United States Patent Application Publication US 2014/0325702 A1 - sequence listing, part 43

SEQ ID NO: 98376 - DNA, 533 bp, Heterodera glycines
tgtcccttttccgctttgatccattagccgcgcggacgggaaaatgtttcatccaaatttgagccccaaatttctcgcctcgcccgccgatggatgtgcaaacaaacagacaacaatatgtgtgaatatgtgttgacggtccaatgcacaaatgcacattcaaaaaaaaatatatagaacagcaacattcactaattagccggtaattaggcatcgtttaattaccaatggttgccatcattaatttaattaactacttaaattcctgaccgaaattttgttggaatattttactggacaaatgtttgaattcaattattttttctcattgtttattattaaaacaaaaaatagtcatatttttaaaattttattcttaatttgacaattttatatttaaattgtataaattgtttttccaaccaaatttttaatcttttttatttttttaacagaaactcaataaactattcattaaaactaatcaattgcaattaatctctttctgcctgttctgccttcaaaattgaatg

SEQ ID NO: 98377 - DNA, 168 bp, Heterodera glycines
aagaagaggagcgaaacgcgcgtgaatatgaccagctaatgggctacgcgtacgacgacctcatcagcagcctcaataaagagtaggtacggtctaaagtggttacaacacagtcaacactccggaacacgaccacgacaaggacgggatttagcgtttcacagcatg

SEQ ID NO: 98378 - DNA, 65 bp, Heterodera glycines
gcctacactctctcaaagcagccaaatgagcagcctttaattgacccctcacgcttcagctcatg

SEQ ID NO: 98379 - DNA, 965 bp, Heterodera glycines
gaaacaaaaaatggcattttaaattgccaaaatttgtgataaatgaagtaattatagtcattaaataaatatatgaaagcgagtaaaaatgaaaattaaaaagtatatatatatttatatttaattaattttaaatattccaacatatcccaggacgggaccggccgatatagtcgagaacagcaatcgaaggattggaatggaatgtaaatatacggattgagggtggatggacgatggtgatgatgacacataaattgagcaaaactaactttttcaatgggaatgagaccaaaacggagggaacaaatgcgactttaaaagtacgtacatataatgttgtccattaaacaaatattttgaatgtttgaagagtgtgtccaattttttttaaattgtcccaaagaatgaacttttaagataaaattgaagtcagtggatcagccgaattaatcaataaattttatttccaattaatttttagtttttctaacaaatcttacaaattatgtgtgtataaataactcttttcaaaaaactgtaaatgacactcttaaaaaatattaccaccatagcatgagaggtgacatgagttttattcaaataattttaatttatttaattaaccaaacctaataataaagataaaagttaacaattagtacataaccgtattttatacatctaatacaggtaatctttaagttactaaagcaatgatggaaaaaaaagaaaaaatattattaacacgcatcgtaattaaaaaccaacaaaagttacatacacatgatgacattacagaattgatcaaatccatgtgtttaaacccgaataaaattttttttgacagataaagagagagctgcaccaaagttaacacatattgtagaagtgtggcatttgtgtggtggatgaactgctttaattcaattcattgagaaggtggcggtggaggagggtaaatg

SEQ ID NO: 98380 - DNA, 1003 bp, Heterodera glycines
gccatgacagaatttccatacgaaagtccaatgatcttggtcaaattttgaaaactttgccgagggtggtgcgccggaacaccccttatgcatgtatatgattctaataaattcaacagaattctggaactaattttcttaatgaccattttgttaaaaatagtttaacaatcagatacaaaaaaaaaaatttctcgggttttgattggattcaaattaagtttttggcttataaccattttggattatcatccaatttgtaatatatatttttttaaattgtctgagatttgggacattccattcgttatttgactgctttttagaggaaggatggcacaaaattgagcacgtgttcaccgattatccgaagggcgtgcgttatttggtggtcgaatgtttgggccatgacagccaattttgggccggaaattatgggccaaaaattgccaaattcagcgtgacagcattgcctgtcaaatcgacaaaatgaaacgcgaagaaatgatggattccatttccgaaaataataaagtgatatatactaataaatagcgcggatgtgataagtaaatcattagcatttagtgagtgataactaactgattagattgacactagaaattttgtctgctcattttttaaaaatgtgttgtcactgtaataaaacattttttttcaatttttctttggttttattaataataataaatattatatattgataatttaaaatttcattgctcattcttaattttaattttttttttttttcatttttaattgtctattcgtctatttttcgggtcttgatcgcttttttctaatcactttggcgcaggtgccggaaaaaaacgaaaaatttacactagcaaatcgaccatttttttgattttaaagtgattttggccagtcataattcgatatttctcctaattagcggaaaaattactcgaaaatttttaggattcataaaaatcttagatttttttgttttaaaatg

SEQ ID NO: 98381 - DNA, 235 bp, Heterodera glycines
ttccgaggccccaaaaaatttcggaaaattccgaggctcaaaaatttttcgcaaatcggaattcagactccaaaaatgtcgtaaaccggaattccgtgccatccctggttcacaccgttactattcctattcgtaaccattttttttttcaaataacatacctatttgtccagcttttaacaattaaaaattgtataaataatcttttatacgacgaacgaacaaacaacaaatg

SEQ ID NO: 98382 - DNA, 813 bp, Heterodera glycines
cggctttctgtacccggcaataccctgacccggtattcgctaaaatacccaggcccgtacccctaatttaatatacgattttgaagttttttaaattaaaaataaggctacagaaaaaattgaaaaactctcgcctctcgtcctctcgcctctcgccaactctcgtgtttttggggactctcgcctctcgccaaactctcgctctcgtctttttggggactctcgcctctcgccaaactctcgctctcgtctttttggggactctcgcctctcgccaaactctcgctctcgtcttttctgagacaagtcacacccctgtcctgtacccaaaaagatttgcaactgtggtggtggtttttgtaagacagtaaaggaaaaaagggcgaaggttcaattcctttgcgcaacatgactaggtatttatttaaaatgaacaatttttgaaattttttcataataaaaaaagagttgacccatagtgtctgtctatttaatggttcatttctctttttttgactcattttttccgaggttgggaatgaacaccctgctctgtagacatgatgcaaatttctcccatgtcatatcccattttctcccacactccgtttcctttatgcatcacaattagtgaacgacaaaacgacttttttaacgagaaaacatcgttataaattctattttttaactatgtacatactacttatattattaagaaacgaccataaagtgctgtaattcaaaatttctttcctaattaaacgaattttttcaacaatgggcaaacggctctaccgataaattcagtaaatg

SEQ ID NO: 98383 - DNA, 65 bp, Heterodera glycines
tcgtgaagatcattcgttctgcgaatgacgaacggcgcctgaccgcctggaagggtaaacctatg

SEQ ID NO: 98384 - DNA, 586 bp, Heterodera glycines
  unsure (1)..(586): unsure at all n locations
aaaaaaaccccctttaattatttttttttacccctaaaaagttttaagtaatccaattttttccttttaataaggacaatatttatttgttggagataaaatttccttaaatttttctcctgcaataaagcaaaataagcactttaatttgattaataaaaaatatnttatttgtttaaatataagagatttatttacagcataattaaaaaattaattttggaaaattttatcanttcaataataaaaaagaataaaaaatnatctaattatngtcaaaaataaaattaggaaagaggaaagcacaaatatttatgccaatttgaccaataaaaagcaatacaaacttaattttaaaaggatttattttaagcagtaatttatctttatttatataaaaataaaaaagcaaaaaagaataaaaaacanctgagagcctgtaaaaattgttttaataacaaattcatttttacttaaatttttctacttcaataaagcaaattaagcacttaaattgatttaataaaaattatttgatttgtttaaattttttttcatttaaatattatagaaaaattcaaatatg

SEQ ID NO: 98385 - DNA, 779 bp, Heterodera glycines
gctcattaagcatcattaacattcattaattatgtaattgctggcaaccgcccgccgaacggagcagcacattaaagccaatcattcattcatcattcgactaatttattatgatgaacataaaagggcgcaacagaatgccaattcattaaaatttttgacaaaaaattaatttttggattttcgtgaaagtcaaatttggatttcattttttaaataaattcagaaaattgtgttattttttatttttaaattttttgctatgcaaaagagcatcttcccaccaaaatttccaattgaaaacccgtttttcaacaagtttttgcatttgaaaatgttgtttttccaccatcccctccccccccccaaatgagtgccaatttgtaagacgaccccgcccatgaaaagagaaggtgcgatcggtggtcatttttaattggcgctggagcaaagcactcctcactcactgcccaacaaaagttcattcgccaagtgccgaaaacttccattgggggtggttcaaattcaaatgaaaccccaaaattttcaaaaaattcgatttttttttaatcgctatccttcaaatttcaattttttccaaaaaaatgccaaagttgaatttataaaaaaggaaaattgatattccgctgctagaaaattcgatagtttttcgacaaaagttggaaataatttttgaatataaacccgagagtctcgaacacatttctaacaaattttaaacaatctatgatttatttagccaaaatttattaaaaatg

SEQ ID NO: 98386 - DNA, 442 bp, Heterodera glycines
taccaaataaaaatggtttgttttttcataatttttttataattgattttttttgaattttatatttaaattttataatcattgcatagttgttaaacgatttttttatttaaatacaaaattggaaaatacctaaacgaatatgctttctccttaaaatttattaaattaaaaaaaaatttttggttctatcatcgacattttttttattgaatttactataaaaaacttagttttcactaaaacatttttttaataattttttaagcaattttaaaaaatctcttccattttacctttttaatttataattttttacaattttttgaaatagaattcaatccattcccattctaactaatataataataatttttaaactacgaaaaagtatgcattgaaaataaattttcaaaatttttagaattcttcaaaaccgatg

SEQ ID NO: 98387 - DNA, 159 bp, Heterodera glycines
tgcaacctcatctacgcaaaaagccctgtcaaaccaatcaaagtggccgcacacgacggcacaattccaaagctggaacttcaagcactgactctcggagtcaaggcagtcaaattcatccaagcgcaaatcaaatttgccgatcatcaagtcatcatg

SEQ ID NO: 98388 - DNA, 346 bp, Heterodera glycines
tttttggcgaaaatttcgctaaaaaattaaaattttcaatgatgcatcgaataatttgtgcacctaatttaaaatgtgagacatggaaggaaaattgcgcaaaatttggtagtcgtcttaacaaatttccgtagagataaaacatagaaaatttattagaggcgtctaaaaagactttgtgtgtaactgaaatttgtcaaaaaatcattaaaaccaatataggtattttttaaaaacaaattcaatttccgtttaaaaaattccatttccgaggctttatgaaggtcaatttcgtcattatagcttttcctaaggttttaaccaaagtttttttcgttaaaaaatg

SEQ ID NO: 98389 - DNA, 565 bp, Heterodera glycines
accgcaagaaaagctgggaccggaccaaccaggaattttcgaagaaaaattttttttgaaaaaatccaaaaattttcattaaaatgcatagattaatgataatttagacacttttaaatatttctctatgtaaatgattgagtatttttttaattaatggtatttttctattgttttaataattgaaatatcttaaatttttgaaaatataaaaaaatttttgttcagttggggaattgaacccaatcgaaaaagaataaaaggcagaaggtttagtcaacagaccacatttgaatttgagttatccaaaaataatgttctttgattttaagacattaaggaagcagagaaagagatttatgatgtttttttgcgtaaatttgaatatttttatgactgctcaaaagttcaatctttaggggtgttttttcacctctcgtaccaaaaaacgagaggtgggagtacccaaaatggcgagagttggcgagagacgagagttgtcccacccctgtgtgggtcttttaggaaaatgccgtggtgagccgaagtgacaaaagtataaatg

SEQ ID NO: 98390 - DNA, 1003 bp, Heterodera glycines
tttttaaatatttttccgcaaatcaattcctgatttggtttgtgtttttccggacaactatttatgttattcccgacctcgcctctgagaaaaaattattttgaaaattgtttaattggaaaatattgtaaatattattaaatttttcaaaacatttacacggcatcacggcaccataacattctcgctactatgcttttcaaattctgaacacttctctctgattacaaaaatcgtaaaatcaactaacagccattaaaattatcctttattttttaattttcagaaaattactcaaattttgtttggtggaaaattttttttttattaaaaaacaatttatacatatactttttcatccattatttttaaattaaataattaaaaataaattgattttttccaaatttttctgcaattattaataaagatatattaaaataatatatttttaaattttttatttttaaaaaagggtttcccaatgaatattgttttctaaacatttttaaaaaggcttccaagtgattataattttttaaacattttttaaaaaggtttcccggtgactaatatttctttgaaccttttaaaaaacagtctcccagtgcaaattgcttttctgaacatttttaaaaacggtctcccaaaaaatattgttttctaaacatttttaaaaaagcgtttcccagtgattataattttttaaacatttttaaaaaagggcttcccaatgaaaattgttttcaaaacatttttaaaaaagggtttaccaatgaaaattgttttctgaacattattaaaaaagggtttcccaatgaatattgttttctaaacaattttaaaaaagggtttcccattgactattattttttgaacattttaaaaaattgtttcctgcgaaattttttgaaaattcgtttaaaatatttttgattacgttgtttacagcaatgggcagcttaaactcccttctttttaaaaaaattttcattaaaatatg

SEQ ID NO: 98391 - DNA, 850 bp, Heterodera glycines
tttccgtaaccacgagtgcgctctgttcttcatgcagttgttcaatcggttggtcccaccattttttgtttggctcttttgcattctctggccacaggcccgtatccagtaaacaattcggggagagcacccgaggagctttttttgcctattcgggctaaaaaaatttctacagtattatttttcaaaatttttatcgcggcgaaaaagcaggaatttgtagggcttttgcgctaaaaataacgattttttaccgttttggggtcaaattttcaaagtataatgctccaatggggtccagcggtgtcgataggcgccgcctggaaaactttttggaaattttaatgtcatatgataagaaaatgtacaaaaaaagtgcaacagatgttttctgccctctgttcctgtaatttcttctcattttggcttccctcccccatttgaaaggtccgtcttccgcgtgttcgaccgtcgccaagtccgcgccccgttttgccacgcggatttgacgcggccggagagagtgctgcgcaactatttgcagcagatgtgcgacgagaagaacagcgcggccaacagagtggcgtttttgttaatatttgaaccaaagcacaaaagaagggtcttcggattctccctccgattttttgtttctgtttgggactgccatctccaaattgattccactgtttttggctagtttaaaattaccttttcccccacccctccgttcaactccctccccaccattcgcagcagcagtaccaacacggccgtttgctcaacgtcgccccccgctattaccacaacggcttccatttgtacagggtttgtggttggtcggtgaatg

SEQ ID NO: 98392 - DNA, 1003 bp, Heterodera glycines
atgaataaaaattacaaaatgaataaaacaaagtatgaccaaaatatacggttcgtctcgcaaccgacgaagacgcaaaaaagaaatgacatgctaatggggatattagccgtggtgggttatcatcattgtggctctgattgcatgctattttggccgagcgtgtgatgagagcagttcggcatcggcatcggctggcgccagtgccaacaaatcggcaagcaaaagtgccatttcaagcacaaacgaaggagcaaaaaatgatgatcaacactctgggatatagatgctagattttagggatacattattgtcattatttggcactattttctcttcaagttcggcatattaggggaatcaattatggattaattatatagaaaaaaagacaattctataatgccaaaattggaaaaaatgaatattcaattgaattttattcgaaattatttcttttttaagagataaattttcaataaattcttccctttaaacaacaaatttgtctaacaacacaaaaagtaatttaaaaaattcaaatgtttttcaacttttggaaagtgtttttattcggctgactaattaatatccggccccaactttctgaaaatatttaaacgcttattggtttaaaatttttttcaaaattattagattttttttttaattttgtgccacagcatttttccataagttatcataagctcaccaaactttgcagggatagatacttgaaggaagaaaattagcttatattaaacgtttacatcccatatcctgaaaataggtttccttttgcttttttggcataaagttgaaaaattttttgattttaatgctcaatggttggctttttggcaacgctttctccgcttttattagaattattataaacattattttctaatgaatttatacaatttaaacattacacatttaatgaaaaaagcataaaataaataataaatataataaaatatttttatttttttagtagatg

SEQ ID NO: 98393 - DNA, 593 bp, Heterodera glycines
aggtgaggttaggtcccgttgattaggatgttggtggattgagttccggtgattgaagtgctggtgggttgagtcccaatgattaaaacgcaggagaatagagtcccagtgattgaaatctggtggggttgagtcccgacgattggagaaaaagcaaaaaaaaaggatgcgaggccgcgaagcggccgagccagtcgattttatcaaacataatcttacaatacaatcgtactacctagcgggggatgcgccgaaggcgctgaccccgctaggtagtacgcacaaaacactcgtctctcatggaaaagagcttttacctgtcaaattctttggacaaaagaatggagaagaattgtagttataaggcattcataaattatttaaatgacaaaaaaacatttcgccatttaattaaaactaataattccatccagctcactgtcttgtcagttttccaatccgaccaataatccatcgcccaaaaagttggtttatttagattcattttaaaaacggctctgtttacccgttagctcttgttctttttctcgtcataacttttctcaaacgtttttgaacaggaattcgtcatg

SEQ ID NO: 98394 - DNA, 133 bp, Heterodera glycines
gcgcaatgaaagcaatgagaagctttgactcgacgtcagtcggagggatcagccgggcggagggacaaatcgaaggcattgagggtacgccgggggactggtcaatcccgacggactttcacttcccaaaatg

SEQ ID NO: 98395 - DNA, 174 bp, Heterodera glycines
ttttaattaatcgaaataaacattcgctttgaacaatcgaaattttttaagaaaataggttaaacaaacaaaaatagatataaaactcggaaaaaactgaaaatttttcattttatttaatacacaaataataataaatccattcatctgaggtaatgggcgatcaccaaaatg

SEQ ID NO: 98396 - DNA, 485 bp, Heterodera glycines
ttcgaaagctcttcacagtctctattagcctactaaaaattacagaaaatttttgcggttttcaactgacaacttttttgagagctgattaatcactgagaaatagcttataaatatcttctaaacatttagggctttcgaatgataccatgattgtgaagtttggccaacaaagaaaaaagttatagctttttgaacattgctgagacggagttggccagacggagttgacccctaccgtccttcccaatcgtttccttaccaaccgtttctttaccaaccgtttccttaccaccgtttccttaccaaccgtttccttaccaccgtttccttaccaaggtatttggttcatttccttaccaaaaaattttcgaaaaatctttggtaagaatttcgacaatagaagagagattttcaatggttggatgcttatcatgaattagaagtcagttgattttatgtttaatgttacagataataaaatg

SEQ ID NO: 98397 - DNA, 416 bp, Heterodera glycines
ttatttaatgatataaaattaatcactcaatttaagataaattattttcttcgattttatgagccaaattttttaattctttctgttcattaatttgatttattactcttttaaattatgaaatataataaattcgctttcatttcatttgtgacaaaaaataaaataatttttatcaaaaatattatttatggaaaaaattaatcactcaaaattaaattaaattatttacttcgattttatcacacaaaatttttaattctttctattcattaatttgatttttattcttttaaacttaaaaaatatacgattgattataaaaaaaattaaataaaaaaattaattttcttacaaaatatttattcaaatttaatttaatttaattaagattctttattctgcaaataataatg

SEQ ID NO: 98398 - DNA, 634 bp, Heterodera glycines
gtaacttaacgcatttttttaattttgcagtataatagaaaacacttagagctatcaaatgatataagcttttattggttgctcaaagttattttaaaaaatattttcatttgatggttttttgagtaacaaaaataattttaaataattttaagaattatttttttggtaataaaaaaatttattgaagtacataaattattttattattattacttctttaaaagtttcattttgattttcgtggattctttgagacagcgaatggtaattgaaactgaagattttttaaaataatcctgcttttctttgtctcttttctaggcgaaaaaatgagcattcctccaatttattaattagctaagcagcaaacgactaataaggattacattttttattcataatttcctaattaaatttaaaaaatcgaaactctatacacattcattaacattgttatcgtcattgcatcaaatcatcaacgtcaaaaacaattaattgattttctcgcttttagttttttaatttttgaataataatataagcattaatttaatacaacataaataaagcaattcaatacaatccaattcatatatttattttatttagagaatccttttttaaatctatg

SEQ ID NO: 98399 - DNA, 1003 bp, Heterodera glycines
tttatctattaactgcgatttccaaaaaaaaaaatatatatttgtcataataaactatctttacattatgtttaattaattgggaaatattaaaaaataacataaaattgtcgaattgaaaaaataattatcgaccttaatggattgtgaaaggaagagctgtgtgtatgcattaatttgtataacgtcattttccaacattttttaattttgacatcatccaaatcattttaaattattatttttttcttaataaacatatagcattttttgttttttattgtaattgccatgtaatattattggctatgttttgagtatgagaagtcggatggcacggctcgatcccatgttttcggctttttttgctgagagaaataacaataacagatgctgttcttatataacggtcatttagcaattttattcatttcagtgaatgcttttttagccgatgtccaaactcggatttaatttatttttcaaatcaatccaaaagcccaaaagagattctcgtcatacgataatgtacataaaatattttgcccgagattctcgttttcaaataatcaaaattacacggtgacatacatattctaaaatacaaaatgccatttttaattaaaatattgaacattttttgatccaaataaattaaatagaaaatgtacgggcaataatataatgtctcttaaaaaatattaatttaaaagcactcaaagaatgggagtattaaaatactttgtcatcccgctgctattgtcccaattttcatcccaaaccatttcaggagacaaaggtaaagttggaataaatcataataaaatatttgaaagaattaattttgaattttttaattaatgaataatatttaatttgttattttttccatattaatcggaaaagttttaagtacaccatttatgtagttgatcaccacaaaacgctaaatgattcgccatcgattgacataagagagaggacgacattaggccaactgatg

SEQ ID NO: 98400 - DNA, 352 bp, Heterodera glycines
tgtcgttgacaagaagttgaagcagtacagggtcatagaacagcaactgactaaagccaagaaatcagtggttgaatttgtccacttttttaagtagacccatcagtttatttgagtctaactatcttgaatttaatcgatagatcatttttaaaatctcaaaaatggcagaatatgatcgggaatgatggtgcatattttgattaattttgagttattatttgattttttataaatttttgaatgaaatttttggtcggggtgacagaacttatacaacaccccaatatatagtttatacaaaagttaattttgtggggttaatcctacggtatccccccgcaaaaatatg

SEQ ID NO: 98401 - DNA, 311 bp, Heterodera glycines
tcttttagaagatatatttaaaaatttttttataaaaattcttaaaaaatacaagcataaaatatgttccgaaaattgtagaaaaatgacaaatgttggcagttattgaacgctacattaatggattagtcataatattgaaaattcaatgaatgtatttttctccgaaaaaataatgtcaatttttattattcgtttaacaatttatttattttttttataaatatattaattttaaatataaatttttcgcgaaatacaaaaaaaaatcataaacttaaaaaattaattaaatgttatttattcagatg

SEQ ID NO: 98402 - DNA, 404 bp, Heterodera glycines
ttttcccacccctttaagagcaaaaatattattaaataattaattagattaaaatatatatgcttgattttgacgggggcgttccggtgttaagataacaaaaaaaattaaaagaaaattctaacttttgaaaatttttcattttctgaaagcttccaaaatatattaattataatttactttagaccatcgggcctatctaaaccaataaatgttccacacaattttttttattgattattttgatctcagctaacaatacatttgtaggttcctttaatttttatattcatatttttataaatttgggtcttttttctatttatgtttctatataattatgttcgtatttgtttaatatttttgttatgattattttggatttctacatttaattaaagatg

SEQ ID NO: 98403 - DNA, 376 bp, Heterodera glycines
accgatcttttaaattaaaaagtgaaattcaatgatggctccgcttgttttgctatgcccttaattacatttcctctgcggtcattccctttgtccaattgttttgcgattactttccctcccctttcattccctcgtttaaattggtgcggggattctccatgacgaccttttgctgcttccctgtggcaatgtctaaattactccgctgggtccgaatcccttcaggcgccttttttctccctcccccatttgtccgatagtttgtctatttttgcctttcgccgcctcttttgtcatcattttgctttgggcctttaactcctccagtgtttattgttttttccaattcaaaatgcctgtgggtggcaaaatg

SEQ ID NO: 98404 - DNA, 132 bp, Heterodera glycines
aaaatcagcggtgccaataggcgcagcgggaagtattttcaaaattgatgctatttttaagagagattttcactaaaaaaagcaaaaaaaaaacaaacaaccatcattgaccccatgaaaagcatcaaaatg

SEQ ID NO: 98405 - DNA, 1003 bp, Heterodera glycines
atttccttgctcattgactgttaatttagatgttctcactgggtcgcaatgtttgcatatggattaaagaagaaagtaatttattttgacagtctagcgctaccgataaacggatcaattgttagctcctttctcaattcatttcccggagcggtgtataaccaaaaagcctttcaaactatttcatcaaagtcatgtgctcatttttgcatttgttttgtttactttttatcatcaggttccacatttgatcaatttctaaataaatttaatcatttaaatagtcccgaattgtatgttcaacattttgttcacaattttccaataaaactttaaagaaatgactcttttttttcattgtataattaggtctatctcacaaacgaaaggaatgaaaagtaaagtaaacacaaggtaccgtctagtgtctagcaccactggctgccgaatggacctaaccaatctgcaatgacccattgaacgctgattggttgaatatccattcacccattatttatataaccctttcctcctgcacaaatttaggtgtatgttgtgaaaaggccaggagaaggacaatttactcgtatttccaatgggtgtttactttccacacagctattgcaaatgatgattggtcgtcccttctcatatgtaggtcccgctgaaatctcggcggacattgagaaaggaccggggaaggtcaatatattcgtatttccaatggatgtttaccttccactcgcaaatgatgattggtcgatgggcatttcccttttcatttgtagcttccgcagaaatgttgaacgatgattggatgaaagagtagaatggtcttatgactaatattgttggtcctttctgcataaaattgtgaaacaataattctgtttatatgtcttaatagtttccggtataaaaaagaattgaatatgctatgaattcattttattattggaaataataacaaaaagtattttagcaaaataaataaaataaaatg

SEQ ID NO: 98406 - DNA, 85 bp, Heterodera glycines
tcccattaattccattcacatttttttgataatttttttttcagttcacttcttcaattttctctgattaccaattgaaaaaatg

SEQ ID NO: 98407 - DNA, 109 bp, Heterodera glycines
agttgaattttgggaattttctgaaaaaattaccgtattagtgaaaattttgatccgtggcgaccgaaacaccggcaaaacttccctttggagtcggttgcagggaatg

SEQ ID NO: 98408 - DNA, 949 bp, Heterodera glycines
ttttttggcattcacgaaactgaaacaattcaattttgcaattaattaagcacaacaattttattacttatattaattataaaattaaaaaaacaaaaattgctgttaaataaacatttaaataaaataagttaataattaattcaaaaattgcaatttagagaagaatttttgggcaaattttgtaaatcaagggggagtaaaattttaaatttcggtctaaaatttgcgattgacaaatggtgggtgcacttcatttccccctcgaaaaagtttttttttaattttcaaatttagaaatttcacaaaagaaaatatttttaaaaaatgttagtaagaaaagttcaaaaaatttttgaaaaaatttggtagtgttcatcaaaaaaatcgcagaaaagtttcaaaaaatttttttcttgaaattttcttactaacaataagtttcttaagaattttttcccggcaaaacccaccaatttttgtcggatgcgctgtcgctgctccaacaattgctccaacgcgcaaattgtgccgttcaattcggccaacactccctcgagcgtcggcggaggcaataaaatgctaaaaataaatttacatttaggcattatgaaaaattggttagaaaatatgcaaaaaatattgtggaaaaacaatgaaaaccaatacatttcacgcgaattccgaaatttttgaaaaatttaaaataaaaaatgaattatttttaatatttttcgggaaggaaataaactgttcctataaataggtgtctaaaaatcggtgcactacgtttcccgcgtcgaaaaattcaaaaaaatttttactatcttagaaattttcaagaaaaaatcttattgttagagcttttttataagaaaactctaagaaaatgaatttcgaaattttttttcttagttttcttaagatttttcgtttcttcgaggggatg

SEQ ID NO: 98409 - DNA, 1003 bp, Heterodera glycines
atgcatttgtcaattcggaatttaaatcaaaatttcagctttccaacatgcttattttggccctcgttttgccataccaattttggccctcctattattatgccaattttggctgaaagacagatacaataatgaaagagtggggaaatggagaggaagagaaaaacacaaaagcaaaacgaaaataatgcaaattctcgggggaacaccacccgaatagaacaaactttgtttaaaaaaaatcaattaaaaaagtcactttttatatagattctcggcgcagccacctccgcttgaatctcgagttttaaaatcgagattgacaaatttacaaatttgaattttttaaatttcattgatgtttctgaaccttccaaaaatattcaattgacgcttttttactatatagatcttttatacaataattcttaaaatgttaccgaattatattttttataaattcggacgaattttacactgacgtatttttcggtaacgaattcgcgtgatatttaattactaattctttgccaatttattattgagagatgcttcttccttgctatatttttttctaatccttctcctgcctcaaaacaatttaatgccaatcaatcattttatgttgccaatacagtcaatttaatgaattgaattttggcatttccgtcggaattccgtggcgctctccttggaagtgtatacggccactaaaactgtgctcataaataagatgattacagctaatagcaaattatttttatatactgccttttttaatttattttttagtttatgaatgttttaacgtattttagcaaaaaaaaaaattctctataatggttaccattcctcgtcgaaaagcaattcaacttttatttgttattattttatttaaatttacgcttaaaccccggtttaataaataaaggtcatttcatattaagcatcattaaaaattctccaaattttcgtatttttagcttggtttaatgcttctatg

SEQ ID NO: 98410 - DNA, 532 bp, Heterodera glycines
tgtccggaatcccgttaaaagtctcaacgccctccccgattaatcctaaaatactatcattcatctcaccataacaataaagaattttttcaggcgatggttcaattagattcttatgatgctttaaaaaccgtaatagccaacgggtcttaccactcccagtagcccccgagagaattagagtgaacggaccgcgaaacacttttaatgcatcttatttatttgacctatttatattttcatagggaacatgtttcgcgcatttggggcatagccagaaacacttaattttatgtggacagttcattttttcagtttaattttattttcggttgctatttatagaagggttatataaagggagtgaaaggacaatttgattggtacattgtatcaaaatgcaaaacccgataatcgtaaatataattgctctcgctaatctcggtaccggaattaaactaaactctctgacgatcaccgaatgcgaatttaagtataaccctagaaaattcaatgccgcagttatataatg

SEQ ID NO: 98411 - DNA, 1003 bp, Heterodera glycines
cattttttcttttccctcacaaatttttttacgccgctcaatgaattatgtacggacaacagagatcaaaaccaattcgccgtaatcgtatcgactaattcattcattatacaattaaataaattgtgaattgtattttttaacgttagaaattttggtggattttctacgtgttataagttttaaaaagtgaataagtaagttattatggatgagagaatttttacgtacaaaaaatttattttatgaaatataaggaaaaaatttaaaaaaaaagaggagacttttttgctatttaatgaactttttctgcaaagtttttttttcaaaatttacaattagcacgatacaaaaagtaattattatgcgtaagacattacttaaatatatttaaaattttgaattaaaaaatattttcagaaaaacatcttgcccaaaaaattaaaaacaaaaaatttgacatttttaagatattttcaaaaattaaaacaaataccaaaaatggctaaatttggtactaaaaaaatttggcccagcgaattttttaggaatatcaaaaatacggttttttgcattttgttctgattttgaaaatttctgctttgaactatgtatgagctataaacttctcactttttgttatttttgagtttattttattttggctttttgagaaatttccttaaaatggaaataaagtaaaatttacccttaacaaataagagacttgaacaaaagtcttttgaataaaaagagcattttaatttaaatttaggttaatttgaatactttcaaataaaaatctaaaatttttaataaaaataattttatattttcacgaaaagcatacattgaggcaccaaattgattgaaatgcaatccatcttttttaaacgtgtcataattcttttcttaatttcctttctaataaacaacatttatatacattctttaggtttaattaaataatttattattatataattttatttattcagttatg

SEQ ID NO: 98412 - DNA, 379 bp, Heterodera glycines
tatttaagtaatttcgtttacaattgaaatatttaagtttttacttgttttgttacctaaaaagcgttaataaaattttttattgcctattagaggattttgtgcctttttaattgcctatttcgcgattttttgtgcctaaaaaaggaagccctaatgattgtgcagcgaatattttgaataataaattattaaatttaaataaaataattattttggcttttaatttgtcacttgcacttttttgtccattctcctttttccttttgctttcggcttcctttttatcttgtgttaggctttttgcttcttttccaggtaatttttcaactttgtgtttcctttttactgtcattttacagaaatttcatttggcatg

SEQ ID NO: 98413 - DNA, 114 bp, Heterodera glycines
gagcagggcatcctcctgacgggtcatttcctccactcggtcggcatttgcgacgatgtcggccttaaaaataaatatttaaaaaatataacattttttgagattttagaaatg

SEQ ID NO: 98414 - DNA, 200 bp, Heterodera glycines
tctcattcttctccatccctccccattttccatcctctatcattcactgctttcctctccgctttcccaactcggtcactctttccctcccttacccccgttttttttatttaggtatataaaaaatattttaaattattttatattttaaattaattaatatttatttctttattttcaaagtgtaaatgccaaaaatg

SEQ ID NO: 98415 - DNA, 586 bp, Heterodera glycines
cttttggcgtgggtttttttgttttagcacatattttcttccctgagaaattttgaatttttacaattccttttttttgactatcaaattccaggcaaaatattcccgttttgcatgattttttcaatttaaggtaaatttgattttagcaaagaaaattccgaaaataattacatctttgagagcgaaaaaaatttacgtcaaaaagcgttataatgttttttattagctttatgctaacgaaattgataaaaaataagactgttttgaaaaattcacttatttttaagcagttgttctgtaaatattttgcttataaaattcgtaatttattttatttcttgagcaaatttttgttttttaaaattgatttattttagaaagaaatgaatttaaaaatttttaatagttttaaattccctaactttagaatgttttcaaccttcttttcgtcttttttcacgatttttcacccttatttacggtcttaagttggacttttttcaccctttaaatccgatccctaatcataaggtgaacatgtctgatgataattttacacctttagagttgaaaaataaacatg

SEQ ID NO: 98416 - DNA, 1003 bp, Heterodera glycines
tttttgctttgggatagttaaatgagcaaattggttttgacttttttaaagcattttgccaaatttggcatgaaaaaattaatagcatttatcaagcaatttttgaaaatttagtgaaattctatttatggtgctccatatttttttaaattttttaaatctaaacacgtgaagaacaatttttataataaaattaagcaaaattattaacccattttggcacatattctcatttatccacttttttaaaaccttttctcaattttttaagcctaatttgcccttttcaagtcttaaataattagatatttctaataatcaaaatgaatttaaatatgttcaattttttgtgttaatttcggaattttatatttttaagcagaatttatatatttttccgccttttcatggtaaattttaaagaaatgagcatccctaattattggcactattaaaattatatttttcattttttttttttgtaaattttgaattcttatatatttttaattggatttacggtttacctcagttgggccccggcacgtttgggcccagaatgttttagactataaattctttctttgtcaaccaaatccaacaatcttaggtatcattcgagagcccttcacatgccctattagcatgcaaaattccaaaaaatttcgtcaattttgaacaaacttatgaccaaaagtacatcagaaaccagtttttcagtcattttaggccataagtttgttcaaaattgacggagatttacgagattttgcaggcttatagaggacactttgggatatcgaatgatatcaataacattggatttggttgacaaacaaaaaagttacagccaaaaacatggtggggggcccaaacgtgccggggctcaactgagcgagtccggtagatttaatatttttctcccttttcatagaaaaatttaagaaaattcgtatccataattattggcactgttgctcgccgcgcccctccccagaaaatg

SEQ ID NO: 98417 - DNA, 298 bp, Heterodera glycines
aaaaaaatctcgcacaatccgaaagaagcaaagaaagaaatggaaaaagcgatgtaaataattaatctaaatttcaatttccatgaaatcattttgctttttcgttttcagcttcatctctgtcgattgttggctcaaagtgttcgattttctgtcgccctttcagctttgcctcgaaattgcgctgatcagtcaccgatttgactatttcgttgatgaacatttcaaaacccgcaaatggaaattggacaaattgtaaattcgaagcaaaatcggagacaatggcgcaaaggaaatg

SEQ ID NO: 98418 - DNA, 1003 bp, Heterodera glycines
cgaaaagggaagagagttgtgaaactataaggaaaagtctaatgctattgtttcatagtgaaaagagatgaatatgcaacgaaaaccggtgaaatgagaatgaaaaggaatgatgatacaagggggatagatgaattatgtgttagtatgtggtcaaacaggcaaatgaataggtaaaactctgtgataagtcgtgaaaagcaaatgtatatggtgaaaagtgaaaaggtaaaagcaaaaatgttcactgataaatagtgaaagttggtgaaacgcagtaggcgacaagcgaaatggttagtggtaagtggtgaaaagaggtgaaaaacaatatgcgacaggtgaatgtcctgtggtaagtggtgaaaagaggtgaaaaaaacaatatgcgacaggtgaaatgtcctgtggtaagtggtgaaaagaggtgaaaaaacatttggaaataggtgaaaacaggtgaaaaaccaatatgcgacatgtgaatgtcctgtggtaagtggtgaaaagaggtgaaaaacatttggaaataggtgaaaacaggtgaaaaaccaatatgcgacatgtgaatgtcctgtggtaagtggtgaaaagaggtgaaaaaacaatatgcaacatgtgaatgtcctgtggtaagtggtgaaaagaggtgaaaaaacaatatgcgacaggtgaaatgtcctgtggtaagtggtgaaaagaggtgaaaaacaattggcaacaggtgattttcaattttaagtggtgaaaagatgtgaaaagtctaagaacattgatgaaattctagagaagtgatgaaaagaggtgaaactaaaaatggaaaagtcaaatatttcaagaacagaaaatacaacgaacgacgctgattttcgtgttaagtgatgaaaggcaaaacagaacagtagttgagatagaagctattttaaagtggtaaaaaggcaaagaaatgttcgaatatgtaaaaatataataaaagaatttaagagatttacatttaaaaatg

SEQ ID NO: 98419 - DNA, 93 bp, Heterodera glycines
aaaaatgattttttgaaaatttttcgggtttgggctcaaaaaggctaatttagctgctgggggcgtttctaatagagggttttttgaaaaatg

SEQ ID NO: 98420 - DNA, 296 bp, Heterodera glycines
  unsure (1)..(296): unsure at all n locations
gccgtgccattccgtgacacttccatgcntttattatgcgccttaatggtcctgccacctttcgctccctaattaggccattgtttgctttccttttctcccctccttttcccatgcactccctttgtgccggaaaaacaactttttagtttgtactcttacagaaaaacaaaaacttttctcggtttttacaatatttttcagtgtgtcccgaaatcaccgtgaaggaatcatctgtttttaagcagcaaaagttattttagcatgaattttttcagatgttaaagtgaactatg

SEQ ID NO: 98421 - DNA, 127 bp, Heterodera glycines
cgacgcatcaaacaggtggcgaaatgaaaactctctgatcagtcaatgctttaaatgttttgatcaatttcaggaactggcggagctgaagcaggaaccgatcacgggttgcaccgcggcaccgatg

SEQ ID NO: 98422 - DNA, 1003 bp, Heterodera glycines
gtgaaaagagcggagaatcgttaagaaaatgaaacactcatagtagaaaggactttggtccattagtcaagcaattaggtaattttattttttttaaagaaatcttaaaccatacttttattgatgatgagccatgatttattttgcgattaagcgcctgaaaatccgtgccttttttatgacaaaataaaactatgtttacaacattaaaacaaagttttgtttctagacatccctgttgatagaataaattaatccacgtcagttttcacaccgactttcgggtattcagtcgaaatctaattatttatgtatcaataatttaatttcctatgacttcggtcaatctgtcacgttttgatgcttgattattttttgattcattccaactcaaaagtaaatcaaagtttgaggacaaacttaaggaagggtggacgtgtaaagcgcaattaatcacatccgttttatctctttcccaagcacatatccccgctctcttccattccattttccgttccataagtccaactatttaatcgggagcattctctcgataaggagtcagttgagtgggcagttaatcggcgagcgagagccgagagcaaagcgcggcggaattattattttatgtgattggccaatatttatcttatattttactccttctcgcccatccccgcacgcgtattcgatctagtgggcgcccaagggattaccaatttggggaggccatttatccagggcccggattttggcttattccgttttccccccaaatccaatcctcgttctcactcgttcccttcctcatattctgcggctggacatcagcaccttcactctatatctcctcctcttatttccacacactctttccgtctttttttctctcttcaactgccccattactctctctctctctctctctttgccattcattgctttttcggcattttcttgccttgttgcatcatcaggtggcccaccgcgtcggttggcaatg

SEQ ID NO: 98423 - DNA, 1003 bp, Heterodera glycines
aatatttttttacggtcgtttgatgagaaaataaagtacgaaaagcgcaacgtcacggtcacgattcacggtaccaatacggttaattccgtgaaaaatttaaactggataaaattgaaaatttacgaattacatattatttttctagagaaatttggtcagtttttgggcaaagtttgctaagaaacagagcaaaattttcaaaaatttccccagcggcgcctatctgcaccgccggcccccttccctattcctgaaacttttttgagcaaagccaactaccaatattgtgcaaaaacaaatagcacagtttcaaggatgaccccatttaaataaaaaactcattaaattttttttaaaaattcgctcaaaataaaattattttaggcagaatcagttaacaaatcacattttcaaaaattttccactaaaacgcctatttttctttaaaaattgggtaattacatatgtctcacaaaaccattttaaaaaggtcggaatcgatatactaatttgcaaattttttcatcgttttttgcctttttaaattgattaatgttgcgaaattggctcattttacgtacaaaatctgtgcataaatgaactcaaataaaattcgccgacagagaaaaattaattcaaaaaattcacggtcacggtcacgaaaaccgtgaatttcacgagttttttggataacggtcacggttcacgggttttttcaggcacggcgcacctctataaaatgccattacttttattgccatttgcctcaattattattaaatttgcctcaattgatattatatttaaacatttaaaaaattttcaatttttaatttattaaaattttcatttttcgtttcgggggcgggggaattccctccccattcccccacctctggctacgggcctgaatgaaagtaaacaaattagagtccgataatgaacaaacaaacaaaaatgaatattattttgtaatattacagctcctataataaaaatg

SEQ ID NO: 98424 - DNA, 111 bp, Heterodera glycines
cgtaattaaacggattttatttttgcttaattgtttatttttgtaaatttattttcaacattagctgtatttttctgctgctttcatttcatcaacacacgcttccctatg

SEQ ID NO: 98425 - DNA, 237 bp, Heterodera glycines
tttattttcttccgtttatcccacagatgcggattttcttccaccactttcttccaattaatttcgcctttatggtgcaaaatgtcaatgaaaattctattgcattctgtgcaaaaaaaaggaaaagaaaattaattaaaaaaaagaaaaaaatgcaaatgttttgactctgaacaccaaataatttgtttaattgtgaaccgctggaaaacgatcgtaaggtgaaagttaaaaatg

SEQ ID NO: 98426 - DNA, 809 bp, Heterodera glycines
aaaaaaaaatgggattttggggttcgaaaagaaatatggaaaataataatatttttattttaaaaatatatctataaaatttgcattcgaaaacaaataaacaaatatgatgaaaccaaaattatctaatcatttaaaataataaattgcttcattattcgtcgctcgttgaaaagtcgtctgatttgaatgttattaaaaacaaaaggggtaggggggctttggtttgaattttttttttttttttttgtaaaattatttctactaaagaaaatttgttcttgaggggttttgggatccctgatcacgaatctcacatcagttttaaccaataccgacttccgaacctaaataaattttgcacatcaacagagtccctccccccttagggttttttaaaaaattcgaaatctacgattttaattaacatagcgctcattattcaaatatgaattcgaaaaagaatttaaaaaaagtaaataatttaaattttgtataaaattaaataaaattgtgtaaaaataaaatattgaaataaggaaatgaatattgaatttgcaaaaacaaaaaaaaatcaatcaaattttgttggcattaattttgtcattaaattaatacaatgaataaaaataatgctactttaaatcacaatgattcaattatttttatttgttatattaaaatttttcatttcattcgaaattattttttttacaataaaaaaatttaataaatcattttactttatataattttaattttttagataatttcgttgcaataattgtaatttcagagacataaaaatg

SEQ ID NO: 98427 - DNA, 52 bp, Heterodera glycines
gggggcactgatcggagaaataaatttctccgatcagtgccttttgtgcatg

SEQ ID NO: 98428 - DNA, 637 bp, Heterodera glycines
ttatgacattttggaattatggcaaaaaagttaatttaaaacttttaataaaaaatgaaaaataaaatttaggaaaaaatatttttgacgaaaatattggccattttaatgcgcaagtgatttgcataatgctgaccaaagtgtttctgttattccctggcaatgtttctgtgccatttttgttggaaaagtttttcctaatttattcaatttggtaatttgaaaagatcggataaaaatatatttaattaaataatattttattgaataattttttaacataaattattaaaatatttctaatggtttatttaaaactattgatttatttgccatttttaaatttgaatatatttatatttattaattttgaagatctatttttagacggtaaatcgaatataatttacaatttttaactaaattgtattaatattggccgaatggaaattaaatatgccaaaagttcttagtatttttggtggataattttaaaattaaattttttaaaaaagaaaacctctttcttcctgaaaatttgccaaaatttttgataaaaatttggtgctaaaacaatttaatttaagatactgatgaggataaagtgctaagaattttggacgagcttgataaaatg

SEQ ID NO: 98429 - DNA, 548 bp, Heterodera glycines
  unsure (1)..(548): unsure at all n locations
aaattccgtcacaaaaaagggtcatcaaattacngcaataaataaacaaaatgccaaacaaaaaaattttgtttgaaaagaactattatgcaatctatatataatttttgcctttggtgtcacaagtaaacaaacataatacataaaacgtggtctntcatcacttttctttgttctgtttttatgttatttggtagtaattgcacttttggttttgcttttctcttttgtttaattctattattttttccttaaatatttaatattattatctgtctttcacaattatttaatactatttttctttttataatgttaggaattttttgtcaaattgatgatatatgctattcgaattttttgatactttgaaggataaaagaattcatgttcaaagagagaacatttatttttgatcccaaactacttaatcgatttcttcctttcgtaattatttgttttcttttaacatcattttttttcactatttcacacattttaattatttcatacaccaaaattgatttagattgcttaattgtctaatg

SEQ ID NO: 98430 - DNA, 280 bp, Heterodera glycines
acatggcattttgccctctcattgtcaggtggacatttcgcaagagaatgtgccgcccgaggacactttcaaccgacccgacttcctttggctcgatgtttctttggtctgtctgagcattccgcgcattgtaacgtgcgaacaaaggcgaaatgagttggaaaaggtcggtcggatggtcactttgtgggccgattcattcatttttcattgccttcctccacagacttttctcaaattttggcgccgttcttccgccgaccctggcaaattgcaaatg

SEQ ID NO: 98431 - DNA, 422 bp, Heterodera glycines
cgttatttaaatccgtgtgcaaacgtcctgaattttaaaagattttcaaaattcaaaataatatattaacatacccttgcacttgtctgacgggccatgaaactcacatcgccaaaatatcttaagtcaatctgcgctcaattgttcgaaaacatagagtgcgccgtcatgttctaacttaactttgtttctttttgttttaattttttgctgctggtccatattatataattgaaagaaccttaatttagtttataaactcacttaattataaaataaatattcgttagaaaaaagagtgaaacaaattttcgttaaataaatgtgagttatgaattctcttttatatgcaaccacgcgaaaacggccacgcgaaaactgccacgcgaaaacggccacgcgaaaacggccacgcgaaaatg

SEQ ID NO: 98432 - DNA, 208 bp, Heterodera glycines
acaagtgggaggaagatacaaattattctgattacatttcagtgtctaattattataagatcatcgcatttgtattttgccaactttgttttaacaaaaataaattaattgtcaatgattttgaagtttcaatatgcaagctccattacaatgtttttaacaaaatttattaattgctggttaatagccttacattatattagaaatg

SEQ ID NO: 98433 - DNA, 116 bp, Heterodera glycines
cgtaaatatattgctctcgctaatctcggtaccggaactaaactaaactctctgacgatcaccgaatgcgaatttaagtataaccctagaaaattcaatgccgcagttatataatg

SEQ ID NO: 98434 - DNA, 110 bp, Heterodera glycines
aataattattgtttaaaaatgcattaatttgatttaatttactcattttcgctttgttatttgaccccgtggtggtcactgatgttgagcctgacgcgttcaaagcaatg

SEQ ID NO: 98435 - DNA, 266 bp, Heterodera glycines
tttcgttactaatagaatcggatgattttttgtgtaatatttcatggttacttgcgcaaaagaacaaaaagttttgcaagtttgaaggtcgttcactaatttcatttgccgaatttgggctaaattagtgtttcgtcacacattacaatgcaaaaagtgactatttaagaaactctaaattttcattaccaatataaaattttgacttcaaacattagtttatgctatttatttttgatttaacatttttttcccattaagaaatg

SEQ ID NO: 98436 - DNA, 238 bp, Heterodera glycines
tagcgaaacagcccataaaaaagattagcaaaatttttcaaagatacaacataagaataaaaaaaatagttcaaagaacgttgttttctttttaataatggtttcttccataaaataaaaaataaaataaaattttttttaaatattagtaataatgtttctaatttcaatatttgagaattagcttataattttaaattgtttattaaattgacccaacaatccatttcagaatatg

SEQ ID NO: 98437 - DNA, 1003 bp, Heterodera glycines
aagcagcacaaggcctaattagccgggcatcaaagggatcaattacaggggattacggtatattttctcgcgcctgtcattaacattctattcattcatttatttgcctgccacctgcgggcaaatactaaaaccaaattaataacaaataataataatttttgtttcgtcaccactacatgacaccaaaaatgttatgcacaaatgcataaataataagttggttggtgttgttgtttttttgagagcaatttgttagccatgattcttttgataactattttaattttttttacagttaaataaaaggaaattgtgtttttttttaatatgaaaaccttaattagcgtagcgtttgaactattaaaactcttaattagcagttcattttttccataagccagctctgtttcctaattaggccttttgtattaattcaaataccaaggggaatgaattttcggcatttttatgcctatcccagcctcaataatcgcaccccaacgagttggtgggattaatttaaataaaaattgaaaaacttgcttaaaagaattaatcacaaaattaaaatttttctttattcttagttcttcttctgatcaccctttccgccattctttgatcaaacagtgatccaattaatagcttaattagggggcaaatttgtgggaacaataaactcacatattcgccgggatttacctatctgtggttgtgttcaatcagtgaacgcacacatccgctctctcctctaaatccacatccgacccaattaaaatctttcactgatcgatgatgctgcctgcgcattcaatcatcatccatccgttacagatgatggtgatggagctgctggtcgataatcatcacaaacattttcttgatcactactactgatcagagccccgccttccctccggctgatctgatcatttgcgatcacttgaccgattccaattattcttcgcttcaacttttctgctctgatcagtagctgatg

SEQ ID NO: 98438 - DNA, 534 bp, Heterodera glycines
gacagagcaccggcagagaaagcagagcaggggatcatcgtttatttttctcttttaattattttttttattaatcttttttttgaatttttttttaaatcattttttgctttgttttttttatttatttttattttaagaagaatttatattttatcttcttcccccccccccctccctttcccctctttttcgtcgtgttcgctttcgcccggcggcggtgttcgtctccccccccccccccgcccaaattagggggggggggagcaacaggtttatggggaagagccctcctccccgatcccccgtgttattttgcggggattgtcaacgactaggcaaaccgtcgagaagaaaaaatttgtgagggaacagcggatcacagcggaggaagagaagaaacatgaaggggggggggaggtcattagagtcaatcagcaaattgcgtcattagtttaagtcatttgtcagtcacatttttggtgtatttgagccgaaaatgggatgttttgatatgtgaaacattgaaatatg

SEQ ID NO: 98439 - DNA, 273 bp, Heterodera glycines
tggtccttctctccgcccttaaaattgtcccaatttgcccattaccctcagattctcttcgcttctttggtggccgttggccttgtctatgcgcgccgtcgttacgtggccaaatacggcggagacgttcgtccgccccattttcttgggggtcctttttcggcacttttctccactgatcggtgccattctccgctctttaaggttcttccgaattcgctcgctcccatcagatgggttacagcgaaaacggtggcaatatttttgaggatg

SEQ ID NO: 98440 - DNA, 310 bp, Heterodera glycines
tttttgttattctgtgtattggaaccattttttgtttcataaatgcgagtttcgactttctgatccgggttcggggtccaacctaagtagaaatggatgtcagatttaagttccacaactcttaaaaccaataaaataagcacttctcgaaaaaacgttggctttttttgaaaaaggacgattagcatttgtagacttcaattttaccgtgcgccttttggcttttcacgtggcacctaaactgtcaatgatcatttaaagcctacaatttgatcaaatttcgatttaagcggaattattattttcaatg

SEQ ID NO: 98441 - DNA, 473 bp, Heterodera glycines
tgtaagtaaaaatcgtaactacgctcaaaaagcttctcaaccaattttagcgcatccaattccttctacaatcgcctttatacatcccattatgaacgctaaaattatcagagtgccgaaaatcgcatttgatctaagcctagaaaaaatggtctaagtaaaaatcgtaattacgctcaaaaagcttctcaatcaattttagcgcttccaattccttctacaatcgcctttatacatcccattatgagcgctaaaattatcagagtgccgaaaatcgcatgtgatctaagcctagcaaaaaatggtgtaagtaaaaatcgtaattacgctcaaaaagcttctcaaacaattttagcgcatccaattccttctacaatcgcctttatacatcccattatgaacgctaaaattatcagagtgccgaaaatcgcatgtgatctaagcctagaaaaaaatggtcaagtaaaaatatg

SEQ ID NO: 98442 - DNA, 172 bp, Heterodera glycines
ggtctgttttggagcaaaacccaaaaattcggaaagcaatgacacaacatttttaggcctcgataaattgtcggaccgctgtgccgagtacaaaaagggcggctgtgactttgccaagtggcgttgtgtgctgaacatcggtgcccacaaaccgtcccatttggcattgatg

SEQ ID NO: 98443 - DNA, 82 bp, Heterodera glycines
acaacaacagacaacctcctccctttgctgcaatgacccgtccaagcagtgcggcaacaatgccgtgactggaacatctatg

SEQ ID NO: 98444 - DNA, 480 bp, Heterodera glycines
agtaaatgtcatttgaaaatttgtcgactgatcattaacatatttagtctaaataaataaatttaaaaaaatattttatcgtagaatgaattaaatttttatgataagcttaaaaattataccttgaaaaaaattaaaaaattccaaaaaataaaaaatcgtcattaacttaattaatgaagacaaattttagggagggatttggcacggattagcgaccatcaattagcaacaaaaagtgccatcaaagaaaatccaaatcattttcgtcaacgaaacgaagatttatacataaagccagttgaaagttcaacattattgcttgtaataattaataaaataaattaatagcctaattaaattgttaagcgacaaaaatatgtggatgcaattaatcgcggattattgtcaaaggatgaatttggcgatttcattcggcatgaaaaaattgcttcatcatgggatattcagaatcggatg

SEQ ID NO: 98445 - DNA, 1003 bp, Heterodera glycines
aattaggataaataaatgtgtctgaatgactttttgtaaaatttttaatgatcgcataaaatccaattaattattaaaaaaacaaaattattttcatcactttttatggctaatttgtaagcggtctcgggccctgtaattttaaccgggctaaaacgggcataaatttcgccagtgaaaatgccccaattaaaatggtgtaaaactgcaaaatttttccgccggccccaaagggtcgggttaaaattggaatttttagggaattaaatattattttaaatacattattacattaatataaaataattaaataaattattttacctcgaaaaatgcatatataaattattcaatcggcttaatttaatgaatataaacataaaaatgctttttttctgctttcacagcagtgccatcgtcaaaacaattttaaataagcttatatacatgtttattgattaattaattttaaattaaaattatcattttttatttttttaggaaattaattgacgtaatcgtgccaggcatttgcatttaatcggcctaacatttaattaaaaatggataaattaaaaaaaattaaaaattagagacaaattttgtctgcgtcaatgacttcaatgacaaaacaacatttttttatgtaaacatacatatcagggatgtgccgagccagacaaaatccgattccgattaaatcgccgattccgattatggccaaaaatccgatacggttttaaaaccgattacgattatggcccaaaatccgattaattgcgattccgattacgattccgatttttttaaaataattttttcccaaaaattttattcataatcaaaatcataaaaataaaagtttgtccacattctgaggcaataaacgttttctcagatctgtcacaatcaacccagcggtggagaaaagccgttcgctttcagtcgatgtagctggggctgagaaatatttttttgatagcttagattcggaaacgaaatg

SEQ ID NO: 98446 - DNA, 163 bp, Heterodera glycines
ttttcattaaaactttaacattcaaattccatggatgaaaatatcctatttacgaccgtttaggcgccgtttcgtgtcgcctaaacgcttaatgcataaaattatgcacttaaaattttatcagcttttattctctttctcattttaacagcagcaatcgatg

SEQ ID NO: 98447 - DNA, 752 bp, Heterodera glycines
tttgcgcgaagacaactcagggcaacccaaagttgccagggacaatttacagtgcagcggaggaaattgaaaaagtgccattttttttgggggggggattagcggaatgtttagtaattaaaccgtataatgggatgacactcaaaggccccgttttttttttttggccccgacggttttggcgccagcccaagtttttggggtataacttttttttgttgttaaccaaatccagcaatcttggtatcaatcgaaagcttaacatgtttagaagatatttctaagctattgcttcgcgattagacaattaccaaaaaagttatatcatgaaattgcaaaaaagtcgaaatttttcaagttttttcttaataactttttttagaagctaaaatttttgtttgttttttgtaaggctaatagagcttgtgaagggctttcgaatgataccaagattgttagatttggtcaacaagaaaaaaagttataataaaaaaactgatgctggcgccaaaacgtcggcgccaaaacgacccagtcccatttgcgccaatacacaaaatcagtttataattttggtcaattttttaacggcaatctttagtgcctgttttgcgatttttgtgcttaaaaatcccagccttagtcatcatatttatttgcgcactttttagaaaccaattccctccgttaacaataacaataataatactgatacaaataacaatgctaactttgtggcggcgcaaacaatg

SEQ ID NO: 98448 - DNA, 491 bp, Heterodera glycines
tctcccgataagggtagaagaggaatattatagaaatatgattgcactttaataaaattcttaaaaatttttcaaaaattcaaaaattagtccgctggttttcatagtgcaatctgttaaaaatcaatccaaaaattccattttttcttgcggtggatcctatcagcactgcaagacccaaaaagctccttttttgaatagaatttcattaaagtaaatattattaataatgaggaaagaattgtgcaggaaagaattgcgcaaaaatacatttatgaaatgaattttcattaaatcaataagtaatttataaatgtttttataaaaaatgaatattaaaatatttttattcatattacaactacaaaatttaaaaaatatgcacaaaatacataaatcatcataatatttgagttggaaaagaattgttataaacgaaataaaagcaaataattcaaatggatttctaatcattcattttatgaaaaatg

SEQ ID NO: 98449 - DNA, 327 bp, Heterodera glycines
gcttaaaatggtatttgagaataattgcaattttaaattatatgattttttaatgtataaaaacagtattcgcttgctttatattttttggctcggttctcatgtgtaacccggttttggtcataaatgcgaatttttaaatgatttacgactttttgtctcaattcggttccggggttcagaattaattcgacaagtctttgtaaaatccgagattagtgacccaaaaaagccacaaaaccacttttcacgattctttaattcttaaggtccatacaaaaaataaataaacttttggcacctgacaaatggaaagtcactgtaatg

SEQ ID NO: 98450 - DNA, 214 bp, Heterodera glycines
tgatggagctagccggacgaaacggcaggtcacagacctattttttcatgaaaatccagtggattattgggaaaagattggcgaattacgcaccaaacaagagcagtttgaaaaggaggtaaaacaggaggagagtgaactttcggcagacattacggatgtggagaggaaaaaactactacaaagcgagcttccactcaaacggattcgtatg

SEQ ID NO: 98451 - DNA, 1003 bp, Heterodera glycines
  unsure (1)..(1003): unsure at all n locations
attagaggaaagagctgctttntaaaaaagattcatttatggtcggtcatatgttcatctacatcaatttaattgttttgtttaattgtaaattataaaattaaattaagttttaaataatttatgttatttggaagcagaaatctgaaaaaaaattcttgttatcttttcgatagctcataattttgaaataataatttaaatgtttggtcattattcttcttgttataacaatttaaaagtggtgaaatttttaaaaattacatatccaaatagagaattagagctattttctaatcatttggcggattataaaaagcccaccagaaacagcataacattttctaccgaatttcttttcagttcattcgccgaccgggaaaagagttgacaaattagcatatttctttattcatttttaagctttagcttatcaaacacaaccaaatgcacaaaatgcaatgaaaaagacaaaatgaatggaaatgtgtgaagattggcagaaaagggaaaggacaacaaatcggacaaataaatcataaaatgaaaaaatgtaaaattaataaaataaaaaagtgaaaaaattcaaaattaaataaaaaaatatatgtataaataataaatgaaaagcaaaaggattttacgttatgaagaaggcgtttcaatgaatgttaatgaaagattttgaagaaattccggcgataaaaaagggaaaagagtgagcaatatgagagaaagttagagaagaagacagacgcgaaaagagaattgagaaaacagagaaagtaaaaagagggaaaagggtgaaaaagagagagccatggcaagaagagagaaagagagaaatcaaaaatggaggacaatggacaaaaattgacggagatggcactgccacacccaatggtcgtcgtatcaccgcacaaacgaagtttcggtgccacccgacgccgccgaaccattggaaggccaccgcaccttaaaggggggggggggtgagaagatg

SEQ ID NO: 98452 - DNA, 1003 bp, Heterodera glycines
  unsure (1)..(1003): unsure at all n locations
gatgtgaaaatcaaatctgaatttctattaatattcgatgatntagtccaaaaatgattaattgtttgaaataattgaagaaaatttgtttgaaaattttcattaatttaatttattaaataaaaaaccaaataattttgtattattttacttgatataaattaaaatttgaatttttttttaatttttaaaatttttttgaatttttaaaatttcccggttggtcccggttcccggtttttcttgcggtcccggtcccggtcccgaaaaaaaatcgaggtcccggtcccggtcccgaaaaaaaatcgaggtcccggtcccggtcccggcttctcaggtcccggcaagtcccggtcccggttttggcaaaaattcccggtcccgtggcactctaatattaatcaatcataaataataatattcacatgaaattgtattcccggacttcctttgccatgtcatcataattacatagtccaaatgattggagccggaaattatggcaaaacattaagtctacaatttggcatataaaagtgccaaaaaatcagggaaaaaacacaaattattaatttaattaatttaaatattcatattttatattttgaagtatataaaaaatgaacttctacaattggtacatcaccgtttttctggtgatatttgctttgactggcatttgcaaatttggtaattattaaatataaattttaaatccacgaaaaataaaaaataattttattcacaggcactatcgcttcacctgttcacaatgaagaagatgaaataaaaaatgctcagccacgctttgaaattggtttgagaacaaaaaagaaattaataaaaataacaaaaaaaaaaatccaattttttatttatttaaatttaaaaaaattaagaaaattctcttttctgaaaatttaaattaattttccatttttaattaagtaataaattgcataatcaaaaaaaaaaaatattaggtgaatcatcaagcaaaatg

SEQ ID NO: 98453 - DNA, 127 bp, Heterodera glycines
tgatcgcgacaactcttaactgcccgtcccctgaacagttcatccatgatgtgaggcgccgcaaatttttttttttggcattttttcacattgctaattgtgtttttcaacggcacaggtgagcatg

SEQ ID NO: 98454 - DNA, 130 bp, Heterodera glycines
ggtgtggcgaagttttctaattgctatttattaaaccaaattaataatcaactaaagaatttcatccgtccttttatggaagccaactcaagaaaaaatttaatcatttacaggccattccaacttaatg

SEQ ID NO: 98455 - DNA, 1003 bp, Heterodera glycines
ggctttttgtccactgtgttattcatttccaaaataattgttttctccccccttttgttgctctccattcttcactccgttgatcgccgcttggacctttctctgctgaccaattgatcaccacttggaccgttctccgttgaccaactgatcaccactcggacctctcttcgcctctgtccgagcatcaccaggtccggtgttcaccaatcgctgtcgccaactgatcgctgcacacaccagtcgaggaccaattgacgccgttggatcaggtcaagcacagctaactgtccaattagccggttatttaaccgctatccctcgcgtgtcaattagtcgattgtttaatcggctaacaatctgttctcaaattactatctcccaacggcctattcattcacagttccgcaggcaaccgccgcttaagtctcattccaagcggtttgcgttagtggcgacctggaccccacagggacgaccgcagctatcagttactaaccctaaagaccaaaacctattgtacggtccgacacgtccaatcatagaattttaattctttctttttgtttgctcatatttattttttataacaaccttttcggtcaagttttgaacctatttttttttgtgaaccagttttgacttcacacatttattctgattaattttgatcagtcttgatcaaatatttgtctattcatattaaattttgattgcgcatttaatatttatttttgttgagttgctgtcagttttgaacttactaattttattttttttttggggagagcgttgcttagtcagttttgactaaacaatttcaatttttgaagttcaattagtgcatttacaatttgttattcaacattttattgtttaattcatattattaaccaagggctgccgaattaccaagttgatacattttttttttacgaatcaaatcgtgactatttagtcaaattaaataaatctgaattaaacttaaaaagggatcataatg

SEQ ID NO: 98456 - DNA, 170 bp, Heterodera glycines
  unsure (1)..(170): unsure at all n locations
aaaaacgaaaagttttcaaagcctgtaaaaaatttattnaagaaaaaacttcnaaaaatttcgacttttcgcaattttcatgcatacntgttttgataattgtctaatcgcaaagcaatacnttagaaaaagcttctaaatagattaagctttcgaacgacatcaacatg

SEQ ID NO: 98457 - DNA, 286 bp, Heterodera glycines
ttgtcttatgattatcatcatgctgtttgactctctcacatttattttgtacctaaataatcaacaatttactgataattaatgcattaatttcctggtccatcaacggttttttgtgcaccgcaaaccctacgaatttcatcaaaatgtaaagaatctttatcaaaatcacacacaaattatttatcattttttgtctgtctgcttatcctttggcgtgcctcgccaaaaaatttttgtgtgatcgatcacaatttaatgtgtgcgtcagaaaggtgatcagatg

SEQ ID NO: 98458 - DNA, 529 bp, Heterodera glycines
tcatttttaaattttttatagatttttaaatgtttgccttttaagggggcttaccaaaacttcatcgaacctggttcttccttttctctttcaaatcgccccaaattttttttacagcttaactaggcccaattaagcttatttccagaaaatctctcatgaattctcatttttaaattttttatagatttttaaatgtttggatttttttttggcttaacaaaacttcatcgaacctggttctttctattctctttcaaatcgccccaaattttttttacagcttaactaggccctattaagcttatttccagaaaatctcgcatgaattctcatttttaaattttttatagatttttaaatatttggattttttttggcttaccaaaacttcatcgaacctggttctttctattctctttcaaatcgccccaaattttttttacagcttaactaggccctattaagcttatttccagaaaatctcgcatgaattctcatttttaaattttttatagatttttaaatg

SEQ ID NO: 98459 - DNA, 1003 bp, Heterodera glycines
gcaagaagcaattgatttcaattgcagtcttggagttcaggcatgcactgattgcatacctgaccattcatcaggtttagtgaactgcaattgccgttcacataaccttgaaaagttaatggaaagtccagagaggagacttccattaaacatcaaaaattaccaactcagaaatactgggagaaaagtaattgccttgacaggattcagtcctgtccaattaaaccttcaaatcgaaggtcttcaaatggctttggaacttcaccaaagcctttgcaccattttgccgttgaacatatctggctgttacagatgttcaacgggagcacaattccgttatgtgtgctcgactaattttggcaattctcttgccgaaattaaatgcgatgatggtacacatttttcaacaaaatgtgattccaatgcatccatttaccaaacaatcttggcttttgacaaagccagaattgacacaaaatgccaaacaaaatgtttggctggaaacacttcttttgttctcagcgggacattacattatgtcccgcccgaacaaatagaaaactacaatccaaatcactccgaaagagtgataaacagtcaatccagttggcctaactggaattttgattggaaggcgaccctttggtctttgattggcctccaatcatcactcatcttcataatgattatttgtgtaggcattgtttgcctaacaattttcattaaactttctcctttctatagactttggaaatttatttcctggtctataacgagaaaggggtacagtaatgtgcctacagtattggcaatactgtacttggccgggggaggatccttcggatgtggtgttgaatcacgtcctatcctctcggcagtcaaaaaattttgtgagtcacccctcgttcaggggaatgattcatctcttccattgaatggtggtataaaagggtggcggatttgccacccaaccaccactttcaaatcatccttccacggaatg

SEQ ID NO: 98460 - DNA, 892 bp, Heterodera glycines
tgttagactgcaattttatgtcaattatttttgttgttttttagattatttttatcgcttttttgggactttatatatttacaattaatatctaaactttttgtaggtctccggaatgtttgtccattgcgcgctagaaaatctttgaaaattttaaataaatgcagaaactggaaatatcaaataggtaacacttttactttttttccttttattctttcaattttattttttaaaattcttttcattttgtacgattttctattaatgattattatttttgttcgtttattttttataaaattaatttattcattcgcttttttatctctttttctatcagtggaatttgcacagtttttccaatttgtcatcaccaccatttttccgctgttatcaaaaaaccatccggcaaaaatcgactctgattttgctaatgaatcatttttcatccattataatgaataaaattgtggatgcaaaaaaattatgttaattcatactaaattatcgaaaataaaaatgataaaataataaatggaaaattaaaaagatatacaatatacaaagaaatggtgtaattcgttctcggcctcgagaatcggtaaataggcgaaatgcccatgcagcttaaaagttacaaacccaattttaatcttagtcaaataacttcctaatttttgtttgccattacatagttttttccgtcttttggcacaaaatgccaatgcaagaaattctcattccacaaaacccaaacactaattttttgttattatttttcttttctcctaattttgcaaatggattcaattaaaatgcattaatgagcctaaacgcataaaataaccttttttaaatttgatttattgattgcttcgtgtgcacaatg

SEQ ID NO: 98461 - DNA, 1003 bp, Heterodera glycines
ttaacaaaggacacacaatttttcaatatttttcccggcggtgtatatcggcaccgcctgatccccccccccccccaacatttccctattttgtcaacaacgacaaatcggtaaaaaacagcatataatttttaatttatataaaaatgaatggtttaataagcaaatttaaatttgaatgcagattttatttaataattagccatttgttggcgcaaaataacaatattattattgtgtttttttattttaatttacaaatatttgcttttttttctcttttttcaaattaaaaaagttcaatataattcagaaatctttttgtgtagaattaaaataatatattaaaatttgcttttttattgagctatataatttaaataaatttattttttcaataaagttattatttctaattaatatctatacagggaatttataaaaaattgttatttagcttgtattattttttcgtaaggatagttaatttttattaacaatgatcgattggtcgaaaaatggttgaattaagtgtgcttaagagtcgcaaataatcactctcgggggtgcttgcgcgttttataaaaaccgccacctagtcgcgttttataaatccgccagtcgcgttttataaatccgccacctaacaattcgcgttttataaaaccgccagtcgcgttttataaatccgccaaaatggaaaggcgcgttttataaatccgccagtcgcgttttataaatccgccaaaatgggtttgcgcgttttataaatttgtcaatatgcaaataaccaacaaaaatactaaatttattttttttaatactaaatagatcgataaaaatatttttatgtgacaatatgtgccagtcagactgcaataatatttgccaatattacagctgaataaaaacaaaaatatttgttagtattgcaattaaattctataaaagcattaaattttaaattaatacccatttcattttattttttattttataaatg

SEQ ID NO: 98462 - DNA, 803 bp, Heterodera glycines
tgtgaagtgcgaaaaatttagagagagagagagagagagaggatagagagagagatgaaatggacggagggggaggggtagagggtaaagaatttttggaaaatttttgttttttaagagggcttcctagaaatttttatttaattttttaccgagatggtccttctgtgatatgcgactctctcaaactaatgaagagagctttctttcccctaaagttgggattgaaaggagtgcaaagggcgccctgtgtagctcagtggttagagcattccacggaaaggaagggacgtgggttcgaatcccaccgcaggctgatcttttgcacttacgccatccgccaataataccacacttcgagtttttgttttgggatggattttcaatgggatagggatttaaatttaaaaaaattgtaaactttttatgtattcaaaatgataaagtttttcgtgttttactgaaatcagacatcataagaaaatttaaaaaataaacatgtagaagcatgaattttttaagaaattaattttaattttttgaatgaaaatttttcttaagcataagtgtttaaaaatttatttttttaaattttagatgaagtatttttgaatatagatttttgcataaaaaacttttcatttaaaaacaaaaatttagaatttttgatttaagaaaatatattattagacggtaattacaaatttaattgatcgcctaatttgctaaattaatagcattttaatggacacacttttacccactaaaattccgtcgccgccggcggaggtagcgaactaatg

SEQ ID NO: 98463 - DNA, 342 bp, Heterodera glycines
acattagaataattatcagaccacaatcactttctatcacttatctatatataatgctgtttaggctaccagggattgaaaaaacttgtggttgaacccgacattggatataggcgcaaatgttggagcgcaaatgtccggggcacaaatgtccgaggccaaatgtttggggcgctaatgtccggggcacaaatgtccgaggccaaatgtttggggcgctaatgtccggggcacaaatgtccgaggtgtaaatatggagtgaccaatttgagcccattcatgcctcacctattatgtgcaacagtcggcgcaacattgttgttattgttattattaatgatg

SEQ ID NO: 98464 - DNA, 341 bp, Heterodera glycines
atcacaaactttaatcaattttgcaaaatagttcaataaatttgaatcaccatttcataataaattaaaatatttattcgtttaaatttatttaatcccctttggtttttaatatacccgtaaatgtgacaagcgcatcgccggtagcggcatgatgcattagtttctcttttgtgccggttcagaaatgctgcacatccctttgttatttgaatttgaccccgttcgcatcggtcgccgaagcgtcggaccttcgatacacagatggccacgatcccgcctcatacaaaagggcaaacgggaaagtcgcttttttgttcctccattcaacaccaaaaatg

SEQ ID NO: 98465 - DNA, 441 bp, Heterodera glycines
aatgatgtttgtttatcattcctcttttccatgtcctttgtactattgattttgcccattctgctcattaagtctcttcccctcttttccccaattcattctctttttggttctcctttggactcgcttaaatattgtgctccgctaaatattgaccccaaattattctccaaattctgctttttattttgttgttgttttaataaatattttgtattcaacaacatttgtttgtgaccctaaaggcacaacattggcgacgcccgaactcatcaattttcaagcaattctcgtgttgaattgcttgttttgggaaatttaaaaatctcgtgctgatttttaaatttcgcggaatcatcaaaaaaccaagatacctatgcggttgcggttccactatctgtggttttaattcgtcacaatttcaaatcgtcaatcaagatg

SEQ ID NO: 98466 - DNA, 586 bp, Heterodera glycines
tattttgcgattttatatatcctacatataattacaggccctaattattattgtttttttattaattttaaattaattctaatttttggaatttaaaaaaccaagcactcctgcacggcatcccgcaaattttaagtgcgagatttggtgggattaatacccgagtgatcccgccccgaaacaaataaattttgagttcatatcctgcagcaggatccgcaaatttgaaaaaattaaatgtcatttcgtcataaattcaatttatgctctttctttttgcttttgttggttggaaattcgaaaaaaattagttttttaggcttttcactgcgtacattttattatctttgcttacataaataattctaagcgtacatattttttgcagtaaaagatttttgtttttgccttttttgttccatttaaaatactcataaaattgcaatttttcaactgtcccattttaggagtgccttagaagtcaaaaaattcacttttatttttgtttttgtgccgtcatttcccattttgtgccaccgcgctccgttcgcttcgttttgtgccgtccaatgcaaaagggaggatg

SEQ ID NO: 98467 - DNA, 200 bp, Heterodera glycines
agagagagacaataggcaaaatgtggaaaaatttgcaattagggaggaccagtttgagacaattagagcttttgtgggacaaagcatggcttattaaattggatgacgaagagcgagaaaaactgctgacgacggcattttttagaaacgaatttgaattggagaaatttaatgagtttttcagccactttttgctaatg

SEQ ID NO: 98468 - DNA, 250 bp, Heterodera glycines
attgtatttaagattaaaatttaacattatataattaataaagatgattgatgaaaaattttttcacttgaacgatttgaaattaaaacttccttttggaatggtgataagtggaccatctagtagtggcaaaacaacatttttactaaattttttgagagaaagagatgaattgattagcccacacccaaaatcggtgctctattgttatggtcaatttaatgatagtattcctgtactacaaaaaatg

SEQ ID NO: 98469 - DNA, 171 bp, Heterodera glycines
aataagcgataatgaacctatcacatacctatttaatcgccgtagataaaattttaagaatttcataattccgttttcaattggtttttttggcaatgtttatttcattaatgactaatcaacaacctttaaagagcaattgaaggacaagaaattagcagtgacaacatg

SEQ ID NO: 98470 - DNA, 324 bp, Heterodera glycines
tgtgaattgtcgtccatcatagacggtgacgggacgttagtcaaaaaacccatcaaaatgaaaaatatcgatttttgggcgttagtcaaaaaaccatcaaaatgggcgttagtcaaaaaaccatcaaaataattatacactatacgattatggcctatatgcatgcaacactcaattaatgccaaccacttccaaaatatttgccgcactgattattaattaatgccaaactatcatcaacaaaacaaaaccaaaaatggaagatgtcagttaaataaaaataattaaaaattcttcaaaaagattggggagatttggaaaatg

SEQ ID NO: 98471 - DNA, 273 bp, Heterodera glycines
aaaaaaaagttaagcctaaaatttttcgcaaatttaaaaagcaattaaaaatttttagattttttattcatctccctttttgatagtgaaagcatcagagagccttatttaacttttaattaacatttggtgcgtttcagagcacgttctaaaaaatatttatgaattaattttgcaaaataataaataagtaatgaaaaagtcagaatttcgaaaaattttaaaaacaacaagcgttggcattttttcaggttaagttagtcctttacaatg

SEQ ID NO: 98472 - DNA, 1003 bp, Heterodera glycines
ccaccacatcaaatgagagaagaatgaatgtgagaaaagcgcgccatggcattttaaaattcatatttattgcaaaaaaaaaatcactaaaataaattttcccaaatgaaaaaccgaaaatttgagaggggaggaaatgccgacaatttaaaatgccaaaaataattgtcacattagcgcatttaattgccgtatcataatatactcaaaattcacgccccctcattagcactgacaccaacagctaattagtatgatggtgtggtctactaaactttaatgaaatgccatgagaaaatgccaaaatggcatgggaacaacctgccaacagagtgtcaaatacaaaaatctgttttttttttggtttgtaaatgccgtgccattttaagtgctgtcgaccgtaatagaaggcgtgttccatttggctacgaatggcattttcatttccattctttgtgcttgctgctttcagaaaatgagtaagttaatcttcctgctcaaattttggccaaattattttaccgtaccaaacattacgacgtcatggacaaattactgtactaaatatcttgacaattttacagtattcaatcagatctcccatcgctgataaattttacacagtactaaatcccgacgtcaaatttacagatacttgaactgagacatatattttaccatgccaaattttggcgttatggcaaactactgtattcgatcttttgaaaattataccgtgcaagtcccgacagagatttactgtatcctagacaaataatattttaccttatacaactcaaattatcccttcgctgattaatcttacacagtacaaaatctcagcaacttaccgtactcgatcccgacatatttttaccacgccaaaaatatgatttgtgatcaaataattaattaataattttttttcattacaggggcaattcaatttaatttatttttgtttgtttgtttttaaattattttcgtcatgagtctgaacatg

SEQ ID NO: 98473 - DNA, 488 bp, Heterodera glycines
ttctctccaattaaaaagcgacatcgaagtcaaagggccaatgctggcctcctcttcctccttggattctgggcagttcggccgtggagtcgtccatcggctacaccttcattagcaccattctttccaatatcgcttctcgctctccagctgtgcaaacatttgttgcagttgctgcacctgcacactaagacgctaaaatttattgaaattaaaaatgatttaaaagtaaatgaaaatttttaagtaaattacattgatcatgggtgtggcggggttcggacgtacaaaacttttattgcgtttgtagattgtaaaaattttttaggtgaatttttgttgcagatttcgtaaactcattttaatcgaaattaaacaaaattattaataattaataaattaaagaaacccaaatgcatttaaattatacatattactaatgtttattaatgttttgaccaaattaggtttttataattactaaaatg

SEQ ID NO: 98474 - DNA, 311 bp, Heterodera glycines
  unsure (1)..(311): unsure at all n locations
ttttatctttntcgttaataattaaaaagattgtctggaatttgtcttgcgccacaccgctgtgccattcatttatgtaatttgacaccagtctgataataatttcgccaaaatttatttattatttgtccatttattacgaattattttgcatctatcactccaaattttgttaaaaaaatttttttattgtcccaatttttaccatttcacaaggagtgggttttgttttgaattatttaaattttttaatttttccattttggcttatgctaattgttgattttgtttagggaatttgccaagccatg

SEQ ID NO: 98475 - DNA, 232 bp, Heterodera glycines
cgaaaataggattcctccctaattcacactataggctgtttataaaccgataaattaattttcttccccgacactctgtccccgattgtcggggaacaatccaagcttaaaattaaaagaaagatactaaattactttttttttttacaatagatggcttgacatagatcctcctccggcctcagcctattattacgcatttggcggcggtcctcgcatttgcattggcatg

SEQ ID NO: 98476 - DNA, 209 bp, Heterodera glycines
tttcagaaaaacgcatagctgcgattctgaataaataacgcattgttgcgcttttcttcgagttgaatttgtgtcccacaaataacgcattgttgcgataagtgtggacatcgacaaatcaccgacaaatcgggccgttttcgaggatcgccgtttaactttgtttttgttttgttgagtagtacctctgcggtagctcaaacaaaatg

SEQ ID NO: 98477 - DNA, 602 bp, Heterodera glycines
aataaactattttttaaatttttatttaactttgaaatattcttcagaattttcccttcaaaatgagcacaaaatggttttatttggtctattattgaaaaagttataagctaaaaaaaattcataaaatcaagggtaaaataaaatgtttaccttttattgtttgtatttgttcttttggcgttctgtatttattattattttatttatttgctttaaaaaattgaaatttatacacaaacacaaggaggaattgaacttagagcccctttttggtgactaactcacagaccactaagacgaaaaaaccaacttaattgtacttggagcccaaaattgactcgccgtgtctatctaaaaaatacaaaaaaaaaatcgacaaaattataaaacaacaaaaaaattgacaaaacaacaaaaaactacctaaaatacacacatccaactttgttcctcgcgtttctctctgataaaagggtttggtttttctttttgctttaataaagttattcgaattaatccgtcataatcgtttgtttcttccttgttttcgttttcttctctaccaacattttcacactttaagaaaataaaagaaaatg

SEQ ID NO: 98478 - DNA, 242 bp, Heterodera glycines
ggtgctgctccatccccccacggcacccctcccgtggactgcgccggaaaacaacaccttccgggggctgctgcttgtccgggtgctggcgccacgcaccatccgtgtgcctctgctcggctaccgcacaaaggatgagcgcttcaccttccctttgtgtgggtggtgtgccgaccgaagacagcagcgaccgtgccgtcacggtgacgacaagcgttcgtgggtgacggcctacacgcatg

SEQ ID NO: 98479 - DNA, 516 bp, Heterodera glycines
aaaaaaaattcaatcgttcccggaatttacctttaattttttattggctataatttttcctcatttttgaaaaaatttttccttttttattaaatttttataataaaatatatccttatataattttcctccacagattctcaattccacaataatactttattattacatccatttggccatacaaatcccagcccttttcttttttggccaaattttggctttgtccacctgccgtaaatttgtgaatgaaacagcagcacgaaagacaacaaaaattgaaaatttgatcaaacttggagaaatcactggccgatcaattagttggctctgccgccagtagctgatcctccgaccgatcaagttttggccctgtcttcaattgccaatcacttttttgcccagccaccgatcaattgctgactgatcactggccaatcactttgataataatcaataaaaacaaccacactattaatggcaacggtgggagcagcaggtggtagtggcaaaatg

SEQ ID NO: 98480 - DNA, 174 bp, Heterodera glycines
cctaaataaagaatgttgctgctagctattcgtttttttaatcgtaaaacagaaaatgtcaatttaatgggccaaattctttcggtctccgaacaaattgtggggggggggggggaggccacctggtcaagccgttcttcctccgccacgtcaattggagaattggcaaagatg

SEQ ID NO: 98481 - DNA, 136 bp, Heterodera glycines
ttttttccacgtatcggatccgttagtgtctttttcgatttgcggtccgcctctgttgctgctcgtcccccgctgggtttgaacgtcttcaaattggaccctttttataggccaagtggtcgcctatgaaattatg

SEQ ID NO: 98482 - DNA, 1003 bp, Heterodera glycines
catcgatttgttgtagtttcctcccgttccatgaatattgtttattgcagggttaccctttgtacttatttggagggtgcaaaacttacaaatttaaaatgtacttatttgtaagtattgtacttaaaaataactcctttccatcgcgccttccattttattctctcctattcttattttctctctttccactctctctccctccttctccctttttttctcccactctttctttctctctctaactcactcactccctctccatcttctcttctatcctttcttctcttctctctcctcactctctatattttatctctctctctctcacccactctttttttttctttctttttctctctaattcactctcctctctctgtctttctcttcctttccctctttgtctttctttctttctctcactctcttactcactccctctccattttcttttatatcctttcttctctttctctctctgtattttttttgtttctcttctattcaatccttctctttttctttctttccctcatcactaattctctctttctttctttctacccctctctctctctctctgcctttctttctctctctctctctctcttactatccccctctccatctcctcttctatccttccttctcttctttctccatatctcttttttctctctctctctgcctttctttctttctctctcattcactctcctctctcagtctttctctcctctctctatttgtttttctttctttctctctcccatatcctttattctcttctctctccatctctatttctctctctctctctcttgaaatgactatgtgatgactgataatttcaattcgccttaaattccaatcgatgcctcagaccgaaaagcgttcttcctcccacctctctccccccacagacaacacaaaaagactcgccattgacaactcatacaacatcttgggagaaaagctagctaacattggtaggcttatg

SEQ ID NO: 98483 - DNA, 93 bp, Heterodera glycines
gctttttctttcgcaacacattctgtttttataagaattattaatttttatataaaatttataataattttagacttattccaaataataatg

SEQ ID NO: 98484 - DNA, 203 bp, Heterodera glycines
tgcgtttgtcgacattgttcgaaacgagggaatggtggcactgttcagagtaagtcggagaggatggcacggcacatgcggggggggggggagggtgaatgaggttgggtcggtggttttgaaatgggtttagtggagtgtctgtccatcgtttgaattaattagccatttttgacccctaatagggcttttgggtaacaatg

SEQ ID NO: 98485 - DNA, 1003 bp, Heterodera glycines
gtagcgcaaactgtccgaattatgaattaaaattaaatttatttgcataaaatatgtttttatggattaaatctgacattttattatgataattaaataaattgttattgactcgataggcgtagtctccgattagagtcggcaccagttccacgaccagcgcattttcagctgcacaaccgctgatgagtgctagcaatacgacaacgaaaggagcgaaaatagcgaaatttggcggataggggagcataaatatgtgtattttgaggctaattacaataaattaatcgtaataataagaaataatttaaatggttggggaaagattttaatacaaacattaactaaaattgattatattaaggcgattgacgtggattttattggaattgttttttacaatatcaaaatacaaaataattaaaataattatttcctttccaaaataattcttattcgaaattttgcaaatttatgaaaaataaatttattattggtggccgtggtctcatcactttgtcaaactctgatttttgcactttcgttttattttacggttagcgttgccgaaaaatcgaatttacaggacactatttgcacgtaccgctcaggctggctcggatgcagaatttccgggttcctttctctgtaagtcgacagagataagaaagagaaggagaacagcacaaatcaaaataagcattttagcaaattattaaaattttgtcaagaatgaaaaagaatttattgttttgaaaaataacaaattttagagtaaatttgggtatttaaagccattaaattaggcaatgaataaattattgtgtttattcaccatcgcttattgttaatctgtcaaataaatcattttcactttttatttattctaatatttaatttttattttataaattaatttcttataatttgtcgcttcaaatgactttttcttttgctgtgcttcttttgcttttgattcctccgctgacattggcaaaaaatg

SEQ ID NO: 98486 - DNA, 733 bp, Heterodera glycines
aggtgcttgctttgaatactttgggtggtgctgctgccggaggctcttcggccacgcggggccgggacgcgtctttggatggtgcggtgggttccgctgtgctcggaccctcttccgcctctcgttctccggtccgccgtcgcggtgccgccgttccgcgtccgtcgttggccccttccacctcttctcactttgccagcagcgactgttcaatggcggacccctcttctccggacggtccctctcctccttccactcactgtcctacttctccaccggaaatggcatatccaaattttccggcaaagtctcgcgcttccatcagtccgcatgtccttcgtccgccttccccgcgagccaccctaaagaataggcggtcatcatcgccacgaaagctgagcatgaccaagttcagaaagttcggtgacaccgtcacacatcccgtggtacgtggcacggactcgaaagaataagcaaagaagcggcggatgggagacgagctcagccaacccatcgaagagcttctttcttctcagcactgactttgttggctttatcgcttttcaccacttctatttaccattccttttttacgataaaattgtcgacatttttcgctgttggagtttttccaaggcgcccaatttttggagagagtgtcacaaattgccttttttgccatttgcccactttacgttttcttagatgccactcaattctgtccatccaaatg

SEQ ID NO: 98487 - DNA, 764 bp, Heterodera glycines
aaatttggaaggtgccgctccgttcagagcaaccggcgactgtcgcgcatgtccaaatgccggtaaaaaaggggttcaacacgtaaaacaacaatttctaaaactcaaatattttatgcattaccgaaaaaatgggcatttttaggcttacatagcgaaaaaaaaagacattttatatttggtaaatttttgaacagatttgtagcgaaagtttgtccagaaaattacatgaaaataaatttaattaaaaaaatacactctctaaaatcaatttaatttactaaaattccttttttttaaaaaaaaagtcctaaattttatataattttaatcataataattaaaagcctaatatagcatatttaacaaaaatttgtgccttacttatttagaacactgaaaaactgacaatttttggccaaattttgctatattttatccttgaccaattaacaatttttttgtgtttagtctcaacaaaaccaaatgaattatggcaatgccaatccggcacagtttaatttttatccaacggcgcctccagtgcaacgcggagcaccatgaaaagcggagaatggagcatgtacacggatttttagttgaagaaaaggattcacgaacggggggacatatagaagactattgtagctaaattttgtgtggatttccttatttctgcataaaatttttttgttgatgtttaattggtgcctgttgtgacagaagaccccagacaaaagactcactccgacaaaagacctatg

SEQ ID NO: 98488 - DNA, 115 bp, Heterodera glycines
agtgcctcatgaggcactttcgacacatcacctcaagcgagatcagctcgcgattgtgcccgagtgcggctacgacactacaaacacacaaagccttgtagcgctcaaattcatg

SEQ ID NO: 98489 - DNA, 477 bp, Heterodera glycines
tgagggttagagaatacacacattgaaaatttaaaaaaaaagaatttgaaatttagtggataatattaattttttaaaaattcaatgatttgaaatttcagaaaattttcgaggcttttttgctcttcattctcgtgctgttcttttcaccaaacaccaacagcgaagatcgtcagtttttttggtttttgaaaaatgacaaatttttatcattctggggccaaactgtacaatggagtccgtccggtgttgccgataggcatcgccgggaaattttttgaaaatttaagaaatgtgataagaaaattaaattttataccaatttttcttgaaatttttttcatttttcttttcaagcgggggcgggagggggcaccatcctcccccacctccggatacgggcattgaagaattacagtaggatgtgtataatttcaatttatcatctcttttatacgttcagcaatggtcattatg

SEQ ID NO: 98490 - DNA, 68 bp, Heterodera glycines
tttgtcagagtcttctattagttgatcccgaaaaattctccggaaacgcacttcgccaaaatcgaatg

SEQ ID NO: 98491 - DNA, 469 bp, Heterodera glycines
aaatattttaataaaggctttgcgtaatcaatcctgttttatcccgcaccacaatataagccaaaagtcaagaaattacaaattattctttaacgaggattctagaaaatttcatgaaatttttttttgtaaaattaagctttttttgttgaaaaatttgttcaaaaaaattaaaattttttattctcgaaattagtttggattttttaaagaattaactaaaaaatattattttttaaaatttttctgcggacacggtaagcgggagggcgggaaacgagctgcttccggtttaatcaatcacacacaacatttatttaatgctagtcaaaaaaaataaataaaaatctataccgtaatttctcacatttaattttgattggataattttataaaataaataaattgtccgtcccctttcaaggctccccatcagcagcaagatggtcagccgacagactttggcatg

SEQ ID NO: 98492 - DNA, 316 bp, Heterodera glycines
cccccccccgaaatgaaaatttttaaaaattttccagcaaataatggaaaattttttcgaattccccccccccccaaacgaaaatttaaaaattttatagacaattttcgtaacaaatagcactcaaattttccgtaaaacggccaaaattgggtcctttttagtgaaaaagtggagtttttacccagcagcgggaattttttttaagcagccgccgccgactaccaaacagtagaaaagtctacaagtggaaaattgcagttatttgcagatcgtaaacaacttttatcaattttattcagcaaaaaaaattatg

SEQ ID NO: 98493 - DNA, 510 bp, Heterodera glycines
ttactgcaccattctatttcgcttttgtctcttccagtcttttattacaccattctatttcgtattgtgccattctatttgttggcatctcttccgttttctcattgtttcattctatttcgcttgtatctcttctagtctctcattaccaattctattcgttggcatctcttccggtctcttactgcaccattctattttctattgtgccattctatttcacttttgtctcttccagtctctcattacaccattctatttcgtattatgccattctatttcgttgggtatcgacgtaattcgcgcatgtgtttgtataatattatgaaaactcattttacatgtttttatgcacgaatgtttgtttatacattatataaaatggaaataaaaaattttgctttaattttaaattttgctcacatttatttttttaataattaaataaaatttctttaatttttataataatttttgagtttgaattttttgtttaattaggaaaatatg

SEQ ID NO: 98494 - DNA, 168 bp, Heterodera glycines
cggtctgcccaatggtcaattggtgaggctaacgtccattaactggctaccgccttgatggattagtcacacgtgaaccccctcaacgcaaccttgccattgaatacatggggtgcttttatcatggtaaaaaaaaaggtcgcccttttcaaccgaacaaaaaaaatg

SEQ ID NO: 98495 - DNA, 234 bp, Heterodera glycines
agtttggtaaaacggaggacaatttcaattttaaattaaagaccgcgttaattagggggttgatccactaattaattaattcactaattgacttatttgctcttttgctgaacagccgccccagcagaagcagcctcaagaaaagccgggggcgcaacaggacgacacggagacggaggaggacagcaaagaagacaagcggaagccgataaagtgtcaggaggagaggaaatg

SEQ ID NO: 98496 - DNA, 413 bp, Heterodera glycines
  unsure (1)..(413): unsure at all n locations
cggtacggaaacgcgtccttcggtgnccgcacaatgtttggctgcgattgcttgcgtcgaattgccatccaatgtgatttttttgtctaattctcatgtccttggctgcgttttgtcctttgttaaatgattgaatgaggtccaaaatgtatttaatcaaaatttagtcatttttagacagagtattttaagcaattacaattataattcttaaaagttgctctttgttttgtttgctaaatttcccttcccttttttcgtccctttggccatttattcttttgtcccctcttcgtcagcaatggcccgaccttttggaccgtttggttgccaatgtaacgactgatggtgcggacaacgctttgctgcgcgaagcttccctggaggcactcggttacatcggcttggacatg

SEQ ID NO: 98497 - DNA, 550 bp, Heterodera glycines
ttgagttataacataacgcctgaggcgaaaaaaatgaaaacacttatttttattttcataaattaaaccaaataaatccttttaatgaattttttccaacattttctatcagcaaattgttaaatttcacatattaatgacgaataacagttttttttaactatacgtcttttctatattaattttttttgtcaatttttatatagatttttttcaatttttcttgcaattttcatattaagcatttatttattttacataaaaaaatttttcaatgattaaatttaatatgttcaaattgaattgcgttttaatgaaaaaaacgattgatttaatatttttcaattaattacaaaaatttatcatttcttggagaattaaattaataatagaataatttgcttttctctattgaaggtgaaacgaaaagaaatattcaataattaattgtcatgtctgacccataaaattgcataattattaattaaattatttttcatttttgtcgctattcgcccactctttggccctttgtccgccattcccaatg

SEQ ID NO: 98498 - DNA, 375 bp, Heterodera glycines
ttttcttcaatattttaacagatagtgagaattttaaaatctgatctaaaggaacaaaaatcggttatggaggagattattggtcccgaaaactttttttagtttaaggaaaattatttttaggggtaatctgaggtgctaatattgctaaggcattgatgttgatctatacaacaatatgagtaaacagaaggattcagatgtcattcacggagtaaaatgggaatatgatcgatagggcgtcaaattatatggaaatccatattttttcctggactgtgggaggcctgaagcgtacgaaaaaatgtttttagcgtgatttgaagcctttgactaaaaattcttaaattttagctttatctgtcttcaaaaatg

SEQ ID NO: 98499 - DNA, 1003 bp, Heterodera glycines
cgacgggggatgataaggccccgctttttaacagtaattaatttttttaggaccagcgaggcgcgggcagttcacattggatgttgccttaatttgcttttaatttttaattttttaaatttaatttttattcgtctgtttccatcctttttgattggatgcgacaactaaaaatgggttgagaatgagctttcattttatcatcggtcataattgttttttttaaatttattattatgcgaataaaatgtaattaaaagtaacaaaaattaaaaagtttaatttctgcgtaagagcccagcaaaaatattcatggagtttatgtaaatagtaaatattatttatatttaatattaattttttacttttcgaattttaaattattttgtcgctttgtttttctaattttccgtttcctcaattttagtatttatttgcttccataattccccaacgaaagaattcttttccatgtcaatgaaaatggcaaattttgttgtccttttttgcccctccgtcgtccctttctttctttttttgtctctttaaaaatgcaattctgtcaagcacaaatctgtgccaacgccgtcaaatgccgtcccggaaagatgggacatcattcccttgggggaattacggaggcaaagggcacacatcgccggaggggcgggcggcacagagtttggcccaaaaaggcagcagagatttctcgcctcacccctcgaccagttccatctgtgccattcgctgttccaaaaatattttttgtcttcatttgaaataatttgttgataaaagcgttttatatattcttgaatttatttatttaaaactaaaattttaggccaaaaaaacaacgactaattaacctcaaatttattgctatggccgagaagaaaaatggcattagccacgaatgctgtggtgaatgataattaaaaaataataattttcatttattttgatcttttttcattttcagtatcaaataattcatcagatg

SEQ ID NO: 98500 - DNA, 56 bp, Heterodera glycines
agaagcaaaagaaccgggaacccaaacattgtgttctcttctcattcaacttgatg

SEQ ID NO: 98501 - DNA, 56 bp, Heterodera glycines
tgtttggttttccacaaatatcttgtctgattttttccattttagggcggcagatg

SEQ ID NO: 98502 - DNA, 152 bp, Heterodera glycines
tagcctgacacgaatgacgatacttaaaaaaacaaaaataattcaaaggcaacaaaaattgtcgaaaagtcggaccacaaatatacgattggcttggaccgcatgggacgtaatgtgagagtaaccgtctgggttatgaattaaccggaatg

SEQ ID NO: 98503 - DNA, 187 bp, Heterodera glycines
agagagagagagcgagtgaggagagagagtgagagagagagggaggggtgatagagaatgaaatgaaaaaaagttgtgggagtatatgcagatggtcagtggataattgcacttcctgtttatttgttaggtggccgattcgctgacttctacgaaggacactgtgaccggcaagtcggcggagatg

SEQ ID NO: 98504 - DNA, 77 bp, Heterodera glycines
tcactttgaacactgccacttcaacatcagtgacctccacggggcaattagcagaggctaattgagaaataattatg

SEQ ID NO: 98505 - DNA, 56 bp, Heterodera glycines; identical to SEQ ID NO: 98501

SEQ ID NO: 98506 - DNA, 489 bp, Heterodera glycines
attgtgaaaaatatacgaaaattattttagcttttaattatgcagtacaatgcttttaagccccgccgtgaggcgggacagttccaaaattttgtaccacattttactgtggaaagtccaagtaccttattggacaactacgtgtcaatgagcacagtcgcctttggccagttgtggaacggaaaaatgggaatatcagatggggtgcgctcttttctaaaaattcctcttttcgtctaaccatccctcccttttgtgcactatttcgtttcaaaattgaatcattttttttgtcttttgaaataaattgtgaaaaatatacgaaaattattttcggttttaattatgctgtacaatgcttttaagccccgccgtgcggcggctccccttttgtgcactattttagtttttaaaattggttccggactttttggctttttgaaataaattgtgaaaaatatacgaaaattattttagcttttaattatg

SEQ ID NO: 98507 - DNA, 1003 bp, Heterodera glycines
cttggcaaaaatttttaatttttaaaaattatttattaggtaactattttggttttttggccttaaaaatcccagtcctactcatttgcaactgcaattagtaaataataaatttttggctcaatttttgttcgattcttaaaagtgtatttttcgcttttattgcatttgtgttgcgaaattttccaaaaaatgtcgaaatagtaaaaaaatattgacaaaacgccaaaatagtaaattttcactattttaagtagagtgccacgggaccgggattttcggtgtcaaggcagttcgtacaatttcaaatgggaatggccataatttttttgttcgtcatttaatttcttcaaaatttgtttcaacgaaagctcaacgtgtttagaagctatcattaagcagaagctaagcgattaatcatctcaccaaaaagttgatttatagtttacaaaaaattaggattttcttgaatttttaagtcttataaatcatagctttttggtgagatgattcatctcttagcttctgcttaatgattacttctaatcttccaataattaagaaaaaattcatccaggtttcattgcctttttatcgaccgaaaattttattttttggcattttcttctgtaaaactcaaactttgcctcaataagtcaaaaaaatcacgaacaaaagtcgcaaaaactcaaaaaagtcataaaaatccgaaaaagtgtaaaaagtcaaaaaaagtctcaaaaaatgcatgttagaagtagggatcggatttttagtggcaaaaatcccaaaataattaactaaatagtggcaaaaatagtggcgaaaaagttccaaataattacttttaataaaaaacttttaagctctgatggggttttgaacaagcccaatttcgagaaagaattactcgattgagtaaatttcggcataaatttgaagagaaaaaaaggattttcgatgagagacctattttgattttggcagcaaatgtccgaaaatg

SEQ ID NO: 98508 - DNA, 1003 bp, Heterodera glycines
attttcggcccattttcgttctgctcaatttcgccactttttgttcaattttgctcgtatttaatgcgacaaatccccaccaattcctacaatcagaagcaccagcaaaggcaagcaatgcctcttccgtccctctctcagtccccctcatttcattgtccttttcccccggcccaattgtccgttccatttctgtcattcacccggtccctatcattgaattttgtgatttttccatttgccccatttctgaaatttctgtcccatcccggtgcccaattccatttgtgataattccccggtgatggcttttttcctgtgatcaatttgtgataattttgttcaccatttcaaatatttggtttaattacccaagtttgaggtcatttcccggaataaattttttattaattctgtgtctcgtccctgcctgcccctgaaccccgcaccgtggaattcatttggcccgaccccagagcaagtcgggacaaattggcgctcctggggtggatttgctgtgaaccacggactgaaatcgacggatcccggtgacaaagggggaagggaaaaagcaaattagagagcctagacaagaccctccgaggcttgtctagtgttcatagtttcgtgtagttactgtcctccgaggcataacttcacgagggacatagcagacttagtgtttaccctctgaggaagcacttcgtccgaacagagggttgaaaggtgttgtgtagtggacgaagtacttgccctccgaggaagtacttcgtgcaaaagggtgttcaagcgcgcacaaggccactgacaaataaggaaaaaggcaaactaacagtcctccgaggctttagtttagccataaggcaaaaggcaaacaccttgtcctccgaggcaggtgtttagtcacagaggtccatcaaaggccccagggccgagaccagactgatcccggcaaaagacacaaaacaacacacacacatacgcacaatcaaacagcacaatg

SEQ ID NO: 98509 - DNA, 149 bp, Heterodera glycines
atttgttaaggtgaactttgcgcgctatttgctcacccacggtgcaaacgttggacgcttggacaacaccggtggatttttgtcaaatttctgaattttttgtccaataatttattgttcccgtttcaggaagcgttttcgcactgatg

SEQ ID NO: 98510 - DNA, 1003 bp, Heterodera glycines
ttttttgttttgttaaaaatgggtttttgggccatgggttcaaatccacatgcctgcaacatttttaaaaaattatttttggggtttcgagttcggatcaaggctttggaattgggcaaaatggatgccaagttcttgattagtggtcccaaaaaccctaaaaaacatttttacaggcaagtggatctgaacccatggcacaaaaaaaccatttgcttccatctatgatcccgaattccaaaatcagtttatttttgtactttttttcaaaagtcttataaaaatatagaataaacagaagtttatagaggaagaatttcgtgtttttcaaaaaacctttttagaacagcgctattaattttttttttctcaaaaaacgaatttttccaaaatttatgtaataacttcttcgttttgaagatagaaaattctaaaaaagtataaaatgctccagatttttctctatttttaatgcttttttgcactttaattgattcatttagaagtgaattatgaattttcaaacattcgcctaaatttccaagggccaaaaaatgaaaaatcttttcaattcaaaaatttcagattaagatttaaattgtaccattatgcagaaagcaaaaaattttaagaatttatatagggaaaggggttgaacaataaaagcccccccctcgattggaagctcccccttgaatataagccccctttggaggggggttgaacaatagaagccccggggcttataatcgaggaaatacggtattttagttaactatttcgggattttttcgtcactaaaagtatcgtccctaattattagcttattattcaattataaattccatacttttttcgcttcggctcaccacggtcgggaacacctgggttttcgttcccgccgatttagtttttttttgcttcatttttgtttatggataactgagtccctgttaaaagttgagcgtgcccctaatttgcatttttctcattattttaaatg

SEQ ID NO: 98511 - DNA, 762 bp, Heterodera glycines
atccaattgttgtaactgagggaactcaagatttaagctcaaacacacaccaatcaatcccaaaaaatcgccggaccggatttcgggtccagaaaaatccggtaccgggtccagtccggttcgctctctaattataagtttaggtgtccctgtggtaggggtttcttgagttaaaaaacgcggttgggtctgaacagattctgtaaaacccaatgatttaactatgatgtttaacaaatatgattttttttaacgtttttcaagcaacaaattataaaaaatggaaaatttttctgtgcgcattatgtacaacggtgacttgttatggtatcccatcgggataagtgaaaacatcgcatcactcaaagggcgtctgtcgcatgctctcaaccaaccagcgcatcaaatgtttttgcgtttcgccggtagagtccatttgtcatagaaagtcataatttttttcatttagggcaaattttgccaaacaatttgatcatcatcggtggtgggcccatacacattcacaatggtgcccaactcgaacttttttttggtgccgccgccggtcgctggacagatcaattgatgaataggaggaattgcccgatctccaatttttgttttttctgttgatacgatgtttttttgttttgtttctgtaaacaataggatcccaaattctttttttttgttcgtttatggcatttgacagtctctgatttttgtaccatttcaaactttttgtgctgtcttttaaaaatg

SEQ ID NO: 98512 - DNA, 485 bp, Heterodera glycines
ttcccaaaaagtttttttggaaaaagcgcgcctcaaaaaagcgttttattgattttttaatttggaataaaattttaaaaaatgatttttgctttatgattttaactattaaaaagttgtagaaaaaatttcgcttttcgcatttcgcattttcgcatattttggcttttcgcatttcgcttttttttcatttcgcatttttcagtttcgcaaatttcgcttttcgcatttcgctttttatcttttaatttggcccatccctggaatacacccccaaaaatagcgccttggcctatttgattgaggccaagttaacccccaccgtaattgaggactcagggttggcaaattgacaaatttttcaaaaaaaaaattaagccttacgaggaggccaagcactcagtgcttttctccgattgttgaatggtcgtggcggttggcattggattcagtgccgtctgtgtactacaaacacaagccgaatg

SEQ ID NO: 98513 - DNA, 567 bp, Heterodera glycines
aaatattaaaaaaataacatgaaaaataatgcggcttaatctctgcgaatcattggttttttagtgaaaaattttttgaaattagaaatttgattaaatttcccattttttgggagtttatgtcaccgaacttaagtttcgtaatcgtataaatctaaatgttccaatcgaaatttttttgcattaccggttttttgatttttcaaaagaataacaaataaggtacaaaattaaatccaagaatgaattacctacactcgcggcccgataaagatatattttcttgtaaaatgccttttttgaaaaattcgggatacggtatgccattaagcaactgctgaattttgcttatcatagtttgttaaaaaaaccaatatgaagatttagttaagaatttaaaactaaaggtgaatcagttatcataaccattctcacgccatgaaaatttttgaaatttttaaaatgtgcgatgcgatttaagcaacgaatggtcacattcaaatggaagggagcatctccaaatacagcttcaatatcctccactcacttacacaatgatggacgatg

SEQ ID NO: 98514 - DNA, 1003 bp, Heterodera glycines
tatttactacataatagtacgagttgggtttcgtccgttttatgtcagcatttggacaatcacaattatgcacttgttttattattaaatcgggcttcatttatgaatttataaactataaaatagaatgaaattatttgattatattttttaaatattaagaatttataaatataaatcacaattataatattgaattgggcttcatttatgattttataaaataaaaatcacaatgatcaatcttttgggtaggggtatcataaatttcaaatcacaaaaattgcatataaaaaggctggatagagccttaaaaatcataattttccaacaacttcaatcattctggacacttaaaatatttcgaaaaccaaattcattaatccattcataaattttgtttcgatttgtccctaattttcttccgatttttctttcaattttattccgttcttttggtgagtattttctttctttttgcttgattttctcctttattttataatatttttcaatatttctcttttttcattcaaattttcttcttccttttgttcccatttttctccaaatattcatcaaatgaattttgtttaatttttttatttgctggttctgtttattaaacacaaaaaaaactgccacataaacaaagtttccaattaaaacaaattacaacacattaaaaatactcgtctgagctctcggaaaaaaacatttaaagaatttttttttttttgcgatttttcattttttaattaattctaatccgaatgccatttagaatttgatcatttaaaatttttaaaaatttaaaaattctctatgcaaggatcggatttttggcacttttttctcccttttaccagaatgcctagaattccggcccatattgggtagaagagattaaaaagacaaaatttatgtatggcataacagaaaaagaaaaataagaatttttctgttaaaatgctgtgggagcaaaagcaacaggggccaaatg

SEQ ID NO: 98515 - DNA, 172 bp, Heterodera glycines
catgcgcgggtagcggtgcttgacggcgatgcgactccgctacgatacgtcacaatcataccaaaaagtggtgccttaggagaggtaaaaataattattctttagaagaattaaatattgattttgtttttctatttagtcgtatgggctgcccaaactcgacgaagtgatg

SEQ ID NO: 98516 - DNA, 972 bp, Heterodera glycines
  unsure (1)..(972): unsure at all n locations
ggttagtaagttagaatgngtatatgtaggttcgtgatcaaggaccaaaaaaacttcgtgaacaattttcattactagacaaaccaaaatggtancccttnggttttaataaatttcaaaatcggtagacttttataatagtgccacattttcccataatgcaaaatttgaatgaaattaaactntaaaaagctagtaaaaattgaacattgtatttttgtgccacaccaaccaacacctttaaactgtctaaaaattacaataataaataaaaaaataaagtttttggtttaattttgcaagattaaaccgaaaattatttgaatattcggaaaataaactattataataattaaatttatctagttgatacttttgtaatttcggcttaccacggaataccatatggttcaattgttttttgggtatattttcatttgggaagcggcggtacaaaaaggcgccgccaggtgaatttggaattttgtatcaatttgtgtagagtttgaaccaaaaagccgaattttcgagcaatatagaaattcttgaaaatttcttttggaaatattaaaatattaagtttttgagtaaaatcatttataaattgcactaaattaaaaaaatatgtatggcgcctaaccttatcttacttaatatatgtgtgtatacgagaaaataaatgccatgtgctgttcatgtgaatcgtttaggaaattggctctaacaaatcaattatattcaatgacaacaaataaatattgatgaattttaattttttcagacatttattgaaaaatttatttaatataatataaattatctttttgaaaagtttcgcaaatttggaaaattcttttagtttaatggcccctttttgtgtattattattgtttttattgtcagtttacctaaaagaagcagaatttgacgtaattacatgcttaaaacaaaataagttggccaaaggaaatg

SEQ ID NO: 98517 - DNA, 292 bp, Heterodera glycines
tgtaattaattggttcaccattcccaagaattttacctttttaagtttcaatttcgctgaggccgctttgctcatccacgggacgacgacagtttatgcgcgaaaagtcgactacgtattgcaaaaagcccaaaacttttttgatcaattgagggaggacgaaaacattcaccaccagcagcagcaaaaaggaaaacgaaggaaaggttttgaaattaacaatcgaattgactcttttcttgcattagatgatccattggaagaaggtgctgaagcgacaggggaagagatg

SEQ ID NO: 98518 - DNA, 561 bp, Heterodera glycines
tttatttttggtaattaattgaattatcttaaatatttgggaaaattaattgttttattttattttattattgttttgactaataaatggtaaatgaatgaatgcttttcacttttttgttcactttcctttttcctttttttagtgaatcattcactttccatcccacaaatgcttctttctgctgctaatgtgctgatgactaattgaaaatgatcaaaaaaaaatatttttatgataattatttactgggaaaatggacaaataaaaatgatttatgttaattaaatgtgcaaattattttttaattaaataaataaaaaagcaataaaaatgatttggtgccatattaattaattaattaataatggtttggggtgccaattttgttattttttgcttttctgtccatcttttcgctatttccaatgccaatggcacaatgtaatcaaaataaaatatattattatcaaatattaaattatcttttactaatctgtaagcaattaagcaaagtgccgttggaatttaagccattttgcacattaaaagttaaatatg

SEQ ID NO: 98519 - DNA, 1003 bp, Heterodera glycines
taatggaacccccgcctcctcccggcccttacccgcttagtaaaattaagcgtttacccacttgccaaattaaccaataattgcccatttgatttcttttattatgatgctatgtcatgttttggtgaattaattattgatgataaatactgctgattatttaacaattaaaaaattaacctataattaatatttgagtaaaaaaaagattaattggtaattatttaaatgtttaagtggacttagctaaaagtcttttggtaacatattttgcaataaaagttgaaaattcggttatccttgtagtcctatgttaatcttttattaaaaattttaaattattcttttataaatattttgttttataaaacttttggaaatttagtaatttctaaattttttgattaattattaagatgctgtaccttcttattttgaacatttttataaatcatcggtttttaatttattaatgtttttgttttttttaaatgctaattctttttaacttattttttaaatcaatgataataaatttgttctttaaaaatggaacttgttgattattgttaagtattaaaaaagtaaatttaaacaaatatgaattttttaatattttgaatgctttttttgaattaaatctcaaaaatgaataatatttctttcttaacatgtacacttttgctaataaaatgtgttatttattattattagcaaagttcccaaaataaatcagctttttaaaagttttttgctgtttatttttgaaattatgattgttttaaaattgggcattgtgtaaaaacattactatttaaaaatctgatataaacaaacttttggctttcttattaggttgtacacttatttttcttggaagtttaatttttttcattaaagatggtgcgtcaaatgtaaacgaatgctttgtccttgaaagaacgacaacaatgagaaatgttatgcgcaatacgagggagaaatttgtgaactacggtttatg

SEQ ID NO: 98520 - DNA, 769 bp, Heterodera glycines
  unsure (1)..(769): unsure at all n locations
aaaaatataatcatatgcatatatcaaagtccactgaaaaatgtaaaactccacatgaaaanataaataaataattatcatttcgagactaccattgtcatcgcatatgtcaaattagccgactggcattaatccctactttgacttaattgaaaaatttaggattggaattttccaaaattaagtgacaaaaaattaaagacgcatcttcaaatattaaaatattatttgttagttctttcggtgctgtaagttttctacagtaaaattttgttttcaaaacttgttctaaatgataagtgttgttgacttttttcaaaattaaaataatatgatttttgaattctgccacaaatcctgcaggtttgcatcttggcattaaaacccccgcattttcctaaagcgattcgggaattgtatcttttttttttgcaaaaaacctaggattaatttttccaaaattaagttacatttcaaggcaggctcgaaagtcagctggtatacacttgtcatagatgtcggttcaaaatcggcctgccaaattgttttttccttaaagtcaaaagcttccccaactccttcatatactcaatggtactcaaatggctgccctccttattttgtctgcccaattgtctatcttcaatcgcccacccataaacactctcgcatttgccctcttccattctatttattgactgaaatttgttaaaacttggtcccggcgaagaacatagcgaaaaatggtgagacttaaatcttattaatg

SEQ ID NO: 98521 - DNA, 138 bp, Heterodera glycines
aatttagggacaaaactctaggcggaggcagctctgtccctctggtcagatcagatgagatggctctttgtgagcatcctggtctatggccagccgagtaatgccatagaattgtggaacaagtacaaagaccaaatg

SEQ ID NO: 98522 - DNA, 728 bp, Heterodera glycines
ggtgtgtgagtttttgcataatacattttggcatcgattttttgtatacaatatgtaaatgcgggattttttgtatacaatatgtaaatatggagataagagacataaaccaaaaaatcgaagattaaaaccgaaggaaagaaagaaaactgcaaaagactgagataaggattggaagaaaacggccgttattgagaatgattaagaaaaaaaatcttttgtcattgtaaatttcgaccagaaaataggtatgtactgtctgtatacatacacaccaagatccgctccccatgtttcgagaaattgcttggtatcaataacagaccaaagggttcggaaattatttcgtttatcggaaatcaatataatcgtaatacatacgctacatatttttccggaaaattgaaccgccgttagtttaaactttgtgtttagttggttggggcccttaaacgataaaaattgatgaaacccgagtccgccattggcttaattcaaaatgattatttatcaattaaaaatttggctttccgtcactatagccacgcagaaacaaattggtgttggtgtgagctaatgagctgttggatttggttctatctgacttttgctgaacaaaaccctttgttttcaattaccggttcgggtacaaattactaaatttactttttaacaaattttcttgtttattcaaggaaattcagccaacttttgcatcaaaagtgatg

SEQ ID NO: 98523 - DNA, 113 bp, Heterodera glycines
ggggcggggcggtgggcgatcagttcaatttgggtaatgggcaaacgctgaaggcatttccacgcaccgccgctcatttggaagtgcgacgcggcgaattggtggaacaaatg

SEQ ID NO: 98524 - DNA, 1003 bp, Heterodera glycines
ttgtgcgattaaaatttaaaatttttaagccttttggccgctgttccatgccgcgcctttggtttggcaccgaaaagccccaccagcagcagagggagaaaatgtgtgtaattgtgaacaacctgagatttttattttatttggaaaataattcattttgtctctgccacgtaaaccccattttggcggatcgtagccatttttgctcttcagcaagcattcaattttaaaatcacaaaacaattttttgtctgcttatctcatttttgatcaaaagaatctgcacacatcgtttaagtgatatgttgttcaaaagggatgggaaagtggaggagaaaagggatggaaatgggggaatgaagcgggacaactcggctcggccgctttggtcccagccaagttcaggcgattgatcatacgatccttctcaacgttggccaaatgtattggatttggctgggaccgagttttgcgagactgagttgtgccaacctcggtgggaaatgttacttgtaatggttacctaagtgtgatttttgttcgttgttttaaagatggataatgcggaggaagggaggaggggagcggggtggaaattccgtcgggggtaggagtgatggcaaatttaaatgtcgaacgaatgagtgttagtcatttttatttgctgtgggatatttgtttttttttaagaaaattggaaaccaatttattaatttttgaattccaattttggccgtgcactttcaatttccaatggcacaacaaccgcaacaggagggggacaaaaaattctatgtaagtttttttagagttcaattattaataattttgaaatgccattgtaaagcagtctcataattactttcccaccaccataaatattatttataacttttggggtcaattatttttgtcatgccaattggatatgaatctctcggccctgcgctcaaaaaaagaaactttcaagggaaacatgccaaaacattaccaaaaaaaaatg

SEQ ID NO: 98525 - DNA, 238 bp, Heterodera glycines
  unsure (1)..(238): unsure at all n locations
cattaatcatgagacaagagatttatttnttgaaaaaaaacagttaatgagcttatgctgaattacgctaaaataaatcgttagtaaaattatgaatacttttgataccaaaacaaaagattaaaatttataacttacaaaattttatttatagaaaaagcatctaacacattaataattaatattatttattcattaaaaagtaacataaatcagggctcccatccgtcattgaatg

SEQ ID NO: 98526 - DNA, 77 bp, Heterodera glycines
cccctcaggtttttattcgatttgaaaaattgttttaaccaagccagccacttattttcaatggtggtggctggatg

SEQ ID NO: 98527 - DNA, 960 bp, Heterodera glycines
tcggttcaaaaaacgggtttatacttggtcggatcaaccttcccccaccccttagatcgatctgtcttcaccgagagcttttcgatttggtaaccatattcttggggattgggccgcgagaaaaaaaccccgtataagtcaagatattcttttttctcaaatcttccagatattttgtccaaattcttctgttgttatgcttcggatggcctttccatacacaattattcatgcgcaagctgatgtatgtttaaattacatatttttgcattgtttatggtcaattagtcaatttcacgtatttatttatatctttcaatctcaacctctacgatactattcttgtcaataattcagttccagaaaatgaacttggatttgcttattttcgatcatcgatccagaattcaaagaaaaattgatttttttccaaagaatatttttctggggaaaagttcgaatcatttacctaaaactttattttgatgcaaaacaatacttaagttattaaaagtgaataaaaagtacgcaatttgcgcaaaaatttggtcgattttaacgcgtgttttgaaaaaaaataattttttgctggaattcgggtttggggtttggaattgggcaaatctaagtttagattcgtaataagcaccctcgaaaacccccggaaactgattatgagcccaaaatgaatagaaaaaatgtggcgattaaatgttatttttccgaataatgaaaatattagatagtacgctaaaaggagaggaaaaattagagaaaaaatgctttttgttttctctgatttcgtttttgggatggtgtgaacaatgagtgtgatcattgatcaatttgtttgtttgtttattcattcgttccttttcttatgtattttttcggctttacgcatataaagaaattgaaaatttctctaaaattgttttgtgcaaatgttttctaaaaatg

SEQ ID NO: 98528 - DNA, 117 bp, Heterodera glycines
cgatcaatgagaatgaattttcatttttcatttacaaacaattgtttgtatcattttattgatccatttgtttccttaagttttttgtaattttttatatgcacagattgaaaaatg

SEQ ID NO: 98529 - DNA, 110 bp, Heterodera glycines
ggtaaaagtgtattttcccgctagaaatatccattggcattggcaaatttctcattattccgtaggatttacggacggtgtccaagaccaattcgttatgggctcacatg

SEQ ID NO: 98530 - DNA, 710 bp, Heterodera glycines
aataaaagtcccggtttttgttcacaaacacaaaaaaaagtgtttttccttctatttagagcaaggagaagccaggaaaaaaatatgtatttacataaaattggcagccctagtaattagttaatggaaaattaaatgtaattaatggatgggaaatgaatttttaaacttattttacattagtcattctgttattgacaaattcgttttctttctttcctatttctcatcaattagcacaattatttagtaaaatttcacttattttttgatttatggctgcacatttaaaaaataataattgggcaagatggtgcgaacaaaaactaatgcattaaaaaaattcacattctatttcataattgttttaatttaattacttcctgggcccttagaaaaagaacgagttacgggtaaggttactctcagctgcgggtaaccttacccgttacccgtagtaaaagagcaaccccgagttgggggtaaggttatccgggtaacctaacccctcgctgcggggcatttacaaaatatttatgtgttaaaaaccgggaatatttttgggtcaacagcaacaccagcagagcttgagtgggtcagttcaatgggtttgaaatcccgaattaggggtgtatttttacaaaattttagctgttttttaccaaaaatattgactttttctaaatttggtctacttctttttaaatatg

SEQ ID NO: 98531 - DNA, 197 bp, Heterodera glycines
aaatattggagttcagctttttccgcgtcaactcgattttttccttgacgcctaccgcaaggcaaccgcccgcccctatggctatttgctaatcgatatgcacgcatcatctgatccggcgcttcgcctccgcaccaacatatttaaagaggagcaggaggaggacgagggaacagttgtgttcatccccaaaaatg

SEQ ID NO: 98532 - DNA, 597 bp, Heterodera glycines
taagcctaaaatttttggcaagtttaaaaagcaattaaaaatttttagattatttattcatctccctttttgatagtgaaagcatcagagagccttatttaacttttaattaacatttggtgcgtttcagagcacgttctaaaaaatatttatgaattaattttgcaaaataataaataattaatgaaaaagtcagaatttcgaaaaattttaaaaacaacaagcgttggcattttttcaggttaagttagtcctttacaatggagaaggcctgcaaaatttggagagattatatcgattttagtgcgctaggttcgatgaaactttttaaaatataagcctaaactttttggcctgtttaaaaaggaattaaaaatttttaaaatatttattcatctcccttttgatagaaaaagcatcagagagccttatttaacttttaattaacgttttgtgcgtttcagagcactttctgaaaaaatacttatgaattaattttgcaaaaaataaataagtaatgaaaaagtcagaatttcgaaaaattttaaaaacaacaagcgttggcattttttcaggttaagttagtcctttacaatg

SEQ ID NO: 98533 - DNA, 164 bp, Heterodera glycines
agtaagtatttatgtttaccaaatatgctacaacatttcctcgtcctttataaaatttcctaaatcccgaccggtttttaaatcaacactctaactttatgcattctcaggttttcattggacatgttgatgccggcaaatcaacaattggaggccaattaatg

SEQ ID NO: 98534 - DNA, 173 bp, Heterodera glycines
aagtggaaacagcctacgtggtggacgaccctctgacggccttcaccaagtggctcctgcacttcgaagccgatgtcctcggcatcgaccctgcggagaagcgccgcaaacggaagcgtggtgacaacaacaacaacggtcggaatcctgctgcaaatgccttcctcgacatg

SEQ ID NO: 98535 - DNA, 369 bp, Heterodera glycines
gctgaactaacaaagaaaaatggaaatggcaaaacattggtggacacaaaaagggggtttcctgttctgggaaaccaaaatttaaaaaataaaaaaaccaacaaaagaccgcgcagaaacaataataatttggaggcaaaaatgccaaaaatgaaccaagattaaaattgtcttttttaatttgtcgaaaattttttatttttgcacgggccttttgttggcttttttatattttaaattgtgacccaaaacagtaaagtatccaaaaaagtacaattatcagccaaatttctgctaaaaaaaattggatttaaaaaagcacacccacctatttttatccacattcagcatgtgtttgaattcctcatg

SEQ ID NO: 98536 - DNA, 76 bp, Heterodera glycines
caaaaaaacccccctattttttcatcagattgccctaatgggcgctgtggtcggtcctgtcgatttacaccaaatg

SEQ ID NO: 98537 - DNA, 344 bp, Heterodera glycines
tcccgggatggaaattttgggcaaataaaccccgtgaaagaacaaaatcgttactctcagagtaaccaagtcgaccccaacatcgataatcggcgcagaccattaaaagtctcgacaatttctcgtactcaacgacgctacaccattcgccagagctaagaggaaacgccggagcggacgaagtgaacgccttttttcgccagtcggacgcagttagcgaagattggcccaacgaaaagcgcttaagcgcattaaaatcgaaatgttcgggtagggcagaacgcgcatacaattccgccgttgccaataatcccttccggtatgaaaatatccgaagagcgatg

SEQ ID NO: 98538 - DNA, 91 bp, Heterodera glycines
ttttgagagctggaattaccgcggctgctggcaccagacttgccctctcatagatactcgttaaagggtttaaattgtacccattccgatg

SEQ ID NO: 98539 - DNA, 361 bp, Heterodera glycines
tctccaacttttaataatttcccttcttattttttttagtaattggttaatcaaatagactgaagtaatacataaacagcattcattgaccataaatattctgtgaattcctagaattgtatagttgtaacatctgtatcttaatttgcgccttttagacagccataaaattcatctcatttttttctggtttcttgattcataaagtttacttaggattatatatcaatcatatcgaatgaatctaaaaagatattatggttttatttttgtttgggtaaactatatcaaatcgaattttcatggtccatttccaatctacgttatctattacttaagcttattgttttaatttaaaatg

SEQ ID NO: 98540 - DNA, 286 bp, Heterodera glycines
ttccttttaaatattagcggagtgagtaatgtaacagcggacttcctgaaaataatttttacattttttggtgattttttattatttgatttgaaaaagggtttttttgaaaaacgtgaaaacccttccattgtacggaagacgaaggatactcataatttttttgttataccaaaacaccaacaaaaaaagtttggtttaaaaaaaattcgaattttagtttagctaatcgtcttaacaagaacacctaatgaatttttttaggtttatttgtttactggaaatg

SEQ ID NO: 98541 - DNA, 124 bp, Heterodera glycines
ggggacctctagagtcttggtcacattgtaccaacatctgagagaccaacaagtgctccatcaggtgcatttgaattattttccatggaaataatagaaatatcctgtcaaggctcaacaaatg

SEQ ID NO: 98542 - DNA, 78 bp, Heterodera glycines
acaatggcatgaaaagtgatcagggcaaagtcaaacaattctttgaaaagtgatcggacaaagccaaacaatggcatg

SEQ ID NO: 98543 - DNA, 805 bp, Heterodera glycines
atttgtaaattccaatcgctttgcaaataaatgagtgaatgaaaggtcgaatatcaaaaagcgacgtaaaaaattggcggaaattgtgctgactgatcagccctcccctcaacgaatggcatggcgagagacgtccaaggtgccaagaaaggtcaaaattataatcggtgcagcagattaggcacttctcagggtttgcaaatgctgatgcgaatttcgaatttcggcattggcggttgttttttgctgagtcataggcaggcaggcacaatgaacatgattgccgtccgagagggcaatcgaggtggttggcaccggtgccatttgtaaattgtatttcgttcgggataacattagggattttttggagaaaaattaaagaaattcaaaaaaaaccgaaaaatcgaaataaaccgaaaaattttcttcggttttttcgatttcggttttttcggttttttaaccgaaaccgttcgaccgaccctcttgtccggtctttacaagaaattccttttaaatttgtgatttaaccatttttttgttcatttttccttgagaaaatgttttttttattaaaaaattatttttcgtccatattttcgtcttttggcatttttgttaactaaaaacccgtatcctattctagctattgttttatataaattcttttaatttctaatgattatttcatcttttattataatccattttaccattattttatataaatgttacaaaatttgctgacggattgtccggaagccttcctaaatccaacaggacattccaattaagataaaaaatg

SEQ ID NO: 98544 - DNA, 987 bp, Heterodera glycines
tcaatttaagaagcttcaaattggataaaggaaagaataaaatccgctttaaaatgttttttttttgataatatacgttttaaataaaaaaaaaattactttttaaaataaaaaaagctttttggcttttttagttttgtagaatttgacaaaaatcttcagcagttattgcgtcccagtaatggatgttccaataatatatttcaattttattttttaaatcaaccaaaaaagcaaaatattttaaaattatatattaatttgagctaacaagggggctgaataagctaataaccaaaacaaatgtactacgtctattttatttagttgggaacggattttcagttgctaaaccccaaaataactaaaataattgcgaaaaatagaatagaaaatgcaaaaagttcaaactaaacatttttctctaaaaaagtactaaaatatgcttcaaaattattctcattataaatagatttgctaaatttttatatggaaaatcatttgaccttatcttaacatcttttacagaaaaaaaaaccgtattttgccccatttatgctctacataatttcaataatttcgataaatttcgataagattcataaaagttatgtccagaagaattcaaatatctcaaattttacaactttttttggctcgaactttttttgaacttgtcgagattttttggaattttgcaggctaatagagcatctaaagagctttcgaatgataccaacaatgttggatttggttggcaaagaaaaaagttatagtccaaaaacatgtgttcgtacgataacggcctgacccctttaattttactttattatgcttatgttcctaatttcaaattaaaaaactaatgatttttttgtaaaatgatgccaataattttatttcaatgaagtacaaattaaaataatgactaaaattttttgtatttagtacaaaaaacaattaataaactcttgtacttagtcaatg

SEQ ID NO: 98545 - DNA, 156 bp, Heterodera glycines
taggaatttgccacacattaatgaaaacagaaaaggtgaataaaatggagcttttaaagtttctttgcagtttttcaaaagaatgcttggtataccgtcaatagaagtattgtttttatccttaagtttacataatgaaaaataattttcagcatg

SEQ ID NO: 98546 - DNA, 149 bp, Heterodera glycines
tttcatcagttttagttttttacttaagtttattcccacaacttccaaaagaaagacaacaagcaattcttaaggaggatgtcgccgcatttgcgaaaggtttcatcaaaaaaaaattaaataaaaaaagggatttagcgttcgaaatg

SEQ ID NO: 98547 - DNA, 356 bp, Heterodera glycines
  unsure (1)..(356): unsure at all n locations
cgccgatgctgtttttaatgattaatttaaaaaatctcanatatataaatattcatgaaagattacaatttactcctttaattgaagctgtatagttaataattgcaataatatgnaaagaatatattgattaagttttaatttatataagatacaatttttgcatttactagaaaattcataattcatatttttgtcagctaccaattctgtcggagaggttgtaaagaagacctttggacgaatgattgttgtatgcaataataattattgatctgaattatttttgcttaaaaaacttctaattaatgaacaaaaataataataaaaaaaattattagtatcgcaaaatgatg

SEQ ID NO: 98548 - DNA, 1003 bp, Heterodera glycines
cgcatccctcactttatgacgtgccaaagtttttagttttttataattaaagaaaaggaacaactatttcctttcttcaaagaaattgttagtgtagaggtaattcgttagtcaaaattttttttgggtcaaaagttcgaatcccctatgtgtaaattcattttgtaatttttatttttgctttttgtgagcaattcaattatcaaattttatttctttatcaaaatatttattttaattttattccattaaaaatcaaaaattgcattaaacattccaatgcgaaattatacacattaaattactttttaaaaaaccaattcaaattataaatatatatcgtccaccgaattgtaccgttcagaatactaaaaagctattcaaatttatttcggatcaaagcgattccgaaaatatcatatactgtggggattttaacatcccaaacattttatgggatgaaaataaggtaaaacatataaatgatcctatgtcaaatatgctgattgagtttatgaaccaaaaacaattgaaacagcatgttaaagaaccgaccagagaaaatacgattttagacttagtaatgactagcgaatcagaattaattaatgaattaattgtattggaacatttttcaacttccgatcataaaatggtcggatttcaaaaaagaaaaattccggcgtaataatcccagtgtttatagaagagattttaaaaatattaatttttcgaaattaagtcgggcgattcttgaaaatcgtattgatttatcaataaactcagtgtacaccgttgatcaaaaatataaagaattcttaaataaagtactgaaattatatgatacttttataccaaatagacctcatcgataataaaacaatcgtatcctcaaaaaataagagatttattttcagagaaattactgttacataagcttgtaagaaaatttcctgaaaaaagtgaaatcattttaaattacaaaattatttctagggaaatg

SEQ ID NO: 98549 - DNA, 190 bp, Heterodera glycines
  unsure (1)..(190): unsure at all n locations
gctaatttgtctattcagctgctaattggtgttcctctcataagttgnggttttnnaatggaattgaggagaattaccatgacacccccaaaatgggcactcccctgaaaagtgtggacagtgccgtggactcaatggaggtttcctcgagatttgctcggtgattttgcaacgaatgaaaatctcaatg

SEQ ID NO: 98550 - DNA, 556 bp, Heterodera glycines
tttcgccctaccatgaaagaatttttataaaaaaataaaaaatagaaatttttctagtgattttcccaggtttatggcgaactacttttctaaaaaaattaaaaacgtatttttctgattttcaaagagaaatccttgtttttcgtacctaaaagaagtttttaacttcttttcaaaaattatatgcaaacaaataacaatttcaaaagaccaataaatccatttccaccctatcagcaccaccggcttcttttgatcccaagtgcactaaaaaaaattatgatttgcttatttcctacccaaaattgttaaaatcgataataggaggtgaaaatataatatttaaatttattttttatcgaattaattgtataaataactgtttggaagcaatttcgcaaaatgttcttatttttttacccatcttattttttggcccttgatgttcttatttgaaaaatttcagatcacatccctctgatttatccccctcccttccactacatttaagccgttcatttttcgtcttcaccacggcgaagtgatcgccggaatg

SEQ ID NO: 98551 - DNA, 1003 bp, Heterodera glycines
atgctctacaagtttacaacaaaatctcagaaaatttcattaagtttcaaaaacgttatggctatatgaactcaataaaccttgttttctactttattttcatttgtatttgaatttaatttttaattttatttaatttaatttccttgtgacaatgtggggtatgatcaaagatgttcaaacctacggagtttatcagaaactctatccaattcatatggatcggaactgttccaccctttggggaagagaataattgaattgataggataaatattagttaaataaaaggtccgtcctttgttgtccctctaatttccgttggaaatgtccagctcctctcctaaaggccattttacctgtcaacgcggcacaaaaggacagtttaaccgtgcaccgtttagcctttgcattatacccgcaccattttcaaaaattttgattgttttaattgtttatttctctgagatttatctttatattttatttttattaatcttttatttagtttaaatcctaccataattttaatcttattttaatattattttaattaatcctattttgaattttatttaattttaatctttttaattaattttatttaattttaattataatcctattttgattttaattttcttaagttattttttatttggattaatttgaaattttatttcaacattaaattaacctgaattttaatcgctcaaattatcacaagcgggctctcaaatggcccctgcgtgtgctcaaattgcacacgcgagcgctcagatggcctggcgttccttcccctcccccatgggcacgacagctgactccctccccttcgcctccctttcccttctccaataggatttggctttgggttttatttatttttaattacatttatttattttaatttaatttttaatcttatttattattttaatttttcttaattttaatttttatttgaattaattcttttaattaataataaaattaatagatg

SEQ ID NO: 98552 - DNA, 86 bp, Heterodera glycines
ttataaatacaattataagataataccccttaagaattatttcaaaaaaaatttttttgttcagaaataattttgctgaagaaatg

SEQ ID NO: 98553 - DNA, 820 bp, Heterodera glycines
tctgctggaagacagttttaaaaagccagaattgtttgtgagtattactgaagtagttaaaatcaattaaaaatgacgcttttgcgtgtaagcatcaaattaacacttttttttatattaaaaatagggatcaaaaaattaaagtaaaaatacagcttacgcttacatacatttgttgtactcacaaatgaaaattacattgacaactggcacatagcagaattgcaattcgtcattaactaacaaaaaaatatgtattgcaattcgcacctttcttttccttagagtccaacgactaataaaaggcagcggtagatctaataaacagcaacagcgaaatggtatgcacatacacacggaaaggaggagaggagagggattaagattaataaaagaacagagagagttaatacgatcaaactaatgaaaatgactcctcagaatttatgaagtccagtgcaaagccctctaaagaatatagattaaaaagtatccaccttattgtgtatcgttagattacatgggtgggtctccgatatttcgactaaaactcaaatggtacgattttgactcattttggaaagcctaaaagcaaaacacataaatttgttgtgacatttgtcatttaaatcaaattcattaattaatgaataattaatgcttatgtatgtacatataggtatgtaattaattacgacgttcccatgtcatttggaatttgcccactgtttaattgaaatgcatttcataggaatccattaaattgttaatcgattaattatcaacgcatctttttttttaggacaaggccttaagtatg

SEQ ID NO: 98554 - DNA, 144 bp, Heterodera glycines
  unsure (1)..(144): unsure at all n locations
aatgggtcaacaacttcanagaggtgtctcgccatgttntcgtcaaattgtttttttaccaatttttgtgtntagaaatttctccgtgccaccacttcagtcagttacaaaattaaacttttcatttatatgacgccaacaatg

SEQ ID NO: 98555 - DNA, 126 bp, Heterodera glycines
ttttccccatttagcaaatttctcaatcggattttggacgtccataaagccgaccaaagccccgccaccgtaacggagcagccaaaacttgagccgactgaacagtttgatgctgacctgaacatg

SEQ ID NO: 98556 - DNA, 379 bp, Heterodera glycines
  unsure (1)..(379): unsure at all n locations
ttttggatgatgtttttgatagtattataaaataaaaattttcacttctnttctctttttttgatagtggtttcgaccctataatatttgtatgataattttctaaatgattaggtttttaagagtaatgcaatcggttggtcttttgagtgggtattttcaaaaagcgtttaaaaaggtatgtgcgcaactaagtttttataatatacttttttaggaattttttctgtgaattaaatgacgatcaaattaaaaaaaattggaaagtctggaaaactataccgtggctgtttacgttgagagcaatttcccctatgcacaatggctcacagaaatcaaagattatttgttttcttttgtatattacgaaagaaatatg

SEQ ID NO: 98557 - DNA, 275 bp, Heterodera glycines
aatttaattttaattttaaatttactttattttttagttttgaaattgctgacaatcaaagttctatcgccgtaaaatatttctattggatttcattccgcgataatgttaaagtacgccacgcctgtaatggtggggaggtagtatttggtggactaaaggttgactgtatcataggggcacaaaaaaaaattatcgaattccacggctgtgcatttcacggacatccaaaatgttataggcctcagacggtcggaccaaacggtaagaccatg

SEQ ID NO: 98558 - DNA, 1003 bp, Heterodera glycines
tccaactgttaagcagtgatccaatttggtgaagcattgcaacaaatcgttcattcccaattggacaccgttacaaaaggccaaattcaaacaaaagggcaacggcgcatttcgaattcgaatgaattcaaaattttccgacaaattttagaatcaattgaagacaaagaaaattgtgcaagaattcggaattatttgcaaaaatttaacaaaaaattgtcatttgccgagaaaatctctgcattggaagaactggtcaatattttgggccaaatcattcgagattataaaggttgcacaaagaaggcgtggccggatgtcgtggggggaaatttttttcagaatttaatgggttttttcgaattattaaatttaaatttttttcaccgaaagataaacggaaatctggaaaattggagagagacctgccaaataatattaaaataaaatataagataaagacactagggatcgagaccaagatagacgagcattttgtcgagtcgagacttgacagcgagactatagaccttcaatagagaacacatgagacaaaaattagatgctttatagtaaacaatatagagcttattatagatttgaatactagaaaatatgtgaaatgccgcctacttttatttaaattgcattactttattttattagtaataaaattttaaattttttgtaataaattttacatagaattaatagaaatataaaatcagatatgttttaatcaatataattgaatttcctttgtgtttctccagaaaaagaaagtgaatataatagcgattagttttcttaaatatttattttctttttaggatttttttttactttttttttgtaatttatgtcccttaattaaaacgctgattatttattattacttatgttatttttgaacaaattttgtgtctttcttccattaattttatatttgacgaaagaaacatgttcagaaaaattaaaaattcgcgttatttacgagacgatg

SEQ ID NO: 98559 - DNA, 610 bp, Heterodera glycines
tctgaaaatgttagagaaaagtgaagggcagatcccttggatatgtttacctttaattaattaattaattagcgacaagtcacaggaaaatggccagccagctaaagtacagtatggaatattgttaaagattaaaaaacaaattcttttaaaaattgattacttaaaattggtcaaaatacttaatattcatattaaaattttaagttaaaataaataaattataaatacaatatgcttgactcattcattttttaatgatttaaaaaatatttttattttctttttaatgtaccaaaatttagctatgagtttgagtaataagtgatcgaaaccactttttataaccatatagttttccagtcaatttaaattaatttattttttgccaaacttttttaaaattaattttcctcttatccttaatgattaaatttttgcgtttatggcatggtgaggaaccaaatataactcacggcaattgttttccgtccaattcctagggctatagctgtgacacgccaaacagattaggcgctgtgcccggttgctaattaattaattaattaacggtcattaacagcaactgttgctgcacactggcaaaatg

SEQ ID NO: 98560 - DNA, 184 bp, Heterodera glycines
actgtacattttgatcatgcttattctcggcattatcaaagtgacaaaaaaaatcgggtgtgtgtttttattttttggctcggaaataaaaaagcaattttaaaatgattttttagtcgcatttgttaatgatcaccgaaattcgtcaaatgtgacgagacatgacgaatcatcagcggcgatg

SEQ ID NO: 98561 - DNA, 1003 bp, Heterodera glycines
gatattacccacagagatggcacggaattccgacatttttggggtcggaattacgatttccaaaaacattttggacaatcatcggaattccgaaatttttgataaaattggaatttttaaaaaaaaaatttttttgaaattccggttgttttcgaggtcgctgatcacgaatctgactcattttgactaattccgaattcgaatagaaatcaaaatcatttaaaaactgttgctacaattttcaagggcttcggcgaaccgaaaataattgtcgaacgcaaatcggaagaatttccattgcccgaccgtccgctgcccagcaaaattcactttaaggaccttcacattcggtattcaaaaacaaaaaagcatataagcaattgaaatgggtaataatagtacagatggtaccccctcccccaacccttttcgaaaaaatgaaaattttttccgaaataaaattattttatggcttttcagggtcggaaattcggattctgacattgatttcgaccaaatttgaacccagaatccttgattcgaacaaaaattcgaaaaatcagatcggaaaaaacctataatgtgtttttatagtttttgatatcagtgccaataatcattagtaggtttgtaagttgaatgcactaaaaaatgccaaataaccctaaaaagccgagaaatccttcaaatatgcccaaaaaactcgaaaaatgcccaaatatgcactaaaatatgctttaaaaactgccttgcactaaagaccttcaccaaatcaaaaaatttaacgtagaaatgctatttttgagcccctttcttaaaatttggaaaatcatagtatttacaaccctaattatcattagtaaattttgttaagtaccatccgtactattagcctaaacattatccgctcccgcttttcagcaacatttgctctcctgtctgtgaatttctccgttccaatcggcacatttttgacaaaggcatcaatttgcgtttggatatg

SEQ ID NO: 98562 - DNA, 1003 bp, Heterodera glycines
gataaatattggccaatcacataaaataataattccgctgcgctttgctctcgctcgccgattaactgcacactcaactgactctttatcgagagaatgctcccgattaaatagttggacttatggaacggaaaatgaaaatggaatagagcggagatatgtgcttgggaaagagattaaacggatatgattaattgcgctttacattattaagtatattcatttttgtacgaaagatttacaacagaattataaagttgattctttttaaaaggattttatttaagaattaattataaacaacaacttaactaaataagattattattattattattataacatcagttttaaaaaaatatcattaagaccatctttccataaaaactcataaattatttatattactctgggctattttaattataattaaattttgaattaaaaatataaaaaattatatagtcttttcgtaaatattctttgatcatatcatctatattttttatatatcatgtttgatattatgcgtttgtaagcaaatatttatatattctatgatcgattttttgaatttgtttggccaatttcattattgtttgagttgaaaatttatttcatgtgatattaaagctactgtctatttttttcttgaaaacaccggctaatttttaatggcaatgaagtgcttattactttatatatatattttttttgcattataatatctaaaacataacattgataaaagttattttagcatgagagtatcacgttggacattttttgcaaattaaaaatatttaaatactttattcatttaaataattattgattatttttccacaaattcagttctttcaatgttacatatttatgtccaaatttatgggatgaatttaaatataactagagtcatctaattagaatttttaaaaattttaataaagcactttaattctaaaaagaaaatttaatttaattgtgcaattaagtcaaaatg

SEQ ID NO: 98563 - DNA, 248 bp, Heterodera glycines
taggcaaatataataaaaatataaaaacagactaataaattagtaaaaaatgtattaaagcaataaaaatttttaaatgtgaaattgtttttcttttttttggtgttctctttttgatgagaaaaacaggaaaagccaaaatgttaaaattcttctttattcttttggattctcttgaatttttatcaaatcattctttttttcaattctgatttttcctttcccttttaatgtttttagcataaatg

SEQ ID NO: 98564 - DNA, 403 bp, Heterodera glycines
ggggacgctttttatttgtttttttccatttttgggttaaaaaaaacattcattcgttaattcatggaatggttattaatatcctatttgtgtcggagaactttgattccatgatccgattgggtaagggaatcgtgtttccaaatactgtcatcttttttcaagggggagaaggttgggtcaaattgaatggtttgaggaaccttggcaaattcggtgtttttttggactcagttttagtttttttgttgttgttgacaatgtgttttacagggctgcacgcaattacggattttacggaaaaaatacggtgcttttttgggagttaaaattttactctattatcccccacataattaaaaggtatatataattaataaagtttttttcattccagcaaatg

SEQ ID NO: 98565 - DNA, 68 bp, Heterodera glycines
tgtccgttttcctcatctaacttttgttctttgattgctcttcattttcagcgggcaatggtcaaatg

SEQ ID NO: 98566 - DNA, 1003 bp, Heterodera glycines
cctttgtctttaacatttttcaatattttgtgggccaaaattttgtaaaaatttctcctatgctaacttttgatgctgaacaaaaaaagtcttttacagcaacttgatcagatcacttcttcatgttgatctggacacccaaacaaaatacagtgaaaatcggggaaaagaaaagttgggaacagaaccaagaaacaaccaactggaccacgcaaaaaatttcgctaagtttcaaaaatatttttaaaaatatcgaatatgtcgcaaattttaaaaaatatttatttttattttgctcttaatgaaaatctgttaagaaatcgtgccaagggcatctatctgcccgctagcccaattcattcttggcacataccaggctgttgtgaatcgaaaaataaaatgcgaaatacgaaaattacgaaactaaaaaataaatacgaatacgaaacgccttaaaaacatgaaattctggattgagttttaaagatttatagggattttggcttcggaggtagagcccggaaatttcaaatttgcggatcccgctgcgggactggaactcaaaattttttgcgggacgggatcccgcgggattaatcccgcaaatcccgcaatcccgcaaatcccgcatttaaaatttgcaggatcccgtgcgggattgcgggattttggaaaattcgaaaaaatttcaattaaatttaaaaaatttccaaaaatcaaaaaatgctgaaaaataaatttttaggggctgtcgggatgcattaaaaggggctgatgggtcgactaaggtttttcgattggatccgacggtaaaaagttgatcggaaatcaaattattaacgttcataaatttgactattttttttttcttcaaaaccacttttttgcggtgcaagaaatcgggaatttttcaaaaaatatacaatataataaaaaaatttctaaatattttaataggctaaattttttaattcttaaccaagtaaaaggtatttcacaaatg

SEQ ID NO: 98567 - DNA, 76 bp, Heterodera glycines
atttgtttaattgcccgcagcgatcattcagccgagcatcgaattgtacggggaggacgagaaccccttcggcatg

SEQ ID NO: 98568 - DNA, 1003 bp, Heterodera glycines
gaaccggccaaaaacaatcatgagattattattttttgttcatttatctattcattattaggtcacaattttgctgaaataaattgggaaattcaaattatgaatattctctatgggtcatcattttgccgcaatttattcttaattgactctaaaaataattaggcaaatcagcagaagaatgaatgctcatttcattattcgataccattttaacaaaataataagtcgggtccttaaatgtcaggtcctcatatgtcgggtagccaaattaatgcctgtttggccgaaatgctaatcgccgggttaatttgaaaagtgatccataccattccaacacaaaatttattttcacttaacttttgcattcctctaaataacaattaaacgattgattaaaaatttttaatgacctttgttataaattttacaataaaattcatcaatttttaaatatttggcaaaaaataaataaattttttcaaaaattattggccaaaattaataaaaaaaaaatccaaatttgaaaaataattttttcccttataaaaatacaattcttcggaatgtataactttcgccgacctcgactcaaggggtgagttcagtaatttttttatagacacattttcacaaaattaatcatttttgttgcaaagcaaaacgagtcgaaggcaaaaaaggaaacaaaggacaatcagaggagattttctctgattgtcctttacttggtttatatttttcatttttatttattcttttcattcatccattcaattattaggtcacaatttttaatggcaaatttaaatatgaataattcctatgggtcatcattttgcctcaatttattcttaattgaccctaaaaaatatttaaaaaatcagcagaaaaataaatgctcatttctttattctttgaaattttaacgaaataataattatatattaaaaaacatctgaaaatgatttaaggatttgaattttcaatacctttaaaaatg

SEQ ID NO: 98569 - DNA, 336 bp, Heterodera glycines
  unsure (1)..(336): unsure at all n locations
tagaaatggatgtcagattcgtgatcagagacctcgaaaacnccagaaaaggcgttttacacgattttttaaatttttgtttttgtttcgcaaaatggcggggggggggagacaaagcacattattagcgacgacaactcagttcaaaaaatttcacgtaacacacttaaaattcataagagctaaaaacgaacatcatattcgtgtccagcgcacaaaattacacaagaaaatattatttttcaaaaaatttcgggggatgacaaaaagcccgaacataaatttattgaataattaaataaattaaaataataattattttaaatccaaagtatg

SEQ ID NO: 98570 - DNA, 395 bp, Heterodera glycines
atgcttctgttgttttttaagaaattttaccaactctttaaagaattacggaaaacggttttttagtaaaaattcgttgaaaatttttctctggcgatgcctatgacatattatttgaatttacttccccttaccccgcaaaaaacttttataagaaatttcaagaaaaaaattaaaatttattcaatgattttttcaaatttttaagaattcttaaattttttttttaaattttaccataaagaattataaaagttttaaccggttttttacttgcaatttttctcattaaattttctagttaaaattttttgagcacacccttcggggttccccttccgaattttttttctggccacgaacctgtgcagggttagaatttctaactaccaatg

SEQ ID NO: 98571 - DNA, 464 bp, Heterodera glycines
tgcctgcaattagcgctacctagaagatgtatattaatgtctaattgaaaaaaataaaagataaagtgcgggagaggaaagtaaaacgttttgaatttatacgaagtcaagttgtccatccagttgtaagtgtattaggctacgagatcgctaaaatgttaatgagcaacaaataaatgagcggatttgaagacggaatgaaaaaaattctatttgacttcatttctctctacccttcgttaattttactacacactactcgattggtaaaccaatgtacatgtgctgaatgaataagtcgagttaaatacccggaagataaacactaccccttgacaatactcaaagttttggatgatttctttagaaaattcgatattctgttttgcccgtcaaagtgaatggtaggctctgattctctttatttatgaagtgcaccaaaaacaatcaaaaaaaaggaaatg

SEQ ID NO: 98572 - DNA, 999 bp, Heterodera glycines
  unsure (1)..(999): unsure at all n locations
tttttttctaagnncngttataaacataaaaaaattgaattttctantttctttttaaatataganaacctantaaaaagtataattctgtatattttctcttttatagctttcgcatttataattgatccacaatgaagtaagttatgaattntaagaattttaaaccgaatacgattttgaagctatgagcattttgggaacaacatgtctccaaatttgccaaaaatttcaaaaaaaaaaatcgataaagccaaataacgaaaacacgcaaatttttgtgtttttttggggagtgtattttttaaaaatttccagaccgatccttaggggtgttttttcgcttctttttttttcatttttttcaatatatggaccaaaaatcttaaccaaaccaaatttttttttttagtctaagtagcatatgcgcaaaaaaccaaccctagcaatgagtaaaaaaagagtttaatgagtaaagagagatttgtttttgttctccggaattcaagactcgaaaattttttttttgccacttattcattcatttattcattcaattcaattcaattatacttgtattaaaaataaatatatataatatatatatatttttttttttgcctttttatttcacccattggaaaaatcagatgaatttatgttaatgaacacacaaagtgaacaaacagtcaccattgatcattttatgtccagaaaaatatttcactgatgttgactagcattcattagtaatctcatttggtcgcttttatgaattagaactaaaataacaaagaaaaataataatttttatcaaatttttggttctaatcacaccacaccaatccaaattttagtaaagggtgattaatgagaatttaaaaatgaatcgtccgttaaatcccttttaatgaaaaaaacttttcaattttctggttgctttacaaaacctttttagactgccaatcttggcattcaattgaaattgaaaaccaaatg

SEQ ID NO: 98573 - DNA, 1003 bp, Heterodera glycines
attcataggagtatattttttgaaaaaattttatagtgttttttatttgctaaaaataaaaaactagaaaatagttgctaataactcaaaaagggtgctagtgcatttcgtaaaaaccgccacccatgagcgtttcgtaaaaccgccaaatgggtattttgttaaagcccccacccatgcgcgtttcgtaaatccgccaatgggttcgaaacaaaaaattataataaataaaaattcataacttggcccaagttcaaccaaattaatattttatggtattttttaatagctttaagtgttctctatcagaatataattttaaaaatttgttatcttatgtataaaaaagttatcgtcataaaatttcgaaaagtcttatgtcagaattttgtgtacagaacttttttgaaattcaattaaattttctgaaatttaaaggtaaatagagaattcttagagctatcgaatatataaattaatttggctcaattgcattttatagatttaaaacattgtgtttataattatatatgcttgaccattgcaaaaaacctagaatgttcaatgatttataaatttttttatacttaagataaaaattttgtaatattatattctgaaagaatacacccatagctattaaaaaataccatgaaatattaatttggttgaacttgggccaagttatgaatttttatttgttacatattttttgtttcgaatccattggcggatggatttacgaaacgcgcatgggtggcggtttttacgaaatgcactagcacccttagcaattgcactgacctttggcccattttcccggccaccgttgccaatgacaactttctttctatcgggattcccttcaataaaaaaaggaaaacatgcttcagttctaagaaataaaggaccattccaaaaataattttcttaaagattttcttggctctatcttttttgtttttccgttttctcaaaaatataaatcttttttttgcatatg

SEQ ID NO: 98574 - DNA, 607 bp, Heterodera glycines
  unsure (1)..(607): unsure at all n locations
tttgcgcgctaattcaaaatttacactgggtaaatgttttctttataggccaannnatnnngangancagccagaacncgcttcttacccaacnaaaccgaacaaagnggagagcgaaaanaaaggggggaaaaggagaanngnngccaaagcgaacgccaagcaanccgacatcccagaaaaaagnngcaggagnnccaaancccgaaccaaaaaacngaancaaaaaagcgacnaaaagccaacgagaccggaaancggacacaaacacaccaccaacaaacgagccaggaaaacgaaacaacgnggncaacaaggcccaccaggaaacgcccaaaaatgttgattgttcgtctttcgtatttttcaaaaaattcgtctcaattttcaccgtttcattgccccccccccccttaaatttcattattccaccgcttccacattctcttgttggttatttgtttgtttgtttgtttgttctgcttatggggttgggctgattcgacgccgccgtgggcacctaaccaaatgaggggggaggaaagaaacgaacggcctctgatggggggggggagagggggtgaataaatgcatagataagggaatg

SEQ ID NO: 98575 - DNA, 305 bp, Heterodera glycines
aaacaattaattttaaccaaaaaatacatttcaaaagtgttacacaccgccagatttttattttatttttcagtcgtcatttcagtcctatggtataataaatttcagtaccgtctcgaagatagacatttttcggaattatcttcactaaaagtcaaaaaaaaggtgtgataccaactaaactattaccgctgtttattattaaatgtactctccccggctttaaatcttccatgacgccttgtttttttttgttaattctcttttaaccattggtctcgtagataattattaacattaaaatg

SEQ ID NO: 98576 - DNA, 288 bp, Heterodera glycines
tcatctaatctatgatttttcatcaagcttttttcatttttaaaattatagtcataaaaaatgtttcatggggttatcggggtcgctaatcacaaatatttcatccatttcgaccaattcctaaacgctgaagttgaacaaaaatcgaaagttcacattttaacgaatttcgaatttttcgtcttaaaaatgcttattggattaaaatggcccggcaaaggattgctaaacaaaatgtgttaaaattaatttatgtttttgatagtaatttttgctttatctcagatg

SEQ ID NO: 98577 - DNA, 1003 bp, Heterodera glycines
aacaccacgtcatcttcatattttgctttgcatattaattttttcatccaatttattttttggctcagtgtattgcagtttacacccggaatcagatcgaaaattttaaaaatcagattatcaagtaaaccaaaaatcagatttcggagtcaaacaattttcaaaaagtttaaaattagttatttgaataatttacttgttcaaaattttttcacttttatttttcgcctcccttatcgatcgattataacaactttttggtgccgcgtttttcacaaaaaaatcttcgtgacaagggagggagacggattttatccaaaaactatccaaattttatgtaaaagttaatagagataaagtattgacattatggcataagattttaaaataaaaataattataagaaatcagaaaaaaatttagtcagtattcaaaaaaacaactgacgttttgtttttatgtattaaaaagtcgcgtacaaattttgattaaatagacttcagattcaaataaaatgaccaacacttatctcattaataaaaatttaattattattacgcatttatttttacttggttatttatttaataaagagcgggtaactcaaaacctcaacgttattgaattgaatttcgttaaaattttatgaaattctatttaatttttttcccaatttgtaatcttaaagaatgaatttagtttttcaatagtagtaaggggtgggcccgccggacagttgcaagacaatgggtacgggaaacttttctttatttttttgctgttaaccagggcggttgtctttttatataagcatcgtttattctggcagcaattgccttttagggcttgaggtcgttcgtttgacttgactaattttctgagtcgtttaggtgccctgtcgtcttctgcttcatggatggcagtgcgctgctcttcaggtcaagatgggtttctataccgaatattcagaatataattaataatattattattattattgatg

SEQ ID NO: 98578 - DNA, 238 bp, Heterodera glycines
ttctgtcaaacatcggatccaattcaagcaaatttgagcaaggaattgtgttgtttcatcaaacaattgactcactgaaaccaggttaacaacacccacaaatgaaaattaatcccgaaagtttttgagccggaattcgggaattttatcggagtatccgcttttatcttggcaaattaaaacccatttttgtcgatcagaaactgtaccagtgaccggactgttgcagcatacaatg

SEQ ID NO: 98579 - DNA, 322 bp, Heterodera glycines
actgtaggaaggggaatcaattactggtaattaattggagattaaaattatgtaaaaaattaccaataaagattgacattaaattgctaaaaagcacttatagatacttaatttagccgtttttaattcatttagcctaattttgtgagttggacgattcagcttcaatttttccaaaaaatgtaaaattaccaacaaaagaatcttgaaagtaagcgaaagttttgaaaaaattacaatatcttgaagcgactttcctttcttattttatgacgtgccaaaatgtgtgccattattttcagccttcaaataattggcaatg

SEQ ID NO: 98580 - DNA, 1003 bp, Heterodera glycines
ctacatatcgacaaaatgattaattgtttgaaataactgacgtaaattcgtttaaaaatttcattaatttaatttagctttaacttttagattttataaaataaatagcaaaataaaaattaattttgtgttattttcacttgaaataaattaaaatttgaattttttttttaattaaaaaattcccggaaaaccaaggtcccgtcccggcttctcaggtcccggtcccggttttgcccaacattcccggtccgctcaactctacggtagtaccataaaaataaagtttccaacgcaattaattctctgcaatttgtgttatgtgccaaaaaacccccaaaatatgtgctaaaacccaaaaaaaggccaaaatatgtgccaaaaattgaaaaaaactgctcaaaaaataagttaatttctcaaaaaagtctcattttttatcaatttcgctagcttaatgtaatgctttttggcgtaaattttttttcgctctcaaagatttactcatttttcggaatttcttcgctaaaaatcaaattttgccttaaaagtgaaaaagtcatgaaaagggtcaaaaaaatacaaaaaaaaagaaaattttgaaaaattattgggcatttatttgaccacgaatttgagtgccaaaaaagacatttttgtaaaaaaaacctaatttttccaaaaaatcgccaaaatatgtgtcaaaaactgccgaaaccccaaaatatgtttttattcctaaaaagtccaaaatatgttttttatatgtgctaaaaactcgctctgattgaaaggaaaacaggtaaaaatgctatttttgagattttcatgcgatagataaaaaaatatataaaaacatataaatccgttccctgataatatacgtcaagaaataggaaaaccctaaaaatccaagctttacccaactcaattaattcttctgctatatattgtgtgacatcattcagaatttggccaaattgtgctaattgcctcaaaaatg

SEQ ID NO: 98581 - DNA, 1003 bp, Heterodera glycines
ttcgaattgcgcttttccttttgatcagttcccacatttttttgatcttagtgcgaacatttcttttggtcaatgccattctccattttattgtttgatcaaaattgcgcgcaatccttctaattatttacatccattcccaaatttatttaagatcagtccaaccctgaggggcccacaaatggtacctttcggtcaatcagtgccatccctttttctgatcaaatggcgcacattctcttttgatcagtgccatttccccattcttctcttcatcaaattgccccaaattattttggtcaatcgtcttttggctatttcttttgatcagtgtcacccctccccatttatattgatcaattgacgcatatttcggctgatcagtcccatcgccatctttgatcaaattgtgcaaatttatttgatctgtcccattttccccatttctatttgatcatttgtaccatttttcattgctcaaattgcgcacatttcttttgatcagtgccacgtctccccatctttcattgatcaggtacattgatcagtgccatttccccttttgatcaattggcacatattatctgttgatcagtgccattcctcaatttaattggcacatactatcttttgatcaataccattccccaatttttctttgatcattaggcacacattctcttttgatcagtgccattctccttttagtcaattggcacacatttttttttgatgctcctcttacccatgccaattgtcaatcatgagtctatcgtgtatggcctctccattcattcattagtcaacaaacattcattcaattacgcattaattcattcatacatgtagaaaagcacgcatgttcactcatgcttgccacattcattcacttattcatgccatgtgctttcatagagtcatgtgttcataaattattcatccattatttatatatgtgttaatattataaaatggtccaaaataagtttatctcattcagatg

SEQ ID NO: 98582 - DNA, 467 bp, Heterodera glycines
ttgggactgaacaaaatgtcggcttttactgaaactgatggaccaacacttgcaacttacaatattctttttaaaatattaaattattaggtaaaaataaccaataaactaatatgtaataagaatcagtttttaatggcaaaaacaaatgaaaaatgttgacaacttaacggaatttgagtaaaatgacaaagtgcacgaaaaaatgaccagtaagaattaaaaatgcacagattcaaacaaaaacattgttgttttaggcttcttcaagtgaaggcgggtcttcttttgttgtcgaaccggtgtccgaggcggaattccggccgataaaacgatttgtgatgatgaaacagaataaggcaaaaatctaaaaaaaaacataatttagctaactgtctttcaataatttaaaataagaagtttaaactattttaattattacaaaaattatgttaatgccagcaatg

SEQ ID NO: 98583 - DNA, 72 bp, Heterodera glycines
ataacgttacaaagtctaatttagatgagtgtttttatcatttttaaaaccctgttcttggtcgctttcatg

SEQ ID NO: 98584 - DNA, 513 bp, Heterodera glycines
agcaaaaatcattttttaaaattttattccaaatttaaaaatcaataaaacgcttttttgaggcgcgctttttccaaaaaaactttttgggaagggggggaggcaggcgccgccgtgaaaatttttgaaaatttgattaaaatttgttgacagattttcaccaaaaaatcatcaaattttgtgatttttgtatcatttttctaatgagaaataagagttttggcgcgccgctgagaacagtttttcatcaaattactaaattttgcgattttgggccattttctaagaaaaaataggagttttgggggcgcggcggtgccgataggcgccgccgtggaaaaaaattggaaattttgatcatttataaacagtttttcactgaaaattagccaatttataggtaaaattttgaaaaattttatgggactttaatccaattcttaggggtgtaaaagtcgcatttcgcgccaaaaagcgaaatgcgaaaagcgaaatgcgaaacgccaaaaaatg

SEQ ID NO: 98585 - DNA, 147 bp, Heterodera glycines
ggtgatcaaatggctaaaaatgtcctaattacgctaattgctttaatgcctttaagaagcatagcggcagtttggacagaggccattacacatcggttgtggttaatctgacaagcactgatcagcaatggctgagatttaacgatg

SEQ ID NO: 98586 - DNA, 397 bp, Heterodera glycines
ctgcttcaacttctgctgctgctctcccgttggctggtgctgtcgctgctgctggagaccatcgccacaacaatttgtgtgtgattttggagaaaacgcgctcaaaactggacaccaccgtggagtgtgttgcggaactgtggcgcaccacggatggcacggcacaggaagtaggacaaaaaacaaaaaaaaaacaaatgccgacagttgatggcttacaattagcaatgttgttatatgatttttgtgtccggacccctgctaaaatcggggatatctgcggccgagttttaagggccatttccaattactaacggcaaaaaaatttgggacttgacatttcgaatttaatcaattttcgtcatagttttgttgacgtgtctagacaaatacaatg

SEQ ID NO: 98587 - DNA, 312 bp, Heterodera glycines
tttgtgtaatttgacaacgcttcttttatcttttcgttaaaaattaaaaagattgtctggaatttgtcttgcgccacaccgctgtgccattcatttatgtaatttgacaccagtctgataataatttcgccaaaatttatttattatttgtccatttattacgaattattttgcatctatcactccaaattttgttaaaaaaattttttttattgtcccaatttttaccattttgtgttttttcaacaaaataaatatttgttcaaatttaaagaattatttttaaaattttagacacaaaaacaaatcatg

SEQ ID NO: 98588 - DNA, 311 bp, Heterodera glycines
tggtcgaaatggatgacatattaatgattaacgaccccgataacctcataaaacaattttatgactataaatttaaaaaatgaaaaaaaacttgacgaaaaatcatagattagatgatgtcatatgacaattctgatgtcatattcgtgatcagcggccccggcaacccccgagtagaacgaataatcgtaaaaaacagcatttttatttttgaacattttgaaagtccgtttttcttcattttgtcataatttcgtcaatttatcttgcccccccccctcccaattcagcaaaacttttccgcacaaatg

SEQ ID NO: 98589 - DNA, 312 bp, Heterodera glycines
acgggtttcgattcccgtctcctcctgtggatgctccggctggcgggagactgactccggcgatgcgcgcttctccggctggtgggattagcggcgacgaacgggcctgcccttcggtggacggtttggcaccgctcggctcttccttccttctctgccctgcttggtttcgtcgacgacgggaattcgccccgtccctacggctgctccggctggcgggagactgacaccgatccgcgagactccggctgcgggagtctgaactgcttgaaattcgctgacgctccgggccaactcccggattctccaatg

SEQ ID NO: 98590 - DNA, 203 bp, Heterodera glycines
ttctctcatcattcacttccccataatatgccaagaaattcgggactcctccgtccccctcccattttaaatatgcttaatgtattagctgacaaaatgcgttggaaatgggttggggaattggatgaaatcttttttgcccttctcaacacttttggtccaatttgcttaaggcaatgaggggaaaaagtgaagaaaggatg

SEQ ID NO: 98591 - DNA, 153 bp, Heterodera glycines
ggttaacttaaaaatggggaggagaatttgaatttttataaaacgaatttttaaggttgcttgggtgaccaaggccggaaactccgacttggccgttccaattgccattcggccgaccagtgaaacggtgatgtacccaacctttgccaaatg

SEQ ID NO: 98592 - DNA, 52 bp, Heterodera glycines
tagttgcacttatagcggaaaacaaagtaatgaataccattagaaaaatatg

SEQ ID NO: 98593 - DNA, 539 bp, Heterodera glycines
atattcccgaagtttccccatttttcatttcctttcaggtgtgttttagaattttccctccctgtccaaatctcatatataaacccgaatatttccctttagaatcgctctcgaaaaatcattattccatcctttgattgtgcgctattccgacaaataaactacttcttgtctaagaagttttttgttccgaaggtgttcctttttctctacggtttcgacattcccggaactcagagttccgtgtttgcatttgtctaagctcgattgtcccgaagtccaccaggacagttcaactaagtctaaaggggctgtccatcccacaagtccattccaagagtgaaaaccccgtcccattcgctaagttcaataacattgtcgcggagcgtgtgcaaaccgacagccgaagcgcaaccgaccagtccagcaaacccgcacctcactcgcttcctcgacaagtggcgctcctgggaacgcgataactggcgctcctgtaaaacgaccacacaacaagtggacctcccgaaaagaccatcatg

SEQ ID NO: 98594 - DNA, 857 bp, Heterodera glycines
ggcggggaattatatggatataaatcgcaaaatatggccataaaatatcgaccaaaaatcgcgaaatatggacataaaatggcaaaaatatggacataaattttttaaattgagggtataatttcccaaaatttctttaaatttgttaatatagcccttcaaaaatggctaaatatggtattaaaaatcattttagaagaaaaaaacatgataaaactaaaatttactcatttttagcgaaaaatcaaccagaaaagtgaaattttatcttttttgcttatttttgacataaacttattaatttttatgaaaatttaaatttattcaatattcccgagaaaatttggcgaaaaaatgattttttggaaaattttccggtttttgggctcaaaaaggccaatttagctactgggggccgttctaatagaggttttttggaaaaatgccaaaatatggacataaaatatgtatggataaaaatgccataatatggacaaatatggacataaatcgcgaaatatggaaaatattgatatggaactccatcctagaagcttcaaaccaagctaaaaacatgtttttcgtgcatttcaggcccccacagtccaggaaaaaaaatatggatttccatataattccccgccctaatttttacactcctatgagactttataaagcctattttccattccggaccttttgtcactattttggcatttttcctcattaattatgttaatatttcgagatttttcataactaaaaattgcgaccttttatttagataagcaaagtcaaaaggattttaaatgggaagcgattctttggagttctccaatatttttcaggaagagatg

SEQ ID NO: 98595 - DNA, 161 bp, Heterodera glycines
attttatttgtcttacaatggatcgaaaaaagatttaaattcttcaaaaatgtcgtgaacacaaatttttggatacaatgacagcgaaaacgaagggaattctgagcaccacgaataaaacgccaaaatgatggatgtgacgataattttgaagaagaatg

SEQ ID NO: 98596 - DNA, 418 bp, Heterodera glycines
aactaagaacccagcaggactcaagttatttgtccttgaaaacaccaaggatgtccttgcgatacacttttatccttgaaattcgtaaaaggatggatcttgcagatcatcatttcatatttcttttccattttctttgatatttgttgacttttttcgtttgaaacagctaataacaaatcacggctaatttttgattgttggcaaattgattttagctgaattgtcgtcaaataatttgcattgattttttttattggatgtatgaagacgcaattttttttttatattaattttatgaaaaacataaaaatattatagaattttattaattccaaaaaataatacattaattataatattcattaaattatttttataacaattaataaaaaaaaacatctattaagaaagtatg

SEQ ID NO: 98597 - DNA, 51 bp, Heterodera glycines
gagaaaaaaacattctctgtaaaaaataaattaaagaaaataactataatg

SEQ ID NO: 98598 - DNA, 482 bp, Heterodera glycines
aactgttcatggcatttttggggtcgctgatcacgaatcaccgacatttatttcgactaattccgagcccatgattcaaaatccgaacaaaaatgttgaattttttaattttgtctttttgctcaaatttgggttcgggattcagaattcggtaatcaaaattggttttgcctcgtgttgtcaccgacgccgaaaatatgttttcaacgaatagaaatcgtattaaaaatgttttcaaatcagggtcccctatggttttaataattttcaaatttaattattttatttcttgcgccgatacaaagtgacaacatgcctcattaattatcaatttaatgtttaacctaattattcaccatatttgtacaatttaattcctccaatagaacaccccgctctctcaattagtgataaagaaagcttgcaaaattaattcggctttttaaaaatatttgaatttggcatcttttcagtacggcatg

SEQ ID NO: 98599 - DNA, 441 bp, Heterodera glycines
caaaaatgtacgacctgtgactaagcgacaacgccaccggtaaggacgagtacaagatcaaattgcgagggatcacgcaggacttggggcaatcacgaataactgacaaagaaatttgtatgatgaatacccctggcgcatgtattcgtctgtacacaccttccctcgatatgaaccttctctcagacgaagagcacgatcccgaaattattccataacctccccccccccctcctacgcccttggtttggatgaggagattatgcttaactaacaacaaggcactgttatttttgtgacaaatttcagtttattattttttcaataataaatttttaattaaaattgattaaattttcagaatatttaaaatgcccaaaattttgctaggcccaagacttggccattgcccactatgtgtccgccaattttggcaaaatg

SEQ ID NO: 98600 - DNA, 163 bp, Heterodera glycines
atttttcttacatatttatgtacatatttggaccactttttgtacatatttttggcagccataattataaacatgttaataagggggaataaattttattttaataaaaaatcaaactaattttttctttaattgatttgtaggttcataattttttaaaatg

SEQ ID NO: 98601 - DNA, 438 bp, Heterodera glycines
tttatttggtcattaaatgttggccaattaattaatcggctgacaatttctggcaattttcttggatgggtatatggggagcaggatgaaaggtcgccgccgaagcatctccaggacaaaatgttgtcgcagttttttttcaaaaatataaaaaaaatatgtcaaaaatttttttgttacctagcctaattctaaaaatttttattaagaaaattgaacgaaataaaaaatttattttttctggaaattcagcaaattttgttttcggtaacactaggttttcaacaaaaaggttttaacaatttaattaatttattttttgtgatgtttatgccggcgacgttttggggtgttcccgggtctatgacatgacaattatttcttgtttttgcttattttagtgaggacaaaatttgggacgatttggatgacgcgatg

SEQ ID NO: 98602 - DNA, 70 bp, Heterodera glycines
acgattttatttttattttttggtcaggccattgaatttctggagaagtcaatgatcattttgaacaatg

SEQ ID NO: 98603 - DNA, 489 bp, Heterodera glycines
aatcactctgatgctgatgattgaaaaataaatgattttggacacatgtatcaattgttctatcgattgttaattattctgcaatgtgcttatgttggataaaatcatcagaatattataatgataacaatcttaatgttgatttatttgttgtaatattccggtccactatcttaaactccgttccgtaaaaagagaattgcggcgctctaaacattcgtacggttccgatgatattttgggacaacgtatccccccaaatagcttaataattaaattttcaaaagattttgaccagcatcaaaagtaaattgacaggaattcgaaattatttctccacttaaaattgagtttttcatcgattgaatgtttgggggtcattcctttgcacttgactgtaagaaagaatgagcttatccgctggcatctctcaacacctttgtcggtgtctcagccaagtcggctctgagtcaactgaacagtggaatg

SEQ ID NO: 98604 - DNA, 256 bp, Heterodera glycines
tttttgaaaaactagcgtaggaatcctacgctgactaatgacctagcgtaggattcctacactagcctttcctacactaggctaatgtagttatcctactcgagctcaaagtctataaaagggagtggaaaatcgcttcctcggatcatttttgaaaaacctagcgtaggattcctacgctgactaatgacctagcgtaggattcctacactagccattgggattgtggtgaaccaagcaagacctgccccttatg

SEQ ID NO: 98605 - DNA, 414 bp, Heterodera glycines
ttgaaaaatttcaatgaaatttccaaaaaaaaaaaaacctgacaagaaattttaggggctggcgggatgcattaagggcgactaagatgtttcgaatgggtcagacggtaaaaagagatcggaaatcaaatctgttaatggtcaataaatttgactattttttgcttttcaaaaatgcttttttttcggcgcctattttttcaaaaactaggaacaaaggggtccgcctatgcagataggcgccgtctgaatttttttttttgaaaattttatcaattaattaactgattttgaccaaaaaatgaccaaatgtcacaccttttgactcaattctacaggattaatgtcgatccagtggtgttgataagcgccgccaggaaatttttttgcaaattctaggtgaaatttgagatg

SEQ ID NO: 98606 - DNA, 303 bp, Heterodera glycines
cccatggaatttttgattttaattttccgtctaaattagtccgtgatgatgacattccgtgccgatatttcgcacgcgcgggacgaggccaaaatggcacagtgggaaatgcgggtgtacgaattttcgcgccagctcaacaattcgttgattgaggtaattaactgcctagttaattaattgcgggtaattagttaacagtgtaattattcccaattaattaatacacattacgacatttttaaaaatgtgtagttacattaggcgctcgtgttgggcagcgaaattgtcgaccgcgagatg

SEQ ID NO: 98607 - DNA, 225 bp, Heterodera glycines
cgacagatattataattacatttaggcacagatttttcttccgttttattataatatgtaattatttactgtattttctcttaaaattgaccatttcttaaaggaaactgataatttgaaaagccaaccgtaaaattaaattagcaatttctaaaggaaagttttacgacactaattcacattaatccgacaataaaatatcattaacggagaatataaaaaatg

SEQ ID NO: 98608 - DNA, 51 bp, Heterodera glycines
gggattggggagacttatcagaaaaggaagaaaatatcgtttgaaaaaatg

SEQ ID NO: 98609 - DNA, 1003 bp, Heterodera glycines
ttaaattgcacattagtaacaagaatgatagcgatcactccgtttctctcattaccctcctctaaaactgtcagatgccccgggcaaaattagaaaatgaactaggcaaatgctgtaagctagctggatttgtaattgaattcaaattcatgcgagtcagccgattagccgccggagaatttgtgaagttgaatctgcgcgtcgataagtcagactgatcgctatcttcatgttcatttttccttttccttctccatttcttaacaccctgccacctcccccccccctcctcctgcttcggctatcgccaattatggaattctgcttccagctaagggttctgctcccttactcatttgagccggttaaatatttgaattaagtaattaattatgtcaggcagacacataattaaatgaatgttgcgagtttgccggtgccaactggccatgccgattaccatcttaggaattaacttgttgcgattgctaaggtgtgacagcgaaaaatagcgaataaatatgcaaatgaaaaattggatttagaaaaatgtggcaattagccagacgactacaacattgtaatgagtataaaatggtctaataatttcagtcaaattaagcatcaaaattgcattttctgatcagtttttatcagtccaattaaacaatttttaatggtaacccagtcatttacgccgccctcctttcctcgatcatttcggagcacctctgccgatcaaaccaaatcaaaaaatcatccgagctgagcaagttgcggcaactgtatctcagagtgcacgatgctaggggagggcggcggatcgaaacaacgcaacatcccaagatttttggcaaagggcatcgatttcctttaggttatttaaggatataacgaaattaggaatagaattatgttttgtagtttgtaaattttaatcaatttaagcgctctccgttaattgaaaccctaaacatcttaagtgccgttgaccagcgaaatg

SEQ ID NO: 98610 - DNA, 302 bp, Heterodera glycines
ttgctgacccgcaaaccgttgctgggcaatgtataaataaatctatttaaaataaaaataattaatttttttttacacattccctaacccatattatttcttcaatttctaatgttacacattatacaattttagtgattcatttgacttttttaattaatttttgagttttttaaggcataggaccatcagtgccgaacaggcgctgccgaatcaaatttgggaatatttccttgttaaaaaataattctaaccaacttctaattacaaattacttctttacataacaggtgatgcgaatg

SEQ ID NO: 98611 - DNA, 1003 bp, Heterodera glycines
attatttttttcgaaaattcctttcaaaataagatatattcattcatttgtctagacaattatcctaaaaagagtgagcggaatttccgagcttgcgacggcttatgaaaaagtatcatagtgcgccgccgggaagtgttgagtcggaacgactattcagctgcgcaggatttatttttaatgatcttcgaaagaacctatcgcatgaaaatctcgaaaagcttatttttcttcatcataatcttatcctttacaattttgattattgattaaatggaaatttttttgaattatctggaactccttgcaattccccccccccccccattcagtcttcccaaatttgtatgcatcggaattttaattaattttttatataagaaaaaataaaaaaaagtgtaaaaaatggtttaaaaataggaaaaaaatgcgcgaccgcgatctgcgattcgcagtcatttttttgcgcgatccacgatccgcgaccgcggcaaattgaatccgcgatgcgcgaccgcgggatttttctgtgcgcgctccacccctgatgtagactctttcagaaaagaatttaatatttaaagcaaaaaatatttgtcgtttggatattttatttaatattgcaataatttttttttaaatttcattaaaatagtatctatttcattcaaatattcatttattaattattacctataattatgaattagtatcaattaattcaaaataaacatttggaaccatgaaaaataaataatttataattatggaaaaaaatttatgttaaaaattcattggttatttatttcttattaaaaattaatagaaaaactagcttaatcaaaaatattatttatatttccaattaagcaatattttttattttacaggaaatcaattgaaaggcgattttaacatcaataaatagccaaaataataatcaaaaattatattttacaagaaaaaataaaatttattatttttttaatttgtgaagaagatg

SEQ ID NO: 98612 - DNA, 273 bp, Heterodera glycines
tccccgtaattgggttttttgagttttaattccctggcccccccccatttcctttccccaatcgtccaaaatacagtcagtcccccccctttttcttatcccgcccccgggagaggtacgacttggcgctcctgggttgcgacgtaaacccatccttttggacagcgttttaaaggcgctgacgcggacaaaagcatctaactgtgtgataatttcggaaagtctcgactcatatttttcaggtttttgtaccattttgcagtaaaatgaatg

SEQ ID NO: 98613 - DNA, 1003 bp, Heterodera glycines
tttttcttgataaaatttttggtttaaaatcagggctcggatcgaaaaattttcaaaatcagaacatcgggcctaaaaaatcagattttggggtcgaaaatcagaacattttgcaaaattgcttcaaatctgttatttttacatttttgtttcacttattatatttttcccctcctattatcgaatttaacaattttgagtggaaataagcatattttaaatcagtgtatttaggatcaaaaaatcagattttaaaaattttttgcggcgcattttccaaaaaattgtaaaatagtgacattatgccataaaatttctaaattatgaggatttaggaaatcagaacaaaataagaacaatagcccaaaatcagaacatttctgataaatcagaacagatccgagccctgtttaaaatgtcaatatttgccaagaattattagaaagtaaatttacttcagttgcaactgccaggaaaaaaatttttttttttacttatttttggctgaaaattatgtcactattttgtcacttttttggcacttttcgtcactattttagtaactattttggaattttcgtcactaaaagttgcatccatatttatgagatatttgaatattttaaagtggtgcaagacttatttgtcactctgtaaaagcatcgtgtgtgagaatttccccactatttataggcaattctataacaacaaataaaggggaggtgctctgatttggtaaaaatggatttggtacaaatgttgaaatgatgagtagtataaaaggaagttggttcatcctttccggccattctattccaaataggcattaattaattcctgcgtattattgcggctgctgttctctgtccgtgccatcatcaaatcaaatcaacgaaagctgagccatcggaagtgtgcacaaatcgactaccaaacgaaactgggcaccacaaaacaacaaaatcatcatcagcagtaaaagtggtgcagaaggaaacgcatg

SEQ ID NO: 98614 - DNA, 59 bp, Heterodera glycines
atgaaaacgaaaaaacaacagttgactcacgtacaattgaaaaaaatggacgaaaaatg

SEQ ID NO: 98615 - DNA, 259 bp, Heterodera glycines
ataattaacaattggatgatgaaacagtggcatttttagaaaaaataattgatgtaaattttcaatttgctttttattttatggctttcgcttctttaaagcagtgataattcgattttatgcatttttatgtgtttttatgatttaacctttcaaaataaaagaataaaacaacaaatacaactgaataaaaggttttcatcaaaaatattttaggcattcatttttgaaaagtattcttatccaaattttataaatg

SEQ ID NO: 98616 - DNA, 343 bp, Heterodera glycines
agattaaaattttgaaaagcctcatttggcaagcaaaaaagcctcattttgactcgaaaagcctcatttctacaaatttattcaaaacacatttaaaatgttcaaatcttatatttttgattgtccatgaccaattttagcagttttttgctagctttttgtgaaattctgagcatgaaaaatcgaagttgatttttgcagcgctttttccaattttttgggggaacaggggggtccggttagcagattttcattaaaaatttcagccgtcaatttgccgccctcggcggtgccaaacgcgagcattttggacaaaattgtgccaaagccgggccaacgcatg

SEQ ID NO: 98617 - DNA, 190 bp, Heterodera glycines
tcctgacaaaaacggctctaatattgctgagatgacagcgaaatttcagcgcttaaaaaacgcaaacgatgagctcaagaaagagctgcttaaaccgaaggcaattttattttaagcacataagcagggcaccctttaaatttgttattgaaaccattttaagtacaaagtttcgttttttctcgaaatg

SEQ ID NO: 98618 - DNA, 784 bp, Heterodera glycines
actcattgtattattttaattaactgatcagaaatgaagaagtgtattaaacaattattcaaatatatgcaagtaaaattcaatgtgtttatttgtgcatatttaaaagtagaaataagccaattatttaattttatttttttaccatgtgcaaatacaactcgaattataaattttttcattatgttgtattataaattgaaaaaattatgccttcaaataatttttaaataattattttttctgctattaagcaaagaaaaaatattcaaacaattcgtaaattagttttttattaattaattataatttttatatatattattttcagctattaacacacatatatatatatatatatatatatatatatatatatatatatatatatatatatatatatatatatatatatatatatatatatatatatatatatatatgagctggaatcgtttgctgctgctctcttttaaaatgatctatattttaaatttattttataaataattattttaaatgaaaaaaattgattaacctttctattaaataaataaatcgaaaagaatttagaagaatcaatattaataaaaatgaattaaaaaaataataaaattttaacatgtgatgccagaaggaacggagtgtgggagaaagtgggataaaggacctgagagaacctctaaaagaggcgcccgtagctcagttggttagagcacggcacggattgctggggtcgtgggttcgagtcccaccgggcgagttaccttttatgttctacatg

SEQ ID NO: 98619 - DNA, 183 bp, Heterodera glycines
tacatttatatgtttttttctaacgtaaacagtttatggcttagggtaatactttttcttttgggtttttctagttgtgtaaacttgtgtatggatgagtggggtttacctcaatagttcttcatcattatcatctccatattatcttgagcaatactccctttttcccaaatcttacaaatg

SEQ ID NO: 98620 - DNA, 404 bp, Heterodera glycines
aaagtatcaaaatagctgtctaaaaatcgttagtaatgaaaaaatgtcactaacaaagatatatttaattcattgattggagtgaatttatcgctttttgaactaaagaaaatttatagagctttttcttttttaagtcactttaaaaaaagaaatagactttttgccatagaactaattgaaactttccaaatttggattcttttaagggtatattttaatttttcattcgtttctcatcaaatctgattaaaaatccccactcttttgtcagattctgcctgttacaattgctacgatttttgtctccccgacttcgccgtccttcggcgacaaaaatacgaagacaaaatgtcattgggaattcgaagactgaactgtttccgattgtttgtgcccgaatg

SEQ ID NO: 98621 - DNA, 412 bp, Heterodera glycines
  unsure (1)..(412): unsure at all n locations
agagaaataaatgggacgagaatggtgacaaanaagtaatatgtaaatgttatttgaccatctgttgtgtctatgtatgttattttttcgtgtcgtttcataatatttctaaataaatatcatatttaatacatcaagtttcaggcacttttcttatttagtggattaagggaaccttttgaattgcaaaagaatcgctgggcacaaaacaaagaaacgccgcctttgatttttttttttcaaaaaaagcatttggtcaattaaacgaaaaaagtgccaaatttaaaattaggtaattgctttttactggccaaaaacaatattgaaaaattgtctttgattattttatgtcatgtgaagttgaactcaatttgtattctttgccgtttgtgtattataacaccagtcaatg

SEQ ID NO: 98622 - DNA, 589 bp, Heterodera glycines
tacttttccattaacatgaaaataaaaaacaatgtgaaaatttatgttgggaattcttaatacaattttattttaaaatttttttccccatttcaaatgtaaaaaaattttttaaacattttcaaaaaatgaaattgaatttttatattttatgcttcatttgggataattaattaatcatcacaattttcttcaacaacaagaaagcgtgtaatttgtgaattaattattttaataataagtctgcacctctatattaaatcatattttcttctcaataacaaaggcgtcaattttatttaattaacggttaaataatatattaaatcacattttcttcttaataacaaaggcgtcaattttatttaattaacggccaaatgttttttactgaattttaaccgaattgtgaaaattttttaattatagcgataatgcgtttgctgtttgttttcaattttacggcgcatattattttggtagttgaagtcatttcctcttttctcgagtcggccgaaaaacgagaattctattctctaattgcaccaattacccaattaagcctattcaaagcctaatcaacccaatg

SEQ ID NO: 98623 - DNA, 217 bp, Heterodera glycines
cctcaaaatgtgcttgtacagctccgtgaacatgtcgaagttggcgccgttttgttgctgcgcattttgcccaattttcgccgagggcaatgcgcgaaaaaggcgcgcattttccttcagcagtagcaactgctcggcgtaagcggtgtacgtgtcgcaaaactgtgccggatgatcacgctgatggacacagcaaaatgcgatgcgtgccaaaatg

SEQ ID NO: 98624 - DNA, 389 bp, Heterodera glycines
tctttaggggtgtatttttcgtattttttcatttttcttgtgaaaatttccaaaaaatggccaaaatatggactaaaaacccaaaaatggcgaaatatggatttattcccgaaaacccccaaaatatggatttatatggactaaaaaccttcaccaaatcaaaaaattttaacgcagaaatgctatttttaagcccctttcttcatagcatatgcgcagaaaaaatatgttaatccatataatttacaaccctaataattaggtatatcattttctatcccgtcattagttagccaagaccctggctttctcgagtccccccccccaatggcaattagtcaaatgaggacaaccattgggcacataaaacatttaaaggtgcaaatatg

SEQ ID NO: 98625 - DNA, 160 bp, Heterodera glycines
  unsure (1)..(160): unsure at all n locations
ttatataaaattgtgaaataaaaattttatataattaagatttgctggatttttcttttttttttnaaaaggttaattaatgcaaaaatctaaaaaagcgcttaaaaaattttaagctaaaaaagaaaatatctaaataaactttcagaacaaataaatg

SEQ ID NO: 98626 - DNA, 68 bp, Heterodera glycines
tccaattattttatgggagaacattcccgcaaattgccaattttatgtgttcggaaatttgcaaaatg

SEQ ID NO: 98627 - DNA, 117 bp, Heterodera glycines
ccttaaatacagtaagaaatttatgaattaattattgcttcgattttcactttattataaatttacgaattttttaatattgttatttaagcaattttattaccctttatagatatg

SEQ ID NO: 98628 - DNA, 337 bp, Heterodera glycines
ggcgcccagatttttcgctttttctgttaataaaaatggtttattgcttttttggaaaaaataaacaaattcaaaaaaaaaccgaaaaatcgaaataaaccgaaaaattttcttcggttttttgatttcggtttttttcgggtttttaaccgaaaccgttcgaccgagaattttttgagtttttcggtttttttcggtttcggttttttttcggtttttaaccgaaaccgttcgaccgaccctcttgtccggtctctagtataaacctaattttgaattttctaggtgaattatacttcaaactacttagaaaaccaaacattttgtttccggtatg

SEQ ID NO: 98629 - DNA, 340 bp, Heterodera glycines
  unsure (1)..(340): unsure at all n locations
aatttaggcaaaacttgttgnacaaggattctagatcgaaatgatcaaactctttaanaataatgatccactgattatgctttggttntaaattgngctcacaatctgtttgaacaggattcagatttaagcataaatccaactaattgctgggcagtacttgatttcgattgggcattgaaaataattagtattcccatcagccatttatcatgatttgaaattgtactattctttacaaattctgatcaacattatagactaacaatgaactttaagctgtggcataaaaattaattctagtcaatttaaattaattgcaggcaaattgccccaaatg

SEQ ID NO: 98630 - DNA, 215 bp, Heterodera glycines
ggtgagtttattcaaatataattaaattattaattaaaataaataaatcatttgtgaataaattcagttaaggccaaatctcgggtcgattatgttacttgtgcgtgtgacaatggtcactaggattgaaggtaatcattaaatttataaataaggaaaattgggttttttcaaaaaaaaaattaaaattttatgcaaaatttacagtgtccatg

SEQ ID NO: 98631 - DNA, 260 bp, Heterodera glycines
ttggaagaatttgcagaaaaaatgtaaaaagaaatgaatgagaagggcattctcgtcgtcgttgacggcatatgtttgctcttctccgttcgcgtctcgatctactcacaatatttattacgctgataagaaaaaggggccatctcaaaaaattatgcaaattatataaagctaaaaaaggatgaacggtcggcccggtatataaatggggacaaacaaatttagtttcattttgatcagattttcaaaaaaaaaatatg

SEQ ID NO: 98632 - DNA, 96 bp, Heterodera glycines
tgtgggggagggacctaggggaattcaattttctcgtttcattttaagttcccatgacatttaaaaataattttaaataattttctaggaaaaatg

SEQ ID NO: 98633 - DNA, 523 bp, Heterodera glycines
attttttcccaatttttttcaaaaagcaacaaaaatattggtttaaaaagtttgaaacgaaaatagtgcacaaaaaggggagggatgcttagacgaaaaaaaggaatttttaggatgggacgcacccccatctgatattcgcatttttctgtttcacaactggccaacggtgactgtgctcattgacacgtagttgtccaattaaggtacttggactttccacagtaaaatgtggtgcaaattttggaactgtcccgcctcacggcggggcttaaaagcatttgtagctcaataaaagttttttgttttgaatttttcacaatttatttaaaaaagccaaaaaatccggatccaattttaaaaacgaaaatagtgcacaaaaaggagccgcctcacggcggggcagcaccaaaagtccacacattttaaaaaggaaacggccgatttcacataattttttcatctttgctaagccaattgaagtccgacgaaaactgtcttaattatttgcctcaataaaatg

SEQ ID NO: 98634 - DNA, 116 bp, Heterodera glycines
cggattccccccccccgaaatttttctctggttacggacctataaaaatgtattatacatatatgcaaactttcgtcttctcattttgtagaatgaacaatttttgctgcgcgatg

SEQ ID NO: 98635 - DNA, 308 bp, Heterodera glycines
ttgttaggccgtttattaggccttattttatttcttaaaatgaatatatcgggatagctgaataaaaaacaagacgaatttcaaaacgctttccaaataaattaaacgattttcttaacaatttcagataattgttgagaaatgtttgttcaaaaataatctgggatttagtctcaaaattaatcacatttatccatcgggaatactcaaggcaattggagtgatttttaaaagtaaaaaaatagaaaagctttaaggaattaatctcaaaattttatctggtttaatataattttcttcagggcatg

SEQ ID NO: 98636 - DNA, 737 bp, Heterodera glycines
tttttgggcaagatttgttaataaattgtaaatttccaaaaatctttccggacttttttaaaaagcacgacaaagaaaagcagactagaaaaaaagccggagaaaaatttggaactcccgcccttgtctcaatcatccccgtcctatggtccttgacctaagtcgcccgttgtaaagaaaattagccaaatttttttggaccccaccctccccactttcatgtatggtcagggattgcggacttggaccccgtaaatcccgcgcgagaccttttggcatgcatttaaaaataatttttacatttttttaccaacccaaatatttttttttattttgaaccaaacccaaaaatctttgtatcattcgaaagcctttgacatgcactattagccttacaaaaaatacaaaaattttcaggttgaatttgtttaacgacaaaaaaagttaaattcaaaaaatttggtctggtgcgccgaaacgttacagaatcaaatatttggcatccttattgaaatttttaaaaatttataaagacagaatgccaaaaaattttgtcataaaaatagacatttttacgtgcaaaaatatccaagcatggaagccgaaatacatgcacatactttgtatccaagtacggatcacaaccttggattataacaaatgctttagttttttttatagcttttcatggatttcgaattttgattttttaaatgtttacatattgtctgtcaatg

SEQ ID NO: 98637 - DNA, 547 bp, Heterodera glycines
ccccccccccgcccttcatcagaacacttcaaaaaacaaatttttttttttaataaaaaaatttgactagaccaatcgaaagctaacggtcgacctaatggaaaaaaatccccgaaggcgagaatttaattaattccattccttcgggggtccgtgccgggtgccgcggggtaagcagtgctggtttcgtttcatcacggcccccatccttttgactagtcagccagcgttgcttaacttgtcagatcggacgggtacgcatgattccaattttccaagcaccccaccgaaagtagaacgaaataaccaaaatataaggaaaatattttaaaaagatgttattcatctcccttttgatagaaaaagcatcagagagccttatttaacttttaattaacatttggtgcgtttcagagcacgttctaaaaaatatttatgaattaattttgcaaaataataaataattaatgaaaaagtcagaatttcgaaaaattttaaaaacaacaagcgttggcattttttcaggttaagttagtcctttacaatg

SEQ ID NO: 98638 - DNA, 289 bp, Heterodera glycines
ttttgttgaggggaaatgatttagacagttttcgtcagatttcaattggcttagcaaagatgaaaaattatgtgaaatcggccgtttcttttttttaaatgtgtgggcttttgttgaatggcactttttcccggatggtttatgggtctctgatcgcgaaacagatacatatccattttgaccaattctaatccccaaaacacgaaatgtaatttttgactcgattcattaatacaaaaacatcctacagaccaaaagaaaattaaaggggaatggaaaatgaaaaatg

SEQ ID NO: 98639 - DNA, 808 bp, Heterodera glycines
ggaactttatacaaattttaaaaaagtaatattttgtatatgcatttaatcaaatttctactttctttataaatgttagctaattagtcagcgtctatttattttctgtaaaaatttgcctctttatttaaaattaaattatatataatttcatgaaataagacactaaatgtatagagaatgaattaacgtggtcgattggaataaatggacaaaaaagcaaagtcaaagacaaaaccttaaagcactagtcgattggaataaatggacaaaaaagcaaagtcaaagacaaaaccttaaagcactagtcgattggaataaatggacaaaaagtcaaagacaaaaccttaaagcaataggcgattggaataaatggacaaaaaagcaaagtcaaagacaaaaccttaaagcaataggcgattggaataaatggacaaaaaggtcaaagacaaaaccttaaagcactaggcgattggaataaatggacaaaaaagcaaagtcaaagacaaaaccttaaagcaataggcgattggaataaatggacaaaaaagcaaagtcaagaacttatcctacctaatttcatggtggcaacgaggcatttgactcccttaagagagccttccttctcatgtacttgtacctaaaatgttgttggcacaaaaagtaaagggggaaaaagaagacaaatcatccgatcaaaggctaagtctcaacagatcgcagtgtaaaagctgctctactgctaacaaccccctgaccagtagtcaagtcgtatacaagtgattttgcgccccgacgttccaccatg

SEQ ID NO: 98640 - DNA, 284 bp, Heterodera glycines
ttctcacaccctccgattggcactcacaaaatcaaactccaaattggaaaaaaggagcccggccattgcaaaaactttcgaaacttaaagggaggaaaagctgtaactcaaccaaatatatttccaattatctttagacgcttcgttaaataataatagttttttgttaggaaaatcacaaaacttatcacaataaggcttcacaagaattcaatgatttggcctattgtatattaatattattcttttattattttaggtcattggtaaactgttgaataatg

SEQ ID NO: 98641 - DNA, 904 bp, Heterodera glycines
ggtaacaaagtggaaaaccaaaataaacagatcaaccaaaaataaaattctcagttttaataatatttttgaatgctaaatagaaaaaaaattaattggttcgtattaattagggcgaggattttagtttttaatttttctgaaaaattaattggttcgtattaattagggcgaggattttagtttttaatttttctgcgggtttttgcctattaaaatatgatagcaccaaagtaggcggtttggagtggccgtggaaaatatattttttggaaaaaaaaatttttatttgtctgaggctaggacaaatgaagaaggggactcattcttcctctagctgtgctccgtgataaataaacaaaattggatagaacagaaaacgaaattgttcaaatcttcaaaaaaaaatccgtctttttgcatgttactaattagtgcccctaattaaagaaagccccccccccccaaaaaatctttcaaatacccgttcttcagtttcattttaattgcattttataaatttaaatattgttttcgaaaggtaaaaacattttctaattaggtatgtaaattattttgaatttttggatgagtggagagagaaagagggcgataaaacgaatggacacttaattaccccaaaatgtaatttatccaacacaatagaatagtgaaagcgctgaatacacatatataatgagatggtatatagcagccatctgcctgctggacaaaaaaaagggaaaaactgattttggcgggccaattaaatttggaccacccaaaaatgaacgaattcaaaatccaatcctatcagcagtagcagcaggtgtcaaatagttcgattaaacttgaatgaatttaaaagtcattacacatttttagcaaaattttggcgaccatg

SEQ ID NO: 98642 - DNA, 260 bp, Heterodera glycines
tttcaatcaacggaaagcttgtgaaaattgaaattaaatgggaataaatgggaaacccgagacgaattaatgcggtggtggtgttggcgaaacgcccacataaaacacaattttttaaaacaattagccacgagaatgggcccaaaaaacggaacggcacgccgacggggcacggcacttgttgttaattatgttgaattggtgcagctgctgttgctgttaccataccaacacaaaggaaaagccgccccgaagcaatg

SEQ ID NO: 98643 - DNA, 179 bp, Heterodera glycines
attttttgattgggtttctctaggttatgtggcttggttaccccggcacttcgggcgcccctttcatggattacatcataaccgatgagactacttcgcccattgagcttgcttatgcatacagcgaaaaattggcctatatgccacacacttttttcatcggtgaccactcacaaatg

SEQ ID NO: 98644 - DNA, 110 bp, Heterodera glycines
tggaatttgtcagccaagaattgatggacaaacgcaacgtcttggagatgaaagtgcgtgcaaataacagaaacaaattcgattgggacacacttatcaaatacaacatg

SEQ ID NO: 98645 - DNA, 94 bp, Heterodera glycines
tttttgtttttttgtgcacacaacctattgtcagacgcataactatttcccatttttagcttttttacatttcccaaatgccccaccaaaaatg

SEQ ID NO: 98646 - DNA, 347 bp, Heterodera glycines
  unsure (1)..(347): unsure at all n locations
attgagagaatgagttgagagaaatgaagagcganagttgagaccaaattgatgaaacaatacaaagattgatgaattctgaattattattttttcttacatgattttcttcgcatgatttaatttgttaacaatgctaaatcaataaattaaaaatggaaaataaattgacaaattggcttaatgttagttgcctccggtcccctcctcttccccctttgtatttttctctggttatctcccttgttgacgcactatttcactgcccccaaagtgtataaatagcgcgagttttcgtctgccaccctcacttttcaaaccattcgaaaaaaattcaacaaaaaatg

SEQ ID NO: 98647 - DNA, 759 bp, Heterodera glycines
aaaggaataaattttaattgacttgtctaatttgataattagttttttaatgattgattcttatttaaaaaaaaacttaaacacacggaaatatttccacaaataatccttctatttaattgtatataaatattacgaaaattgtccattttaaaataaattatttgtgaatattttttttcgtaccacttgacggatttaagctaatttaaaaatgcgctagcattctctttaagttaaatattaatttttataattttcacatgcagcaaatttcgacattaagcaattttaaaacgccaccttaaatctaatcattggcgcttcgaaaagcctcaactttcaaaacccgatacaaaacttaaaccttagacgcgagaatctcgagcacattttatttaatcaaagtattattccatctatggtttttgacatttcatttatttatttgccgaatttagtcaaccaaaaccgaacgtgggcatattttgtacagctcataaaaaggccaatttctcctttctccaacaaatcaacatgttttttcttctccttcgatgttattttatttgccattttcagcaaatcatccaaagattgcgcaattaccaaaattgcccattcggaaataaaaaattcaatcccaaaaactggtcgagagcgcgcggccaccaaagaccgaccggcaacgagcaaacaatgaaaacaattaaacgccttttaagggtccaattccgaaaataatttcttgaaaaaatg

SEQ ID NO: 98648 - DNA, 316 bp, Heterodera glycines
tttctttggcaagttcgagattttcaccttaaaaactcaatttcatgataaattaaaaaatggataattataagttaagttctgagtccaaaaaatgttaattatataaaattattgatataaaaatcaattcttaagaaaatgaatctaatgattccttactttctgcaaatcaccaaaattaatttccattttcacgattcctcaaattaggtaaaaaattacaaatatttaaagtcaggatttattataagaatactcacgacgctttaaaaaatgaatcgaaatcgttaccttcgcgatttttttaagcatg

SEQ ID NO: 98649 - DNA, 803 bp, Heterodera glycines
tttttttggaaaaagcacgccgcaaaaaaaacatttttattgattttttaaatttgaatatatttcttcaaaatgctgatttttgaccccaaatgaagattttttgtcggccaaatgcagattttgaaagttttccgttgaaggccttgtttttacgctaataaaatattgttttaagtcgatttttcatgtttttattacgtttcattcgcgctactatcagttttagaaaaaatcttatttttggggtccgagtcttagttttagcctcatctgtccttattttgaaaaaaaaaacttgcgaaccctgcttgtattttattttccttttcgcaacgtccctgcttcctctcccacttctcccatctcccctcattctttctttttgtctctccttattttattccgtcttaatctcttccttcacctctcctcccttctctcctctcttcctctctctcatttcctattttttttctctctctctctctcttgctttctttttccagtctgggcctattcagtttggcgcactttgacgctttataacttctcttgcaaacaaataaatttttaatttatatataattcgatagcctaagtgacctctattaccctgtaaataatataggaaacttagggctatgaatgattttaagaattaaaaatttagacgcttcaaagagaagttataaagcgtcaaaatgcggtcctattgaaacggcccatattgaaatgacccgcaccccaaattctgtcctttaagttccatgcccccaattaaaaaatatatagataagatg

SEQ ID NO: 98650 - DNA, 1003 bp, Heterodera glycines
gtttttcccactaaaaatttatgggccaaaaatttcgcgcggataaaacgaaaaatgaaaaacgaatgaatcattcgcccactcaaaggggggggggaagaagtgatcgacggacgcgcaaagtgatcaaaccaaacgatgaataaacatttcttatttatttaagtgtttgtcaaccacaaatcctttaattgttttatttttgtttttaaaaatgtcatcactttttttaattttcgccatttttggcacaattttttgagtcgatgtcgttttttcggggcttagtttaattggcgtgccattaatttcatagccaatcaattaaatttcagtccaattttgaaaaatacgggtcggacttgatacaggtttttactgacccgtagccagtaacccgtacttatccgtacattccaaaaattcgatctccagttcgaattaactccatttttttcaacttcaaaaggaatggctaattaatgctaatggctaataattactcttaattggtccctttctttttcactggtcttttctgatcatagtttctctgtcgtttcgagcttactaatttgtcatgttcaaaaggaatggtttgattaaatggaattagagcctccgctgaattatgaccgcccccctgaaataaagcccccctttcgataaaataatttcaaataaatatttattttcgtttttaaaatatatttccatttttaattttaattttggttgaccaaaacttttcctgtaaacaatcatcccaatgttttcttctgttccgatcacttcttccattttctaattttcctttactaatcgaatttcgcgcttcgttccctccaaatttcaacttttgtttttcgtctgtcaccaaaatcagcgcccttttcttctctttttcgtgcgttgttttaacccactaaatttttacacttttttttgtcgcacgtcgaaacgccaaaaggcgacacaaattgcccccaggggcctggcgatg

SEQ ID NO: 98651 - DNA, 506 bp, Heterodera glycines
attgtcttgggtgaattcgaccaaatgattatggttgattataatcggcacattgtgaccgactcaaagcttggataaaatataaataaataaaaatgaaaaatattattatataatgttaaaatgaataacaccaatacaacaaaacccaacatacaaattttgaattccccagaagagcctaatgaaactcttttacatgtactacttttttcgcattatcttcttgcatttccggtgtttttgcttatttggttcgttttaattcggtggcttaaaagtcacggtcacttaacgcccagcgaggcagagacagtaatgcatgagatgaaaaatatcccccgacacccaccaatatttttcgcaacaaaatgatgcaagattagagaaaactgacagtgaactctctctctctctcttcagtatgaccaaatcgataatgagtcatgctggcggaggattctcaaagcgactcattttttttcatctttcattttacaaaaatg

SEQ ID NO: 98652 - DNA, 120 bp, Heterodera glycines
tgcaggtatttggacgtccaagtgatcaatttcctgcgccgaaatcgccgcctgttcagcaccaacatctcgctgcagttcaaccatctgattacggaatttcgcgcttggcaagcgatg

SEQ ID NO: 98653 - DNA, 165 bp, Heterodera glycines
gaggagctgttttcgggtgcacaaaatgaagagcagcggaggccatggcacaaaaagcagcaaaaagcgaattttcggggccaaaaagacaaagggcggcggcggaaaggaagggggacgagtgggcaaaatggtcgactggtggatgggacgaggagaccaatg

SEQ ID NO: 98654 - DNA, 91 bp, Heterodera glycines
gtccattttcctaaatgtgctcttgctgtgacagaaaaaaagtaacatttggaaatggtaagcccatcaacagtccaagcatggcataatg

SEQ ID NO: 98655 - DNA, 107 bp, Heterodera glycines
cgtcattcgggaaattgtgccggtcattttagtgcaaagaaaatttttcgtcaattatcggaaaaatatttttggcctaatatgttcgccgactgcgttaagacatg

SEQ ID NO: 98656 - DNA, 687 bp, Heterodera glycines
cgggaatagcttccctatagtctgtactttaattctgcgttggagttttgctccccataattgtttgagtaccccaaacggacacttgaaaaaatcgatttttttgttttcggggcagtccccccgaaccgatgcgcccagatttatggggagaccgaatccttcgggaatagcttccctatagtctgtactttaattctgcgttggatttttgctccccataattgtttgagtaccccaaacggacacttgaaaaaatcgatttttttatttcataaatattttttcagaaaatgctctgaaacgcaccaaattttatttacatgttagtttaggcactctgatgctttttctatcaaaaagggagatgaataaaatttttaaaaatttttaattcctttttaaacaggccaaaaagtttaggcttaacttttttttcagaaactgatcagaagcgccccaaactttgcagggatactgaaaggaaaagaattaacctgttttatcacattagcttgtcatcagtttttataaaaaattttcaaaattctgcgtctcctattattttatttttttttcaaaattttgaagggcggggggggggggcggttgggcaggaaaaggccaattttgccaaatcggatggccaaaaaggtgacaacataagtgatgcaactctgaataatg

SEQ ID NO: 98657 - DNA, 283 bp, Heterodera glycines
ttccataagtggtcattttgcctttgtctcatcaatttcaaaattcccctccttttcagtgtatttgtcctccctcggcgtttgctgtgccgcgttgactgttcagtacgctctgctcaccttgtccctgttagacgtgttcagctccgcctggtcccccactcagttcatcttctggaccggcctcgtccccggctcgctgatccccgccacgcccatttgcgttttctttctgtccgccgatcggctgctgatcattctgctgccgtcaatttacaacatg

SEQ ID NO: 98658 - DNA, 64 bp, Heterodera glycines
aggcttttcgggtctatgttttcatacatgtgcatatatgaagaaaaaatcttttataggtatg

SEQ ID NO: 98659 - DNA, 906 bp, Heterodera glycines
agaaatgactggaagaataatagaaagaccaataaacaaaatatactcacttgaagtgaataattccttagaaacaaaaagttatgatgaaaataaaaaagaagaaaatataaaagaaaaggaaatttgtgaagttcaaaagaaaaatacacatcaaatgacaacaagatcaaaaacaagaaattatttattaaaaggaggcataggattacttatgacaatattattaatgagttcaaatttatttggattaacaaacacaaaggaaaataacaaaacaaaaagcatagtcaaattaaaatgcaaagattgtgaaattaaatgcggatcaaaaggaatagaattaaatacacccacaaaaataaataaatttgaaatttgttgtatgggtcattgccgatcaccgacttttagaaataattatctatttgaattaagcaaagaaatattgattacagaacactattgtaccgtaaattactggacaaagaaaggaaaatcttatagaaatgaaattatttgcccaccaatagaaatatgcaaattaattaaatgtttattttgcctagaaaaattggcaaatcctgaatgcatgttgaccgaaacgctcatattaataggaatcggcctaacttgtattatttcttttattatttgcaagcaagttttatcataaagtttatcataaaaatatggtggattattaaaatttgtttttatgggccatatttggcgttaaaatgggtcttgaaccaaaaattagacaaaaaatttaacgatgagatacagaaaagtttattaaatgaatttgaaaaaagagaaaaagaaaaaattcaaaaaagaaaaaacagaagactatatagacttgtaagcattgtaatattactatttttatgtttgacaatg

SEQ ID NO: 98660 - DNA, 485 bp, Heterodera glycines
tggttaagaattttaaaatttagcctaataaaacatttaaaaatttttattatatttaaaatttttgaaaaatttcgactttcgaaaatttttggtgcctcggaattccctccctttcgtcgaagatttccatcttcatcatatgtttgtgtttgcgtctctttttcctttgttttcccaattgtcctttttatctgataaaatattctcccccccccccccccaatttcgccactttccctcattttccctattttttaactttcactcatatttcatttttaaaaaatgggatagctttcacccaataataatttgcaacattttagaaattatataaaaaatatcatctaaaataataaaacatcagatattttgtaacaattagcccaaatttaaagaaagtcgaggcgatttacagaaaattagtgggagagagaaaaggaaagaatttaggcgagaaaacgccaaaacaacaacaaatg

SEQ ID NO: 98661 - DNA, 63 bp, Heterodera glycines
ctttaggttaggatcgaaatttatataaattatgtttaatctgcagagaatttcggaaaaatg

SEQ ID NO: 98662 - DNA, 734 bp, Heterodera glycines
ctgccatttttttgaatcgatgccgaaatgagagacaaaagagaaggaaagaaaatgatttgatggaggaatgccataggcaacaaaagttttttttgaaagagaattggcactttttgggaaagacttagtgagaaagtgtaaaattttccaataattaaatacaaaatattcaaaagcgaaaaagtgaatatttaaaataaattgcagtattatctcaaaataagccgtagagtgaatatttatttatatctatgaaaaattatgaaatatttaaaatgattttttataattagaaagtaattagattatcccatccatttaatactccaaaaaattttttaatttatatacactttacaaatgtttgttctttggctacttaactgtgtactcagttcagttttggccacgaaactcaaagtcattttgtgagaatatttttggtgagtggtttctgaagaagccaccatttgctttttcaagcagcagcaggtcctttcaatgcttaagcatttgggccgagacggagggcggggggcctaatgggcaaaaattcttaataaaatgcaataaatggaaaaatggttcgatcgaattaattcccagtgatcccagtgatatatacactggaccagggatttaacccggtcccgaattaccgtattcccgacttttttgaaggttatactcccgaatttccatattcccgtacaattttggggttagacatg

SEQ ID NO: 98663 - DNA, 362 bp, Heterodera glycines
gttgcgtgaaacaggcggcttttgcccgtggctgcgtgctgttctttcggggatggtgcgtggactagtggtgagagctgcttgtggagcgcttcagctgcgtgtatgctcgtcagggtatgcacttcggttggcgctgaacgaccagtttagaactggcacgaactcggggaatccgactgtctaattaaaacagaggagacggatggtccttgtggacgttgaccgtgtctgatttctgcccagtgctctgaatgttaagccaaggaaacttgattaagcgcgggtaaacggcgggagtaactatgactctcttaaggtagccaaatgcctcgtcggctaaatatagacgcgcacgaatg

SEQ ID NO: 98664 - DNA, 1003 bp, Heterodera glycines
tcatgagaagccagaccgagacaataacttgaaaccaaaaccaatgactgaaacatttcttaagtcgagactaatttgtaaggttaggcgaaacttcgtgaagcggaatatgtgacaaatgaatatgcgacactgtgtcgccaaaagcgacacaaatttcttggaaattttcatttattttttaatccttttcatcgatcaattttgcattcgctcgctcgttaattatgagtcatcttctctcttcctcatatttttatggatttttttccatttgtttgtgcacatttttcacgtgcctggccccgcccccattgatttgtgagggtataaaagcccggcccattctccattttcctcacttcttgcttcttgcttcttacttctcacttcttgattcacttcatcttgtgagatttctacaagcacttctgcttgatcagcattaagtcgggacagttttctgtccaagcatttgcattaaattgtaattgtgcaattgaattgaataaagattaagaaagagtcttagtcttatcattttctgtaaaagggacacccaggagccctttaatacagaccattaagccgttgacccccgttgggtcacaaaaggcttatcaaaggaaaggagaaggatttctccttccaaattgtcccttcgtttaaaggagaggaatttcctcctttaatttgtccctttggacattcagtgaatttctgtcttttggacagaaattcgctttgcttaaaagactccccccttctgccgggagagtctgcttccccttctgccgggaagtgcaaatttttgtggccttttgcccacaaaattggagccccgtaggggtcggcttccagtcgtaagcctaccctccaaccaaaccaatccaaagcgcggccttagcgcttggatcaaacacacaacccaaaggggtttattgtgttttcattaagcgtaagagcaatgagtgagctcttgcgcatctccattgcaccaatg

SEQ ID NO: 98665 - DNA, 203 bp, Heterodera glycines
ttcccttttccgaatgattcggtttcgattggtaaattaaaatggataatccccccgctccccatcggttcggttcgatttaatcgtcgtctcattttccaaagaatgtttatgaattgtacgaggatgagcaagtgcattaccaaaaggagcaggacttgaaggaggaggaggagctattcgaccggcagaagaacagaatg

SEQ ID NO: 98666 - DNA, 275 bp, Heterodera glycines
aataatcaaagatggatgggattgacaatcagtgtgacaactgtcatatttattttcattctttgcagtttgtaccaccattatttgttttattggtaaatgttagaaattgttcaattgcttttattatttggtaacctccattttcaaataacaaagaatcttatatgaagtgatgaattgtttcaattcaattttggggtttaaataggtagccaaagcctgattctgattctaatttccaattttcgaatacattcctttcttcagtgatg

SEQ ID NO: 98667 - DNA, 477 bp, Heterodera glycines
ttccccttggaatttgtcattgtaatattcgggatggctaaacctttagttgtatttagttttcaggttcgctaacacaaaattggcactattctgtctaatttcaaaccggacccgaaatcgaacaacaaaaaacttactttcctttaagcacaccttatcgtgtgcttgtttaaaagtgtttgattttaattaagggagacacttttggtttggaattttttttgattacactttgtcttaaaaattgttgtcggttttttcgggtcgctgatcagtgacatcaattttgactagttccgaatccctaatctaactgaacaaaatttgaattttcaaattttcgggtttgggatataagaaattgtcaaacaaaagggcccctttggttttttaagtaaaaaaactacttttaagagacctttttggttgtttttccatttaaattatttgctttagaccgcaaaaaacattatg

SEQ ID NO: 98668 - DNA, 1003 bp, Heterodera glycines
tcttactatacctgcaatctttgtattaatggaatatacatattgaaatttaaaattttcttagataacacattgccaaaaacttttgctgaagagccattacaaagaaaacggcgagcaccagaaaaatatgggacaggaaagaataagcaggcgcaaaaggacaagtaattagtaggggtgccaaaaatatgtacaaaatatgtaagaaaaatcgcgaaatatgtacaaaaaaccacaaataccgaaaatggaaaaatttttcaaaatattaaaaaattcaaaattttgaaacgcaaaatatcatatttctatttcaacattttgggcttttataaatttctttgtaaatattttggcatttttcgaatttttcatgtaaaatttcagaaactttttaacaaaaatgcaataaaaatgcttttttattgacgcgatgacattttttggagaaatgttcaaaataaatttcaaaaattttccactaaataaatctgtcgaaaaataatctccctgtctccattagtctgaccgtctctaataatctacccctttctgtgggggttgaaaaataatatacctgggcatataaaaagagcaaatacggtatgtatcaaatatgtaaataaaatttttaaaatggttattttttggaaaaaaaatccctcgtaaatgatgaaataggcacaaaatgcaataaaaattacttaaatatgcttagaatcaccttttaatattttaaatcactttttttagtatttttcaggggtacattttcaaaatatgtaaaaaaaaatgaaaaaatgtacaaaaatattttccgaaattttggatttattttttaggattttcaaaaattttcgtaaaaaatccttaaaaatgtaaaaaattaaaatatttaaaaaaaatccaaaatatgaaccaaatatgtaagaaaatctcgaaatattaaaaatattaaataaaaattcccaatttttagtaaaaaaaataaaaagttatg

SEQ ID NO: 98669 - DNA, 1003 bp, Heterodera glycines
attcatcgttcattttatagacaattttcctctttgtaatttagaccaaatgaccaacgaaaaagactctatttggttttattttggcaaaattcacaattcttcttattttacaaatgtgcgatccgcggcgttttttgcgcgatccgcgaccgcggcaaattgaatccgcgatgcgcgatccgcgactgcgggattttttttgcgcgatacgcgatccgcgaccgcggcaaattgaatccgcgatgcgcgatccgcgaccgcgggatttttctgtgcgcgccccacccctgttaggcaggtgtgactgattattaatttgctattcttgtcatttttgaactttttaagtgaaaccccgaagataaatttttgaacagccaattcaaatgcatttcgtaaaaaaaatatcgttaaaattacgaaagtgctctaaattttactggaagatttattttgtttattacgaaattatcaagcaaaaaatctcggaaaggggtagagactatgcacatatttctgaatttttcatcaattttcacaaaattttgcaattataagatactcaatttcgcattaatcatgtccataattttttattaataaacgtaaaattcatatttatttgaaattattaaattaaattatttctttgacaatttacccatttttaattatttcacaaaatttcaaaacatcgcccgccacaaaatgaaaaaaatatttcgaaatgttaaatgtttggaagaaatcgtatttcgaaatttttgcgaaattttgctgaaagataaaccaaacaaaacaaacaagcatttaaatggcgcacattcaaacattgaattcattcattcttttgccatttatagcttaatgcctttttttgtaatttttcatcaaatttaaataaatatttttattttaaaataatatcattattttaaattaaaagaaagtaaatttactacaaaaattgattaatttagcttaaaattcaccaaaaatg

SEQ ID NO: 98670 - DNA, 595 bp, Heterodera glycines
atctttttgcacacggaaattgaatgacaaaaacaggatcttgtatttgaaaaaaaaagaattttttttttaagtttaacaattaaaagagacgattttatttatttatttatttttaaatgaatcggattcaagccgatctttcagtaaaaaaatatacgaaaaattatttttgaaacaaaataattttttatcaataaaacatttatttattctttttttagcataaccatcattttcattctctttttaacacccaaattgctgcttgaattgttaatgatttttttttcctatttccgaattatatttttgccaggaaaaatactttggataaataaatgaacaattaatcatcacttttagcattaaaaagtgaattaatttatagggcaattgatggacagattgttaatgggagaataaatattaatgaaaatggataaaatttctctgaatcacctctgatcagcaaagtgctgcttctattcgtgcattcatttggcttttgcctataccacaaaaataacttctcaactttttggccaggcgatattcactattaaaaaaaattttcattaaatttaaaacaatg

SEQ ID NO: 98671 - DNA, 213 bp, Heterodera glycines
ttctgcgagaggacggcaaaagcaaaggtggcgaatggtaacggcccaaattcgcattgacttttccttatccgtcgtcactgtcatttgtgcctctttttagcccatttgtgcctcgcggatttatgttttacttttcacggcttacccaaaaacgctaaatgaagcgaaatctgtcgcgcttttcccattttatttttatcattgtaaatg

SEQ ID NO: 98672 - DNA, 65 bp, Heterodera glycines
ggcaaagccaaagaccaaagaaaggccaaaaatgattctgataagtttaaggcatgaccaaaatg

SEQ ID NO: 98673 - DNA, 825 bp, Heterodera glycines
tgggggggggggaaaattcctttttcccccccccccccccccccccgcttcgcctccccttttttgggctggctctcttcgtgacctgttttgggggtgtcgggggatggggaggggagggatgcgattgaatgggtggggtccgtccgtgggctataaggggaaaatggttggtgaataataacaatgtgttgttaaagtgtgtggtgctgtgatgggaatgattcagcaacagaagaacgcccctctcccctccccaatcaaaaattgggaattgtttttgtatttttttgtactgattgaattgcatccctttactcagtttatttcagtgtgtgtggtgccccccccccccccattagaagatggcgaatgttttgataatgcattcgcggtgccatttgtttgcattacaaattgcctatttatggcacaccaaaattttgatggcacctttttaatgttgtatgtaaggtgtgcccatttattggtactttttaatagcttatatatggtgtaaaaagaaattttacaccatttcttatgtgacaaattgcgactttatggcatgccattaaatttatggcaatttatttgatgcaaatttcgtcttaaaaataataaattttccctctaaaaatattttttcaatatattagtgatattcttagataagtgtaccaccgctgttttacacatgtatttatttgtaaatgttctttttccattaaatgtcttatgagtatgcgtcttggcattgagaaattatcctatttttctaatatataatttttttttaatttaagcaaaaaaaacaaaataatg

SEQ ID NO: 98674 - DNA, 497 bp, Heterodera glycines
ttctgtgaagacgacactgctctatatataatatagaaatgaaaatagacaatattaacctaaaaaatattaaaatttattttttcttagcatctttagtagagggtgaaaaagattcagccttggatggggtaaataatgtaaatgtgagaaagaaagtttgtcattttttgaaactcctattcatggattttccaagaacttgattttattccataaaatccaatcaatgtgtataaaaaaaaactcaggtccttgtaggcactaaaaacctggattttttgagatatttttaattacctattattgtcagttagatatttagataaaattaggtaattaaatacataatttttttaaactatttaaaatccaagtcgaggccaggtcccacatgggattcttgtccaggctttctcaaaccaccgaattctagttacatacataaaagtttttaagctctttgttcatttattttgtttgaatgcgattctatg

SEQ ID NO: 98675 - DNA, 188 bp, Heterodera glycines
tgtgaaaactttggtttttttagcttaataagtaaaattcaatttttatttttatttttagtctaatggaaatttgtggcatattttaatataagtaacaataagcatttgtctgaatatatcttttcatttcatatgcatttttcttttatcttctgatcagctccaccctagtttgggcaaaaatg

SEQ ID NO: 98676 - DNA, 103 bp, Heterodera glycines
ccttcaaaaggacagctccaaccaaattacggcttcatttgcttctgttcatcaccaatgggtctttggatgagtctttttgggaggtgacgaaccaataatg

SEQ ID NO: 98677 - DNA, 1003 bp, Heterodera glycines
aagaagtggagaaatgtgtgggtgtgctaatctgagatgtgtgtacatgcacccctgtgaaattctgttgctggctgggaaagtttagaaataaaatgggattaggtgaaagagaagcgaaaaatgcgtggtaatacacacagagggaagttgcagcaccagcggcccgctttatactcccaccggctggtcgtacgcgcctttccccacctttctcttcatctcttaaatctctatgcaaacaattttcacttgggctcgattcaatttactctttctcgcattgcttcagatgacaacattattatatccaactgacttatagatcggggaactagagaccgcgctttgtagattaaaaaacaccaaatatgatagccattgtctaattgaccaaaatactacaagaaatggatcaaaaaatggcaaaataatctcatatactatgtgtatgtattgccaaaacattactgtaattaaattttatttttttcacgccatttggattttaagactcactccaaactggctagtagaatgaatttttaaattttccacgtaaagtattaactaattctacataagacagatttaaaagacgacaacaattaatacataatctcactatcgttaacaacttcatcggttctgctagcatttattttcatcgtcttccacacacagtgctacaggctttctcaacaacaaacgactgtaatcgttccttcgacttctcatagtcaggataatctttagctagttaaataatctcgcttccgcagatatcctcctaaaacattgttctcagaacattattccaaaaaaacaaccacggacaaatcacagcaacttgatcatcgtccgcaacacgaaacgcggaagttttcaactttgggtcgaagcagcgctgcaaacgcttcaactacgcctctggctggacttagttaaaacatttatttgatttcgatcatctcaacttttaggttcaccgagtaacacaatg

SEQ ID NO: 98678 - DNA, 555 bp, Heterodera glycines
tttgcctgaaaaattttcaaaaactactttgctttgggtacagtatatgtatgatatactgaaaaaaaaagttaattttaaactttcgatcccgtcgccgaaatgttcaggggaaaaatgcgtaaatttttcttgcacattaaataatgttgatgtgcaataaaattgtcaaaaatcaaatttaaatcgcaaaaaatgccaaaaaaagttcgatctttcattgttgttaatttcaaaagtcaaaacttaaagcgacaaaagaaagaaaagatataaatttaatgaattttttggttaaaaatcagaacaatttgcaaaatagctttatcgactaatcaatttttcgttgaaaaaagcgctgagcagagtgcgatggtgggtgggaaattggttggggtacaactcggagttggcacgacggtccgcgtgggcgtgggtcaggaagacgccgaccaactcgtcactggtcaacacgccggatggcactaacaaaaataggaattttaaaataaatattatttaaaatattgtattgacggacgacctaccaacatg

SEQ ID NO: 98679 - DNA, 100 bp, Heterodera glycines
tgagaaactgaaatatttgttagattatgatacatggcaattaattgtccaaataagatcgcaaaaaacaacaaattttctttcctaattaatcgacatg

SEQ ID NO: 98680 - DNA, 727 bp, Heterodera glycines
tagtagggtcgcaatttttagtgttatactattttttcgattctgatgttactatgagtcactagaaatcactattttggcgttttttcattaaaatattgaaaataattcactattttggcgttttatcactatttttcactatttcgacacttttttggaaaattccttaacaaaaatgcaataaaaccaaaaaatatacccctacgaatcgacctaaaatttttttctaaaataccactaaaattggaaaattttcttaaaaattgttcccccaattttgacaaattttggtttaaaaatgtttaatatttgctaaggaaatagttcaaaggaaaatgtacctcatttgcaactgcaataagtgaataaaaattatttttgcttaattttagactgatcactattcgtcactatttcgtactttttgccactattttgtcacttttttggcatttttccccaccgttttaagttaactattttgagatttttcgtacctaaaagttgcgaccctattaattagtaatatttgattttttaataataaatattgtttcttaaggtgaaaacgctgaattagcttatcatgtgccagcggtgaagccaatatttacggttgacaatggaaatcgtaattcattagtttctgttgtaaaaaatatgagagaaattttgaattttttttttgaaaactgatgaaaataaattacaattttatgaaatg

SEQ ID NO: 98681 - DNA, 1003 bp, Heterodera glycines
aataaacaaataataatagtaattataataaattccaaatttgatcattaaacatcacaaattgttacatagataaaccctagaagtgccacgggaaccgggacctggaagcggacaactgagtaccaaggtcccggttttgaccgggaccgggactagtcccggttttttcccggttttcccagcctaaaattcccggtttttcaaaccgaaaaggtcccggtccagggtctgcccaaaattcccggtccccgtggcactctagaataaacacaagtagttatcccacggtacccgtccgcgtccggtgtgaagtttcacacctttggtgtgaaaccggcaccgtccgtagggtttaggacgtggttttcgcgcacttagcggacggtaattaatctcccaattaaaaccaaaaggtttgggaccaatttttcgcgcacttcttgggggagggggctaccgtaataaaaaatttaaaaaaaaccaaaaggtgtggagccgaattttaagggggttaccgtaatcaattcgaattaaaataaaaagattcggaccaaattgcaaaaatgtaaaaatattaataaaaaataactaataaattataataatttaaatttattgccctcagcaatttttcggcaaatgattatcccccgtttcccattcacagcgtctctttttttgaatgtgttggaggatcaatgatgaagagaatggggataaggggcaacgaagggggggacgaaggggggagggggggggcaaatgagggagagggcagaaggggcacaggattacaaaatcaattaataaacgaagtaaaagtaacatttattttctttacaattatgagtgttttaatgaattattttaattttcatttcaattttcaattattaattttttcccttttgattaaaagacaattcatttccaaacaaattgttcgcttccaaattgttcgcttccaattgttcgcttccaagttttcaacaggatcatg

SEQ ID NO: 98682 - DNA, 163 bp, Heterodera glycines
tacaaaattacccatattttgcccatttccaaatggccttaaagccgtacaacgaatgtgccgaattcaattttccaaatttccaccccctcccactaataaatgttgaaattcgccttagtccggtcacctcgagattgtaacgcatcacggactgctcatg

SEQ ID NO: 98683 - DNA, 977 bp, Heterodera glycines
  unsure (1)..(977): unsure at all n locations
cttcgaattcgccaatcgacttagtgcggatactgattcntggagaaaaaccaatgccagcaaattttctttcataaattttcattcatttaagatttaatgctaatttatgtatttaatgagaagctctcatacataaatttatatttttacacacaagaaatacatctgttaattatataattaaatgagatagggagagaaataagcttatgggagcaaattaagtcactgaacgcaaaaaccggtgaaattatcggcgagtaaataatagacgatgtgataccgggaatttttttggaatttatgatcaagtccccacaacaattctactacagtacacttcatttaccgtctgatgctttgtccgctgatcaacatcataaaaacacaaatttgaaagttaaataaatttcaatgataggaattgtttaagaaataatttatataaatatttttttaaatgtaaatataacatattttaccgcatttaggagagaaagctagagatgagaacatagtgagagaggagagagtgcgataaggaaagaaagtgtgggagaaagcgagagtaagagaaagatttatataaagaataaaaaattaattaagttatgcaatgattttttattaatattatacagagaaaaaaataaatcgttaattttaataaagtgagaagagagtgaggagagatggaaaactaattgatttttttagttgtttaaaaggcaaagcaaaatgataaaaaatccattttaatattttttttacaaaaaactacaactaattgctagggatatttgtaggaatttacatttatttgttgctccaaggctatgtatatgtaggaagaaaggaggccaaaaatagtatctctgtgaacaaatttttggaatatgtgaaagtttttggtgcttttgtggatttttgagaataattcatatttagttatttttaaaaatatagaaaaaatg

SEQ ID NO: 98684 - DNA, 362 bp, Heterodera glycines
  unsure (1)..(362): unsure at all n locations
aaaaaaaaaattttttgatttcgctgttttgncgctaatttcaanaatgatgaaaagtgctttttgtgttgtctgcttttntatcgccacatacagtatggacaanagtataataatagtaatcaaacagtatcacagatttttttttaatcgagataaggttattttaggggttacagggtcggagaatacgattcagatatccatttcgacncaattccgaacccctgacgaacaaaaatcgaaaattcaaattttcatattcgcatttttggtctaaaactggtttaaattttttattgaaacatagatgaataatttagtttgtttcctcacatttaaaccatttcagaccaaaaatg

SEQ ID NO: 98685 - DNA, 156 bp, Heterodera glycines
cggcttttagtaaagaataaaacaaataaatattgtctattttatagtgtaatattgagccaattgtatcaattgattaatagtgacggatcggatagaattacatataaacaattcacattaatatatcaaaatgaaaaaagacaacaaaaaatg

SEQ ID NO: 98686 - DNA, 1003 bp, Heterodera glycines
caatcgagccaattttttttaatactttattttcattcaaatttagaattttgcctgccattgtttattttacattgacgaaaatgccgacactttgatcgaatcggagggatttttgcaaattgaccaaaaaatgttgtgcgaaattttggaatgcgacgaattgcaaatccgtgaagaaatttcaatgtggaatgcagtaaatttttttaaatttaaaaatgttacaaatttatttttaaaataagtccgaatctttttcggactattttataaaattattatattcaccagcctttccatatttacagttttcaactctccctcaaattggcactgtttcggcccgtttcgaagcgctggtggacaaacattttgatgacaggacgattttttttataattccggcaagttttttttgttttttttgtttttttctgttcttttttgtttttgtttttgggttatggtcccaaaagccttaacagccccaaattttcaaaattcttaataaaataaaaatttttggaaattcaagaaagtttatttgtaaaagtgaatagttttttatgtgtttttttgaaggattttatgcgtaaaatatttaatggcctccaagtaggcaagtttttttgtttttttttgtgtgtaaaaatgagaatgtttcaattttttaaattatttttttaggatttttttccaaaaaacgaacttcaattttcagaatatcaaagtggtggacattctaccctttttgaccgtccatatcttaagagaacattttttcttaaaattaaaaaatcttttttttttggaaattttacatttttaatttaattttttggccctttttattcattaaaaaatcttttttttggaaattttacatttttaatttaattttttggccctttttattcaattaagcctaaaaatgcattttctatgaacaaatttacatatttaactaacattttttcaaaatttcagctgggtttgcatg

SEQ ID NO: 98687 - DNA, 808 bp, Heterodera glycines
ttgtttaggcatttctccgtgccaccacttctgcctgctacaaaattcgaattgaactttttgatttaatggaatttgagccatttgaattggtgaacgaacggactaaagaaatgctgatactggagaaagaagccgattatgaacaattcatttgtagtgattggctgttgaaacgatgccaaattggggagacggcggcgattcagtgggagtataaaagtcggcacaatttgaactatgtcaacttttggctttttaaggattgcattgggtgagtttgatgagagaaacagtttttgctttaataattgttggatagtgaataatttgaatttatggcgatctgacttattgactttatttgttatttctatgtccatccgccccctccctcgtccataaaagtggacacctcctcccactttttgttctttcctttcatcattcatttatattttatttcccaatttgccctccgaccgaatcaataaaattatttatttatttctttttctttgtgtgttctaagtggaagaacacaacaaattggcgcagtcagcagccattcttcatcactgaggacaaggacagctgcaaattcaacaaaaaccaatagcacccaggtggtgtgaggtctgctaagaagcagtttaactcaacaaaaaaaccaatagacctaagaagggtgaggttccgcaagaagcggtttttcaacaaattcgtcagcttagcaccaagacggtgtaagcatccaccaggtgtggattttgtggactttttcaacaatttcaattgacggacaatg

SEQ ID NO: 98688 - DNA, 180 bp, Heterodera glycines
aaaaaaatttattaaaattggaatctggagtagagatttactctcgacggtaattatatggaaaaggctcaaaaatgctcgggacagggtcattgacataaaaaatcggatcaacccctaatttttaatttaatttatttagttagaatttttatgtaaaaacctttagacaatccgatg

SEQ ID NO: 98689 - DNA, 157 bp, Heterodera glycines
attgggtcaacaaattcaaggaggtgtggccataatttcggcaaatcactgattttgattgcctctatttttgttttccagcgtttagcaatttctccgtgccaccatttcttctgtcagttacgaaattgattttgctgttcatgtgccgtcaatg

SEQ ID NO: 98690 - DNA, 140 bp, Heterodera glycines
aaataaataataatttttttagcatttttagtgccaaattttttaaaaatagtgaaacattgccaattattcccgagagtgggtttgaaccgaaggacagtcagagcaacatagcgataaaatattttgaatggattatg

SEQ ID NO: 98691 - DNA, 84 bp, Heterodera glycines
tgtgagtttaatggtcatacttgataattgcttcacgccttacccccccccccccagattaaagacaaaggtcatgtgcacatg

SEQ ID NO: 98692 - DNA, 216 bp, Heterodera glycines
atagttagtccttttgttgaatttttagaaattttatccgtcaaatcagcttttggaattttaatgagtaaatcaggaaccgtaaatgacattctatgcttctcttgtttgatacaccggaagaaataatagttagtccttttgttgaatttttagaaattttatccgtcaaatcggcttttggaattttaatgagtaaatcaggaaccgtaaatg

SEQ ID NO: 98693 - DNA, 1003 bp, Heterodera glycines
ttgttttggttacagttgagacacttcgttttttaatttgaatattggcattttgtttatttacgccaaataccaatttttaccgaccatgcctatggctgtactttttctggggccaccaactggaattgtccccaaaattgtgtttatatgagcaccaaatgttaatggagtccaaaaaatgttttttttttcacgttcattcgtttagaattgagcttttactgctaatttgctcaatgtctgccgaatcgttgttggaatttattgccaaattaacgacattgtcaatgacactgacagaggaagaaagcaagaaattggttgaattgacgaagaaatggacagaacaattagacaacatcattgggtaaattaattcaaatgtttgtaattttatggcaatggcaaagttttgtggtttctccgaaaaataaatttaagaagcacatttcctatgctaaaaaatgcgctgatcgcgaatctgagctcggatttcccaatttcggacccgaattcggaccctaacaaaaagaattggattttttccaaaatatgcattaaaaatcaatcaattttgacgaaaattgttcattttttggccttccgctgcctcaactgtaacaccgaccatggcaaataatcggcagtcctcgccgccgcccttctcgtccgccccggtgccgtcgtcgtcaaattctgtccaatcattgccatgtgccaccaccactgccacaaaaaatgccgacccaattgttctgacaccgaagacgacgatgccgacgacgacggcattccctgctgttctgccgatggtcccgcaaaacggattgccaggttttttaaaatatgcacggtctaggctcacattggcaaaaatttacgccgaaaatagacagatttaggcattttgaagggaagggtcccgcaaaacggattgccaggtttattttaataaatgtccatagtctccaaaatgtaatccaaaatttgcatagggatg

SEQ ID NO: 98694 - DNA, 455 bp, Heterodera glycines
ttatgtgtaaataaacaaaaaaatttatcaaaaaaaaaagtttgaaaaaattttcaaaagtggtgactttttaactagcgccgaaatttttttgaagaaattttgaagtgaaaaattttaaaaaattcggtgtgggcggagcacgaacgacatgggaggggaaatgaaatgtttcgcttattttagtcaattttagactaacaataagtagcaagaagagttcggaaatgttttgttccacccaccactttttttgttgttgttgttccaattgggtcctgctgggttcggattcacaattagccaatgtttatgccatattcgtggtcaatgaaccccgaaaatgcgcattataatgagtttttggaacaaaaaattttaatttttttattatgatgctaacaatacaatacaacaaattgcagtgtcttggaatttaccccgcaaaagcaatg

SEQ ID NO: 98695 - DNA, 66 bp, Heterodera glycines
ggttacggtttgcacattgtttaattgcgattggttgaaagtaagtcatatccatttcaggggatg

SEQ ID NO: 98696 - DNA, 68 bp, Heterodera glycines
ataaaaaattaatattttaaggctgttcttggcacgccttttagaaatgttatccaatcgataacatg

SEQ ID NO: 98697 - DNA, 156 bp, Heterodera glycines
  unsure (1)..(156): unsure at all n locations
attttttaatcctnaatttttagtcatttgtttttattacctctgcgtacccgggaagancncgctacngctcatcaatgattgaaaatttatgatttaaagtacaaaactcgaagaaacatcaaagctgattggagagactcatgtttattgatg

SEQ ID NO: 98698 - DNA, 461 bp, Heterodera glycines
gtgattcggcaagcgatcaaccaccatttaaccaattgatcgatttttcactttaaaataaaattttttaatgtttgaaaataggattacaaataaaataggaggaattcataaaaagattaaaaataggtacaacgcatcaaataaaaaattctaaaaaaggatttagaagcatttgaaaaatgtgggtgggcgctcgctctatataaataagtgtgcgtgtccccgtcggcccatttcaatttattcctgtcaaacatttcgccgtcagttttttgtcagcagcatgtcggataaaaaaagcattgtttaagcgtgttatcgcagaggtggacctcactataagcacggtcggcataactttgagcggcccccgtctgtctgttccccgtttcattccgtttgaggaaaacgggcgttgccgcgcatgtaaaggaactgaggctgaggtggacacaatg

SEQ ID NO: 98699 - DNA, 158 bp, Heterodera glycines
taattaaaactcgttgatttttatttgatgaatgttgttgtttatttttgtttttacttcatcttgaatagttttctagtctctttttgtttattgtcaatttacatatttcaatttgtattgtaattgttgcactataaaagactcacttagcgatg

SEQ ID NO: 98700 - DNA, 449 bp, Heterodera glycines
aattatcacttattaaaagttatttttgtaaaggatatttattatatgagctaagaatattttatttaattaaaaattttcatttaaaaattgtttagatggccaacagacggaattttatgccaaaataaacaccgacaaagacatggtaatccaatattatttagttgaagtaccggtaaattaagtgggtggttgttgtattaacaataaaaaaaattatttttattctaaataaattattttttggtctgtaagcttcgagaagcgtttgaacatatttgccttgtccgtttctgactgtttaaaaagtagaaattgcgacaaaaaattataaaaaattaattaactatttttggccatctatcgtaccattcattaccataccaatttgttaattgtctttttttgattcatttgagtctttgccattttcagaggtcaaaatg

SEQ ID NO: 98701 - DNA, 121 bp, Heterodera glycines
agtggggaacattatcatcaaatttagattatgttctgttgcgtaaaaccgagttttaataaaataaatatttttttaagcttttatctttgcttttttgaatttctttcactcaaaaatg

SEQ ID NO: 98702 - DNA, 229 bp, Heterodera glycines
ttttgccaattccctgctccaccgttacgcattttattttctctttagccaattttaagtgctgttccaacaaaatgcccaaattcagttctttgatgacaaattcattggcgagattttcttgaacccgttgagccggtgaagggttgtgaaacaaaagcttaaaacactccgtgctgactttgccgtcatcgttgtcttcgccaattatgtcaatgtaaaaataatg

SEQ ID NO: 98703 - DNA, 1003 bp, Heterodera glycines
tatcatttgaaagcccttcacatgctctattaacctgcaaaatttcgaaaaatttcgttaaggttcaaaaaagttaaggccaaaaaagctgaaaaacccggtttctgatgtacttttggtcataagtttgttgaaaattaacgaaattttttgatattttgtaggctaatagaggatacttagggctattgaatgatgccaagaaagttggatttggttggcaatgaaaaaacttatagttcaaaaactaggctggcgcgaaaacgacccggtacgaaaacgtcctggcccgtgaaatgcgtaccatctttaaaaaaacaaattctgcattaaaaataaacaaaaaaaattgaccaaaaaaaaagtgaaaaaatttcaaaagtttactcattttaaatagcgccaaaatttttattttaaataaaagtgatcaggagagaagaaattgtaattaaatcagtttttattttaatacccttttcttattataagtagagcatgaattgggccatgaaagaaaaagcagcaacaaaaaaacatttgatgaatatttggagaaaaatggaaagaaaaaggagaaaaagaaagtatgaggagaataaaagagaaaaaattagaaaatattagagatcggaattctcaaatttgccgggcagggccgggctgactttttcagaagcaaccgggttccgggcccggcctctcaaaacccggtcaacccggattttcccaaaaatcgccgggccgggttgccgggcccgggaaaacccggtacccggcccggcccggtccggactctagacaatataataaaataaaagaaaaaattaaacaaaatggaagaaaatatttaaaaaaagaatgaaataaaaatagcaaaaatcttagggatggtaattatatttaaaaatggagcaaagaattggggcttaatcaaaagaaattttattaatcaaaaaccgactaacaaaaatttgaaattgtacaaaaattcattgaaatg

SEQ ID NO: 98704 - DNA, 1003 bp, Heterodera glycines
gacccccgcccccatgttccacatttttttgggaaaagcacgccgcgaaaaaagctgttttaaaaataaaaaaggtcggcaatttacatacccgggacccctttacaaatgattcccaaaatgaaccccaaaaatttaaaaagaatggattttacgtcacaaattataattttttcctttcggaaccgccaaaccaagacaatctttttaattttttttaaatgggtttcttaaaggatgagattattgaaatttaatttgaaaattttgaaaattttcgaccagagttcagaatctgccatttttcctatttttgctatttttctcccgcggcccatattttgggattttttgcctcaaaaaacatgcaaagcttttattctgatcataaattactcttaaccaatttttagattggatttttttaaataaaaattttcaaaattaaaaaaaaaatttttttttgaatacggattgcggattacgggaaattgcggggttttttgacccccgcaattgcggattgcggatttccgcaactgagaaaatcgccgcaattgcggatggcggatttccgtaattgaaaatccagttgcgcccagccctgctctaaatggcatataacacacattcatggaaacactaatatttcttgaacatttttgttttatttttaataatgaaatttcaactcaaaccacagtaaaacagtcgttaaaaagaaatttaattaatttttattatgtcacaaaagcaaataatttaattgtaaacaaatttcaagcaaaaaacggataattaaattgcaacttcattaagtgaaacgtactgaaaccaaagtaaaaattagattattaatagaaagagacagttaaactaattctgcaaattgaatttcgaacgttctttcggtagcgtttaaagtaaaaaaaaaaaaaaattccaatcagaaattgtgaattcattttaaaattattggcacaaacaatggcaacaaagaatg

SEQ ID NO: 98705 - DNA, 387 bp, Heterodera glycines
ataaaaagttgttaaaaacaaagattttttttactctaatttttgtgaataaattttagtaaacaacttttgattttttcttaaatttatatttatttattttgtgaatttctctttttctcctttaaaaaattctttggcaaaaaatttcaggccataggaaaattgggttaagataaagaaaaacaaaaaacacacatacccaaaagcaagaagcattgtccatcccattttatcagttaagcaaaagaatttataacaatgattaatgattaataattaataattctaaaatgataaaagtcaattattgtcacagcatttatcacaaaataatggcaataataatattaatgattgacaacaaagacaacttcttaaaaaatg

SEQ ID NO: 98706 - DNA, 1003 bp, Heterodera glycines
tctcttcattttaattatgtaaaaaacaacatttacttttctatgtgtaactttttttctttatgttaaatccgtaccaaattttgcatagcgatagagaaaaaaattctgcatcgattaataaggaaatttaatacaaaaataaggctcactcaaaagttatttggtgaaaaattttgtgaatttctttttctctctttttggcgtactattttcacatctctaacacacaaaaaacatcaaattcgtaaatgctaataattttggttgtaaaggaacaaaatcactttgagcatttagaatcaatagaaaaaagaataaatttagcattttggttagaaagagctgcctaggacttgagttataacatgataaaagtttgaaattccgacaacttttttctgagatgacaaattgttcgggtgatgaccccgagagagacatttaatttattttatttatgtaattccctctctctgtctcccgcactatttctctcatttaattgtgtctgcactccctttgtaaaggtcagacacatcatccctcccccatattgtgacccccgctcatttccaatattcattctgttttcttgttgtattcccacattttcctccgattgtcctccgccccaaatatttatttatttgtttccaataaataattgattatttattggactgtttaagctcggttaggtaagaccgaacaattggcgacgcctctcttcgactcaagccgggttggctgagcatcatcatcaaaagccgagtcggcaatcaacaattttgaaattctaaagccgggttggctatcatcgaatttcttaagccgagtcggccatcatccaatttgaaattctaaagccgggttggctatcatcgaatttcacaaagcctggctggcattcgtcgaaaagcagaaaaccaaaactgcaaaattcttcaaagccgagttggcattcgtcataaattgctgaaagcgaacacaactcaaaatg

SEQ ID NO: 98707 - DNA, 117 bp, Heterodera glycines
  unsure (1)..(117): unsure at all n locations
aaataaaattaagcttttacagagcgcaggtcggttgagtcncgcgcacaanctgagtcnctgttgtgaattttgaactcatttttttgcggggggcgggggtggtactgaaaaatg

SEQ ID NO: 98708 - DNA, 181 bp, Heterodera glycines
tcgatcagatgtgatcagcaacttttcactgaattcccttttaagtggtcttttcggctattctttggactcccaaaattttttgttttgcgaactttggtttgaactttcgcttttatatgggaaaatttggtcgtattttgtggatcatataaaggacgaaaatttaaaagaaaaaatg

SEQ ID NO: 98709 - DNA, 164 bp, Heterodera glycines
  unsure (1)..(164): unsure at all n locations
caacacaacaaaaacaaatacaaacacaaacncaacaacaacaacaaaatcaacaacaaaaacatcatcaacaacagccatcacaaactcaacctacacaaacacaaataacacaacaacatcaacaacaacaacaaattctacgcccaataccgctgaaaatg

SEQ ID NO: 98710 - DNA, 183 bp, Heterodera glycines
  unsure (1)..(183): unsure at all n locations
aattttgagaagtgagatagaaatgataactttcacgattcaaccaaattttcggtgctctaattanccgcgataaaaacattcgaatcaattaaatagcttctgagataataaggtttatcataaaatttcatttaaaaataaaccctcaattattggtatgaacgatactttccaaacatg

SEQ ID NO: 98711 - DNA, 156 bp, Heterodera glycines
gccctaattagagaaaccattttaaattttcttcaataatgaaaattgtacaatttttttggggaaatgcttttgctttttgcccgaattccgctgtgccacttcacaggttgcagcttgaccctaacgacttcactttgcgtttgaccgccgatg

SEQ ID NO: 98712 - DNA, 272 bp, Heterodera glycines
gagcgacttttaaacaattattatgacttgtgaaatttttaaaaaacttttaaatatttctgcttttcaacagaaacattattatgaaaaagcaataaaaaacaaaacaaaaaattgacgttaatttttttcaaaaagcaaaggggtcggggtcactttggcgcgggacattttggcgccgcaaaataggtctaagtgttctctaatagcctgcaagatgctagaaaaatatattcgttttaacaaaagatatggcgtgctgcgccaaaatg

SEQ ID NO: 98713 - DNA, 1003 bp, Heterodera glycines
gaaaagagcaaatactgacactaggaaaaatttcaacgagaaaatacgaaattcatctttttcgagtatattcaagaataatctttgtctattgttattaccccagaatctacttatactcaaaactttaatagacttcaagctttcgtttgtttacaagaatgtaagcattgaccaaagtaagaagaaaatgattggacgcataaaacgaatataatatttaggaataaattatttacattaattgattgaattgattttcccttcgatttttttactcctgacttcacatttctccctgtttaagaatttccaccaatctctcattctctctgtctgcccgaattggacacccatttcgaaccccatacccggattctgaaaaaatcgctcagataagcagggtaaaattgaagaatacttgtacctcaccaaattcgacaaatgatatgtcatccgacgcctctatgtatctaatgcatgaatccgaatgaatttattgatggaaaacatttctggtcgagttatggaccaatcttgaatccgaaagaatttttggacaaaaaaaattgacataagctatggccatcaaaaacctctgaaaatgactgtgataaaaaaataattgttgactgcgtgggcacaaagggcctccgccaatcagtcagccgcctgcggatcacgcgttgacttcttccgtaacgttgttaatttcttttttgaccaaaaattctttcggattcatgcattagagactaataggtgtcgaatgatgtatcattggtcatctgctgaggtacaaatattcttcacttttttcgatatgcagaattcaaacgattttttctatctttttttattaaataaggccagtagaatgtcacattatatttggtagattgtggacattgaggcacaagctctaactggggttcgaattcttttatggaatagatggaaaaataaaataatgcaaaaataataaagtattacagcttttatg

SEQ ID NO: 98714 - DNA, 1003 bp, Heterodera glycines
cgcttgctggggttgtgctgtagagtgtaaggcgtatttaaatgttattttaaatgtaaatagatattttgttttctaaaatttaaataaataaaataaatgcaaatgtgaattttcgcgtggatgtctgcggggagggacgcgagctgggaggagagggctgtaaaatcaattaacgtgtgcgaattgtttatcggtggaaaagtaaaggataagcggaaatggtataatttaggaggtaattaagagcacattggttggtgtttgatcggatagaaagacataggaatggtgtgatgagtgggagtattggaattgattgtggggagggaggtcatttcaaaaattgctcgcacgcctgacagctcgggtcgcatttttgtccaacgtgacggattatttctatcattttttttttctctgtctgatcgcttcccggacgtggacgatgtcctggaaaaggaagacgacgacgacgacgacgaggaacacgaactggcggttccaggccgcgacaactcacaacgcgcttgcacctttcgttcggtgctgatcagtttgtatgctcggcggacgcaatcgcggggcacacgcaacgaggtggaggaggagcacggttggtccgcggccgtcttattagggaaagttttttacatttctagttaaaaaaggggggaggggcaaccgtaagcacaacatcgcacaacggctgaggtgccggggcatcgtcaatcgggacaggcccaatttggagtgccggaggcgcaaattgctgctgctgctgctggtgttgcagatacggttgaaaagcgaactgtagcggaggaagtaccaaaggcattgcgaatggtgggaagacgggcagtggtggcatgcgcatttgcaaagtgctgatcgcctgttggacggcagctgaaagcatcggcggcggttgttggtgctgtgttgccggtacgcaatgtgtcaattgttggtgttgctggtgctgctcctcctcgacatg

SEQ ID NO: 98715 - DNA, 1003 bp, Heterodera glycines
aaacgaatcttttcttcatttttgatcactatcgattcgttctcattgatttgtcgaccttcgagaattagtgccttgtaagtagagaatggcaaatcaacctttttattagtttttgcggggtatcaatttaaatgttgatatttaattaaatcaactaacattacgccatcaacgcaaatatcaatttaatttttaaaatttgcgctaattttttaaaatttatttgagcggcttataattttatggagagagacaacgcaaaaatgagggagtgctgaatttcaattccagtcatacaaacatttttgatcaaggagggtagagaaaataattccaatagagagcgcaatgggaaggtagttcatgtcgggtcgcggcagaaggaccctccgaatagctcatcaattgtttgggcctgaattttaacataacaattaattaactttaaatataatttttaaatttattaaaataattattaaaattaattgtaaaaaaatttaaaaaatatatttattcataaatatttatttcctaaaatattccttccacaaattaattaattttcaaagttaataaagtaaaaattaaataaattataatttttagtaaatttaattaaaaaattaacaattaataaattcaaattaaaataatataaaaattatacttaaatttattcattaaatttaattagaaaaatatttttaatttaaaaataatatttaaatttttgaaaatttctttcgcctttttttaaattttacccttgataatataaaatttatttttacatcctttgccccgaatttgacacaataatccaatttaagtaaaatcaaaagaaattggacacttttcgcgtccgtccgatgtttgcgcgacagaaagacactgacaattgggcggattatccgtcgcaacggattagcgcgattagcgcgtaaatttgcatttttgggggtggattttcgcagccaatttggaaatgggcaaaatg

SEQ ID NO: 98716 - DNA, 402 bp, Heterodera glycines
ggaaatatggtaatggaggaaggggaaatacagtaatagagggaatatcaagggaaatatggtaatggaggaagagggaatacggtaatgggccctatttaaaacgaccagaaatattctgaaaataattttaattatttaagcttccatcgaccaattcacgcagctgcaaaatgaacagaagacacttttggaaaaagtggaacaaatggtgaaagaatgggagaggaagggcaaaatgccaattaagacaatgccaaaaaatgaaaaaatgttttttttataacactttgtcttagactttttgtaattttagtaaagaaaatccaattttcttatatttccttttttgtctctgcgcagggatcgaaaaatgactccgatttggtcaatttaatcatg

SEQ ID NO: 98717 - DNA, 223 bp, Heterodera glycines
ttaattcctagggtgtaacttaagtttccgcacactttttttaaagaatttttttaagaatataaatttaaaaaaccacaatcatgatccgaaatatctgacattattattgagaatgagtttgctatttatcgggcaagggataaatcccattagaaaagtatttaaggagttagagttgataatgtaaaaatggtcattttcgaggtatgtatttttgatg

SEQ ID NO: 98718 - DNA, 817 bp, Heterodera glycines
  unsure (1)..(817): unsure at all n locations
agcagatccagaaaataaataacataccaccataaacctgaaatatttctgtaaaataaagtattactntcaaatgaatgtttcataaattgggcgtgatttttaaaaaattatataaaaagcattattttataaactgtatttatttatgaaaaagaaagttattttgaaatttaggctaattgattcaaaaaatataatatttaataaaacaaaaataaaaactttaacaacgaaaaaaaatgaaaaataatttgaaaggaaacatgttttttagactcaattataataattatgtgaaactctaaacatctaaaaatacagcaaaaagtaaaaaataaatgtacgtgccaaagcttatttgctgaataaatgacattaaactttttatttttagtcgattgttgctcgtctttctttttaaatttatttttaaaaaatttaatattaattgattcggaaattcatttattggtaatttttaaaactttatttttaatgggtaaaatttttttctcactttaaagtcatgtctcgtccaaatagcccaaccttggcttgtattctctgtcatttgttaacgcgtagtttcatttcttaaattaattttctattttttatagtagcgaaagcttttatttaggatatcgaccgcaggaaaattcttgttcttataagtagccaaatttaatttataattaagtagattctttgtcttggaaatatatttgctaacaattacttatcatttataaattcaaaaactcgaatactttaattataaaagtattccagatttatttaaactaaaaagatg

SEQ ID NO: 98719 - DNA, 100 bp, Heterodera glycines; identical to SEQ ID NO: 98679

SEQ ID NO: 98720 - DNA, 404 bp, Heterodera glycines
tctgtaatttataatttaagaaatgagctagtactgatattaagaaacaagaaaccgctaaatgcagcttttatgtaaccgaccccgtttttgggttctttttttgcccccaccccccccccccccctgttcggatttaaacactaagaaataaatgtaacagtcgtagtagcagtagcattagacgtgcataccacctactcaaattatctatttggcgctgccaaaattaaatttcttttcttacggtagtcaatcaaaagattacggttagggtcatttagtgcggtacatttcagtgcgacgtatttttataactttttagtatttcgctcttattgcaaattacaatataacctatgaatttttaaccatttaagtttgcaatttgatttttaaaaatg

SEQ ID NO: 98721 - DNA, 1003 bp, Heterodera glycines
aaaacttacctaagcttgtgttttttcaaaaaacaaaatcagcctggccggagttgcgatttttgcaatcatttagtcacataatcacatcataaagaatttaattggttgatgctcgacaaaaaaagcgtcgtacaacacagagaatgccatcgagactgagatcgccgccacatccagctctcgcatttaaaaaagcatataaatttgaatttgaaagaaaaattaaatactttggctttttgttctattactcgatatcgatttgttttcgatttcatcatcacaactaaacttaggtaatccatttgcatttgccatttggagtaacacgggggtggtgtcctttttggtggtgcgtgatttttcatgtttctttattttccttaattttaaatttacagtttcctaatcaaatattcaatttatacataggtatgtgtgaccttaatggctcgtttttactttatctttatgaaaatgaagatgtatctgttggataaatctgatttatatttgtttatgggtttttgggccgatgggggggggggggctgtggagaagagcgtcaacaaactattagattggagattggacaaaaacatttaaactgaatgggtacaccatttgaattcctttgtttagcctatccatcagcaaaaggggcagcaccaccctgcattctgaatttagagaagtccctctttcaatatcactggttctcctctgtttttttggttccattagatcttcccttatatgcaaaggtggttcagtatccccgtccaacagaatcgatattattatttatttttttccaatctccagtgttaccctttctcttcaaatccattacatttataagtcggtttttttagcaaaaaaagagcaagaatgacttgcacaaaggtcaattagctgttattttaacacattatttagcttttgtattcatttaactgatttgccatttgcctctttaaaattgtgcccataaacgatg

SEQ ID NO: 98722 - DNA, 1003 bp, Heterodera glycines
gaattgttgagaagtgatcgatcaatttgaattatttaattattgacgtgctcataaaaattgttccttttttactgttgttggaatgatcaatcaacctatctgtctgtgtaaatcattaggataaatttagcgatttcctgaaagatttcgaaaaaaccaaggtactgaagtttccaatcgggactcagttatccattatcaatacagtttgcaaaaaaaggcaccaaaaatcgtgaaaatgcactaaaatcccaaaaaaggcatataattttttttattagtgactttagggagcaaaactcgtaaaacttaactaaaaaacttaatttggtcatttaaatgattattaaatattttacctaatacttttttcgaataagtaaaatttataaatctaaattttttatcaagaaaaaaatgaaattttggcaaccactttttgagaaaggttttcaattcttaggggcgtattttttgaaaaattttcaattcataggggcgtattttttgaaattttctcaggtcatttcttagagggtgtatttccccggttttatttcatttttaatggaatttttcggaaaaaacgccaaaaaaggcaccaaaacggcaaaatgccaaaaaaaggcatttaaggcacgaaaatcccgaaaacggcaaaaaaaggcataataaaagtcaacgtagaagcctcaaaccaagtggaaaatgcgttttttatgcttaatatatcggaactagtgcgcagaaaaaaaggcatatgcctcaaaatgcgagctctaattatcaaaaacaaagaagaaaatgaactatgtagagttgagcgggaccgggaccaaaacacgaacaactgagtaccaaagtcccgggtttttcccgggtttcccagccaaaaattcccggtacgcgaccggaattcaattttaggtaattatgcagtttacaggccctttttaacatacattttcaaatgcctataaatctgttttagaaaataatg

SEQ ID NO: 98723 - DNA, 1003 bp, Heterodera glycines
ctgcaaaatttggaaagattatatcgattttagtgcgctaagttcgatgaaactttttaaaatataagcctaaactttttggcctgtttaaaaaggaattaaacatttttaaaatatttattcatctcccttttgatagaaaagcatcagagtgccttaattaattttttttaaataaaaaaatttgactagaccaatcgaaagctaacggtcgacctaatggaaaaaaatccccgaaggagagaatttaattaattccattccttcgggggtccgtgccgggtgccgcggggtaagcagtgctggtttcgtttcatcacggcccccatccttttgactagtcagccagcgttgcttaacttgtcagatcggacgggtacgcatgattccaattttccaagcaccccaccgaaagtagaacgaaataaccaaaatataaggaaaatattttaaaaagatgttattcatctcccttttgatagaaaaagcatcagagagccttatttaacttttaattaacatttggtgcgtttcagagcacgttctaaaaaatatttatgaattaattttgcaaaataataaataattaatgaaaaagtcagaatttcgaaaaattttaaaaacaacaagcgttggcattttttcaggttaagttagtcctttacaatggagaaggcctgcaaaatttggagagattatatcgattttagtgcgctaagttcgatgaaactttttaaaatataagcctaaactttttggcctgtttaaaaaggaattaaaaatttttaaaaattttattcatctcccttttgatagaaaaagcatcagagagccttatttaacttttaattaacatttggtgtgtttcagagcactttctgaaaaaatacttatgaattaattttgcaaaaaataaataattaatgaaaaagtcagaatttcgaaaaattttaaaaacaacaagcgttggcattttttcaggttaagttagtcctttacaatg

SEQ ID NO: 98724 - DNA, 219 bp, Heterodera glycines
aaacatttccgaaataagagcaaaacatgggaaaaaccatgctatacttaaaacccattgcttttttaacgaaaaagaaaccaaaaagcaaaggcttttttccgtacggttaatttcaagaaatcaaccaaaaattttcggcgccgacggaatcagaattattatctatgtttttgtataagatttttcattaaattttccagatctattgaattcatg

SEQ ID NO: 98725 - DNA, 294 bp, Heterodera glycines
tagttgcaaacggcgtcagctcctgctgccccctattttgtagtagtatagaccgccaccagcacacggtcacgcagtgctctctctcctctccttccgctatctgctatacgctctctcttttctctgtctgagctctcactgaaataaatgcagagacgctaaaattgatttaaataaatttaaatttatgtctattgtttccccatttttgttactttactcttctttgatgttctttttttgtgtaggctttaatttgttcatctttaatgttttagattgttttaaatg

SEQ ID NO: 98726 - DNA, 292 bp, Heterodera glycines
cgttaagtcacacaaaaccatttcagagcttgccatatttttatttatttattttaccactttgaattttgttatatttgaatggtatttcttctaaaactcatttatctcttttttattgtttcatcgctttacaatgcccctgatttttgcttcatcttttatcgtgttcgtgaatctcctctctttcgccaattgaaatgtattcggtgatttttattattttaaatttttttttatttaaattcggattttctatcttttaactttacccaaaaagtagcaaaaaatg

SEQ ID NO: 98727 - DNA, 118 bp, Heterodera glycines
aacattaagtttttatttaaattgaaatttcattaaagttttagaagatgtcccggcgaatcgaacattttgttgaccccacaaaatccgacatttactgaatttcggtggtacaatg

SEQ ID NO: 98728 - DNA, 1003 bp, Heterodera glycines
atttttgtatcttttttaaaaatgtgataaaaaggtgaaataaaatttataaaatagggctaaatattgtggatttttgtactatttaacttttcccgaatagcttttcagaaggcagttacgaatttttttctggaaattcgaaaatttccagaaattctggaataacttttttccatttgaagataaaaaatcaaaataaaacccataaaattctgtttatggtaaaaaaaaattcagcctacatccacttaaagtattttcattcaacaatgagaaattcattttaaaataaaaataaggaaatttaagtcttccaattatttagtaaactttcgctcattttttattcataataattggatgttaaattggcgttttgacctttttaattattttcatatttgtactttattctccacgccccaaccctccttattgtgttcataaggagatcattcccctattcccctcctttttgtctcttccctcattcattcgtttttattatatttttgcattgtccaccgaccgatcaataaatatttgtttattctttgtgtgttaattggcaagaacacaacaatttggcgcagtcagcagccaatcttctccaccgaagacactgcaagtcttcgaaaacctatagcacccaggcggtgtgaggtctgctaatatagcagttaaattcaactaaaaaccaaaagacacaattgtggtgaggttccgcaatacgcggttttatcttcaaatcttcaaaaatccttaacactcagcaagtgtagggagccaccaggtgtggttatttggatttcaacaatttaaagcttattctcgatgccgttttggcaaaatccgaaaagcggattcaacaaatgatgagtgcccagcaaagtggtggaacatctgcgagcctaagccatgcaaatttggcgagctcaatcgatggacgaatttcaaaattccattacgactccgagtcgggaaataccttcgagcaatg

SEQ ID NO: 98729 - DNA, 61 bp, Heterodera glycines
tgtgggtttttcaattccattaaatatttttattttttaaatttaagagcaaaaaataatg

SEQ ID NO: 98730 - DNA, 73 bp, Heterodera glycines
tctgtcaacgaaataatggcgaaatatttaaaattaaaagataagataattaaataaataattccagttaatg

SEQ ID NO: 98731 - DNA, 75 bp, Heterodera glycines
ttttgacgatttcgtcgacttcagcaaagtgagtgataaaggcataaatttgtcattcgttttattcttgaaatg

SEQ ID NO: 98732 - DNA, 209 bp, Heterodera glycines
tattgtccaacccctcgggcccatttgcaacaatttaaggcaaacaaaattcaaaagttgtttggataaaatgtgattttcgttagaatttttggttttccgcttttctaattatataaaaataaagtttccaacgcaattaattcttctgttatttgtgtgacatcattcggaactcgtccaaattgtgcttatttctgccaaaaatg

SEQ ID NO: 98733 - DNA, 338 bp, Heterodera glycines
ttcccctcaatgcttttcctaagatcgctccttctgccaagtgtctctcaactttgttcaccgcattaaatttgtgcaggaatcaattcgattcgagtttttgcattgtatgttcgttttttgttttttcaatctttagatggatttttgtttccatttcctataaagtaattgagagatcaaaactaattatgacacattaaaaggaatgggcggggggcgatttttcttaattatcttacgccacttacaattagcacttaggttttaaagttgcttaaaaaacagaaaaattcacctaacttgccctatgttatcattcaatttcttcaggcatg

SEQ ID NO: 98734 - DNA, 61 bp, Heterodera glycines
ttttcacccctctttatttctctctttaaaaaattaaatattatttttaatgatgatgatg

SEQ ID NO: 98735 - DNA, 272 bp, Heterodera glycines
gaacaggcaaaaccaatctcgccaaaaagtatcattttgtcttgcctatttatcgaggttctcgtctcactccctttgttctttttcagttgcattttcctgcccccgtcgttgatccctcgctggacactgctcctccctccgtccgttccaaattcactgtcgaagctgccaagtcgccgttgccacttgccacctttgctggctctgcgttgcctgccaaagttgtgccgaccgagtccatcgaaaatgccgtccccgttgctgaaatg

SEQ ID NO: 98736 - DNA, 74 bp, Heterodera glycines
accctataaaaacacctgggactgaatcgtggtggacacctcccccgagacaaaacttttaaaccaatattatg

SEQ ID NO: 98737 - DNA, 564 bp, Heterodera glycines
  unsure (1)..(564): unsure at all n locations
ctgtgcattatatactgcgggcattgaaatttctangggttatacttaaattcgcattcggtgatcgtcagagagtntagtntaatnccggtaccgagattagcgagagcaattatatttacgattatcgggttttgcattttgatacaatgtaccaatcaaattgtcctttcactccctttatatactccttctataaatagcaaccaaaaataaaattaaattgaaaaaatgaactgtccacataaaattaagtgttgtcattactgcccctgtcattacgagatatgtaacagatgtaaaaaacacagtcttttgcatttcggtacatcattttttgataatttctggctatgccccaaatgcgcgaaacatgttccctatgaaaatataaataggtcaaataaataagatgcattaaaagtgtttcgcggtccgttcactctaattctctcggggactactgggagtggtaagacccgttggctattacggtttttaaagcatcataagaatctaattgaaccatcgcctgaaaaaattctttattgttatggtgagatg

SEQ ID NO: 98738 - DNA, 1003 bp, Heterodera glycines
caatgcacaattattttatttttcctgaaaattcatctctcaattagcagaaaacattttgctattattggatgtttaatgagaatttggaaactcaaagataaaaaaaaattgtccttcctctttaattggttaaaacgaatgtgatatttgcgactagcgaccttgaaagctccccggaatcaatagaaatttcgttaaaaatgcgtttgagaaaattcaaaaattctattttgtatactaaatattaaatagtaaaatctatatataaaaatttgagttgaaacagatcaaaaatagttaaaattttatcactttaatctcggtttcacaattaaagccaaaagacgtattagctactaaaaaggattagtcataaaaaagtcgacataaaaatgaattggccaaaaaaaagaaaaatatttatgcttatccacgtcgcaaatgccgaccaaagacaacttaatttataatattttaaccagcacaacagctcgaagagaaattttatggtcggttcatataaaattcttttttaattaaacggttaattttttttaattaatgaaaaaattaataacaaataaattttatgatcatcaattctttttttcccagaaaatattaatgaatattcaatcagaaatgatagtgaacgatttgtccttttgaatctaaattatttcattcattttaaaaatctggaccagagttcctgtcccgacttatttttttcagataatttattattgctatggaatttcttttccttttccatttgttgtttggcggaattgcattttgtgtcgccagtgagttttaatgaatttttcaattaaaattgttttatttcctaattgagctcaaccctactcgcattgagtttaaatgttccatcggtgagaaaagacacaaattaaaattggaaaaattaatcattacggttggaacaagcaacgatgggctgacgctaagtttggtcagaggatgccagcaggagatg

SEQ ID NO: 98739 - DNA, 54 bp, Heterodera glycines
ttattttaattgaaaaatgaatgattaattaatttattaatttttttagaaatg

SEQ ID NO: 98740 - DNA, 75 bp, Heterodera glycines
ggtgccgtccctcccccccccccgccccctccgttcatttgattttccgttgccatcgctttgtcagagccaatg

SEQ ID NO: 98741 - DNA, 89 bp, Heterodera glycines
ggtataataattattcacttgtgctactatctaatcaataggttgaagtaaattatggcgtaaattaattaggtatatttcagatcatg

SEQ ID NO: 98742 - DNA, 176 bp, Heterodera glycines
gctttgattagctccaaaaaactattgaaaaaaaataaaaggaatcattacaaaaataaaagagaccaaaactgaatttgaacaatgagcgcaatatcattcctagataaacatttatttttgtaccgctgaaatctatgaaatttattaaataaaacaaataaatttttagtatg

SEQ ID NO: 98743 - DNA, 222 bp, Heterodera glycines
tttttttgacaattgcggaccaaaattaatcaaaattaaatttcaattattcaaatgtgcacgtagaatactgctatggttacacgataccttcttatgtctagtaatccccggaaattgccagtatcattaatcatatgctcattgctttccaatttacaatgtattactccctcgcttatagactagaattaacacttactcaaaaacaatttgaaaatg

SEQ ID NO: 98744 - DNA, 1003 bp, Heterodera glycines
aaaggacaccacccccgtgttactccaaatggcaaatgcaaatggattacctaagtttagttgtgatgatgaaatcgaaaacaaatcgatatcgagtaatagaacaaaaagccaaagtatttaatttttctttcaaattcaaatttatatgcttttttaaatgcgagagctggatgtggcggcgatctcagtctcgatggcattctctgtgttgtacgacgctttttttgtcgagcatcaaccaattaaattctttatgatgtgattatgtgactaaatgattgcaaaaatcgcaactccggccaggctgattttgttttttgaaaaaacacaagcttaggtaagttttccgtccgctgatcgtctacatacatttccgttggcaccacaatttaatttttgaactgcttaaattgtcacaatatttttgtgtccattttattattcgtcctcatcatttgtatttgttataacatattctctacgtacgactacgaaaatgtccaaagataatcaacggagcatcagcaaccatttgccatcatctcctcatttgcctcacttatgcaattcaatttcttatcagcaaaagtcggccacctgagcaccaaatgaatgaacagcggcgctgttgagggccgagcgggcggtgagggcaatggttttccatccatcgaagtgttcctttagcattcattggcctttcttcctcagctcatttccatcaaacttttgatctcctccctctctctctcacttatcctttcatcagttgggacggattttagcgccaaggggcggcgaccccacaaagggactcgttcttttattttgttgactcaaactttagtggtgaatgtttgaactttgtctccgctcaattactttcctcccgatgaactttctccgtttatttgtgaagccaagacgattaattatgcctaattctgtgtaaaatttgaaatatttttaaagaccctattttactgagttaaaaataatg

SEQ ID NO: 98745 - DNA, 813 bp, Heterodera glycines
tcactaaatctacaacatttggatttacaccattgccattttagggaaccaacttttctactagtcagtatgaaacggcggatgttggtgttggaaatcagaaaagcatttgtttttttgttaatgctgatactcccactattcgttcgtatatgtcttcgtttcggagacatcaaaaagaggagactttgcgcaaggaatgggggaaaaagcgagagtcaattgttaaggtccaatacatatacatattttagcgctaataatatatattttgttttcaaagactttaaaatgtttctaaaagatcatttaaactattttcatatcaaaaatacaaaatccttgtagacattcctgaattttggactttttgttctaatttatgtctggatttagtaattggtcgaaatgtacgtgaaattcctgatcggctaccccggtctctggaaattgttttaaggatttaaaattttattttaaatattaggacaattttttgcgaaacaaaagatgtcctcttttatttatttttctaatttaccttttcgtttttaagttttataaaaaagaaaggaagtctgcactccgatatttaaagaaacgggcacaagaaaagcgataattttatcagaccgatttttgtccgtgtacatgttccatgcgaggtttaagaagccacgactaaattttataaatctggtgtcatgaaaatgtattttaaatttgttgttttatgctaaatattttactttgaaatctttgcgcctacttacaattgacctttagtctgttactaaaatgaaacgcaaaatg

SEQ ID NO: 98746 - DNA, 1003 bp, Heterodera glycines
ggtgtcgctgatcacgaatagagtatccatttcgatcaatttccaattcagatccaaattcgaacaaaaggtcgaaactacaatttttagaatttcgcattattgatttaaaaccggctttaaaacaaagaaaccaactaaaaacatcaatgcttcaataaaaaaaagttcaaaccatttttagaccaaaaatgcgaaattctaaaaatttgaagtttcgactttttgttcgaattcgggtccgggtttgaaattggtcgaatggcattcgcgtcaaagaacccattcctttttatacccgacaaaagcggggccaggccggttttcgcgtggggaggggtttttggactataactttttttctttgccgaccaaatccaacattcttggtatcattcgaaagcccttctgatgctctattagcatgcaaaatttcaaaaaatttcgttcagtatactggaaaatttggttttttgaactcttctgaccataacttttttgaaccttaatgaaatttttttaaattttgcaggctaatagaggacacatagggctatcgaatgatatcaagattgttggatttggttgacacagaaaaaagttatagttaaaaaactcgccccacgcgaaaacgacccgacccgacaaaagccgactccacgactttcccaccccaaattgctaggcaaatttttagtataaagatgccttttttcttctcaatcgcctcattccattcattcattcattcgtccatttccggtcattctgttcctgcaaatgtcttcagaaattctgtacgtttatttattgtttcttttttttctgattttcggcatttcttttgctcaatttttgaccatcagaattgggagatgaatgaaaatttttgaaactaattttgaaggcttagcttaatcggcttcaaaaaaatcaaaaagaattaaaatttcacatttgaattccatcattttgatacttttcctaattcatttttcagatg

SEQ ID NO: 98747 - DNA, 168 bp, Heterodera glycines
ttgctgcggttctgctgtttaacgcattgctgcgaatttcaacgattttcgtcccactgcaaacgcattgctgcgataagtgaggacgtggtaccgacttattagcgcattgttgctaacttttggacttcgaaacgccaaattttattgccgccgcttagagggatg

SEQ ID NO: 98748 - DNA, 81 bp, Heterodera glycines
ttataatccctcccttttaattttcttagtccctctggctcgggtggtgctccgctgctccattcccaactgcgaaaaatg

SEQ ID NO: 98749 - DNA, 511 bp, Heterodera glycines
tggtttccttcgtggaaagaatagttaagtaattatgttaattaaattttcttaatttttcggtagaaaattttttcacaatcaaagcaaagataatttagggtccacctcaaaaagttcgccatatataaaaatttatttcattttttcaaatttctatattaaacattgacttttttgattttctagcaaagggcgaaccgaatggtgggcttctcttggatacaaagaccttgacctgaagcgtggcttgacaactggtttttatcctttttttgaggaaagggacattcgttatgttgattcgaaaggtatgtattgttttattgacaaaaagaatgaaattggttttcaatatgattatccggtaatcctttattttcgggtaaattttttcgaattttctttctacattcacaaaagttcggtggggtgtaaagtacaaaaattgttcgaaaaaataacctaaattaaggaagtacccgattatgttttttttaagtgcctgatg

SEQ ID NO: 98750 - DNA, 381 bp, Heterodera glycines
ttctagcttaaaaaatgctacctttatttgttatgccggccgtaccgtgcacccccccaaagaatgcggattttggacagagttagcgaattgctgctgcagaattttaattaatcggaaaattagttttatttatattattattaaagtggtccccgcccttctgatggcaatttctttatcgataaataaataaataaatcagttgagagagaaaccattcaatttgcaatttaatgaaacagtaatactatcaatatttcactttaaatttgtatgttttaaaagagaaaaacattaaatcatcatttaaggaatattaatattatttttatttctttcatattaaatgaacttctataaatgaaaaattcagcaatg

SEQ ID NO: 98751 - DNA, 184 bp, Heterodera glycines
ttaaaaagaaacattttcttttaaggaattgatcaatgcttagtccaatcttttggtcactgaaaatttgccgagacaaattgcacattctgccgatgatgagcaacagcagcagagttcgactgtcgttcatcctcctcccctttcaccgttgaacagtgaggaccatgaattgagcggaatg

SEQ ID NO: 98752 - DNA, 546 bp, Heterodera glycines
attttgacgatgacctattgcgatgatttttgtaacatgcatgaatgtgtgaccatgaaataggacacctgtggtgagtgcctattaaactttcccctaatattgaccaaattatgaacaattaaggaattgtccaccccttatcaaaggggctatggtgcagcacagcggggagcgggcgttggtgacgtgtttcgaggactttgacgcttctttctgcccattttacgtcgtgttggcaccacagtagggtcagaggcgttgagcactgggaaacgagtgctggagcgcgttgggaacgatggaataccgattaaggaggcgctggtcaccgagggaaagcgaggaatagacaccgtgctggacaaaggaggactgcctaaacagtttggtactggacagaagggtataaaaagaagacgaatacgtgcgccaagtcatcaaacaataattggcggacccccaatcgccgtaaagcagacaacaagaaagcgtgttcggtcggacgcctttggactctactgattagcagcaaccagcaggatg

SEQ ID NO: 98753 - DNA, 218 bp, Heterodera glycines
ttaattgcttaagtgcttaaaatttagttctcagcaagtgcttcttaaataaaacttcgtttaccaacaagtaaatatataattaaaatgattaagatttttttgaatttttttaataaaaggtataaaataagtaagaatattttacgtatttgaatgaatatttaaatcggcaaatttgctgaaaggaaagacaatttaaattttcagcaaaaatg

SEQ ID NO: 98754 - DNA, 536 bp, Heterodera glycines
tatatgagaggcatatgcctaaaaagtgcattcatttgctctattcataaaatattcacatttacgctatgcataaaaaggagtgatatgaggggcatgtgcataaacgtgtgtgtattcaaatgatatattcataaaaacgcatatgcatgaaacggtatgcgtgcatatgaaaagaaaattatattaataaattataaaattcagagatgggctagaaaagcataacacataatatacaacacagagactgacatatgcataaaagtaaattattgatgtgtaaaaaatattaagcatacacattgcgttgctggcaaatgcttaggcgtgcgtgcttgccatcataaatgtgcattaatctggtgaaacattgattaatatatgagggaatattcataaaaatgcgcattaatctggcgaaatgctgctatgcgctttggcgtgcgtgtgctatcattataaaagccgattgaatagcgagggaattatcacaaaatcaaaaccccaagagttgttcatattacttcagaatg

SEQ ID NO: 98755 - DNA, 59 bp, Heterodera glycines
attgaattagtttaaccagggattaccgtttagacgtcacttctccctcaacctctatg

SEQ ID NO: 98756 - DNA, 812 bp, Heterodera glycines
catatagcacatatttgggctattttggattttttagcacatattttggcatttttgaaaaaaatcgtaagaaaaatacaagaaaatctgaaaatgcaccctaaaaattgactactttacgtttcttaagcatttagaaaatttctttatatatttaaatgcctaaagcaggcaaatcaaacgctgtgttaaatcgtcactggatttcaaagttcccggaaggaacttattcaactgatggaaaaattaatccgggactttacaaattgattgatatcgccaaaattttgactggcggtcgggcgaaaattgataaagactgatattaaatatgattttttttgcgtaaatacacttggttttttcaatttttagcacaaatttttgcattttttaacacatatttaggccttttttttggtttttagcacatattttggggttttttagcacatattttattacatatttcaggatttttagcacataaaaatcccagccctagtcatagggtccaactcaaaaatgttcggaatcgatttgaatggcctaaaataaagaaaaaaatgcaataaaaatttgtactgaagtgtccaccttcgatggggactgaatcgttactttaataaccatgaaaaaagtcttaaatggcctaaatttattctaaaaagaatagtatcttttgcgctcctaatttgcatttttctcatcgttttaagccgttttaaatctgagcaattttgagtttgggcccttaaaaacttatttattttttatgggacaattaaaggaagcgatacccacccaaaatg

SEQ ID NO: 98757 - DNA, 108 bp, Heterodera glycines
tttttttagctataaaaaatttgcaaattgagatatgaacaaaatcaatatactattttgtagacaacaattagcttaacaaaacggtatataaaacattttattatg

SEQ ID NO: 98758 - DNA, 470 bp, Heterodera glycines
ttgagggaatttttaaatttatactctatcccagaaaaatggctatctctttttatgagaaattttatacctcacaaaagcgcttgcgtatgagacggagggctgtgcacaatcgccattttatttcacagaggatttttatatttagaggttatcccagaaaaatggctatctctttttttgataaattttatacacatacaaatgctctcgagcatgatagggagggcggtgcgcaatagaccttttatttttgagggaatttttaaatttatactctatcccagaaaaatggctatctctttttttgagaaattttatacctcacaaaagcgcttgcgtatgagacggagggctgtgcacaatcgccattttatttcacagaggatttttatatttagaggttatcccagaaactctactctaatttaaactattaattaaatgtgtaattcaaatgattaagcatg

SEQ ID NO: 98759 - DNA, 332 bp, Heterodera glycines
acatcgaaatctgcggggaaagccaattgacggtcacccccccaggcaacggatttggtaattaattgtgaaattgaacttataattaaagtgattttttgaattaggatggcattctgtgtttgcgaaatttcccatctccaagtgttgtcgtcccttcatgttctactttgaaatgaaagtcaccaaattgggaaggtaaaatgacatttattaactaattaaattcacaaaattcgcataaaattattgtttttgtgcattttttgttaattttcatatatttacatttttatatttttgcctcgattggattcgccaccaaagaaatg

SEQ ID NO: 98760 - DNA, 336 bp, Heterodera glycines
aaaaagctcagtgatgataaaataaaataaattttaaaatattaattatggaacggcaagtgtaattctgattaaattctattagatgtgtataaaaaagatttataatatttatacaaagctaaaaaaggaaaattcgcaaattaattgaagacaattgataaggtgctaattttctttgcatttcatgtaaagattttataatttcattcccgaaacagtgaattaattgataacataagaatggatagtaaaattttgagtatttaagctaatttttattaatctataaatcacaaatttaaacaaatattcactctcccaatcgctgcaatg

SEQ ID NO: 98761 - DNA, 1003 bp, Heterodera glycines
tcctacttggcttttgtcttaataatccatcattgatgcgaatggatgagcggggggaggggaggggcggggagtgagtgagtgtctctgtgtgctgcgcttgtcccttccggccaatcccccgggggggggggggggcttggcgagtgcttctgctgagggtgggcttttttccttctccatcatacatacgctcgcttcgattttccacccgctcgcttctgaagccgttgctttttgctgcttcccccccccttttttttccttttttggtcttttctccttttcctcattcctttccttctttacctcttccgttctgtacgtctttgatggcattttctgctatttttcatctttttccctcccccccccattcattgctccgtttcccccgcactcttttggaggcaaaaaatgccatcgtccattgtcgattagttggcaagacatcctgctcagaatggcacctctgcttttcctcccttgggctcaccatttgttttgttctgtctgggctcaccttttccttttctctctttttccattcgccgctttcggtgaaaagttaaaaggtgcgaaaaatatttaattattttaaaatatattaaaatactattctgttcatttcagtgtttttaattttttatggacctttcggcaaatccaacgacccttccggggcctttgtataaagtagagttgagcgggaccggaaccgggccgggaattcccggtcctccgaggtcccggttcccggtcccggctaaaattccaattgttctttcttttttgttagttttcgttgtttaatttgaacgaattaaaaaacggattttgttttcatatacaaaaaccaaaaacgaaaagaattccattcaaattgaccatttacgcagtttttttttctctccaatttttataaaaaaatgattgtttcaacaatttaatcagctaattaattccgtcaaaaactgtcttaatatttgccctcaccaaaatg

SEQ ID NO: 98762 - DNA, 539 bp, Heterodera glycines
tgcttacagtttatttgttctgtgataccacattacaacgttatgccgacccaatatgttgtgccaaaataagacctggtggcgattgttccttttttgttggaaacagttaaacattttaaaaaagaaaattaataataattttttataaattatatatttattaaaaattaaaatgacaaaaataaaataaaattttatttttcgattagaagaagagtcgtgctacaactcgacctgtgttcaaggcatatgccagcagcagaagcagcagcaaaaaccgaatgtactacagttgcatcggcatggcacgcaaattgtagcgtcagcaatcgatgatgtgggtactgtaacattgacaccgtacataagggctgcgatggacacgacaccatcgcctactgtaagcaaattgtatttagttttaatatttttaatgtttttaattaatttgtttaacatatattttacgaacaaaaaaaaatgagcgcttaaaaatgttcaattaaatttggtacaaaagtgagcgattaaaaatg

SEQ ID NO: 98763 - DNA, 675 bp, Heterodera glycines
tctttctgtccaattccgatctcttcggtacatttcgcaattaaaacaaaagttcaccaatctctcatttggttgtggacaatgaaaataaaataaattgtaaaattaaagaaaaattgagttaagtgttacaaatcgaaacttgagcgtcaaaatgacttgcctttttgagtttggactgtttgtgttcaaataatcttagcaatgtcaattaagatttcatatgggagtgccagcaaggtcacactttactaagtgtccgatatttgttgtcgtaaccaaccggcacaaagatgggctaggaatcctgggacacttgaacttgagaagaggaccaaatttatgaattattaagttcttcttggcatttttccaaaaattgcccaaaatgttgttgccaaaaggtcctagcccatcgcagtgtccaatttttggccccttttaacggtcactcttttcagtatggtcaacagtgcgcaacaatgggactatcccaacggatggccggtcaaatcttgcttttttattctcacaaataaaattgaccatttcgttttgctttagccattgaatcatatgatcatcgaaggattgcgccgttcagacaacaaactgtagctgttcttttttatgtaaatcaaaattaatattgacgcccctttaaccgacagaatg

SEQ ID NO: 98764 - DNA, 215 bp, Heterodera glycines
aaaattttcatataatgttgtatagaacattgtcttttttagaacgtcgcgaatgtttgtccaatttgggtctttctgcactgagtgctgccggcactctttcggcgaattcgtttgacccattgatattttcaggcaattaattgtttgctttttcaaattcttcgtccattaatttcctttaaattttaggtttgagtcgatcacaaaagatg

SEQ ID NO: 98765 - DNA, 54 bp, Heterodera glycines
ggtcagtgaaggaaaagcacagaacgatcacttaaaaaccggctcagagtgatg

SEQ ID NO: 98766 - DNA, 229 bp, Heterodera glycines
aagaaatagtgtgtgtttggtgagagagacattttctcttctcaattcttcgcttataaagagaaataaatccccagcctccgccgagggtcgtggcgggcccttgtgacccagcgagtagggggcgaaggcgggcggggggcgggcgtgcgccgattgggtgtcgcgaccaagggccgcgtcgacaggggcggcccgggggagcccgggctgtgccggtcgcacaatg

SEQ ID NO: 98767 - DNA, 1003 bp, Heterodera glycines
caaagctcaacgatcgccaaattgcggaaattttaaatattacaaaaagatctttagaaagatataaatctgaattcaagagaaaaagtgaaggtgtcgcggattgactgagaatatttttaagctttcagggccattcattgttaggttttgatgaatttaaatttcttaaaaatttatatattattcggcatttcattcattttccaatttgttgcttatgtaagagttaaaagtattatgcataatgtttgaaggttgttttttttgttctattttttgttgtaattgccagggaatggatttatatgtgccaaaaaagctccaaaatatgtgctaaaaagctcaaaaaaggccaacatatgtgccaaaaattgaaaaaaaaactgtcaaaaaataagtgaatttatcaaaaaaatcacattttttatccatttcgctagtacaattctaatcaaaaacatttcaattctttgtgacgtaaatatttttctcgcttcaaatatttatttatttttctgttttcattgataaaatttaaattttgccttaaaaatgaaaaaagtcattaaaacggtcaaaaagtgcaaaaagagaaaaaactaaaatttttgaaaatttttgtacattttgacaagaatttgagtgcaaaaaaagctacttttgtaaaaaaaattaaaaaaaaaatccccagaatatgtgctaaaaactactgaaaaccaaaatatggtttcattttaatgaatatgcttgatgccattttcaaaaaagccgaaagacagccatattaatttataaattgaaacccactcgtaataattaagttaattttaaacaaaaaaatgaaaactgaaaattttcaaacaaaaaaaataaaaatataacaaagatgtaaaggttgcaatcattaatgctgtcaaaatggcatcggcatttggcatagatatgcttttagctgtccaattgcaacaacaaaggcaataagtgcgattgatgctctatg

SEQ ID NO: 98768 - DNA, 1003 bp, Heterodera glycines
tgaaaaggaagattaattaacaattgcattaaaacgggaattacgaatttctatttggattaattgaaataaattacaaaaaaaatcattggagtttacagattaatcccttaaaattcatttaaaaattaatagatagaattggattatctcccacaaaaaaaatgttgtttgcaaaacgccaacgcatttctttgcctttcgccattttgaacaagaaaagcggcttattttttgcgtgccaagatgagcttccctaattaattttcacaaattgacattgccctaggcgagattcattcattcgacacgaaattaattaaataaaccgcgctaatcccccacgccttccgagtccaatccctgttaaaatgtttaatgctaagtgttaattaatgccattttactcgactttttcaaacataggttttccagctcccctcatggcattttgtaatgaaagggcgggggtggggcggaagttatgcctcaaattgcttacatgaaagatgaagctgccctaaggcatacaccgatcatttctatggctttttcttcttcccaataacagcaaaaaatgttctaaaagctcttttaaaatgtggaataattttaaatatttatttttaatacaatgattatttatttttatccaaatcatggcaacattcatttgtgacctgctgtagggaatggatttaaaaaactgttacaaaaatttattcacataatacaattttttagcatatgattgtcctatcaaaaatgcacataaagtctattttgctcgtgatcattgatcattaatgattaaaatttaaaaccaaatttcaagactataattatgtatataagaaataatcctgattagtgatcaaaaattaaaaaatggctaataatttaatcgaatttatatccgattacaacctcgcaaatccttatcctcgataaaactatatttgttaaaaacaacatttttaaatttttgtatgattcagaaatg

SEQ ID NO: 98769 - DNA, 1003 bp, Heterodera glycines
gaagaggaagaaaaagaggacagagagcgacagggagtaagagagaagggagaaagagagcagattgagagaaagacaaagtgagagagaaggaaaagagagagcgaggtagagagagatagacagcgggagagagagacagagaaagagagagagagagagggggtgagagaaggagaaaaaagggattgaaagcgagagataaggagagagaaagaggagagaagagaggaaaagtaagtgagaaggcgaggagataagagaggaaagaaaagagagaatgaggagggacgggacaaagagagagagaggagagaacagaggaaaagagagagagagagagagagaggagatacgagagaggaaagtgaaaagaaaaagagagtgaggaggagaaagagagatgaggagagataggaggaaagaagagaggaaaggataaaatgagagaaataaaagacgaaaaatatcatatatatcgttagttgaagcaatattacaaaatgtcttggtttttgagcctaaaatctgattttttggccctgatggtctgattttgaaaaattttcgatcaacccctggttaaaggataaataagtatttggaacatgccgaagccacaaaaattttcggaaatcgtaattacagcggtaaatttttgcggaacgcggaaatacttaaaaattttaataggctaaattttaaaattattaccaaataaataatgatttaaaaaatattttcggtatatttgagtgtttgtatgtgtcactgtttgaattagtgtggcgttttgtttgagttttgcgttaaaaatgagtttgaaaagagatgaaaagaaattgttttgaaaaagaagagaatataaagaaaagagacgaaaataaatagttaagaagaagaagaaggcaaaagaaatagcacagaaaaagaaggtaaaagatttctcctcctaggatgtagaggttagagggagggatggtgggaaatagtgcactgtatg

SEQ ID NO: 98770 - DNA, 235 bp, Heterodera glycines
aatgagtttttattttttataagtaagaactgtcagtcgacatgcgggcgatgatgggcgggggggggggatgaagtgccacaccccccaagagcgctcaaggccaagcatttacttcgccaaaaatggctgcaccataaattcgaccgcaactttattcagttgcccatttgactcatttccaccattttttagtgtttaaattacagaaaaataattttttatttttgaaatg

SEQ ID NO: 98771 - DNA, 481 bp, Heterodera glycines
tttggggacccgacttttagggacccgacatttgcggatcgaacgtcatttggggatccgacacttagggaacccgacatttggggattttaataaaacaaaaaatattaaaaaatttaattttatgtccaaaattggacaaattttttttaaaacgcctttcccaagggccaatggtaacagacactcgtcaaggacatttcagatggctttgctgtttaatgccgagactatcttttctgtttcttatctttcgcgtgactttgtgcggtgctttaaattcattttttaacaaattatttttttttgactcacttgcaaagcaaatctcagtccggaaacagagttattttaaaaaatattattttgtttttcttgcaatgcaatggaattaactctgactaaagcagactaaatttgtctagttttggacaaaaattaaatttttttatattttttgttttattaaaatccccaaatg

SEQ ID NO: 98772 - DNA, 116 bp, Heterodera glycines
ttgcgaagcagaattcgccaagcgttggattgttcacccaccaatagggaacgtgagctgggtttagaccgtcgtgagacaggttagttttaccctactaaagacctgttgctatg

SEQ ID NO: 98773 - DNA, 469 bp, Heterodera glycines
tttccagaaaaggagattttggttcagtttttgagtttttccaggacattttgttcagtttttgagttttttcaaacaaaaaaaaacttgaatttctacaaagtgaactggtgaagctttatagaaaacatgcttcaaagtgatcactctcatcacaaatccggtacttttccgaaccccggaaccgaccgaaatcaaaaatgcgaaatttttaaaaatttgaattttctgatttttttgttcgaatacggatttctgcgggcgctcagaatttgtcaaaatggatggataatgactctacagaattttttgccagtggatctatgaaataatttgtcccattcaggcattactgtattcatcggaccaaatgaggtgtgtatgtacaaattagagatcgcataactggggtgggaagtgatccggcccgaatccttgtccctcaatcccaaaagattttggaaaaatg

SEQ ID NO: 98774 - DNA, 210 bp, Heterodera glycines
aatttttttcaaaattgacccaaaatgtccaaaattattcaaaaataattttatgtttttcgccattcgttttttctcatttttgagtctcccccccccccaaaaaatgcacagatcgcatcgctttttccgagtggacacggcccggctggacattccatgggaagggcatttgggtggaggaatggcaccggcgccgcccacaaaatg

SEQ ID NO: 98775 - DNA, 1003 bp, Heterodera glycines
aaaaatcatatcacaaaatatatagcacgcaaaatttttcgtgtttcacctactagccttagtttaaagagcttagattttgatcaggcatacctaacaattaatatcaagaacaaataaaagatataaaaatatatatctttaaaaagcaaaattaaatgaattactcacattatcaatgacaatataattcttgtaaatcaggaatttataaactaatgcattgcacaagttgatcagatcactacttaaggatgatatgaagtgatcaaatttttagcaccaagaggaattgaaaaaagaactttttggaaaaactttataaatttttcatattttcattcgcattaacttgcttaactccgaaaaatcacatataaaattcaatattcagatgatcatccaatttaagaaaaaaaaatttttttaaattaaatccagaaatgatgacccgcaaaagtcggtccgcaaatgtcgcactacgcctcaaaaagtttctttgaaaaaggcgccgcaaaaaagttttttttatcttgttttatgttttttgactataaaaagttgtagaaaaattgcacttacgtgtttagtaatttcgcgttcttgagcgggcgaaaacatagttgtaattttatgcataaagattccgatttttccaattttttgcatatatttttgcattcggcatttttattatttaaaaacatatttattatctctctttttgtgtactaatttcatattacaagcggacccccaggatcccgcatcaaaaacccaatttgcagatctgaggtatacattaagggatgggagacgacgccctcaaaaaattttggcaattgaaaatcggcattccactggcttaaaaaaatttgggaaatctgctaccggaactccggctcatgtcggaaatcagaatgtccttgatttcatatatgtatgtaggagaaacgcaaatcaatgatttattattatttagcactaatttataattgttatg

SEQ ID NO: 98776 - DNA, 217 bp, Heterodera glycines
  unsure (1)..(217): unsure at all n locations
cccgggactttgtgaatattgctaaatttaatatggcgtaatttttttgttatttcgctcccattttgaggggttttgggtcctaaattctacctattttggtaatntaagttgaaattagagtccctagtcccattaaaaacatttctgcccccattaaagctactgaaaaattacggactccaaagagaatgaccctcggctggcgccgatgatg

SEQ ID NO: 98777 - DNA, 1003 bp, Heterodera glycines
tatctgtttattacattcaatatcacttaattaaaatgaaaagctttattaaaaagcatagccaaatttttagaattcaatgaataattgtggaccaggttgacgatttttttaattttgtaaaaaaagaaactaaaaacttaatcatatacaagaatttaatttccaaatcttaatataaaaaatttttatgaatgaatgtaaacactgctcataagcaccggacaaatattaactaaaaataattttattacttttgaactaattccatccacatgagcaacattttacaaccttaaaaatttttaaaaatatttaaataaattaaatcaataaaaattagccaaaagtattgaaaaaaatattctaaagcaattggaaaataaatatattttttgggaccccccataaggcaaattaaaaaaagttccatttcgacaaatttaaacccctttccgaaccttaaagtttttaacaatttcaagtttttgcaattttttcacgcggctaattcggtttttgactaattcttaaatttcaactccagttgtgcttccggtactgttttgcacatgaataaatccggttaaggaacaatcctgaaacgttgcggaaactaccagcaatatttctaattattcagttctgatccgaataatcagaatttttgtgatttgtgttataaaagctgaataaaaataattaaatggcaaaattggccaaaaaataaataatttaaaaaacaattatattaattaaagtaaataaaaatagacccaattctctacaaaatggcacgtgtggaaaaaattcgtaccagcaaaaattttttgaaattcccggtttttttaaagaaccactaattttaaaaatacattttttctttttccttaataactttttgtgttttttatatagtgggactcgcttcgtagcaaatcgagctctacaaagattggtggaacaaaaataataaacggctaggctcggcatcctaaatatg

SEQ ID NO: 98778 - DNA, 1003 bp, Heterodera glycines
tcccaccctcttctggattaattagggcaatttcgctgacaaatcagtgagcgagtgaagggctgatgagctgatgagtgacttgtttgataatgactctcacttatcactaaataaatgatctatttatttatttttgtaaatagaaacatggggactttgttgatgaatgaatgataattcattgaaaatggtcattttaatgtccactgatcggtgaaaatgcacattttgtttaatgatcgcaaatttctccggattttaagcaaaattatttatcgaggcagtttataaaatttttatcgttttttatgaattaatgaaggcattttactattttttgttttctttttttctttaatgaaatgcattgtttgagataaaaattaattgtcgccccattctaatgaccccccccccccaaccattcccaaccaaaaaatggcatggcatggtacgtgataacaccgaacccaattgttgttgtgtttagcaactgcaaattatttttttccatcttattgtgattgtataagcgatagaaaaatttattgttcccattattttatttaattagacaaaaaaaaaaaaattaaaaattggtatgcgaaattattttaaggaatcgcacaaataagaacttgctgaattaatacaggagtaaatctcatcaaaaattttggcaccactcctatcggtcgatagctctagattccctaaagcctgtcaatttgtaaaaaattttcaaagtttaaaaagtttttccaaaaagccctaaaaccgaatgcagtagttatgtttcgtcaaatttttttccaaaaaaaaacaaacaattaaatcgtattattatcaatcagccttaagactctgttttagtattgaattatttttttttgtgatcattgaaatacttttttggattgctattttgcaattttattctttattgttcatgttacagttataggtaatatttatttgcttacagcaatttaaaaaaatg

SEQ ID NO: 98779 - DNA, 715 bp, Heterodera glycines
acatttaatttggctctttacgagtatattattttatttcgctatttatactacaattacaatattcgttggtataaatattttcatttgataaaactaaagtaatttgacatcttaaatttttacattgtctatttgttagatattgtttttaagtgttataattacttataattgtaaataattatcaaattccatacgagtcgatttaatcattgaagtgtgtgtgcactaaatgatagtttgtaaagctaaatcaaatcatattaatcattatgaaaaatataataaaaaataaggttttgtttaaaataaatgaaaataaaaaagtggaaaaatataaattaataattaaaaataaaattctgctgaaatcaaatactttattatgttgataacactttcaaaaatatgaattttattatattaaataatatttccttcaagaataacacttttgtaatagagataaccatttgcattaaataatcatatcagcgaaaataataaacctgacaatgattataaattataaacaaagattaatataacttgatgaaataattaaatatatttaaaataatgaatgtaatttgtctccaaatgtacttaatgattacaacttaatttaaaatcaaaaaataaatattgtatgtaagtaaatcaagaaaaaacaatcttttggtctttaaatttgctgagcatttcaacgatg

SEQ ID NO: 98780 - DNA, 143 bp, Heterodera glycines
cagctgaaaaccgattggtgcagaagctctcccagctgctgatcgtcgctgaagtcatctgcgagcgttgtcttcaggctggcatcagcgtcaacgatgggcttggaagaagagcgccggattgtgtttgtctgtgtcgtatg

SEQ ID NO: 98781 - DNA, 300 bp, Heterodera glycines
gggcgaaacttcgagcttcgtgcttcgagcttcgaaaacttcgggttttttgggcttcgaacttcgtgcttcgagcttcgtgaaaatgctcgaagtttcgggaaaaatgcacccctaaagattgagttttcgaagtaaaaatactcccctaattattgatcttaatgtgagtaatggtgataatgtttatgaattttataaattaaatatttcttcaatattacctattttatattctacatattgtatatctctttttaaatgctttttaacacattttacatttttagcttgaaaatg

SEQ ID NO: 98782 - DNA, 482 bp, Heterodera glycines
  unsure (1)..(482): unsure at all n locations
aaaagtaattttttatacaaanagtatggacaaataaaaccaacaaaagaaaaaaacatggagtgggcncctgaaaaatgatttaccattcacaaaagtaaattattataaatcaaacaatgagaaatataaagtggaattntaattttcatatcacatttttgcacttttcgctgtatccttatgactttttggcattttttattaatacactaatccgtattatataaaatctcataatttggcctataaatgagtttgacaaaatttactcattttaattgtatgaaaaaaaattttgggttatttttagaactaattggaaaactaaatgaatatagaaaaaattgttttatttgtttaaaaggcaattaattccttattggttcagatgaaattcattttccaaatttaattattagaaatttgaaaataatgctttgtgattggtttttatctctattaattttcagctagaaatg

SEQ ID NO: 98783 - DNA, 332 bp, Heterodera glycines
tctgaaaaaataacgattttttaaaattataaaatgacaaaaaccagagatatcagtcttttagcaaattgcactcaaattttcaaaattctccccggcggcgcctaacgacatcgccggacccttgttctcaaaaagtttttggaaaaaaacgcgccgtaaaaaacctttttattgatttttcttcatttgaaaaaattttccaaaatgcttattttggacccccaaatgatgattttttgtttgaaaaatgatgattttgaaaatttttatctgacaacattggatatcacatttgaatatactaatatttccaattttataggcgaatg

SEQ ID NO: 98784 - DNA, 1003 bp, Heterodera glycines
ttgaaggaatttttttagcgagaataccaatgaattttgaaaaaatgttttctgaaacgaatgttttaatcttattttaacataatgactgaaattaaatttttctcacaaagcagtgccggattaattctccccgatataatcaagttttttgttatttagcaaaaatgtcaaatatctgggaatattctccaccgctgggttgattgtgacagatctgagaaaacgtttattgcctgagaatgtggacaaacttttatttttgcatcacaatcttaaaatttatgattttgattatgaataaaatttttgggaaaaaattattaaaaaaaaatcggaatcgtaatcggaatcgcaattaatcggattttgggccataatcgtaatcggttttaaaaccgtatcggatttttggccataatcggaatcggcgatttaatcggaatcggattttgtctggctcggcacatccctgctgctggttgctccagcagaaaatttaccattttcttttgctacctttttctcgtatttcgtggtcaaatgaccaggtcaatcaaatcgtgccaggaaatttcgacagtggctgatttcgacagtgaccgatttcgacagaataaaattattattttattattattatatattcacatgaacaagccgtgcctcagggtcaaactgatccgaaaagtcatttttatttaaaaaatgcactatgtttaatgaaaattaataaatgcgtgtagtaaaaataaagcattttttctcttaatttcaatgtggtaaaattcagtggtactttggccgttgtagtgataagaccggtcgttcactttatctcgggtggtcaattttcttgggaggtcattttgataagagaatttggagaggaattgttttgcattcccgaatgctgatggtcattctcgagttgtaattgctggtgttcatcatttgccgtttttccctctattcgttttttttccaaattcattggctcatg

SEQ ID NO: 98785 - DNA, 811 bp, Heterodera glycines
agtttgagttgttgtttattgtacatttggttttttattggtaacgaaaaaataataaatgcataggtaataatcaacagaatttgaaaaactatgactaattaaaaattgccgtcgatttttttaaatttcaaacttagaaattttttaaagaaaataaattgaggaatttttctacctttttcgaaattttttttcatgttttctttaaaaaaattttctaagatttgaaaattaacaaaaaaaaaaaaaattcagcggctagattttaccccgtccccataaatttgatcatcggcagcggcacgggggtgaaatggacagagaaattttttggaaatttgatagtaattttggcaaaaaattttcatcataaaattttgaaaaaacgctgtaaaagtgaaaattggctacataattataagatttttttcgaaaaattagcaaatttcatgctttaatccgaagcaaatatttggctaaaattcacccccccccccctttttttcttagtttgccgtccaattatgccaatgcgccgccggagccgggcagttgggcacacattttgtacacggaggacagtccgcggagcgttcggcacattgtaattcgtcaaattcgcccgctgtgccccgacagcactccgccgagcgcgctgggcgccacgctgcggtttgccatgcaaacggtgtgcccggataatacgcgtgtgtgggacgcctttttgacgctgcccgtccgggcgtgcagcgtgcaacaactgttggacaaggtggagggcagcagagagacggcgccgcaagcgatg

SEQ ID NO: 98786 - DNA, 654 bp, Heterodera glycines
ttcattttttgtttcaattgtttccatttttttgagtttgaagaagaaagaagcacacttgctctgtcatttgcaactccaattgggtcgaagagaatttctgacaaccgatgtgataaatataattttttcgcaaaaaaatgattaaattttaccattggttagagatgtcaaaacgttaaatttattattgtccataaattgggcagcattttgtgcatcatctcgagtggaaaattcaatcgttttgtttgaaatcttaatctacgtattttatttttatttttattttgatttaaccttattttccaatgttttgttctttataagaattttttttacagctaatttttgtggtgttatcattctgcgctttgttgaatgcgacttctataaattattaatttttagttgacaaaatgctaatttttctgaccatttttttaacaaaattttggagacaactgcttttcttttttgccgcggacacagacaaagaggttgttttttccacattgattttaagcactttgttgcaaacatttgttgttggcaggatctaaataagttgttttataattataattattttcttaaaaattattttaataaattgaaagtttttttatttttactttaattccaaacaaaatg

SEQ ID NO: 98787 - DNA, 51 bp, Heterodera glycines
tagcccgggggtaatttggtgatcatcggcgacactcaccagtcactcatg

SEQ ID NO: 98788 - DNA, 424 bp, Heterodera glycines
tcatgttcacagcacctattaatggaagtatatgcgatgatatcatataaaaatatgcaaatcagggcaatcgcttgaccaaatggttaggtaatgggtcctcgcccccctttcatccttggccatactttctcattttcaattccttttccacagcccaatggatgcaattcttgctgttttttaatttacttttgataggcacagttttggtcccaaaatggtcacataataccagttcttaaagaccttgtaaatttaattccttttttgagttacagttcgcgcccttatgaacaattaatccttttccattgcaaaagaaatttcgtaaaaaaagctatgaccaatactgattttctcattacagtccatttcattattaaattatctaaaaacaaagtccttctctgctttagacatg

SEQ ID NO: 98789 - DNA, 235 bp, Heterodera glycines
  unsure (1)..(235): unsure at all n locations
tcgctgctgctgctgacgcccaatgggcatntttgccaccttctaaatttaaagcgatttgttgaaattaatagataattcattagggaggaagcgggaaacacctgctgctggggaaatctggtgtaatgctaaatatttggggacttttaataaatgtaaatcccatccctaatcatttcttatgtaattttcccaaaaattgaaaatccgagacttttgtcgagtcgagatg

SEQ ID NO: 98790 - DNA, 129 bp, Heterodera glycines
  unsure (1)..(129): unsure at all n locations
gggggggggaagtccaaaaagaaaccaaagggccagattcaaaagggagaaaaatcccgaaattgagcatggcattggcacagtcgatccattccccccccccctccgtccagatgatccatccncatg

SEQ ID NO: 98791 - DNA, 69 bp, Heterodera glycines
aagggaaatttttggggtaacatcatattttttaaaaaaattttctatgaacatttgttcagggagatg

SEQ ID NO: 98792 - DNA, 136 bp, Heterodera glycines
ttgttaatttcgggattagttcgtttccccttccttttccccctccccgccgaaaattaaaaaaaattatatcaaacacagaaatttttcaaaaattaagtaaatgtttttgcatgttttgaaacaaacaaaaatg

SEQ ID NO: 98793 - DNA, 233 bp, Heterodera glycines
ttttaaaaaaattttttttttgggggggggggggggggggggggggggggggggggggccccgcgagccaaacaaaaaaaaattttcccgattcggaataaaatttttttgaaaattttaggcccccaataggggaacaaaaaaaggaaattcgctttttaaaccaattttaaattaaaaataattcattttgaaccttgctcagtttgttccgctatttcccgtcgaaaatg

SEQ ID NO: 98794 - DNA, 218 bp, Heterodera glycines
ggtgcgagaaggcggggcaatgtacaagcgcctactttaaactaaggggctgatgttagcataaataagtatgagaagccatgttaggagacaagcagtgagagtgagaaaggaaaaaaaaatttaattattcaatgtttgacaagatttattgttcgattaaatgtatttcctgacaaaatatatatatatatatataaagaaggcaaattgaaatg

SEQ ID NO: 98795 - DNA, 271 bp, Heterodera glycines
aatccatgctcagatcatcgctcccactcacaacaggagctgtacagggcccaagaattgataggcttcctgtcccaagagtactctcatgggcaaggtgccaatgaggatatcatccatacaaattttctaattttatttttgttcgagttcgggtaaggggttcgaaattggcaaaaatgggtgctgtattcgtgatcagcgaccccaaaaaccccttaaaacttattttcattaatttataaaacacatttataggcatctgaaaatg

SEQ ID NO: 98796 - DNA, 79 bp, Heterodera glycines
aaattcccgtctttttctttctaatctctcttcactctttaattttactgcatcaatttcgcggtttttgtttaaaatg

SEQ ID NO: 98797 - DNA, 745 bp, Heterodera glycines
tttttgctaccaacaaatgttggatttggttgacaaaaaaaatttctaaccttttacaaatgaaagttggataaaaattatccatcgaattgattgatttgggggtaaggtaaaacgcccggcaaatgtcatcattagggatcggatttttaagtttttgcttatttttctgcggctttaactcgacgagaaatgcacgaaaaacacattttgcgctcggaaattcttcgttttgacgcatttattcgaaaatttttcttgacgagatcacattttttgcaaattttcaaaaaattttccacataaatttattttttcattgaccaaaatttttgtaatttattttttttcttgaccaaattttggttttttcgcccttatttaaggccttagtttggactttttcgcgcttaaaaatccgttccctagtcatcattttgcaaaatattctcctctgttgcggttccctttttcttccaatccgtcgtcattttatgccaaaatgtttccgcgccttccgtttttgtcaatgggttttcgcctcccattggcaacaatttaagacgaacaaaattcaaaaattttttggataaaattgattttcgtgcttctttcatccaaagtacaatccgtaaaaaataggaaaccctaaaaatccaggctttatccaacgcaattatttttctgctatttgtgtgacatcattcgaaattcaacagcaaattttgctaattgccaaaaaatg

SEQ ID NO: 98798 - DNA, 701 bp, Heterodera glycines
aagcaatttgacatctcagaaaaaagttgttggagtttcaaatttttatcacgttataactcaagtcctaggccgccgtttctaacaaaaatgctaaaattaatcatttcttattgattctaaatgcatagtgtttttgtacctttacaatcaagattattataatttgtgaatttctatttttcatgtgttagagacatgaaaatagtacaccaaaaagagagaaaaagaaattcgcaaaatttttcaccaaataacttttgagtgagccttatttttgtattaaatttccttattaatcgattcagaatttttttctctatcgatatgcaaaatttaaagaaaatctgtaaggcgaaaaaaaagttctatagagcgaagtgaatgttgttttttacatgattaaaaccgaagagatagtacgccaaagtgagagaaattacaaagaaaaagaaaacgacgagatagtactaggcttttctctgcacagtgtgcttgacccatagtgtggaaccattcttcgtcagaaaatgaattttcgaattggttctttgcgtcgttttttcttttggcacaaaattaattgtgaataaatttaaaaaaaattactaaaataaatttaagcatttttgtgtgctttcttttccttctttaatggacatgggaatcccttcaacaagcgatttgcataatcaacaatg

SEQ ID NO: 98799 - DNA, 99 bp, Heterodera glycines
tcttttcatatagtcgccaaataatttttatctttttttaaatttactattgttttggctgatttgcacataatgcaccatttttaggttttaataatg

SEQ ID NO: 98800 - DNA, 253 bp, Heterodera glycines
aacatgaatatggcatttatttaggcccatttcaactacccgaactcgaaaaaaagttaaaaattcgaatttttcaggattcgtttttttcaaaaaaattggatcgtaaatggaaaagtgccattttcgaatggaaaagtgccattttgaaatgaaaagtgccattttgaatggaaaagtgccattttgaaatgaaaagtgccattttcgaatgccatcccctctccatttttcagattgttgcctcagaatg

SEQ ID NO: 98801 - DNA, 1003 bp, Heterodera glycines
ccttgggcatcaatcatttcccaaattaccaattaccactgactcacccaaaaagtataaataaaagtaaaatagttgtctaataagcgataatgtttttattttaaatagaattatttactcttaaataacaaaattatttaaattggtaaatttcattttaaattttcaaattatttattttccaaaatcacttttgtagtagggctgtcaaaaatatgtacaaaaagtggtccaaatatgtacataaatatgtaagaaaaaacccaaaatatgtacaaaaaaccccaaatatgtaaataaattttttttaaatggttttttttgggaaaaaatcatcgtaaagtatgaaataggcttcaaaatgccataaaaattacttaaatagtcttacaattagaagaacttttagtattttaaaaattatttttttggtatttttcattggtattttttcactataaattttcaaaatttctcgaaatatttgaaaaaaaatatgaaaaaatgtgcaaaaaatttgccgaaattttggatttttttttaaatttccaaaaatttccgtaaaaatcctcaaaatatgttaaaaaaatgaaaatatgtaagaaaaagtccaaaatatttaccaaatatgtataaaaaccccgaaatatgtaaaaatatgtaaataaaagtcccggtttttgttcgcaaacacaaaaaagaaagtgttttcctgctattttgagcatggagaagccaggaaaaaaatatgtatttacataaaattgacagccctaataattagcttgactttttaggcattttcccacttgttttgaggcttatacattgacttttattatgcctttttttttgccttttcgggattttcatgccttaaatgccttttttggcatttttccgttttggtgccttttttggcgttttttccgaaaaattctattaaaaatgcgatttaaataaaaatatttttaaattttcaactgaaataaattaaatg

SEQ ID NO: 98802 - DNA, 106 bp, Heterodera glycines
  unsure (1)..(106): unsure at all n locations
aaacccaaaataagcgcagcggatgggatggnatacaaaaacaagtgaaatagtataagaaaatgagagggaggaagcgaaagaacaaggaaacagtttatggatg

SEQ ID NO: 98803 - DNA, 415 bp, Heterodera glycines
ttatcaaattatttatctgtgattggatgaagtcttattggttcggattggataagagttatcaaaaaaatttaaaaaaatcttttagcaggtgaataattttgaagaaaacataatttaagttttttggagaaaaaccaaacaattttattttattttatgggaaaattttgttcaattaaatgaaacatataaatttaatgcctaatttatcactgttatgaatgagtcgttaatttttattttttataatttcttaatttattcagcggctatcgtttagcgaataagcacgaacattctgtttaaacattaataaaatttctatttttcccaaggcggcgcatatcggcaccggcgggcccaccatccctttttttataaattaaatgattttttcatttaatgaaaaatg

SEQ ID NO: 98804 - DNA, 93 bp, Heterodera glycines
ggtagcattttggaggaacattcccaagattaatttgtatcattaaaaaggtataaacaagtggttccattgcgagacgcactttgcggcatg

SEQ ID NO: 98805 - DNA, 680 bp, Heterodera glycines
tttttttttaatgtataggaaatgaaagtgaacgaatgaatgctattagggattggttctagacggagaaagggatgatattggaaggcaatgccctacaccattaaggaaattttgaaaaggtgtcgaaaattatcgattgattacaaacatctgtcaccatatgcaattcccgagggaaatgcgcattgtttcgccgaaaattatcgattgatgggcggagacaacagctttaaaagcgcgtaaagacatagaatttttcatttgttccttattctcttatctaggttttaaataatttttattttcaattttgctgttaaccagggcggtagttcgacctacagagctccgtttatcctggcagcaaaattttgttaatttgtcttttagaccttgaggtcatgcttttgacatatctaatttcctgagccgtttaggtgccctgtcgtcttgtgcttcatgggtggcagtgcgctgctcatcaggtcaagatgggttgatattgtctttttttttaatcaattattcaaataattgtgtatttttctcatatatttttcatgaccaattgtatttttgatgagtattgctcatataaatactccttttcactgcatatttatcattataataatattttttaaaaaatttatggatttttattagattttaaaatg

SEQ ID NO: 98806 - DNA, 109 bp, Heterodera glycines
attgacccttttgtggcccaattcgaaaatggctgctgctgaccaaatggggaaaaacatagcaaaaggagcattgggaaaatgaggaaggctttatatgaaggcgatg

SEQ ID NO: 98807 - DNA, 593 bp, Heterodera glycines
tttgttgtcacgaaattattttattattgagatgatgatttgctgatttttgagaaatttgatgattttttggaaaaaatccttaaaaatggccatttttagcctatcgacatcccccgcaaattcctctaaaattttggcaaaattgccaattttcgatgaaaatctgattaaaaaatggtcaaaattttctatttttaccccggcggcgcctaactgcaccgctggaccccaaaaacttttttcttaaaaaattgactcaaaatcgcaaaaatttgtcattttttgtgaaaatctgttaacaaatcgcactcaaattttcaaaacttttactggcggcgcctactggaaccactgaacccttgtttccaaatagtttttggaaaaacgcgccgtaaaaacatttttattgatttttattcgaaaaaattttccaaaatgctgatttttggccccaaatggtgatttgttgtttgaaaaacgaagattttgaaaattttcatttggcaacactgcctataaatgattgaaaagaaaaagagaaaataagttacatggattatattttgaattctaattaatttttgattatg

SEQ ID NO: 98808 - DNA, 72 bp, Heterodera glycines
tgtaaaccattcctttaaatgtattttatcaaccagttttgaaggaaatggcgcaaagactggcacaacatg

SEQ ID NO: 98809 - DNA, 95 bp, Heterodera glycines
atttgagtccgaccaaagaacagctaaagtgcataatcctggtcattgcactcaacgacgagcaccacgacctgaggcaaaagtgtctcaaaatg

SEQ ID NO: 98810 - DNA, 128 bp, Heterodera glycines
ccaaatatttagagagtttcaaatgaaaatttaaaccaccccccccgtttagcacgccgtcctgctccacccatgaaatgcttcaaagctcattagcacccataatgaaatttagcggcctagcaatg

SEQ ID NO: 98811 - DNA, 97 bp, Heterodera glycines
ggtttgtcttttctacattaagttggatgggtggggcttatttgttttcccctttcttttttctgtctcaaaaatctcaaatttagcagtcgaaatg

SEQ ID NO: 98812 - DNA, 958 bp, Heterodera glycines
tttattttatttaaattaaaatggagataatgtttaaaataattatgattattttttcttgaatgattttgcgaacaactcaataggttttataaagaaattctgtattgaattttagttgcagtgattaaatttttgagtcttaatttttaaaaatgattttttaaatttgtttagctttcaaaaatgacgaaaaatgcaaccttttgcaatttaacattcatcaatttgtcattttaaatgtgaccaaatattcgaggaaaattaacatctattcaaatggaaaatgacaattaggttattaaattgattcagaattaatttgaaaacttttataatttttgatttaaatatttttttgctgagaataattaaaatcacgctaaaaatcacttgtaatttaatgataaaaaggtacaaagaataggaaaggttattcttttttttattattcttttataatacttcagattttaatctagcatctttaattgacgtaaatttcccatttttcggcattttattttttcaataaatgccaatgtctgcgataaattgaaaagcttctgtccccctccccagtaattctattattggcctgattttctttatttttatttttttggttttttaatgaagaaaattttaggcctaatttgctcattacatacaaacaaagtcaaatttatcatgtgaaattgggttgaataagcacagccacgcattagctgagtttataaagcaatttatttacaaatcactttaaaaaatgatttttacagaattcttataaatttttcatataaaaattgtttattcaaaattacatcgataaattaattctcttacaaaaatatagcatatatcatcaccgctaatacaattaatttataattaaaaataatattttagtttatttatataataaattatcattttatttgctattaagaaaatg

SEQ ID NO: 98813 - DNA, 460 bp, Heterodera glycines
tcgtggttaatattttcgtcagtgattttcgtcagcggataatttcgtcagtgaacattttcgtcagtgtactactttttatttattttgctgttttccatttttttcgtcagtgttccaattcggcagtgaatattttcgtcagtggatccataaaattaaaattttttcatttttatcaaattctttaatacagtatttatcgctttttgcgtatggtaactctagataaaataagtgattatttgtactttaataaatgatttacataaaagaaattgtactttaaaactgttgaatattattagtaaatttacttctcaaacttcttatctcgccatcgttcccatgcgttctcgagtgcctgcctatttgcatatttgtttagtccttatctagttttttcaatgcataaaaatgaacgatatgaaaattcattcgtttactgcaaccaaaaatg

SEQ ID NO: 98814 - DNA, 211 bp, Heterodera glycines
atttgttaatagatttgaccaaaaaatgacgaatttttgtgattttgagctaattttttaaagaaacaaaaatattttagttgccgataggcgccgccgggaaaaaatttgaaaattgggagtttttgtagcatttaaatcagcgaaataaatcaataagcacaaaaaatttaaaaagtttgggcaagcctaaaaataagaaatagaaatg

SEQ ID NO: 98815 - DNA, 102 bp, Heterodera glycines
atctgttcccgaaggcgattgctgatgtttttgatgcgcaaaattcaacaatttctgctggccaagcgttgtctaaatggttgaccacgccgagaaaagatg

SEQ ID NO: 98816 - DNA, 431 bp, Heterodera glycines
taatgatcgatcatataaaatcactgatctattagtggtagaatattgtttcttccaccttatcagcgtttctcgtgagatttccaatttagtggaaattatttcgtcactcatttgcagattggctatttttattatacaatatcgcttcatctttgtcagattgtcggcacagagttttgggttgcttgatacagttattagaattggatccatgcctgacaaagaaaattttatgggcacctatttataggacagaatacagcctaaataatcgattaattttttattttatgaattattaattttagccattaaaaaaattggatgaaaatgtaaattttagacaattttttggaatttacattttgatattgattttaaatttgtaggtacaaattaaacatgaattgcattactttttcagaatg

SEQ ID NO: 98817 - DNA, 207 bp, Heterodera glycines
atgtattatctctgcagctcttgcccaagtgatttgttgtgcgtgagaccacggggctatacaaagcccgtgatttgcttgcaccgttcgatcgacaatttcacgcagctgctgcgtgaaggtgttcagccgactacaacaacgcgcgcagcaacagtgccaaatgtgacaacaatttgtccagcgacttcttcaaattgcccgatg

SEQ ID NO: 98818 - DNA, 388 bp, Heterodera glycines
atgagaagaaaatgtccattggaagtgcgggtcgttcacgtaaattcacacaaagcaaaaaagcccctcctcttctctcattttgtctgtccatttattcatttccttgctttttgttattgggcataaatgacggagagaacaaaaagaaccttttttagattttaaaggcttttattcactttctgcccaaaaaaccacaaatgtatgctcatcgtcagcgttttaaaaatgttttatctctttgactctcgcgcattggatgtgatttgttttaataatgcaattaaaatctttttcctccaattaaattgaaatgaaattggttgaattaaagcatcaaagtatttattttttgttactgaaatttcatttttcttttctgatg

SEQ ID NO: 98819 - DNA, 717 bp, Heterodera glycines
tttttcgagatttttttgtaatgaaaattataaaaaatgaatccgaatttcagctggaatttcgattatgcaaattttggttgtgcaagcacgcagggacctcaagtcgaaaaatgggcgtggcctattaccaataaccggaaaattcaactggttctaacacccgaccgatttggcaaatcatttgtaatattttattatttttggcacgccttttctttttttgttcctttctctcctcacatttttcgctcaaataaaaagttttaatttgctgttaaccagggcggttgttttaattacgcaaagcaccgtttatcctggcagcaaatttaattgccttttagaacttgaggtcttgtgcttttacataactaatattccgagctgtttaggtgccctgtcgtcttgtgcttcatgggtggcagtgtgctgctcttcaggccaagattggtttaaaatgcttaccttaccaattataaaaatgctgacaaattatattaacattttgtggtgtgattaaattcgcctgctcatataactattatcgtatccacacccgttcctccctcacttattaccatacattcaacccttccgtattgtcgattttccatcgtcattatttcgccccataaattcgcatttttttgcttctttttatcacttaatcaatattcatctctctttcttcatattagatcaaaacaaaaaatg

SEQ ID NO: 98820 - DNA, 1003 bp, Heterodera glycines
catcttgcctatactaaatacagagtggaaaactcttaagctctttacttaaatttgtttttccttttgttaattggggaaggtactaatcgtattactaatttgtttaatgaatttatttaacacgatttagttttttagggcttggaattaaatgaaaaatgcatgagaattggtggctttcgtcccgattaggtcctccgggttcccgaccgaattcagatcggatacccggctttttcaagagtcggtggaatttcccgtacttatgctttttcaactcggaatcaatttaagccaatcagttaattaatgttattacatatttacccgtgtccccccttctttgtactggcaatgattaaggcggactaaatatgtaatatgcattcattcaaaatgaattttttaaaaattaaatttcttagaatgaatttctaatttctttcttttttgtccttttctaatttatatgatttttcttgtgagaaatttaaggattttctgctattttacacaaatgttcgtaatttttttaaataactataaataagattaaaaatttaaaataaaattttacaaagattaattcgatggcccgtttttttgcttctcaaaattaccttttttgcacatattaaatttcaaaaatacctaagcataattcattgaaacaagcacagtttcgaaccttgttttatacagtttgcaaattgtgttaaattatttaattttttatgaaattttgggcattgtgatgcttaggggccgttttaaaagagagtgccgaagtttttctttaggggatgtaaaaagtggcatatttgcacgagtccgaggcttgaaaccccaaaacttttctcaggcagagattgacatttttatttggtccctccctgcccaacaaaaggcatttttatattattttatattattttattttaccttattactctaatctattaacctgctcgccgtttgtcactgccaccagcagacaatg

SEQ ID NO: 98821 - DNA, 88 bp, Heterodera glycines
gcttaaaaactaatttggatatgaaaaaaaaacaaaataattatttacagggttggggaattgaactttagaagaagaaaaaagtatg

SEQ ID NO: 98822 - DNA, 230 bp, Heterodera glycines
cagagttccggtgggaatttctttgttgtttgctcagatcagttaacagattttgtaccaaaaattccaattctttgatttgtaagctttcacttaaaaaattgaaaaatgccaaaaatatttaataagtgaaaaacgaaaattttttagaaaaatgaccagagaacaatcaatctttagggatgcgaaattagttccaattaacaaaaagcatttagcgtattccaatg

SEQ ID NO: 98823 - DNA, 85 bp, Heterodera glycines
aaagggatatttggaagctcaaaagccatgcgaaagagaagtgccgtcgctgatcacctgctgcaagtcgttgaacacgagaatg

SEQ ID NO: 98824 - DNA, 99 bp, Heterodera glycines
ttttattaggaaaatgaagggagtaatcataagaatgaccgctggttgccttctcttcattcctttttatttgtttgccaaatatttttatcagaaatg

SEQ ID NO: 98825 - DNA, 592 bp, Heterodera glycines
cgttggaatacaccttgaacagactcacgctcaatttttctgtaaaaatgtttttaaatgcacgtaaaatctgcttgtaccgtttgaccatgtttttataagtatataattacaattaatgcattccgcttatattttcaattttaacctttgagtttgtctcatagccaagtttacttattgctcaattttcgttgttggtaaaatttctttatgatttaaaattaaaggcattattagggagcaaaacacgtaaaacttaaccaaaaacttaattttggtcatttaaatggttattaaatattttataatgtttttcgaataaggaaaatttttaaaccgagaattttttataagaaaaataatgaattttggcgattaatttttgagaaaatttttgattcataggggtgcattttctgaaagttttttcaattcttaaggatgtattttctgaaaatttttcaaatcatttcttaggggtgtgttttctcgattttattccatttttaaatgaattttccggaaaaacgccaaaaaaagtcaccaaaaacggaaaaaaacgccaaaaaggcaccaaaacggcaaaatg

SEQ ID NO: 98826 - DNA, 966 bp, Heterodera glycines
ttacaaaagctacaatatcattaagcataacgcacaattttttgtaaactctaatgaagatgaaagcattcttttaaattacttatttcaaatgattatttttattaattttctttttgtatttttcttgctattcccagcaaatgcttataacacatataacacatatgatgggtaatgtttataacattattataaaaataatagaaattttataatattttcacagacaaaaaaaaaaattattttaaaatgtccaaatttattattcaaattttataataattaacaaaatctaaaatcattttttaattatgctaaccatgagatcaaatataaattttgagattacaaaaatattttttttgttttaatgaaattcacgcattgatgataaattggataaatataatttttccaaaaacatatcactcgcgaaaaatagaattctgtgccaaaaataattaaattaaaaaaaacaattcaaccgataattttgcattttcattcaatagaaacaatctttttttcaaaaaataaactcaccatgttgggcgtttttgatgaggttttgacttaacaatttgtctaaaaaatgggccattttttgattttgattttttatatacaaataaagggggatttgagtccggcggagcctcggataatttggggaattggcttgatttgttgttaacagttcacacctgaaattgccaatttcttcagggatttttgcttaaaattttgaaattttcaaggaatttgtgaagagggcgggggttgagtgagggtcggcgctctattaaaacgcgaaaattttttacgcctaaattttcgttctcagttataaagtgattcgcgcaatcccaacgaatgactctcaagtgctggcattgcgtcatttcgcaaatttgatggagtcgtcaaacagtcgcaaaggcactgtccaattctggcaacatg

SEQ ID NO: 98827 - DNA, 368 bp, Heterodera glycines
aattgatttttaattcttgttaatgattttaatgtttattcatatttagaatatttgttcacaataatagtttgttatttattttttcaagatggcgaaaaatttccaacaagtcccaaaagaactgcgtcgttctaaaaatactcggaattatttccggaagagcccagatttgggcaagtattatgaagaagttgaaactcatgtaaaagaaaacaaaaaaatgggcatcaaacaaaatgtttcaacattttacttcaaaaacccgccaaatgaaaactctgaaaaaaatttcaaaaaaatattagcaaaactcataaatgaggcaaagaaagcggatgagcctggggtggaaaattgagaaaatg

SEQ ID NO: 98828 - DNA, 168 bp, Heterodera glycines
tctctctgtctttctctcttctctccatttctctcttcctttactcttcctttatctctctttctccgtttcgctctctcctctctttcctatctctgtctctcttctgtctctctctctcactctctcctctctttcctatctctctttttgtctgttctctccatg

SEQ ID NO: 98829 - DNA, 204 bp, Heterodera glycines
agtgagtggcgattcgataattggcatttttcgaatactttttaagcgacggtcctagaaatttaggattttcgaggcttttgaattgggtatttcaaaattaggcatctcgtgaaaaattcgaaaaattaaatttgtcatttattattggtctattttaattgaaaattaccattttttacagctttttcacgttcggaaatg

SEQ ID NO: 98830 - DNA, 258 bp, Heterodera glycines
ctgaaaagtctcgtttccattccattcgatgccgaacagcgaaaagaatttggcgaatcggaaaacactgccccggggcaaacacttcagcagacggaggcaaattcggaggagaaaaatgcgccgtcggcggttgtgccgaagaccgactcggccgatgaccttttgggctgttcctctgcttttgcgaatgaatccgccgatttatgcagcagaaaaccatcggcaattgcaaaagacgaagcggtggaggaaatg

SEQ ID NO: 98831 - DNA, 97 bp, Heterodera glycines
tttgtacaatatgttgtaacatttagctaccgtacgggttaagatacagtacgagcctgaacataaacagccttcaaattccttacatccacggatg

SEQ ID NO: 98832 - DNA, 891 bp, Heterodera glycines
ttttttgactttattgattggatctatcgtccgattcggcaatgtttcagcacaaaatgtttatttggttttatcctattaacttttgtactcacattctaacagatattgttttttgaaattattgaattttctgattttttcaactaattattattattgtttttttatcactttcaattttcaatatccattttatattaatttttttttaaattaatttttgatttaaaataataaatcgatttgttagtttaccgataattatttattttgaattttaccaaaatgaggttttgtaatttaacgaaagtttatgtcagattcaaactaactcccgtagaaattaaaagcaaaaatcaaatggtctgctgatgatggatagtacactaaaccggaaaataattgcgcgtcatttaatatttgtccttgagcaatttttaattaactactgacgaatgcaattaaaaaataattgatttgcaatttaaaattgcaaaattttaattgttttttactaaataataaaatttcatttccatgatgggaggttttattttatgctgtaattaataaataattcattcatttggatgaatcaaccaatccgaccttttgccttgttcgcccaattagcgcattaattagcactcattaacattattgaagacatattagtcagccagcgactgaattaacaaaaccgaccaatgcttttttctcgcacattatttatttggcggtaattaactcgttttaaattgcattataaataggcaattaataatgaccacttcaaaccgacacattcattcattcattcattttccctctcaattttttagcatttgttaaattcgtcagctacaaaaaatttcgcaaaataaaatg

SEQ ID NO: 98833 - DNA, 106 bp, Heterodera glycines
ttccgcacttccaattgtctgtgaccagtaaagctgtcacaccattttgctcagctgcttgacaaacattgtgctggctgtgaatgggccagtgctttacaaaatg

SEQ ID NO: 98834 - DNA, 1003 bp, Heterodera glycines
  unsure (1)..(1003): unsure at all n locations
ggaaaaaatttttttccccaaaaaagtggcccccccccccccgcgcgcccaaaaaaaatttttttttttttttttttttttcccaaaaaaaaaaaaataaaaaaaaaaatattttttttttttttaaagaagaaggggggtttgttttttttttgttttttttttttttttttttctttttctctcctcctcccccacccataattttttttttttttttttttataataaaaaaaaaaaaaaaaaaaaaaaaaatttttttttttttttttttttttttttttttttttttccccccccccccccccccccaaaaaaaaaaaaaaaaaaaaaaaaaaaaaaaaaaagaaaaaccccccccccccccccctttcttttccccccccctggtctccaatccgggagggcgggggggttgggcaaaaatttggggggggggggccccaaaatttaaacccaaaatttttcccatttcggccagaatttttttggcnaattaagaaaattttattgctttttacgggggctttatccatttgtaacgaaggaaaatagtaccattctcctattttattgttttttgaataataataaaatattatttatttagtataaaattaaaattttatgttttcaatctttgctataaaaaatgaaattcaaagcgaattgatttagtcannttactnaatgtnntaaaaattagataaattttttggctaaaatcnnaattcagtgggaanaattttgcgaanatcatccattcttcgaataggtacttaatgatgcattttctatttttacccctttntaagaatttttttaaaataatggcacacaaaaatatgcaaatatccgtgtactaattaattatatttagttttaacgcttcaacaaaaatatttttatttggcatttaaatgccatttttgacgagccgatttgaaatatcgccacaaaaatattttattatttattcacccatcaccaccattttgagatg

SEQ ID NO: 98835 - DNA, 58 bp, Heterodera glycines
agtaatctttttttttgagtttcttataataataattaaatttgaagaattgcatatg

SEQ ID NO: 98836 - DNA, 95 bp, Heterodera glycines
tctgtatttatttattaagaattttttaataaaatttatttattcatgcaagattcagtctgattgatttattatcattttataattttagcatg

SEQ ID NO: 98837 - DNA, 776 bp, Heterodera glycines
atgcttcgaagataccaaaaaaggttggatttggatgacaaagaaaaaagttatattggaaaagcttgctggtgcccaaacgtgccggcccaaccatggtgaccaagaatcagacatcatttttgaccatttctgaattcctaatctaattttgaacaaaaaaaaatagaaattccgtaataaatttacgacttttttcgaattcgggttagggactcggaattggtcaaaattgatgtcaaatttgtgatcaacaaccacgaaaagccttgcgaataagttttcacgacgatttattaggtcaaaataatttggcaaaccaaaagggtcccttcattggattttgaatagccgcaactttttaagtagctttttaagggcgaacacccaaaataaggatttctaaggtcgaataagggcgttaaaacgcaaaattttccaacaaaaaatgtgtttttcgtgcatttctcgtcgagttaaagccgcagaaaaaataaggaaaaacttataaatccgggccctattcataagcggcgcctattgttagagtctatccatcattttttttcataaattcaaattttggcgaagagtcagcaagtcctccgaaagtttatatttgcgtactgcaaactgaccaatcgtattcaatttcggccaaattccgctgcacttgtgggtgcagcgcggccaacgtggcactggcctccgccagtgttgtgccggtgtccgtcgctgcggcaccccgggctgagcaagtgccaccgctgccgatg

SEQ ID NO: 98838 - DNA, 68 bp, Heterodera glycines
ggtaaccacaaaattcgtcaaattgttttattaatttattaatttgtagcgtttctcgaacaataatg

SEQ ID NO: 98839 - DNA, 999 bp, Heterodera glycines
ttgcacggaattcgagcgaattgcctttgtaccagcccaggggacagccacaaacctggcgaattatgagggggagagagagagaaataggtgacaaaaacggatgaattcttccctttaccaactccttaaaataattaccccagcccctatttgggacatttggattcaaaaaacaaaatattttatagcattagaattccgttgcttttttgttgtccacttccatacctccaacccgtactcgtcccggtagtgttccgcgcacgcgtagcgcaaccgtttgcaaaaggtgccgtcaattttgttatacgcctcgcagtacaaattgtactggttggtcggtatctaaaagaaaaaaaaatcaaaaccgtatcaggcaaagagacttattacggggacgggacgaaatctcgccgccggaatctcgccgcagaaatttcaaaaaaaaaaaaaaattcaaagttagaaatttttcaaggaaaaaattttagaaaaatttttttataagaaaattccaaaaaaaaactatgctaactttttttgaaaatttttcaaaaaaaacagtaaattttcataaaatttcaaaaaaaaattgctgaaaaatttttcaacaatttttttctttaaattttcttataaaaaaaaattttaagaattttttccttgaaaaatttctaagtttgcaaattttttttttgaaatttctgcggcgagatttcggccggcgagatttcggcggcgatattttgtctcggcgagattttggggtgcacccccatcctcccatggatacgggcctgaatctaatagtttaaaaaataaaatttttcgggctatgggcttggccctgggtgtttttcttgaaagatttccaagtttacaaaaaaattttaatttcttgtggggcgggaacatagtgttgtatctctaatttttctcattcaataatcaactttttttacattaatactttttgccccctctcgcctcagaatg

SEQ ID NO: 98840 - DNA, 693 bp, Heterodera glycines
tcgatttgttgtttcgcttgtccttttcctcatccgtcctctctctctctttcccttttcattcattttgctgtcccccttcctccgccggtggtttggttgaaaaattgcgatggaagaggctttcgcttccaatttcttctctctcttctgtgttaaatgatggctatttccgctccatttgttctcccccccccccccttcagtttttgaatttgaaaattccgtttctttttgcgtgactcacccatccctcaacatcatatgcatatatacacacagttacgtttataacatgcatacaacaaaatttatttgtttgttttaattttggcgagagtgcttggaattctctgggcactattcgctgttagataatcccgcgtttctctttcgcgctgtgtctctatgtgtttagtggttggttacatcgattggtttccattttaaattgcctccaattaaacagaaaattggatctcaaatgttgttaaggggacatacggggttttaaacattatatatttttcccgttactttcgagttttgcttcctcctgaatttatctataaaatctaagtgttgcaaaacgcgaaaagcataaaatgtaagcaaattggtctaccctaaacgatataaaattttcattttcccaacagattattcttctgtcattaaacctaaattgtaatg

SEQ ID NO: 98841 - DNA, 1003 bp, Heterodera glycines
  unsure (1)..(1003): unsure at all n locations
tcccccccccccccaaaaaggggttggggagcccccccccccaccggcgccacccttttaaaaaaaaaaactattttttttttttttttttgtgggggggacgccccccccccacaccaacgggggcccccccaaattttttttgggggaaaaaaaaacaccccccccccgggaaaaaaaaatctccctcccacaaacacccgccgcttattttttattttcgcgggggggggattattttgttctccccccccccccatttggtttgtgtggcgcaccccccccaccccccccaccccatcaaaaaaaaaaaaaaattttttttttttttttttttgttcggcgcgcccccccccccccccccccccccccccccccccccctctttttttcttttttttttttttccctcccatttttttttcccccttttatttttcgcttttcccccctttttttttttttatacttttttcttttttcctttctccattttctttttttcttttcatttttcattttttccccttctattttttttctccacctttcttttttatctatctctttttctttccttcttcattattctccctctttcctttttccttctttctcccccttttttcttcctccatctctttccccttcttcttcntattctccttacatttttcttccgttgcactttctccttcttttttgtttttgctccgacttctcttcttctctctcttncctcacatcttcttcccctctatctcgctctccccctctctttctctatctatctctattctctctcagtcttctctcttcgtccctctgtcggtctcgtttctctatccgtctctatctctctctctctcctttctcactatatctccctctttcttttttcctctttttctccccttctctctctctccctctattttctctctttgctctaactgccttctctctcctcgttctcacttctctcttttaatacagaagaatg

SEQ ID NO: 98842 - DNA, 341 bp, Heterodera glycines
acccccaaatgtggccctaacccccttctttcattcaaccccccttcccttccccctcatcacccatcccttctttatcaccatcttccctccattccttccacctgccagccgccctcccccgcctcacttccttttcattctcttccaaatattttacgaccaaagttttccccgccaaaacgaccttgaaaaaacaacgcccatttttgcaccaaatcaaaattgttttcttcgcatcgattgatgtgcgagaacgaattcaccatgcattccccatttaattttagttgttaacaaaataaaattaagaaattttattttcagatttatttaaaatg

SEQ ID NO: 98843 - DNA, 1003 bp, Heterodera glycines
gactttatttataattgctacgatttaaaaagtttcgaatccagaaaaaaagtatttattttgttatattggtattttgaaataaagaatatgctctaaattctttccattcttttcgtgaatgtttcccattttgcataaattcatttttttaagatatttttcaacaattttagttttttatcattaatttttcgatgtttcacagaattcccattttttaattgtttcttccatttataaataaatacttgttaaattaatgcccaaatgttttgctaatattttttgacatttttctacttttcattccaatttttcatttaatttaatttttattttgtcatataattgatctaattgttttaatatttgaagtttttcctcttccgaatatttattattcattacaaattcactgttccattcaaaaatttttagccgcgaatttttgtgcaatttttatttcaattttagtccattctttttttgaaaatgtcatttccatttgcttaattctttccttaattttgttaaattttttccacaatttcttttcttttgatcaattgcttttaaaaatgatcagaattaagtccaattatttgttggcaattgttcaatttgatcactatttgttgaagtttctctttctatttccaaatttaatggttttattcagaaatatgaaaattaatataaaatgaatataatttataattacaaaaaaccttaaaaaataaattgatttccttggattttcatcaaagtatgattacaagaaagccctaagtagaattttgaaacatcattataaaaaaataagtagaatttgcttaaataattagcaaaaatttgagaataaaaccaactagaaaaagaatttttttattaattttattcagaaatatgaaaattaaaatattattttcaatattaattttcataaatgcaatttttaatatttatacgagaaagataaacgaagaaaaaagctttgatg

SEQ ID NO: 98844 - DNA, 748 bp, Heterodera glycines
ttagacaaagggaaagcggcggaaaaagccttttttattctttctctcatcaataataaattattcacttttttaaatttataaccctagtaaatccatcaaaatttctagcattaaaaacaattcataatttatttatattgtatatgaatgaattaggcatacaattatggcaaattggttttgctctctgttgtccacacaaaattcattgagcagcgtaaaaaatttgcgagggaaaagaaaaaatggaaggttaggttttaaaattaaattgttaagtgaaaatgtcattttcaattaaacataaaaatgttattttgatcagtgtaattaacactgatcagagtttttaaatcatcaaacaccgccaccactgatcggaaaatgccagccaataatcggcatcaaattgaagtacgtgccattatcgatgcgcgactgcatttctccagtcagcggctcgtacgtactttttgcggcccgcctaaattaaatttattcaattaaaagtttggagttcatttggaatttaagttttaatgaatatgcgcaatactttttttgtgctttatggaaatcaaaaaattctttaatactttcaataatattttttttaatttaaagttattttaaataaataatttgtcaagcatttcttttttcttaatcggccaaagcacattcttgttgtagaacggttttcttcagcttaaacgtgccggtccggtccacctgatcacagatg

SEQ ID NO: 98845 - DNA, 765 bp, Heterodera glycines
ctgatgacaagctaatgtgataaaacaggttaattcctttcctttcagtatccctgcaaagtttggtgcgcttctgatcagtttctgaaaaaaaagttaaacctaaactttttggcctgtttaaaaaggaattaaaaatttttaaaaattttattcatctccctttttgatagaaaaagcatcagagtgcctaaactaacatgtaaataaaatttggtgcgtttcagaaccctttctgaaaaaatatttaagaattaattttgcaaaaaacaaataaataatgaactctcttccttaataattttcctgcaccgaaggtactcactcggcctcttcgcggcctcgaggtgggccttcgcgtgttgtcaaactttctaaacagctaattgtaagtcgagaatctgatttattaaaaatttaattctgagtgagtgaaaggcatcgtctgtgttcaaaacatggacaaaagcgtgaaagagacaaatgctgggagatattggaaatgatcaaatattacaaatgaaacttgcaaaaatggaacatttgtccataaggccaaaagcaagaaatactcttttcataaatggcacagaattgctcaagcaaacacaccataacaaattgacagaaataatttctgatgtcccccacgaaaatttttccaaatgtttgaaagcttaaccattttgaaaatgatgtgcgaaaagcgggcatttctgctgaaaaagtcggacgctcttttgagtaggggagggatgaaaaatg

SEQ ID NO: 98846 - DNA, 247 bp, Heterodera glycines
atgaaaagggagggagttcaagaatttcctctactagcatgtagcatatagcgaaataagtttcatcataatgaaaattcacagcaattttgaatagttaattctcccaaaagttttttattttaaaagataataattttttattattaacttgaaattattaaaaacgggtaaaaataagaaaaaaatacataaaaaataatgtataccgcccggattcgaacttccccccctcccccaaaaaatg

SEQ ID NO: 98847 - DNA, 241 bp, Heterodera glycines
gcctaatttggaaaagaaatttttaggggctggcggaatgcataaaaagggggtgatgggttgaccaagatttttcgaagggctctgagggttaagaaagttcggggtgtcacaacaaaaaaaatttgcggatcccgctgcggtattggggtaaccgtactttcttgagccgggattttcatcggatttctgctgtttttcaatcaattttttttcatcactttaagaggctactaggatg

SEQ ID NO: 98848 - DNA, 258 bp, Heterodera glycines
  unsure (1)..(258): unsure at all n locations
tttggaagcagcacacacaaaaacaaggagctgaaaaatggaaactttcactagnaattatttttatgaattttttttgaaaatttcaattttttcaaaaaaatttttcaaagaaaaagtcccggtctcgggttttcaggtcccggtttttccaaaaaatctcgatcccgcttataaattgcatttattccgaaacattggctaaattgagcccagttgctccgattcagaaagcaagaattgcttgaaataattatg

SEQ ID NO: 98849 - DNA, 90 bp, Heterodera glycines
aaaaaagagtccgtaaaattcaaaaacaaaactttttatcaatgcttcattcagtataactccattctgcggccaccgatcagcaaaatg

SEQ ID NO: 98850 - DNA, 943 bp, Heterodera glycines
ttgtgtatctaccttgcattggttcctgattatatggacgatcattgtgcgaaatcgttccactgtgctgctgatgttgagggggtagggaatttttttgaccatcgactatttaattttatttagtttttggacaaacaaattgaggaacccggtcgctcggacttcgaagagttaatggattaaatgctactgtcggtcccttaaactcatcaaattcaaaatgacaaataaataaaacaggataacccgaatcaagtgaactgaacttccaaatgcgaaagataaagtgtagttcacagattgtccaaaatcgcgcttcggtctcacattcaaatgcatgaaccggtaagtgcctccaaccaagagagtgtttgataaaagggtagccctggcctctctagcacaaatatgaacacgcaaatgttgctcattttccaacaaaaggtttatgccgtgcgcggatgtgccattgcgaaaaggaattctttccgcaaaattaaattcaagcagcttaagggttagtccactaaaaaaaaattctttttactcagacagtaatgaaagggtttacgtgatgtaagatccaatttgccaatcgaagaccaaaaaatcatttgttgtagtgccatcctgataaaattgctccagaaatgatcgaacacccgcattttgacccgttccctcattgatcattggtataatttgttgttgttggggggtgacgccatggctatggacatctgtagcaatgcgctcaaagtgttgtcgatgggtgagtgatatcccttgcggaagggaaaaagcagcaggaaacgatgtttgagcaaaacccgatgtggaaatggccctgtaagcggatgcgcaaattgattcagcaatggaagaggcgagaattgggacggcattgacattggattgatgaatgggttaagaagaaatg

SEQ ID NO: 98851 - DNA, 66 bp, Heterodera glycines
agtaatatttttgccaatcgcttttttctattgtcttataaataaatattttcagacccaagcatg

SEQ ID NO: 98852 - DNA, 280 bp, Heterodera glycines
ggtgaattttatggaaaaaaacaaatcctaattaggtgggtttgattaagttaattaggggaataattagcaaaattaaatgattaaatagggataggtggtgaaagagttaattggcagtttttttgtaaataaaataagaatttgagtgatttccgtcaaacacccgtataattgaattttaaatattctaacaattatttatgtttttttagattaaaaagatgagttctcgaatatttttttcttaaataaattttaatttttcgcaccaattatg

SEQ ID NO: 98853 - DNA, 174 bp, Heterodera glycines
tatttaatcgtttaaattttattacatttgtcattggttcgaattcgcccgaccgatgttgaaatttggttgcttttcaaggtatttcccacttacaatacgcatccttttgcacttatattatttgaccgtgcccaaattgtaaaagtgatttggacactgaagttcgaaatg

SEQ ID NO: 98854 - DNA, 1003 bp, Heterodera glycines
tccttacatttatttattttattctgtttgttttgatcgttcaaaagtgtccttgatcagcaccgttttttttgtcgccaatctctcgctcttttgcctgcccattcattgtttttcgcacccatgaaaaattccatttttgaaaatttgaaaactttttgaaatttcttcagcgcccactcatcatcatttttgttttgtttttgtttttttgatgttgttgttattgttctcgcaagaaaaaaagaaatttagaataaatgcgtgtactcatttgtcggtgagcgctttctctcttcacaaagcgttttgatcactcgccgccaaattgacatgacgccactatttttaatgcaaagctaattagaataaaaaacaagtttttggggacgggccttccttctccatttgggaggaggagacggatgggtcgtgtggtttctctcttaaattaaacaaacggaagacaaaacaaaatttggcccctggggggggggggggcaatttgcggtaatcaaattggggacgatgaaatttgggacgggaagtgagacgatttgttcaccaaacagagggcagtctcgagcaaccgagtgattgatcaattttcaatttttgtttctccctctaagcggtgcgcgagggttttgcgcgtcattttctcccgttaatcgtttgaatttgggtcggaaattgttttttttcccgaacctaattaatgataacgttctggtccgcccgaaccaaacaaagccaacccttctcttattgtgggaaagaaactctcgtcagtttcttcacattctcgaatcgagagaattctcgggttttgagggttcccgttctcgaatttctagggacccgattctctttgcacagtctcgaaaaaatccaattactaaataatctttggtctttataccaacagcaattttaaaaagtgattgtgccaatgttgccaatccggctgctttttctgttggccgtgccgtcgtcggcaatg

SEQ ID NO: 98855 - DNA, 318 bp, Heterodera glycines
tcttaaaaaattactaaaaaattctatttttggttcttccttctagtttctctcttccttccaattcagcaaatgtccggaccccctctcttcgacggacccctccccaccattccgccgtccgtcggcgcggaccccctctcttagattattttttatttttagtaaatttagtattcgagtcataaaatttaaaataaattttattttatttggatatatcaccaattacttaaaaaatgtcattaacatgatttaataaaaaaatcttttctaactaattaacatattctttcagttcatcttggtcagccaatg

SEQ ID NO: 98856 - DNA, 246 bp, Heterodera glycines
tttttgtcagggcggagagaacagccgacggcggcagtgctcaaaacccctcaaacgggcatcttttttgaatcatcacccgaagagactgacggaacgacgcacaatcgtttgtttgacgaaaaccgggaaatgtgcaattcggcacgactcagatcactgatccaaagggtacggcacgcactcaaaattcaattaaaggacatggcctagccgagacttctggccattttcaatttaaaaatg

SEQ ID NO: 98857 - DNA, 687 bp, Heterodera glycines
  unsure (1)..(687): unsure at all n locations
atagtaattaatcctccctatttttgctcactgatcaactgtttgctgatcaatcccagccagaaaaatgataaattattgcattgtatattcattntaatccaactcagtctgctgatcaatgtccaagcactttcacatttcacagattttgtgctacatagaaaatctttattttaccatttacatttataatttttaaattattctaaaattacgatagaaaaattaataatattttattgaaagtttttattatttactttttgttggttaactattcactgattgtttcgccacgggttagccgattcacaaaaataagcgattcataaaatcgcaaaaatcaaaatctgacttttcctatgatttttatcaataaaattgttatagagaccggcgagggacgggatctttcgcgggattttgcgggatcccagtccgtaatcccgaatttttttttgtaaaatgcggaattgcaggcttgcgggattaatcccatgggatcccatcccgcaaaaaaatttagagttctaatcccgctgtgggaccctctgttggtctctagcttattgtattaattattataaaaatggttataatttataaaatagaggcttaaataaacattcttccaaaagtttttggcttaataattaaacttacttaatattaaataaaaccatg

SEQ ID NO: 98858 - DNA, 109 bp, Heterodera glycines
ttcgtgtgaaaaacaatgcagtaaaaaaattgtgagcattttttgtcgctatgccaacaatagcaaaaatggacaattaatggcgttttaaggtgccaaattgcaaatg

SEQ ID NO: 98859 - DNA, 321 bp, Heterodera glycines
ttttgtcgcgataattagctaaaacattcattgccctcccccctcaatttgaagaaatgcaacggcaaatgccaacgctaacggcaaaaacgccggcgaaaggagcgtaattatttctttgggccaattggatgaaagatcagagatcgccacacatcaaattgccaaattcgcaaaattcacaattcgctgacctttccttttgtgccgccactttcaatgggtcctcaaagccgaattttcggtggaagtgccggcggcagcgaattatcaaaatccatcacatttcacgatttttgtgagttgactcagcgagagatg

SEQ ID NO: 98860 - DNA, 222 bp, Heterodera glycines
gagttcgacatttttaaaaaagcctggacctggattccttccatgttggcctggacctttggacaaaaaccctgaaaaacgccaggtcctaagaaaaatcccggttgaaaaaaaggacatgtacctggaaacaaggaaaacccatgcctacaaactctataaccatcaaaaagcgtgttaaatacatttaggattatattccagccgcttttcgactacatg

SEQ ID NO: 98861 - DNA, 92 bp, Heterodera glycines
atttttaaattttttaaatttctttattttttgttgattacaatcgttatctattagagtttttttcgttattaatttttcagttaaagatg

SEQ ID NO: 98862 - DNA, 189 bp, Heterodera glycines
attgactaccgtaagaataaatttaattttggtagcaccaaatagtgttatttgagtaggtggtaagctcgtcgactgctattgctacgactgttattcttaaatttataaatttccaagactttaagcttttaatgtctccaactttttattgataaattatttcagattttcaagatttgcaaaatg

SEQ ID NO: 98863 - DNA, 1003 bp, Heterodera glycines
accacctatcttgactccctttcccttgttgtctctcacaatttctttttccctgtcgctagtcatcccaatttcccttccttttggccttttcttccacggggcgcccgacccgcccacctgttgccaatataaaaatttgggggagagatcggattgatcagtgtgatcggggactttgatcggcttgttgcgaacttttcctttttgcttttacacatatactcatcgctaaataaaccgattgttgaattaatcggagctttcaattggggaatccgcgctttgggccaatgcccctggcattggcccagggcccaacggattcacgcgcgcacccatctaacagctgcctcaaatcccttccccctcctacgaccaggcagggccccatccctggacgtttggagtttttgatcagagctcattaattaattaatcacaggggaaaaagggttggggaaaagaaatttcagctaacaaatgccagtcccgggacaagacaaaaataaacacaaatggcaaatcacgagaaaagactaacaattaacgaaacaaaaatgcgaaaacgaattcgaagaaaaaaatgaggcaacaactgacgggaaacattgcgatcacattggcaagcatcatccaatcaacgacgtccaattgtttcattatttttattacaccaatcgacgaacaattctttaattacttcatcacttaatttcccaatcaacaattactggagttcaacaaatcttttatttttctgagacacttcgacgacataatttctttaaattttaaatttctcgacacaatcaacaaaattctggatttattttctaaattctggtgttaatcagcgaaacatattccgacaattccatcaaaaacggccgacgcgcggagaagatcgaattctttagaggaagaagaacaaaacgaaggacaaaccgaaagggataaaaggctttggctcatccaccaaaaaaggcagctgcgtaatatg

SEQ ID NO: 98864 - DNA, 187 bp, Heterodera glycines
ttcactcactcactgtgaccacgaagattttatggtgacgatgatgatgatgggcgatgaccttgcggcaatgtatgaaaaacaaaaaaacataaaaaagtttggcgggactcaagtggacggcactcgagcggatttggcatgagaaggggcggcgcggcgcttttgaaaaaaataaaacaaaatg

SEQ ID NO: 98865 - DNA, 153 bp, Heterodera glycines
cggattgggaagaggaggttcgttttcagtgctaaacactcataatttggtggttagcaccagcacaaaacaacaacatcagtcgtccaccagtgaatgcggagatttcgccacccaaatcggtcaccttcgactcgacgaccgttttcaatg

SEQ ID NO: 98866 - DNA, 286 bp, Heterodera glycines
aattgtgcaaaaaatcgtggaaaattttaattttttaaaagaaaaaaattaattttttaaaacgaaattttaattttgccgtacttagataaaaagacaaaaattgaaaaaaattgaattctcgccaataatacgcctcgccaacgccgaatgatgtgcaaaaaaaaattgaggaaacattaaaattgtagccaaatgaaaggccaaaaacccaagccagtataaaaattttgtttgcattcgcgtttttatctctgatcatacagcaatttatttttttacaatg

SEQ ID NO: 98867 - DNA, 105 bp, Heterodera glycines
tcaattttgccattttttgtacatatttcagatttttgcatattttgtcatttttcatcaaatatttcgatttaaatatcttttaggaagaattttttaattatg

SEQ ID NO: 98868 - DNA, 285 bp, Heterodera glycines
gtgaatacaactgaaaggcatgcacaaatcaacacagccatcatcgacttaaattgcatggaaatcaaagcagaccatccaaaatggtggaaaataccaatcaaagtgaatggctcagattatccaatgcatgttgattccggcgcacaaatcacattgttcacaatccaaacatggattcaaatgggcaaaccgcttttgaagtcagcacaaattcgcgtcaaaaattgcaatgaccaaacatttgcaattgaaggacaattttggtgcgaagttgaatacatg

SEQ ID NO: 98869 - DNA, 497 bp, Heterodera glycines
taaaaatatatttttttttttctaaatcctttaataggggggccaattttgtgggcccaaaatttccccccggcgtccagaaaagtattttttcataaaaaattaatcaattttaatttttcggggagcccttttggccgtttttaagccttgttaagtcgccttttgggggttttttggtgactaaattccccatccccaatttattaattgagaattgaactttaaaaaaaagggtaagaaaatctttccaccaccctttgaaattaagaaacttgtgtggtgtccaggtggcaaaatccctttttaagacaagtgattaattaacaattatattttattaagctaaaagtctgaaaatagcgaaacaattgccagcggtgaagccaatatttgcagatagctttaataaatgtcttagtttaattactgccgtcgtaaaactgaatgttatttcgaaatatttttgggaaaatattgaaaatgacttggatatg

SEQ ID NO: 98870 - DNA, 300 bp, Heterodera glycines
  unsure (1)..(300): unsure at all n locations
ctccgnctggtcaagcatagtcctcctccaacagctgcaaaacagccttctcccgtaaaaactacgcccgcgtctaagctaaagcccgcgaaaacggttccaaaaccaccaccacctcctcctaaacaaaaaacaccaccaaaaccttcaccgatacttgagtcaccgcctcggtatgaagaatcgaacagaacaattgtaaagccaccagtcatacaaccatctccacctcatcttgaagaagcgaacaaaacaattaccaaacagacgacatttgatactactgcaaaagaagtgatg

SEQ ID NO: 98871 - DNA, 222 bp, Heterodera glycines
agtcgatactatgggtggttcaaggtattgcaacaaatactgtgcttttgtatgtgtttattagtttgagaaaaggggaggggagagtaattagcctatagaatcggggtttatataattttagtcccttctattcagtttggagcgtgacccgtacatacacaccggaaatcgactcattccaaagccttttgtgcctccaccgccgccaggcaaaaaatg

SEQ ID NO: 98872 - DNA, 106 bp, Heterodera glycines
tcttctggatattgaaaagaattttgtgttgcatgactctgtcaagcacgatcaaatggtgactcaaaaatcattttgccatagacatacaaactgaattgaaatg

SEQ ID NO: 98873 - DNA, 81 bp, Heterodera glycines
ggtatcattcgaaagctcataatatgctctattaatctgcaaaatcccaaaaaaatttcgtcaattttgaacaaatttatg

SEQ ID NO: 98874 - DNA, 164 bp, Heterodera glycines
tctggcactctccctttattgattcatctctcgttttttgaaacgctgtctaagtgtataaatatgcaaaaatttgcagtcaatccatcattattttcttcacttacaaattctgccttctgtgattgttcatctgtgacgacgacacttcgtgaacgaacatg

SEQ ID NO: 98875 - DNA, 177 bp, Heterodera glycines
ttttctcttccatctctcttcattgcgatatatctaattttgtttttatcttccatgtaatattttttaacgcgaaaatttgaaattatcgattcgaatgccaacataaaagcgctatacattcagcataatttaattcatttaatatttttccgttcctaattatattgtatgatg

SEQ ID NO: 98876 - DNA, 62 bp, Heterodera glycines
tctcatcaagcggttccgctgactatgacgttgccctttcgccaacccaattgcttgcaatg

SEQ ID NO: 98877 - DNA, 88 bp, Heterodera glycines
caatccattcgccccatcaccatcacatcccaatctgctgtctccctcccttttgccgttcaattcgcctcgtcatctcgtcccaatg

SEQ ID NO: 98878 - DNA, 729 bp, Heterodera glycines
atttgtgcagcaataatgaatgaatgcccttctctttccgttttacacaattaatttgaggcgtgcctttttgcacgcttttttgaaaaaatttgaaataacttcaacaacttatgttttcgatttttaataaaaatcgaacaaatgaatgttttacaattaattaactttgacaattaaaattgctaacattgacaaattattttagggtttactttattccatttgaagttcttttcaggttttccttaaattatttgtattactcttttcactattattttgttgataatttgattttaaatgcctttttttattattttagagccaaacaaacgatttacctaatttaataaacacaataaagtattgtctttcgaaataattgtcttttttaaatttatttaatttagttataccattaaataaattaaattaattttatttcactttttcatttatcaaatttcttcacatcgttttcctttcccacataaaaagtgaattgcgtcaagacaaacgaattggcatttggaaaaatttcacagaaaatatttttcctctcttttttttacttttccaacaaaattatttttacattattttattcatgaaaacgtgggaacataaatggtttttgtgtcaatttaaggaagtttatggtgaaattttgcgtaaattttctattttattataaatttagctaatttttgccattgttattaaatg

SEQ ID NO: 98879 - DNA, 311 bp, Heterodera glycines
tttcgtttccgatgaacgtcaaaaaaagcttcctcgcttcttctggtcactatgcgacacgcacacacgacagcgtcgctgacgagggctttaaagctcggtgtaaaatttttgagggtgggaagcgagcccaatttctttcacgtctggactttgacctgggaaaccaagaactttatttgttgaacaatttggatcttttatttacaatttacaaagctcgtgacactttcatcatgcagacattgaaagcaaacgatactaccaaataccgcgttagagtccatgacgtaaaactgtatgccaaaatg

SEQ ID NO: 98880 - DNA, 480 bp, Heterodera glycines
atgtgttcaaaacaatgccggacagaggctatgccttgttaagccttaattgccagatatgggccaaaagtttttatagtaaaggtttattttgtttgtttttttgggggtttaagggattagccaatggtatcgcccagagggccctatttataaatgcatatggattaattaatgtgcctacgttatttcgactttgaacacacgaggattcgaactgcatttttgattcaggaatatgacacgaccattttcagaattccccctccccccgtgcaaccatttttgaaaaagtttaagatttttgaataaaactgttgcaattaggggaaggaaaaatgccgaaacactgccaacactccagcaaatttggcccaaggaccgagaacaaaattgaaatattatttatattagttcaaaaaattaagagaaaaacaaggtcaaaccatggtcgaaataaatagattattttaataaatg

SEQ ID NO: 98881 - DNA, 369 bp, Heterodera glycines
gcggggatttgattgattgggatttatggaatgaatgaactaacgaggagaagtaattagcggggatttgattgattgggatttatggaatgaatgaactaatgaggagaagtaattagtggggattcgactgataggaattatggaacgaatgaaagaatcaagacgggagattaaataataggggtaaaatctagtggattccactaatacattatgcgtgtttgtatttaatataaaataaatcggcgatttgtcacttttacgaaacgcccatagtggcacttttacgaaacgcccaaagtggcctttttacgaaacgccctggcacttttacgaaacgcacattttggcactttttacgaaatg

SEQ ID NO: 98882 - DNA, 94 bp, Heterodera glycines
caattgtacgcttggtgtagcatgattgagcagtggccttggtatatttaatatatccagattaatcccccccaaatgtcttttcaggcgcatg

SEQ ID NO: 98883 - DNA, 95 bp, Heterodera glycines
cgtaatttgggaggcggggggctgcccttttgacaggctttaatttgtaagcctatgttcagcagggacatgttgtggttggcgaattcgccatg

SEQ ID NO: 98884 - DNA, 875 bp, Heterodera glycines
ttgttaacagattttcacaaaaaaggttggtttttgcgattattaagctcaattggtaggattttcatttaaaaaatgataaaatatgtatcaatttaaaaaaaaaactatgaggaatcatattttctttataggaaacgcacgagtatacaaaaaaaaaattgaaaataatctaatttctgtagagggattgaaccaggggaaagaagaagggaaagtcaaggagactagccattaggccatttgcacacttgggcagtgttaatttttatttttccctttgactccaattttcttcactaatttttcactcatgctggtatgcacaatgctaaggatatttatctgtagctagcgatatgtggatagggtagctgcagataaaaaaatctgcagataaaatccctatgcacaatgctagcgctaactatctgcagctgaagatttttttatctgcagatacccatccgcagcaactctctcgtcacacatctttttatcttttctatccctcaagagaaattttctaactgggggttttcgaggtcgctgatcatgaatctgacatttatttcaaccaattcctaacccgaactcgaaaggtccaattttcggtttttgttcaatcatcatgaaatgtaaatcaaaaaattttagaggtattaaaagtcatttagtacaatttttcaatttttaaacttatttttgggattttaatcgacatttctatcgaaattatcctcatatcgatgaggatagtgattttaatctgcagataggtggtagctgctaccctatctttagcattgtgcatatgtagcctagctgcagctgacgctaaggattatttgtaaaagaaactgtcattgtgcatg

SEQ ID NO: 98885 - DNA, 500 bp, Heterodera glycines
tctcattgtttgtgtttgcatatgtatttacgtctatcctgcctttttgattgtttttggtgcacttcataaataaagagaatcagagcctaccattcactttgacgggcaaaacagaatatcaaattttctaaagaaatcatccaaaactttgagtattgtcaaggggtagtggttatcttccgggtatttccattcgacttattcattcagcacatgtacattggtttaccaatcgagtagtgtgtagtaaaattaacgaaggggtagagagaaatgaagtcacatagaaatttttcattccgtcttcaaatccgctcatttatttgttgctcattaacattttcgcgatctcgcagcctaatacacttacaactggatggacaacttgacttcgtataaattcataacgttttacattcctctcccgcactttagcatttatttttttcaattagacattaatatacatcttctaggtagcgctaattgcaggtatg

SEQ ID NO: 98886 - DNA, 136 bp, Heterodera glycines
agcatttcttgctgaaagttatgttttaaatctaacttttttcaccagattgacctgttcatactctaaactttggtctctgattagtcttaagccttagcttttggatgattattttttaatgatcactaaaatg

SEQ ID NO: 98887 - DNA, 1003 bp, Heterodera glycines
aatttttgaaagaaatgttttttgaagcgaattaatatgcaaaatcttaacaagattcagttaaatattcaaatttttctctcggcggtttcttattctcttaaaaaaattagctcaaaatcgtaattttgtcattttttgaacaaaatcgttgagaaatcgcattaaaaattacaaaaatttttctgtcggcgcctattagagcaggggtgtatctgttcatatttctaagaaatgttctgatttggggtagtgtcttattttcatttaaaagaggaaatttctgaaaaatttggctaattcctaacaaaattcattaaaaattcttaaaattttcccccagcggcgcctatcggcaccgccggccccccaaaactcctatttttcttaaaaattagcccaagatcgcaaattttggtcattttttggacagaacttgttaacaaattgcattaaatttttaaaaaatttccctcggcggcgcctatcggcaccgccgaactctcttccctcacccatacccaaaaatttttcggaaaaatgcgtcgacaaaattgttaaaatcttataattgattttcggaaatgtataaatttctcatttctaagccgaaatgctcagaaaatagttggcggtgagtaatgcttgattttgttgaataaaaaagcgattcaaagttttggaagcgtgttttaaaaaatgtccttatttttgaccctaaaatcttatttttgaccagcgatgctcttatttcgggaaattttcaagggtaaccctggtcttgtaccagttgcattttcatttttttcaatttgaacataaaatttttcttctttctcaacaggtcgaaggcgattacgaagaaggaacgctcagcaaattcgccgtggacagaaccaaaggcgttttccccaactttgaaaaccgttcgttggccgttccctatgtgatggaagtgccgcctgagaggctgatcagaagccacgattcgatcacaatcatg

SEQ ID NO: 98888 - DNA, 58 bp, Heterodera glycines
cctgaaaataatttaaaattatttgatgaatatatgtattattaggttttatgcaatg

SEQ ID NO: 98889 - DNA, 159 bp, Heterodera glycines
cagcaggcatcacaaccggttgccgtcacttcgtcggcggcaaaaccgctgccccaacaacactttgtgcccccgccgccctccttttacacggccggcaaccgttcgtccaacgccgccgccgccgcactgcttggcgttgtgccagcgcctccgatg

SEQ ID NO: 98890 - DNA, 366 bp, Heterodera glycines
  unsure (1)..(366): unsure at all n locations
gagaatgagagtgatgnaattgagaggaggatcagagtaagagacatgagagagacaaagagaaagggagagatagagggaaaggaagagagagagagagaaggaagaggtgagagaaatggagagaaaaatgagagataaagagaaagggaaatgagagagagagggaagagagagaatgagggaaggagtaagagaaagaaaaaaagtatttttgatcagaaaaaatgcctaagaggatattagactgatcaaaaagagaaggaaacgaaaaaagacacgagactattttaactgagactcacaaacccaaaggaactgtccgagcagtacgcttccctccgcgaacggtctcggttggcaatg

SEQ ID NO: 98891 - DNA, 255 bp, Heterodera glycines
cagttaggtacgacaaaaaacgttattcatttattatttaattattgaaaaatgtaaaacgtgtaatttcattaaaattggcaggtgccatgaacagaaaggcagacacaaaaaatcacaaatattatgtaaattcagaaacatttaattaaattaattgtcaggtgagctttcggttttactcaagcaaattaagtattgccatttgttgttttatcttaaaaaaaattaattaaacaaaaattcagcaaaatg

SEQ ID NO: 98892 - DNA, 82 bp, Heterodera glycines
ttccatgtttcagttggctttgtagcgacgtttggatggtattctcccatcatttgaccatgctcaactcggcctcaaaatg

SEQ ID NO: 98893 - DNA, 419 bp, Heterodera glycines
atttgttaaaaaattcatgatttgttaattgttattagagaaattaaataaaaaatttgctaattttggtgtttaatgtaactgaaacaaaaaataggtttccatccgcaaaagtggttgtccgcaaatgtcggctttaaaaatcaccaaatgtcggtccgcaaatgtcgggtaacctttttgagacatccattttcaacaagacgcgccttcgcggagacaagacgtagagcaatcattcaaaggccattttgtagagaattttgtgctctttctgttcgtcatattcatcttctatggaaaatttttcccaaccccctagaatttttttttcgaatttactcagattttcgtattttttcacccgcaaaaattttgtgtttaatgccttttttatggcataaaatgaataaaaaatg

SEQ ID NO: 98894 - DNA, 459 bp, Heterodera glycines
tttttaccactatttttctctcactcatcgtctgctcgtctctcctttattataagctattttcctaagccaacgcccttttctccctcttttctgttagtcatttctcattggtgttgacgatccaacattcagtgtacaaatttgttaaacctctcaacattttaaatcaaaatcctaataaaaatttcgttgaatttctccgcctcttatttgtgcaaaattttcgaaaaagtaattttctatttaaaattaaaaaattcagaagcaaattcaagaatttttttatttttaaatgcattttttaccacatgaattatgattaaatttttgcgtttcaattcattttggaattaagaaaaataaaaattgataatcatttgatcatttttagcgcactttaagcaccgccgttaggcagcgcagttccaaaatttattccatgccacagatattatg

SEQ ID NO: 98895 - DNA, 291 bp, Heterodera glycines
ataaatcatttttttctcaagttctgctcgtgatcgaaactttctcgatattcgagaaagactttttcaaaatattttccatattctttcaaaatcaaataaaaataattataaattatggaagcagccttagaattttttccttgcaaattttgattatttttttcctaatttgtttaaattattcaactataaattctttaaaaaaatttgtgggtaatacgtagggtattcttcaaaacatcagcagagaaataacctattttttacagtcaaattaatgtgccaatg

SEQ ID NO: 98896 - DNA, 1003 bp, Heterodera glycines
tttggcacgatttttggtttttaatggctcgcttctatctctatttccaaaggatttgccgcatttacagcatctcgacccggtatttgacgttgcctttgtatttttattctacttgcgccataagttggcaatcgaacaagttgatcatcagagagtccttctcttgacgatccaattaaattgcgcggggcagcttcaggttgatccatagcagcgtcttttagctgttcctgacgctgccttttctataatttaataaaattaaataggaaatattccaattttaacaacagatttcaccacgttagactctgggtccggcaaatggttatgatttgttcttccaattaattttgtgctgtcgataggtgaatgggccctgcctgggcatgatttcttgacacatctccatacctatttaagataaaatatttaatatatacaaatactgaaaaatagcctgggtttggcctgctgctattattctatcagtacgcatttcatagccttcaaaaacagtcatcgttttgcttttcgttgtcctcttatcgggttctaatcggtctgaaaattgatttcgattttttgtttgcttaaactacaaaacttgccttgttgtggttgaacatgacataattgaagcaaaattaaaaaaaaactttgaaatacattctataatatttataagtgggttggtaaaaaatattcaaataaaatcgtaaaaattctacataaaaacggtgtttttcttttcatttcccgctattttcctctttttgccagccgtccgcctctcttgttattgccagccgtccgcctctcttgttattgccagccgtccgcctctcttgttattgccagccgtccgcctctcttgttattgccagccgcccatttctcttgttattgccgtccgcccatttctcttgttattgccgtccgcccgcactttataactatttcttttatgaaacgtgaaaatattattgaactctaaatg

SEQ ID NO: 98897 - DNA, 53 bp, Heterodera glycines
ggtcattcaatttaattattcaattctctaattgggttgtttaagctgtgatg

SEQ ID NO: 98898 - DNA, 591 bp, Heterodera glycines
tggcctggcaggtcatttaaaaagcaattaaaaatttttagattttttattcatctccctttttgatagtgaaagcatcagagagccttatttaacttttaattaacatttggtgcgtttcagagcacgttctaaaaaatatttatgaattaattttgcaaaataataaataattaatgaaaaagtcagaatttcgaaaaattttaaaaacaacaagcgttggcattttttcaggttaagttagtcctttacaatggagaaggcctgcaaaatttggagagattatatcgattttagtgcgctaggttcgatgaaactttttaaaatataagcctaaactttttggcctgtttaaaaaggaattaaaaatttttaaaatatttattcatctccctttttgatagtgaaagcatcagagagccttatttaacttttaattaacatttggtgcgtttcagagcacgttctaaaaaatatttatgaattaattttgcaaaataataaataattaatgaaaaagtcagaatttcgaaaaattttaaaaacaacaagcgttggcattttttcaggttaagttagtcctttacaatg

SEQ ID NO: 98899 - DNA, 798 bp, Heterodera glycines
tagaaacagtgggaaaatttatcatttaattatttcatcttactaattaattattgtaatagccgcttttcttattgtttcttcgtgcgtttcaagcctcgcacagtcaggaaaaaatatggattttcataaatccctatttatcagtcagtcggccattaaattttcaaacactttttgcagaaaaaaatctatcgtcaaattacgtctatttctactcccaatcagatggcaaatgcctcgacaaacgatgggatcaaagtcatataatccgtttaaggattataatttcagtcaataaccaataaattgttttttaaatatttagtgactttcaattttgattagacatcattgacaaaaacaataaggcatgcaatttattcatttttattttttactttagtatcaaaatattcaatttcccatttgtttaaaattgtccaacataaaattccgtcgtttagtgaatcataggaataatttttatacaccacaaaacatttgaaattttccatttatccaattttgtaaaaataaaatgcctttttccatatattttttgctgctcatttattatattatctccaatgaaaaagtttttgctgaaaatggagaaaagaagtttctttgcaaaattaatcacatttaaattattattattttaagaaaattgtttttggatttaaatggcactgatcggaccattcggctgaaaaactgcggcaattgcaaagggttttaaggcttaaaaagccaataaataagtaattggggtgttaattaagcctggccatg

SEQ ID NO: 98900 - DNA, 119 bp, Heterodera glycines
cgtatattctttttgaaaaataatttcgaaccccacggacatttgtaatttcatacgttaataaaagaagcattcgattaaaataaaataaaattcagctaagaaaactccgtttcatg

SEQ ID NO: 98901 - DNA, 171 bp, Heterodera glycines
attttttttgaatcttaaaaattttttatgctctaattctatggtacacccttaagtaaaatataagattttgaagcgatttttatgaggtgattttatggtgaaatagaataatagattttttaaaaatataatcatttcttttttcagttacacgagcttaagcccatg

SEQ ID NO: 98902 - DNA, 401 bp, Heterodera glycines
  unsure (1)..(401): unsure at all n locations
gcatcattttttgggggggggggggcgaagttcgaagcccgggcggtgtacattaattttctttgtattttttgggttaattttcatactttntaataaatttaaatgtntggttttattaataataaatttttntagtntaattaaattattttttgatgaataatgattttcatttaaattatttattatatttaattaaagaatttcagctattattttaaaatttaattgtaaaatttttttcatttcaatttaaataactattcaatcaattattatacctttcataatttgtttttcattaataaaaagtgtattatatgttaaaaaatgaaaaatataacacttcgattttttatctattttgattaaaaacaattccttaattaccataaatg

SEQ ID NO: 98903 - DNA, 409 bp, Heterodera glycines
tggtgccgctaggcgccgtcgaatttttctttttgaaaatgtagtcgaaatttatgttgctaagtggtttcgtaaaaaatcactaattagggtgtttaccaaataattaccataacttttgctcaaaattaacaaaatttaatccttttgataccgtttgacagctgataatgcctgctaaaaattttcaacaactatacaaatttttgtatttgatggttgattatagcattttcgaatctggaattttatgacgattttgccaacaaaacaataaaatactgatcaaactccctccctcccccctttcattagcctaaaattttttaaatcaaattttttttagattttacgagagttagaagtacgcaaaaaactgctcgatttggttcgatatgaagaaaaaatg

SEQ ID NO: 98904 - DNA, 96 bp, Heterodera glycines
ggtgagtaatgggaaaagcatttgggaggacaaaaagttaatttttaatgaattgggaattaattaacgaaaaaccaaccattggcatttgttatg

SEQ ID NO: 98905 - DNA, 169 bp, Heterodera glycines
cttttccaaatttttcgctttttaaattttatcaaactgtttttttgatataaatcgaaaaagacattaaaaaaatcgaacaatatcaataaaattataatgtgaaaaatcaaattacgcccatctcggatttatcaatactatatttcgcaatttttttagaaacatg

SEQ ID NO: 98906 - DNA, 66 bp, Heterodera glycines
ggtaatttttagcccatttatcttcatcaaaggaattgtttttttctttagttggcactgaggatg

SEQ ID NO: 98907 - DNA, 1003 bp, Heterodera glycines
agggtctaaaaatgttaatttaaaaaatctcaaaaagaaggtgctaaaagcccgaaaattaatctataagagtataggaaaaaaatttgagggagctctataattttaaatttaaattaaataataaatttaaatttttcctaattcaaatttggcctttttaaattaaaacccatttaaaaacattgaagaaatttaattcaataaaattatattcttaaattttcatttattaacctaataattaaagaaaaggaaaattattatttacatactttaattttagagaaaagtatgcctttaaaaataattattattttgtgatttggaaattataaattaattttcaggggaataatttttgtattttaaatgattttctaaatttaattttctttttttagaaattaaattaatttcatttaaagaaccaattttttaattgcctcacctttcatcacacttttattatattatttttcatttaaccttaaaaaagtaaattaaattaaaatacgcaaaagttaatcgaatcgaaaagtttatttaataaagttttttcaaaaatattacttttaaattaaaatttttttaatataaaatagtttttattaaattttattaatttaaaaaagttttccttttaaattttcttttattttccgttcattttaattttaacattcttttaaataaacgttctatcatttttctctttaatcaaaaaattattttcaaattaatataattttaattaatttttttttggattttcgtcatgacgctattttccaatcctcgatggtttggcggtgccaatgccaagccaacaaatcggaggataaaagaaatttaaattaaattacgcaatatctaaaagtgacggtttttaaactaaaatttattataaaatatttttattcagttttattgaattaaaaaaaggctttgaaacaaaaattcatttttttaatgtaacttaattttaataatttccatcatg

SEQ ID NO: 98908 - DNA, 249 bp, Heterodera glycines
ctttttcgctgcgctgtgctaatgatgcgttcggtcagttgttgcgcctccgctggtcccccttttgcacttcccccccccattttcccaattttacatttttctctatttttcatccccccccccctcccgccggtgttgtaatttccattccattctttcatttcacacaaaatgctctcagaaaggccaaatttgtccccttcgtcccccaacggaaattggcaaaacgacacttttcaaaaaatg

SEQ ID NO: 98909 - DNA, 1003 bp, Heterodera glycines
agagctaaaaccacaaaaaagtcagacttttcgcatattttatttataacttttttacatgtcgatttatatttgtgatttttgggatgccaatagagattgtaaagctttcgaatgataccaagtttgttgaatttatgttatgggctaagttcattttttatttaaatataccttagttcgattaaagccacttaaatttaaatgaaaaatctgttaactgaaaatcttatatatttacgttcccctcccccaaggtggacaaactcggcacagagacgaaccaattcgtacaaacggcaccgcttcatgagcgacaaacacgacttggtcgagtgaccatgagcattcaggtgaatgagcacaagacaataaacaggcattgtaccgtgccaaaattgtactttagttttattataccgtaatatttggcatctaactagccattttatttagttaaaatgaacttaacccgcaacatagaaaaattaaattttttccaacttaagaaatcatacaataggatttattcgttaatgtgcacagatacaccacaaccaaaattagctaatcatgaccttgacattttttgctagatgattagtttttccaaacgctgattaatcatcccaaacagatgattcatgccttccgtcaattccatttgttttaaaatgtttgtgacttatacgacaagctacacatcgggaaaattgagcagccaataattgcggcagtcaaaaattttttaaatattaaaaaaaaaattgtttacattttttaaattaatctttttgttttttaaattctcctagtaaattttttgttggtggtcccgtatggcttgtcggaacagatctcggtccgcgttttaacgggatcccgaaacatgcattcgatgggagtaaattcaagacattatactttttctttgttgattaaaaatataattttgatataattcgaaagcacatatagacttctatggccaaatttatcaatg

SEQ ID NO: 98910 - DNA, 87 bp, Heterodera glycines
atccattataccttaaaaagtagttaaatttatattctaacagagaattcctcgatttaggtggcatcccgccaaattttaatcatg

SEQ ID NO: 98911 - DNA, 269 bp, Heterodera glycines
accaaaatcatgtgactttacgaaaatataaaccaaaatcatataactttccggaaaatacaaaccgctgcgaaataaaccaaaatcagatgactttccggaaaatacaaaaggcttaggaattttaaccaaaatcatgtgactttacgaaaatacaaaccaaaatcatataactttccgtaaaacacaatcaattataatcaaaatcttgacttttcataaaacctaaaccgcttcagaattaaaaattacatttatagacagcaatg

SEQ ID NO: 98912 - DNA, 313 bp, Heterodera glycines
  unsure (1)..(313): unsure at all n locations
ttcgggtgaaaacaaaataanttaaaaaatctaattaataatntaaaaaaataaattaataatttaaaaaataattaaaaatntaagtaataatttaaaaaataattaaaaattaaattaaacatgtgtaaaatttcattaattgattatcaaactaaatttcaaaacatttcacaattcctttatttatatatttaaaattttttgatatttaaaaagaatttcattttatattgttttttgttttaatttttatttaattttaagtttatcaaaacaaattgcatccgaaccgaccacaaccaacgaaatg

SEQ ID NO: 98913 - DNA, 815 bp, Heterodera glycines
aaactttgcccttacacgttgttatgccaaaagccaaaaaatataacctttactatgagtaatttttgttaaaaatcttaagaaaatttcaagaaaataaataaaactttctagcatttttttttaattttatgctgaattttacgaatttaaaattttttccaattcatacgctggaaatttttcttgaaattttctttttattaattttccctgaacatttaaaaattttctcgggtgaatctgatacgggggggggcgagcttctcgcaaaattaattttccatttagagaactcgtcggtactaattgggtttgtatccacatttttggccaaatttttcaaaagcgtaaccagacagtcagacagtgcactatttccttcttttcttccgcataaccactggagaaaggaagaattagggcacgggctgattgggtgcatacggattatcagattagggcggaacgtcattacagaaacagtggttcgaaatcctaccactcaagtcgaaaacgcacgctagtggtaacgctgtgctttcattggccctaagtcaatgataatctctccatcatcaagaaaaggttcctgtgaggaatttagatgaattataattcaaattgaaggtcaaattttaaaaatgaccaaatagaaggaaaaattacttcggtaagcccaaataaactgattcatcatgaaataaaatttgggctaaacaatttgcttcctcaaatagaagcacatgcttttcacaaattggttctactaaatctgacagacataaaaagatcatgcttttgtgagcaatatg

SEQ ID NO: 98914 - DNA, 821 bp, Heterodera glycines
tttctgaaacattttcttgtaataattttgttgagtagaggggtcaagcggtgcctataggcgccgcttggaaaaatttgagtgaaaaatgtaacagctttccctaaaaaaaatgatcaatatagccactaagctacaaaatgatcacttttctgctggtttttgattaaatttaaaaaattaaaaatttgaaaacatccttattttacttactaataaaaaataataattttattatgtgtggggatcgaactaatttgtaagacaaaaacaagtgaaagactggaggtttaaccgcttgactatattaatatagtttattattttttctcaactaaattttcctcttaaccaattaaaaaaaatattttctcacagcccactcccccattcttaccaatgtaaaaaatctcgtgttgaatgatctccatcaacgaagagtttggccaaaattctctatatcgacttttttgggaatttttcaaaaaataaacccttaaaaaccgaaaattttttaacttttagtaagaaatttttgaaaaaaatttatttatataaattcatgtatttggcattttttagtgtatacaacttcgaaccctacttatcatttttaacagaagttttgaagcaatattttatttaaaatagaatctatatttttaaataaattaattttttttaatttgggctcgtaggcttggtaaatgtccagcccgatgcgaccataggaagtattagaattagcaaaaaaaatctgtattctaattttgggaaagaatgtattaacaatatagatcacgatcaaagcggatgccatg

SEQ ID NO: 98915 - DNA, 111 bp, Heterodera glycines
gaagttgaaaattgaattgctaaaaatgaaaaaaaaacaaattaatttaaattggaaacattaataaaattcctaataaaagagacatttatgaaatgcacaaataaaatg

SEQ ID NO: 98916 - DNA, 701 bp, Heterodera glycines
gggttaagatttatgttatgaaaaaatagtgtgccctattctattcattttcacactttaacctgttaaaaaacggatttaagcgctttgccgcatattttttgattttacaaatctttttttaacacctaagaaaacctagaatttttggctctgggccatcaaatacaatttccgaattgggggccacagattcaaatttcgtcaaatcgtgaacactgcaaatccaaacggatccattcgatgatttttagcctaaattgttgcttttatgcctcacaaattgctgaagcgctatttttggatatttagcgaactctttattgacttttttaaagttctcgacgagctaagtctaaaaatcaaggaataagtcgaaccggcgccatttaataagcactgggacaactgagtcccagtaaaaatggaaacttcagtaccaaagaaataaaatatgaacaaaaataatttggtcaggtcaatcattttatggtacattttggtgtttttgtttcagtttatatggctaacttttcaaatcaaattgtttgaaacgacaaaactccgcgttgtgcttttgcaattcagcgaattttccctatataaatgggtaaaatgtgaaaaaatttcattgttatcaaattattatttcgttgctctgatcaaagttcaactgtcttctactgctgtacaacaaaatg

SEQ ID NO: 98917 - DNA, 1003 bp, Heterodera glycines
ttccctttattatgtttaattatatttttaataattgtcaaaattgaatcagaaaagaaaacgctgcaacaaaagtcatttggcgaaatatttggagaaaaatgggaagaaaaagaagaagaaaaaagaaatgaactcaaaaaaagagaaataattgcaaaatattataaaataaaagaaaaaataaagcaaaaaggaagaaaatattcagcaaaagaatggaataaaattgacagaaaaatagcgaaaaaattgggaacaaatcgaaattatattcaaaaatggattaaagaaattggactttataaatatcacaaatcaaaaactgatgaacaaaatatgaatttttcaacgctttattgaaatgacaaatgaatataagcaaaaaagaaaatattcgccaaaagcatggcaccaaatttttgccgaaatttgtaagaaaattggagttggcattgggacaattgaaaaatggaagaaacattttggcattcgcagaaatgactgacaaagaaattgcaaaaattgtgaacacttctcaacagaatatttccaattggaaaaaacattttgtggctgaataaaatcattcgatttttagaattaacatgaaaacttttttgataaattttataaaaccatttaggtttgctgtttttttcaaatgtcgtaaatatactgaataaacagaaaactgaatacaaaaattcattaaagcgaataatgcctttttctctaatgagttaattatttttcaaaatttttccactttttccttattactccgattttaacccatttgtgctgtcttaattaatatactatacattcatgattaaatttggaagttgattccatgttggaactttcattttataaaaataattttataatcatttattcagttttttaatcagaaaaaaaatcatttatatgcctcaaaaaatgaattgcgatttaattgaataaaaaaataaaatcattttaagacgacaaaaaaatg

SEQ ID NO: 98918 - DNA, 51 bp, Heterodera glycines
accaaggacaagaagaccaaggacaagaagaacaaagcagctccaccaatg

SEQ ID NO: 98919 - DNA, 609 bp, Heterodera glycines
atttgcttgttttctaaatcctaatttatatctttgaattggtttgttgtcttttgactctcatcaataaatttttaatctaataatactcaaacaatgaatcattggcaaagctgaaaaattgctgacctaaaaccgtgttaaccgagcgatgcttgaagcgtgccaaaaaaattcattaacttttttaattaagataaactcaagtttaaaggcgtagtcgcgaaaaattaaaatttaatttcgcaatgtaaattaaattgattctttctatcaattgtgttattaccgaaagggctttttttttattaaaatccaaaaaatatttaatcaaattgattagtgaaaaatatgttcgagtttttgaatgcatttttccagtaatacatgattacaaaaaccaaaaattagggaaacttttcccattcttaagggtatgtttttttagttttctaatcaatccttgggggtgtacatcaggggtggagagcgcggacagaaaatcctgcggtcgcgcattttttttcaagtttgcttggcattcattttgaaaattttgggcttttcagttttatgaaaggaagtgttgaaatgggtgagggacaaatg

SEQ ID NO: 98920 - DNA, 755 bp, Heterodera glycines
aagtgtcgcggcgcaaatgtctatctctttctgggcggcgaaagtgtcgcggcgcaaatgtctatttttactgggcggcgcaagtgtcgcggcgcaaatgtctatttttactgggcggcgcaagtgtcgcggcgcaaataagtgtcgcggcgcaaatgtctatttttactgggcggcgaaagtgtcgcggcgcaaatgtctatttttactgggcggcgcaagtgtcgcggcgcaaatgtctatttttactgggcggcgcaagtgtcgacgcgcaaatgtctatttttactgggcggtgcaagtgtcgaggcgcaaatgtctatttttactgggcggcgcaagtgtcgaggcgcaaaagtcggtacaccattcagggcattttattttccagatgttctgcctatccccaattaaggacaaatctaaaaaatcagtacatcagtaagctctgtttaaatgaaaggcatgacgtcaaacattttttgagtataaatgtattgagtacaatgatcagaattatatatatttttttaatttagaattaagcataaatggctaattatattattcttatttttttaaatgataaaagcatcaaaaatttcagtagcattttaaatcaaattcaaaaattttcgacgcaaatacctcatttttataaaatcatatggatttattcatttaaaaattaacatttattttttaattttatcattaaatttcagtagcattttaaattcacaaatccttcaatg

SEQ ID NO: 98921 - DNA, 179 bp, Heterodera glycines
agactcggctcttctgcgaattttgcaatcgaccagggcacattcaaaatgaatgttggtattgtcctcgagattttcctggtccctctaattcagaaaatagacaaaattgggaacattcagctgagaatcatgccaaaaatgattgtgctagtgaaacacaacaattgagagagatg

SEQ ID NO: 98922 - DNA, 154 bp, Heterodera glycines
agctcgttgacggaaagtcgtgtcaagagctgaatgaaatgacgcaagaccgacttcgtcaacttcgcgagctgacgcggatgggcgcagtctacaagttgaagaaatttgggaatgtgaaataaacgaccagctcaagagaaaccatgaaatg

SEQ ID NO: 98923 - DNA, 577 bp, Heterodera glycines
tcgtacatatgaaaataaaagcaaattcttataaaaatttctcatatggaattcgaaaaattgacttggtttttaactaatttcatttaaaaattccaaattttaacttatgaggacaattcgtcgattgtaagagaaggaggcagaaaaatcctgaaatttggccggatactaaaaattccagttttttctacgatcgactaacctcgattttttccctttcgtttataaaaaaaaattaggtcaaattcgatcgtaagaccacttcggaacgggtacaccccaaaatatcaccgagacaaaatatcgccgcaaaaatttaaaaagaaaattttcaagaaaaaaatcttaaaaaattttatataagaaaatttcataaaaaatcattgaaaattttttttttttttgaaaaaacttcgtaatttatcataaattttcaaaaaaaaatcgcttaaaaattttcaattttttaacttacttacaaaaaaattttctaaaatttttttcttaaaaatttttgtttgaaattttttttttgtcccgtccccttcggaacccgcgtccctgcacaggtatg

SEQ ID NO: 98924 - DNA, 554 bp, Heterodera glycines
ttttcattattccaaagtgacaatttttacaaattggctacaaattttaaaaataaatttatttgtatatgtaaactctaaacatttttattagattccgtaagaaaatcgtgtttctgtaccctttggaaaatttaactgtgaagccaggttcgcactaccccccccctcctcctcctccacccgtttgttcccccacccccagaaaattctcaaatttcgaattttagaagatcttataatgaattactaacaaaaccttttaattttcaaatttttcttaaaattttcttatgaaaaatttaaataaaaagttttttttaattttcgaagtgggggcggaaacgaactgcttccgtgaagtccaggtcttaattagattaaaaaaatttgaggttgcgacccggcgacttcgattttttttattgttctatcctaattcttaaatgccctctaatattgcattggtttttctttagtttttcgtcactgcaacatacagaagcaattgtcccgccgacgactccttcctgtacaaatgcaggctcggcatg

SEQ ID NO: 98925 - DNA, 510 bp, Heterodera glycines
tttttattggataaataatttaaattagataaaaatatattttaaattattttacttttattattaattgtttgctgcttaaatatgccataaatcggtagcggaaatggtgccaaccaaatttcgttgcaatgtcattgcaaatttataatatttcgtctatcgatgttaatgaatttcatcatctttatgtttgccaacataattgttttgaatgatatccgacaaaaaagagaatggcacctagtaatttaatgttatttattttttaattatatttttttaataaaaaatttaacattatagaggcataataaaataaataattggcaaaaaatgatgatgatgtaattaaaggaagtcgaaatgaagcaaataaattatgttggcatcttttcaggccatcaaattaaaggtgtataaaaggaattaaataaacacatacaaacatagattcggattttacaataatattaattcttaataattaattaaaaatctaaaaaaatg

SEQ ID NO: 98926 - DNA, 494 bp, Heterodera glycines
attgggaaaaacataggaggggggagtctgaaaaaggcattttttcgtgtgcttttccaaagacaaataaaagttttttgttgtttttagtaacgtcctctcccgccgcttttccacaatgatgatgaagccaaaaggctgtggtcggcaagcgattgatgaggggttttaaactcaaggggggagggggtcacaaaaatatgatggtattataattttgcgattgttaagagaatttttttgagggagtgaatgatcttaaaattaagtttttttttacagttggccaatgtgtgttcaacatcaacaaaaaaaagggccggagatttcagttactttaattattaattagaaaaattattgaaaaaaatccacgcattaccatatcaaatttatcgcagtgcattgggttcagccacgccgagagggtgtgacatatctcgtggatacaaattctcaccagattatattcattttcattttttgcagcaatg

SEQ ID NO: 98927 - DNA, 460 bp, Heterodera glycines
ccccccccccccccgcaggtgaattaaaggaaagtcaacagatggagggcaataataataaggacaaattgagacgataaagcatccaacgagaaaaacaaaagccgtcaaaactaattaaatgacagtcattagtcactcattaattcactgttctttcccagcaccaccaaagcgcacttagtcatcacaaaaggggcaaaaacattgacagatgtttgagaaaggggcagaaattggccaaaaaaatgcggggaggggtggcaccgcaagggattttagtcacccggacgacgcaatgggacggacggacaaaggccgacgaaagaaaggcctttgatcagagagggccaaattcttagtcaataaagcggtaattttacctttgactttccatttttaggctaatgttctgattttgaaaagttgagcaagatacccactccaacgtgaacaaatg

SEQ ID NO: 98928 - DNA, 141 bp, Heterodera glycines
ggaatcgaatgcaaaaacggccgatgctttggttgattggaagaacacgaattgtgctcggatgtgccatccgttggtcgaacgggtgcaatcgcttctcactgccattccgtttaaagtgaattttttggttgccaaatg

SEQ ID NO: 98929 - DNA, 125 bp, Heterodera glycines
agtcgggacagagactgaacgtgggggagagtggggaaagggaaaagagttggattaaagggaccgcccccaaggcaacaattggttatgtcatatgtgattagggggtggtgattgggacaatg

SEQ ID NO: 98930 - DNA, 129 bp, Heterodera glycines
aaacgcaaagacaaaaagtgaaaaatcgaatattttttaaaatgtttttttcatcatttttttgcctctgccgactgtcctcacgtaattgaagtgaccgatgttgaagcagaagcgttcaaagtgatg

SEQ ID NO: 98931 - DNA, 280 bp, Heterodera glycines
tcagcagaaatttgtgtcgatcacttggatttgccccacaaggtcttgtggacaaacaaaaccttcggctcatccaccaagacttacaaattactttaaaattaaaataaaacgaacatgtttcgaaaaatcagttccaaaaatttcagcaaaatcaaaggcaaacgccaaaatttaaactctcaaattcgtggccataaaattttagaaaaaaaaaattcaattaattttctatactgatcagtcagatcatctcttccgagtttatcagccaggtatg

SEQ ID NO: 98932 - DNA, 1003 bp, Heterodera glycines
atgctaataacaaaacaatagaaactatgaatataagaaacaaaaaaaaaaagaaatttttaactgtgcttttgcaaaaatcaaaaactgacaaaacaaatatgtaaaaacgaaaaccaaacatttctttttttcaaattcatttataacgcaaaacaattacaaaacgccacgccaattcaaagcatggcggatacagacactcaactttattaaataggatatttttaaactatttttttattattcaaatattaaaaaatcttggtaaataaaatctcgctggattacaaagattaaaattatttctatttaaaattattttctattattttatattaattttgcctaaattcttattcagataaattagtcgacattgacaaaagttagatattttttttgtcgaaaaacagtacaagtcggtgcagtatgagttggttataaaatttgtattaaaatttaaagaaatttcctgttcacgcacgtgaacggattcggaattggttgactgttaaataggtcaatgtggctttttttttgaaatgagtttttgaggcatttttaattttgataaattggcattatgtttttgacaatcattcaacttttctccgcgctaacaaaaatctttaattttcttttcttccaacaaaattttgtttttttttcatggaaaatgaattatgtattttatgtttgtattagagaccgagatttccaaaagtgccggaccggaccggtctgatattttcagaagcaaccggtttccgggcccggcctccgaaaaaccggtgaaacaggaattttccctaaaatcgccgaaccggtttccgggcccggtaaaaaccgggccaggtccggctcggtctctagtttttatgcacaaattttgttttgtttcatttttggggtgatttgtgcatttaattataaaaccttttattaagataaaaattgttttcatctcttatttatttccgcctcgccctccataaaaatg

SEQ ID NO: 98933 - DNA, 1003 bp, Heterodera glycines
tcttgctctctctaataccacataaaaatataaataataataataataaataaattaaaaaattaaatttaattaaaattaaattgttaaaataataatagttaaaaattaataaataaatttaaaataatagataaaaatttaaaaataaatgaaaaaaattttagaaattgataaattataaaaataataataataataataaacacaaattataatagtcaaataaaaaaaaagctgagagggcgctacctattgagtcctaccgtttcagtccttgactagtcaatccggggtcaaaattttgaatttggcgccaaaactttaatttttcgttatttttgaatttgagaaattggtttagttttggcggatgcctattggaatgtttttatagggcttcgctgatgtttaaaaggggaggggtgggcgtcagcttcgggagggaagcgacgccgggtcatttgagagcacgcagggccatttgagcgctcgcacgtgtcatctatgcgcccgcaggtggtcatttaaatgtccctttactgtcaccaatactccatcctaatggaggggtagaggccgtcccttatgacatctctccccaaatgaccatttcgttcgcaccatctgtcgcgaaagcgaagggttaaatatgtctctttggcaacctgccaaatgaccattttagttttagccccgcccactttaactagtataaatagccggctattaccagcaaaagtcaacttctcccattcattcgcgaaaattctacccacattcattgcttgcgcgctccgtcaaaaaatatttaaactaacaaatttgcaactaaattaccctttcatccaatattcaacttataaaaaaaaaatattttcaataattttctattacaactataaaatttacatttttctaattcaaaatattctttcatattatcttatatcacctataaatcataaatttttcattcatatattattattcaaataaaatg

SEQ ID NO: 98934 - DNA, 718 bp, Heterodera glycines
tagataatttcgaagagaagctcggctggtaatcgcttgcgcatcatattggtcatgaaatttgaatgaatgaatgaagagtgaattaaaatatttttgtgcccggttctcatgggctcttttcattaattattcaatagttaatattgacttcaaaagacatttgaatttgccgacaatagtgaaggagataacttcaaaggaaatttgaatttgccgacaataaggaaggagagttcgagaaaattaattggtattcggatgggtacaccccgcccctaggcttcataaatactcagtccaaatcacatttcattcatatctgctcatgtctttttactcactttaataataataaaatttgtaaaaataattaaattataataaaatttttattttctgctgttaaccagagcggttgcccaattattaggctccgtttattctggcagcatttgtgtgtcttttagggcttgggattgtacgcgtgacctttactaattacccgagccgtttaggtgccctgtcgtcttgtgcttcatgggtggcagtgcgctgctcttcagggcatagttggtttaaaaaatctttaaattattattattattatccattaatttgcattcacaacgacaatttccatgcctcaaaaatatgtgtcaagattgttcattttatccattcaattcattatttttccctgtaaaattagataatg

SEQ ID NO: 98935 - DNA, 195 bp, Heterodera glycines
tttaggtgactttatcatgaatagcttttctaattcatccacgattttaccgttgttttgaatggtttgttaaaatttgatgggacaaattttccaaattcaatgttaacatttgtgaaaatcgtcccatccgcctttcctttagctttccaccaccaccgccattttagtccaacttctccgtcttccgccatg

SEQ ID NO: 98936 - DNA, 52 bp, Heterodera glycines
  unsure (1)..(52): unsure at all n locations
atttttttttttttttgtttacttttattatttctgataaatnttgagaatg

SEQ ID NO: 98937 - DNA, 1003 bp, Heterodera glycines
tccgtttccgccctcggacgacggattaaaatgtccaagtcatttcgtcaaaacatttcgtcgtctaataatttattatggagggcaaaatccgactgaatgaatgtcagcggatttggggctcaaaatcggctccgatttcaaatttacagctttttcttcttattcatatgtatatgatactggaaacaaagaaaaggatttaaaatttcaaagttttttcggtttcccatgataaattaattttaagtaataatttgctttattcatcttataattagcatatacaatgatttgagagtatctttttttctgaataaagttttccacaacagcaatactttttttttggaattattggacaaatcggaactgttaatttttttcgctttttaacaataaaatggtggtcaatgcaaaataagaaaatggaaagggattggagtgggggataatccgttgctaaattctcaaaaaaaaatcctcaaaacgatgcacaaaaaggggtaaatgccgcgcggcactttctgtaattatggcaaaatgccgacagacaaaaaaaaatgaaaaaaattgagaaaggtttagtgaaagtgtgaagaaaaaagagtgagcatttattttttgtttgctttggcactttttgtccataaaatggcaaattgcggcctttgccattcattcgttcgttctcgaaaggaaacagaaaaagaacaaaagaacgaaaaaagaacaaaaattattattatttatcaacagagtgaaggaatggcaaacattggaaaaaagggagaaaaaataagggagggggggggggggtaaaaattgaaaattcagtgagaaaaaaagatggaaattttgtagaagatgggtcagtcgacctttttgcgatttttcgtttttttccaagaattacaagcaaaagaaaattcatagaataaaaattaatgaaataatttttattttttatttaaaaatggacaatatttgagctcagcaaatg

SEQ ID NO: 98938 - DNA, 73 bp, Heterodera glycines
ttccccagacaaccaaatttctcttgataattctgtgcggttgtcttttttaaaaaagaaatggtgagtgatg

SEQ ID NO: 98939 - DNA, 116 bp, Heterodera glycines
atcagaaagggacaaatattgatcaagaagcagtgatattgtaaggaacagagaaaggaaaaaggatcggaatgggaagaattggaaccaaaaatagtgatcagaggaataacatg

SEQ ID NO: 98940 - DNA, 740 bp, Heterodera glycines
taaagctgtctgcgcagctgcaatcaaacaaaatttatacaaaaaaaaaaaaaaaattatcctcaaaagttagtaataaacatggcttcttttttatgtaagaaaaatcgcgaaatatgtaaataaaatatgtataagaaatgctaaaatatgtattaaatatgtacaaaaatccccaaatatgtaatatgtaaataaaatcttttaaaggttatttttttgaaaaaaaattcttcgtaaagagtaaatacgcataaaatgccataaaaatgacctaataaataggcttagaaatcaacatttattattttaaaaattaatttttggtatcagaattttgaaaaatatttttttgggaacattttcaagaaaaaattttaaattttcgcaagaaatttctataaattctcaaaatttttgaaaaaaattgtgtacttttagatttttttttgggcatttaataaaaaattccttaaaaattgcaaaatatgtacgaaaaatgcgaaaaagtccaaaatatgtataaaaatatgtagaaaaatcgcaaaatatgtaaataaaagtcctggtttttgttcgcaaacacaaaaaataaagtgtttttcctactaattaggctatagagaatccaggaaaaaagatgtatttacataaaaaaagaagccctggtaataaaattcttttttttttaggttattactataattttcctagttttctcatattatagctatagtatg

SEQ ID NO: 98941 - DNA, 812 bp, Heterodera glycines
atcagcacaatcggtggccgagtggccaatggggcggtgaacaaagcgatcagtggcggacggaggggacggaaaatggcataaaacaatggcacaactcagtgattattttcaatgctttcatatttttctatgaaagtttattctcttacttggccattgtcatgtttcacatttataataaaaaattatataagtttttctaacgatcttataaattcaatttgttcccaacaattttcccaaaaattttcaaaagtttgccgaaaatttaacaatttagcattcaatccaaattttttttcattttgatgtaaaattttttcgtcaaaactcaaaataaaacaaattaattaaatcaattaaataatttatgtcttcatttttaacttccgaaccttggcaaaatactaaaaaaaataatttaactgaaatttttatttgaaaacattgactttcttaataaataaattggcattgtcactaatttaacgtggcaaaaaccattcaatgcacatattacaagcaaaaaaaatattttctcagttattttttacaattaaaataaattaatattatattatttttataaaaaaatcataattaaatgttttacaattataattagattagcttaaaattatttttaatattaaatatgacacataaaattgaattagattttaactaattgaattgaaattaataatttaaaatttcattaattcttcaacatatttaattttttggcatttttcccacaaactttttggcactttcttaaataaatttgcttaaattaggtaaaaatg

SEQ ID NO: 98942 - DNA, 150 bp, Heterodera glycines
gaggacattgtcccttttcacgacgggagagaagcgtggccaatcgagaacgattgtttgatgtatgccgatcgggtcgtgattccaaaatcacttcaaaagggagtgcttcaacgattacatcacggacacccgggcatcaaacgcatg

SEQ ID NO: 98943 - DNA, 1003 bp, Heterodera glycines
aaatttgcggcttcaggaaaaatgcgtcagtaataaaatatttttaaaaatcattctgtagcatgacaaattataattgctgaatttatcatttcagtttttttaattccaaagttataaaaaatttagaaaatttatgaaaagctgttaaaaataaacatactgtgaataattggccattgtaggtttattcccaattaaaataaaattttgaatcatcatactaacatttctcgtttttttcatgaatttttgattcctgacacattttccgctcacaaaatttgttacaattccaaaataattttccctttatttttacagcgaataaggcaattttttgcccaattaaaaagggaaaataaacctttttttacaataaataaaaggtgtaaaaatagcgcagaaaaaaaggaagggaaatggtaaagcgaaaaggcgaaaagaagcgcaacacgcgaaagggcggggggaattgggccaattacaattctgtgccccgatgaggaggcgatggcataaatagaaagtgccttttcaaaatgtgtacacatttgcatttaattgcctaaaatatttttttaattataattattattttgcaaaaaatttctccagagataattttttttgtttcttgaaattaaaattcgaatatttacggactgaaaattgacaaataaaaaaagaatggagcaaaaagtcaattttcatgtttaaaaaaaattataaatccatatatcatacggatgatttgttttattattgcacccaaaacaaggaattttctcaaacgatgtcaaaataaaccaaataaaaatgccaaagctttcacctcctctcaaaaaaacattcaatttttaggacagaaattctcttcaccagatcaagaatttttataaacgcaaagatttactatttttggtcttatttttctattgaagccctgctgtggtcaaccgctttattgttttttttttctcattttcacagcatcaaaatg

SEQ ID NO: 98944 - DNA, 398 bp, Heterodera glycines
ttttaaatctaaaaaataaatttaaattttatatatattttttgaaattctatttaactaatttatttttatgcaatttgggcctcagctttctataaacataaactctcataaaggatggttttttttaacagaaattactgtagttttactgtgccttccccaaaatgtcattcgtcaacaaaaatgccacaattcgcccacaggtgccctctgtgttggctcacaaaacttggcaaaactgtgcataattaaactgtgcagcggcccggaaaaaggtcattcattcattggcgattttagtcagtcgtcaccgaattttggcagaatacaacggtgggatttgctattttcgactcactctcgacactaattattttacacccgaaaatacaatg

SEQ ID NO: 98945 - DNA, 65 bp, Heterodera glycines
ttccgtttgccccttttttagtagtcacaatacttatttgaccggtctccaagtgcacggcaatg

SEQ ID NO: 98946 - DNA, 264 bp, Heterodera glycines
ctgctccggccgcccccgctcatccgcccgatggagcgccgggcggccgccccacaaatattatatatgatatgatcgaccattcaactgcacccagatcttccccttccccacccattacattccgtacatgaaagaccatcagaagtccttgcccccgccctcgatcttcgacctccccactctctcacccacagtggcatccacaacgatatcacgaggatgatatgacgatgcccgccacaagaaattgcaagtataatg

SEQ ID NO: 98947 - DNA, 319 bp, Heterodera glycines
  unsure (1)..(319): unsure at all n locations
tctgtctcctccaccacaactgcgggaacaactggcaaaaaatgacaaatcaaacacattntaattttgattnttatttgtttntaattataattttattgcatttttttactgtgtccattccgtccattctgtccacagattgttgttcttttcgcgatcggttgattcgccttaaatttgtacaaaaaattttgatttttaatcgatgaatttcctaaaaaatgccctgttataaattgccaaaattttcaaaaaaaaaaaaatggcatccaatttgaatactgtaatttaatcaacgcgggttaccgtaccaatg

SEQ ID NO: 98948 - DNA, 95 bp, Heterodera glycines
tgactctgtcaaaggaggaagtgaaatgccttattttcatcacaggtttgagcgacgcgcacaaagaactttgacaagagtgtctccgccaaatg

SEQ ID NO: 98949 - DNA, 284 bp, Heterodera glycines
ggtatggaaagaaaaaatagttatttctgggactttttcagaaatcagaattaattctccaatgtggcccaaattttaggcccccagccacagccccttgcttctcccagttttaagtcttggatttgtcaaataaattcaagacttcaaattaataatcaaaaattctcttaaaatttttttgaacccaattcaaaaaaggaaaaaaatttgcagtcaaaaaattattcgaatttctccaattttgtttccataatttccgaaagttattcggtatcataatg

SEQ ID NO: 98950 - DNA, 822 bp, Heterodera glycines
ttggaccctcaaaataaggacaatcttacaaataaggtaaacgagtaaccctagttgtgaagacttgaaagcaaggggttggtttttctaaatagtaatgaatgttattacttaaccataaaaacatataaattcgaaaacctaaaatgattttttaaatacataaaaaaattaatatttgaaaaataattaaataatttatatgaaaaaaaacaaaaaaaaacaaaaatagatgttataatcttgaaaaatactctcaaatacaagtatattgcaaatacaccaaatctgagtcagtttttaaatgcgcaagtggcaagtatattaattaaaataaaaaaaattacactcaaatatttatttagaaaaattagtcaataattgagaaaaaataaaaccgtttaggaagaaacagttactcattataaaattaacattaaaatagatgatgaatgtacttttaaattttaaaattcaaaagaaaaataatatatataaaaaaagcatcatagattggttatatggatgatataccccatgcatgtattataaataaataaaaaaaattgaaaatagttaaataaaattattaaatttgattaaataagaataaatagtaatgtaagatttaataataaatatagtactcaaatatggttgaaaaattttaatctatttccatcaccgatgtattgaatttatgagaaatgaaattgaaaaaataaacaaatacatcaaaaatgagaagatattgaagaagctgaaatttaaatcactttctatttttttgctaattgcgaattgaatgggagcttttaaatg

SEQ ID NO: 98951 - DNA, 142 bp, Heterodera glycines
ttttccttcaaaatggagacgagattttcggcatttacctgctaacataattgccaaggttgaaccggaaacccggatttctgcctatccctttgacagcaactccacctgggaacaaattggatttggagagcgagtcatg

SEQ ID NO: 98952 - DNA, 298 bp, Heterodera glycines
atcagtaaaaagtgcactgatcagtacaattcatgttcattactctctgtttgtctgtctgtgcctgaatttgctgagtctatcctacaaaaaatatcgccaatttggcattccgtccttctcattcactggaaatataattaccgcgactaattagccaattaaagttttcacaattaaaattttaattatatgtattagtgacagaaactagaccgggctaggcgagatttttaactaggtatccggaatctggctttttaatcgaataattttataaaaattttgaaaatcaatg

SEQ ID NO: 98953 - DNA, 879 bp, Heterodera glycines
tgccaatggcaacggatggcacgcgccgaaggaatggaccgactcaaatgtttacggtatgccaaagtcggagcatttgccaaatatttaaaatccttccgcaaatactcattggcattttcattagttttgttttgtctctttcttttggcatttccatcgttcgctttgcttttgcgcagattccctccgttgtgggcttttcctcaaagtcgaaacggatgaaaagcaattgcaaaatgccaaacgtttctttccgacgggcggcgaagagttttccttcagaataatggggggagagaatgttgaggagggcatttcgccatggacggcggcaatctttcgtcaaaagaaagacaaagggaggcaaatggaaatgaatttcaaaacaaattttcataaattaacgaattaaaaagacatttcgtattcgatatttattaaatttaaccagaatatgccatcatttggccttgcttttcagccacttacatttgttccggcactttaatttccaaacggcacgtcgtaacggccgcgcattgtatgttcggaggaagcgtcaacaaaatttgtttttccgaagaatttaaaagtgcggatgaggctaaaaccgatgacttgtgccggtgggtggcacttttcggatcattccgattaaattggctaaaattggcattttgaaaggcaaccgaagggctttttgagcgtccagcaaatccgagaacagatttccgtttacattgggtccatttgcctttcggagcaaaaggaaacgccgtgtgagtcgccgaaaacgcagcggaaattccgagtcaaaaagtgccaaaattaaaaatgaataaataaataaaacccaaaaaaacattcagtgccatg

SEQ ID NO: 98954 - DNA, 103 bp, Heterodera glycines
ttttgagaaaaatgcgccaacaaaaccgccacaacaaatccatcaacagaccaagcagggaccgatattcatttcgagtaacagcattttgatcagaggaatg

SEQ ID NO: 98955 - DNA, 1003 bp, Heterodera glycines
catttaaatatttttctatataattgtaattgcaataaaaaatataacataatttatttttaaacgttaataaataatttgcgattttctgaaaattcaaatcatttatatatatgatcaagtgatcatcagcaatttttatttctcattattgagttatattatttttatttaaatttatctcatatcagattatttttcttgcaaaattcggtttatatttatttcatattacattagaactgatttacaaaatttaaaagtaaaattaatttgttattaaattttaaaattaaacaaagtttgtgaataaatccattttcattgtgatgtaatgacgagtgagattcgaggtattcggcaagcttaacctaacccaatttttcttacttattgaaaagtgatagacttttatattgtaaaaccaattatcttattttaatttttatttacagttatctagcagtcgaatatatacaaaagcttataattagtgatagtaaatttttcaatttacttttatttttgcacattgaattttttatctgtactaggcagataattctgttattcaatatataattgatattttttaaataaatttatccctcaaatatgatgattcatattactccaaccaattaaatttattttccatataaattgcaattactataaaaaatataatttgattcatttttaaatgttaattaataaattgcgattttcttgaaaataaattgtaatttttttaattcaaaaaatatctatttgttttaattaatttttcaataaatttttttttgttgttttcttagcattttttgtgttgttgcttttttatgaaagaatttaactttttgaaatttaattactgaaatgttttgaatattttaatttacacatattttatttatttacttatattagtggctatttgaaacttattaaaaatttttgcatttgaaatttttatgtttagattgacttctttattctcatg

SEQ ID NO: 98956 - DNA, 264 bp, Heterodera glycines
attttttgataaataaatttaaattttcaactgatagattttaaagcgaagaattatggcaaaatattaaaataaactgtctttctcattttgtgccaaacccattggttgaacattttatttttaaaaaaatccattttaagttttgtttcacaacatgggttttgataaattataaagaaaacatcaattaataatcatttgaaacagacaaaatagtgaagccccatatatatttaaatttttttgattttaaataatatg

SEQ ID NO: 98957 - DNA, 402 bp, Heterodera glycines
  unsure (1)..(402): unsure at all n locations
gtgatcagcnaacataaaagttgcatttttttgccattgttagcacctgttgctgacaaaagtccaaaagcgcgtccctggcctgcaattcgccctcatataaacacaacagctcgagcaaaagcattttctaatcataattaactaagaatccaaaaaaaatttgagtgaaaaagtgaaattcgatagaactgtttaaaacttcacaaggaatttgtgaaagccactccaacttatagaactctgtgttttcataaaaaatcttttattttctgtccacattcataattcctcctaattctttatcgccaatttaaattatttggcgttttattttaaagtttttgttggtttatgtttactacacactaccaaaaaaaaattcctttttaattagtgatg

SEQ ID NO: 98958 - DNA, 206 bp, Heterodera glycines
atggagaccaagtataatattccaaggaacaggaattaaatgctttcatcccccaaaattaaaattttttaaatttaattttaattaaaaaaatataataaaaataaataattttaaatcattaagattttgcttctcattgaaaaaactttggacattgcaaaaacggagaataaaaaggcggcaaaaatgtgctcaaacaaatg

SEQ ID NO: 98959 - DNA, 69 bp, Heterodera glycines
gtttagttattttatgttttccgcctttttgatgagtgtgcccacagcctcggcttcgtccgtgccatg

SEQ ID NO: 98960 - DNA, 563 bp, Heterodera glycines
tattcacttcatttttattattttttattctccccatttctcttttttcttatgtgttcgctgttttaacaatgagactcgcaataacaacattcttgattttttattctcttctaattaatggtcatgaaaaatcgaatttaattacttgtgtcttttctctttataaaaagggatggattcattcggcagggaaacactgccgccgaaggtagcacccctttaaaaaaattaactttcaaatcactgaaaggatattactagggatttcgggggcgttgaacacgaatttgtcatttattttagccattttcgaaccccattttgaatctacataaaatgacacatttttaatgttgcaatgttttgggattgaatttttactattttaatcaaaatatgaattgtgccggtcccagaatcccctcttgctcagtccgggcgccgtagcccgccggcagaacactcccaaattgaagaagggggatgaatcaatggatttgaatatattttttaaaatgggatctatcatcgacagattaccgggcagtcttaggtaaatg

SEQ ID NO: 98961 - DNA, 83 bp, Heterodera glycines
ggtgcgtttcaaacaactatagtaaattcaaattttactattaaatttattttgttttaaaatgtgtcagttctcttacgatg

SEQ ID NO: 98962 - DNA, 71 bp, Heterodera glycines
caatgtcggcactttcttttcaagttttttgccttccaatcaaatccccagttttttcagatcttcaaatg

SEQ ID NO: 98963 - DNA, 108 bp, Heterodera glycines
gcaccgaacaaacgaaaaaaacggaaaaatatttcggaacttccttgtgaccaaaagtaaaaccaaattaataataatattttaatagtaattaccattttacagatg

SEQ ID NO: 98964 - DNA, 1003 bp, Heterodera glycines
tattcgatcatttagtccaaaatgattaattgtttgaaataactgaagtaaattcgtttaaaaatttcattaatttaatttagctttaacttttagattttataaaataaatagcaaaataaaaattaattttgtgttattttcacttgaaataaattaaaatttgattttttttttaattaaaaaattcccggaaaaccaaggtcccgtcccggcttctcaggtcccggtcccggttttgcccaacattcccggtccgctcaactctacggtagtaccataaaaataaagtttccaacgcaattaattctctgcaatttgtgttatgtgccaaaaaacccccaaaatatgtgctaaaacccaaaaaaaaggccaaaatatgtgccaaaaattgaaaaaaactgctcaaaaaataagttaatttctcaaaaaagtctcattttttatcaatttcgctagcttaatgtaatgctttttggcgtaaattttttttcgctctcaaagatttactcatttttcggaatttcttcgctaaaaatcaaattttgccttaaaagtgaaaaagtcatgaaaagggtcaaaaaaatacaaaaaaaaagaaaattttgaaaaattattgggcatttatttgaccacgaatttgagtgccaaaaaagacatttttgtaaaaaaaaacctaatttttccaaaaaatcgccaaaatatgtgacaaaaactgccgaaaccccaaaatatgtttttattcccaaaaagcccaaaataaatatgtgctaaaaactcgctctgattgaaaggaaaacaggtaaaaatgctatttttgagattttcatgcgatagataaaaaaatatataaaaacatataaatccgttccctgataatatccgtcaagaaataggaaaaccctaaaaatccaagctttacccaactcaattaattcttctgctatatattgtgtgacatcattcgtagctcggccaaattgtgctaattgcctcaaaaatg

SEQ ID NO: 98965 - DNA, 1003 bp, Heterodera glycines
aaatattttattaaaaaaatgttcgaattcgtgttccggattcgaaataggtcaaaattgatatcatattcgtgatcagcgaccccgaaaacccccgggtactactccgaattgcataaagaaccctttttaatctctttttttatgggaccaataaaatacaggattacccaatttttttggagaaaattgggaagaaaaagaagaatgaactcaaaaaaagagaaataattgcaaaattttataaaataaaagagaaaatcaagcaaaaaggaagaaaatattcagcaaaagaatggagtaaaattaattcgaaaattgcattaatttttctaaaatctctttacattgtgaatttattttatttttattgaaaatatgtttattattttcgaatgagctccagaagaaagtaataaaattttatttaatcattaatttaacaattggcaattattttgtcattaagataaaattattattattatttctttgaaattaaacaggatttccttattttattaagtaaaataatgatttattcagttttttaatcagaaaaaaatcatttaaatgcctcaaaaaatgaattgccatttaattgaagaaaaataaaataaaatcttgaaaatgaaattctgtattttattatttttatttttgattactctaattgatcaaattggtggaacggaaaataaaaaattacaacaaaaaacatttgaggaaatatttggagaaaaatgggaggaaaaagaagaagaaaaacgaaatgaactcaaaaaaagagaaataattgaaaaaattatagaataaaagaaaaaaaaagcaaaaaggaagaaaatatccaaaaaaagaatggagtaaaattgaaacaaaaacaaacatttgaggccaaactttttgcagaccctccgtcactatccccccaattaactccaaaaaacagcgaattgtgcaccaattggacaatgccgcctcagcaattgaacaattccacatg

SEQ ID NO: 98966 - DNA, 1003 bp, Heterodera glycines
ccctcttttccccgcccctccgcccatccattcattgggatgaaccaacccattttctgaatttgaatttgacccattggcgagggattagcgaattgggcgaaaacagcaaaaacattgtgaaattggcacaaaaaacaaaggtttaagcgtaaaatatgtaaatgtgaagctgaatgaacaagtcattctgttgccgtgtcgactctgataattgtcgccgcttcgcccctcaaatgccctgtgggaggctttgcttttgggtggtcactctttgcccccgagcgatgcttttcctttgcccccggcgccgctctttgcctgctgtcctcggccattgttccgctgttgtcctcgccttccctttgggcacattcgacgaccgatccgaagccaagcgaagaggagccccttggcaaaatggcaaaaggcttctcccccgccccccccttttgtggaagtgccgagaccaacactttgccttgaccatttcgagtgggcggagggcacaatttgcatttgctaattatggacagatggtaaggaggaggacaaagttgggaagggaaaaacgaagtgaaattataccccgggggagtacaagcaaattgggattgaaaacggagaaagtgccgaaggcattggcaacgcattaattacaaaagaaacaaaatgcaattggcacattttaatgacatttaatagggggcaaatggacaagttacaggtaaaattcacaaatcaattcaattaccaattatttgaattgagaaatcgcaacatttgccaaaacaatgcgattttcgtttttggtctgatgaaaaatgcgcatataaaataccctcgtcgattgttgatcatcgcgcaaaaaagtcttgagaaaagcgcgacggtattcggtgctaaaaagagatgaaaatgagaaatgccaaattggcattggcattggcacctgcaggcgcaaagcaccggcgcactgctggtgtaagcaaacacaaaaatg

SEQ ID NO: 98967 - DNA, 467 bp, Heterodera glycines
acaaaaaaaataaatatgaatttataaaattaaatacaaataaattatttacatatgtacttgcaaaaaacataaaacaacacttataaattaggcatcattaacggtcaaacttcgaaaatcgaaccttttaaagttttatggcattgaatcattgtgtttatggcgcccaaagttccgattaagtcatcaagaacagaagaaaatagaaagtatgcaaaagaaagtggaaagtatgtttgggtttttattgcttaattattaattttcatgttaattaattttcgggtgaaataatttttgctgacgtcattatttctgacgaaaatgcaagaaaagaatatgcgtaataaaacgttgattaattagaaataaatattttttgcaattaataagcaaattcatataaaattaatttttaaattattgtaattctattaaattcattttaaaaaggcattattatg

SEQ ID NO: 98968 - DNA, 76 bp, Heterodera glycines
ggtggccaacaaaaagtgcactcgtccgaagacccaaattgaaaaacaaatttcaaattatggcattttcaggatg

SEQ ID NO: 98969 - DNA, 981 bp, Heterodera glycines
tggcattttttggaaaatttcccaaaaaatgcaataaacatgaaaaatacatcccaagaatcgacctaaaaaattttcaaaaatatacccctaagaatcgacctaaaaattttcaaaaatacatccctaagaattggaaaaatttcacaaaaattcttcccccaaattttttttttcttgttcaatattttctaagaaaatagtttgtaactgcaatcagtgaataaaatctttttccttaattttaaattattttcaaattaaaaaacagctatttaaaaaattacacccctaaatttggaacttttttgccactatttttaccactattttggcattttttggtcactatttagttaattattttgagattttttatcactaaaaatccgatccctattcattagactaaaataatataattttattttctattagcgccaaaacaatccgaaataaggaaaaaattaaattcttcaatgattgaataaaatcaaatcaaattttgcttattggaatttctatacttagcatgaaaatcaatctttctagtgcattttctaaaaattttacgcactctcatcgattttttaaaataaatttttaattatttttatttattattttatttgtattactaatttttgaaaaatgatatgtttttgtgaaactcttctttcttctgtctcattttgttttcaataaaattttcccattttccttgcccatttctctgccttttcttccgctcctccataaaaataaaataaagtcataaaacaaagaaccaaaattgattgcgatggatttaagacttttgaaaaggcaaaattcttgttaagacggagagagtaaattaaaataatcctttttaatatctgtaaacaatcagacatattattaaattaatgcttaaattgtttaattaaaaacaattatatttaataattttttaatttaatttagaaaatcacaaaaatg

SEQ ID NO: 98970 - DNA, 307 bp, Heterodera glycines
tgtttgttttcaatttgaccagctgctgttcacaaaacagggctttttgttcacccgtcaaatcgcctcatggccaaaaaattcgaaaagtccgcccaccgacaaattattaaaatggcagcaaaaaaagcggaaaacttttgcggcattttgtcatccgttggggggaaaaggcaaatggcacacattttggtgggtaaatgacagaaggagaataattttggacttttttgctgctcttgttgaggtgtgttttggtgccaggacaattgcatttgtggcctcaggcaattggccaaaaaaaatg

SEQ ID NO: 98971 - DNA, 52 bp, Heterodera glycines
taattgactcactaattaagacacttcaaatgaggaagattgcccaaaaatg

SEQ ID NO: 98972 - DNA, 124 bp, Heterodera glycines
gtctgcagtgggagttgggaacagaaaagacggacaaacaactaaagggcgcaaatttgctggctttaggccgtacatcgaagaactcaaacgtcgtctgacctccgttcagctgttcaccatg

SEQ ID NO: 98973 - DNA, 619 bp, Heterodera glycines
ttatcaaaaaaagaaacgaaaaccctaaatgcagcttttatgtaaccgacagacaccatttttgggttctttttttgccttccccttgttcggatttcaaacacattaaagaaataatgtaacagtcgtagcagtcgcatcgacgagcatacttactcaaattacctatgtatttggcgctgccaaaatgaaatttattcttacggtagtcaaccaaaagtttacggttagtgccattttagtgccgtacatttcagtgcgacgcttttttttttatctttttagtacctatttcgctcttattggctttttgcaaattacagggacccacccgttttggtcgctcgtttcggcgtcagctcgtttttccacggtagcttttttctttggaatccaaatccaacaatattggtatcattcgaaagctttaacatgctttattagccttgctaaaaaaacaaaaaattttatgcctggaaaaaatttattaagaaaaaacttaaaaaacttcgtcttttcgcaattttcatgtataacttttttggtagttaactaatcgtgaagcaatagcttagaaaaagctttagacatgttaagcttttgaatgatatcaacaatg

SEQ ID NO: 98974 - DNA, 174 bp, Heterodera glycines
  unsure (1)..(174): unsure at all n locations
caccaaattctacacaanagtgctcacacaattgggatctgctgcttaatgatatgaaaagcggtttggtttttactcaatataatatatatatatcattcctaacaataagatgtttctcgtcttcctaccacattggcccgacttcgtccggtgactgaacgacttggaatg

SEQ ID NO: 98975 - DNA, 805 bp, Heterodera glycines
attatgctctacaaatcaatgaatcaatgtgccaactatttgctaagcttataatggtgaagaaaaccaaacaaaaaaggcattggggtgtaaaataagctttacataatggctaaaaattttatttaataaatcataaaattccactaaatattaaattttaatcaaacctggccagaatattcctttatattagcctcagcttttcagcaattttttagggttttctttttaacttcacaaaattatggcctcatggatgtttcaactatacaaaaattttaaaattcttcaacacagaggatagaaattctgaaaaacccttttctcaaaaacatttctgtggccaatccaataaagattgacaaataaaaataaaagattgtttattaaattaatttaatttctctataaattacttttatatttgcttttcaggaaatattttagacaaataaaaattaggggctcattagtgtgtcctgaaatttgagtggatttagcaaaaacttggacaatttacggggccatattttttgaagtcaagagaaaaacactaatcaattgatgtctggagttaatataaaaaaataatctggcaaagtttgattacaaaataaatttattatttgaattttcatgttttttaagtaacatataagccactatctaagacttacgttacagctcaatattcaaaagaattttgttttgattttgatcatatttttcattccgtctgttaaactttaatttagcaagctcattaaattactaattatattctcattattctctttttatg

SEQ ID NO: 98976 - DNA, 611 bp, Heterodera glycines
atgcgagctccaaattccgcactggcgattcgtaacattggagtgcaactttttccgggaaaactggattatttcctttctgcctatcgtattgcgactaataaaccctatggctatctcgttgttgatatgcatgctgcttcaaaccccctgctgcgattaaggagcggcatatttaaagacgacgaagaagaaggaaaaaagatcattttcattccaaaaaatggccttttgtaaaattggagaaattgtacataaaaattttgattttattcgagtacttgccaaaaccaaatcgatgaaaaaaaggagacaaattttaaaacgtgcaaatgccgatcaattgttaacactaattgaaatagctttaaacattctttgttcacactttaaattaacaactcgccaaagaaagcgtttgctaccttatgcaacttttgttcgaagtcttgctcgtcgaaggaccgaaagaggggcacggaaggtcctggttcaaaccggaagtggactcggaggagtttttgcagctctgctcactcctattcttattgatttagcacgctctgctataaattcaagctcaaagagtgacaattgatcattttatcatg

SEQ ID NO: 98977 - DNA, 1003 bp, Heterodera glycines
atgaaacaaccccgccccttgtcatggtaattgcggcaagtccaacagaatttctcctcgcatacgtgtccctttcttccgtcacgggtattccgttcaaagtcccacaagacaccgcacttcttgcactttttcgatttggtacagtaattagatgtgaggtggtgttgatagcattcacaaaggaaggtcctagggtgtccgtgggatttcagaatgaaatttggtcagtggatagagcacccatgggttcttaagaaaagtgattttattttttgcggaatgagcccgagtgccgagttattccgtgccaaagtttttggtttttttctaattaaggaaaagaaataattgtttgtttactttccaagtgtctaatggtgtagaggtagtgtgttagtcaatcttttttttgggtcccaggttcgaatcctgtgcatgctaatacattttacaatttttattttttctttttatgcataattaattattaaaaatattttttatgaaacaaaatcttttatgcattttaattttattcaattaaaatttaaaaaataaattaaatataaagatgaactaaatatcatgtcgatttgagaaaaaagttttctaattttttatataaattatgcaattaatgaaatgtaaatattttattcactaaacaaaattacgaaataagtcattatcattttttgaataatttaaatatttatagaatagcaaaaaaaaaaaattaataacttaaaaccatatttttattgtttgaattggattgaaactgattgttaaaaatagcataaaaagcttcaccacgtcatgtgactctaggaaagagcccaagattgaaatatttacaaaataaatgcataaaaataaagcaaagaaattaccgaaaaaagaatgtgataatcctttcaaattgtcattcctttcaaattgtcatctcctctcctaatcgatggcaaagagaacggcggcaaatttttcccctcccatg

SEQ ID NO: 98978 - DNA, 284 bp, Heterodera glycines
aaaaaaatcagtggaaaaatgacaaaaaaaattaaagaaaaaaacaaaataaaaaatttttttagaggggccaaacgaaaaaataatcctttctcttgaatttaaaacactgaaaatccctcaaattttcaatttccagataatttgaatgtcaaattttgcatgattgtgaggtcatagcgattattacgtttgaaaaaacaatttctgcctctcaatttgaaaatttacattcacacagcacacacattttggccggaaatttggccgtaaatgagaaaatg

SEQ ID NO: 98979 - DNA, 127 bp, Heterodera glycines
gaaaatggaacagaaagtggaagagaaagtggaagaggaacagaaagtggaagagaaagtggaagaggaacagaaagtggaagagaaagtggaagaggaacagaaagtggaagaggaatagaaaatg

SEQ ID NO: 98980 - DNA, 148 bp, Heterodera glycines
tcaaatgttcagtttaaattgaatggtttcatgcacaattaattccttcgttaatataataaatttgattgaaattgaaaattttatattatattttcaatatatgccaataataaaaaataatgcagaaacaaattcatcgacaatg

SEQ ID NO: 98981 - DNA, 419 bp, Heterodera glycines
tttcctccccttcgtcccgtccttctttttcttgcgcttcactttttcccacaaattcggcccaaaatgtctctgatcagtcccaactgaatcatcaacatcagcgggaacaagaagaagaagaacaagaacagctcattcgactgctgacagtcacttccgactcttctgccgatggccaaaaagagaagcaaaaggaaaaacgaacgcaaattccaagcaaaggttggaggaatttaaaaggaaaacggaaaggcaaaattataacgaaatgatgccattggcaggcaaattaatcaccgctttgatcgctaacactcgccggtgccgctcccgccaaagtcagttgggttaactctcaatggccattcgaaatttgtggaatgttgatgctaatttaagcacatcagaaccaaatg

SEQ ID NO: 98982 - DNA, 91 bp, Heterodera glycines
ttttatcattggccttgttaagccttcgcaatatgctcgagcattgttcgacacttcttacgcatattttttggcactaaatcgcacgatg

SEQ ID NO: 98983 - DNA, 445 bp, Heterodera glycines
tctctttattcttctctctctctctctctcttttccactttttctcactcttcctctcactatagcgcgcgcttctctctttcgctttctttctccctccctcactctctttctttttttctctctcacttcctctctctctccttctctctctttttcttccaaacacatataaattttttttgggcacattattttttagtgatcaactaaccgtaaaaaatggttaggtgccgaaaaaattcctatagagctggaaaaagctcttgcaaaaaatttatgacgagcaaaaagaaaataaaatttccacaaatttcttttaatttttagtgtgacttgtaagcctaaaaaactaacaaattaattaactcaaattaaaaataaaatgtaaaatgccatttttaaaaagttcaccaaaccgaccgactcggaagagccttcgatg

SEQ ID NO: 98984 - DNA, 485 bp, Heterodera glycines
ttttctagaatttgaataaagaatgatttcgatttcttgctaggaataattttgacccaaaagtgggcgtggccaaagtgcacatatcctacacccggtcattttcccgattcattttaaaaattttcatcttttttttttgcacatctgctgtttctctctcctcctctcacttgtcttgtgctttatgggggccgtattatttaattgggaattttggggacagtataattaaattttattaaaattattaatatttttgctgttaaccagggcggtagatttaattaaaaaagctccgtttatcctggcagcaagttgtatgttttaacatattatgatgtgcctatccatgcccaatgtttcttcatcttccatcattcaccatcatttcttcttcacaacattttccatgctgacgtgcgcatataaataccgaaattttgttcactcctcctcaatccctgcacagatttaaaaatatg

SEQ ID NO: 98985 - DNA, 195 bp, Heterodera glycines
ttccacacaaagcgtgaactgacaatgaatgaaaatggaatggaaagggacgacggaattgcccgggggggggggggacaatgagtcccggtctcacattcaaaaacaacattttaataatattgtttatatgtaagcataaaaacaaagcatttatttgtgtttgacattttaagaaaggtcgcgccgaaaatg

SEQ ID NO: 98986 - DNA, 794 bp, Heterodera glycines
tcttctcgttgtgttacgcccgttagtaaaatatgagaaaaatgcatcacaacagcgacttttatacacattttggacgtttttttttgcattgtgtgcagttgcagtgcgccaaaatgtgcgagtttcctattttgaatatttttcaaattaaatcttaattcagcacgatgatacacaaaatatgagtacggctaccaacctagagttagaatgggccggcatcgtttcggctccaaagtttcggcaccaaaattttttaataaataaataaatagaaatttcctaaaaagacaaatttattgtgcagtttctgaaattttaaaacttttcatatttctcttttatcctttttgacactcatattcctcactcttttctctgtctctttctatcttctccccttaataattcaaataataaaaaatgttcgaatgtctaataagtcaatcgggtcctgatttaaaatttcgtaatcccaatgctaagccagcctaagttgaggcctaatacgatgcccaggcctaaacagctggcttctgattcaaatttttcgacactcggattatttggcaaccggacaggaagcgataatgttttatctcatttaacgtctgaatttgtgtttaatgccaaaaagtgctataataataatcacacaatgcgacataattattaaaaaaaaaaatttgcccaaaattagtcattttgatggtaaatatctgttaaaaaaggacctaaatttgttaaaaaaaaacattattttattaaaggtatcgcccataaataaaatg

SEQ ID NO: 98987 - DNA, 497 bp, Heterodera glycines
ttgacgaggccgcgtccaacaaaatttcaatattgtagcaggccgaagtggtggtggaggcacgatggaatgcctaatacatataaaaatttgaaattaaaatatcgatgaatcccgcgtttgcggattcaaattgccgcggtcgtgaaacgcggaaaaaaatgtcgaaaatcgcggtcgaactccttccccttcctcccccgaaattaaaaatgatttgacgacctccttgaacttgttgaccaattctttgccctttgatgcataagtgcttgaaaatcggcaacgcaaatgcttcggctgtccatcggtggtcggcgtgtgcaaccatttggataaagcctcgccagcagttgcattcctaccatcaaaagcaattggagcggggaacagacgaaggaactgatcgagttcagctgcgggagatcagtgagaattgtaggcgaaacgaaattgcgcaaattattcaaatttgcaggcacatagaatgccaaatg

SEQ ID NO: 98988 - DNA, 160 bp, Heterodera glycines
tttcgggggtcgctttgacaacattatgctgtttcgacagttcttcctcaacgggttttgtccacaaatgatccgtcgtggtaacaaattatatgaaatgaaaattgcgcggggcgaaaaaaacccagagatcatcgtaagagacagctggaaccttatg

SEQ ID NO: 98989 - DNA, 187 bp, Heterodera glycines
ttttcctttccttttatacatcccaatccaaaaaaatcatccggcgaaattttggctgctgcagtgcccagcagaatttgcgtataaaaggctcacattttgatgactcctgccatttgttttcaatccctctcgcccgaatcgcaaattatgccaaattctaattttttccccaactttcagtatg

SEQ ID NO: 98990 - DNA, 1003 bp, Heterodera glycines
ccatttccatcatgacaaacaacaaaaaatactggcaaatttttcaaattttattttcggcaaaaaaatttcaaatgaatcgtcaggaggcgggcgcttcaattttttttcgaaaaaattattagaaaaatttttcttggtaggcctgcacatatcacaagctaacatagtaaaaagtaaaatactgtttttttttaaattactgattcgacctcctcattttgatctacctgaaattttgatcaagaccgggccaaaaaatggattcaataaaaaattcagcatttttgtgattctctaattttttcttgaaatttataaaaaatgtttcccatgtggttgatgggtcagctattttacgctcacaatttgctggtcttgatcaatgaaagcacaacacacaatggccttaatcgacttctatttggtgctaggcatgtacatacattattattattatattactctatagtgatggtcgagaccgaaatcctttttttcgagactcaaaaaaaaatcccgacaatttacttgaaaactgagattcgactcttgagcagcattactacatataccatgtgccaagacatttgcgcctcggattatgtgcgccacagacttttgcgcctatggtttaaaatcggtttcaaaaattaattttgtccattttaaatataaaattaataaatttaaaccgcgttatatgtacatagacacaaaaatacaggacgcaaaaatgtcatatataaatctactataagaacccaatttgtcactctctcgtccccctttttatccactttgtgaattcgaattttgcatagtttcaggaattctattcattatttgtgtggcattcgtgcatttatcgataaagctttttcttcagtttaattttgtaaaaaatcattttgggtttcgcaaatcgctttttaattattttttaaaattaattatcctttcattcaatttttaaatttgcccatttaattagcgccaaatg

SEQ ID NO: 98991 - DNA, 848 bp, Heterodera glycines
ttttttgttttcgggcagtccccccgaaccgatgcgcccagatttatggggagaccgaatccttccggaatagcttccctatagcctgtactttaattctgcgttggatttttgctccccataattgtttgagtaccccaaacggacacttgaaaaaatcgatttttttgttttcggggcagtccccccgaaccgatgcgcccagatttatggggagaccgaatccttccggaatagcttccctatagcctgtactttaattctgcgttggatttttgctccccataattgtttgagtaccccaaacggacacttgaaaaaatcgatttttttgttttcggggcagtccccccgaaccgatgcgcccagatttatggggagaccgaatccttcgggaatagcttccctatagcctgtactttaattctgcgttggatttttgctccccataattgtttgagtaccccaaacggacacttgaaaaaatcgatttttttgttttcggggcagtccccccgaaccgatgcgcccagatttatggggagaccgaatccttcgggaatagcttccctatagcctgtactttaattctgcgttggatttttgctccccataaatgtttgagtaccccaaacggacacttgaaaaaatcgatttttttgtttcataaatatttttttcagaaagtgctctaaagcgcaccaaattttatttacaacttaattttagcactctgatgctttagtatcaaaaaggaagatggagaaaaaattttttaaaaaatttttccttatattttggttatatcgttttgcttttggtggggtgcttggaacagtggaatcatg

SEQ ID NO: 98992 - DNA, 601 bp, Heterodera glycines
ccccccccctctctattaatgatgctatcttttaagaattgtcctcctcaaatgtgtccttttagcagctgtgttatgctcaactcctcctcattttcgtttcatcatcctcatctcatcctcctcctcatctcttcgttcgttcgtcatttctcccttttcctccgtccccactttttcgctctctcttcggtcgcgcgtcgcctccattcgatgaatgttcccactgatcacccccccccccaaccaacaatcatttggtacgaagcgccggactaataaatcacaaatgcacatgcgataggtcccctcggggatggacggcgatcggagtttgtgtggtggggggagggggggggggaagagaagggatggatggcctttggcttcagaaaaggaatattacgtgttaaaatgataaccataataatactaccatcacagccccaccaaaatcaacccataaaaatgatcgccgcctccgtttgtccgccgatcgatcaggccatttgatcaactcgcggtttctgctgcactcgtccttctcgttttgcctctctctctctattcacagtcattccaacagaacaaccgccgaatg

SEQ ID NO: 98993 - DNA, 285 bp, Heterodera glycines
ttatttaaatgaattagaagcttttaccccaataaatccattcttgttaaaaaattcattcaactttttgttcgaattagtgtccggtattcggaattaggtaaatccgagttcagatccgtaatcagcaccctcgaaaacccctaaaaactggttttgagccgaaaattaaaaaaaaatttttgaaaattatagacacccattcttcagaattgcccaaaaaatgaatatataaacggtgacttttgcctccctcccaacacaatttgcgtcccaacaataatg

SEQ ID NO: 98994 - DNA, 76 bp, Heterodera glycines
ttgtatggtgattggcacaacccaaggccgatggtggaagatcccggtcacaatcaatggcttaaatttgaagatg

SEQ ID NO: 98995 - DNA, 322 bp, Heterodera glycines
aaaaattgacctacatattaaaaatccataaatttttaagttttttaacaaattaattagtaatcaatccattttacttcaccgaccaaattggaaggtgaacaacgaacttgagcattttgatcagatcatccacagctgataagcattatgcttttcatttaaaattggtcatcccttttttatacagtatttttaatcaaaaaatttttctaaatttttttaatagccttctattatggttgtgcacaaaattgttcgtttggcactcattcgcctgctgagggcatgacatgcaacaccaattggtgttgcgaagatg

SEQ ID NO: 98996 - DNA, 368 bp, Heterodera glycines
tctgtaaaaaaaaatcaataaatcggcctggggattcactgtgtgtttgaattggcgcccttttgtatctttctctaaccactactctctcgtctatgtgtttgtggatgggcgtggcctatcgattaagaagggacagcccgtctggaggtcgctgcgcgctaacacccctctcactatcaatcaataataattacgtgttttttttcgcaggttcattttatgcttttaacaattataattataaactatttcttaatcgtaatggccccgagaaaaatcaatgatcaattggtgtttgagaacaaaagtaatcattttttgagttttttataataattttaaatttttttaaatttaaagaaatg

SEQ ID NO: 98997 - DNA, 190 bp, Heterodera glycines
tgaatataatatggacaaaggcgaaaaataggtcctttttatgggttcatttacaacggatgttttggttggtataggcactcactcagtaaggacaaatgggatgtaattatacaatgacgtaggagagagatttattgagagtacatggtctggaaccgggatgatttggagggatcagtgaaaaatg

SEQ ID NO: 98998 - DNA, 135 bp, Heterodera glycines
  unsure (1)..(135): unsure at all n locations
tagacaaagaaattctntggcccacattttggatgaaagcaattccaatcatattcatgtcattgataattttccaaattaaattttaaattattgaaaaatatataaataaaaaatgcaaattcctcacatatg

SEQ ID NO: 98999 - DNA, 560 bp, Heterodera glycines
acggtgaagttggagtaaggggagatcagttggctaacgcaaaaagaattgggtcgataggtgcagaattcgcaatgtgcgggccacatttgcaaagagccccccccatttttttatatatagataactaggcgtcccggtagatggctgcgctttatagaaagccgagcctatcccgtcgaggtgtagatgcgtaaggtgtgcaccgtcgcggttgttagtgcagtagcagctcaggcgcagatgcgtgtctggatgttcgtgcagtagcagctaccggtaacagcctagcctagccgttcacccccaccccaccctacgcggcatgcaaaagaattgatcaggttcgtattgactcggtacactcgctcgtcgctccgcttcgctccgctcctcgctcgcgcacctcgagggtcagggcgcttcgcgcccgccccttgtcatgagcagcatcggttggcgcttgctcggcgtactcgctcgtcgctccgcttcgctccgctcctcgctcacacgcctcgaggggcagggcgcttcgcgcccgccccttgtcgataatg

SEQ ID NO: 99000 - DNA, 226 bp, Heterodera glycines
tctgcaaaaagacacgcaatcagttaactaaacagtcaacgaaggaatattctggtgaatgattctatcgacgtgacggcatttagcttcactcccaattctttgaattgtctatacatctcatccactaccctcccctcaatcgaacttcgaaaacggcgctcagtcgggtgggacagttggccaaggcgaggataaaaggtccgtacacgtcgggcgcaaaatg

SEQ ID NO: 99001 - DNA, 129 bp, Heterodera glycines
ttttcctgcccatttccaaaggtttgccttggcctgccaatttgtggcattttttttgtgtccgcaatgcattcgctcctccgatggcacattcgtcaaatgctttctgaagaaaatgagcaaaaaatg

SEQ ID NO: 99002 - DNA, 138 bp, Heterodera glycines
  unsure (1)..(138): unsure at all n locations
taagcggggggagatggaccggtacaaaatccattgtctattcgattcgctgggggtcgaatgcggcaccatatcgtaccgaatgggccgtccttacaaccagcacaaaaaagtgcccgcncactcaaagtgatcatg

SEQ ID NO: 99003 - DNA, 643 bp, Heterodera glycines
tctgtcacgggttgagaaactaaaaatgaatattttagatcgagaaaattttcggaaaaaatggaaaattatcgatattttcggtttacccttttaaaaaactggtaaatttaaatagaaaaaaatgaatttttcgctttttaaattgttttttgttaaaattataaattttacttcgtttttaatgataatagttttttaattcctatgtatatgattattaattatttattttcaaaccgttttctttctgctgagcattgacctccaaatgtttaaaataataattgtgtttatatattaattaattttgaattaccatttgagtggagaaaataagcgcaaaaaacgtgaaaatgtgaaaacaataataaccattcattttcggtttcaaatttataaaatatgaacacattcacaattctccaagcttttatatgctttcattctcatttaatttcttttttttaatttaaattggaaaatggctttaataaaaaaaaagtttattggatttgccacataaaaaacaaataaaatgataaaaagaatcaattaaaatattttattgcattaaattattcataaatggatttgggcaaaaatttgaagaaattaaaatgctctagaatattaaggaatg

SEQ ID NO: 99004 - DNA, 558 bp, Heterodera glycines
tcaaaaaagttttaaaaatggtcgggtgaatcgtaggatcaacgccgtcatcatcatgataatcttaaagtaagtataagcttaggccgaatctttaggctttggcttcacatttagctggggttgaagtggatgcattttcacatatcatttccattttttatctattttatttaatcaagaatctcaattaaatagtggcaaaaattccgaaatagtggcgaaaatggcaaaatagtcgcaaaacgccaaaagtgtgggtttctgaaaaaatgagagaaaaaacagctcatttttcattaaaaaatgaagatagttttaattgagatcctaataatgaatttatagagaagaattttaagtaaaaaaaataattttatttttatattaattttttaattatttcaatggcgaaaagtacaaaacagtgatccctattgacgattagtggcgctagaattaattgtgtttctaagataaaaatacgtgtttttttttgtgctttctgatcgaaaattaaattgtagatacaaatttattcatttttttgaacaaatg

SEQ ID NO: 99005 - DNA, 950 bp, Heterodera glycines
atttggtcgctatttatttatttgtattgatttcatattatattttattttttggcggcgatctcgtttttaattgttttgcgctttcttgaggacattttaattaatgttttgtcctcaatgtaagcggatttttcccttttgtggactttttctttattgacaataaacaataaacaaaaatatgtacaaaaagtgtcctcatttagtattttaaaaattaatatttggtattttttaggggtacattttcaaaaaatttttagttatttttcacatgaaatttctataaattttaaaaagttctcaaaatatttttaaaaaatgaaaatatttacgaaaaatttgccgaaatattggatttttttgaggattatttccagacccggtccgctcaaaatatgtaaaaaatgaaaaatgttagaaaaaagtccaaaatatgtaccaaataagtataaaacgtcgaaatatgtaaaatatgtaacaaaccccgaatatgtaaataaagtcccaacttttggactcaaacgagagttgaaaattaaatttccgacaaaattctcatttatacaccaaaaaaggtccattttttgtggaaatttccagcttgaaatttcgaagctataaaaagttgcttcgtacataaatatccatctttttttttgtaaaattctgtaatcaaatccgttttatcaccagtcatttttatgaacgattactcacaattaatgaattatttacatgcacataaaatgcaattgaaatggacgaattcgcgagcaaaacaaaggtcaaatacatacaaacaaacaaattataattagtattaatgggccagtcaattttgaaatattcgaactcggtccttttatttgtcttgtcgccatttttttttgatcgtcaacttatcccagagcgtgtccgacggtggccaatgtcccagccgaatg

SEQ ID NO: 99006 - DNA, 151 bp, Heterodera glycines
tgttactaatgctcgcattcatcccccccccccctcgccctttcttttcgacacactgtttttcttattttgtgtttttattattacaaattagaacaatagttaaactacaaaaaagttaataatattaatttttaggaagcaaattatg

SEQ ID NO: 99007 - DNA, 248 bp, Heterodera glycines
tctgagaatttggacgtacaacggaaactgttcgcagaagtgtagtcggctttgccacagtgacttacaattggataattcagcaattattttcggatggcttttgttcctcccccccccccctctcttcccattgggctgtttcgtttcgtttcatttcgtttgtcccttttcgccttctctccaaaaatttctccattaatattgttttacgaatttttgcttttaactttcaggcttagagaatg

SEQ ID NO: 99008 - DNA, 820 bp, Heterodera glycines
ttagttggttcatacctttattttaaatatgttaatgcattttggcatcccgtcaaaaaaaaatttcggctttcgtaatcagtcgaaatcaacaacaattttgctgacaaatataatgataacatcagttgggaggaaaagatgatggtttccccgcggtcattatcaatagaaaatcggagaattcacctctcaacgccaaacccccgccccccccccaaaaaaaaattctatttttgattgtttaattatattgctgctgaatgatgatattgctgttaatgattttcacttcaaatttcgaataattaattaatttaaggctgaataattttcaaaagatttaacaaagccaaaagccacgaaatttttgacttggaaaatttacctattgcttttatttaaaagatttatttccttttgttttcagatataaacttccaactaccgtatttcctgaaatagagcccacggtggctttatttttcaacccccctcaaaagggggggggctctaattcagggggggctctatttctcaaccctctcgagaggtagggggggaggcttgatttcagagggaggaggggggataccaggtaattcagggggcggtgttattataggaaatgggtttttgttattattttaaaaagtcaaaaaatttcgacatgcggcttttcgggcagggtttgtttagcattaattttgttagcgcttctaatggtttttgacttttattttttaattcgaatatctcaattttcaatattattaattgttatttaatttaaaaaaaaataaaattttagcaaaaaatg

SEQ ID NO: 99009 - DNA, 166 bp, Heterodera glycines
tggctgatggattcggcgcgacgactacacattgtggcaaagaaagatgtctgataaaattcatatgtacatttgaataaattttatttatgtgtgcattattggttaattttacctcatatttttgccaccttttcatacatttatcattttgttgtttaagatg

SEQ ID NO: 99010 - DNA, 1003 bp, Heterodera glycines
aaatcgacgtaaaaaggaaaaatacacccctaaaaatcgaatttttgacttcagccccccccccccccccaaagccaagggtctggctacgcccttgggtgatgcgacatatgcggcgcagaattaaatgaccccaaaaatatttcaacaatttatttaagttaacagaattgttattttaagtttattttttaataatgactaatttaacaataattcttgcaacctaatcaaagataaaggttgagtcgtttgccgttgtaacatattcagaaaacgtttcacttcgccccacccagcattttcaaactataaatgggatactgtaataaaaatttttgacaataaggaaaacaaaaagatgatgatatagcccggtaaaaaaaatttccgggagcgggatcgggagttcaaagttttccgggatgggagtcccgaacgggaattccgtaaaaatcccgctccctttaaaatcccgttcaccgaaaaaagcgggaccgggaatcccgtaaaaatcccgcgggagtcccgacccggcgggctctaataattaatcacattcaagcttttactgggcgccgcaaatgtctgcgccgcaagtgtcagcgccgcaaatgtcggccaatcctttaaataagcgattgaaagtgattgtgtccgatcatttgatcgttaacaaatttttgaaaaaataaattaatcttttaaacaacttaattattgatcctataaactgaagaacgaatttccttagatttaatgctgtttaggctatcagggcttaaaaaaaaattcaactttgagttgcgaagtgaatttttcccataatctaaatttaaataagcaaacaaacaaattattatttttttttctctttattatgcctagggatgtcaaaaatatgtacaaaaaatggtcaaaatatgggtgctacgtcatttcgcgacaagtgcaaaaagggcacttcgcgacagtgcaaaaattgggcacttcgcgaaaaatg

SEQ ID NO: 99011 - DNA, 587 bp, Heterodera glycines
atgtatgacaatgctttttttgatttatcgcttcgaatcgtcccattttatattcatttaataaacaataattattttaacaaaaaatgttaacattttcaaattttatatttttaatgtgttagtagacacatgaaaatagtacgcgaaaatgagagagaaagaaatgcaaaattttcatcactccatttttttttgctcttaaaacccctgagattttcttcgtgattttttcactatcgaaggaaaaagaaaaattcataaaaattgttcttcttttacaatttccaattttttgtgttcttctttctaaaattttgggtccggattggaatgagaaaaatatcgtggttcacgatccaggtcgtgatgagaaaaatatttgatttcaaatcggttttggcagaaacgcctgatccaggcacaggtattcaaaaataccgagccgagctttacaaacaatggtttcaatccaaagtgctaattcctatatatacttttttattttcccctgactttccgatgacaccgaaaacttaaatttcatattttctgtaaaattccagcacacaaaaaattccaaaatg

SEQ ID NO: 99012 - DNA, 195 bp, Heterodera glycines
atattcgaatttcttattatatgaaagcaacgcaaaccgtaactgaaccattttttgaagtggtgaacgaagcgacaaatgagaagctgatactgttggaagaatccgagtgtaattggctgatgaaacgatgtccaataattgtcggggagacggcgacggttcagcggaagaaagacgacaatttgaacaatg

SEQ ID NO: 99013 - DNA, 328 bp, Heterodera glycines
ttactctaaaaaagttcaaaattaaggactacaaatataatatgtatatgaaacgaataaaatatttcatctttattttaaaattggcataatgtcaatattaaattcatattcataagctcatttttttattatgaaaagcccaatcattaggggtgtaaaaaagtctcggtctcgagtctcgaaaatcgagaccgagactttaaaacccgagaccgagaccaaaaaaccccgagacttttctcgagtcgagactcgagaccgagactctcgagcatcactagtgaacagcacgtcccaccattcgtcggatcttttgtggcggatg

SEQ ID NO: 99014 - DNA, 292 bp, Heterodera glycines
aaaaaatggatccaaatcaatacaaagaaacattgtagaaaatggtgtgtacataggttgaataaattatattaatattaatgaaacagataatttataattttggattagaataaagcgtaaaattaatttaattttatgggtcagccttttattcgtaaagtttttgtttataaataaaaactgaaaaggaaataagaggatcatgttagccaatggaaaaaatcataaatgtatatttaattatgtaaattaattaggaaaaaattgcagagaacaaaatgaaaatatg

SEQ ID NO: 99015 - DNA, 346 bp, Heterodera glycines
tagggcattgggtggcttttgagaggaagaagacccgatgaacaaaatgagaacgtttctaattttctcttccaattaaaagaaaattctttggaacatgaattttttctttttgttttcaaccgcaattgatcgtttttttaaattgttttgaattttttagttgttgatctttggcgggtgaattaaaaaatgcttacaaaattaatgagggatgtcattaaacttgaaatcaatcagtcacatttaaattacttaatttacataaaaataatggaggacaaataaataggggtaaaagaaaaggaaaaggcaacgcacggataattataaaagaagccctatg

SEQ ID NO: 99016 - DNA, 468 bp, Heterodera glycines
aaaaccaaaaatcgtgccaaaaattaaacaatggttttccttgaacgtagtgttgcgcacgaccggttattaaccgcgtacccccggttttcggtttcggttcggttaaccgaccgcgcgcaaccctacttggacgcttactcatatcctcgctgtctctgacattttccaactcatttttcaagggtgccttcgcgacggataaaagagggaaccaatttttgatttgggactcacgtgagcacgatattgaggagccaattttttttatctttgcaagtgacaaaggcattgaatggctacggacataccaaaattgggcgggcgacggcactttcaaaagtgatatatgacaggggtgtgaccattttctaaagttttgtagctcggccatcgaatttcatgcaattatataccctaaacattattgcacaacactcaagcataccatgcgcatatataataatg

SEQ ID NO: 99017 - DNA, 1003 bp, Heterodera glycines
aatttattcttggccttgctcgccacccccactccattcttggcacaaatccccacaatttgctcatttttatatcttgtcgatgagccgggggcacagaaagcgcaacagccaaatcaatttaattgacggaacttttgttttgccataaaaatgttgcgcaaaactatcggcagaattaattacgggttactgtagtccagaggcaaaaggcgtacagtagaatttgacattatttcaatgctgcccatcgctttgcttctgcaatcaagctaattgtgtttaatgaattgagtgactctcatttggccattctataggattatttggcattttccttttttaaattgttttcatgacgattgttttttcaattttgaatatttataatttttttattttcatttgcctattcgtttttttaacaattttattatttgagaaaactttatccgaactccgaattcaccaaaataatttatctccgagaatgggagctggttatttatattcttgaagttttactcctcctatgaaaatttaatttatgagagcgtccttgaaaataaggacagcacagtattcccatggaaacgttcacgtgcccaatcaataattggcagagtccggaacagggccggatcctgtcagggtttttccgaactcctgatcccgaaatccggctctactttgaaaaattgacgacctggatcagaaaaaataggatttttaatccataaaatcctgtacggatgcaaattcccgagttctggtcctggtcccgaattttacataatttcgggctctaataatacattttggatcactattcaggggatttgtgctgaattggattttgtatttgtccaacacctaaatctgaaaaattggatttaaagacaaattctgaaaatcgggatttaaggactttcaaggacaattttttcggcttaattcactgccgtgcccattccatcaagtgcctgtgaccatgaaaagcatg

SEQ ID NO: 99018 - DNA, 910 bp, Heterodera glycines
ttatttcttagcgttttatgtgtaattattagtcaccatgaggcctaaaaatttgcttatattttgtgaaaaataaaaaaattgtttaaaaattaaattttaaaattttaatccttcaaccccagaaatcaaacttttaatgggctggatgacatgataaaaatatactaaaactagtctagttattgaataaaaacgtaattaatgaacttaaggcggcgttctaaaattatacaaattaattgtataaaaaaatataataccaaaaaataattcaaaataaatacggcattatattcagaatatatttatacagaaaatttgttacatttggtcacaaaataaaaattcatttaattaatatacttattatgatattttcaatacttatttaaaaacttatatttaaaacacttgcaaaaggcaaaatatacatttttttaaattaaaaagcaacataaaagatatttaaaaaataatcattaaatcaatttatttagcatttattcaattaaattttttcttcgaaatacgataattattggaatgaaaatcataaaaaaatttcttttaatggacaacaaatcattaactaatagatcaggctttagatttataataagctaaaaaattgaaatttataattaaattattttacaaattagtgaaatgatatttaataaacaaataatgagaaaaccaattgctaaattaaaaataccggatttaaattaaattatagataaataaaaaaacaaaaaaaattttttaagacatttgattttataaaaatatataaatttaattcattttaataataaataaaataatttatgcaataacaactttaaaattttttaaatatgtacaaattaaatgtaaaataaattttgctttttttcaggtaatg

SEQ ID NO: 99019 - DNA, 1003 bp, Heterodera glycines
cgggtacagaaagccgggtcagagtcctagtttttaaaccgagtccaagtcatgaaaaatccaaacaaaaatctttaaaattttttcatgaaaattaaaaaatattttcatgaaatatatttattttagaaacaaactttattatttgtccattttttccaccttttttttgcggtgcgttttttaaaacttcggggacagttggggtcgggcggtgccggtaggcgccgccgaaaaaattttgaaaattgtcttcggatttgttaacagattttattcaaaaaatgaccaaaacttgttttttaaattttttgtttttaagtcgctttttttgtggcgctgtttttccaaaaaaaaattttttggaacattgggtgcggggtccggcggtgccgaatcggcaccgccgataggcgccgccggaaaaattctaaaattttgagtgtaatatattaacagaacttgtcaaaaaatgatcaaagttttggttaaatttgcagttttaggctgtttaaaaaaagaaaaaataataatttttaaattgaaatattttttattaattaaaatttcaattgaaaataatttaaagaaattatttaaaaaattctgtaccgttggggaattgaacccaagagaaaaataatgaaaggcagaaggtttagccagcagaccatatttgaattggagctatccaaaaatagagaaaacattaaggaaggaaagaaagagatttaagattttttttcgcgtaaatttgaaaatttttctggctgctcaaaagttcaatctttaggggtgtattttcaactctcgcctctcgtcccaaaaaacgagaggcgagagacgagaggcgagcgtaccaaaaatggcgagagttggcgagaggcgagagacgagaggcgagagttgtcccacccctgctatgcaccaaatatgcacaaaaaaaacttgaaaattaggggtgtaaattaatttaaaaaattttaattattcagagaaaatg

SEQ ID NO: 99020 - DNA, 1003 bp, Heterodera glycines
aactgaaaaatttttcattcttactcaattttattcaaaatccaaaaatttttactactttatttagttttttttttcttcaaaaatgatttttcatgccaaattgagcaattttaaagattttatttttagattaatgaattcaaagaaattttggaaaattttgtcctccattttgaaaatttttgttgcataattaacactttttttttacatattcaatttttaatataattttatgcgcaacattttgtgattttacacataaattgctctctttaggtattggtttcgctaatgaggcgcttgcaattgacccaactcataatgatgccttaaaatatttatgcatgttaatgggactcaaaattggccaaatgcaaaaattttttacaaatgcgaaaaaaatagttcatcttacagtggaattagatgtttgttgttgtttttttataaatccaaaaattaaaaatggtcctttttatggcgattattaattttggggcagggatttataattatgagaaattgtgaagtatttaaaaacaaatatttacgaaaaaatgccgaaataattatcaaaatattgtaaaaaaaaaacccgaatattgaccagcccaaaaacctgaaacttcaaaaatttaccgtgcgattttttactaaaaatttaaccaaaaaaaaaataaaataataataaacataaattccatatttacgaaaaatcgccgaaataatgatcaaaattttgtaaaaaatctgaaatattaagcaaatatttaagaaaaataagaaatttgcattgtatttggcattttttcgtgtatatttatttctaaattttaaaatatcttacaagaaattttttcttaaatgtccaaaaatcgaaatttcaaaattttgtcgtacaatttatttattgtaaaattaaaaaaaaacattttaaatataaatcccatccgattaattatattgcagaaattgttgcaacgagctgatcagcatg

SEQ ID NO: 99021 - DNA, 161 bp, Heterodera glycines
ctggaactttacacattcaaaaggatcgataagccacgctttcgcggtccgtattcgtactgaaaatcaggatcaagtaagcatttgcctttttgctctacgagaggtttccgtcctctctgagcttgccttaggacacctgcgttacgctttgacagatg

SEQ ID NO: 99022 - DNA, 991 bp, Heterodera glycines
  unsure (1)..(991): unsure at all n locations
gggtaagcagtgctggtcgtttcatcacggcaccgacccttttggctagtcagcaatcgttgcttactttgccagatcggacgggtgcgcatgattccactgttccaagcaccccaccaaaagcaaaacgatataaccaaatattaaggaaaaattttttaaaaaattttttctccatcttcctttttgatactaaagcatcagagtgctaaaattaagttgtaaataaaatttggtgcgctntagagctctttctgaaaaaaatatttatgaaacaaaaaaatcgactttttcaagtgtccgtttagggtactcaaacaattatggggagcaaaaatccaacgcagaattaaagtacaggctatagggaagctattcccgaaggattcggtctccccataaatctgggcgcatcggctcggggggactgccccgaaaacaaaaaaatcgattttttcaagtgtccgtttggggtactcaaacaattatggggagcaaaaatccaacgcagaattaaagtacaggctatagggaagctattcccgaaggattcggtctccccataaatctgggcgcatcggttcagggggactgccccgaaaactcaaaaaaaaatttttttggataaaaattatttaaatgaactgactagataatatttaaaataggttattactcttcctttcagtatccctgcaaagtttggtgcgcttctgatcagtttctgaaaaaaaagttaagcctaaactttttggcctgtttaaaaaggaattaaaaattttattcatctccctttttgatagaaaaagcatcagagtgcctaaactaacctgtaaataaagttttgtgtgtttcagagcacgttctgaaaaaatacttatgaattaattttgcaaaataataaataattaatgaaaaagtcagaatttcgaaaaattttaaaaacaacaagcgttggcattttttcaggttaagttagtcctttacaatg

SEQ ID NO: 99023 - DNA, 636 bp, Heterodera glycines
  unsure (1)..(636): unsure at all n locations
gacggggctttttggcgcggagagaatatgatcaatggaaaagttagaggagcgttttcggggatgattgtccatttttttttattctgagagtggagtgaaaaggaatgagcaaaatctcggtatttatatgcgagcgccggcatggaaatggcgtgaaatggtgaatgaataataaatatttggacatggaaaaatttcaaaaaacttaaacaanactatggcctgaagagcagcacaccgccacccatgaagcacaagacgacagggcacctaaacgactcgggaaattagtcaagtcaagcgaaagacctcaagccctaaaaggcaaattgctgccaggataaacggtgctttttgtaattaaagcaaccgccctggttaacagcaaaaatatttattttaattatacggtcccaaaatcacaattaaatgatacggtccccataaagcacaggacaagtgaggaagaggagaggaaaacagcagatgtgcaaaaaaaaagtgaaaatttttaaaatgaatcgggaaaatgaccgggtgtacgatacgcgtactttggccacgcccacttgcgcaccaaaattattcccaacaagaaatcgaaatcattctttattcaaattttggaaaatg

SEQ ID NO: 99024 - DNA, 197 bp, Heterodera glycines
tcgctcagggccgtgatttaagggatgccgtcagggaacattcaagacaggggctgactaaccttaccgacaagttacaacaatgtggtaaaggaaaaaaggccctgatcactaataagaaccgaaaacgggtatttgatcagttaagtttcatctaaaggtataaatagaacaaataatacaaaaagttaaaaatg

SEQ ID NO: 99025 - DNA, 291 bp, Heterodera glycines
ggtaaaaaacacccatgccttttttaattattttcaaattgtaagacaatgttctaactgctcttctcaacacttttgacgggacgcagcagcaaacgcgggcacttcgccctgaaggtacaaaatggtggatttacaacaataaaattattacatttgatttgaatccaattccggtcaacctttcataaaggttttttaaaatttactttttcagacatcgacaaattgccttctacaaaggtcgggcccaaacacatagaaaatgcaacccaatgtacgacctgcatg

SEQ ID NO: 99026 - DNA, 174 bp, Heterodera glycines
aggcaaataatttttatttcacgggtatttttcagaaaataccaattaaataatgacatcacagatagacacaagtttgtaataaatttaaacatacagaattttttggaataaaatggctttaaataggcaaataatttttatttcacgggtatttttcagaattaaataatg

SEQ ID NO: 99027 - DNA, 242 bp, Heterodera glycines
  unsure (1)..(242): unsure at all n locations
cttttttagtttctaaatttagagatattttcctagttttttttttgaaaaacctgattaagttttctaaattttttnntcgtgcattgtaaaaaaataagaaaagatttagaaaaaaaatacatataaaaaacctctctaagaaattcagaaaaaaaaaaatttgtcgctgggagggaacataattgaacctttgtttttgtctatacaaatttataacttttttcagccaccgaaccatg

SEQ ID NO: 99028 - DNA, 389 bp, Heterodera glycines
agccattgtcccttatctgccgcattaattttctttcttgttgtaatcacaaacttttggcaaaaagacagaaaattttgtcactattttgcattgttcattgtttttatttattgctaattttttaaatttcattttattttaataaatattaaaaaaagataataattttttgcccgaattttacccaaatccataaatttttaacactaaaattaccgtacttactgaattagtagctccgggggttctatttttcaacctcccccctcgaaagggggggttctaatacagaggagggttctaattcggaggggggtacgaattcagtaagtacgttatctatgcctttttttatcagaattataattaaaattgtacaaaaaatg

SEQ ID NO: 99029 - DNA, 150 bp, Heterodera glycines
  unsure (1)..(150): unsure at all n locations
ctgacagagaattttantttgtaaattntgaggaaattcagccactggtatattattttgaatttaagggacttttggaactcggagtcagtgtcgacgttttggaagacgtggaacattcccgtccaccggtgggctattcaccacatg

SEQ ID NO: 99030 - DNA, 545 bp, Heterodera glycines
ccgagcagctttcctaaaactcagcaaaaagtccaagaataggtgtattaattcaaatgaattaccatcattgtggaattctgccgaagaatcgcgtatttgaaaaatgaattattgtcgaatgagaagttctacagaagaatcgcgtttttttaatggctcaggaaagtaccaaagttttgggtcaaaaattccctgggggcatttatcaaaacaaaagcccacccgccgtcttccttctgctaatgactacccaattagcatttcccccttccctttgtgttttcggttgcttttgttaatgattgattaatttgttgggcctttgcgccgttcgttccgttgcctttgcccttttttgtcctttgaaattgccttttttacgtgtgcttcgttcgtccccagctgtctgttgttttttccttccaatcgatcccttcgcttttcccccatttttcctttggccatccgttcgctcatttttctccttttccgtccgcttaattcacttggccattcatttgtcgtccttccttcgcattatg

SEQ ID NO: 99031 - DNA, 128 bp, Heterodera glycines
tacgattgtctagccttttctcgcccgccccctttaggccactttccagcaaatgcagaccaattacgtgccggtgaaaccgacgagagtgccagcgcaacgcgcgatgacttccgccggaggctatg

SEQ ID NO: 99032 - DNA, 221 bp, Heterodera glycines
gttggcttccgcgccattgcttccggtctaataattttatttccttataaaaagagcataaaagaaaatcgatttataaatttatttttatttagaataaattttcgaatggaaattcttttttcaacctagattttttactgtatatttttgagaatttttaaaaaagaatattcataaaattccaattcttacatatttaattcattttagtaaatatg

SEQ ID NO: 99033 - DNA, 270 bp, Heterodera glycines
taattttagccaaactttctacgagtgctgcaattgggagcttaaattctgttctgaagaatttccccattaaccaataagaatgtgatcgaatcgctcgaacaggacgacacactcaaaaaggtgatgaaatttgtgcgcactcaatgtcccgacaaaaagacgatgtcagaggacattgtcccttttcaccgacggagagaagcgttgccaatactggccagaaattgacaaaaaaattgaagaagttgttcgttcctgccaaatatg

SEQ ID NO: 99034 - DNA, 740 bp, Heterodera glycines
  unsure (1)..(740): unsure at all n locations
ggatgccaaagaaaaaagttatagcgaaaacctataaaggggngaaaancngcncacaganaaccgacaagnacctttaaaacgnccatnngncgncngaaanngnngaaanaancccnaaaacnngggananccnnnnnnancnccactcttanaaggcnnagaanccaaagggncgaaaancngcgagnngccaaggggaaagaagcgcaacagcaaacggccgaacnngcngagcaggaaggggccgangancagaaaaaggcgcagcaaaaggacccancccgcgcnncggcncccaaacggagggaangggccaagaaangggagncaaagggnaannaccnaannaggaannaagcacacagnaannaaacnaanaaannnccaggganacggnacgnnagncaccanaaacaanngaagaaggcnnngngnggccaaaaaaagagcggcaaaannggacccacggagaannnngnccnnnncagcaacaaaccggannccncgcccgacacnnngaagcagnnnnnggnaaaaccaannnnaaaaggcnaccgnanccnaannannnanagnnggcncnncacaannngnncaaattggccgaagcgcgcaagaattgtttgttcgtcgttttggagctgttttcggacgggcacaaaaagacgcaaatgccgaaagtgatcagcaattcgttagatgttttcccactgatcggcgcgcaactgatcaaaatg

SEQ ID NO: 99035 - DNA, 1003 bp, Heterodera glycines
cgttgcttattatttatttctcttaaatttcaaataaatttcaatattgtaatttattctataaaagagatagtgtttatgaaccagaataaatttttatttgtgaaatttcctaaaaataaaatacatattttttccaatgtgcttattatattattgctaattccttcatttgtaataagcagttcaattaattaattctatgttccttccctaaaattttagcttatgatttctgagttattataaatcaaaaattcgattttaattttcatattattattcaccagtataccggatcattagttatgacattgaatgctcagtaagcatttataattatttttttattattaatattttggtcgatatttgattaactctgataatgaaggaaaaggagaataaagttgttatacagaatttgatctttttgtgtttttaaagttggcttcgtttaaaaatttttagtcttattgttacgcacataacgcatgtaaatatatgtttaaaatttttgcatttacaataattatattttttgttacttagggtattaactattttttgctgtgtaattgaataggcaattgagacaattattaaacagcatttgcatttctattataacgtacaacatatagtttttatttgttaaagggttgtattttatttatttattgtctataatcttatgttgaaatgatgatgcttttatgtttctctttgcggggacatttatgatatgattatattatatggcactaaatacattttcgtcttttttagaagaaaaaaaggaatttaaccatttaatttattaaatacaagaatggaacattaatatgactgattatgaaagatcattaataaatgcttttgattgtttatgacaggtttttctcgggaaaaatgttttattatttgttgaaaattatttattggctaattttttaaattattattttttattaatttaatttcttttttattttcgaggatg

SEQ ID NO: 99036 - DNA, 111 bp, Heterodera glycines
  unsure (1)..(111): unsure at all n locations
aaatttttcttggcgataaagttttgcttcgtcatcgccaatcgcaatcatggcgcgctgggatcgtcagccaatgtcagggagtcattancgaggtaaagtttccgaatg

SEQ ID NO: 99037 - DNA, 1003 bp, Heterodera glycines
ggggggggggtaaagtgcttcatcgaataaggggcagcttattgccaccgattcgatggggggagaggggggggggtgaaaagtgggggcaccggggggagaaagagacgcaaaattggcggtgaataggaaaaagcgatgtggatgaatggaaaatggaaaaaggtgatgatggaagaaggaagattcacaatatttttttttgttgagctttaactttaagaaaatgtttccatttttatttttaaacgatttttatttttttgaattttatatttaatacaaaaatggaaaatcgttgcaaattctgctgttgggttaagaaaacaaaagaaaatgagtaaaaaatggtggaggtaaaaatgatttatgagactgaaaatggaagatggaaaaaatggtgccggggagggaaatgaagaaaattttagaaaaaaataatcgtgcatagagatgattaatgatgaacggaaaatgaagaggaatgatgaaagggtaaggggatttttatgaaaaaaattttggtgtgtgaaaaatgaaggtgagaaaaaggatgatgatgaattggtgaagtaaaatgaagaggatgaaaggaaatgagaagaatagaaaattataaaaaaagggatataaatttggaggatgaaacaaatccaatacaaagaaaaatatggcttaaggagaatttgttgggtgaaaatggaggtgggaaaagggatgaagatgaagtgaaatttttgagggaaaacaaagaaaaaattatgacgaatagaaagatgaagaaagaagaattgttgaaagaaataaattcaaataaaaaacttaggatgtaaaagaaagtgccgattaaaaaaacggcactaaattggtaggaggaaattaaaaggaaggaaaatggcttagaaaggaagaagatgatgatgatgaattgatggaagaacaacaatggagctggaaaggttgacgatgaatataatgaagagggataaacactaaagggatg

SEQ ID NO: 99038 - DNA, 79 bp, Heterodera glycines
attacaatacttaatgattaaatgttggcacatttaaaattaattaggcgagcatttgggccaattttttccaccgatg

SEQ ID NO: 99039 - DNA, 93 bp, Heterodera glycines
ttttaggtagacaaaatgtaatccaattggactgtatgcacgcaattgacaaggtcaacatttgtaatgatatagaagttaaactgaaaaatg

SEQ ID NO: 99040 - DNA, 699 bp, Heterodera glycines
ccggacccctttctttcccaaaagttttttggaaaagcgcgccgaaaaaaattatgtgaaacgtaaatctgaatttctaataatattctatcacttagtccaaaaatgattaattgtttgaaataaatgaagaaaatttgatttgaaaattttcattaatttaatttagctttaacttttggattttattaaataaaaaacaaaataaaaatttaattttgtattattttcagttgaaaaaaaattaaaatttgaatttttttaaaaatttttgaatttttttgaattttaaaaaattcccggttggtcccggttcccggtcccggtttttgcaaaaattcccggtcccgtggcactctagtttcaagcctcccaaagagcgtaaataaacacaaaaaaccttaaaaaactgattcaattattatttgctattttttattaccttttatttatgtttttgtatgaaaaattccttttccaaaaaacattaaaaatgtcttttataattcgaaaaaagcaaacgcagacattccgcagcagttgagtgagatcgcatttcatttaatggatttttccgctcttccaattatttgcccatttaaatgctatcattccccaacagttaaattccttaaattgaataaaaattaattaaattaaaaaagcatatttaaataaattttaccgtgttaaaaaatg

SEQ ID NO: 99041 - DNA, 1003 bp, Heterodera glycines
tcgaaaattttggattttcgactttttgttcgaattcgggtccgagttcggaatagtcttgaaaccattcgctagctctaaaaattctctattagcctaaaaatttcaacaaattttgtttaatttgaacaaagttatagacaaaagtacacaagcaagcaggttagttgattttgggcaaatatgaataattttttattaaaaaattttcatttgatcgttttttataatgctgttattgatgatttttatataagtttaagcatcgatttaacagccaatttacgttgcaaattttcactgttgaaattatttaattgacttccaagggaaataactaacaaaagtgaagaatttggagaaaggagaattttttctttgtttttaaattaaaattttttttattttatggcaaaatgttacatatcaaaattttttttaaaaattatgatgttacaaaaaatatgaattgataaaaatcaattctaatcaccgaggggtcatatgagaagggggtctggggttcgagtccgcttggctgcggtttatttactcgaaagtcgaaatcggcagaagagacagtagtaaaacaacaaaacaggatgaaaaaaagagcaacttaaaaggaaaaacaaacttgttcataacttttggtatattgtaaatcattgtgcataaactttgtcaacacgcaaagtataagttgaagcggaaaagcgatgaataggagatgaagcgggtggaaaaactgagtcgggcgcaagcgcggaaaggtgtgccaaaaacggatgcccgcgccgtaaagaaggaagcaagcggaacaatgcgcggaaatgcgagagcggacgcaccgcggacgacagtgcggcggacagtggacattgcttgatagggtttaaaatgcaaaatttgggccactgtcataatttacactaattagctaattagagaatgagtctagcaaatcaaaaattgtgaattttacccagggaaaagcagaatg

SEQ ID NO: 99042 - DNA, 290 bp, Heterodera glycines
agcccatttcgagaaagaattactcgattgagtaaatttcggcataaatttgaagagaaaaaaaggattttcgatgagagacctattttgattttggcaacaaatgtcgggacgcaaatgtccgaaaatggcccttaagaaatgggccgcaaatgtccgaggcgcaaatgtcgggccgcaaaagacggaccgcaattgtcgtttttggctggtggccgcaaatgtcgtgacacgaaatcaacaacagcaaaaaggaaacagcgaagggggaggagaaggaagagaaaatg

SEQ ID NO: 99043 - DNA, 166 bp, Heterodera glycines
ggtgggtaaagaagagataaacaagattaaatgataatgagagaggcagaaaagaagtgtgaaaagaaagagagaatgagggggcgacaaagggaaaagaaaagaaataggggaaaagatagtagggggaaagacgacaagagaaaaaagtgggaaaacaaaaatg

SEQ ID NO: 99044 - DNA, 256 bp, Heterodera glycines
aaacagcggaccaattaaatagaacatccatttgtgactttaaaataataaatgttcaacggtagtttaaatataactctttggttttatgaagaacaaattcaagttctggcttttgttgtttctcattttgttccttaaaatttatcatatctaagagagaagaaacgatgagtgagatgaatatcaattcttcgtctctaaggtgaaaatctttttaacatttggtggggacaatgttcgatttaaaattatg

SEQ ID NO: 99045 - DNA, 130 bp, Heterodera glycines
tctgctatttggcccatttttttgataattcgatgcaaaaaaggcggtaaattttttggcgttttttttgccataaaatgccaaaagtgaaaacaatttttacagtaacccaacagacgtccacgcgatg

SEQ ID NO: 99046 - DNA, 672 bp, Heterodera glycines
  unsure (1)..(672): unsure at all n locations
gtagagatttaaatttaataattggattaacgattttattaatttcggggcacatttttaaataaaatgggaattaatgaaaaaaacatttaaaactaatcattatttacttaatatttgccaatatttgttcagtagaacaaaatttattaaatcttaataatttttattttacattaaataatttttttatattgtaaaagcagaagatttagatttatattatttataaaaataaaaaattaccaaatttatttttgagaatntaagaagaaaatgaaactccacctattattagttttaattatatttttaatcatcgaaattgatcaaattaaaacggaaaaggaaaaattacaacaaaaatcatttgaggaaatttttggagaaaaatgggaagaaaaagaagaagaaaggcgaaatgaactcaaaaaaagagaaataattgcaaaattttataaaataaaagagaaaatcaagcaaaaaggacgaaaatactcaacaaaagaatgtaataaaattgaagaaaaaataacgaaaaaattggggacaaatcgaaggaaaatttatgaatggattaaagaattggggcttcaaaaacaaataaagaaaagctataaatcaaaaagtgatgaacaaaaacatgaaattgttcagaaatttattgaaatg

SEQ ID NO: 99047 - DNA, 544 bp, Heterodera glycines
atagattgattctgactgatcactctcatgtaatgggctttctaaattaaccgctcacatcacagcagatagatcagcgcatttacaatggatccatggggcgatatttttgaaattttatggtcagaggttcggagactagcaacgtccctggatatcgattgcttagctactagaaatgtcctcatcaacgcatgtaactgatacatggtccgagaattttgaaatattgtggtcggagttcgggattatcccctccctggatattaactgagtaactaacataattctagaacataatctcgaagttgtgatagcgatgctgctcggactctagctagtatattatagcactaagtgctccccgcccgcccttcccctttctttacccctaaagcttttccacagagtccgacatttgcccattggaccatgccagcgccagcattcttggctttgtctattacaacacgtgagcttggcttttcccaaagttattttctataattttgcacttaattaaggtctatccgttttaacaatg

SEQ ID NO: 99048 - DNA, 192 bp, Heterodera glycines
aacgccgccgaatggagaaagatttattaacaaaaaaatacagtataatgacgaaaaaaatttattaaaaaaattacattataataagaaaaaaagatggtaaaaaataaccccccacacccaccggtttaaaaaaattttttaaaatacagtacccgaaaaaaatgcgcgaaaaaattttgcgcgaaaatg

SEQ ID NO: 99049 - DNA, 56 bp, Heterodera glycines; identical to SEQ ID NO: 98501

SEQ ID NO: 99050 - DNA, 171 bp, Heterodera glycines
taatgtgtgcaaatatgtacaaaatcacttgcgacgggcgccggcattcacacagacgctacaaaaaaaagaactgtgtgtgctgtgccgtccgtgccgagtgcaaaatatgccgacaaattacttcgttcagaacaaactaattaatgccaatttgtttccagacaaatg

SEQ ID NO: 99051 - DNA, 132 bp, Heterodera glycines
  unsure (1)..(132): unsure at all n locations
attttantctcatatcatttgaaaattttaattttgtacaaattttgaatgaatttaccattttaaggcttggtctgtgtgattctgggcaattttgcgtccggttttgccggcgtttacgtggagaaaatg

SEQ ID NO: 99052 - DNA, 858 bp, Heterodera glycines
  unsure (1)..(858): unsure at all n locations
gatttntgggcgaaataanttcgcgtcaaacaaacacattttttattgcatttttttgtcaaagaatttctgtttacatgaaatatcgaaaaatgctaaaaatttttacaatattgacaaaactccaaaatattgaaataaatattttttttcaaaacccccaaaaattttgttttattgaccaatattgacgttcaaatgaaaaaattcaagcgcataaatccgtttttgagcttctttcttcaacgcatataaacaaaaaaaaattgaatatatatgttaattccatccctattaattatcttagaatcagccattaagaatacctatatcgaaaatgaaccatttcattttatcaacgtaactccttgaactctatgcccgtgggattgatttcttgcctgaaaaatggcaactcattatcgataataatggctggtgttttaaacgtatttgaattttttaaatttttaaatagatttttttgctaaatttaaaaagaaattttgttttttttttgcgcaaattaaaattcaaataataataattattatatttgacaaattctgcagataaaatattttttacattttattttcacatgtatgaagaaaatcaaatacatcaataatcgatcatatgcattgtttcatgcaattgtattcttctgatggcactcgaatatctgccatattattatacaaattcatattatagtttttataattctatatttaatattaaaataataaaaatattcgtaaattcactttctcgaaccaatttatacattactctaattaattgtcgtgaattagcttaacattctctaatttagttgagaaaaattgttaaatg

SEQ ID NO: 99053 - DNA, 175 bp, Heterodera glycines
ttccttttgcgtctgttaattttgctttaaaatgaattttggccatttcaatcaatcgattccgatcaaaaaatcattcacaatttttctttccttttctgttgtttttatgtgttggccaacctcagctcagttcttttcagtttcattcaatgattaccttttttgtcagatg

SEQ ID NO: 99054 - DNA, 509 bp, Heterodera glycines
gctgaagggcgctgttttgcgctatgcgaaagcgatcgaactccgtctcgggggagaaaaagaaaaatcgacgaatgtcattatgatggaaagtgctgtcgcccctttttattcaaactgatcaggaggaccttccctagtaataatgctaggggaacctttgtttttcttttaacgccaataaatttattgaccaatcccaaattctcggatgaacatttttatgtgcgtaatttggccttcgtccgccccctttggagtcgataattcattcatttgaaaatttaaatgtcgaaacataagcaattggtaaatttcagtgcatttacacggcgagtcaattttgggctccaagtagtgaacgacaaaacgacgttttagtcgtttaaaaaaaagaaacgatttaacatcgttttgttaattttaacgatgtgcataacgccaacgatgttttaacgatgtttttttaaattacgaattatagaattgaaaaggatgtaaatgaaatg

SEQ ID NO: 99055 - DNA, 1003 bp, Heterodera glycines
aaatgcgtcggaacaattttttcccaactcttttttttggagtgcggatagcgagaagatagacaattcatggccatggcacattaacattaaggttctggacggttttatgcgtcccataacatattatgcgtcccatgaagggaaccggccattttggcgcaagactatatcattttgatttcacagcaaaattaaataatcttggtatgattttaagtggcttgatagtgcctattaacctgcaaagtttcaaaaaatttagctgagaaacaaaaaagttatggccaaaaaacctcaaaaaattgcattttcctggccattttggcgcagcgcgccatatcttttttaaaacctaatataattttttgaaattttgcaggctaataaagaacatttagacctattgattaatatcaacattattttatttggtcgaattaaaaaaaagttatgaatctttaaacttgtctgcgccaaaatgaccccgaccctcccatgaatgaccgaccatcctggtatcaaatgaaagctaaaagtctcaggattttataaatgcaagaaaagtgcaaacactggcattaaaaaagaaattacaatgagaaatcacgcaattcaactttttcgagaataattttttgtctacttatataaaagcttctatagaccttaagctttcatttgataccaagaatataagtattggccaagtaagaaaaaagttatggcctaagaaactgggtatggtcattcatgggacgcataaaaccgactagaaccaacattaaacgaattgcctaaaaacgaattggaatttttaatgaccaaaattgaaaaggagttaaccttccttctgtattagacatattcccaaggaagagtaaattattttccgaatcctcccaatatgttaatttcatatttttatttccattctttttaagtggatttgttctttattcattgcttacaaacaaaacccattgattcttcgtcaaaaatg

SEQ ID NO: 99056 - DNA, 738 bp, Heterodera glycines
gggtgagtgagtgaatgcatcaatttgtgttcacgacgtgtgcacaacgttttccaccacttttcagaattaaaaacaaaattaaaacaaaaaattttatgaaaaaatcttaaaacaagaaaaaagaatttaaaaaatttccaccgattttagaaccagtggacacaccgactcaaaaaatgagacataagtcattaaatagagagtgcagagaaagacacatttctctcttattggcgaactatttctttacagagaaagaaaaaaaaacttaaaaaatgacgattttcgaaatcatttttgagagtttatgcaaaccaagctgaacaatcttggtatcattcgaaagctcttgatgaggagaagctttttataagcaaacgctatacagttgaatgagttagaaaaaggatgtgtgcgttcgaaattttgaatttgaagaaaatcaaaaatgttcttttttcttgatttttaaaatttgtggacgtttttttcaaatgactcaaaaaagacaaattttccattaattacttactgtttccatcttttaaaaataacgaaactttaatattggaaaaagtttttttttaatttgtatcaacttgcaaaactttgcaaaaatacattaaataaattttgacgaaatttcttaatttttacccataccgcatagattttaaaaataatatcggaataaaaaaatttatgggcctacgaacaaaaaatcagacaaaaatg

SEQ ID NO: 99057 - DNA, 68 bp, Heterodera glycines
tttggtggtgccaacgctagcccaacaggacagcaggtaggtggtgaataggaatcacttgggtaatg

SEQ ID NO: 99058 - DNA, 63 bp, Heterodera glycines
ggtggcgccgccttctcttgcacttcgtttttcaattcttttttcccttggcaggccatcatg

SEQ ID NO: 99059 - DNA, 981 bp, Heterodera glycines
gagaaaaggaaaaacgtgtgaaaatggataaatgtgattgaattgataatggccaatgggaaataattaaatgagggaaatgcgtcgaataatccttacaataacataaaaacttatttcttttcctctccgtttggcatactattttcatatctctacccaatgaaaaacgtgaaattcgcaaatgctaacaattttcgataaaatggtataaaatcactttaattttttagaatcaatataaaaagaatcaatttacgcattttggttaaaaacggcggcctagggcttgagttataacgtaatgaaaatttaaaactctcacaacttttttctgacatgacaaatgcttagcacttgcttagaaaatattcagcttttcaaaaactttttttagataccaaatttgttcagtttagtggggaatgaagcgagttatggttgatcaaaataaagaataccaaaaggcatttacccagggctcccaagtgtgcttatttctaagatttgtgcttattttgaggggccggatcttagaaacctaaaatgtgcttatttcagcattacgtgcttattttgggatttgaaaataaaaaaatgcaaaattttaatgaatgttttgaattatcgttttttattgaagcgaatatttgaattactaattcgattttgaaaaaattcaaatttatttcgttttattgagtgtaaaatacccaaaatttcagagaaaatctgtaaaaaacagtcaaaatttctatttttcctccggcggcgcttttcggctccgcgggtccccaaaacttatttgttttcttaaaaattggctcaaaatctcaaaaattggtcattttctggcggaactctgttaacaaattgggcgctacttaaaaagagtattcttttgaaaattttttcactttttttttggtcaacattttttttttgtttgttttgatacagaatttgtttttttaacagatg

SEQ ID NO: 99060 - DNA, 77 bp, Heterodera glycines
attcttcctttttagcctttctttttgactttccattgactgtgccttttcgtcttcaattttgttcatccaaaatg

SEQ ID NO: 99061 - DNA, 532 bp, Heterodera glycines
aaaaaaaaaattaattttttccaaaaaatttgtggccaaaaattaataaaaaaaaaaaaattccaaaattggaaaattaattttttcccttataaaaatacaatttttcggaatgtataacttttgccaaactcgactcaaggggtgagttcagtaatttttttatagacacattttcgcaaaattaatcacttttaattcgcaaagaaaacgagtcgaaggcaaaaaaggaaccaagtcatcaaaaacaatcagaggagattattattttttattttatttattctttcattcatccattcaattattaggtcacagtttttaatggcaaatttaaatatgaataattcctatgggtcatcattttgcctcaatttattcttaattgaccctaaaaaatatttaaaaaatcagcagaaaaataaatgctcatttctttattctttgaaattttatcgaaataataattatatattaaaaaaacatctgaaaatgatttaaggaatttgaattttcaatacctttaaaaatg

SEQ ID NO: 99062 - DNA, 137 bp, Heterodera glycines
ggtagggctcaaattccggcaaaatggagtttcaatcccccgtaatcttatcccggtctgaggccaatccaaattcccgactttatattattttaagtttgaatttaaaaatttttcagcattttttctgcaatatg

SEQ ID NO: 99063 - DNA, 144 bp, Heterodera glycines
tttgggcaataattttaaaaacaatttaaattgtttttataaaccaaaaaccgagtaaaaatgtaatgcctttctgtgtttggcactttgtcctcctcaaagttttgcgcattttttggcgaaaactcttcggccgatgaaatg

SEQ ID NO: 99064 - DNA, 206 bp, Heterodera glycines
cttatccatgccatctatcatctatgattctttcatgcatgcattattcatgcaaacattcattcatgctagccttattcaatcattctttcattcattcatgccatgtgctttcatagaatcatgcgtttataaattttcatgcattacttataaatgtaataaatattataaatggtgcggaattagcttatcacattcagatg

SEQ ID NO: 99065 - DNA, 73 bp, Heterodera glycines
ggtttgcaccatgtctggaacttgtttttaaaatattttctaggcatcttccgagttcggtcttttatacatg

SEQ ID NO: 99066 - DNA, 154 bp, Heterodera glycines
ttaataattttaattttttggggaaattgatttgggaaaaataagaaagaatggcaaaagaaattgttttgatgtaaattcaccgccatcaaaaacatagtttgggtaaacaatctttcagttattgatcatctaggttaatccataaattatg

SEQ ID NO: 99067 - DNA, 303 bp, Heterodera glycines
tttggggaaaagggataaaaatgaatgaaaaataaggaacgagagtctcgaacatcggcgattgcatttgtttacccaatcttttgacccgtagcaatattttggtcgataaacggaaaggatgaggaaacattttttaaataaactatggaacagaagagaatgaaaaagggtatataaaacgattcgattttaaatttggtaacattcatgatcaaagctccaaaaaatggccattaatattagtgacaaaaaatctttgatggagaatatttccagcctctcgcacctgatcctccgatg

SEQ ID NO: 99068 - DNA, 81 bp, Heterodera glycines
tttaatggatgtataaatatttgaattcaattttcatttggtttagtttcttctgctgatgtttctaaggctggcaaaatg

SEQ ID NO: 99069 - DNA, 241 bp, Heterodera glycines
ttttgttaatgaagtaaattactggggttagtgtgaagagagtggcaatgaaaagaaaggtgcaaaatttgaattttcgctgttctaaatcagcaggttgcaaattttgtggaggctgttgaagcggttttttcttcgtcttctattgtgagccaaagtttccgattgatggtctaagttttaattttttctttaaaaatatttaataatatttttaagagttttgaatacaatagggatg

SEQ ID NO: 99070 - DNA, 655 bp, Heterodera glycines
aatatttgtgaaaatagtaaatataacaattagaaagaaataaaattacaatttaaattgcaaatttaattattagtttaattatcaaaaaaatgcaaaaatttatcattaattgaaaattggcttaaattctttcgcgaaaggacgcctctgattttaaggacagaaatgagaaattaatttgtcctttaattcatttgcaaaggataaaaaaatgagaaaggaaaggacaagcgatgaaaagagaaaagggaaattgatttttgcttctctgcgaaaaagaaaacgaaaagaaaagagaataaatgagtaaatttttcggtgtttttttactaacatttttcaatgtttttaaatattttatggtttaaattactttaaaaaactgagaaaaaactgaaagatttcatcgcaaatgaaaaggcaaatgtgccccttgtcgtgtcgttgtcgtccgtcatcgattgttcttccattttgcattatttagcgtatttattatttatttactcttttcgacgaccaataaattccattttcgggccgttttaagccaaaagcatttttcatacagttagcttaaatggtccgacatttttttcctattattttttgtgttgttttatttttcttcgaagagaccgatgggaaaatg

SEQ ID NO: 99071 - DNA, 188 bp, Heterodera glycines
tacctaaatatatttctgtcaccaatttattgtttaaatcctttatcagcgattatcgtaaataaatacgatggcgcgaatgactaaatatgtcatttgttattattgcaatttctcggaacttccgaaccgttaattctgtttgttatttctggatctgattgtgtttttgttttctggtagaaatg

SEQ ID NO: 99072 - DNA, 95 bp, Heterodera glycines
ggtcgttctgctgattcaataataaatcccttgcaagtccaaaaatttcagtgccggcagagcatgcgcaaaccgtggccaacatcgaagccatg

SEQ ID NO: 99073 - DNA, 358 bp, Heterodera glycines
tgtcagcaaaaagacaaatagataattaattaactaattaaatagggaaaattaattcggaaaaaaggaaaattaatgaaataattttaacaaatgttcttcgcattgctgatcagttcaagaagcaaatggaggagcatgaattttgtgtattctttcacaataattttaggctgtgaaaagcggaagaatttccgacaaaaaatcattggaaaatctttgcggggagggggcggccggactatctcagagttttgccaagggatgtaattctggggaagggagcaaaaaaagaaaaaattgccacccaaaatccaaatttggcaacaatttttaggccaaggaaaaacaacgaatg

SEQ ID NO: 99074 - DNA, 53 bp, Heterodera glycines
ggtgcttgtgccaatttgctttttgaatttttaatttcaaaaattctcagatg

SEQ ID NO: 99075 - DNA, 70 bp, Heterodera glycines
tctgtcacataaatgtaataatccgccatttttttgccaggacatttggtctgaacgtgccgatcggatg

SEQ ID NO: 99076 - DNA, 557 bp, Heterodera glycines
ccaaatttatttccattgggacaaaatcggacttggaatggaaattttgaaataatacggggagatttgagaatttccgaccaaagaggggaaattttgggaatttccgagggaattcaagaggaagaggaagtgaaaggcaaaaatacaaaataaatgcgatttcggatgaggcagctcagccttcggcatccaactcccgaaggtccctgaccccgacaatgacatttttgacaatttcaatgattctgtgctcatttttcgggactatttctggtcaataccaattatgttctgatcgggttcccaccacacccatttggttaccaaacgtaacggaatgttcagtaccggagtgccaaaaagctgaagagagaaaagttacactttttttacctgtccgaatgccaaaacaattctcagtttataactgctatcagaaaatgatgaaaatttgtacgggaaattttctttttttctggaaagacataaaaattctggattcgtacgtgaagggagtaagtcaccgagcttgtcagggatttaaaaataacatg

SEQ ID NO: 99077 - DNA, 722 bp, Heterodera glycines
ttcaaaaagcgaaaaaagaaaaattttacagctaaataatttgagtcaaatgtcttaaatgggaaccatggcaaaatatgcattttttttttgcactttgcctacttttctcggctcttctcgttatatgattttaaaaaaaaattttatgcagcgaaattttgaatttttttaatttgaaaaaattaatttttttgtgtgaccattcaaaatttgttttttttttgtcaaaagcaaaccgcaaaagcgaaactttcttaattctaactgaaaatggttaaacgcctcctctcttttttccacaaaaaataatgattttaaatatcggccgactgttaatttttgccgtttttataaaaccaagacaaataaataaacaagtatctctaaacatttaaagtcagtcaattttgcctcgaaaaaaagtcgaaaattcatttttcataatctaaaagatctaacagcagctgtgaggaaataaaatgcgttaaaaatgcaaatcaacggaagacggccaacggattttgaatgggagagcgaaaacgactagcaaatgtccatttcgtgcattttcatcgattttggggcaataaatgtgatttttggtgaaaaatgaatttttgacatttgtaaaaagtgaaaatgtggggcctaaatttaaatttttaaatacctaaaaataaataatttagcttattgttagtttttaattaaacataatg

SEQ ID NO: 99078 - DNA, 152 bp, Heterodera glycines
ttttagatgttgaaatttaattgcaaaaattttataaattttttacaattaatttatcggggaactgaaattttatgcgcacttataaatatatttaaattaaaaatatataatttaaaaataaaattaattattattatgataaaattatg

SEQ ID NO: 99079 - DNA, 732 bp, Heterodera glycines
ttttcattttatttctttcatttttcacgttttgagtgcccccccccccaatttcgtccacataaattgccaattactcgcctcaattggcgcagtttcttctgccaaattatttaacaaaaacaacacatttcgttgcagccaaaaagtttaaaaaataatttaaaaaagacaaaatgaagaaaatggcaaaagaacaaagaaaatggagaaagaagagacgggcggcgcgagagtcaaatcggcaaatccagcacaaaacaattgtcaaaagtcccattttcttctgatgcgattggttggccgtcgttcgtagcgaaaggctttttatgcggcgatttgaaagcaaagaccaaaagacaataaaatccttaaaatcaccactcattgatgagcagcaacagatggacgaatgaataaatgaatagggaaaagggggggggggggggacggatgttacgttaacgttacatgtgtcatctcttaataagcaacaaacaaaacgatttctccagctggcatgagatggacagtgacggaaggaatgtggcagccgatgagagaaaacggaaggacaaatgaaagaaaagaaaaagagaggaaaaagagagggggagagagacaagcggataaagggataaaaagcgcaattttaaatttatttacttttgaagagaaaatgaaggaaaagcgaagcaaatggcaaattaaaacggaacaattcacggaatg

SEQ ID NO: 99080 - DNA, 204 bp, Heterodera glycines
attgactgtcgcctctacattcccgtgactgcgcactttcccgaccgagctatcgcagctttcctggatccggaacttcgcatcctctcgctgacagcacaacatgcaagctgtaatagctaccggttccatcatcttcaactgcgaagcaatcccaacatctggttatggattgtctctcgaaccggcacagcacgacgaatg

SEQ ID NO: 99081 - DNA, 166 bp, Heterodera glycines
ctaattgtggaactatggatgaagaacaaatttttcaaccttttgatgaagacaatatggaacaaagtcataatttcatggtataaacattcacccattattttataaatgttaattggcaatttcgaaggattatgaaagtggcacacatgacgacgcaataatg

SEQ ID NO: 99082 - DNA, 149 bp, Heterodera glycines
ggaaagaaaatcaaataaaattctttcaattcaaagataaaatacccgcggaagtgccacaatttcaaattaacaacgaagaggcgacgatttttgccgctgtgaaaacggtgaacaaaatttcagcgtcctattttggtgtaaaaatg

SEQ ID NO: 99083 - DNA, 1003 bp, Heterodera glycines
tgaataaaaaaataacaaatgacactattcaaccggataaaattgggagacatatccggaaaaaaaattttcaatttttttttcaaaaaatggaaaattttatcaaaaattcatattcaaaatttatttatttatttacttgactacatttttgatttttaaaatatttatctcatttccatttttagcacctatttggggggtttataatagggttgctccccgaccccgagccccctacctccgactttttatcccccgaccccccgacactaactcggggaattggggactcttgaaaatttttaaatttgtacaattttcttaataaaattaattaaaaattcctaaaattccgaaaaactttcggcggcgcctatcggaaccgccggcctcccaaaactccaaaaatttttttaccaaaaattggcttgaaaatcacaaaatttgacaatttttggataaaattctcttaacaaattatactcattttcaaaaaatttcccggcggcgcctatcggcagcgccggacacccccctcccccacctcagaggtgatctttcgctttttctattgataaaaatggtttattgtttttttttgggaaaagatttaaaaaattcaaaaaaaccgaaaccgaaacggtataccgaaaattttgcttcggtttttttcggtttcggttttttcggtttttaaccgaaaccgaccgaccgacaaatttttgagtttttcggtttttttcggtttcggtttttataccgaaaccgaccgaccgaccgaccttcttgtccggtctctactaaatcgaattgttgacttcagcccccccccccccccccgaagacaagggtctgccactacgtccttgctcgctgggcccttttaattttttatattccaacataagattaaatttttttttaattttttgaattttagcgagtcaattctgatgagtttcaaaatgaattcatgaccaaattcaacatcagcgaaatg

SEQ ID NO: 99084 - DNA, 55 bp, Heterodera glycines
ggtacattttaatttgtaaacaattattttttaatgattttaggcgtgaacaatg

SEQ ID NO: 99085 - DNA, 564 bp, Heterodera glycines
aattggcaaataaggtggcaaataattcacatttctcagcactgttatgatagcatttattttcataaattagattaggtatttcaaagggattgacattgaattttgtatatatttataaattgaatttcttccctttgaaatagcctttttctcaatttggctatggtatttatttgtttgtatttttatatgtaaagaaatgctatcgtgtatagtgcttttttggatgggtcagttttagcttgcctgaataatttagccttttctttgatggatgctattaaatgttgtgggtatttaggagtcaaatcattcttggttaaacgctttattggaatacactcatttaaaatttttaacaacgtactgttaaaggcggaatatttttgatttatgctaaagcattcatatgacaaggcatttagccttgatgctatgactatattaaaatgtaacacattcgatggacaataccaacgaaagtttacgatctttgttttcggttttgttttaggagtaattaatgtaaaaaattgtgttaaatgatccgatgaaaatatg

SEQ ID NO: 99086 - DNA, 827 bp, Heterodera glycines
gatttgtaattatatgaaatccatatttttttcctggactgttggaggcctgaaacgcatgaaaaacatgtttttagcttggtttgaagcctctaggaaggagttcttatccatatttttccatatttcgcgatttatttccatattttggcattaagtcctattaaacggcccccatcagctaaattagccgttttgaccccaaaggccgtaaaaatttccgaaaaagacattttttagcaaaattttgtcgaaaaaattgattaaatttaaattttcttaaaaattggttaatttatgtcaaaaataagcaaaaatggaaattttcgattttttggtttgttttctctagaaattgctttttttcttctaaaacgagttcttatacagtatttagccattttagatgtattttactagaatttgatgaatttgaataaacatttcaaaatttatccctcaattcggaaaatttgtgttctatttttgccattttatgcccatatttcgcgatttttggtccatattttatggccatatttcgagattttataatccattttttgcatccctagtaataacaattaacatttagtcatgcagagatcacaaaaaatcaatatttccctttttgtctataattttcgctattttcctcatcattttattgtttgccggaggcgagatttagtgataaaaattattaaaaataatctcattttttttcaacgaactgatcatatgtaattaacatatccattttccacacttaattaagatttaatttttccataatttgtttcagtaatttgcaaatgctcgaaatg

SEQ ID NO: 99087 - DNA, 632 bp, Heterodera glycines
tcgataataatgtttaatgagttccaatcaaataaaaacaaagattaatgagtattcaatcaattaaaaagaaactttaataaattcaattagtcgataataatatttattgagttccaatcaattaaaaacaaagtttaatgagttttcatattcctttggcagtcattttgattcaattttgcaaactattttacaattaagccattgccaacaaaaagccactttggtacatttaatgaagattgggacagaatttgtggaagtgatgaccagcagcaatgtgtgagaaagtttgatggcaaattccagcgcaatgttgtgtgtttttgttataaaaaataattatgcattgttaaattataacttaaattaaattaattaaatatattttatattcacttttagtttattccgtcgcttaaattggccggctgtttaattgcaaaaaattcaaatgttttcttggagtcgttgttttgctactttgcaaatatgaataaatttaacatcacaaatttcgattacaattatttgaatttgtttgttcatattttattaataattaaacgtgacttagagagaatggcattattttttttttaaattttagaccgagaattaggaagatg

SEQ ID NO: 99088 - DNA, 1003 bp, Heterodera glycines
cttttccaatttggtgaatgaatttctcatgtaaaaagccttaaattttttctttatttggcaaatcaataaattttataaaaataatactttgaaatgaaaaaaagaattttctttattttgactttttcaaacaattaattttcattattatctctttcgatatttaacaaataattattactttttaaaaatttgcaaaaaaaaaaattttaaaaaaagctaatgaggtttttctttttactataatttaagaatttttttaatttttgcattcagccaaaaaatgaacgagaatatcaatgaccataaccaacaaaaaaagcaagaaaacatatgaaaaaaattgtaaatctttgaaaatctccgtcctcaactgggcaagttttcctttcttatgcccccaggctctccttttcggcctgctttgttgcggtaaaaaaataaatttcgattttgaaaaatcacttaaagaatatgattgattgcgttgagacaaaacgaattaatttttttaaatttttccctcggcaaataattcaattgaaatctttctatttttttcttggaaaatttccgggtcggtcccggtcaaaaatagaggtccctggttctggctgatttggtctcagttttgcacaacattcttgttcccgtattattattctcaattaaccaaaatttttgttattttttgtttgctattattacaaattaataaaaaaaatttttttttgaaattttcttttctcccattattggaaaggcaattaatgtatttgatggacagcacagatcacttacatatttagtcattcaatgataataataaatgtgatgattcagaaatgtatagcaaaatgtgtggggaaatcattcaatgaattaatttaatttcgttatttcgcattcacaattttgaaataacggataattactataaaatttgtttgtcaaatttagtcataatttaaaataataccaaatttatttttaaaaaatg

SEQ ID NO: 99089 - DNA, 388 bp, Heterodera glycines
tattttgcgattttatatccatataattcctagccctacagatcagtaatcacgaataaaaaaatattccatttttaagcgtcatataaaaaataattagagctttggagaattattattatagataggtaaatggattcagaggagacgatttaatgaatttttttaatattgtttatgcccatggtaaagacaaaatccaacatcaaaaagcagttataatcaattatataattgataaatgcacatacgatgtccttaaaatggaaaacgcgcattgcttacataaattaatacgcattttgcaaatattagtctttttttaataagtttttgtctctcactcaaaaaaaaaattttccttaaatttaaatattcagcaaaaatg

SEQ ID NO: 99090 - DNA, 985 bp, Heterodera glycines
  unsure (1)..(985): unsure at all n locations
tctcgccccataaattaataattgaacctaaattntggagttaaatgcacatatgaaaaagttttattttccacctcaattggcatgtgagcaattttcctctttcgaatgccattctaaaaagtattaaaaaaaataaaacatttgggtagaaatccagaaaaaaaatttgaaaggcttttttctcttctaaattggattttccttgctgcatatatattaaagaataatggagaagtgagagtggcactggcggtgccgggggggggggacacgtaatgttttgtcagatttatgaactacagattttgacaaatattgtccgtttttatggacatttggaacccgcggtgccgaaatttttaatgagagattgttaagaaaaatagaaaaatttcatccttccctgctaacaattttgacatgaaccaacggaaaaaagactaaaacctagagcactagacatttaaagcctactaaaaagtaaaaaataattatattaatttcaaaaaagaaattaaatttttaaatttagagaaaccaaaattaggaattaaaaaagtctcgtcttcgcgataacccgagacctggacgaaaaaactaagaattttctcgcgttgggaccgttactcatgatcaccaggggaaattcccggttttttcccgggtttcccagccaaaaagtcccggttttgcccaaaattcccggtcccgtactaccctactataaatctgaacgaaatgctgatgttttttggcattttgcccaaatttctttataaataaaataaatgccaaactatgtctcttttattaaccaattttaagcagctaaaattggaattaggtcattttcccatttttaggtctaattaggtcattttcccatttttaggtctaattttggtcgtttttagaccaataaaataagttttaaaaaaaaaattcattttaaggcacaaaaaagtgcttacatcagagaatg

SEQ ID NO: 99091 - DNA, 137 bp, Heterodera glycines
tgatgaaatataatatataacgaaaatgcacatcgctgtccgtgtgctttgggatgtggtggacatcgagcggagactgagcacggcaccgctgggaaattggcacgggcgcaatttcaaaatttgaaattgaaatg

SEQ ID NO: 99092 - DNA, 309 bp, Heterodera glycines
tccctgtaaattaataatgattttttatagtggcttccgccataataattttttttggcatatttccatttgaatatttaattttttgccattacattgggcccacgtattttttttccggcggaagtgccaaggaaataagcaaacagatgaaaatattagaaaattaaccagcatgaatatgaggaagtattatgaaaactatgtcaaatgaaagtgtataaaatgaagggaaaaatggaaaatataataaaataaaatttaaaataagtacgaaaaacaacaacatttgataatcatttcacaatg

SEQ ID NO: 99093 - DNA, 110 bp, Heterodera glycines
agaaattttctatgcaacaaacgctctcgaacatgaaacgaagtgcggtgcgccgtggccattttatttttcaaataatttttaaatttaatagatattccagaaaaatg

SEQ ID NO: 99094 - DNA, 287 bp, Heterodera glycines
aatttttctgggatttttctttttttatttcactaaaattaccatttttggtgccaaaactgttaaaaatgaaaaaaaaatcacataaatttttaaatttaggtatgaaatagtaatttattttaaatatttctttttgtttttaatttttatatgtttttctaataaaatcaaggaaaacaatttattttttttgtttttgtttcacaaaaataattttttcggagatcgcaaaaataagcacacctaacaaaaataacaccaaatcttagaaataagcacaaatg

SEQ ID NO: 99095 - DNA, 98 bp, Heterodera glycines
aatcaattaaatagcttctgagataataaggtttatcataaaatttcatttaaaaataaaccctcaattattggtatgaacgatactttccaaacatg

SEQ ID NO: 99096 - DNA, 54 bp, Heterodera glycines
caaggacaagcgctgattttgtgcccaaaaccgtaaaataacaaatctaaaatg

SEQ ID NO: 99097 - DNA, 145 bp, Heterodera glycines
tttttgcgctttttatgtccgtatttcggtctttcttagtccatattttatgttttttattccatataatttcgagccctaatcattgtttaatttccgtattcagcaatttgtttgtcctatttttttcttcaaatttcacatg

SEQ ID NO: 99098 - DNA, 989 bp, Heterodera glycines
aagtgatcactcaattgtcaattcaataattcactaaaacaatgccaaattgaagtgatcattcaaatgccaattcaataattcactacaattatgctcaatttgagtgatcactcaattgccaattcaataattcactagaacaatgccaaattgaagtgatcattcaaatgccaattcaatattttgccataatctaaatttctgccccataaaagaggtaccttcgcaagcggtgaaacaaccaataatcctgacatttattcattcataatcttttgtagctttctgattgccctccaaatttaatcattttgtagccgttggcattttcgctcaattaataacattgcttaccatgcttataatgatgccatcatcccgggttttgaccccgatagtcctttctcgttcttccaaagcctgaatcccggcccctctttttcaaaagtccggcctctagatttatgggtaaaaaggaatatatgtatgtccattttgaagtgatcttggatttaacaaattatacttttttaattaattgaaattaaagttaattttttaatttatttttgcgtaaccctcttgtccaaagataaatctaaaaaatgaataaaattcaaattttgagcttgaactagcttcggtgcggcataatcatcagtatgtatattaacccatgaaattatgcggcacttttcctcttttcgtccaccgaaattccctacggatccctaggaattgcaataaaaacataaaataacctcataagagtcgacttataaatctcaaaaaaaattatgggtaagggagggacgacggcaatgccacaggcaccgccgggaaaattttttcaaaaattagggtaagatttgttggtaagattggtcccaaaaataatcaaattttccccaaagcttcagaattctatagctaaatcgctcaaaaaatcgaggattaaagtaatatttaatatttcagaaaaaatg

SEQ ID NO: 99099 - DNA, 779 bp, Heterodera glycines
acttaaaaactgtgcaatttgtaatcaaatttaattcccacttaacaatggaggttttgcggtaaaaaagaatttgttagaaggttcaattatatgcaactagaaaaaagtggatatcattttaaagaatttttgaattttaataaacaaatttaaaaataataattttaatgacattttttaaaattttttttattaaaaacgtattaaagccgacaaaattataaaataatttattaattaagaatatgtggagaaaaaaaaagtcaaaactatgatacctccaattattttgattcaatgattcgattttatatgattttttaaattataaaaatttatttatttatttctttaagaaagaatgggaaaaaaatcataaaccaaaacaaagttaatttttagaaatatctctttttaataatttggtttttttaaatttatatattttatattaatttgatttaatttaactttacttttctaattatattgtataaaattaaatttgacaaagagtataaaaaaatatggttaaagtcaatcacttgtcgcagcatatttacaattttattaataataataataaaaattatttgtaagcttttgccaaccccataaatgtgcaggaaattcgtgcaaaaacaattttttgccacattaatggctagccaaacaaacgactaaataaaaagcctcgcatgatttatttcaaataaaaattaataaaatattgaaaaaaaatttttttttaattatttattttttccttaaatatg

SEQ ID NO: 99100 - DNA, 1003 bp, Heterodera glycines
atatttatccattatttgaaaaacaaataaataaacaatgtttttggcagaaagtaaattttgtttcaaataaaatattatataaatatataaagttcattatgaaattaaagaccaaaggaaataaatacaaacaaaaagttttaaattttatttgttatactttaaaaacataaagaacaaatagattcaacaaaacaacaaaaatgaattaattgttgaactctggttaacgcagaaagttaaataaaataacagcaatgaaaagccaaaatatttataaaaaaatagccaaaaattttcaaaaaaatacaaacttcggaacgtaaaaagcaacagaagaaaaaaggaccggaaaagacaagccttataatctgaaaaaaagttcatatacaaaataataaatatataggtaaaagacattgaagaagtaaaatattgatttaatgcataaattaattttttattcgatgctttatcctagatagtatttaaaaccccaaaatgtaaaacaaaaaatcgataaattaatcataaatattgtttaaaaattcggaataaggtaaagttgaatcaaaatccagctattaacgaaaaattggtaatttatattataaaatatctttataataaatataaatttgaaccaaaataataataatttgttaagcatacatttctgtttaaagaaaatcaatttccttaataaattaaaaaataatatttaaataagcaaagatttggatatatatttaaaaaataataattttaatcattttttgaattaaggcgggaggtgtttgttgacccaaagaatattctccaatttgacaaggttttactgaaaaatacaataatttaaaacacggtgataaacgtaaattaacaaccaggaataaaaagaataaagtattagaatatggtcttaaaattttttaaactaaacatacaagcttcagagtgaaaaaaagctatattaagaaaataggaatggaagagtatg

SEQ ID NO: 99101 - DNA, 245 bp, Heterodera glycines
ggtgaaaagccaacctctgtggggttttcgggttttctgaccatgaataccttatgtatgatgtatgtataagattttcaaaaatgatgttttatcattgatttcgaaaaccaaatcaaagcattattctgcttttggccttgccaagtcttcttcatttatttaactttgtttcttttagagtttgtcatttattaaaatgagcataacgctcgccttttgattagtgagtcaacaaaataatg

SEQ ID NO: 99102 - DNA, 138 bp, Heterodera glycines
tcactataaccagtccgtgccttcatttcggccgatttgcccaatgaactaatcgaacttctggagaagatcgtcctcgagaattcggcgtttaccgagaaccgaaacctgcaaaatttgctgattttgaccgccatg

SEQ ID NO: 99103 - DNA, 1003 bp, Heterodera glycines
gtcccagcactatgggtcaagcccagtgttagacaaaattactcataacgccaaatagcgtatttggcgtaaatttttgcgcgttaattcaaaatttacactggtaaatgccttttttgtattgtttattttaatcagacgtaactcacttcattcccaactaaactgaacaaatttggtacctaaaaaaagtttttgaagaggagaatctttttctaagcgaaaactaagcaatttgattttttagaaaaaagttgtgggagtttcaaatcttaattacgttataactcaagtcttaaactgctgatttcaaccaaaatgcggaaagtaatcatttttctattgattctaaatgtccaacagattttgtaccgtatcaacaaaaattaatataatttgcgaatttcatgatttttaatgtgttagagacatgaaaatagtacgccaaaaagagagaaaaaaaatgcaaaacttttattattccataacttttcaatttgacctattttaatattaacttgacctattaaccgatgcagaatttttttctctatcgctatgcaaaatttggtgtggatttaacaagtaggaaaaaagttaaacaggatgaagtgaatgttgctttttacataattaaaatgaagagatagtacgccaaagagagagaaattacaaagaaaaagagaaacgacgagatagtactaggcttttctctgcacagtggagttgacccatagtgtcccagcagtgttagacaaacaaatcatttcgccaaataatataattggcgtaattttttgcccactaattcaaaaaatacactgatcattgcctttttgcattgtttattttgatcagtcataactcgattcatcccaacaaagccgaacaaattgatatctaaaaaaaagtttttgaaaagaatctttttcgaagcaaatttacgaatctccgtttcctgggttccccactttagtcatcctcggtctgatcaaggatcatg

SEQ ID NO: 99104 - DNA, 171 bp, Heterodera glycines
catcccaaatttgctggccatttccaatagacaaatgcacattatttttggccaacaaatcattttaatctccccccatccgttcatccgttttcaaatctctcacttttattttggtaggtatataaagaggtcgaaaagactttttggatgcataatagcgaaaaaatg

SEQ ID NO: 99105 - DNA, 281 bp, Heterodera glycines
tttagtccacatcgaggctcaaaacgggcgcttctcctttatggtttaaattttgttggccttacagagattagaagccttacaacagtgattagaagagttacaattagaagagttttataggtagaggagtaaatttcccatccgaaaatgatgctaattttgccgtaaatccttactatacagtcgacgaagaaagctatttacagcttttccgagaaaatttggtcaaaatattggaaaaggcgaaaaataattcggaaattgcacggaaaaagatg

SEQ ID NO: 99106 - DNA, 125 bp, Heterodera glycines
agttcgtcgctcttccatttctattttcattcatttttacttagatcgtcacagagcaacgtaattttttcaaaaccggcgcaactcgtgccgcggcatttcgcaaggaacagctgaagaaaatg

SEQ ID NO: 99107 - DNA, 243 bp, Heterodera glycines
ttttcagaaatcagattaattctccaatgtgcccaaatttagcccccagccacagcccctgcttctcccagtttaagtctggatttgtcaaataaattcaagacttcaaattaataatcaaaaattctcttaaaatttttttgaacccaattcaaaaaaggaaaaaaatttgcagtcaaaaaattattcgaatttctccaattttgtttccataatttccgaaagttattcggtatcataatg

SEQ ID NO: 99108 - DNA, 457 bp, Heterodera glycines
aaaaaattattcattaattaataatttgttttcattttatatggagaagcaacatttagatatttagttagtatagccaatcctcccttccccacaaaaaatgacacaaataaattatatacccaattgaatcgtctcgaggccgctaaggggattggagtaaaagtggtgagacgagacggagggcggagttatcactaatgataccaattagttaattgttttaaaaggctagtgatgtccaattttcttgacttttcggcttttaaactggtcagaaaacgccttaaacacattttggcactcgagacaattgattgggatatataatttgtgccattttttgtggggattggctatacctcatcccaactttttgttgaaaattcatgtaaatttttaacattaattttatttatttttgtttttgcgaattactttttcagtgccaaaaatg

SEQ ID NO: 99109 - DNA, 110 bp, Heterodera glycines; identical to SEQ ID NO: 98226

SEQ ID NO: 99110 - DNA, 293 bp, Heterodera glycines
  unsure (1)..(293): unsure at all n locations
gattagaagaggtaaaagagtgatttaagaggtaaaanagtgatttaagaggtgcaacagtgattagcagaggtacaacagtgattagaagaggtgcaacagtgattagaagaggtaaaacagtgatttaagaggtaaaacagtgatttaagaggtgcaacagtgattagcagaggtacaactgtgattaggagaggtacaacagtgatcagaagaggtacaacagtgattagaagaggtgcaacagtgattagaagaggtaaaacagtgatttaagaggtgcaacagtgatg

SEQ ID NO: 99111 - DNA, 113 bp, Heterodera glycines
tttccaattgcctcccaattcttcagatacctggcgaaccatcggacactcttgaagggggtttagcgccattaaaaagcatcgacaccataaaatccaccgaaggcataatg

SEQ ID NO: 99112 - DNA, 1003 bp, Heterodera glycines
  unsure (1)..(1003): unsure at all n locations
tttgtgccttttccccgtgctcactttgggctgtttcggcggcgcttctcttcccggccaattccccggccaagtgaactttgacagttacgcagcaccaccgagttacaaaagtgagaagagttcgctcaaaaaatgatcaaaatgaatgtttaagcagcaccaccagcagcagttgcgagtcccctttctgctccaacaattactttggaggctccgccccctcctcccgctcctattttccctcttcctgctcctcttcctcctccttccgctcctctcttccctcctcttcctcctcctcccgctcctctcttccctcctcttccccctcctcccgctcctcttttccctcctccccaattaccgcaactctttcaatcgcctctcaaatactcccagccctcttcctattcaagtaatgtttaagcattggcttttttgctatctcttctcccttcagttgctcctcctccgtcttatagcgtttcgcccccctcttctcnccagtacgggtncgtgatgttatgtttggctatgcaaattgttgtgctttagaggccacttacgcaactccgtccaccgttccccccacaattccccaattgtattcagtcgttcctccgcagtacaaagtaagtcccgaaaaacctttctccccaaaagctttgccttgtcaaggttgaagcccctcagcttcccgctttcccaactcttccgccagtcgttttccccgcattgccaaatctgtccccgccgcctcctcccgagccaattttcttcgctgggcccccgccaccaccgcccgtgaaagtctcaagctattgttcgtagtcacgtatccctttcgaattgatccgaatgtttcagctgttgggccacagcctccgccgccgccaccccccgccccgtcctattccatgtcgccctacgaagtgcctccccctggtaataaaaacgcaaattttaattccaatagaccaatgaatcatcgttttatatg

SEQ ID NO: 99113 - DNA, 322 bp, Heterodera glycines
aatttggagagattatatcgtttttagtgcgctaggttcgatggaaactttttaaaatataagcctaaaatttttcgcaaatttaaaaagcaattaaaaatttttagattttttattcatctccctttttgatagagaaagcatcagagagccttatttaacttttaattaacatttggtgtgtttcagagcacgttctgaaaaaatacttatgaattaattttgcaaaaaataaataagtaatgaaaaagtcagaatttcgaaaaattttaaaaacaacaagcgttggcattttttcaggttaagttagtcctttacaatg

SEQ ID NO: 99114 - DNA, 591 bp, Heterodera glycines
cttgtaaatgaaaaaaaaacactgggaaaatttgaaatttacataaataaaaatttttcaacatgccaagctccactgaaaacctctaaacaaacagtaacacgaaattaacttttcaacacaaaaaagcagcttctctaagcattttttccaatgttaccaccttttgccgctgagttttcacttcgtttgcatattttaaaatttaatgctaatttgactcaaaggcaaaatttaatttttaaatcgaaaactggataaaatttgacaattcatttttaacccttttcaaacggtcaaacccggacaaatttggtataattcgaaatttttcaggtcttaaactcacggagctctttcaaatgacaccaaatatcttatccgtacggtttgaaaaggttggaaacatagaactgtcaaattttggccaattttttgatttagaaaaacatttcgccaagaaattttcatttttactcgaaaaatttgttttaccctttacccctaaaactcaaattgacagctaattaaaaatttccctattttttagcgatttttttccaataaattactgcatatttaacaaaaatg

SEQ ID NO: 99115 - DNA, 1003 bp, Heterodera glycines
gcagaagtttgtgggagatctccctggcctgagggctagaaacaaagacgtgtacacgcaagtaaagaagtctgacattttaaatttctgtccgggctagtcgaaaactaaagggacattaaaacgaagagaaaagaggtgagaacatttgtccgggctagcgaaaagctaaagggattttaaaaatgcagaaaaaagaagaacgaaatttgccccgggctagtccaaatgctaaaggggcttactgcatcgaaaattgacaaaatttgacaattatttgtaggagagagagagaataggaaaagagagtgaaggaagccaaaaataaccaagaaaaagtcctggtagcaaatgaataaggactaatttataaaaatacttgaacgattgtgaagcaaaaaaaaaagagagagagagagagaagaagtgagacaaaaaaaataaataataaaacaattttttttgaggagagcaaaaaggcccgggctgacaaccaatcaaaggggcactattttagctaattaaaaagagggaccaattaaaaaatgaaaattaggccctatcattttgcttacagtatgagttacagtttttacaagttccaaagttcattttatctcgttgttttctctcgtttttcacgccataagaatattcacgtaatcacgtgcctccgcatttttcattgggcgagatcattcactttacacatttttgcggcgcctgagaattgttaattgctcttgttaggcggagtttaaacggagatggagcagataagcctatttctggaaggcgttcgcatctatttgattacccgctgtcattcattaatttttttctctctcaattaatgcataatgggattaccaaataattttttttagcaaaataaaacaaaatcttactacgaactgaacgacttcgaatgtctacatcagggggctcgtcaaatgagttcccctttggtacatcccaagccttcgggcaggaaacaaagatg

SEQ ID NO: 99116 - DNA, 542 bp, Heterodera glycines
cctgagataaccaaaatggaataatattgatttaggttgaataaaattcaaattcaacttcccaaaagttttatttaatattaaatatatttttattattttttttcttcgaagtacaaaaatcaaattttgtaaaaattaattttccacatagcaccaagtattttaaaaatgctaaaattttaggaattttgatgcaaaaagtgtactatacagttttttggttctggtcggttttatgcgtcccatgaaatattatgcgtgtcccataatcattttatgcgacccataatcattttatgtgccaaccagggatggacgaaatttcgtttcgtcctacattttcggcactttttgtgtttcgttttcgtgtttcgttttcgtctaccaaagttttttcgtttcgttttcggttttcaaaattttgtttttcgtttcgtgtttcgttttcggtttttaaattttgtttttcgtttcgtgtttcgttttcgtcagagcaaaattggacgaaaaagacgaaaataaatacacccttaagaatg

SEQ ID NO: 99117 - DNA, 289 bp, Heterodera glycines
attaaaaaacccaattttcagatttatcccttcacgccgtacacttacatggtcgcactaattcccatctttctgcttaccgacttagtgggtttttttagaaaaaccaatcaaatactgggatgtttctgggaaatcgaaacccgaaaaaattttgtgggccacaatttttggacattaaaaatttgaaatcaaaattttgccaccaagttttgactgtgcccttggcgcaattttgaaccatttcaatacaacatttgccaaacagctgctctacaagccgacaatg

SEQ ID NO: 99118 - DNA, 305 bp, Heterodera glycines
ttagtttattaagaaaaacaaaaacaaaataaagcaaaattcattaatttttacgaaaataaaataaaaaaatcgaaaatttccaatgttttgaaaattttagaaagataatttttttacattaattttctcgctattttaccattacttttttttgaaaaaattttcgtatttatgggtcaaaagagccgatttaatagaggggccaatttttttcgaaaaataccaaaatatgagcaatagccggaaatttacgaaatttccaaaaattttgccggattttttttcaggagagttcaattatg

SEQ ID NO: 99119 - DNA, 1003 bp, Heterodera glycines
  unsure (1)..(1003): unsure at all n locations
aggataaacaggataaaaataaataaatttagctaaaaacaatagaacaattagtgaaaaagtaaccaattaaaatatgtaaatgcttgaatgctttaagcaaggccagataccaaagaaaattgtaacagatatgtgtaaattgagtaatttggacagatatggacaaaatgtccagtagacaanatgtacagtggacattgcgaccaaaaataaaaatttatcttaacagtttcgaaaaaggttttgacattcattcactgtcgtaatgtccaatgatcagttgcccacttttgtaaaattgtacaaaaattgttaaattttgnaaaaaaactcaaaaaaaaaatttccgaaaatttccgactttttatccaaaatgttggaaatcgtaattctgactccctaaattttttcggaaatcggaattccggccccaaacatgtcggaaaccggaaatcggaattccgtaccatccctgctgcacagtaaagcattagtttcgaatctttatacccatataaaactttctaaaattttgatatattattgaaattttttaaaccagttaaaaaattgccgcatttttatttttgatgatagaattttatcgtacctaattttttttcctggacgcttactcttttaaatgtttatttataaagcctatttttaaaactctatgaaatttttgcttattacatttccaaatttttgaatacttaatatgaaattctaacctattgtggatttgaataatatcttgtcaaatggtgtgtattgccttataaacaaacaaatttggcggatgtgggttggtacgaggcgccgccgcccatcacacgataacatgaagctttagaatttttggtgttaaatttttatcttataaaatcaattagccgatttaatgtttatatataaaaaaataattaatgatgacttccggttgatcaatcaaaaatttcgatgagggtcactggtgatcagtcctcggccaacaatg

SEQ ID NO: 99120 - DNA, 1003 bp, Heterodera glycines
taacttaatataaggggctaacagtctgcaaaatttcataaaattttatttgaaacaattagcgtgtttttaaacttgaaaatttaaatttttttgtttacctgaaattttaaagtttttatataaaaaaatacagactttttaaaaaaattgtaagtgaaccgaaaatattgaaattttgtaaccctttttttatttacatataactcccagccctaattatttatttattttagttagaaatttaaatgtttaattttgataaagatttatttgattttttgagttatgaatgaatatttaactaaaaatgcatcaaaatagcaaaaaaaaaaaaaaatttttttaaattactgaattgcacaacatttttttgagaggattataactacaacagtttaatattaagaaacaaattaacaattaagatttggttaaaagtagagcaatcgccgctcaatttggtggcaaagtgccaattgattacggtgggctgaagggttatggtgaaaggcacaaatttccaacggattattatggtaaatttaattgaagaattatttaatttttgctaactccttttctctattaagacaaaaaagaaaacaaaaatatgggcagaacatcagaattggcaacaaatccattgcaaattaatgccaaagtaattgagtatttaaaacaaaaaaaaaattgacaaaatttaaaattcaataaaatctataataataaaaaataaattaaatgaaatttcaaatccaaataattagtcaaaaaggcatattgatgaatatttaattagagcccttatttttaaaattgttgaaagctattaagcaaaaagaaataaaatattttggctagatttgactcgaacatttacaatttttctttataaatccgtactctaatattataataaaaaataatcagcccagacatattaattatgtcatgaaaatttagttttagtttttatttttaggcttccaaccagaagatg

SEQ ID NO: 99121 - DNA, 632 bp, Heterodera glycines
taaatcattctgtgcatttgatttgtcattcataaaacataaaacatttatttagtcatttctgcaatttattcggcttattttttacagagataaaacaaaatttttgttaattccttttaattcggccaatttaaaggccatacaaaaattgccatttatcagcgaaaataaaaataaaataaaacaaaatttgacggacggacgataagggcaaaggggagaaaggaccaaacgaaagatcggcgggagaagggcggcgggggacgacggcatgacaaatatttggggaaaaagggggaaaaaaggaggaaaaagggggaaaaggggggaaagtcatcgccccctcccccccccccctcagccaaacccaaagtcattttttagtttttgctcaaattttacaccaaaaaaagtttgacagaaagattaatcattctcaccaccaaatgtttaaacatttcaacgatttattaaaagtaattttactgtattttttaggaaatcattttaaaatatcttaataatcttttaaaattatccttctttttgagggaatattttttaaatttgtaaattggcaacaaattaaataaaaattttaaatttcttttgattgtttcggcaatatg

SEQ ID NO: 99122 - DNA, 89 bp, Heterodera glycines
actaaatctgaggcgatattcggattctccgggtttggtttgcccatgaaaacatcaatttcattttattaggtcctttcagaacaatg

SEQ ID NO: 99123 - DNA, 75 bp, Heterodera glycines
taaacggtcaagagtttattaaagtatggggaaaacgacatcagtgtcccgactcaagtttatttaccggacatg

SEQ ID NO: 99124 - DNA, 147 bp, Heterodera glycines
gtgcacctagattggatggaggcgtgggttcgattcccacccgatggctaacattttgtcaacaaatctgagatgagaaaagcaaaaaccaaataataaattttgaacatctggactcaggtcagggaagcacttgtgaataatatg

SEQ ID NO: 99125 - DNA, 104 bp, Heterodera glycines
tcactaaaattaaacaacttaattaattaaaaaactatatttatttaattttttttaaaggctttccatgctgtccgggcagtcaacaattggccgcgctgatg

SEQ ID NO: 99126 - DNA, 81 bp, Heterodera glycines
tgaaccaacaatgaatggggcggtaaagaaaatcagtatcacgacagaaacagtagcgaatcatcatcgcccataagtatg

SEQ ID NO: 99127 - DNA, 195 bp, Heterodera glycines
catttccatgagttgaatgttgttgtagaagttagtggccttctcctcattgttgtccatccttcgattgtcgtccactttctctgccaccgataagcaatccgatggcacctttaaaggcgtatattcaaaattttcgttcgtttttgtctttccgattccccaacgaaattcaccactctctccaatttgatg

SEQ ID NO: 99128 - DNA, 302 bp, Heterodera glycines
gtcatttgcatgaaacgacaaacacatgctaattaatgggtaataattagttaccattagcagcattcattggtcggtgtgtgggcgtgggcattcccacggcggacactccgcggggcaaacccaacgccaaatcagcaaataataataataaatgaagtcactagtcactcactcttcgcattttatcaccgcacgaatcgatcaccgccgcctccgccgattctcagcccaattcattagtcgattatcacttcccatttaaatcacaacatttggtgcaacaatttgaccaaacgatg

SEQ ID NO: 99129 - DNA, 60 bp, Heterodera glycines
aataaaatatttttcaataaataatttaaattttattagatggtttataatttgaaaatg

SEQ ID NO: 99130 - DNA, 79 bp, Heterodera glycines
aaaaggaacattatccatatagcgcccgaaattttatgcaaataatgtttagatggtttaatataaaaattgaatcatg

SEQ ID NO: 99131 - DNA, 220 bp, Heterodera glycines
ttgattttaacataaaaaaatatatatatataaatataattaataaatttcaaaagtaataaaattttcgtataattaaaattaaatttagtttaatttatatataattaatatatgtttttatgcaattataggtttttacatgtcgcgtcgataaacgcacaaaatgcatcctaaaattcgatttcatttaaatgatttttaggtgacaccaaaaatg

SEQ ID NO: 99132 - DNA, 328 bp, Heterodera glycines
taattttccggcaaaaaaatggcttgaattttataaaaaatttggcaatagttgcttatctgcgaaaattatccggcgcggcggccggcgcctatcgatggtagcactgctggatttgactagttttttatggttgtagtttatgcgtccaaccaatgactttgctgttttttgggccataacttttttttaaaggtaaaagcttaacattttttgtatcaaaactaaagcttaaagtctcggaatttataatttacagtatacctaaatgtaagaagaaaaaaaacatgcgatgcaattatatgaaagttgtgttaattaactaatg

SEQ ID NO: 99133 - DNA, 1003 bp, Heterodera glycines
attatgttaaagcgaaggaattaattcaaatgaaatttaataaatgcactaaaattgtataaatcatttaatatttttaattgctgtcccatttaaaaaaagttttttcttttttggcttttcctatttctccccctattttaattgaatgctttttgattggagctcaaaaatttttatgaaagtgaatgatttttcgctggccgatcagcgcttaaatgcgttggtcggccgtacaaaaatgggcggtccctgcggaccgaagcggcgcggccaatgggcggcagcgcacggccgcaccgcacacagcccacaagccaaagccaccagataagcaggacggaggatgggatgggatggggggggggggggggtaaccccgaactatagcgataaaagccccccaggggatgattcatttttggttgtacaattccatcgttggtggtggtcggtcggtggcggtggcgctaaacgaccgacagaaaatgaaaatgaattgctaatgagttttttataatgagcaaaaaaaaaaagaagcgaaaaatatttttatttgtgataatatttgtactaattgtgcgaaatataattagaatagttttattttaaatgcattttattgaaaagagaaagtggaagagataatgtaaaaagagtttgagggaaatacattaaaattaaatcccgaaagaattttttatcgagagcagttattttggcactaaaatgccacaaattgataaaattttcgtctcaataaataaaaaaagaattcattaaaatgcttaattatgtcattttgtattattcttcttctctcttttttaaaatcaaatatgaacattttttttggtttcgaattaatgccatttgattgcctttctgatcagatttggtgtatttgaaaaaatttgtggcaaatggcatggaaaggaacaaaaacggattaataaaaaagaaaagatgatccaagaaacactccattaattagtttaaaatg

SEQ ID NO: 99134 - DNA, 457 bp, Heterodera glycines
ttggataaaccgaagcaagtgctagcgaaaactcgacttattttcttttgcgtgatatggagacatttgtgccacggattaggaacaaacgaatagaattcacgctaaatttgaaaaattggattattcaatggaaaaaatgcctgatttctcaggagcgaaatagcggactattgaatgttgagccgaaaagcatcccaaaagagtggagacaaacccatcggtaaagcgaaggcgtgcaacgcctcgcacactgtccgaattggtggacaacggctgaacgtccaaaaagcgggcgaagcgactgcgccgtgtggcaaaaacggaggggtagccaatgcgatagatggaccgggaggcggtgtccacggaaatgacggcgacaattcgcgtgaaatatctgtgacgaaacggggggtgggggagtaaaaatggaaaattggagaaaacgaaaatg

SEQ ID NO: 99135 - DNA, 221 bp, Heterodera glycines
atcatagccgggggttggactgtcagggtttttgtctgttttttccgaccgttcgacctccgtttaatttaccatcgtttctttttataaaataaaaccgcgttctccattcattttttttcaattttgtgttgcttttcattcgatatttttgccttattcttgtccttttacactgatccatgattttataaagcattgttttgaatttcgaaaaaatg

SEQ ID NO: 99136 - DNA, 566 bp, Heterodera glycines
tgtgtgtcaggggtcatggtcatggagcccgaacggaaacgcagtaaatatgcctctctctcacacacaaacacggagattttttagaaattttgcttacctctttcatggaactaggccattacgaaatttgaaatgagacgcgcaattcttcaaaatttgtgccgaaattgtttttttttggaaatggccatggcacacccattttcggccaattcatttttattaaccaaactcatatactgtttttgaaacttgaaaatgggtgaaatttttgtttttaatcggttttaattgcgaaggatcataggagcaaagagctacttccccaggacttttgaattgtttttggaaattgaatctcaaaattcaccgcgttgacttcatttttcatgcacaaaagaaaaaaaaattagttggaaaaaagtttgcctagaaataagaagagttgtcattcaaaaattttggcacaaaatcccattcaaaattgcttttttcttaatgaaaataatgattgaaaaaatcacaccgcataaaaaacgtaaaatttttttgcataaattatg

SEQ ID NO: 99137 - DNA, 352 bp, Heterodera glycines
ggtgaataattggcattggcaaaaacttaaataaaaataatttattttataaaatcaaaaatgatttatttaaattaataaagtaatttgataagaatttttaaataaggtgcaaaatgagttccgccaaaattgttgggatgccctcgcttgtcacaatcggctgtttattaatggcaaaagtttgacgatcaattacagaggatttttaatgtttggtaattaattctaatgaaaatatttttaaaatttgttttttcaaggctattgttccatcttcgctaaatattccattttgttgaacaaagattgctccaacattttttactttgaaatttcagtcacaaaaatg

SEQ ID NO: 99138 - DNA, 482 bp, Heterodera glycines
ccccccccccccccgcccgtcccggcccattcactccatgggccaaccgtgggctaaccgctggcccaccctcttcagccatttaaacttttgggctatctgctgctgtttggtgagtagcctgcttattgcttggctttatccctccctctcgcccccccccccccgctttttgctcaattgagcaaattatttgtttttttaagttgggcgtaagcggcgcttactaagcgccgattcagatgtacggaaaatgaatcgcgattttcggggcgctattttcacgtgaccgcgcgcaattcgtgccaattttttcactatcgcggcatttttctgtcgcatgcctacgcctcccccaaaccccaaaaaaaacaatccaattgaaaacaatttcccattctgtcccttttaatttgtcgcccattcccctctccctcttttaatatagtttaattaattaggacaccttattttcggggatg

SEQ ID NO: 99139 - DNA, 320 bp, Heterodera glycines
ttgtttggaatgagttgcgcaacatcactcaaattttgaacatagattatcaacattaattaaaaatacctaataaataattaatgaaaaaataacatttttttgaaactgtataattaaataataaataattaccattttttgaaattgccctttcatttaaacaaacaatttttataaataaatgcttattctttttgttttcatttttaacctaattccagtttttaattattttaatatcaaaatttatttttatcccaatttcgactttgttaagcccctttttttagctgatcgactccgacggttgcagcatg

SEQ ID NO: 99140 - DNA, 1003 bp, Heterodera glycines
taatgattcatccctaatttggctagttttccttgctattttattatatgacagtgtttctgctgttcagtttagtcattccccctttttctttctctcatttttcgttgtattattttgtcccctcaaaaaaaaattgtgcaacaaaaaattcattgaaaaaatttatttggaagtaaaaaataggaaaaatttccgatttttacaccccaaaaaaatttcacgcaaattctatttgatttgatatgttcagacagaattttgcccaatcaatttttggttgaattttcaattttaattttaacaaatacaaattaatttcaaaattttctccccaaatttttggttgggcaaaaaaataaaaaattgaaataaaaattaaacaaattattacaatttaaaaaattcccaataacatttcttctgtgataagtcggcaatcattatcattcattcgtttcatttgtcatttttttattctctcaaaaatatattttatattttattattcttttttttgcatttaacctccgaaatttctgtcattttcatgtaaataaaataaaataaaatttattttttcaatttttatttaaatgtgagaacggattaaacaaaatcactttgcatttgttggatttgccacttaataattattcaaatttaatatcgtaataattttcgtgaaaaattttgctttttcttttaaatttttctgcttttctaagtcttcaatgtctttcccatctttgaaatttaattgaaatttcggcacttttttactcttagatcccacgaagtttatatgagctttagggatcactgaccatgaatccggcactaattttgaccaatccctaatccaaactagaaaaaagtcaaaaaattaaattttatgaatttggttcgagggcacacaaaaatatttttcgttggggcctaaagtaaaaagtgccaaattttctctattttttttaagttccgataattttttaaagccatg

SEQ ID NO: 99141 - DNA, 1003 bp, Heterodera glycines
aaaaaaacaaatactcgaaattttctttcattccgccgacgaatattggctgatctaaggtaggaagaatgtatttgtttttctttttgataaataaatatgtaaatacctttaatccctgcaaataatttttcacattcgttttgcctttggtgttgcgcaacaaaggcataagaattgcgaaaaagaaataaaaataatagaaggaacataacaacggaaattattaatgctttattattatttttattgaaagaaaaaatgaaatttttttataagaatttgtaaaaaaatcgatagaatataattttacaaatgaccaatattacatagaagggaagtgaagaacgacagaaactaatatatgcaaacacaattaataaatgagctaacttttcaatcttaattgattgttaggcttcgtataaaacggtaattcgaattcaagacgcaaatttgtaaaattttcgtggcacattttccggaggcctaccagacccaattcggggcacaaatagtctctgatccggaacccggatcgatccggttcaagaaaaaccttttgttccagtttttcatgaaaacatgtttattttttttccttcaacactttggatttttgtatatttcttaatatttatcgcaaaagaatattatggtaaaaagtttaacccgccgattggatcaccgaagcatgagaagtaacaaaagaaaactttgattcataatttcttagttgaaaattgatgcaaattttgtggcaatatttgcgagcatttaattgataatgattgcctacgaattcttttagccggaaattgattgatattttcttgtttttgtaaatatgatgggtatttatttgttttttagcatattttggcatataaattcataaaaaccacttttattattgtatttaaccggaatttaatttattttatttaaaattttcccacttttttctgctaaaaaaaatttgaaattaattaaagagaaaatg

SEQ ID NO: 99142 - DNA, 127 bp, Heterodera glycines
aatgggtaaaaatgtcttcattttaataatcctgcgaaaaaaaaacttcatacaaaaatcgattttttcgaaaacttcatcccttttttaggtttccgtgacaaaaagtggcagcagcgatgtaatg

SEQ ID NO: 99143 - DNA, 52 bp, Heterodera glycines
ggggctctgttttagggaatatggtataacaattcttacattcgccaccatg

SEQ ID NO: 99144 - DNA, 58 bp, Heterodera glycines
atcccctcacgaaaatctgcagaggcgacctttgcaacccggaagtgagcacgtcatg

SEQ ID NO: 99145 - DNA, 154 bp, Heterodera glycines
ttcgtggagatttggcctttataaaatcacattttgacattttacctggagcaattgaaaaattagaatcacgcaatctcacactcattgaaagtttgtgaaaactcgatatttttctatgcaaattttctaggtttggacttagtgagcgatg

SEQ ID NO: 99146 - DNA, 1003 bp, Heterodera glycines
  unsure (1)..(1003): unsure at all n locations
tttaattaaaaactaattgaatgaataaacgatggaagcagaatttgttattttaaagatcaaaaaaaaaacatatttttgaaccttttgttcaactgttttttgcgataaatagaaattggtttaacactaaaacacaccctttggatttcatttgtcattatggtacattagccaaccgtatacccattaaaataatgtgcatgaaaaacgagacctttatcttttttagtcgcttctagcatgaaatttttgttgcttttttttattcgtgaattcattaatttttctacaaaatttcaaatgaaccgcaaagtcggttctaaatggggaaaatattttttttaatgaaaattttgaaaatatgccttaaaattgtgnagaagatagtgatcgatcaacaacaaaaaaaacggccgatcaatgggatttacgcgcaattgatcagacaatttgagcggaatgagcatattttgtgctatgttggaaatttaaaaaagaaatatcttctttttttatgggttttattatttatttatttgacttctttgcacttttatgacgtttttacctttttaagcaaaattatttaatttgtctattaaaaataaaaataaaaattcagagtcccaatttggtttgtaagaaataggtgaaagacaaatcaattaataataactttacctcaaaaatgaatttcttaaaagggccggccaaccatcgacagtatcaacagcgggggtggcacggaattccgattacggcatttttggggtcaaaatccgatttttggctgttgttttagaataaataaattttctaagttgtagaacaaaatttcaaattgaaaattttatatacgcaaatcttttttaaacgcttccacgaatatattgttggaaaatgtataagttaagcaaaaaatagaaaagtgagctttttcgtaagttatggatgatgtgagagatggacgtaatgcacaaagaaaacggtagaaaaaatg

SEQ ID NO: 99147 - DNA, 63 bp, Heterodera glycines
tttcgctcgatttttggaattgcaaagacattactgaactccatctgccaaggacaacaaatg

SEQ ID NO: 99148 - DNA, 183 bp, Heterodera glycines
aatggaatttgttgtaagtaattatcacccatttatccgatgatttttggattcaaatttttttaaaaaggtcagcaagggagcagcagcagcagcaacacaaatccgtatggaggttacggtacgggaggaacatcgccttacgggaacataccgaacggatacggtatcggcaccggaatg

SEQ ID NO: 99149 - DNA, 329 bp, Heterodera glycines
tttttatacaaaaaaattttccctgaaatttgtatttgacattttttttgaacaaaaaaagcgattcgtgtcaattagtgttagccggaaaattaacaagatatagcattaagttaaacgtcaaaccacccgccttaattaactcccatttaaggcttaaatgatcagcccaacgcattaattaaacaggcaattttcaattagtgccgccgattaattacccattttttgtctttacgcctttataaatagagacggaatgaacactcattttcattctctctgtaatcattcaacaattgtatttctctgcaattattattataatg

SEQ ID NO: 99150 - DNA, 1003 bp, Heterodera glycines
caaatatcttcaaaagatccagagctttcgaatgatatcattgatgttatgtttagtcaacaaagaaaaacgaaggccctgaagataatgtcgggagggaggttattactaatgaattgttggggcggggggtatcccggcgccgctgtttggcaccgaccactttgtttctcattcgcaccctgtaagagcactaatgtacactttggtttgctcgataaataaaaataaaattttgtgtttccaatgtttcccatcttccacttgttcttcctccgcacccggatgcggttgttgtatttcgcactcgtactcattcacaccgtccggggcgtccactttttctttttttgaataaacttttataaaaaaatgcgtagaaaaaggatggtgctaagatagttgcatttttaaatttttttggattttaatatgaaccgaaaaaagttcagaacaagcgctgctgtgttgagcctttaaaaaccctgcttaaaactttacagtaatctcaatgatagtcagttaaatctttaaaatcttaggataatccttgataattatctttctaaatcttgcttacagattttcaaatatgctcggcagcgattattctgggatatgcttagggcctgaaaaatgccaaaatattgacaaatagtgacaaaagtaaccaaaagtccgaatagtgacataattttcatccaaaaattgagcaaaaacgaagcgccaaatagtgatttacagtgacggataatacatcataattgaaaatttcaacacagaaacgcgttttttgagtttctttcttcaaaacaatggaacaaaaaaagaagttaaattaataaatgttgcgaccctttaataaggtgctaaaatgtgaaaactgctaaaagatctcatattattgaagaatttatttttaatttatttttgaattttcgaatggctaaaaagtatttatgaataaaaaagaaattctcagcaaatatacaacgaaaaaatg

SEQ ID NO: 99151 - DNA, 66 bp, Heterodera glycines
aaattttcaaatcaaacattaccattttcagacttttttgcaacggtccaccggttgcaagaaatg

SEQ ID NO: 99152 - DNA, 813 bp, Heterodera glycines
cttcttttaggcaaatgtccaaaatttcttaaaatagaaaataaccaaattaaatttttatttggttttctccttaagttttaatataaaaaaatataaattttgtatgcctattttgtttttcgccatttttgtgccgaaaaaattcctattaattaggtatttcttgatttgtataagcataaaaaagactccaatgagtttatctgtcttcttaattgatcatacataggtgcacagcattaaaatttcttaagtgtcaatatcaagtaattttactaaatttaaagctaaaaaatgcttaatcgatatcaattaatataacttaatttctcatcaatgatttttaatccttgataggattttgataaaggataaatttttggccattaaaaataacaaagaatgaaacagttttaattattgaaactaatttttggtcaaaacatttaaaaaagcgaaagatttcaattttcgttttttttatctgggatataatattatatttaaatttaattgtaggagagaatgtcaccgaagtatgaaatgcccgtgaaataattattcttttagaatgaaaatattaaaaattgtctacaaatacatatgtctctgtctaataatttcccaatataaattcataattatttcacggggaaatgttagttttttcgtaaattgatttacaaacaaattttaattagttttattgatttaattaattaattattccaatgacccatttcctgccaaaaaaatataaaagttcattatttaaattaaaatttatagaaaaattataatatataaatg

SEQ ID NO: 99153 - DNA, 203 bp, Heterodera glycines
agcagcaacaagtagagattggagagctgataaaacagaatcgcgactggttgtgtgctttggccaagacgaaatccggaaaaaaatgcaggaaacttatacgaaaagcaaacactgaacaactactatcgctggtcgaaatttgtttgaatctcgtcgcttcgcgcttccaactgacaaccagacagaagaagcgactaatg

SEQ ID NO: 99154 - DNA, 1003 bp, Heterodera glycines
tttctgcggctttaactcgacgagaaatgcacgaaaaacacattctttttcgaaaatttttcgtttttagtgccactattcatcactaggaatcactattttggagcttcgccactaaaaaaaactatttcggaagttagccactaaaataattttttgccactattttggcgtttcgtcattatttttgccactattttggcattttttggaaaatttcccaaaaaatgcaataaaaacgaaaaatacaccccaagaatcgacctaaaaaattttcaaaaatacacccctaagaatcgacctaaaaattttcaaaaatacatccctaagaattggaaaaatttcacaaaaattcttcccccaattttttttttcttgttcaatattttctaagaaaatattttgtaactgcaatcagtgaataaaatctttttccttaattttaaattattttcaaattaaaaaacagctatttaaaaaattacacccctaaatttggaactttttcaccactatttttgtcactattttggaatttttttctcactatttagttaattattttgggattttttatcactaaaaatccgatccctactgatcactaatctgacatcagattgtcatataaatcatctaatctatgatttttcatcaagtgatttctcgtcagaaaatagtttgaatttttttttaaagtaacagcgagcgagtggaattgcagacccattcgaagagatcttaactcaattttggtatggcatttatgcctccgcaataattttggcgcgtagctttagcaattccacacgcaagttgttgattttaaaaaaaaaattcaaactttggcctcaaaacggaaaagtaccgaaatttgttaattagcaactattttctagttttttaaaaaattttagagcctaaatgcataattttttttactaattcgatgtcttctctcctcactcattgaatttgttagatttttcttttgattgacatg

SEQ ID NO: 99155 - DNA, 227 bp, Heterodera glycines
  unsure (1)..(227): unsure at all n locations
tattaagaataatngtgtgtttattaattaatattttgaagttntattggagggtgcaagaatgaatatttggaaatcgtagattattattttatatagtagaaatttcattttgaagagaagcgttgcaaaaataagctcacaacgacacaaataatgaatagatgtggaataattatcttgcagtggtcttttatcaaattttgcagcataaaatccagcatatg

SEQ ID NO: 99156 - DNA, 360 bp, Heterodera glycines
gggaaagcagttaatgtcctcgacccaagcagcatagttttagcatgtggctctcctggtgaggagtttagctgtgccggcaattatgaaattttggtttatagagaagaatccgatttagaagaagcgcccagttcatacgcatttgttgcggttctgcatttttcttttgttgcggaaagatcaaacgcattgctgcggttctgctttttaacgcattgctgcgaatttcaccgatttcgtcccactgctaacgcattgctgcgataagtgaggacttggtaccgatttattaacgcattgttgcgaacgtcttggacttcgaaacgccgaattttatcaccgccgcttagagggatg

SEQ ID NO: 99157 - DNA, 57 bp, Heterodera glycines
aacgaagtgcaccccaattgatgacatattttgctattgtttttaggctcgctgatg

SEQ ID NO: 99158 - DNA, 209 bp, Heterodera glycines
atttttagttcaactttttgcacaaaattgcaaattcgggcggctgattcttcacaaaattgttgaagtatggtgaaaaataaaatttctggatttgttcttttatttttgtttttagcgtggtcaaaaacccggtgaccaaccatttgccggtgggctgccgtaaatttctgagcacactgaactgccccaatttggtgtccaacatg

SEQ ID NO: 99159 - DNA, 716 bp, Heterodera glycines
  unsure (1)..(716): unsure at all n locations
ttgtttatcgataaaggggcagccaacagaaattagctgcctcatcaattttttgttgttgtttngatgggttttttgnacaaaaatcggctcggttaattggccccgtggtctttcatctatcataaaccgtagaccaattaaataataataataattattattattattattattttatggggtcggctgacagcaaaaagtggcgttgataattgataaaattttacacaatttggccatttattcttcaccaatccttccttatctcttatctgttcgttttatacaatacatatgtacaaaataacataataaataataacaattttcttgttttcttctgatcgatatgctgcactttgaatttgggagggccatgggaaattggcaaaatttaatttaattttttttttgttttctaaatttcttaaaatttttcgaattttatatttttttaaaaacttggatgattttttaataattcggcttggatgatgtaccgctccgacgactggatttttggaaattttaacgaattttttggagaatttgggtgaaagaggtcttgaatgggataccaataaggattccgaaaattttcatcacaaaatactttttcccttaaaaatttctaggagtgtggaggggccttggggaggggggaattttccgggaaaaagaaccgaaaaaaataaaaatttcaagaaaaaatg

SEQ ID NO: 99160 - DNA, 119 bp, Heterodera glycines
ggtcaaaaataaaaatttgatatatatttttgtgtatttttaaaaaaaattcagcgctccgttcgccgacaaagggaatatttgtgcaaaaataagggaggccccgtggagggacaatg

SEQ ID NO: 99161 - DNA, 163 bp, Heterodera glycines
atccggtcccgtgcctatctctacgcacatccattacctatatcacaacccaaaatgaattttacaatggtttatcccaatatcagcaattcattcctcttatttcacattccatattcattttacctgttttgtttgcagatttaatcgacacacaacaatg

SEQ ID NO: 99162 - DNA, 142 bp, Heterodera glycines
  unsure (1)..(142): unsure at all n locations
ttcaaaaatcttttgattgagagactcggtcggacgggggcagatttctggagcaatttaccacaggatttaggctttttgttacacnattttccacaanaaattgtgcgcaatttttctttttcaggccaaataaataatg

SEQ ID NO: 99163 - DNA, 823 bp, Heterodera glycines
tgatcagtagggctgtgaattttagtgacgaaaaatcccaaaatagttaactaaaatagtgagtaaaaatgccaaaatagtgaagaaatagtggcaaaaagtccgaaatagtgacgaatagtgacataattttcagacaaaaattaagcaaaaataatttttattcactgattgcagttacaaatgagttggactgggatttttaagaccaaaaaacccaaaatagttacctaaaaaaattttttaaattaaaaatttttgccaagaaagtaaatttttgagaaatttttttttgatttcataggagtatattttgaaaaattttagctcgattcttaggggtgtattttttggttttattgcatttttgttaaggaattttgcccaaaaatgtcaaaatagtgacaaaacgccaaaatagtgatttttaactattttagtgacgaagtcgccaaaatagtgatttttaactattttagtgacgaagtcgccaaaatagtgatttctagtgaccgataatgacatcagaatcgaaaatttttaatgcagaaatgcgttttttgagctcctttcttcaaatcaatcgagcaaaaaatttagttaaaacctaaaattcacagccctagtgatcagcgaccccgaaaacctcataaaaaattttttttaatggtctgtaaagtacatagtaaatacccacaaaaatctaatccctaaatattattctgaagtgtttgccgattattttcgtaatctttacattttcacttcactaaacacagatcattctgcacacatcgcatcattcatttattgttttcttatg

SEQ ID NO: 99164 - DNA, 132 bp, Heterodera glycines
  unsure (1)..(132): unsure at all n locations
atacataaaacncatttgttgttcaattttcttaatttttgctaatatataatcaatccccaaatccgaaatttagtgatttgaaactgatttatttaccaatctcttccaatgaatttcctcctgtccatg

SEQ ID NO: 99165 - DNA, 994 bp, Heterodera glycines
aaaaaagaaattataaaaataattaaattgttataattaatgtaatttaaaatttaatttttttttattttaaaagaaagcaacacattttcttgtatcttcttgagtgaataaatttgtatttttgacaattttgttttaaatatttatgtattgtttccaagtgtacttttttctatcatttatccttggtttgaggcgtcccttaaattttgggatttcttaaatttagttaaaatccaaattttagtgacgaaagaattgtcaatatactttttttttaatttttgcaaataattttcggatagagaatatctggtgatattgactttttatacatattaaaaacatgcgatattctgaaaaattattggttaggtctcgagaaaagtttctaaattatgaaaatttgttaaaaaaagaacattgacataatgcaatattaaatatatattttttatatttttaatttctttaattgtttatttatttaaatcagtattttcttttaatttaaacaaaatcgcatctaaaaacataaaatttttaacgttgatagctatcaaatttcaaatatgccatcagtgtctggaaaaaattgttatttttcccatcatttttgtcaatccacctacattgaaacaatacactcgtttatttttaacaagaaattgtcgcaaaaataagtgcagaatgaatttgaaaataaaatttataatattaaattatattatcatttttaaaaataaatttaaaaaaatattttattctaaaaaatttagccaaattaagcaaaaaatgcagcctcttctaatgctatttttgactataatgagttataacttggtcccaatgatttgtgatggaaactatttgggccaaataggtacaggtaaaaatttaattactaaaaataaaagaattttgcaaaataaattttaaggaaataggcaacaacaataacctattaagagagtatttgtcgcgtggaatg

SEQ ID NO: 99166 - DNA, 625 bp, Heterodera glycines
cgtaattagcccaattatcatttttacgttaaattttaattcagttcaacaaaatgcttgaatttcccccgcaatactctttctccgctgaaccgacttaagcacctctcgatggagtcaaatttgttgcaaatgttgcccaattatgcctttcagtaatattaaattgcttttgctttttaattacccccttttttggtggcttgtccatcttcaatggctttcattggcccgtaatcggtttgtttaatccctgttcatttaattaattgccatttcctaattctcaggttgtcttcaattaatgcgaaattgttccactcaacaagtgccattcaaattcggtggctcaatttggccaataatcggatcagtcggatggagacagccgcttttcaggccccacttggaaatgttgtccattgaacatgtgtcttttcctgttttagaatctgccgaatttggaacgcctttatttgtccaacaatcggtttacaactttgccccctcaagtcaattgatcatggataattagcaataatacttttgtgtcatttcataaaattttgagtttagattctttcagcactgaagaatttgcgacaattgagcttggctcacaatg

SEQ ID NO: 99167 - DNA, 852 bp, Heterodera glycines
ccgcttgggaaattttgaaaattagagagtacaatttgttaatttttgtcccaaaatgaacaatttttaggaatttgatgctgttttactgtgtttgaaaattgctagagaagatccaaattcataggggtactaaattctgatcactcccgaccaccattatggagagtgatctgatcagggtggtgcactgacttttttggtcagtaccctgttattacttcgctaaactttttcaaatttgtatctagcgcagaaaaatgataaatgtcttcaaagttttagacctatgtttttgttacgccaaatttgggccactttcagggaaaagtcgtaaaactttttttctatactttacaatttattttattatttaattacatgtaaaatattaaaaaattcgtaaatcaatacatgcgttaatattgtatgacgttttgtcatatggccgtcgtccctctgctgtcattataaacatgggagaagggagaaggcaggcaatggcattgtgggggggggggggagaaggccggcaatttctaaaagccaacaatgaaaataggcataatgtggggtgaagacaaaaaaaattatagtttttattgtattctatgaaatttatatggcagagaaaaaaagtaatagcattttgcatataatggaaacagaaataaatgaaaggggtatagaaaaaaatgaaataacacaaaaggaagacgcacacagccgaaagaattaggcaaaatgccacgtttggcaacgtggcaaatttcccttatttaatcagaaaggaaaggcaagaaaatcataattcaatcaacatttgaagcaaaggaatcaacaccagacatg

SEQ ID NO: 99168 - DNA, 239 bp, Heterodera glycines
tttaaaactcggatgttttaaatttccttcccagttcagctaaaaaaggaggccacgggcgacccaaagcgacgccgcggggtgtggcagacaacgcttcggagtcgcggctgacggacgcattggacacggcgaatcggcacgcaaaagcagcggccaatgcaaagtatcaaactgttcaggtaaaatgggagcacaaaaaacatcaatgaaaaagggggtggcggaagtcagggatg

SEQ ID NO: 99169 - DNA, 195 bp, Heterodera glycines
tttctcgcaccctacaggaaaatatgtcatcattttaaataatttaagaaattattaacatgaaaatttcgaaaaagtcgaaattttgaagttttttctttgtcatttttctattatcatttctccgaaaaaagtcaattaaaaatcagacaattaatgaaatattatatatattaattagttttttttagcatg

SEQ ID NO: 99170 - DNA, 514 bp, Heterodera glycines
  unsure (1)..(514): unsure at all n locations
ttttcatggcttttcggcgccgtttgccatactttttttatacttagattttntatttgacatgaaaatgttaagcacatatagagcttttaaatgatgccagatttgctaactttactgactaaagaaaanagttatanaatttcaaaattggctgcgaaacagcctgcggcgaactgaccccgaccncaaaaaatggcacctcttttttttctttaccaaattttttgattaaaaacaaatttatttgcctttttttcgcctatttaatgtttttatgtattttgctacctaaaaagtgtaaagaaaaaattttatttgcatattttgcgatttgtttttctgcctttttaggtgcctaattcgcgattttttgtgcctaaaaatggagtcccaataataatgttttcttaaaaattccaatccctatggctattttgcccattttaaacagggaaattaagttaaaccatttaaaatttttgaaatttttattcatttttttaagaatatg

SEQ ID NO: 99171 - DNA, 73 bp, Heterodera glycines
tttattacaaataaaaataatactttttcacattcttatcaccaaaataaaattaaaaaatttctaaaaaatg

SEQ ID NO: 99172 - DNA, 52 bp, Heterodera glycines
acaggctcttttggcggtgtttttgctgaaagcgggtacagtcaagtcaatg

SEQ ID NO: 99173 - DNA, 580 bp, Heterodera glycines
ttggctcgagaaaatgaaaattgtggtgagaattgcgaattgttagtggaattttgataattcaatcatttttcaaagtaatttcctttaagcttctttagtctgaacaatgtttgagtgaggtgcaaacgctgtgccaattgttgctgggcgtgcccggcatttttcgtcttaagggaatttcaatggtacggtcaaagaccgatgggcacatggctggtgggttcaaattcaattatttaatttgttatgtaacaattttaaataatttttaggtttgttaaccctttttgaagggtctaacattccggttctaaattggcactatcctcccacgctcaactttccgcgtgacatcagagcgcgagttggccttccgttggcaaaagatgcgccaaattacgtaggcccttttttaaccgatggaaattgggcaaaaaaaaaattaggaaattaaaaattttttagtcaagaaaaaggaaatggctttcgattttgaccttttttattcccttaaattcatttaaccattatttaatccaaaaagtgtaaaaagcacgatttataggtgaacgaaatg

SEQ ID NO: 99174 - DNA, 101 bp, Heterodera glycines
tttttgaacactcgctcccccccccccttggggaaggctttttttataattatataaaataaaatttccattcttatggctatctaaagataccaagaatg

SEQ ID NO: 99175 - DNA, 211 bp, Heterodera glycines
tattttagaaaaaaagtatttttgagatttttttggggctgtactgcagtatatgctttcgttcaatcactgatcattctcagttttgttaggccataagtttttttaatctgttcattgactaatttcttggtgttaaacgaaggcttaaagtcttgtgaatttataaataaagaagaaagcaaatatgacttgcagaaaaatagcaatg

SEQ ID NO: 99176 - DNA, 140 bp, Heterodera glycines
ttcgcctattatcactgtttaactataaaataaaaattctatataaataaattaccaaagatatgacaaataaggcttctctccaaatgatactaatcgctttgcgtcaacttaccttcactaagttcatttagggaatg

SEQ ID NO: 99177 - DNA, 779 bp, Heterodera glycines
acatggttttcaacaattccaaacacaaaaaacccaattcgaacttcaaaaaatcagtggtctcattgccaatcttttgacaaaaattcttaaaaaaactgattttattcttagaaatgttttttcgtgttcgggttagaaattgttgaaaaataatgtaatccttaaagcatgctaataaataatttcataaaaaaaaattaaaaaatatgattctttttgacacgtacttcgtaccacatttacttatgtattgttagcaaaattaattaaaaatcccaaatatttcctctgcggccctatcagaaccaccggataccaccaatgtatcccaaatttttttgaaaaagcatgttaaaaattatttttgttctaaaaatcgtccaaacatggcacttaaaaattgcacttgagaaaaaagggccgaaaagcaacaaaaaaagtgttcgtttcatccgttggttttccccactgtctctgctgcagggcattttcgaattcaaacctttgctttaagcgtatagacacttattgttcattcagataaagcaatttcccactcctccgtctcgtgacctttgctgtggttcgggctgttcaaactgtacgattttttttagctttgcgcagaaacataccaaaaacactttgaatttgttgggttttctcttcatgaaatgctctttttgttatgtttctgatctgaaaccgatcactttcacctttgtaattaattggataattaaggcgtttggattcaatttgctgacgaagtgatg

SEQ ID NO: 99178 - DNA, 997 bp, Heterodera glycines
atcagtttccttctttgtctcgagcctaattccaagtctcgaatatcttcaaactttatgttactactaatcattgggtaaaatacaaatgaaatagattttttaaaatattattttaataaatttttattttgccaaggcattgatcagcttgtgcttcggttgggtgtgctttttctttctgcttcgttgtcccagtggtttttcctaggcaattttcataaattttattagggcatgccgtaaaattatggccttcgaggcctctggctttttcgttcggctctcagagtcgaatgctttttatgaaaaaatgatcctgactcggaaccttcaatttctaattgggacagaaaccaaattggtaaatttttccgagcggaaacttcagatttaaaattattattttttttcaaaaatacccgagttttaaaaacgaaataaaaaaactggggacattaattttaatcagttacaaacagtacgggaggaggagaagcagagacaggtcatagaaccgagaacaatgaaaaaattttctgcgggaggggagggccaactcagtctgtccaattcgcctggccaaacttcgtttgtgccaatttgagattaacttttttaagtcgtaccgaaccaaattggggttttcggtactttaatacagtatccttttattaactgtaaagaaggaaaggaatgcgtttcacaatcaaaaaatttccgatttccctggggagggagggaaatgattaatcattgaaaaacatcccccgggggcgaatttaagaaaataggcaataaaagaaaaaaaagaatgaagaagccaaaacatggagaaaatgatgacgaataaaggaaaaacaaaacgaatggaatattcctcatcattcaatctatgcttttgtacgcttcattcattcattgttaaaaatattttgagcaaatataatttaaaaaatttatcgtttagaattagccgaaaaattcaaacgaaatg

SEQ ID NO: 99179 - DNA, 1003 bp, Heterodera glycines
atgttccattccacaccgccccttattcttggcaatcatagtctccagagaccaaaattcattccgaataattcctaaaacattattgcctttttttaacccaacggaaaatttagatttaaatgccaaaacccaaaaatcttcatttattcatttttttccatgcctgcgggccggacaaaagaattgcttgcaaaaaattgctaatgattttattgctattcagttcgaacgttcaaattgtagagtctcctcaagaaaaggaaattaaaggaatttcagtggacaaagaaatttgtgatcatttttgtgcccatccatgccagccgactaatttaatttttccaaccgaagagagaaatgcaactttgggttggacttgtgtacacctaaagccaaaaattgtccctcaaagttggtcctcatttttctcgaaaaatgcttggacaattggcggcataatttttactcttgccggcatttccttttgtgtaattcgagcatatttgtggtcaattgacccgattcaattgaaattaatgtttgaaatttcttttcaaaatttgcaatttccccgcttttgactgcgtttttaattaattccatatgaccaaagttttgcagtgcccccccatttttttctctccgtgccaaatatggcagccgacggaaagcaattcatctcccgtcccctctcccgttttttgctcttccccgtcgcaacattagctttttgcggcgatgaatctcccctgccgctcgggagaaaaaggttttttgcctttttttcccattagctcgccgctgttgtaacatttgaaaaaataaattgcatttttgctgtaacgcccatcgtccactcggacccgtcgttatttaaggccggctcatccttcagaaaagccatttcttgctttcattctcatttttcctccgctccttcatttttttttcatttttccatttcctttttcaattttcaatttttttttttttttagatg

SEQ ID NO: 99180 - DNA, 104 bp, Heterodera glycines; identical to SEQ ID NO: 98209

SEQ ID NO: 99181 - DNA, 281 bp, Heterodera glycines
  unsure (1)..(281): unsure at all n locations
atgatggcattantgggtgaaaattatataggtacataccttctgatggatttgacgggggatcaatttcattatagaatttttgttcgaattcaggtccgggattcgaaattggtcaaaatgtttgcagcaattttttttaatgtgaaaatttccgagtctcatggcaaaatttgccacattttattctttttaatttaacttagcaccgaacttattaattttctagtcaacatttgctgggtgagccttccttccccaaaaagtttttgataaaaatg

SEQ ID NO: 99182 - DNA, 61 bp, Heterodera glycines
tgtaccaaatgatctaacccttttttgtggttaaagaaattgtcagatgtttcgctacatg

SEQ ID NO: 99183 - DNA, 60 bp, Heterodera glycines
gttaatttatgtcaaaaataagcaaaattttgcttttcaggttgatttttcgctaaaatg

SEQ ID NO: 99184 - DNA, 475 bp, Heterodera glycines
gttcctagttttttggaaaattgcgccgcaaaaaaagcggttttgaaaagcaaaaaaatagtcaatttatggaccgttaataatttgattcccgatcaaatttttacagtccgatccatttgaaaagtcttagtcaactcatcagccccttttaatgcatcccgccagcccctaaaaatttatttttcaaaatttcgtgtttttttttgatttttagaaatttttttgaaatttaattaaatttttttcgaatttttcaaaatcccgcaatcccgcgcgggatctcgcaaattttaaatgcgggatttgcgggattaatcccgcgggatcccgtcccgcaaagaattttgagttccagtcccgcagcgggatccgcaaatttgaaatttccggtctctagtaaataatacaaaaaaaagaactaaattaatataaattatgaaatattaatgaatacaaatttcagttggttatg

SEQ ID NO: 99185 - DNA, 86 bp, Heterodera glycines
agtatgcaagagggattctttcatttgctcacattttttaatgttttgattagtttttatattcttatttgcaggtgttctatatg

SEQ ID NO: 99186 - DNA, 86 bp, Heterodera glycines
cgcacatcagcgtcaagttggccgaccaacgagtgcaagagggtcagccgttgaaattgcactgcaaagtggagggcgtgccaatg

SEQ ID NO: 99187 - DNA, 430 bp, Heterodera glycines
aattttaaagcattttaatgacattcaatatttaaataaaaaattttaaaaataaaatggaaaataatgaaaaaataaataaatacatttgaataattagaaaataaattaatttaaaattggttatcaatttattatgaagaattaaatttaagttgattagaatttttaattaaattatattactccaactagaaattaaatagattaaaattaaattttaacatttaatttcctcaaataaaactattttgtttttattggaaggagtgttgaaggagagaaaaaacaacagcaacaacactatgaacaaaatgccaatgccaatgctgagcaagagtcggcattggcgtcaacaaacactgatagcattgataatgataatgataataatcacccgccggactccgtcattttggcggatgcaatg

SEQ ID NO: 99188 - DNA, 62 bp, Heterodera glycines
tttctccgctacggcaaccaaatggcgccacaaccgaattgctggccccaagttcggagatg

SEQ ID NO: 99189 - DNA, 446 bp, Heterodera glycines
tttcacactggggcaaaattggtggcacggggacacagtggcactctttgccccgctctcgacacatttcccccgggggctttttggttgacattatttgtggtcattcattggctgggcgagaaggtggccatggacggacggggcagtacttattagggaagcgatacttaagactttaattgacccaatgaatgggggcaatgagcaatgaatgggaggaacaaacgccggcatcaacgaacatttgttggcacagccggcaggggggggggggatgatggcacaggcggcgcaaatggtgcgggggaatcatggctttggctaatgattgtaaaagcatagaaaaatcgggggcttttggcggtgaaattattacggttaggtcaaatcaagaagaaaatgagtgagcctgagctggcaaagtgaggagagtcacggacatg

SEQ ID NO: 99190 - DNA, 71 bp, Heterodera glycines
taaaaccgatcagtaagtggttcccgattttgctctttgctaattgcacaaatttttgttcacacaaaatg

SEQ ID NO: 99191 - DNA, 633 bp, Heterodera glycines
gagatccaggctcaattgaaccctaataataatttaaaattaatttaatttttaatcaaataaattttatttattttccctgtgaacggagtgaagaaaatgcagagaaaagtgagaaatatgagagaaatattgtacaaacagacagcgggagaaaggcgttctctgccctaattgtattgtaaaaaatggaggacgtggaagaaattgcgtacgcgcgaggcgaggcaataatcattcgttcactattaaaaatgatggattatttttaatttaatattaaattttaattgatttttaaattttttgtagaaaaattattcgtcattgcaattttagtcctacgtaatcataattattttaaatttatattatgtgaatgaaaaagaaaagccagcgaatttctaattccaaaaaaaaaattctaaaaaaatctatttgggaattaacgacagagttttttcaattttcacaaggctcgaaaattttcaaaaaaatcactgatttaagcgcctgggaattaaatcccataatttcttcgtttttcccatcccaaatttctgagttaaacttagacccttcaaatttttcagcattttttgtatatcatcgtaaaaatatttttaaaaaatg

SEQ ID NO: 99192 - DNA, 115 bp, Heterodera glycines
gtcttttctttttcatttctttgtgtttaatttttctttactccgctgaaattctaatcgcttaataaatcaaaaggaatttatacatataaaaaagtccccctaattggtaatg

SEQ ID NO: 99193 - DNA, 141 bp, Heterodera glycines
agttcgcctcaatttcgtcaccagagagacccaaacatttgaatgggaacaattggccaacaaaagatggacacttttttaaatttaattaataaaagagatttttacccaaacggtgtccatttttagtgaaaatgaatg

SEQ ID NO: 99194 - DNA, 203 bp, Heterodera glycines
cctgtaataaatatgccattttgagatcatttccattgttattgttcttcagttcgttcgtcggatgtcccccgcagggaccccaaggcgatgtttctccctttccgtgctgcccctttttctcttaatttggcatttttcatttgccgaagaaatcattcgaattgattcctccaacaacgaattgacgccggacaaaaatg

SEQ ID NO: 99195 - DNA, 1003 bp, Heterodera glycines
taatcaaaagaggcatttattttacaatttttaaaaattattaatgcatttttgtacctcttctgccatttgttgtacctacttctctcttttaatcactgttgtacctcttctaggttggtaattaaaatatttttaaataaataaaacaaatgtttatatttattgcaaaatcttctttttctttaaaagacaattaatttaaaccaaaacacattcatcctttaaattgatttacaattaacggttcccctcttaaaagaacaatgacattttactgagggttttgaatttttacgaaaattaaacttttcagtgttatttaaaaatttaacattgccaaaattgatcggcaaaaactgaatattttcagtatttgtttccaggcccaattgaaccctaataataatttaaaattaatttgatttttaatcaaataaattttatttattttccctgtgaacggagtgaagaaaatgcagagaaaagtgaaaaatatgagagaaatattgtacaaacagacagcgggagaaaggcgttctctgccctaattgtattgtaaaaaatggaggacgtggaagaaatattgatttttaaattttttgtagaaaaattattcgtcattacaattttagtcctacgtaatcataattattttaaatttatattatgtgaatgaaaaagaaaagccagcgaatttctaattccaaaaaaaaaaattctaaaaaatctatttgggaattaacgacagagttttttcaattttcacaaggctcgaaaatttttttaaaaatcactgatttaagcgcctgagaattaaataaaataatttcttcgttttcctcatcccaaatttcttagttaaatggcattctttttttttcaattttatacccaattaaaaaaatattttaaatttttttcaaaattttcatcaaggtcttgacccttcaaatttttcagcattttttgtatatcatcgtaaaaatatttttaaaaaatg

SEQ ID NO: 99196 - DNA, 795 bp, Heterodera glycines
cccaaactgggctttttaaatatgggaacctggtaaatcttcttatttagtcaattcttcagccgtttaacgtagggttagactcgcattagtttccgctcggattgagactcgaatacccggcttatacggaaccgaaatatcgagaaagtccaattttatttaagggcataaaaatgatataaaataatatattttgacatcgatccataaagaattgtaatgagtccaggaaaattaaccttttaattgagtgtataattcgcttaaaattttaaatctaatttgattaaaatttttgctttgagattagaggtattttttatatatatttaaatttttttaaatgctaaatattctgcagaatctttccggtgtccaaatttctgttgcccctcgaacaccaagaaatttgacatttattcttggaaatgagctgttttttcttgaaaaacaaaacgcatataaactattttaactattaaaattctttctctatttattaattctcagaaaactcatcaacagttgacgtcggcgaactaattaatttggaaaaagaattggcaaattttgagcaaaatattctccaattttataaattgggtaattacataaattgaccacttattctaattacggttttgtctaaaaaaaatccttcgaaaaatgaataaatggtcgaaagaataatggaattttatgtcaaaacccccaggcacggtaatggctgcaaatttagtaccgtacccgcacatccatgcctggggaaagccgatacatacaattgaaatg

SEQ ID NO: 99197 - DNA, 466 bp, Heterodera glycines
ttttgtttgtttgtttgtttgtttcttattcatttatttattcatggttgggaaatttttcaatatttatttggaataaaaattttcaattatcattctcagcaaaattattttttctaaatttaaaataaaaattaaactgtttaaaattgtaaaaaagtaattaataatttttgaacattctctaaattgtgaaactaattgaaatatttttatgttaatgaattttttcaatttcttatatttttaatttttttccctaaaaatgctaagaattaattatttaattttctttcctcaattataagcatcccactgattaaaagctctttagagggaagatcgaaattaagccacggagcttaatcatattttaaaaatagacaaatttatttcaaattaatccattttaatatattttaaaaactttaagtccataaaatcttccaaatttactctaaaaatg

SEQ ID NO: 99198 - DNA, 102 bp, Heterodera glycines
agcgtaaaactaaaaatgtacatttagttgaatgtttgttgtttttctatttaaaaataatttttatttgcacttttaatagcacctcttgcgtgcacgatg

SEQ ID NO: 99199 - DNA, 806 bp, Heterodera glycines
tttcttctttcgttttttgagtgcataattttgattgacataaatttcttgtcactatttttctatatttattcccagaaaattaattttctctgtataaaaatggacaccaaaaagattttaatatatggactttttacattgtttattttgcttgtacttttgtcgcttgagtcacgttttcctgtatatctttgagccgttctagcgactttttcaccatttttcgtccggtgttttcccatttggttggccgtgcgtttcgtgttccgccggcaggtcaattcttttctattggattaaattatgtgtcggacgtgggcggggggggggggggtcattcgtttcaaactctcaggtttaccgttatatcatttatctaaaacggcagaatccacgagtggcgtttttggtgttaatctgttgcgggtttcctaaagtttccattccatcctttgttatctcttgttttatttgctttcccatttttctacagttgcttttccctgttttatggcttcgtcctctgaacaatccgccggtgggcagtgccaccaaaaggcgggggatggacaaacgccggccattgatcggcttgaaggtgctaaaaaagacccaaaggcagtgacggaggacgaatggcgcaaagtgttgtcgccggaggcgtttgaagtgacgcggcagtccggcacggaggtgggccaacaaaaggggggggggtggggagaaatgccattgccagaacttaaaagcaaagccgagtgcaccgtgaaaaatcatcgcatttaattaaattagccgaaatg

SEQ ID NO: 99200 - DNA, 147 bp, Heterodera glycines
gctgttgccaaccctgccaatcagccaccattggtaccaattaatgcccaaatcgtgccaaatttgccggctgttgctgcgcctgcgcctttagccactgctcggttgccgcagctcagtcttcctgttttttcgggcgaaccaatg

SEQ ID NO: 99201 - DNA, 390 bp, Heterodera glycines
attttaaaacaacaagcgttggcattttttcaggttaagttagtcctttacaatggagaaggcctgcaaaatttggagagattatatcgattttagtgcgctaggttcgatgaaactttttaaaatataagcctaaactttttggcctgtttaaaaaggaattaaaaatttttaaaatatttattcatctccctttttgatagtgaaagcatcagagagccttatttaacttttaattaacatttggtgcgtttcagagcacgttctaaaaaatatttatgaattaattttgcaaaataataaataattaatgaaaaagtcagaatttcgaaaaattttaaaaacaacaagcgttggcattttttcaggttaagttagtcctttacaatg

SEQ ID NO: 99202 - DNA, 564 bp, Heterodera glycines
gttccgggtcaagagcctgtgggtaagggaaaaccaaaacctattgggtgaaacccaagcctattgggcggttggggaggaaaagccaaagcctattgggcggtggggaggagaagccaaagcctattggaggggtgtggtgacatgtggcggctggcagggtgccaagagatggcggcggcataatccaagcctattggagagtgtataaaaaagaaaatttaaaataataataaaaatagaaattaaataaaaagatgaaaatataaaaattaaataaaattaaaaataattaatttacaaatcttaaaaataaaaaaagcaattagtgccaaaagttcctactaaagagccattgattatttgcttttcaaaggaacttttttgtcgcctttttgcaacgaacaaatttttggtcgcaaattttaaaagggaacagccaaaaaagtaattaattaagttcgagaatcggctggctagggcgggtctgtccggatctgtggccgaaagtgccagtttaaaatcatttgaaccaaatccgtcccaattctccctaaaaaaatg

SEQ ID NO: 99203 - DNA, 161 bp, Heterodera glycines
ccccccccccctattccccccccattgctcacccatcattttattccttctctttaataattttttcattttttaaaattatttttgaaaaagcaaataaatttaagcagcttggatattctgcttcttctactgccgttgtttctattctatgtaaaatg

SEQ ID NO: 99204 - DNA, 314 bp, Heterodera glycines
catggaattttaaactctaaaaaagccaaaattttaaataccccccaattttcactcatttcttgtagccccaggccatttcattaaaaaattctggcgatttcaaaattctgatttagcatttttggattttccggagatagcgaaaccacaattagagccaaatagtttattatttaatttattttcaaataaaaaaaaattaggcggcactgctcgcggcgctcaatctgcgcgaacggcggtttgacaaatttcgcgaaattgcgaccgaacaattaacggtttacatgcgccaacggattccgaaaatg

SEQ ID NO: 99205 - DNA, 1003 bp, Heterodera glycines
tttttttcctctctctctctcaagcaccattctcatcaaattctctgtggcatttcattcaaattttgcgtcgttctcactcaaatacaaatttgcatatagtccaacatttaccttaagcaaatgacaaaaatggccacagcatttgaaatcgccaacacataacagcccttcttctttgctatttattcaatccattttaatgatgtatttggtattacaacgatcccttgtcatttcattcacttttaccctaatgagtacctcacaaaaaacctaactagtccctgaattcgaaaccaatccggacaaatatagattcattaaaaagagcagagcctgagctatcaaactacttgccaaatattttttatttaatctccaactcgttttatgtacagttgaaataagacacttttggtttgcgtaatttccaagaaaaagacattttcataaaataacatttcatcaaatgttaattactatttcccatattcctttatgtacagtaagcattgaaattcaaaaaaagtaatagtaatggactacagtatgcattgattttatattacagtttttcttcattaatcgtaatagttttttttcatttctctctacctatttcatcccaaaccgtgaaatttcgcattacctttgttgttccattagccagtgaccattcacgtgttcttcatcggctcctttgccttatgggaggagctaatgtgtccataaaaggctgatctcgatcttcacattcattctcatccgcgaaggaaaatctcttttaatatttaaacctttttttcgctaggcaaatcattcatttctcgatcaaatccttctcacacttcatttatgcttagcacagcttttcaatttcagtttttttctccttttctctttttatttccccgttgtaccttccaatgtttttccttatccaataattgagtataagcaaatgaccgtctgatttaattgggttcaatcttagctaatg

SEQ ID NO: 99206 - DNA, 59 bp, Heterodera glycines
attggtgtcagattcttggtcagcgacttcaaaaaccttttgaacaagttttcgtaatg

SEQ ID NO: 99207 - DNA, 1003 bp, Heterodera glycines
ggtgtagttgaaaattttacggcatttttttctttgatgaaataaatttagcatgaaaatttcatgaaattttgttgcggttcaaaaaaatatagcccaaactatgagaacggacgggctatgagatacggaagatagggctgtgcgagaagtgatttttactgggaaccgagaaacgagaccgagaaatgaccccgggaaacgatacgagaaccgagacccaaaaaacccgagaaatttctcgactcgggaatcgagaaccgagaaatctaaatgaaattgattcaaatgtatttttttaaaatcaaaaacacattaaaaagggggctaggtcaaacggaatttttgcgtaggagtctcaacattaaagttaccgcattttttgcttttaaaaacgctttttcgcgcatttttccaaaaatttttggggaacatgagggtccggtggtgccggtaggcgctgccggaaaatttttttgtaattttttagtgagatgataacagattttcaccaaaaaggccaatttttgcatggcaaattttaggtaaactttttttcctcttttcccccttagccggcgacctcccgcccgaaacggtcatccttaacagtgtaaaaactcaaaaatctgctctcgtgagtagacgacgacacaaacacaattgccccttggatatatcgcgggggggggggggggggggttttaaagatttttgtgacagtaacggcatttgtcacctcttttcgccaccataccacgcacagtcaaacggagcagccgaaaagtttgttgatttcttcaaaagacagttgaagaaatgcagtggggataaaaattggttgaaacaatcacttttgtcttatcgctccatcccaattgcagttttaaacaatcgatcaccagcagaactgtttctcggccgaccactccggaccaaactttctcttatgaaaccggaacggccgagtccattcttccgaggcccgtatcaataacgcatg

SEQ ID NO: 99208 - DNA, 76 bp, Heterodera glycines
agcacataagcagggcaccctttaaatttgttattgaaaccattttaagtacaaagtttctttttttctcaaaatg

SEQ ID NO: 99209 - DNA, 134 bp, Heterodera glycines
ctaaatataaattgcataacaaaaaatatttgccatgtatgaaatctacagaaattggaagaaattcaataataataatgaacgtttaaaaatatataaaatattatgccattattaaataataagtgaaaatg

SEQ ID NO: 99210 - DNA, 617 bp, Heterodera glycines
aattagtataaaataccacaaaagacccaataaagtttagaataacgttttaagtacttacttttgatatcactcttttgataaaatctatttttaagtttgattttttataagaaattctatataaatattaactcaaatatgcaaaaaggtgaaaataattaggaaaattgcaaaacaaatacaatccagaaaaaaatcttttgtaagaaattcttataattactttttttttgaaatctctattgaaaaattctaaaaattttttatatgaaattatttaatgatttaaggcacacaatgcccatgttttattgaagacacgcattgcatcagctgttatcaacaaatattacatcacagaaacaaatttgttcaacacaataaataacgtattttttaaatttaatttaattaaaaaattacattaaataaaataataaatcataaataaatgaaaggaatttcagtcttacgatttaattaagggtttttgcaaatcctatagttaaattaattaataaaataattgttttttaaattttttctttatttcaaacttaattcatactttaatatttttaataaaaattaatattttaaataaatcatagatg

SEQ ID NO: 99211 - DNA, 1003 bp, Heterodera glycines
ttgcacaaggcaactagtcaaggaaaataaataataaattttggagatattttttaaacaaaatttttttatttcttaggggtgtatttgaaaatgtttgggtcgattcttaggggtgtatttttctgaaatttttggattgattcttaagggtgtatgttcttttttattgcacttttgctatgaaatttctggaaaagggccaaaataggtgctaaagttcgaaaatgccaaaataggtgttattttaaagacaaaaagagtgtgtatcatcatcattggaaaaaattaaagaaaatttaaatattttgacgagccttttcccggtccattgccaagttctctctattaattaatgaacctttttttactattaatactttttagaatttttaagtaagaaaaggcaaaaaaatatattttcaatttttctttttattaaaatttttattagggcccaaatttattggatttcatattaatacacttttttcagccgaaaatgcttactaaaaatattttcagcttggtttgaaacttctggaatattttatttccttaatttccattcttcaccttgtgtcaatattttcaaaatttctccatttattcggcattttcatcaaaaattttcatgttcataattcttatttgattattattatattaattttttctcaatgaaataaaatttgttcttcgaattaaataatattttttatattttttcattaattaaatttttttagtctcaaaaaataatttcgtcaacttttttgaagtgaaccaaagcaagcatatgtcgcagcaattgcttctttatgggcccttttcccatctttaattgtcttcaaatcgatcaaaacttaaaattgaaaagccctccattctctttgctttaaatgcgatgtttatttaactagaaattcgttttaaattttttaaatatttttcgggtcttattccaaattcatcagccatcttctcatcaggcacaaaaatg

SEQ ID NO: 99212 - DNA, 120 bp, Heterodera glycines
gagagagagagagaatatatgagagagagagaacaaatgagagagagggagaggcagtggaaataagagagagtgtgagagggagagagatggagagtgcgaaagggaggggaagagatg

SEQ ID NO: 99213 - DNA, 318 bp, Heterodera glycines
aaccctgttgaagttttaattgatatgttctaccaacgtatagataggttggaacatagaaaaaacaatttaaaaatatattttagagatttggtcggatcgtggtcattgttctatagactcccaccctcactttttgacacttcccgccgggtggttgcggagaataaactggaagaatttttaaaattaccatcattttttcgcatgcttttttataataaatattaaatgttcatgttgtttttaaagtgaaggttttgacccaaatatttaatcaattttaatttattatttttggtagaattccagaaaatg

SEQ ID NO: 99214 - DNA, 138 bp, Heterodera glycines
aaagaaaaaggaaaatatgaaaatgaaaaaagaaataaaattgagtggaaaattgcaaaattattaggcacaaatcgccacaaaatatataaatggaaaaaagaattaaatttaaataaaaagaaaattaataaaatg

SEQ ID NO: 99215 - DNA, 209 bp, Heterodera glycines
gatcagtcggtcgtccgttcgatcggtcttccgttagatcagtcggtcgtccgttcgatcggtcttccgttcgatcagtcgtccgttcaaacggtctcgaaagaaagacagaacattcggccgccccttcaagcggtctcgaacgaaaaacagatcagtcggtcgtccgtccgatcagtcgtccgttcgatcggccgccccttcgaatg

SEQ ID NO: 99216 - DNA, 413 bp, Heterodera glycines
tcgtacgcgtcgtgccgtagtcggtcgaaggtcgttgagggaaatgtgtgtgtcgttggccagcaaaaggcagaaagacgaaaatgaatattagtgagggattggaggagatttgttgcttttatattctttttttggaatgaatttcttttggaaatttaagtcatataaaaggcgttgaattttgcaaaaactttcatttccttgccctctttaattaactattgggttgatgaaaaagttctgacactctgaaaaaacaaattatgcaaaaaatgatatttaattctaaagagattgaaaaagggaggcaggcaattgggatgaatcagcggacggttggccatcttctggccatttgcatttgttgtatagccattacttttgcaaaatcgaacgattttcaaaaaatg

SEQ ID NO: 99217 - DNA, 100 bp, Heterodera glycines
cagcgcactttcctctttgaagcgtcggtcaatccgcgcgcgtcaccgggcgaaattgtgagaaaagcaattcgattttttggcactgatcgggagaatg

SEQ ID NO: 99218 - DNA, 118 bp, Heterodera glycines
  unsure (1)..(118): unsure at all n locations
agaccgagaccgaaaaccncgagatccaaaaaaacccgagacttttctcgagtcgagactcgagaccgagactctcgagcatcactagttgttatgatcgtgctgataaagagaaatg

SEQ ID NO: 99219 - DNA, 240 bp, Heterodera glycines
accaaattaaagcaaaaaatttgggcccaaccattttaaagcaaaatgcctaattggggtgaattaaaaaaattagggaatctttccccaaattattcattttgttctgtcccaaagatgcccaagcaaaaatccacgcaatttgggtgaaatatcagccgggagatgaatgcgatgatgagcaggaagcgacgtaagtggggaaaaggatgaaaatgatgccaacgggggaaaagcatg

SEQ ID NO: 99220 - DNA, 94 bp, Heterodera glycines; identical to SEQ ID NO: 97954

SEQ ID NO: 99221 - DNA, 383 bp, Heterodera glycines
aaagaaataccgtagccatttgttcgacacataaattctatgatgattgtttattgaatgtaatgactacaataatgctaatactttcattttgcaaatattaaaataatacataaattttttgctggaatactgtttaattacgctgataccgtatccttcgtttaacaaataattgatggcatataattctgctggaaaacggtagtcccatatccatttggctacagtatccatatcatcacaaaacagatattttgtgatcccttccaaaaatgatatgttgctaatgagttgattcattcggttgagtttgtgcttttcagttttgtgccgatcagtttggccgaccagcctccgcccaccattttgcagaagcaatg

SEQ ID NO: 99222 - DNA, 101 bp, Heterodera glycines
ttccgccgccgttcgcacttttcggttaagccattcttaacctctggacattcccattgccacctaaattgctctttctcctgctaatgatgatgatgatg

SEQ ID NO: 99223 - DNA, 812 bp, Heterodera glycines
ataaatagggctccaatttttaggcaaaagcctatttttttcctgagctccccgtggcctgaaacgcacgaaaaacatgttttttttgggctgttgttaagctattttttgtgttattaatgcctattttctaggcttttatttttagagcccaaaaagattaaaaaattttgaaagagcctatttttgcctattttggcgttttgccgaaaatttgttaacaaaaatgcaataaaaacaaaaaatacacccctaagaatcgatttttttggaattttaaaaatacacccctaacaaataagcagagattcaaaaatttctgaaaataaatcacctaagaaatgaagattttctcaaaaatcgtctttaaaattttttttggacaattttttgaatttaaaaaataatgtaactcaatactgatctgacttatttttttaccatttgaataaaattttttcattttacacccctaaatttgagactttttagagcctattttccattttttggagcctattttgggggttttttagagcctaaagcctacctattttagcggtttttagtgcctataaattggagccctacttcatatacatattttgaccatcattttcaaaggttatctcctttcgcgggcttttcaaattttcaatgaaaacgaatgaaatttcagtggatttataaatatcctaacaaaaacaacctcaaaattagaagaaaatatcttttttgatactaatccattgattttacatagaaataacctacaataacgataaactgttaatccccaattgtttaaaatg

SEQ ID NO: 99224 - DNA, 392 bp, Heterodera glycines
taagccacaattaaatgaatttaaataatagattaacagcacctaactttattggaattcgaatttcatctaaatggttaggaatttcactttatgcaattttattgtttgtactttgtttgtaggtaaaagaaaatttaaaagcaaaattttttcattattttttttaactttggcgtatcgcttcaaattcaaagtgggtttcagtggtactcttctttttgaagattagcaaaaagaacgatacttattgtattgaaatctatctaaattttgtatctacatataatacagtagcgattttaacaaaaaaaaacagttttatgtttttccaattaaataaataccaaaattaacaaatttaataaatgcaaataattaatccaatgatg

SEQ ID NO: 99225 - DNA, 857 bp, Heterodera glycines
tttattaaatcgctaaataatatttaattgaaattaattttaattttttgttatatttcgtggatttttttttaatatgtttatgtaaaaacaatttattatatatagtttcataatgtcaaacattaaaatttttttgtatataaacagagaagcagaaaaaaacgtggcacgcacttaaaatgttggcataatttatttgtttttcgtcagcggatggacggcaccactagcaacttacgaaatgcttacaattttgaaactgttttttttaattagaaaaaacaattaatttctttcaaataactggcaaaattttcccatgattttgccttgtcattttcgtaaaatcattcgaacattaaaagaatgctgttcgatcggaccgttattccctaaaaatgcataaaaatttatgaaaaaacaaattctggcgttactttgatcaaattacgctgtggaatgccagattcgtcttgaagtcctaaaaacgtgtgcttttcctgtacctctaattaaaaatggtaatttgaattttttttttttaattttttaaaagcctattcaaagtgttttggattcaacgaacaaaattttgttgtttccgaccaaagagtatcaagagtatcacgtaatttgatgaattttattttaattttattcattcattcatcgaattggggatggattttttttttttacaaaaacttgtgcacctaatttgtctttaattagtaatttgcaagtattaattactaattaatgtgcgcaaacctttctatttaaaggcagatgatagtgtttaattggaaatcattagaatatttttgtttcagcaaaatttcacactgaaaatg

SEQ ID NO: 99226 - DNA, 1003 bp, Heterodera glycines
agtgccaaatttgaattcatattcttttttcagacttctttttctttagcattttggcaatataattttcattttttgttgatgagttttaaataaaataaataatattcaattacgctgttttcatccttaatgacccaattaaaatatttaaatataaagcccttaatcttttatttcatcaattcttacagttgtaaagaattatatagtccagcagaatagaaatagttaaaagtggaatggataattcgttaaaaatatacattccgaaatttgttaaaatttctatgctttcggtagcatttttacacttttaaaatctttttattttaaatccttatttgatgcccaagcatcccaatgcccaaatttactgctggtggcgcaagctcgccacctcataacttttaatttaatatgtagattagttattttaaaattaataaaatcaatctaaaataataatttatgaaattgaaatcattcaatataaagttggaataaatattcatataaaatggctaatatttgcaacattttgggcaatctgtacgttcatattgttcaaatttcctccccaatatggtcacattgccaattctttgtcatcaaatacacaatgccaagatacaattcatgtaaagacaaatgagtatggctgcaaataaatttctcgttttcgcacatatttaaatattttgagatttttagaattaattgaaatttttaatgaaaatgcaaaaatgacatttttgaaaaggtacctcctaaaaatctaaaatcgatttaagaaaaatagatactaaaattaactaataaaccaaaacatcatttgtccatatttacacattttggcggtcatgtttaatgtctgtatattgcgatttttcttacataaacttacgggtcggggtcgttttcgcgtgggccgctatcctatgaaaagtcgatactcaatgaaatttagcccggataaagcggtgtacaaatacagaaaatg

SEQ ID NO: 99227 - DNA, 484 bp, Heterodera glycines
ttgggtcgtgaactgcttgctgcttttttgttttgttgttctccagaagatattctcgggagtgggaaagtttttcacgggaaaacaaataaatgtacaaaattcggtcctatataagcagaacgatcacagaagtgtggcacagattcattgtagatcatcatcatcaacattcaaagtacccaattcatcataaagtgtcgggcccaattcatcatattcaggccaaattttcaaaaatgaaatcaattttttctgttgcactaatgacacacatttgtccaattatccaacaaaattagttgggcaaaatattacgcccagccaacctgtattcatgaattaaggcatatggataaatcctgatttaacctcagaagcccaatttggcctgatttatacataaaaatttttgtcaaaaattaaaaaaaccaaatttagcaaaaaaaaaagtttccatttcttcacttccgcattgaaaatg

SEQ ID NO: 99228 - DNA, 781 bp, Heterodera glycines
tattctataaattgtcatttaaaaatattagaataattttttataaggatttgaaggattgattatttaaaattgttagaatttccaaaaatttcctgggccggcggcacgttgctgcgctttttctaacttttgataaatcttttctttttaaattcagaacagaacccattttccgggcctccttgttttaatttttttcgaccaattttgaacccgttggttgagtaaatttataagtacgtgtatagtcttttcaattttgtaccaatattttttctatttcatttttatcatagctatgttgtaaaattaaaagagtaaaatgccgaaatatctttaatagtaaaaaaatatcttttctcaaatgcaaccaaaaatgacttaaatatagtcaaaataattcacaacagatttgggaataattgttatttaatagttttatcctatctttggaaagtaataagatagagacaaaatgtgacgaaagttttgcaggtggcatgcaactcccggaccaatgttttggcaattttccggagcaaagcttaatgaaaataaaccatttctatgagaattaacaaagaccctgttcagtaaaaaaggggactaactaaaaaattagaatttttaatcgcttaataagttcgtggtaaaatgacctcgtcaaataaccaccttattttgctacggcccctggtggcaatagcattaaagaatgaatatttctaaaaaaatttataaattaaataaataaaaattgcgtctatcatacaaaatg

SEQ ID NO: 99229 - DNA, 237 bp, Heterodera glycines
  unsure (1)..(237): unsure at all n locations
aaaaggaattaaaaatttttanaaatattatcnnatctcccttntgatagaaanagcatcagagagccttattaaacttttaattaacatntggtgcgtttcagagcactttctgaaaaaatacttatgaattaattttgcaaaaaataaataagtaatgaaaaagtcagaattttgaaaaattttaaaaacaacaagcgttggcattttttcaggttaagttagtcctttacaatg

SEQ ID NO: 99230 - DNA, 454 bp, Heterodera glycines
cttagttgtgtttgtaccaaagaatggagcccaatagtcagtgaggaacaagttaaaattagtcaactcatccacgacaattccaaatggctttgtgcgctggccagaacgaggtccgcgaaaaagtgttgcaagctgatacggaaagcgaacgctgatcaactgctagcgctggtggaaatttgtttgaacattgtcgcatctcgatttcgcttgaacaaacgtcagaagaacaggctgatgccctacgcagattttgttcgctgcctgagcagagtgagaagtgaacgaggcgcgagacgtatgattgttcagaagggagcaggggttggcggactgttcgctgcactcctaacacccgtgttaattgaagttgcaaaatcatttgtgagcaaaaatgtataaataccgtaaaaaaattgttgttatttcacactcgttgtttcataaaatg

SEQ ID NO: 99231 - DNA, 53 bp, Heterodera glycines
ggtaaaaactaaaccatttaatgtttttaaaacgaattttcagcaagagaatg

SEQ ID NO: 99232 - DNA, 104 bp, Heterodera glycines
cctcccttttgtgcactatttcgtttcaaaattgaatcattttttttggctttttgaaataaattgtgaaaaatatacgaaaattattttagcttttaattatg

SEQ ID NO: 99233 - DNA, 664 bp, Heterodera glycines
attaatatttttgtgataccaattgttaagtgcgtaactgttgtgaaaaaagggtacgaaaaactgtgataaccccattcagagactagcaaaaaaaatcagaataggattggatttgcgtaccaattattatttttataatgggtttgttaaatgcgaaacagttgacaaaagttgttataactcaattcagagatgagatagaaaaaaacaacaataggcttggagagcccttgaagagctgcaccggatgcaagtgccgccgttgctgtacgcttagcggttgctctgcaatgacggaaaattgcaaaatcagaaaagaccaaatattatcaggaatacactctcccatctcacccgtagacaaaccgaatggtatatgttcgaacggcaagttgactaccgtaactaattaatatttttgtgataccaattgttaagtgcgtaactgttgtgaaaaaagggtacgaaaaactgtgataaccccattcagagactagctaaaaaaatcagaataggattggatttgcgtaccaattattatttttataatgggtttgttaaatgcgaaacagttgacaaaagttgttataactcaattcagagatgagatagaaaaaaacaacaataggcttggagagcccttgaagagctgcaccggatg

SEQ ID NO: 99234 - DNA, 377 bp, Heterodera glycines
actgttattaaatgctaattaacaacgatgagtaataatcattaagattcgctttggcgctgctgcgttcgttcggcaacttttcgaattatctcgcaaaaaattgggacggagaattcgattgggacattttgtgatcatgtttttgacaaaaaatcaaataatttgggattccctaatttcgtttcgtttgcggtaagtgccaattcaaacaaatattttaatttgacattcgtggaccagccaatattgaagttcatttatttatttgcctggtgtaaagaaatcataacaaaataaattaatttctaaaacataaccaattgaccacgcataaacaaaaattaaattagatgatttaaattaaggaattgatg

SEQ ID NO: 99235 - DNA, 292 bp, Heterodera glycines
attcaaaaatatgaaacaattaaagaaaagttaagagaaaaaggtaaatatgaacgaaaaaatcaaacaaaaattgagacaaaaattggaaaattattaggcgcaaatcgtaaaaaaatatataaatggaaaaaagaattaaatttatataaaaagagttatttatctggcaaaattcgaccaaattttgacgaaatattcggcaacgaatggacaataaaaaagagatgaagtttttataaaaactgaacaaattgaccaaaatgataactctgcggcagttgatcaaatg

SEQ ID NO: 99236 - DNA, 73 bp, Heterodera glycines
aaatcaacaaacggggcacagtaggaacaattttactgccattgaacgaccacagccaaacagttaccgaatg

SEQ ID NO: 99237 - DNA, 93 bp, Heterodera glycines
attgtgtaatttattttttttttgccttagttatagtcgaaatttatttttaattttttaattttctaaaatttattttagtctcgaaaaatg

SEQ ID NO: 99238 - DNA, 153 bp, Heterodera glycines
acactagaaaccaaattaccagcacttttaacacctaaaaacagattcctatgaattatttttgtcgctttttgttattttttgaattatttctcgctcttatattttggttttatttttctattagctttttaaattttaatttcaataatg

SEQ ID NO: 99239 - DNA, 184 bp, Heterodera glycines
tatgtcgaaggtgagcagtcgaaattccccgttaattgccttaattatttaattgctttactttttcggtcgactcgccggtcgtcgcatttggtggtgtccgagtggcgaaggtttggtttcgaattgccgtaattaaattatgcctatgttttggcacacatcaattaattaataattaatg

SEQ ID NO: 99240 - DNA, 673 bp, Heterodera glycines
cggctcccgaagcatcggttaaaagaaaagctgttcataaaacattcacatgcctttattaggtgattattttttttctacatcagcttatcagcaattctctctttggcacttattccgccagtttaattaggcacgtatttacaaccattgtcaacgcagcaccgcttggcgttgaaggagggctggcatattttggcaaaacctaccattggcactactaaattcgtggctgatcggggacgaaggccatgctggtgtcggacacttctctctgcgtcgcacacaaaccactaatcgaattaaaatattttattcataaacaattttattttcacataattttggaggaaaaggcgtggatgcgcttggcattttggcattgcacgcccggcggaagtcaagtcatatgatctttccccgaagccttttcgccctttcctttaaaatattgggcggatggtatttttatttttatgttgaaagaaaataaataataaagaaaattttttttttagtgagcaaagtatgattatttctattcacacatttgaaattcatgtgaaaaaggcattgaaaattttcgcttaaaaggccttagaattcgcttaattctgacttcatttcacctttcttcgaccattcattccaatctttaataaaaaaaaatatg

SEQ ID NO: 99241 - DNA, 516 bp, Heterodera glycines
taattaaaaatcttttttttctgaaaatgcaattcttcggtatcaaattttgagtcgatccgcaaatttttttttttgaattattgttaaaatttattattggcgaattgtcttttctagcggttgtgcttggcggcgcagacacacagaattgcatgcgattgcaattttcaatgcactctcttcaacttttttgcgaaatataaacttgagaacgcccgccttttttcattttttggatttttcttttcgactgtcgcattcctctcgcagataattgataggtaattcgaaatcaattaaggaattaactttcacaaattaaaatctcagactattaacactctaaaagagttttccgttatatttgtgcgttgcgtgccgaacgggcttcattataaagatccaacaaacccatctaaacacaaaatttcaaatgtttgcaattcttttctaccttaagctgacttctgtgctttcaccgttaatcttttgattgtttctgaaaccaaaatg

SEQ ID NO: 99242 - DNA, 805 bp, Heterodera glycines
actgatattaatcctatcgaatccattttgattaaaaaatatccgaaataaaaagcaagtttttacattttataagttttaataaatatgttgactttttgggcccaattttaaaaatgaggaatataaacataacattcaatatttaaaacataattacaaaaaaaaaagttttattatctaaaaaagatgttttaaaaaaattttcgtttgttatatgtcaaagaaatttgatggtgtgaaaatcgcagaaatggatctacagaagagaacttttttcaaattcaatcccaaatatgttggaaatttaagtggatattacacataaaaagagattacaaaatttcaacaaaatggcttttgtatttgtatgatgagtgtagtacaacagtctcttcagcctaatttcgacgaccctaaaaataaccaattttaggcattttcattttaatattttgaagaagaaattcgattaataatctaaaataaccgacaatggatatttttttggaaaaaaataaataaagaaaaacaaaaaataataataatgacgaaagaaataaattactaattttgttttttgatgcaaaaaaaatcgtcagttcaaaaaattgcgcatctgtcattgattctaattcattatataattcaaaaccagttattcataatttcatttgaaatataaacgatttcttactgctcaaatgcataaattcttcaaaaataattattatttttacaataaaaatgctttcttttcttttttaaattaaatttaaggaattcaattagcattattataatg

SEQ ID NO: 99243 - DNA, 505 bp, Heterodera glycines
gatcagagaactgatcactttatggccaaaacagtttggagagaattaactgacaaatgagtaccaaattgatcggaactaaagaattgtgataaatcattacataaacggatcaaatcgattttgcaagggctaaccaagttcaaatcagataggtttaagaaaagtgacaagttttatgcagcttaattcccagttgattgaataacgaatgatcagtcaaagcagtgtgacaagaattatcagccgagatgtatcaaagtgatcggaaataaacaatagtgataaagtcattagacaaattgaacaaattgctttgccaatgtatgatcaaattcaatcctaagtaggcttaagaaaagtgttcaatttgatgcagctgctgattttccaggtgattgaagaacgaatcaaaatcagagcagcagcagaaaaaggccaaagtgaagaagccgcgggcaatgacagaaagggggaggcatttttggaccttttgttggagatg

SEQ ID NO: 99244 - DNA, 1003 bp, Heterodera glycines
gttcatgtattctgtttaaaacgctaggctgcttcaactttcgatgagagaggtcgcaatttgagtatggagaccgtttgagtgtgactcattaaatacatgcatttgataaattcatttttaattagagcaactctccaatggcattggtcattttttggtcaaaattcataaaaaatttgtatggaaacattaaatcgttggcggaaagttaataaagatttgcagaataatttttcaatttgtccttctttttaatttattttaagtgagacaaaatgaatgaaattattttatttaaaaaataaatgaaaaatctaagcgaaaatttaaaaaagaaaatataattattgaaaattctgctcaaaatcttttcgcatttaaaattttaatgcgatgaatcagcaaaaaaaaatggaaaaaattggagcatttgcacaaacaaaagaaaagccaaagcgcgtcgattaagcattggtattttggtctatttgcgatgattttttgaaaattggaccattatttgcataacagcaaaaataatccgccgttatttgggcgagattaaaaatatgaaatcattcgcctaaattttgtgtcagcgcattcattgcataaaataaaagaagaaatgcgggagaatttgcatttcatttccaaaaatcattttaaaaatatcattttttgtgcatttccgttgaattaccctttaaattttttccatcggttcgatttgtttgaagtgcgcggccaaagagtggcggcgcacttaaaaatggcaattatcgatttgcggaacgaatttaatggaattaaatatttcattttaaaaacaaaataatttttggtttttaaaaaacaatttaccagaatgattgacaggtggcaaaagaatgaataatgagaggaaaaaaggtacaagaaataataaatatattttaaaattaattacatttcaaatttaaaatcagttttaattgtgtccgtcgctgtcgtctcaatg

SEQ ID NO: 99245 - DNA, 619 bp, Heterodera glycines
aatgaatgaatttgacagcacaactccgaattgaaaaaccccaagtcaaatcgatggcatttcaatattatttcttttttatggtgtccgaaataaaataatttttcaaattcactttaaaactttcaccgacgatgtgaattttttcagtataaaaaaatattttaaatcaaaaatgtaattaattttaataaaattgtcgttttcacaataatttctttagatacgtgtaaaatcaatttctttattgatttaaaaatgcaaaaattctttcattttatttatttttagagatttaaacaaattgaattttaatgcaattaatagcatggatttgctttattctaaaattccaccaaattacaagcattggcagtaaattgacactggaagtttctccaagtctgtacgagcattctttgtttaggtatataatatttaaatacgtttcaaaataaaaaaataatattaaatatattttgattcattttaaaacagttatgcgattgatgttcgttgtactgatttaaatggcaacaaatggcaaacattatacggcagcatttggaaaaattacccgtcccattcgttttttcagacagaaaagagtggcaaaatg

SEQ ID NO: 99246 - DNA, 179 bp, Heterodera glycines
ccccccccccccccggtaatttgttaatttttcccaaatattccctcaatttgctttttcttagattcgttcgccgcggtttcgtctccgccagtctccgaaatgaaacaaatttcgttgtccgttgtgctgttgagaattgctttctgttgtccgattacgagggacttgacgtaatg

SEQ ID NO: 99247 - DNA, 1003 bp, Heterodera glycines
tattatttttatcgaattctcaaccggtatgagtagattcggctactgaacattggggctttcgttatggatcttcattcattttcttgcctgtttctgctcagacatttctctgtcggacgggcggaaatgaatgccattttgaacaaaaatagcgcttccgttgtcggggcaacattgtgtaagtaagaagaatcgggcattttctgtggaaacagagaacattgttcagacacgacgctttttccatgtgcggaatgtgccaaaatgatcatccaatcgcgcatcagtcgggttgtttatttgagcgacaaaaataccgtccaaatggaggcttcgcgtcgccttttcaacatcacaggcatcaaattcaggtccgtccttccttatccctctcgcaaataaatgcatattctcattttactaatgtgtaataattgttccctttagccgatacgaatcctctcgtcccgaggtgactctccgcttcaaatgaactcttctgacggtgccgtgccttccattttataattttctttgttactttgtcttgttatttgagctgcctgctctcataagggcattattgtatttctgtcctcactttcgattttcatgccaaattccctcactttctctttttaccgaaaatgccttcgattaccctttttccctgtgctttccttttctgtttaattcatttatcgattgtctttgctcgccttcgttcgtttgtttgtccatctgtcctctttcactgatttcttcttttgaccaacttttgcatacctttctttttttcgtttaaatgttggcataagaaatatgggtatttttgtcattccaaaatgttcttttttgtttaaattgataaattttagggaatttctttgttggtttaaattcaagttaatttttcattgtaccttttcggatttttaattattcgactaattgtaattggagtaaggttaaacgttcccattgccttccattaaaaatg

SEQ ID NO: 99248 - DNA, 90 bp, Heterodera glycines
agtaaaaaaacaattgaaaaataccgtaattattaccgtattcccaaggccttccgcgtgaacaccgactcggcctggactgatctgatg

SEQ ID NO: 99249 - DNA, 216 bp, Heterodera glycines
actaaatgttgaagtatttgaccaatgtcacggccattttgagcagaagtgcaattcagtcggactaatgtttttgtgaatgagaatgaataaatgagagggaatgttttatcgccaacaaatactgggagggttcgccacgcacagtgaataaaatcaataaacgacctttgatatggaagttgcacaaatgaggtgagcacagcggtcgcaatg

SEQ ID NO: 99250 - DNA, 270 bp, Heterodera glycines
  unsure (1)..(270): unsure at all n locations
gaattatttcagaattttntggcccatcaaatcctttttcattttgtcattttcaaatctaccataaacttatgaccacccaaaaatagggtgtggtacactcaggcgaaagttgctccgtcactaaatattccctagagaagataatggtgcctttggaaagccacagaaaatgctataaaaaacatcaaaacattaagcgtaaaagatttcattgaaaagttttatcaaagcaaatagaaattgagagcaccctaccataaacatatg

SEQ ID NO: 99251 - DNA, 220 bp, Heterodera glycines
  unsure (1)..(220): unsure at all n locations
attgattgtcccagaacttnttttgaaacccaatgacattttatggaattttaatatttattagatatatagaggagttaaaattcaaaaaaaaaaaataatttaactgcttctgagaaaagttataaatcattcgatagccctaagaattctctaattatttttaaaattaaaaaaaaattcattgggtttttaaaaagttctggacaagtcacaaatg

SEQ ID NO: 99252 - DNA, 180 bp, Heterodera glycines
gtcgggcaatggaaatggcacagatttgcccatgacaaagagttgtggcattccattgtccttttgaattgtgattgttctccaaattgtcaattcggctttgccattgaaatgtttgttcaccagcccatgtgacgaaagaagtgccaatttgaggccgagttgggcgcggtcaaaatg

SEQ ID NO: 99253 - DNA, 1003 bp, Heterodera glycines
cctacgtaattttttggggtttggcttggacttaggtacttttttgttagtgttctgtcagaataaggcttgtgtgatttttggcatttttaggtcgtacatttatttttgttgcttcgatgtcgccaaaatcgtctcatgtcaattacgatcttctgccggaaatttctcacaccttccgcagccctgaaccccgaccatctgttctagtttctgacatgttttctgttttgtgtgcttcgccgcttatcatccttttccttttggtaaatgtttaaatttggatgttttttctacataatttttactttttagtggcttcgtattggcatcaattttggaaaattcaagttttcgctcagtgctcttggtaaataccactttttaaattctctgtcatattattattgttttatatttgtccatttttagggtttcatcttggtctgtgtgctgtttttgggctctacgttttcttctggctcgagttgaacatgttccagacgttgaaatggctggctgttattggcgtgcccactttgttccttggaagtcgtctttccttttaaaaccaatgctttaaagcttaacacaccgttttttgggatatattgtatttcttaatttatatgttggtaaataatattatggttttttaaattccatttataataaattgctgtatgaactttaaacattttgttgtcaatcagtatttgtgaacattatttactgtcaatgtgaacctcaatttcttaggcctataatttttttttattgggtcaaagcatactttcttggtatcaatcgaaagttaaagtttatagaatttttcaaaattcagtgtttaaggaaactcaaaaaattaatcccaaagtacctatactcgattaagcggaattacggatattctcattttatttgcttttttctaactataaattccagagactttgtcgtttggacgcataaactgcactaaagcctgtttttaattagtatg

SEQ ID NO: 99254 - DNA, 799 bp, Heterodera glycines
acaaaattaagaatttttttcaatgaaaatcagctaaaaatataaaaaaaatatggaattttgtgttgcgaaagaaatatggaaaataataataattttatttaaaaatatatctataaaatttgcattcgaaaacaaataaacaaatatgatgaaaacaaaattatctaatcatttaaaataataaattgcttcattattcgtcgctcgttgaaaagtcgtctgatttgaatgttattaaaaacaaaaggggtaggggggctttggtttgaattttttttttttttttgtaaaattatttctactaaagaaaatttgttcttgaggggttttgggatccctgatcacgaatctcacatcagttttaaccaataccgacttccgaacctaaataaattttgcacatcaacagagtccccccttagggtttttaaaaaaattcgaaatctacgattttaattaacatagcgctcattattcaaatatgaattcgaaaaagaatttaaaaaaagtaaataatttaatttttgtataaattaaataaaattgtgtaaaaataaattgaaataaggaaatgaatattaaatttgtaaaaacaaaaaaaaaaatcaatcaaataataatgctactttaaatcacaatgattcaattatttttatttgttatattaaaatttttcatttcattcgaaattattttttttacaataaaaaaatttaataaatcattttactttatataattttaattttttagataatttcgttgcaataattgtaatttcagagacataaaaatg

SEQ ID NO: 99255 - DNA, 466 bp, Heterodera glycines
agtagttagtactgccacaccgtcgtagcgcgcgaagatttcgcgcactagcgacagggtattgggcgtttttgcggcgcggatcaaagggtttcgcgcgttgggcgtagggtttggggtgggtgtcggcgggctcaaaggggggtttggggggttggtcggggaccgtcgtagtgcgcgaaattttcgggacaggtggtcagttaaaattcgaggacatgtttgtgctggtgggggcggatggggagcgtggtcggggaaaagcgacgccaattgattgctgaccaccccctccgtttttctctcctcttccactactgttatgacctccactcgcaatgcctcccctccttcgcttgtgatgccgaaggtcattatgacccccccccccccatctgaatctttttttttgttttgtttctttatttcgtagtttttttatttttttgttttaaatttaaagatg

SEQ ID NO: 99256 - DNA, 307 bp, Heterodera glycines
tttgtgtggcaaagttatgggaaaggttaatgaatatcattatgagaactttttacaaattttagcatatgtagtacaatatcatttttcaaaaaaaaaaaaaaattctttaaacaattttataatgtaaattgtttatttgggtatgatatttaattgtaagcattatgtcattttttaaaattctttattttatgtttccattttttccggcatgaactaaacagtttaaaaaattttagaaaaatttggatattttaattgctgattatgaattttatttgatttattcagttctcctatgatg

SEQ ID NO: 99257 - DNA, 396 bp, Heterodera glycines
ttttattaggcaattttttaacatatatttttattacaaaaatacaaaattatatttaattttaggtttctaataaaattgaaaagaacacctataaaagaaaaaattgatccaagacaattgagaagtttgaatttttagtaggtattattttgaaaataagcttaaagttcaaataaaattttcaaaatttttgggataggcttaagattccgactctctttgattcgagacaccttaaacatgaaaatcaaatagctttgaaatcattaaatcaagctattaaaagaagcatctgatgctgatgatgataacaataacttaaactcaaacaaatttgatgaataaggtgtttattcaaattgacaacaacatttttccagtcagcataaaatg

SEQ ID NO: 99258 - DNA, 1003 bp, Heterodera glycines
acaaatttcggaatgtatatttttaacgaattatccattccacttttaactatttctattctgctggactatataattctttacaactgtaagaattgatgaaataaaagattaagggctttatatttaaatattttaattgggtcattaaggatgaaaacagcgtaattgaatattatttattttatttaaaactcatcaacaaaaaatgaaaattatattgccaaaatgctaaagaaaaagaagtctgaaaaaagaatatgaattcaaatttggcactttccgttctaatgtattgttttcaattttcgtttaattttgtttataattttttttactttgctcaaaattgaataaagcacaataacttttccaacttttcaaattttcttatttttattttaaaataattcctttattaaatttcaatttatacaattgtgagtgcttgcacttttctgttttttgactcagcacgctttcttttagcttataattatggatagaattttttaattttatctgtttagcttttattacccgagtgatcattcaaaaagtcaattaaatttaatgaaaacgaccaaactaatgatggcgtctgagcccaataatgagaagcaaacaaatttaattgatgaaaatttctcttggccaaattaacattagaaattggccaaatgataaatagttcagctaaacaaattttgttcaaattttttgggtttccgtcaactcgaaacaaaagtttagtttagtcaactgtcaagtgcataaaaattttttaacataaattttaaataattttaatcgatataaattggcatcaattgaatggttggctaaagaaagatcagctaaacaaattttttgttcaaatttcaacaaactttggttctcctaagcgcaacaaaatttttgtttaaaagcgattaactttttagacattttcacactaaaataatatcaattaataaattgaataaaaattaattaatcaatg

SEQ ID NO: 99259 - DNA, 408 bp, Heterodera glycines
attcttaaaacgaaaagattacaaaatttgtttgtccattatctgcaaacggtgctctaatttcagtgaggctctaaatatatttttaaacaggaaacattgctgtgacaacttgccctcggattcgacattgagtgcgttgtgaaaaaaaaaatacaaaagctaaaatggattctttttttaatgtgcaaataaagtgacttatgcaataggcattactgccttttattacgcaaaaatagttggcctttttcaataaaaaaaaatcgctaatcattgtaacataataaacttagccaacagcgatagaaattaaataaaatccaatcatcatcattatcatataaatttaatgcattacagaatttaagaaaatgtttggggtcaaagattgacgaacggaggatg

SEQ ID NO: 99260 - DNA, 1003 bp, Heterodera glycines
ttaggaatcgagaataaaatgatcttttagtttgccgaaaaagtaattaataattaaatatggtgagaaaaaagcggcaacttgaaaaaaaggtttcctaaatttcatgaatgcaaaaatgcaaaaaaaaaatcaagctgagaaaaaggggcaaaggggcaatatttaaggcagatgccgttttggcctgccattagtcttaaatccccatctccatttttctcaccacatcattctgtccatgccacaaattttagcactagattgaaaatttaagaattttctgaagcatttacacatccattttagcctttttcccacatcccgtcctaggtaatatttttgttcctaatttttttaccaaaaaaaacttaccactatctttatttgaaaaggacgtccttaaaattcgaattctgtttgagttgttccttaattttttgcagaactttagtattttaaccaatttttaacaaattcacacaaaaaataatttttcatggcgacgcctatcggcgaatcctgactaaaatttcttttaaatttctgcccaaaatctgcaaaaatgctcaaaaaaattgtcaaaaattgcaaaatgaaagaatttttaaagacaaaatttctaaaaaatttttttcccaggcggcgcctatcggcatctccggtgctaaaatatgggagaaacttcattttggagaaaaaaaaaacaactgaattgaataaaaaatgttaccctttttattgatttaataaattttttttgagttatctctgaaaattacacaattcctccattatgtccttgaaacccgacatatttgtcttttcaaaccaaactaagtagatacacctgttttactttaaaaatagaaaaaagttttttagtgtgattgagttatatttttaattattttgtgcctatttctccctattataatattttcaataaatttattataatttccaataaatttaatatattttttcctttagaaccaaaatg

SEQ ID NO: 99261 - DNA, 1003 bp, Heterodera glycines
ttgtctttttaataatttctgttcgagaatgtctgttgatatcgagaattttaattttcttaaacaattttgcttttaaggacaattaagggtatattcttctgcaaattgagggaaatgcatttgattttcctactgattttgccaatcctttggccggccaaccatcgaatgccatggacaaaaagtgccaaaacattctgacaaaatgccaaacgactcaagcaaaatgacaaaacactctgacaaagtgtcgaatgattctagcaaaattcccacccaaattgccgtcgggacagattattttttgctcgaaaaatatggacaaaaaattctaggcaaaaatagcaaacacaatgaacaattgaaaaggtcattatagggctaaagaaaaaaaagtatctgctggaggaagtttttgctaaaaattcaaaggtaattaaaaaagggtgatgtgtaggacagtcgcttgtgggacccatatttccaattagttgatgggtagagagaggagattgatatagatcatcaatagtaaatatttttaagtgtttgctttaatttaatataggattcctgatattaaataacaaataaaatttttggaaaattgatcaaaaatggggaggcaaaccggactagtacctgtttttcattaaatttgttgtttttgccttttcattttcaaatgcttttttaggccgtctttgcctcgcgttacacaatcctcgcgctgttgaaaaagttcaaagttctcaacataatattttttggcgattttggaatcggtgccctctgggcatttaacttattttaaaaatgtttattcttttgccaacaaaatttatttgcaattttctctttaattctctgacttttgagcccaatttcgaaagatcgccaaaaaaaaagaaaagaaaatactgtttaattcgtctattctttgcagaagaaaattttcaacaaattgaagcgtcgtttgggcaccgaagaggcgaaaatg

SEQ ID NO: 99262 - DNA, 160 bp, Heterodera glycines
aaaaagggcaaaaaaatgggaaattgggtggaaatagaaattctattgggggaggcgaataaatactttgcattctacactttcatcagtctttaaaatccattttatgacctaaattgaccctagtcaataaatgattattttccacattttagcgatg

SEQ ID NO: 99263 - DNA, 604 bp, Heterodera glycines
tcccggcaccgggactcccgtttttacgggactttcggtcctaatggtttgtccaaaaaatgggaactgggtcgggagtcccggcaaaatcccggcgggaccccggtccgtacgggccctaatggtttcattcataaactcttatttatgaaaaagtgataaataaattatttatgaaggcctattttataaaatatgtacattaatcagggcggccaagtgtccttatttgtaagatttgtccttattttggcacgacctccttgctttgtgcttattcatggatttgaaaataaaaatgcaaaaatttaatatttttttaattacatattgttttttattgaagcgaatatttgaattaattcgtttttgtaaaaaatttcatttttatttttctttagtgtaaattcgttaattttaaatgcccaaaatgcccccaaaacgtaaaaatatctatttaaagtgataaatatattatttgtgaaggcctattttataaaatatgtacattaatccatgttaattggaaaaggtattttcgtaaaatttaaatgcacataatttgcttaaatcgttcttttttattaaaaaatttagaaaaatg

SEQ ID NO: 99264 - DNA, 149 bp, Heterodera glycines
aagtaagcgcagtgaatgaaaatcagtcattactttgtccacgaaatgacaacgcaattccctttaattgttcttctctctgccatttttctttagccaattttctctttttcagaatttgttcgcagcccaaaaacgaaagagaaatg

SEQ ID NO: 99265 - DNA, 421 bp, Heterodera glycines
cgaaatttgaccaaaaaagatctattttaagtcaataccttccactaaatacaaatcaaagatgcatttttcgaggctacaatttttttttcttcttaaaatcagaattaccgaccataaattgataggaaatcggaattccgtgtcttcctgacccatatatcgcatataagtttgaatatttagaatttcttgtaatattttttcattttttcgtcccacatctgaagggtattcatgtatctttttaagacacataggatggaattccgaggccctaaaactttgaatgtcagcggaatctaggagacctccaaaaattttttggaaatttgatttcaaatttccatccctgtaactatgtatatatcagtatccgttttttaaacaagaaaattcactttccactgtgcaaacaatg

SEQ ID NO: 99266 - DNA, 175 bp, Heterodera glycines
aaaataaaaaaaaattaaaatatttctaaaatggaaaaacattttagaatcaaccaagaaatgccgattcattaaaaattattttaaaagagaaaaaacatttaaaaataaaaataaattatttgaaatatttttaatttcaaattttttttagcatcaatcaagaaatacgatg

SEQ ID NO: 99267 - DNA, 74 bp, Heterodera glycines
tattaagatggtacaaagaatgtattacttgtcagcttaggcattctccaaatcctccttatagagcagaaatg

SEQ ID NO: 99268 - DNA, 249 bp, Heterodera glycines
tttatgacgtcatttgactcggctttcccttcgcttcttcaaataaaaaatgctttaatttatttctttctttttgctttgcttttgcaaaatttgcagaaaaagagcataattcaatcattaataatcattcacaattctcacattttctcctcaaattaatgttcaattttgtttcatttaaatgccattttctttttttacattttagcttttaattttattgctttttttaattgttgccaaatg

SEQ ID NO: 99269 - DNA, 505 bp, Heterodera glycines
ataggtagcttaatagcagcttagatttaactaattgttaggagactaagaaaaaagctaaatcctaaaaaatggccctgacgtactttccctttcttttttactttagaaaaaacaatacacttacagtatcaatacagaatattgcaaactgcggctgccttaaacacacagtgactattattgttcattggcggtttacattcacattatgctgctgccggtggttctgcttgttgctgggattacggtaataagtttggcaaaacggtacaattattggcccaatggaaatgtaaaatgtgaaattgctttcgtagttcgtttttgttgagtatcgtataagaaaaaataaataaatttaattattatttatctttatttgcttttaatttgttcattttcacccaaattgttcccattttcggccgatccctgcgggaattacgaagcactaacccaccaattcttcgaccacatttacgagcataaccatgacaaaatg

SEQ ID NO: 99270 - DNA, 129 bp, Heterodera glycines
tctcctgttaaagcatttgtatttaagaatgaacatggaaaataaaatttaaattttcaaaatggcacatttattaaatattacatttgattgggatgttgacaagggcgcttttttggttgacgaatg

SEQ ID NO: 99271 - DNA, 59 bp, Heterodera glycines
ggtgagggagaaaaaacccataagacaacaatttgtcactttagccaaacggagcaatg

SEQ ID NO: 99272 - DNA, 906 bp, Heterodera glycines
tatacgaaatctgccagctacggtaattgggaggttatgtaataaaatgaaaatggtaaaaaaaaacacttggtcctcaaattttgtttacgtactggtgttggaagctaaccttaaaagatcacttagagcttattaatagtgactgtttttttaatgtaaatacatattttttcctggcttctccatagcctaattagtaggaaaaacactttcttttttgagtttacgaacaaaaatcgcgatttttatttacatattttcggatttttgtccatatttccatattttaaatctatatttcggaattttcacaaaaaaacaaccaaattacacccctaaagatggaaaatttttggaaaataagcccaaaatcgaaaaattttcagaaaattaccaaaaactgcgcaaaaaatttttcatcagaaaattcgggtaaaaattaattttttgcaaaaatttactattttttgcttttttttaagtaaattaaatttttttggtaatgaataaataggaggcctcaattatcaaattatattatttatgtattaaaaatgattttttatttcttgaccggaaaatttatgggtttatgtttaaaaattccaaccaattttcagaaaattttgtgccaattttcgttttttttgtcagcgtttttgtccatatttcgtccatattttgcgatttttccgtccatattataatccatattttggattttttttgtccttataaatccggtccctacctattacatatgtacgtatttatatatatatatatatatatatatatataatatatatatatatatatatatatttctagtttggtatttctgtaaaaaatatacattcctaaaatctgtttttgagttcagcccccccccccgaagccatg

SEQ ID NO: 99273 - DNA, 570 bp, Heterodera glycines
attttttaagggcgacagtggcagtccgttgctaagcaaaattggtgacaagaattgggtccaagttggtgttttatagagaccggaccgggccgggcccggtaccggtttttaccgggcccggaaaccggaaccggtgatttttggaaaaatccggtttgaccggttttccggtttgaccggtttttgagagaccgggctcggaaaccggtcgttttttaaaatgtaacccggcccggaaaccggccttttggaccggttttgaccggttttataatcaagccaaaaatgtttctttttgttcatttttctttgaaaatgtctttttggcataatgtttttaattttttttgtcaatgttcaagttgaattttttaattctaatgtttgcttctttataattattaaataatgtcttttttgtttagattttatgcaaatgagtttaatttggcaaattggcctatttaaaaaaacgtccaagactacagcaaaaatgaattgaaggaatgggaaattgataatgacctcgatgaactacaacaaaatgaatttgttcgtcctgttatg

SEQ ID NO: 99274 - DNA, 92 bp, Heterodera glycines
tctacgatgcgagtgcacacgccaagggagtcccttccctcaacgactgtttgttgagagggccggtttggctgccggacctggccggaatg

SEQ ID NO: 99275 - DNA, 873 bp, Heterodera glycines
aaatttgatatttttcaaattaattttttcgactatttcattttgtgagaatgaatattttgataaatttttgtaatttaatttaattttaatataatttttaatggtaatattacctattgtaccccgccccctttttttcaaaaagcaaatttttctaaaaaaaattttaaaatagttgttttataagttttcaggatcggagaatagtagagttatccccctcccatgcataaactatccacaagggtaaatgtgcacattgaattgattttgggtaatacttgaatttttggaaaaaaagaattttaatttttgattattttttcgcaagaatggggagacaaaaaattcaaaatattttaatttctgtagagggattgaaacaggggaaagaagaagggaaaagtcaaagagactagccactagaccatttgcacaatttgtattgtttctttgaaagaatatatttatgattatttcttaattttttccttttaactccaattttcatcactaatttttcactcagaccccattcttaccagcgcttgtttttcccggttcccggttgccctaccgggaccgggacctgagcttttcaaaatccgggaccgggaaccgggacctcggatgaccgggaattcccggcccggtcccgctctactctatccaaaattcaaattctaatctagatttatttatattacgccaaggcgaaaaattcaaaactaaaggtgaggattattggctaactcagctgaattttggtgtctcaaacctcaacaaaaaatttatgctgcctaaattttaaaaaaacggaaatctgctgagaatttttcattttatttttgcagcatataagtgcaaatg

SEQ ID NO: 99276 - DNA, 178 bp, Heterodera glycines
ttttagttcgtcgctcctctcgcttgttctcccttttttgccttgctcttttgcaattgagcttgtgtggcaaatttcttttagccattaaacaattaaaaaagtcaacgaaatctttaaatatgtattacaaaaaaacaagatagaaaattattaaaaccttatagaacattcgatg

SEQ ID NO: 99277 - DNA, 579 bp, Heterodera glycines
  unsure (1)..(579): unsure at all n locations
tttataacaaatatacaatttaancatcatcggcatataaattttattttcactcctgatggcaaagcatcaggaagatcgttaatataaatcaaaaataataaaggtccaaggacagagccctgggggacgccagagccaacttttttactggaggataaatcatccccaattttaacacgaaaagtcctattactcaaaaagtcctttatccacatcaaaagtttgccccttatacctattttttccaatttgtataaaaataattcatggggcactgagtcaaatgctttttgaaaatcaatataaatacagtcaacattttttccatttattattgcctcgtaccaatcttccacaactgttattagttgactcgttgtagacctattcctaacaaaaccaaattgaaattccgaaatttttttgttttttaatagaaaattgtaaatatttttgcttaaaattctttccataaccctgcatagtgagcaggttaatgaaattggcctatagttttcgggattatttttgtcaccctttttaaaaagcggaaaaacaattgattctttccagatg

SEQ ID NO: 99278 - DNA, 1003 bp, Heterodera glycines
ttttgttttttccttttttaagaatttaaaaaataaaagtatttttaaaaccaaaaaacatttaaaaaaaaccacggttaaggtctcaaaaatggaaagtcaagaatttttttaaattttgttttttattttttgggtaattcaatttcgttttcatgtatggtcgagtttccttttcttaaaaaaaagtttaggccgaataaaaaaaactggggccgagaccgtgactttaaagcttgcatcgagctcagacaggattttgtaaagcagaaaaacgttggaaaattttctgatcataaaattatccattaaataacatttgttttaattgttaaattcccggctttttcccggttttcccagccaaaaagtcccggcttttcaacccaaaaaggtcccggtcccgggtttgcccaaatttcccggtcccgctgcactctagtttaaacagttatgacacaattttttttgcctgagccaatcaccaaaatctcaatatctgacagcctcagatcagtttcaaacatttgaatttgtcaccacaattttaaaaatggaaatttcaaaataattcttcgaagatgaagaatttttcctttaaatttttattgaaaatagactaaaatggttttgaattttcatctttaaattcaattatttttcccctttcaaaaaattaaatttaaattattcaaaaaagagaaaattattaaatatgaaaattaattctgtgttgtcattcctattttcgtttgattggccaataaattttttttaagataaacaaaatgataatttaacgaattgaatgtgcatgcttttttgaataaattatagcaattatctgctgaaggaaagaatgatgaattcgaaaggtataaataaaaattggtgccaaattaggcttagccattcattttttctaacaatttataaattattttccattcattctttttccaataatttataaattatattaaacaaaaatgctttagaaatg

SEQ ID NO: 99279 - DNA, 1003 bp, Heterodera glycines
ctgctgcttggtgatcataaatttatttattgaaaattgaattcatttgcttaaatatgtaagaaataaagataaatatcggattgatatcagataagcacattcttttaacattttgaaatgttgataagcctcgctttaactttaatttgtacaattatttggtgatttgtcttttcactaactcgatttaataatggaattttctggaaaaattgtcagtatttttttttgttcataaattttatcagcactgaaggtttttcttcaaaaaaaaataatttaaatttgatcctaaatatttaaaataggtcatttttgggcaaaatttgttaaaaataattttttttcaatttttaaaaacttttcttaaatttttttttcgctgttgccagagatttaaaccagcaggcttcaaattttcaaaaaaattcagcttaaaacacgaaaattttttctcctcttctttatctctccttttgcattctctctctttcactctcccaaaattaatttacagacaattatcattaatcattttgtcacatgacactgccagcaagagaaaattctcgaatttttttatgcaatgcatccggccttgaaccatttgggcgcacaataacaaaactaaaatcactcagagaacagcagccaatcaaatacaaaaactggtccaaaaataatttaaaataattaattagcatttatttttggtgaaaatgcaagcgaaattcatgtgggcaacatcgatcaaaaaattggaaataataaataaaatataatttagttattatgaaaagggaaacagttacgtaattctcaaatcgaaacaaatattaattcattttattattagattagcttgctttctataaaatttatttcaatgaaaaaagatgtacctaaataaagttcaaaaaataaattatgctgagatcaattttcagtaatttcaaaaataatttgccaaattattttttcagaagctttttggtacatg

SEQ ID NO: 99280 - DNA, 301 bp, Heterodera glycines
atcgagaagaaggaccacctgttggccatcagtctgatccgcagagattcggcgcaactgaccgtgggaaaatcattaacccaaagacgggccgagagtttatcgactcggacctggcctggtcaattgaacgcctggtggaccctcgcccggagaatgccccttcgccacgcggaaccaaagagttgaagaggaaactcgcacagaatccgcttgccagtagcctactcaatcgactgtttgttgggtctgggttcgtcggacaagtcaaacaaaacgggcgttttattccctcaaaatg

SEQ ID NO: 99281 - DNA, 138 bp, Heterodera glycines
gttttttcagaatattttttcatagcttatcaatctttctttctaaggctaatatagcctgtaaagagctttcgaatgtacaaagattgttaagtttgtttgacaaagaaaaaagttataagcccagaagcacaaatg

SEQ ID NO: 99282 - DNA, 145 bp, Heterodera glycines
aggtcatcattttgccgaaaattagttaaaaatgaaggaatggtcatttatttttatttctctttttattctttgtcatttattcaacagaaacatttttcttataaaaagataaaatataagcttgttttatcaaacaaaaatg

SEQ ID NO: 99283 - DNA, 457 bp, Heterodera glycines
agattttaccaaaggttaagagtatattttgtatttgggtgaggttttcctaaaatattggttgaagagggtttcgatgttgtcgacaggcgccgcagaatgccgatgggcgccgtcgacagaaaattttaaaaagactggtctttgaaatagattcgttaaaaattaaattttacttgaaatgtccattaaatatgataataaaggacaaataaatcacttcaagaaaaaaaaaaattaacgaattgatgccgccgtttcacagcttattcgattttacgtggatattattgactttataaaaataattgggtggaattatgtaatcatataaataattaaaatggcttttcctatttatttctgccgctgccaaatgtaaatttttgctaattaacttttttaatttgtgcgaccattcattaatgaaatgattttaaaatttgttgttaaaatg

SEQ ID NO: 99284 - DNA, 93 bp, Heterodera glycines
aaataataataataattcggtatttttttaaacatttattccccaattttatttgcattttcttagcttttgaaagcgcacaaatgcattatg

SEQ ID NO: 99285 - DNA, 405 bp, Heterodera glycines
aaaaagggtggcatacaattaactatgattaatccaaaaaaaaactattcaaggactatatatttttttaaaagttactttcctttttttgatcaccacagcattttcattacaaaaagaccaaattgaattgataaaattgtttttaatctctgtttgtttttggattgtaactttgttcattgtcgaccaaatccaataatcatggtatcattcaaaagctttacactttagtatgccatgctaaagtttcattatttctttgattaatctattggaaactatgccgaaaaaataggagttttttaaataaacaaattgcaataactaaatgttaattgggcttttaaatttttgcagaatggccaccgctatcagctggatgcctttcgcaaaggtaacatg

SEQ ID NO: 99286 - DNA, 907 bp, Heterodera glycines
tgcttaagtgcatttgctttatgattattagggctgggatttttatgttttaacatattttttttgcggcttagttatggcgagagaagccctaaaatagcattttctccgaacaatttttgttttagagcgacttataaaaacataaaaacacatattttggcgttttggcacataaaaacatatagcacatatttgggctattttggattttttagcacatattttggcatttttgaaaaaaatcgtaagaatacaagaaaatctgaaaatgcaccctaaaaattgactactttacgtttcttaagcatttagaaaatttctttatatatttaaatgcctaaagcaggcaaatcaaacgctgtgttaaatcgtcactggatttcaaagttcccggaaggaacttattcaactgatggaaaaattaatccgggactttacaaattgattgatatcgccaaaattttgactggcggtcgggcgaaaattgataaagactgatattaaatatgatttttttgcgtaaatacacttggttttttcaatttttagcacaaatttttgcattttttaacacatatttaggcctttttttttggtttttagcacataaatcccagccctaatgattataggttctattgtacccgttctgaccttctgcggtggccatgaagcgctcagtagtgctgctccctcggacacgacatcttcataatgtatcgccagttgccggtagtccacttcattgaaggaattgaaccgctggcagagtgtgaccaactatttggtgaggcacatgttttaatttttacatttttgcttaaaacaaaaacttgatggaaagcgatgtttcatccattttagctctatttgagttttccttgctttttattaaatgcaaatg

SEQ ID NO: 99287 - DNA, 93 bp, Heterodera glycines
tttttggagttcgatttggaaaaaatattagaaaaaatcatcgaaatttgaatttaggacagcgaaaggtacgtggaacagttgctcaacatg

SEQ ID NO: 99288 - DNA, 91 bp, Heterodera glycines
tgtattggggtggcatcaaaaagtgttttttatttaccatttcacattttatgttcaggccgtttacacacaattggaaaacattggcatg

SEQ ID NO: 99289 - DNA, 311 bp, Heterodera glycines
aaagtccagcaaatttgggatgtttttgcgcgtgaaatttggccattgttgcgcccaacattcaccatttggactttcccgatgaccatcatttggacaatttgcgtcgtctcatttcgccaacaattctcgccgatctcgatcagttgaattcaatcgactccgatgatttattgcccgattcaccagctgatgatggaccaaatgcaactgttggccaagtgctgtcaaattggttgaacactccgcgaaacgatggaaagccaaagcaattgcgttcttgtgactattgtcatgtgtcagaaaccatg

SEQ ID NO: 99290 - DNA, 449 bp, Heterodera glycines
gtccgaaaattattataaattactcattttctgaaaaatttttcaaaaaaagtttttagaattctttttataaaaaattttctagattttcaagaaaaatttctaaatttgagtttctagtttaaaaataccaaagattttttttttgcaaattttttaaaaggtttcggctacgaaatttgtccaattccaatcagttcaagccgtttttttttacaaaactaaaattaattttcccgactcatttacgactgaactgactcaacaaattggggggcaggaaattgtacaaaaaagcgatgcaagcggagattttccacaacacgcccaacctggacgtgttggaagcggcggtggaggaccttttgctgctcgagtcaacggcgccagcagttgcttctacctccccctcggcctcggctgtcccgggcgacgatggtactgaaatg

SEQ ID NO: 99291 - DNA, 389 bp, Heterodera glycines
ctcccggcccctgtcccgttttttgctcagaccactgggaatcccgatctcgggatcccgccccggttcattttccaattcagggccccggtcccggcaatcgaaaaattccgatttctactatttactatttttccgccgccccctcaaaggggagcaccattggaacaggaatgaatactgtaattgagggtggggtaattcaatagatacggtaattgatatttagctgaaaaatttctaaatcatttaaaattgtaaaaattttcttcgattttttgaagatgatgcgctgtttttggggcatatgccctctgccctcgtcattctccgatttgtgggaccgtgccgccggcggcagttgcgccacccatttgcatgccaacatg

SEQ ID NO: 99292 - DNA, 1003 bp, Heterodera glycines
gtcttacaattagctaattgctaactgtggctctcttttcggtttttgatttgttgtgattagagaccggaaatttcaaatttgcggatcccgctgcgggattggaactcaaaattcaattacttttatggctttttggaatatatatatttttacattttattttggtcatttgcatattataccatgatgcaaaaaagaattcattttaaatgacctatttaccaaactcacgcttaattaattagtaaaaggaaaaacatttaccgtaatggacagccaaaccaccgtaaatgcctaactattgcatctcacgtaaatgtctacgtaaacagtcgcacatatgccctccacaatcagcacatggccaacaatgttgatgaatgcaggatagaaattgtcggaatgagtgtgccaagttccaaaatgccatggcataagcaacgaaaatgaaagtgccgctgatttcggtgccgtttgaagatgtttcaaccattttcatgaaaattttgtttaaaggaaaattcaaacactaacaaaagctaaatataaaataaaataaaattattgccattcggacgaatatttggttgcaaactgtcaattaagctaattttgttagctttttcgtcgcaaacgcaaataaaattataattaaatttttgttatctcattaataaatgtcagatttaatagatgagcacagaatgagaattgttaaaatcaaatgatttgtggtacttaaattatttatgtcattttaaaatgatatttgaaattagaccatgttttaaaaaatcggtgcaacaatttttttttattataatttttttagaagtttaaaatacttttaaagtaattttttgctcttaatttaataataagaattttatttaaagccaaactgtcaattatactaattttatttcttgtttattcataaacaataaaaaagtcatcagaagggcgagaaccacttactctgacgactgttcagataatg

SEQ ID NO: 99293 - DNA, 696 bp, Heterodera glycines
aaatcagaaattcacaaaatccattccaattgccaaacgcgaaccaaatcccataccaaaacgaacaaattcgttattttggtaaaaggaatttccaaaattcgtgttctcttttcaaacccattccaaattttgcaccaaaatcccagggtttcgtctttcctatcttaatttgggttgatcattgtgccattgcttttcaatcccttaaaaaatcaaggatgaaaaacaccaaattccaagtcgcaaagacaaacggcctctaccggttcggagagctgataaacgaggctatggaagaagtgaaagccaaaaatattttgggttttcaacaattggaaaaattaaaaatggaaatttttgcaatttttttttgcggtgtgtaaaattttatttgtgggccataactctttcctcaaccgattaatatttcttaaatttaccatatataaaattttttggaattccataattgtttttcaagggtttactatacggaaacggaaatttacatgtaaatgaaattattttttaatcaattatttacgattaaaaacaagataaattgcaattaatttgataatttctactttatgaaaattttttttataaattacataatatatatatatatctatctataataaatataagctgaaaacaaaaatcatttgatttttttgactcaaaaaaatg

SEQ ID NO: 99294 - DNA, 251 bp, Heterodera glycines
aatttatttaaataaaattatttttgcagcaatcggtccgagaataggtgccactgttttcaccacttcaaattcattcttgacaacattgtgcaagtaaatcagtctcgataattaattaaattgtaaaaatgaattgtttaatcatttgcaaataaatgtattttaattttaaatttaaataaaaattactaaattattatataaatataatttaaaaaaaaatttagattactgtggcaacgagcatg

SEQ ID NO: 99295 - DNA, 150 bp, Heterodera glycines
  unsure (1)..(150): unsure at all n locations
cataatgtactgtttgcatatggtaacaaagcaaatattaaatacgcactcaagtacccttntaaagggccaggacattgttatgtcgagtgcaaacaagagtccggcaataaaatcggaattgatgagccggctcaatatgccaagatg

SEQ ID NO: 99296 - DNA, 54 bp, Heterodera glycines
ggtgggtccctttggcttctcaacccattgaaatggcaattgctctttgagatg

SEQ ID NO: 99297 - DNA, 1003 bp, Heterodera glycines
ttctccccaaaatattccttctttcgtcccgtcctttcgcaaatatttcggccctttcctttgcttttcctttgccaccaatcgatcgatttacggccaaaattaaaataaataaacgattaaattctataaatttctcaccgttttcaattcatcctaatgaatagggcgaggatttttagttttttaactatttttctgcggctttatttcaacgagaaatgcacgaaaaacacatttttagctcggaaattcttcgttttaacgccactattcatcactaggaatcactattttggagctttgccactaaaaaaaatttattttggaagttggccactaaaataattttttgccactattttggcgtttcgtcattatttttgccactattttggcattttttggaaaatttcccaaaaaatgcaataaaaacgaaaaatacacccctaagaattggaaaattttcacaaaaattcttcccccaaattttttttttcttgttcaatatttgctaagaaaatattttgtaactgcaatcagtgaaaaagttgtttgccttattttaaattattttcaaattaaaaaacagcctatttaaaaaattacacccctaaatttggatcttgttcgccactatttttgccactattttgccatttttttgtcactatttagttaattattttgggattttttgccactaaaaatcctcgccctattaatgaatgccaatttgcattatccccgcgagcgattcgttgccgttgtgggccacgaccctttccattgccttcgctgtttctccatcgccgttgccatttggaacattgtgagcggattcaattttaatcattattaacttttattaaaattaattttgtttctttcgcgtgccattctcatttccaattgtttttgcattttgtctcatttctctgcagttgtactgtttgctccaatttgccctgctcggctggcaagttcaggtggtcaaacaatg

SEQ ID NO: 99298 - DNA, 871 bp, Heterodera glycines
taattaaatttacaaaattaaatattgttttccaatttagctgtttttagaaaatcttttattgtgacagggagcaattcatttccccttgaaaatgttttattgtttaattttcaaaatccgaatttttttaaatcacagaaaaaattttctagcgattttttaaattttatgtttattaataagttttttaaaaaattttcaaaacttttttgcttgaattttcttataattttttttaaaatataagtttggcgaattttctttttactgcagcgccattttaatattttttttcttgaaaataggcatttcaacggctgccggcattgcctacaacacatatttatacgccgtggtgcacaagaaacactacaaaaaagtgacgtcatacttgcgcatggcgacaatggtcggcaaattcttggcattctgtgccggccaagttttgatcagcacgggaattggcgattttatgctgcttaatcaggtggcataaatggacatctaaaattatatgatgctttaaagaatgataatatattttaatattttctaaataaacaatttatttagcattttcattactaataatttaaattgatttataaaaattcttttacctattaaatttgaattatttattttttcttaaaaatatattttacagaattattatcattaaaacagatgattttaatttttaatcctttcaaaatacggatcatttttagattttttaaaattccttatttcaaatatatattttatttttaatttaaaaaactcataataaattaattagttaattaattagttgactctgttggtctcctcctcgctgattcccatcgttcttttgttgccgatg

SEQ ID NO: 99299 - DNA, 950 bp, Heterodera glycines
tcagcccctataaatttattttcagcattttttgatttttggaaattttttgaatttaattgaaattttttcgaattttccaaaatcccgcaatcccgcacgggatcccacaaatttaaatgcgggatttgcgggattaattccgcgggatcccgtcccgcaaaaaattttgagttccagtcccgcagcgggatccgcaaatttgaaatttccggtctctactagaaactgcgtcaattgattaaatttgatatctaaccgaaattatgtgatgaaaaaaattttggaattaaaaaaaatttgaaaaaacttcggcttcggcttcgaaaacttcgggttttttgggcttcgagcttcggacttcggcttcgaataaaaattgggcttcgccttcggcttcggcttcgagtgctaagccgagcttcgcccagccctggttcggatcccggtgaattcgatttagtattcattaatttttattaaaatattaaaataaatattttttagaaaaaaaaattgatttatccccctggacgataaatagagacggggagattatttttcaataatggagacgggcgatatatctactcctttgaattttcataatacaattgtttactttgttttggaccgtaggcactgcttacaaaaattagctgcccttttttatacaaaatttgtacaaaattacgatattttggtgtttgttatgctgcattcataacattatccgggttttaaggcatttttattccgcgttcaatctaatagaaaattgacaaattattcaataatcttttggcatcagttttttttcttattttttgtgtgtaatttatgcattggttgtctgctggtgtctgtcctgtcggagtgacggcttttaactggcaattttagccaaaattcatcaatgatgcctaattatggtgcggaaaggaaaaatg

SEQ ID NO: 99300 - DNA, 110 bp, Heterodera glycines; identical to SEQ ID NO: 98226

SEQ ID NO: 99301 - DNA, 760 bp, Heterodera glycines
ccggaaaatttaaaaaaaaatcattttttcgccaaattttctcgagaatattgaataaatttaaattttcttagaaattaataaatttatgtcaaaaataagcaaaaaagcgaaaatttcgcttttgcggttgattatgcgctaaaaattagtaaattttagttttatcgtgttttttttcttctaaaatgatttttaatacaatatgtagccatttttgaaagctttacttcgcgtatagcgaatttgaagaaattttgggaaattataccctcaatttggaaaaatttatgtccttatttttgccattttatgtccatatttcgcgacttttggtccatatttatggccatattttgcgattttatatcaatataattctccgccctaatgataaattaattttggtaggcgatgtcgacaggcgccgccggatgatttttgaaagttttatgccatttgttaagagatttggcacaaaaataagcaattttaacacaacaagcgccactcctcatcgtgcaaaacattcgatggcattcacttgagccggacccaaacactgccgcactcgcggagcgagaacgacaccaaagttgcaaaaaaattgggtgtttcggtacaaaaatgccaaatacagaactcgagtccggaattttaacctagatagtctttaaacatatagcaaagaattgctattatgttagctttcccgaatccgccataatccctgcgtatctcagagccggattccgacatg

SEQ ID NO: 99302 - DNA, 247 bp, Heterodera glycines
attttatttcaaatctattcaaatgccgaaaagccgtcgcaccaaaaaactcagtaaagaaatgcttttctcaaggacatccttaaaatggcacatgacagcttgtgttatcggaaaaagtgcttgttgttttgcttttttaatgatttcggatgaatgctcacatatcacagtatttagggctccatgggatcaaactcaaacataaaaacatttaaaaattaaaattttcagtaactccccaatg

SEQ ID NO: 99303 - DNA, 107 bp, Heterodera glycines
cgcggcgttcctcgcgctcctcctcctccgcctctttctcttcttcattttcgtcctcttcttcttcctctcattcaccttccgccaaaaaacaaaagaaagaaatg

SEQ ID NO: 99304 - DNA, 770 bp, Heterodera glycines
ccccccttttttcttttcctcactttctttccattttcccctctccgttcctcgttttcttctttttctcatcttcccatcgtcctcttttttccccttatcctttcctctttttctccatcctttcctctacttcctttttctcctttccttctcttccttttcctttccccacttcctttttcttccatttttacccctctcttccccccccttcttttcccaagtccgtctgcccatttgatcactttcccctccctctcctcccccccccctcaatcattgcgggagctgcgcctcctctcctccatgtatcctccgattcctatcgatcaatctcatcgctttcctttcccttcttcgagcgtggattcgctgctccttttgctttcctccggtgatcgttcgttgtttttcctccctccgattgacttgaaatggatgcctccttcgttcgcttttaggcagggataggtagatcattatgcgaccaaacagagctaagctgtccgtttaggcattcaaatgcattaccgttcccatttcttcccatttgtcatatgccctcatggccgtccaccttgcgctttccattgtcattctctgtttcatcagaaacggcgacgattctttttgcttccgctctcattcgcgattctccgtgcttgcgcgtctgctccgcctcagtcattcgctcgtgagctcaccactacggacacttcagcagctgctcaaggttcatgtaccgttgtgaaaaggacgcagagatg

SEQ ID NO: 99305 - DNA, 160 bp, Heterodera glycines
attgaaagggtggttgcggaggaaaaagggaaaagacctccacgagtatggttttgtgaaatggcgtgggtacagcacacctttcaacagctggattccactgaactcaatcacgtcgaaaaacatataaactgcaaacaaatgaaagcaactaaaaatg

SEQ ID NO: 99306 - DNA, 875 bp, Heterodera glycines
aaaaatagatttttttgttttcggggcagtccccccgaaccgatgcgcccatatttatggggagaccgaatccttcgggagtagcttccctatagcctgtactttaattctgcgttggatttttgctccccataattgtttgagtaccccaaacggacacttgaaaaaatcgatttttttgttttcggggcagtccccccgaaccgatgcgcccagatttatggggagaccgaatccttcgggagtagcttccctatagcctgtactttaattctgcgttggatttttgctccccataattgtttgagtaccccaaacggacacttgaaaaaatcgatttatttttgttttcggggcagtccccccgaaccgatgcgcccagatttatggggagaccgaatccttcgggaatagcttccctatagtctgtactttaattctgcgttggatttttgctccccataaatgtttgagtaccccaaacggacacttgaaaaaatagatttttttgttttcggggcagtccccccgaaccgatgcgcccagatttatggggagaccgaatccttcgggagtagcttccctatagcctgtactttaatttttgcgttggattttttgctccccataatttgtttgagtcccccaaacggacacttgaaaaaaatcgttttttttgttttcggggcagtcccccccgaaccgatgcgcccagatttatggggagaccgaatccttcggggaatagcttccctatagcctgtactttaattctgcgttggatttttgctccccataaatgtttgagtaccccaaacggacacttgaaaaaatcgatttttttgtttcataaatatttttttcagaaagtcatg

SEQ ID NO: 99307 - DNA, 167 bp, Heterodera glycines
gcacctcacgcatgtgaacggaatccaagtaacgtcgttgcgcaaaaagtaacgactgccatcaaaaggcgtgctgttgagacgatggaagctccctctgtaatccgtgccgtttctcttcaaagcattagttcgcctgcactttcagaagtgccgtcaaaaaaatg

SEQ ID NO: 99308 - DNA, 341 bp, Heterodera glycines
  unsure (1)..(341): unsure at all n locations
tctttttaattatttattggataaatttattgttgcttttgtgattgattttaaaagcatgagatgcctaatttcacatacaattgtccctttgttcgcaaaatttggaagtgcaaaaaaagaaaaccccggcaccattccttttcgtttccaacagtttgatgttcatatagtaaatgatagaaaaaaatagccataaaatactcatatgtcatatataataccagtgtgttgtagcctgaaagatagacataacagataagacatatgatatctgagtaaataatcttaaaattataanntttattatatatannaaattcttatttatgcataaaatg

SEQ ID NO: 99309 - DNA, 233 bp, Heterodera glycines
ttttttataatttacaaatgaataaagaaattaaaaaaagtaagtttgatgaagcattgattaatttttaaatataagaaatttaaaaaaaagataatgtttggtgaggcattgatcaattttttaaacataaagaaattaaaaatgatacttttggtgaagcattgatcaattttttaaaacattaattaaataaataaatttttataatattaagaaataaaatacatatg

SEQ ID NO: 99310 - DNA, 72 bp, Heterodera glycines
ttattttttgtccaaaaaagctaaaaaaatttttttttaaatttaagtttataaattattcctgaccaaatg

SEQ ID NO: 99311 - DNA, 63 bp, Heterodera glycines
acttcaagaaaatgtaaaggaatttaataatttaaaatatatttcttatttttagcttgaatg

SEQ ID NO: 99312 - DNA, 51 bp, Heterodera glycines
aaagcgtttgaatttttgtgtatttctcatcagttgaataaatccataatg

SEQ ID NO: 99313 - DNA, 121 bp, Heterodera glycines
ggcaagtactttgtctttaattttagttcgggagcttaatttattctttaggacatctggtacaagaaagtccaaaagttttctgtctcaaaccgtttggtctcttctccgtgttcccatg

SEQ ID NO: 99314 - DNA, 369 bp, Heterodera glycines
aattaaatttgccttttggtatggtaattagtaggaccatcgtagtagcaggtaaaacaacatttttactaaaattttcgagagaaagagatcgaatcgattagcccacacccaaaatcagtgctttatcgttacggtcaatttaatcgatagtattcctcgtactacaaaaaatgggagtgcatcgtgcacaaaggacctcctagggacgaattgctgagctctctaaagaagcctctcttattaattctagatgaccttttaacaataattgatgagaaaaacctatctgaattattcattaaaaaagctcatcatcttaatatgggtgtgattttcataacccaaaatttatttgaaaaaaagatg

SEQ ID NO: 99315 - DNA, 283 bp, Heterodera glycines
cccacttctttttaatactttcctttccgtcgcgggactataaagagcagccgcgaaccgggacgcctagttatctatatataaaaataaggggggggctaaccacaaaacgacctggccgcaagcgaatatcgagagttgagcaccgagaccggtaccattcgaaagagctcggttttctctacaattctaaccgtgtggaaaaattagcgacaagcagacattttcgagaaaatcgcgttcgaacaaaaaaaacccggctttttacaactggccaaaaatg

SEQ ID NO: 99316 - DNA, 155 bp, Heterodera glycines
ggtaaaaatctggttgctgttgtggatgtacttattttcggcatttttttttactacaagagcttaattattgttttaaaaataaatttggggtttgttaccattcaggggacataaccagtgaacatggaaaatgtgctcataaagtgatcatg

SEQ ID NO: 99317 - DNA, 170 bp, Heterodera glycines
ggtcagtaaaactaatgcatttacccagttttaattattctaattgtaaacctttgttttaattttcaactactttgcaaagccttttttgtctacggctcactgtcttaataccctgttataaatttaattaattttttttatttgatatcttacactttaagattatg

SEQ ID NO: 99318 - DNA, 338 bp, Heterodera glycines
ctcaactaattgtaaattgtgaaataggatggacaattttctccattccatttagtgtgttagttctaaggttttaaaaacactaaaattttctattttatggcagaaatctttaaaaataggtaggtatgtaatttccaaaactaccccttttccctttactatcttacaaaaaccaccgacgatttttggactgggttgcaaaaaagaaagtctttctaaaattagaatacgattttatattctaggataaaaatttactgattacggatctgaacacagaattcgaaacatcttgaatttgactatgattttttacagatcgatttctgaaaatg

SEQ ID NO: 99319 - DNA, 248 bp, Heterodera glycines
ccttacaataatgcgagggaaactgtattattaatttcaacaatattaaaaatatttatgtaggtaggataaaacggaagaaacattatggaagataacggtcaatttatgatacttttattatcaaattatatttttcaaaggattcctctcgagagcataccgcggacagaccaccgccggaaaggaacccgcggtgatttgccgggattacgaattaaaccaaaaaatttggcatagccaaaatg

SEQ ID NO: 99320 - DNA, 120 bp, Heterodera glycines
attttttttgaataaattttcaaatgttgtctcttttttatttatttctttggttttttgtccttaatattttttaacgtataaaagaaataaaaataattaaaaataaaattaaaaatg

SEQ ID NO: 99321 - DNA, 574 bp, Heterodera glycines
gagaattttcagcccaatgtaatgtgctttatctcatgtttatagcatgagtttaaaaaaagttataaaattaattgtgattgtgaaactcaaaaccataggggggaccccatggttttgcatttcatgaaaatattttgtgctcatatgtatgtcaaaatgcatgtttatggcataatataagaagatgaacatggatatagggtattttttcagtttcatgcttttgcgaaggttttgttagttttccgatttcacataggcatttgtttaactcgttttccttcacaaaaccccttaagttttaaaattttacttatctaattttgtccaaataaatgtcataaaatgtgccactttcatatgcctacataattcttttttaagaaatacttgaaaaatttcacttttttccacgaaaaaagtaccgaattttctggtgcttttactcaatgtccccatcttttttctctttgttaaaatttatttttttttatgaatttttgaaggaaaaaaacccactgaactgaaaagtaccaaaaactgtcttaataatttgcctcaacaaaaaatg

SEQ ID NO: 99322 - DNA, 101 bp, Heterodera glycines
atcgctttgtacgctttttttgccatttttctccacatcggattttgtgtcaaaattgtcattttgatttttggcataaattttataactctcgggacatg

SEQ ID NO: 99323 - DNA, 57 bp, Heterodera glycines
tctgaaaaaaacactgctaaaaaattgtcgaacagtctaaactaaattgatgaaatg

SEQ ID NO: 99324 - DNA, 958 bp, Heterodera glycines
tatccgtccatttttgtacaaatttcttttgcgccaatttcgtccgtccgtcggttggcgcacaatttgcaatttgcaatttccattccccgcccaaatttcaccttgaaaatcagccccaaaattggcgaataaatgtgaagagggggacaaacaacacacaacacaaataaataaataaataattgcacatattctgtggatggagttttgattgggaagaaaattgaaaattttggaagaaaactaaaattggcaaaatttcaacaaaaatattttttaaatgaattttttaattttaatattatgtagttgaattcatttcattttttctgtttgcattttatcaattttcaattagatcaacaattcttatttgtactcattatctattaaataattttgatttttatattttatgtagaaatcaaaattttacaattttgcttagtaatttatcgattctttatattatatcagagttcccaagttttttttttcaaaataagacaaaatggcctaaaaactaagattctgaccccaaaaataagattttttctaaaactaatatttgcgtgaaggaaacgcaataaaaacatgaaaaattgacttaaaacaataatcatgtttacgttttggtggcattttgtgaatttcactcaaaaaatgaaataaaatgtaatttttttttaaaatcaaattaattcaaatattcgcttcagaaaaaaatgaaaaatcaaaatagtcattcaaatttttcattttttattttcaaatccaaaaataagcacaaaataagcacgtaacgctgaaataagcacaaatcttagaaataagcacatttttactttctaagatccgacccctcaaaataagcacaaatcttagaaataagcacacttgggaactctggtttaatttgatgaaaaaggaattgcggtgcaattataaaacaatg

SEQ ID NO: 99325 - DNA, 901 bp, Heterodera glycines
aatttcgtaccctttcccattttctcttcctcttccttttttatttccatcgcttaatttgcatttgtttatcgctatttcactaaaattcaaatgttctttgtccacccgattggggctcttttctcagattcccattttttgccccctctttgtcctattcatcgtatctcttcgccatcaccaatcttttcaaatttgtgcttccccttcgccttctcatcgcctatcgcaggtgccgacccattcacatgttttgcattttttgtctccctgcccggggcctatttaaccccccggctcctcttctttttcttccttctgttttttttgactgatccatttttcgctccccttttttccttatctttttcgctccccactttgctctctccgattgttgtttatcctacggcaaataaattgtgtttgttgaccgctcctttggtcgcggcaaattcccttccctcccttcggaattgccaacagcaaatcgtacaattggggccttcctctgccccttggtccgttctcgaaaactgcaactgtcgaacgggatcggatctccccgtgatccgaggctcacttcttcccttcccaccggtgaacgagtcgggtcaatcccgacggtcgcagtttggagtccactcactcctcccttgagtggtggtgccgtttctttccttccctctttgtcccgccctccctcttctcctttctcggccccccttgggcctcaattcgaaaggggtcgactaagccgagaacgagggcatagaacccggtgatcacccctccctttgatcaccaggggttttcggacaaactggtgccgctaacagggggttacctttcttcggacaacgccaacttcggacattggatttcggacgacaaaatg

SEQ ID NO: 99326 - DNA, 190 bp, Heterodera glycines
tagtcggtagcgcccaacgtcgcggaaggtttaacttaagcttaagctaatttttgagttcatattctattttaaaaattttaaatttaattttatatgttataaattttttaaatttaattttatgcgtaattaaatactatgtgaacatcttcattttattcttaactgcttcatctaagcaaaaatg

SEQ ID NO: 99327 - DNA, 363 bp, Heterodera glycines
tttagaaaatactaacttttaaaaaaaaaaaattttctttattctttttttgtgcaattgtcatcatcacattaaagaatgcaatttttttaattaattggaatgtttgaaaaaaaagaaaaatatgaaaattttcaaaaattcctaattttggactaactgttttttagagtcaaaaatttttgaagcaattctgaaaatttctttcatcttccaagcacgaacctgttatacatgttagttgtctgatcactgatcacatctctgatcataggatttattttttctatgaatttaataaataattaattttcttaaatctgattgaataattaatttaccacaggacattgcattcgaatg

SEQ ID NO: 99328 - DNA, 1003 bp, Heterodera glycines
aaattacgggcattgaagttcttgaaatttgaattatcaataaatcagcaaaatttagttttttggttattttgttaagtaattttccaaaaaatgtcgaaatagtgaaaaatagtgacaaaacgccaaaaaagtgaattttcactattttagtgacgaagcgccaaaatagtgctttctagtgaccaataatgacggggccaggacgttttcgcgtggccgttttcgcgtgagggacgttttcgcgtggcccgttttcgcgtggggtacgttttagcgtgagtgcctattaggactgaaattggtcggatgtgtgtcgaacatacatttcgacctatttcgaatcccaaacccgatttcaaacaattttttgcttttatttactcaaaagcgtcctcatttttatgcttgcaaagattaacaacttcaagtattaacaacatgaatgagacacagaatccgaccatcggcatcacgacatttctttaatttttttcttttttccggggcggaggactcttcttttcacatacatatcctatagattaacccattggaaagtcttaactgttttgttcaattttttgccgtacaaaagtaatgccccaaacattttacgcacaaataactcaattttatatagaaaaaattctgtaataggggttggaaatttttttttaaattatgataaataagcctgccagaaagagagaaaacaattttataccaaattgcatttgggatggtgagtttacactaataccagcagagcattagaccgtgaaaaaattatttgactgtataataatttgtcagtcttaatttagtttataaaattcacttaaatatatattgaattaagcaccagaagtaaaacgggagtgaaaaaattttccaaactataaaaaagtaaaaaattcgcttatgtgcaaccacgcgaaactgccacgcgaaaacggccctcacgcgaaaacggccacgcgaaaacggccacgcgaaaatg

SEQ ID NO: 99329 - DNA, 80 bp, Heterodera glycines
  unsure (1)..(80): unsure at all n locations
agtgtgtgtttcgcccatcgtgaggcggacggtgcccctctggagacnggacnccatctaggcgacctntcggatgaatg

SEQ ID NO: 99330 - DNA, 218 bp, Heterodera glycines
caaattcaggttgcaaaaatttttttcgacgttcaatttcgaagatgaaggaatataattgcgataatggaggagaatgtgatattgaacaatgtaatattttaaagttaaatggtatattagataggattaaaattggaataaatgtttaatttttatataaacaagataaaacatgtaaactgtgccggctgaacaaatgcttaacggtcggaatg

SEQ ID NO: 99331 - DNA, 989 bp, Heterodera glycines
cgaagagatcttagctcaaattgtggcatttatgcctccgaaataattttggcgcgtagtttttacaattctacgcgcccgctgttgattttttaaaaattcaaattttggcctcaaaacggaaaagtacctttttcaattcataggggtgtgttttctgaaatttttttcaggccatttcttagggatatactttcacgattttattgcatttcaaatggaactttccgaaaaacgccaaaaaggcaccaaaacggcaaaatgccaaaaaaggcatttaaggcacgaaaatcccgaaaaaggcaaaaaaaaaaggcataataaaagtcaacgtagaagtctttttaagaatatttttttttgaatttttttttgtttgcacatgcatatttttttcctggactgtgggaggcctgaaacgcatgaaaaacaagtttttagcctggtttgaagcttctaggatggatttccatatgcatattttgcatatttgggcatttttccaaaaaacttctattagaacggcccccatcagctaaattggcctttttaccccaatgaacggaaaatttcctcaaaaaatcatattttagcaaaatttctcgaaaatattagtaaaaatacaatttttttcaaaatttaaaatttatgccaaaaaatgttaaaaaatagaaaattttcgattttttactcaattttcttcaaaataaataattttacttttattttgtatttttgattctatgatgatttttcataccatatttaaccattttcgagattcttagcttaaatttagtgaatttgaagaatttgggaaaattttgccctcaatttggaaaaatctatgtgcatatttttcactttttatgcgcatattttgcgattttatgtgcatataattctactccctacctatcatatatttttttagaaaatactcaataattaaattccattttcttcattctcgacccactttatcgatg

SEQ ID NO: 99332 - DNA, 401 bp, Heterodera glycines
ttgatatatgagtgttactcaattgttgagcgaacaccgcattaatctcgcaaacaaggcatgcggagcagttcaatgcaaaaacaaattttcaggtatctaaattggcaaacaccgggatttgggtcgggacggtcacaaatttggggtcggaattcaggacaaagctaaatcactacaaaggtcgataaacaacgctgtggataattttaacagattctaatcaaaatgattattttaaagatttttttcaattgtttaaacagaaattctttaaccaccaattctataaatttatattagaatatttttgggataccttttactctcccttagatataaattattttttataaggaatgaatttttaaaatattaacttttctttatttcagcggatg

SEQ ID NO: 99333 - DNA, 570 bp, Heterodera glycines
aaacaattagtaaatttaattaaaatataaaatgatatggttataatttattgaagtgcatttcttttaccggctaactgtgatgaattttgaagaattttatttattctgcgttttgaaatgtaaaatttgggaaagaacaacggatttttcgatatattaatgaatatcaactctttatttagtgaagtataattgggcaagagtaaaacttttaaattaaaatttttcattattttattaatattataatatttattgacttattagttgtaaattattttatcaatattatgctgctaataaaatatttacataaaatttagtttgaatatcagtagtcattttaatttttaaaaataatgctttaaaaatttaatatacaaagtatgaaatattcaaaagtaaacataaaaagtgaaagaaaattctcatacaaattaagaataatttaaatacattttgactgaaataaaaagaggaatactttttatattactcctaataaattacaattttatagataaaaaatattacattataatattttttagttatcaattatttatg

SEQ ID NO: 99334 - DNA, 67 bp, Heterodera glycines
tgaaattcatcgaaaacggcacggcataaacttctttgtggcggcatttttcattgtcgcccaaatg

SEQ ID NO: 99335 - DNA, 196 bp, Heterodera glycines
  unsure (1)..(196): unsure at all n locations
ctcagatttttgaattgagaaagttgtaaataagtaataagantagctgtnccataagaaagctccgctcgactgcccatttctgatcgcttcngatgcctttgnctatgccatcactcggttcccctatttcctctcatttttgctcgtttgcattcgtcacccgattcgactaatcgattgctctttcctaatg

SEQ ID NO: 99336 - DNA, 171 bp, Heterodera glycines
gctgagacggaggaaaattaaataagcaaagatcaaattttaattattgtcattatttttattcataaattagaaaaatgccatattataattaaatcgggcaatcgttatttattttagtttattatttaaatatttgtccctattgttctttttttacgtcattgtatg

SEQ ID NO: 99337 - DNA, 280 bp, Heterodera glycines
aaccttttttatcttgttttttcgatatttatcttaagttatacaattaaaggattgaattaaatttgattttatcctaagtataatatacctataaaagttggcactttaaccaacacatattgagtcagacgcatttcatttatatttattcaaaaaactaattttacattttcataaattgacccaattccaatgcctgccgtaaaaggtacgtaaatgttgacgaacattgtggcaacttctgctgctcattccgcccacttaaggtgatggaatg

SEQ ID NO: 99338 - DNA, 314 bp, Heterodera glycines
atgcacatctgcaccgcaaggggggcgggggagactgtctccgacagaaattaaaacaaaaaataataacaaaaaaatatataaaataacaaaatcaaaacaaaattctttttacacattttttggtcggggattagcccaattgtcccacttttcacataaataaatatttgttgctaatccgtgggctctgcccaccatttcccccttttttcattaatccccacaggcattttggtgacttgtactgattaaatcgggaagtggtttggcgttcttggccctgctcatcgccccccccccacggcccaatg

SEQ ID NO: 99339 - DNA, 788 bp, Heterodera glycines
tatttacttgaaaataaaataaaccattgacccgcttatctaagcccctttcggctgcaaaataataatttatttatttttttaaatagagaatgttaactttaaaaatttttacaaaattgcatttatttttcagaatttttctttgtaaatttttattccattttttatttgcaaaaaaccgctaaaacccggcgccgagaaatttataaatttaggtttattttgtcaaaaacaggtttctagcaatttttattttatagttactacacatctgaataaaatgtaattactttccgtggtgagtcgaagtgacaaaaaggcaaatgtgggcgaagtgacaaaaaggcaaatgtgggcgaagtgacaaaaaggcaaatgtgggcgaagtgacaaaaaggcaaatgtgggcgaagtgacaaaaaggcaaatgtgggcgaagtgacaaaaaggcaaatgagtggtgatcagaagaggcgggtcatttaagtaccgaataatgattttaattaattaataatataactattttaatctattaattatattgctggccataattataatttcgttattatttaatatttcccaatcaaattacaatattatattctgtctagagagagaaataatatccacatgcatagttgatcaattcgatcaattgcacttttatttattcacaattatatattatattctgtctagagcatttttcatttctttaatattccactattaacttgtctttaataatttatttccgaatttttaattgatttagaatg

SEQ ID NO: 99340 - DNA, 1003 bp, Heterodera glycines
aactgaaatttattttgaacaaaattaataaaataaaaaattcataaatataaataacaaagctttgtataaaaatttattggctctacttcagtttatgcgtccaatcgacttttatgcgtccaatcacgttttatgcgtccaatctcattttatgcgtccaatcaaagttttatgcgtccaatcattttttatgcatccaataacatttaccatgtgaaaattattatcccttgccagtttttgtaaaaaaaatcttttacactacacgggataattgcgtctcatttcttccaaaatatgctgatatattttggaatttccgtgaaatcgtctgaacatatactgatacaaatatgtcggcaacatatcctcatttgagccacgcaaatggcgaagagatgtcttcagagacccccacgtagcctcaatgccttgggtatgcacttgtctgtcatgagggtcgacaataccgactaatggaaaaaggcagcggctgcccataaaaagtgtggcaaaatttttgactcatgaaagcataaaacctttattttggcaaaaaaacataatttgatacataaaaaatgattggacgcataaaaagcgattggacgcatgaaatgagattggacgcataaaactttgattggacgcacaaaactttgattggacgcataaaaagcgattggacgcataaaagtcgattggacgcataaaaaacgattggacgcataaactgagattggacgcataaaacgtgattggacgcataaaagtcgattggacgcataaaaaacgattggacacataaactgaagtagagccaaaagttatagcccaaaaaaacgacacggcgcccaactgacatagaccgcttcctcacttttcattttaaatgtatgttagaagttgcctgtaaactagagagtacccaactttttaagtagcgccaaaattcattatttaaactctggctgaaaaaatcgaacgttacgacgacatg

SEQ ID NO: 99341 - DNA, 206 bp, Heterodera glycines
ttgctccttgcgattgcctcgtaacgctcgagcgatgacagctttcgccataatttctttcctctctttgcaagtttttgagtaaacaattaggcggacgcccttttttaaaaggaacaaagcaaaacaaaaaacgttgggctttatgtgattattttgctaattcgccaaaaggagttcaaaaaaaaattgcagaatttaacatg

SEQ ID NO: 99342 - DNA, 680 bp, Heterodera glycines
tttcggtgtgtctgccccctctcccctcccaacgggtttcttcgcttcctcccattgcttaatggccctcaacgtgcgatggttttgctgccccgctaatccgcgctttgtttggtttgtgagctccaggccatcaatttgcacatagtgatcagtcagtgagcagatgacggcaatcagtctgaactgcttggcgatcaccgacgcctaaacaggccacccacccgcggccgatgatcgatgggagaagcgccctttttccgactctccgcgattgttttgactgacaatggataaaagcagacacaatcacttcgtcagccttccacgacaaaagaaagataataagcaaaaaccattcattctgaggggggcaaaacgcttcagggcaaaatatccggccccgggggtcgttttggtcaacaggaaaggccctaatttggccgacatttgccagtcgaacaagtttgccagattagcctgttcctcggcagcgaacaatgggcggcttctaatctgatttatccgcgcgccatcaccgatcgccttataaaagcggtgtccaattggcaaatgtcatcattcaatccttccaagttcccaattcagctgaactcaaaacagcgcttccactttattaggacaatttccattcccattttaggcatttattaaacatg

SEQ ID NO: 99343 - DNA, 113 bp, Heterodera glycines
ttggcacctcattcaccctattttacctccttcagaggctttccttttgctggaattggcggagtgtcctcaatgatcgccccgtacgcgctgaattcgatggccggcggatg

SEQ ID NO: 99344 - DNA, 322 bp, Heterodera glycines
tttttagcaattacaatcagagaaagggcaccgaaatttggcaatgaaaaaggcaaaaaataatttaatgaaaaactataatattttaatgtcatttagatgaattcattcctcaacaaattctttcaacttccgaatttctaagagccctttgtttggtcgcttcaattgaaatgggtaaattcaaaattaatttccatttatactcataaaaaaccgctaaatttcagcttttttcggcaccggtaacatcgcctcgctgaattccttcaatccgtcctttctccgttattttgtctccgttttttctcccttcacaatg

SEQ ID NO: 99345 - DNA, 77 bp, Heterodera glycines
ggtaggtatcataatttcctcgcaacttttagaccagggtgatatcatactgccaataactccgattacgtcaaatg

SEQ ID NO: 99346 - DNA, 74 bp, Heterodera glycines
  unsure (1)..(74): unsure at all n locations
tggaatncggtggacaaaacgtcacaaatgggaggcaattaaacaatataatcaaataattatttaatctgatg

SEQ ID NO: 99347 - DNA, 104 bp, Heterodera glycines
ggtacatcgatcacttcgttatcgcttttcttcgttccaatcaccaaattttcgacaaaagaggcaccaatttacagttgtttattcctccttcatcggtaatg

SEQ ID NO: 99348 - DNA, 699 bp, Heterodera glycines
agtgagaagaaaaatgaaacacaatttatcaaaatatttatgtatattttatgcacttgagttcgctaagctttatcaaacggttggacgtgaaaaccgacatattatgaaaacagggaaaaacaacacgaattgggatggtttaaaatctgttactcaatttttcgccgtcaaaaatctttttgtgaaagctgtgaggtgacattttggaccaaagaccgtcaccaaatggaatgtagggagcgctgcaaaaagtgttgccggatggggttcgggttcccctgtttggatgtttgtgaggcgatacactgtggagaatgcaatcggaatttctacaacaatgattgtttcgagtctcacaaaaagacagcttgtagggagtacaagaaatgcaacaaatgtgtggaaacacacaatacgcgaaacaaacacacgtgcggggagaaattctgtagaatttgcaaagtctatcatccgggtcggcaatgtttcattaaaaaaatcaaactccgacagcagaaagcataccgaattgtggcttatgacctcgagacgacgcttgaagggggcgaacacaaaccaaatcttgttagtgccgcgcatacttgtagtgtttgtgtgggagaagagatggaatgcgaaatttgtaatggtccgcggatgatcacttggtctgtagcagctgggtttgaaccgatg

SEQ ID NO: 99349 - DNA, 864 bp, Heterodera glycines
tttttaaaaaaggggaaaaacttggggattttttgggcattaactttttttaaaatttgtttgagtgcattaaaaattgccgacatccaattcatctcgttattctgcatcagatgatattaaatttattagaatgtgttacacttttaataaagttacactcaattttctggttatggccaagtccctaattttggcaccaaatttcattggcccatggctgacaggagaacaacttataggacatgctacgtcacccgtcttattccctggaccctatagacttaatttatggctaaattatttctctcaaaaattccttatagggtaggctctttaaagaatatggcaaggtcgtggatccagtgaaaattacctaggttcaaagaatggcacagaattttacaaaaagggcattgttaaactcccatctcggcggcaaaaggttgtagacagtcagggcaattactttgttaagtagctttttgatcggctttgttatgattgttatttttcattttttgttcataaatttttttccttcaaaaagcgcccttttttatgcaacgacctagtaaccttggcaatatttttatcttttcagttgtattcctttgaccttcatttacatatttaaattaatgtattttatttttaggtttttatattccccccttaaaattcacacccattccttttgttcaggacgaccattgctttgtcggttcgaatgctgcctcgggcagtggtgagcatccgccgtccgtctgcactcctccgcccctctccgggtctcttccgccgattacctcacttgggaagcgcccattgcacccgcacaataattcctcacagcatcaaatg

SEQ ID NO: 99350 - DNA, 818 bp, Heterodera glycines
tacgtgtggaatgttccacttagtctgaatggccgggagctcaaaaaaaggctcagccaacttattggactggtaaaaatattttgggaattaatttcatagcgcgttatccaacaggttcgcttcatcgaaacattcgaagcaagtttattaatttataacttaaaaaatgttttgaatttaatgatgaaatgtgtaaagaggattttgaaattcattcattcggaaattcaaaattgggtcattttatttgactgggctgagattttatgtgaatacaattttttcctggattctccatgctctgaataatttaaaaacaattttttctgtttgcgaacaaaaattgaaattttatttacctttttttttgcatatttttgggtttttctatagtatattacatagttcacatttttcttcacattttgaattttaaaatatattcgcaattttttcgtacatttttaattttttacattttttgagtttttgataatttgtagatttttttttattaaatctacccttaaaaatcgatttttcaaaaaggcaccaaatatcaatttttaactaattaggtatttttatggaattgtgttctttctaatttttttttttgtaataaactttttgtccaaaaatcataataaattttttattaaatattttttaggtcttagatatttcgggattattttcttttggatgaaagcattgacaattacattaaatttgaggcatggatcaaaaggtcggacaatgtgctcatcgagttctgttcaatggaatcggttagacgctttgccgtcatgatg

SEQ ID NO: 99351 - DNA, 543 bp, Heterodera glycines
tatgctggtggtggggggtggggagttcaattaataattttgtgatgttaattactataattattgctataattgcggcgcagttaatttttacaaattttttcaattgtccgatcgcttagctttggattgattttttaggtgcgttcggcacatcacttggcaaaaacaaagtgggcaccctcgcaatcatttttttttgcttttttttgtcattacttttccagaaaaggagcgggaaacggtgggggcccattgagttacggtgaggtgatgcacgagtcgttgacggacagcttcgaatgggcacggccatatgccaaaacagccaagtaaaatgccgtgttttggttaggggccgtcccagagggagagggactggcacgaagaaaatgaaaaaatacgaaaacatttggttgtcacccaaaccccgaaaatcatcttaagaccgcggactgttccggtattttggttgcaccagtttaagcttaaaggcaattttcttatggggaatgggcatccctgaagaattttatcaaaatg

SEQ ID NO: 99352 - DNA, 804 bp, Heterodera glycines
ttgggcattgaggtgtggtggtgataagaaaacaaacaatgttttttgatcaaagacagaattttttggaaagaaattatgacaatttttggtatttgtgagagtcgaaaatgcttcgaggcaatgatttaattatgggctaatgtcccaatcgtaaggtgctcactctgtacttgggatggcgcgacgtgaactttgtttggctgctgttgccgcttttgttttgcgctggcgcaatttggtaaatttgtcgggcacgcttatttgttaggaaaattttgatgggggccaactcatgaatttggcaaaattggaccgaggagaaaagttaagttcaaataatttttcggtttaatttaaagggaccgaatttcggaatatttgtgcgctagcaggagatatcaaaaatgtttatatatttgtttgctaatttcaatttggaatcattcgaaaattacacgtactttaatagacatcccgaactcaaatagcaattaattatcaatggaagccaagattgatcactatttggtgaagaacaaatagaacaaatgatggggctaaatcggtattagttcagttggtaaagtccgtttaagccagaggctccgcttcaaatccgctcgctcaactgtcttttcccaacagttttatcaacccagtaaaatcaggcacagccttcctaatgcagtttcaaccaaatgatttatttttattttatcgaatccctgaaactccaatgatgatggtccgattttcttctcatttgtcaggattgtctctcagcgatggtaccatcagatg

SEQ ID NO: 99353 - DNA, 293 bp, Heterodera glycines
attttttatttaatataaatcgaggatcaataaacttttccttggccgattatatttcatttaatttcaatatatttatttttttggaattccataaattatttttaacatttacaaacacggaaagggaaataaaaatttttaaaatcaactatttaccattaaatataatagattgcaattgattgagatttttcaaaaataaatagagattttgcatatattccacttataatataacaaatataagcagaaaaaacaaaatttattattattttttgcatcaaaaaatg

SEQ ID NO: 99354 - DNA, 320 bp, Heterodera glycines
tctgaaaaaaatttaaatttaaataatctcaaaaaagggcaaaacaaaaaaaaagcaaaaaataaataaaatttcaacagccaattaattaattaattaatttggggcaaaatgttataaattatataagttaatgttaatgttaatgtttgtgcgtgtgtgtgtgaattgaattcattagtgagcagcacaaaactgagggcttttatgagtgattttattggaccgttattttatcaaaaatcaaaattttatcaattttttgtttggcggcggcgaaaattgcaaataaaaaattaatttttgttaaataaacaatg

SEQ ID NO: 99355 - DNA, 928 bp, Heterodera glycines
tttcttaaaaactgccactatgggcgtttcttaaaaactgccactatgggcgtttcttaaaaactgccactatgggcgtttcttaaaaactgccaagtgggcgtttcttaaaaactgccaagtgggcgtttcttaaaaactgccaccatgggcgtttcttaaaaactgccactatgggcgtttcttaaaaactgccactatgggcgtttcttaaaaactgccactatgggcgtttcttaaaaactgccactatgggcgtttcttaaaaactgccaagtgggcgtttcttaaaaactgccaagtgggcgtttcttaaaaactgccaagtgggcgtttcttaaaaactgccactatgggcgtttcttaaaaactgccactatgggcgtttcttaaaaactgccactatgggcgtttcttaaaaactgccactatgggcgtttcttaaaaactgccaagtgggcgtttcttaaaaactgccaagtgggcgtttcttaaaaactgccaccatgggcgtttcttaaaaactgccactatgggcgtttcttaaaaactgccaccatgggcgtttcttaaaaactgccaagtgggcgtttcttaaaaactgccaagtgggcgtttcttaaaaactgcaaaacaaatatatttatttattaaaaaatgtttatgtcagttgtttgccaacgttataaataataaaaatatatatacatataatttttacatcatttgtttgtcaacactatcttcaacaccaagctcagtaaaattaaaatattaataaatttattgcttctgatgattgtagttaataaaatttacaaatgagctcaacgatatatttaatattttttcttttcttgtgctgtttaaaaaatgtcttttaggtgataaaaagtcgctgaaaatcgaaaattgttcggacaaaatg

SEQ ID NO: 99356 - DNA, 1003 bp, Heterodera glycines
tggtgggtgattttaaataaagtgaatgtccagacgaatccagcaagtttatttcgcagggctccaaaaatgtattttcaaaatagggacaaacgaggttaaaactaagatttgcccccaaaattacgattttttttgaaaaaacgacgttttaaattgttaaaacaattaaaaacagtgctacttagtgcaaatcttcaatatcagcatttagaatccaaaatcagcaattttgcaaaaatttattccaattaaaaaaaatgaataaaaatttgcggcacgcttttttgggaacagcgggccggcgatgtcggtaggcgccgcagtgaaaaaatttgaaaatttaaatgcattttattaacagaatttcacgtccggcggtgccgattggcgctgccgggaaaatttgattgcgcttaagcaaagttatggcatgttttgtcgaaaattcgctaaaatgccggattttagaaacgacatagaaccatccccgacttgtcattctgacggaccccgctcaccaataagagtttcccgacggggataagggagcttgggttaatatttagtgatgctcgatatcgaaaatttcctgatactctagtgactaaaaccaagacccaaaaagcccgggacttttaaggagtcgagactgtggcatttggccacttgaaaaatattgataagaaataaaattaataattatacaaaaataaatattttgaggtgcataaattaataaaaaaaaatacattgaattaattgatattattatttatattttttccggaaatgtaagtgccgcatgtgttggccaagaagagaggaagaaaaacggatgacttccgctattgaaacgccaattgaatgattttcattaaaatgccttttttcctgtattcaatttcatcatttttgacaaaaacacactttaaaaaataccaaaaaatatttttaatttaaaaattaagttacgaggtaaaaatgaattttctcacgaatg

SEQ ID NO: 99357 - DNA, 125 bp, Heterodera glycines
aaatttgatgaaatcgttattagttattaccaaggcacaaatagctggtcagcaatacgggtcggggaataggcagcggggtcggggctcacaagggaacttcgcgaactgttagtcggaaaatg

SEQ ID NO: 99358 - DNA, 1003 bp, Heterodera glycines
ttcttcccatccctccatttgtctgcctgcggcgggaaagtcaactccgatcacctttctcccctcgttgaccacgacgagtgattcctctcaaatccccctcccccaatttgcatcccttctcatcccatctcgcggcgcgacatttccctgatgagggaagagcgcggggttaaattgaggaattgggtgggggcgggaggaagaaggacgtggcgggacggaggagggggcaaattggaagaaatttcatttcatcgccgccaccgccgccgtcacagtgaaagagccgcttcttccctttcccattaaaaccaacaaatcccccccccccctccccccaattttaagccgaggtgccacaaccaattttttatgccacttttttttgggtgtcatttcgcgctaacatttctcatttgtcattcatttgcattcattcatttttcattccattggttttcgctttttgatcgacgcttttgagggaatggcatttttatgattcatccatttttatttgtttgccatcagcagaatgaagaagggagatcattgctttcgcggggggggcatgggaggagaagctaaattccgacttatcgaaaaattttttgttctttaattaaaatttatgattttttggcggagggtgcgacttattttaaaaacttttttgcaaccgtcttttgggttccaatttcttaaaattcgaggtcagcagcgccatccctagtttaatcagagacgatcaattttgcttttttgaattcattgatcaaatatcgattcatatggctggcgcatcattaatcaatccactctctgatcactgatcgaacactaaattgagaaatttctaatcgcaatctgtgccatttcaaaagctgatcatcactcggcatatgctgctgcctgcgctttatcactatcgtctcatttcgccgatgaattgaccgacgacgacggcactttttttgtcccaccctttttgtgccaaatg

SEQ ID NO: 99359 - DNA, 95 bp, Heterodera glycines
acaaatgtttgggctttttccttatgtgcgtccctccaacaaatggtgaaaaattggagcatttctaattgcattaattttaattaccaaagatg

SEQ ID NO: 99360 - DNA, 149 bp, Heterodera glycines
ttccgttgttgagggaaaagcgaagccaacgatttattcgggtttttgtcgcaaaaatatatttaaatgcgaattgctgactttgaaatacagtttcgatgttcgaaaatgcctccaaactgtggaagatcgagttgtttgtggagatg

SEQ ID NO: 99361 - DNA, 924 bp, Heterodera glycines
agataaatagtaaagaaaacaaaaagacaaagaccgagagatagagagagagagacagagaaaagagcacatacacatacactatgggtacgccccactgtgcagagaaaagccggcggccccacaaagtgtccaagccacgaaatgtccaaaagagtaaaaacccacgaaatgtccaaaatttttcaaaatttataaaaacaaaatgagtttaatttaggatttttagggttttcggggtcgctgaatacgaatataccctttatattaccccttgcctaaccttaggcccatctgaataataaaaaactcaaattcgagacttggacatttcgtgggctggacattttgtgggtcagcggaaaagcctagtactatctcgtcgtttctctttttctttgtaatttctctcactttggcgtactatctcttcattttaatgatgtaaaaaacaacatttacttttctatgtctaactttttttctttatgttaaatccgtaccaaattttgcatagcgatagagaaaaaaattatgaacaaactttcagtgttttgagtaaaaatttcggcctagaacattacaaaaatgggatgaaaaaaatttgcatttctttttctctctttttggcgtactattttcatgtctctaacacgtgaaaaaacaccaaattcgaaaattctaataattttggttataagggtacaaaatcactttgaacatttagaatcaatagaaaaaagaataaatttagcattttggttagaaagagctgcctaggacttgagttataacatgataaaagtttgaaattcccacaacttttttctgagatgacaaattacttaacattcgcttagaaaaagattccccttttcaaaatctttttttagataccaaatttgttcagtttagttgggaatg

SEQ ID NO: 99362 - DNA, 360 bp, Heterodera glycines
aacgaaattagtggtatttttggtaaaacattcgtcattaattagtgaaacagccattgattaatgaacttggcacagatttattacgttccttaaaattgggtcgcgtcactttggagcggcacattttggcgctaccaatggaaatggcgctaaaatctcaataaaagcagtttttagttcttttgccatatggtccaacaagtttaattttaatagacaaataaaaaatatggtagcgtttgcatcaaaaacggtgacaaagtcacctaacacaaaatcaaaattagaacatgctttaatgatgaatacattcagttccgaagagctgatcgggtgctataaaagctcgaaaaaatg

SEQ ID NO: 99363 - DNA, 261 bp, Heterodera glycines
gaaggcgtatttagagacataattaggttagataacgaagcaaaagaattttctttttctgcacataataccatggttgaagcccaaaatattaaaaataaaaacccggataaacctggtgtgaatttttggcatagcaaattattagatggagttttaaaaattcatgccctatttgacaaaataaaaaaagaagaaaaaaatatgaaaaatattaaaaaaggtatggaaaaatgtctagacagaaaagatttaactatg

SEQ ID NO: 99364 - DNA, 69 bp, Heterodera glycines
cggtaatcagtgttctctgatcaactttgctgtttagccttattataccacgcaacagcagtgctgatg

SEQ ID NO: 99365 - DNA, 414 bp, Heterodera glycines
caccccagagaaaagcaatataaaatttttaactttattttccggcgggacctccaattctgcagtattttttcccctgatacagtggaaccatgtttattacaaatgttttagaggtctttgaacgcgatgacttccattttgactcgaattcctatcttaattccaacaaaaagttggaaattcgaattttcggtttttaggtattttttcattttttaacatattataaaatttcggattttatttttgttgtaattctggttaggagtaaggatttagcctgctaatgggtgctataaccttttgaaacggactttgcgcataggcgaaatttgtccgagccttaaaatcatttcccgcaatttctgtgagtaccacccaaaaacttattattattattattttgtaatg

SEQ ID NO: 99366 - DNA, 224 bp, Heterodera glycines
gccgaatcaatcattttgcgttgtcagaattgttgactgtttgggtcagaaagtgcaatttcgcctgtttgaatctgctgaaagagaccaacggaaagtcgccccgttttatgctaatcggaaatccgcaaggactttttgacgagggcgaactcagcgcagatttggaagaacgaggcgaaggcacagtttcggaaaacagtggcagagcagcggacagaatg

SEQ ID NO: 99367 - DNA, 607 bp, Heterodera glycines
tagggagtacattaggtttggtttggaacacacacccctcccctcctgggttttgatggggcggcaacttcaaagggttgcgcccctcccatagggtttggttcttggcggcagcttcagaggtagtccaataggcatgggtttgtgagcgggcggcacatttcaaaagaaaacacccctcccgtaggtttgggtttgtgcggtaaacacccgctcggaaccgtgcgctttcggggcactcggtacaaacggtcaagagtttattaaagtatgggaaaacgacagcagtgtcccgactcaagtttatttaccggacatgaattttaaaaccgccgggggcctgggaaataaaattaacgaggcattcacacatcattacaaaatcaaaaaacaacgtggaaggagagaagccaaggctgaagataccaaagactcaaaaattgatgtcgcaaagagggccgcagaacgcgccgggagagacgtagaaagacattttaatcagatcaacaatatatcgaattccatccaaacccaactaaacacactacgagaaacaaatcctcaaattttagaagagcctgatataaaaatttggtttgacaaaatg

SEQ ID NO: 99368 - DNA, 920 bp, Heterodera glycines
aatgtctcaagttgagcagtgcaatttttttgtccaaggcttctatgtcaaaacacaaaagccggacaaaattcttttaaaaaccggcatttttagccggtttcgcaatgccaaaaaccatagaaaacattcaacaaaacatttatctccctttttaccggtttgtttggtaaagaaagaagcaattcataaaaaaaatctttttccatcaggttgcctgttcttagaaattgaactcggtcacaattctgtcattcataatacatttttgtattttttttcagataacatttaacatgagaggtatactcgcccaattatcgaagtagagtaacttttttattgcaattaggagttcgaaatttgtcagaaaataaatatatttttttataaataaagaaaaaattaaaaaattccttttttgtgtgtttataaacagaagaataatttgaagctaaattaaaacattttggagaaaaattctcaattttacacaaatttttttggtgtgaaatacctaaaaaagataaaaaacaaacattgatgagccgaaactttatgcgaaaatgcattctcctcccgagactttcagcagaatcatgacattccgttataggtacagtcatggtcataagtgttgtcccatcatgctttgaaaaaaataattgcgtataaaattgtcattttccaatttcaacagataagtagcataccattggatagcattttttatgggctttccaatgataccatatttgcatttgtgacataaacatttatttgatttattttaccatattcacaatttgatcaaaatataggtggtcaaaagtgttgtcccatttcatttttaaaatattgcttctctggatcagcattaaaaaaatctaaaaaaattcaggtaagcataattttggatg

SEQ ID NO: 99369 - DNA, 991 bp, Heterodera glycines
  unsure (1)..(991): unsure at all n locations
ttaaaatgcttccncatggcgcggcccaactttcgccaacttttcgcaagacagctactctgcagcgccaggcgctaggcgccatttgcgaaaagttagcaaaaacaggttagcatatctcggcgcaaagcgcccggcgccagacggcaatttgttttcccagcctttcagggtgcgggacgcgcggggaaaaaaattctgtctctctagcatcgctggcgcaaaagttggctctctatggcgcaaagtgggcaccacaagttagcatatctcagcgcaaagttgtcgtagcgcgccaaacttttttttaaaatgccccccttgggatggcacgcatttagtcaagcggcgccaaacttcagcgccgggcgccacgcaaagttagcaaaaacaggttagcacaactcagcgcaaagcgcccggcgccagacggcaattttttttccaagccttacggggtaccggacgggcaggggaaaaaaatttggcttcctagcattgacgtcgcaaaagttggctctccacggcgcaaaaccggctcgggcgcgcgcccatttcgacccttcagaattgtcgaatcgcgccaaatttttttttaaaatgctccccacggcatggcacgcatttcgccaagcggcgccgagtcgctatctgtgcgccgccgggcgctatgcgccgattttcgaaaagttagcaaaaaaaagttagcatatctcagttcccaaatgtttttgctgtcttttgcacggtgaagttggagtagggggagatcagttggctaacgcaaaaggaattgggtcgataggtgcagaattcgcaatgtgcgggccacatttgcagagagccccccccgtttttatatatatagataactagccgctctgagggcatgcgtggggagcgtgcacttgcttaccctagccggtcgagttgtagccagtaacgggtgcacagtccaggttggctgggcagtagcagctaccgaaagatg

SEQ ID NO: 99370 - DNA, 307 bp, Heterodera glycines
tttaaatatgtttttttaaaggaaaattttatagggaaatttggtggaaaaaaaaaattccaagggggtgccaaaaattttttaaatttacgaaatgcatcaacaccaagacaaataattacattttccttatttagcatcacatacatctcaaatgtataaagcaaggggtaaaattttcatttttcgattcttctacaatttttgtaaaaaattttatttagcaatttcaaattacctgcaaatgcatgccctatatgtcgtgcagaagtatcagagaatttcatggggttattaagaaaaaatg

SEQ ID NO: 99371 - DNA, 1003 bp, Heterodera glycines
aaatagatgatgagagagagagtgggatagagaaagagggagagagaaagagcgatggaggttagagttgttgggcatggaaggaattgctcgcatctgactaatgatttgtgagcggcctgacaaaggaggggtcggcaagtgaccgtgggatttccaaatgaaatttggtgggtgggtaaatcacccctagtttctattatgaaattttaaccatttttgccaaatgagcatgagtgccgagatatgacgtgccaaagtttttacgcttttttaattagaaaagatataattcttttcggccaagaaagaagccattggtgtagaggtagtaggttagtcaaatcttttttatgtcacaggttcgaatcccatgcatgtatatattattttataatttttatttttaattttcatgcaaagttaactatctaaaaatttttagtaaaaacattttttattttaaatttttttccattagaaatcaaaaaattactacattaaacataaaggtgcaataaatatcctgtcgtattttttaaatattttattatcttatgtacatatcaaaatgaaagtaaaattaaaaatattttttattatcatatgtaccaaaataaaaagtaaaattaaaaataaagtctttttataaaactaatcttttgagaattgacttttcataaaaagcaaaaataaaaatttaaaaaaaaaaattgcatatagcggattctaacctggtgcgactgttactaacgcataacctctacaccatttgacaatgcgaatggttgcaaataattatttaatttgtttgttcattaaaaaagtttggcacgtcatatctcggcactcatgctcatttggcaaaaatggttaaaatttcacaatagaaactaggggtgatttacccacccaccaaatttcatttggaaatcccacggtcacttgccgacccctcctttgtaagaaataatattaactgtaaattcagtttcaaatcatg

SEQ ID NO: 99372 - DNA, 350 bp, Heterodera glycines
acagacttatcaggtgcgaatgttcttgtaaattatcataaccactctttttcattccattctaagttgggtcttccatttgctgaaccctctccaaagattgcactctgtcgatgagtttcgaagtgccgttctttcgtccgattttttggttgtcggccatttttcattggatgtgtgtcatttttacccaactcactcagttttaattcgaactttttgcttttgagggccttcctttgcctcgttcttaccacgtttttctcaacacggcttttaaattggcaaactttcgctcgtccgtggcttttgccgtcgttctcaaccgcgcattggcacttggccaaatg

SEQ ID NO: 99373 - DNA, 120 bp, Heterodera glycines
gaaaagagtgaatcaaaggttctcagcgctaagagtcaacttcaatgtgacatttcactcgaacaattcgacgaaggatttggccaacttttggattgttcttctctctccaaaaagatg

SEQ ID NO: 99374 - DNA, 528 bp, Heterodera glycines
cacagtccaacctccggcacttgtgcaccgcagcactttcattttggcgaatcgctgacggcggagggccatttgacgcaaaaaattcgccaatgccgaagcagcgggcaagtagtttcatccaattttttatggcatttttatgttcagtttttatgacattttgtgccttttatctcacaaaatttgggattttttttataaaattacaaaaataatccttcatattataagcaatcaattccatactttgtttatttattttgaaaatcacctttcaatcgaaatttttctgttttattgcactttgagtccaaaaaacgcatttataataatccagcaaagtccctgttcaaaaaaaaaagttcatgccgaacttactaataatcatgcaaacttagaacccgtccctttatctgaattttacaatacatctttataacaaaaacagggtttttctcctcttccagttcccccatttcgttggaggacattgccgcggtgaaccgccaattccatcggcaaatg

SEQ ID NO: 99375 - DNA, 227 bp, Heterodera glycines
agccaactgatctcgcgtttcccacggggaaaaggatcagcgaaaaagctgatccttaatcccgccctttttgttactgtctgtgggggggaaataaaataggggtactgtacgtaacagtttattagggttgaatcatgtttaatgtgataaataatttgatgttttcattgttttggtttaagaaaagttcattataagttttatgtttattaagtctgaaaatg

SEQ ID NO: 99376 - DNA, 303 bp, Heterodera glycines
ggtgttcggtctccatttgcattttgctgttactttctcttttagcatttgtaccaacaacaaataaatcagcaaagggttcaacaaatccaacaacagcagcagcaacaaaatgcatttattttcgggcctggcggaacttcggcaatttctggacaaatgaatcctcatcagtcagcaattgtcggtgccgcttatcagcctccccacccttcgtttatgctgcaatcgcaattggcgcatcagcagatcagaccccatgggacgcccagtggtggtccctctgcttctcctcatgggatg

SEQ ID NO: 99377 - DNA, 163 bp, Heterodera glycines
ggtaatgggggaaaaggagggaaaatgtgccaattaaatatatttttaatttgcaatgcttttccgtcttttaaataattaattagtctttcatttccaaatgcttttgcaggagaattactggtgagtgaattgtcctccgttcgtttccaccgaatgaatg

SEQ ID NO: 99378 - DNA, 448 bp, Heterodera glycines
atttatcaatatattgtttgagtttgatttagtggttgttgtttctcagtttgtttgtttgttcattttttgtgttcttagcgtgaaataattatgctaaatgcttaggcttaatgtttaatctcttattagatttttgattctttgtctaatttttccgatttagcaaaattgaagtgcttaattaaaataaattgtcaacaggtttaaaaataatgttctgctctgccggttcggcaatatcttatcataatgcttagcatttcggaagaaaaagtaaattgcttttgtactcagaattatgtaaaagagtgctataattcgtttttgtggtttaaattgatttagatttttcttatgtaattgtatttgcaaaatttagataatgagctaagtgggatggcctaactttttgttgaatgccttgggattacgaaattcccaaatg

SEQ ID NO: 99379 - DNA, 489 bp, Heterodera glycines
tgccgagcaatttctcgccatttttctcgttgcattgcactctcgccagactctcgcccccctgccactcgctgctgcctactctcgcccccactgccactcgctgctgcctgctctcgcccccctttccctgccggtgacgtcattttttccctttatgagagcaaattaatgtttgtcatccgttgccaatgtggccgagtggttagtgcgtcagtctggccgccccctctggagttctcggatccgctcggtgcggggaatttttgatgaattttaaatgattttaaattcaacatctttgacctttaagacgtttaaaataatttaaaattaaatttaaataaatttaaataatttaaataaagtcgctcagtcaaaaaagtcgcgcatccctgcacccaagtttaattgcgttttcactttccatctgtttttcacgcccgaaccagaaaatcaaaataaatttgacttattccacaaaaaatg

SEQ ID NO: 99380 - DNA, 1003 bp, Heterodera glycines
atatacataaattctcgaaccaagaaatttgtatgaaaattggagtaaatattagagcaattgaaagatggaagaaacattttgttctttaatggggattaaaacattaaggagataattttagctccatgtccgcatttttaattaaccattccgataaaaaattgatttgctttttatatatattttaaaaaaaaatttcatttttttataaatttaaaaattggtttcatcaaaagtgcttgaatctgcctttttcgttaaaggttttatttaaaaatcaacaaaaggattaaataccattatttataatcaaagttgggttcgagaaactttcttgcttatttcggcacagataaacaccaagtttcggaccctaatgcccaactaaaaataggtcggctttagactcaaaatccctaaggtaaaaaatgccataacactgaaaatttaatagggataaattagtttatctattttcagaacttttaaaatgtgaaaatgatgaaaatcaaagatgctgatttgcgactcgttatataaaaaccatcaaaaaggggggtcggggtcgtttttgcacgggccgttttcgtacgagaacaagtttttggctataacttttttctttgccaaccaaatttaacattgttggtgccattcgatagccctaattaattatttgctttttctattaatgtacagctttccaaagtgaaatttcttcacggatttgcaaatcgtcacgtccaaaaagttcacacaataaattttggtcagtttgcaaaaaagcatcagctttgaacaaagtgtcagcatttttgtcaatgtaactcaaataacaatgcacaaagtcctaaattacatgggtcaatgtcaactcgtacaattttaaattgatgtggccataacttttgtttagtcggccaatttcttaaaacttggtatcattcgaatgcttttcatgtttagaacagatgattaagcagaagctaagcgattgatg

SEQ ID NO: 99381 - DNA, 100 bp, Heterodera glycines
agtccagtacattcgaaagcattcgaaacctgaccccattgcatgcttgagtatatggcaagagctatgtgttttgagggaccgtgaggcggacgaaatg

SEQ ID NO: 99382 - DNA, 378 bp, Heterodera glycines
tgtccttaattaattagcctaattatttcaaatttaacacaattacacttttattttatatctgatttcgtcgtcgacaacatcgcccttttctccttttcccattttcattgctaactctttgtggttttgtccattttgcctccgcttgtgcaatttgtctgccaattggggtgtcctaaatcattttgaaaaaaggatatttgtattaaatttaaatttgtttggtgttatgttttttcgaaatttatttccaaatgaaaaaaaatttaaaatcctaaatttttacgggtcttttgttcaacttttgctgaatttataatcataaaattttgttacgcttctcagacgagcgattttataaataaatttaatatg

SEQ ID NO: 99383 - DNA, 278 bp, Heterodera glycines
gctgctaaatttgcagacaaaatgccaaacaattgaaatgtttacacaaattaaaaaaaattttttcgggaatttttcgtgccattatacgataacagtgtggcttacataatgctacacaaacccgaatggttttttgggattttgtttgccgatatacggtaacaatatgacctacagaattttcttaccatggcctcgtagagtgcccgctgctcttcggcatcgtcctcatcgtcgacggttatgccaatttcgccccggtcctcccaataatg

SEQ ID NO: 99384 - DNA, 722 bp, Heterodera glycines
ttctatagaccttaagcttttgtttaataccaagaattccttattgaccaagtaagaaaaaagttatggcctaagaaactgtgtatggtcattcatgggacgcataatatgacatgggaccataaaaccgactagaaccttttttttcttaaaactataccagatccagattttgccctacaaccaccaccgcaaacacatccgctccaatcgctcccttaatttggcaataatttgtttaatgattatttaagcgaatcactttttttaatagattaaaagtgcattttggccacattgtgttcttcgacaaattggtagtttaaataactaaagaagtttttggtagagtgccacgggaccgggaccgggccgggaattcccggtcatccgaggtcccggtcccggttcccggtcccgggttttgaaaagctcaggtcccggtcccggtagggcaaccgggaaccgggaaaaacaagtactggtaagaatggggtctgagtgaaaaattagtgaagaaaattggagtcaaagggaaaaaagatttaaatatttgaactgatgaacatttcgccaagttttctttatgtttcatacattttttacttttacatttcgcatttaagctttacctagcttattttttgtgctaattttgtcttttactattatttaggaaaacgacaaatttttcttatttagtttatcaataacagaaaatg

SEQ ID NO: 99385 - DNA, 413 bp, Heterodera glycines
taattcgttttagtatcaattcatttttttacttcgaaaagttgaactttatgtgatggccaactttttggattccattaatttccccttttaaagcaaaaaatgagtcgaagcaaaacagaaattgtttgcgactttgtgccaatttttaaagaaaaataagggttttgggggtccagcggcgcagataggcgccctggaggaaaaaattggaaattttcaacatagacctattgccgaaactcccatcgattcgacaatgatgtctttttgacaagaaacacaataaaaaagcagtttcttaccgacttagtttgaaaattaaaaaacaaaaaaagttaatgattattcatgaaataattccaaaaattttaaacttttttccgtaaaattgacatttttcagttcatatg

SEQ ID NO: 99386 - DNA, 302 bp, Heterodera glycines
gattcacaaaaagtccaactatccgaacaatctgaaaagcttacgcaattggtagcggaattgcaaagcaaaaaagatgagcttgaaacatcattagcccaaaatgagagtcaaatcgaaaaatttcgtgccaatttgaaatctgcggaagaagtattttcgacaattagtgtgtaaatatgtaatgatgaaaattttcaggaaaattcaaggcttttttatgttatcgatgagttgaaaaaggtgacatgaatctctcaaataaattattacaacaaattcaggaatcccaatgtcaaatg

SEQ ID NO: 99387 - DNA, 676 bp, Heterodera glycines
ggtatgccaccaatttttgaattgataaatttgctgggtgcggaaaaataacccgaaaaagtcaggatttttaccaatgcttttttttgtcttacatcaaatgttttgtttcgcaaatacaaattatgaaaataaaattaataaaaatgaacttttgcgagaatttcctccatttttcagaaacccgaattgaactccacggtcgcacattgtttcttcgattttgctgtcgtaccacgaggcaattgcacattttcagaaaaagtaaacgcttttttatgtgctcgagcgtctcaaattggggcaattggaaaatttaaaccaaagatttattgttagctaaatttgtccatcgggtcaatcacaagcccttagaaaattcgctcaaaattgttactaaaatttgaggctttttgtgccaaattttcccctgcggcgccacgcaaccaattaattttgctattgttttaccaaattatttactacaaaattttgttttccttcgaaaaaatgttgaaattttggaatttttcagtgtgtgtctgcatttcaaattaatgcattctgaaaaattgaatctatgggcgcatgaccgaaaattagcgaaatttttgatccaacccgatcattacacgcactaatttatttttattttaggcattttttgctcaaaatg

SEQ ID NO: 99388 - DNA, 75 bp, Heterodera glycines
ccacaaaagttttgcctaatttgtttatcatgttcaaggtgtgcacgtcatgtcaggagctgatccatcggaatg

SEQ ID NO: 99389 - DNA, 855 bp, Heterodera glycines
ccccccccccgcccacgagcgatgtgtttgctcttcggcctcttatttaagtagcgaaattttcaaaaaaaaaaattttttttttttgagggtagattaggccaagtttggaattttttttgtcaatttttgaacagatttagacgaaaaatgagcccttgcaagcgcgcacgcacagaaaaggcaaaggtggagaacatcgaccaagaaatttttttttaattttctaagtcatttctagaagtatgtaatctgatgcactgagacctcttcttctttttttttttgggggggggtgataatttatctcaaaatctgttcaaaaatcggccaaaaatttcttaactttttccgatggcctaaccctacactcaaaaaaaacttttttttttggaaaatttagctaactaactcaaacaaagttcatgttcttatcccaaaacaaaaaatgaaaatatgggacccccattcttgatgattgccgttttcttaaaattaagaaaaaattcgggaccaatgaattttctccgccattggccacagaaaatttattattgaattactcaatttggaggaaacagaagcgaattttgttgggcatctcgtggcacggaaactgcttatcttttccaccgatctgcaatggaaaaattggtaataaataatattgtggtctcccaatttttcgaaaaaagtcatgtaaaacatcttcccggggttttcgaaaatttgaatgttctatgtttgttcgaattcgggattcgctatttgtcaagcttatgatcagcgacctcgaaaccccaggaaaaggcgttttacacagattaaaaaaaacatttttttttttgaaaaatg

SEQ ID NO: 99390 - DNA, 239 bp, Heterodera glycines
tttatttgtccgtccattcgttcgtttttcgggcaattcccctccccccccgtcaataattgacgcttttcgtcctttgcgatgccacaatatgatttaatgacggagaatttgcttttgctgccggacaatcgttcgctaatggcattatatgatcataagccgtgattatgtgccaggtgcaatttgcgtttgggcaattatgccaatagtcaacgaaaagattgggccaatgaatg

SEQ ID NO: 99391 - DNA, 1003 bp, Heterodera glycines
aagttacctttaagcttggcaggtttaaaattttttagttcttatttttttcatattgaatcggcatttgatctatcattaaaaatcacgtctttaaaactattttctttaaacattttacacatttgtctgattttactttttatatattcttatttgaaattataaaataatattttcttgttggaacctgtccttagtgttgagtgttgaacgttgacatcattttgattttaattttatcgaaactgtaaaattataaagatcaaataattctaatggcacaaaaataaaaattaaactttttatctttatcttatttttaactatattcttgcttttcttttagttaattgcctttaaatttatcggcaaagataaaaacaatctcaatgacatttaaaatcatttattgtaatattttaaaaattatacttaaatttttttaaataaattatttaatgcctatcagtaagtatatcatttcattgtacaaatgtctttttttaattgtatattaaatattggaaatctttattgtattatcattatttattttcatgtccaatcgttctttctgttcattcgtgcattatgcgtgtatatttttcattatttgtatttttctgttttgagttactatggttaaattaccttttaaataattttatgttattaaaatgtgagatcaactgaattaaaatgcaccttataaaacaattttaattttttatctataattattttaataatttaaatattttatacataagatagaattttttagccattataaattaagaattgtaaaatattcatttttccattcattaaatttatgattattttctaaacattgaaaatgctagagttccatatatatttatttttttaaataagttcttttgaaatttagatttaaaaaatgcgcagacgattgatttacataagcaaatcatacccgctggcaaaatgaaatattttaagtgagagaaaaaagatg

SEQ ID NO: 99392 - DNA, 1003 bp, Heterodera glycines
  unsure (1)..(1003): unsure at all n locations
aaatggaaatttttctgaaaataccaccaatcgatgcagcacgaaaaactatgttttggaggtggtctcagttttcccaggaaaaatcggcaaaaaataataaaattcaaaaaccaaaaaaccgacttttaggcctagctcgaaaatttctgaaaatttcagaaatttaaaaaattgacaagatagagctcgccgagctgtacaaaaagttcagcggcgccaacacgctcagcgcaatgcccagcgagttattcccgaaaaacacaaaaaccggaaaattggaaaaaaatttttacaattttttgcaggccagggctttggtgctaggggctaggtcaagaagaaaaaaatttcccaaacattccaacttagtcgcctcccagcagaagttttttgctccaggttcccagaaaaaagttatggccccaaaactgcatgcatttttcctcaaaaagccgtttcagcgccgctggcgttcaactgtccgtcggatcgaaaaacctatagttttcccagatgcgcctcaaaaagttggttaagcaatgtcacacttaaaacccacccccggcgcccgttcccgagattttggttttagcaacgaaacacgatttgattttatagtatataaactagcgggtgcgtgaaccgtcggatctgggaatgggataaagcgcttcgcgctttgggagcttcgctacctaggctgtaaagcgattcaaatttatcgaattggttgggagaggtttttttgaatttttaaaaaattattaggggtttttagtccacatcgaggctcaagacgggcgcttcgcgcccgtttttttagttattaggccgcttcgcggcctcagtcgggcgcttcgcgcccgtttttcanaattttgttggccttggacgggcgcttcgcgcccgtttctaaattttgttgaacttggacgggcgcttcgcgcccgtatttaaatgttgttgagctcataagaggtacaaaaattgttggaagatg

SEQ ID NO: 99393 - DNA, 160 bp, Heterodera glycines
cttttattacatttggtgcgtttcagagcacgtctctaaaaaatatttatgaattaattttgcaaaataataaataagtaatgaaaaagtcagaatttcgaaaaattttaaaaacaacaagcgttggcattttttcaggttaagttagtcctttacaatg

SEQ ID NO: 99394 - DNA, 344 bp, Heterodera glycines
tttagtatttttgaaataattgctaaataatctaaagcaaaaaaagtatatgttacgaaacagaaggggagggtgtattgtttctcagcaaatggagcgaatgaaggggagggaacggtgctagcttcttttatataaaaactaaaaaaaataaaaaggtcgtaaactgtaacaatgaaaaaattggagcgaacatatatttgtttggtcaaagtgaactgacaaacgcactaaatcagagtccttttatactctttacgtgtttctctgcgtaggaaagaacacgctgaaaagtgaagccagtgaaaaatgcaagcacgcagggacctctaggtctcaatatg

SEQ ID NO: 99395 - DNA, 879 bp, Heterodera glycines
cctgcacacaaatatttataggttcaaaatttgtttgaacgcttttggtttttgaatttgtgcctaattagcagcgcttccatttatatgtaagaaaaatcgcgaaatacatataaaaaatgctaaaatatgtattaaatatgtacaaaaaccccctaatatgtaataaaaaaatgtaaataaaatttttaaaatggttatttttggaaaaaaattattagtaaaaagtgaaataggcataaaatgccataaaaattatttaaattggcttagaatcaccttttagtattttaaaaattaatttttgatatctctttttttgaaaaaaatcgaatttttggggtacattttcaaaaaatttttaaaaaatgaaaaaaaaattgcaaaatatgtacgaaaaaatgcgaaaaagtctaaaatatgtataaaaatatgtacatatgtaatatgtagaaaaagcccgaaatatgtaaaaatatgtaaataaaagtcccacttttgttcgcaaacacaaaaaagaaagtgtttttcctactaattaggctatggagaatccaggaaaaaaaacatgtatttacataaaaatggaagccctgctaagtgggaattttgatagttgaatctcttaaaaaagagagagagcactgacatgagtactgtaacaaaatgagtttacaaaatactgtattggattagtaattgaaaaaataaattggtaatcatgcacctccatcacaatgcaatggtcaaagtaattgcgttccgacccgccaaactccgccggaacggtgacgcccaaaagtccgttttggccaagtaatcgccaaaactcgcggagcattgtgaattggtcctgacggtcaatttcactggcgaatg

SEQ ID NO: 99396 - DNA, 547 bp, Heterodera glycines
attagtaattttttatttctcttggtgttacgttttaatatttaaattattatttctttttgcaatggttggtaccttatgtcaaaaggatgttcgatataggaaaattttgattggacgcgtaaaagtcaattggacgcgtacttttgattggacgcgtaaaatgcagtagaaatggacagagcggaagagtgaatttgatgaattcaaacaaaaaaaaaatgcaaaaaatcctaaaaatttctacaatttatacttttttgaaaaatgactgacaaatttatgaaattttctccgtatttaagcgctgaattccccaccaaatgcatccattcattcaattgcattcacttccattctttcccccatcggtcgaatcttcatcttgcttctgaacaataaaataattcccgtcagtttttttttgtttcattttttaaaatgaaataaattttgtgcgctttttcaaggatggtcagagcaacaacggccaggacaagggcatcagcagcgcgagcacggagcatcaaaatcaatcgtcgaaatg

SEQ ID NO: 99397 - DNA, 433 bp, Heterodera glycines
ttctgctggtcattctcatcttttggcttcgcggcgttcttcaatatgaagagtaattccctttcccgcgccggcaatcattttcaaaaaacgaaactgcaaatgtgctaattattcaaacactttctccactttgtgtcctccccccccctgccctcgtttctctaattcttctcctctctctctttctctcgtctctctctctctttctctcgtctctctctttctctcgtctctctctctctcttttctctctctctctcgtctctctctctttctctctctcatctctctctttttctctctctcgtctctctctctctctctctttctctctctctctttttctctctctcgtctctctctcttttctctctctctctttctctctctctctctctctcatgcaccatatcttttctccgtccaaatg

SEQ ID NO: 99398 - DNA, 73 bp, Heterodera glycines
aatttttccaaatttaggctataatttctcaaaatttcttcaaattcgctaaatgcaaagtaaaacttaaatg

SEQ ID NO: 99399 - DNA, 546 bp, Heterodera glycines
tggggggggggggggggtgacgggggcggggtccgaatcctagtattgaggaatcagtgtgtgttaccacaaaaaaaggaaggtcggattgtttgagggggacagccccctggaaaaccagggatttttttggtggaaatcgcaatgccaggcttaatccacatggcttagctggtatggaccagggatgtatcggcatgccgatttccgaatttagttggccgtcggaattattgccgaaatttttttgatggcgtcaggatgccgatgtctgattgctgaaaaattttctgggtcgtcggaattgcgatttccgaaattttttgagggcgtcgacacacatccctgttattaatgggaaacaaaaatctccttagtttctggcgcctattggcaaaatccaacacctagttcgcgggatttaaattaaaattatcgattattaattagatttccgagaaatttttgaattcctttctaattaaaaaaaatttccattttaaggattttattttttgaatttcttaaacaattcatagaaaaatg

SEQ ID NO: 99400 - DNA, 873 bp, Heterodera glycines
ctattcaatatttgcttaaataaacttaaaaatacaataaacaaccaaaaaatgaatttaaaatttaaaaatgcaaattttttattgtcgtccgttgtataaaaaaacacctccagtttggcaatttcaaaaaaaaatttgcatttaaaaaaagaaaagttcgcaaaaaatggtgaaaatatttattaaaaatgccaaaatgacgacgaaaacccaaatttttcatatttttgggggtgtaattttttaaattttcaaaaagtcgagatttagaggtgtattttttgctttttttgaatttttcttatgtaaatttgccaagaatggccgaaatatggactaaaatggcaaaaatggcaaaaatgtcgaaatatggatttattcccgaaaaccccctaaatatggatttatatggactaaaaaccttcaccaaatcaaaaaatttaacgcagaaatgctatttttgagcctctttcttcatagcacatgcgcagaaaaaatatgttaatccatataatttacaaccctattaatgatcttccgaaataatttgcctaagaatgttggtattaagatgtttgccgattagaaaatacaatggtcctttatctgggtgaaaataacacaaaatttatttattttcttgatggcgaaccattgcagaaacaaaaggatttgggcattttaatcaatcaaatccttttctaaccatattaataaaattttaaaaaattccatatttttcttgttatcagcttcaccgagcgttaaaaactcgaagcttgaaactttaatttcggcatataaaagctatagcagaccatagttaaaatacgccaaagaaacttggaatctattaaaaaaagaaaaatg

SEQ ID NO: 99401 - DNA, 1003 bp, Heterodera glycines
tgagtgtaatctaataccgtatctaatctaagtggaaaacagtagggagatttacaattaggtctaatacagtatccaattcgatgataccttatccgatccaggcaaaaacaatatacttactttaaaaagcagaatcaaataccgtatcgatctaattaaaaaaatataggatgggagagttaaaattaggtccttacagtatccaactgatgcagaaactaataccataagctatcgttcgggccttcatcatactgtagcaatgaataaatctcaaatttattgttctcaccaatttttctattgagctccctcccccaacagatgtccactgtttttgcgccaaaaaatgtgcccgtttttgttggcgttgcgtttgtgtactgtttggtgcagtccgtgctgctctattactccaaagttgaaccatctgtgagtaaatcatgtcaaattgggtgaacaactaattgactctgggactgaatcatctccatgccgaaactcgaacaaaatttaaaaaaaattaaaaataagactgacatttagaaactgaattttgctaagaataagcaaagccggaatggacctcggcccgtgttttcgggatcatggctctacgggaataataaaaaaaattcacattgacaaattcttaaaatgaaaattgggattttcctaatcgactgaaatcattaagcctaggattagagtaagattttctactttttaaaacgtttagtgacagatattacagaatatctgaaaatatctaggtaatcgaattttgatttccctgattactcccgcttccctcggtccaaatttttatgtttaaaaattttagagttttttttgggggttattggcctagacacaaagccaaatgccaacacaaaattcaaaaattcaattggaaaggggtagaatttccaaaaaatgaagggtgggtacggcctgaaaaatttccgaatgtctgagactcttgacacacccaaaaatg

SEQ ID NO: 99402 - DNA, 447 bp, Heterodera glycines
ttgtggttgcagctccttgcgcagtaatacccccaaaaaccaagttttggtgtatccatttctgtccttgtatgttgtttgaatatgctttccatagaatgctttcacaactatttcacaatccgatggatgatttagacgatcacggagctcattaattcgacaattcaaaatttgtgcaattttttcagcaagaaggaccatttttctaattaatctagatttatattaattaattttatagaggaaatttgcaaaattattttgtaaaagatgattaatgaaaaaaaagaaattcaactgctatttataatagttaagaatataggttaagtaaacattaacaagtataaaaacagattttcattcatttttagtcactttaatattaatataaataaagttgcattttttcatttctgattttcaaacaatttattaataatg

SEQ ID NO: 99403 - DNA, 185 bp, Heterodera glycines
aggacaccgaaatcagtgtgacaaaagtctcattgtccatcataagggaaatggttatggtatttttaaaatttacatcaaaattcaatttctcctcaaaaggttggcgctccgtcttcgctaaatatccgattgtgctgaataagcatttgtccgactttttttactacgaaatttcagttatg

SEQ ID NO: 99404 - DNA, 396 bp, Heterodera glycines
tttcggattttctcaaacttctctgttagaatcactccctctattaaagcgcccttcctttaaatcaatttcttaaatttcaaaaaatattttatgaattataaacgaattttagtaagtaatactggcgatctcctttcccttttttgaagaaaaattttgtccgtaaaaacaatggcggtcactgctgaacatgaatttttgtttttttttctaaaggggtcaatgtcatatttggtcattttagaggttttagcttaaattttatggatttaggtatcgtttcctaaaaaagcttaagaattttattttatgcagttcttttcatccccactattctatttagtagtcaattagaacaaaattttaaggaaattatttgttttttagcctatg

SEQ ID NO: 99405 - DNA, 322 bp, Heterodera glycines
  unsure (1)..(322): unsure at all n locations
tcggaaatcatgcttccactcanccaaaaaaatgacggaagttgaattccgtggcactcatccaaatnttcctaattagccttcgggggtgggaggggcggagttggaggagggcacgtggcgccttttaaaatgccaatgccatcccacgcaacaaacagcagcaaatatttacaaacgttgaacatcgattgcagcatataataatggccatttttagcaatataaaaattgtacatttgtataataataatttggcatattttatgcattaataaaaaattctaaaacaaaaatgttaattttcgttgcagaaaaaatg

SEQ ID NO: 99406 - DNA, 59 bp, Heterodera glycines
tgcattggaggagggtcccaagcacttgaaaaagttgcgcatttaaaacactcaaaatg

SEQ ID NO: 99407 - DNA, 1003 bp, Heterodera glycines
tttgtatgtatcattagaatagtaaatttacaatttgattttaagttttgtactgatttgtttcgatttaaattatatttaatttgttttgaacagctccgccagccggactccgtcagttaggcccccgcaagttttcccactgtagcttttttctgtatcatccaaatccaacattttttcttttttttttgaaactttcatggaaaaatttatattaagaaaaaactttaaaatttcgactttttcgaaattttcatgtataactttttttagaaattgcctaatcgcgcgaagaattatcttagaaatcgtttctaaacatgttaagctttcgaatgataccaagattattgaaaaataattttaacaaagaaaaatgaatgaaataagagaaaaatgaatttaatgggggggggggaattcgtgctctgattgaagtggggtcatttaacgattagtcatgaaggtgaacgtgaacactaattagggccatttatttatgaagaattaatgacatctctaagtgggcagcgaaatgacttcgcccgtcccttcccatgcccttttattctctgttgggtcatttctttgcttttggcaaagagaatttataaaaatgcaagccatcagaagacagaataaatgcattttattaaggcagggctgccatccgtccttggattcggtgctgggcatttcctaaaaaccgccacccatgcgcgtttcctaaatccgccaatgggtttgaatacaaaaaatgggtaatatttataaatacactcaatttcaaccaaataaatatttcatgtatcatttaatagctttaattgttctctttcagagtataattttctataattttttccttaaatataaaaaaagttataaagcattgaatatgctatgtttttgaaatggtattgcataccgtttatatgaaattgttctttaaaagaattgcgctccgtctttgctggacattcgattttgctgaacaatg

SEQ ID NO: 99408 - DNA, 997 bp, Heterodera glycines
tctgataattattagattaaatgttttaagtactttaacaccaatattttcctatatttgattttttaatttatctttaatttttttaataagctaaatttggattaaaaatcattttcattttgctaaaatattttttctcaaagcgctagaaaaaataataatttgtttgatcgatctttaaataaaattttaaaatttaccatttaaaaagaaaataaacaaatataaaaatgaaataaaatgacaaaaaatttaatgttatgtctaagcttataagtttatgcactaaaaaaatgccaattatgcacataaaatatgcaccaaaaatgcctaaaatatgccctaaaaccccgaaaaatgaccaaaatgcactaaaatatgccttaaaaactgccaaaacgactttgaatccacaaaaaaatatgccaaaaatggtgtaaaaattcagaatttactttaaaaacaccaaaacaataacttttagactattacaaaaaaaacgtgattttaaaatttttatgcaatttcgaatttttaaactcttttggactattgcaaaaaaacgtgattttaaaatttttatgcaatttcgaatttttaaatttttattatatgctaaaacaaaattaaataaattttattcaaaagttctcacaaaagttcataattttttaagggtgtgtttttttattcccaaaaagtcgattcttaggggtatattttcgttttttttgcacttttcgtatgaaaaaacagaaaaaatgccgaaatatgctccaaaaatggtgaaatatggatctattcccgaaaacccccaaaatctgggtgtatatgcaactaaaaaccttcaccaaatcaaaaaattttaacgcagaaatgctatttttaagcccctttcttcatagcatatgcgcagaaaaaatatgttaatccatataatttacaaccctacatattacttttgaaatggatttgtttgtcacttcatctaatg

SEQ ID NO: 99409 - DNA, 89 bp, Heterodera glycines
tctgaaacagaacaaaacagtttttatacttactttaaaaaaaaaatttttttttttgatagacactcagccgattctttgggacaatg

SEQ ID NO: 99410 - DNA, 483 bp, Heterodera glycines
ttttgctacgtgaacaattgggtctgttgctcatcctttagtgagtttcaatattttttgcccattttcttcagatgggacgtggtgcgaatttgccgagggggaacccttaagcgaatattttgatggataattttactaatttttgccatttttaatgcccattgcttctttttttttctcatattgtattgtacgtagtcaagttgccctcctttaactttcctaatttgtgattttcacaatgatttgttcagctcatttgccctttcgcgctgcttttgcctttttaattgtgctagtcaacctcactaaaaacttaatttagtcttccattagcttgccttttacacattttttgctttgattttcaatcccggtaaagttttatgtattctcttttgaaaaaatcggcatttttttttgtctgttgtatactttcattaaaaaaatgattaatttatttaatctatgttcgagatg

SEQ ID NO: 99411 - DNA, 116 bp, Heterodera glycines
ttaggggacacaaatcattgcaaatggccaaacgcttcgtgatccctaaagtcacaacagacaggtactaattagatataagcaacaaaaaaagggatgggcaaaaagcacaaatg

SEQ ID NO: 99412 - DNA, 117 bp, Heterodera glycines
attttctcgggaaaatgggtaaaagattttcgggattcaaaatttgcagcgtcaaaccaaaattattttaaattagcccaaaaacaagaatttattattttaaaagagaaggaaatg

SEQ ID NO: 99413 - DNA, 958 bp, Heterodera glycines
acccctctgtcttttgcataaatggcctccccttccctcctcagttgttcttctccattcatttcatttatttgttccttatatttgcaatcgatatctctgaccccgttcgcccttgtccttttctcttttgaataaatattgttttattccctttggactttggggcgtaacagatatcaacccgaaaattcaaccaactcaggaatcaagaaccaaactgggaaattccaaaatcgagaatcgagactataaaaaaacctagagaaattcgaaaagagacagaaattagagaagttaaacagagactccaaaaatcttaatcctgagaaattcgatatttttctataattttcctggttcaagaataacccgaagtaaataaaattttattcattttttaaaattttaaataatattataattttaaaaaatatttccatataattgatgaatttaaaattatatgaatttagtgaatagataattaaattcaataatttaatcaagcactgagtttttttttaagtcgacctagcaccgaaaaaaagcactttcaaattttttttaggaaaatcgagggcaatttttatataataaaaacctattttttaatccatttttaatttccaccttaacaagctacttttggcattttgcaatacgaaattttataatttttgcatatttaagatttttttgaaaaatatagcaaaaattgccaaaatcgacaatttaataaaaaatataccattgaaatctatgtatcgcctgcattaatgaaacaatttaaaatttctaaatatcatacagtgccccaaaaaagtcttgcctcaaagaggcaaaaattgggaatattaaattttctatcccacgcataaaacaaattctctttaattgacttttttctatagctcgtttgatgctctatcagatgctgattatttaacacaaaatg

SEQ ID NO: 99414 - DNA, 741 bp, Heterodera glycines
ttgcttaaaatttcaaaaaaattacttaaaattttcatcaaagagtcgttcatagtcaaatggataagtgtgccgacgactcgaccgttcaaatgaaaaaccccagcaaaaaatgtcaatttgattcagtttttcctatttaaattttttaaaaaacgaatattttgctcaacaaattttcagtttttgtaaatttcactttacctttaatgagtagtaattaattaaattgtttgaattttactcctttataactagggcttatttttttggtttttatctatttttttctgagctcccagtggtctgaaaagcacgaaaaacgtataacttgaggttgtttttatgctacttttcgcgttattagggccaattctaggtttttacaaaatttttagaacataaaaattttaaaaatttgaaaaacctattttggcgttttgcacataacctttataaattataactagagcgccacgggaccgggacctggtagcggacaactgagtaccaaggtcccggttctgacaggggaccgggactagtcccggttttttcccggttttcccagccaaaaattcccggtttttcaacccgaaaaggtccctccctgtcccgggtttgcccaaaattcccggtcccgtggcactctaattataactttttttcttttctctatttttttgccaatttttgtattattttttgctctttttttcactgttttcctcctccaaaatg

SEQ ID NO: 99415 - DNA, 101 bp, Heterodera glycines
tgtccattaagatcgcaaaaaacaattatttcttgctaattattcgtcatgaagcgaaccacgcatcaaacatcactccacctcgcgcaaaacgttcaatg

SEQ ID NO: 99416 - DNA, 1003 bp, Heterodera glycines
ttatttgtgctcaaattatcatactgaaatgcgacacttactaccactcattattgatgttagcaatttgtattttccattttcaaataaacttatttacatttttgggattacctttgtaacgttttatatttcaaaatttttacctactttcattaccccaaaacccattaatgcttccgatgtcaaaaacggggctatccgcggcaattgatgatgaattcgaccctgacattgatctttcacagaggtccaggtcggattgggtgagtgaacctcttaatatatcggctctaatgcagttaaccgtccaattaatgaccatcctcggtttctgaagccttaacttttttcttacttggttaatccatatatccttcgtatcaattgaaagctccaagtcccgggaatttataaatactatacaagaaaagaacaaatacttgcattaagaaaaaattgcaatgaaaaaacctgaaattcgtcatttttcgcgaatattcaacaataattttatgtctgttgcctttatcccagaatttttttatgcgtaaacttctgtggactttaagctctcgattgatacaaagaatgtaagttttgagcaagaatgaaatatgacttaagaaacaaaccgaagatagtcattgattgttgcgtaaaagtcgactggactgcattagagccaaatatgtgctttttaaatttccttttctaggttggttcatttgctggtaatccgtccacagctccgacggtttatgcgatgttcaacaacagcgtttggacttttatgcttgtttacggcgtgacaggccgatttatttccgcaaggtcccaccatccgcggaaagagacacatgggtcaccctcggttttggttttcactaatagttgtactggttgcgcgaaattagccgtgcccagttatcgcccaccctcagccgttttgtttttccctactttttttgccccttccagtgttgtaagtttactcacgatg

SEQ ID NO: 99417 - DNA, 71 bp, Heterodera glycines
tgcatattttattttttatcacttttttacccattgaatcggtgcgtcgggtcgaaaatgagcaagaaatg

SEQ ID NO: 99418 - DNA, 118 bp, Heterodera glycines
ggcaaaaaaatgccgcggcccaaaatggggcaaaaaatggagcagcaaaagggggagagggccgggaggagtgaccacaatagaactgagcaaattgaggaagtcgtcagaggagatg

SEQ ID NO: 99419 - DNA, 116 bp, Heterodera glycines
cctaaaaacgtgcaagttatcgcccataaagtcgtctattaaaacagactatcaaaaaactgtgaagacacattcacagcaaaatatccttcggccgccgaacaaacggacgaatg

SEQ ID NO: 99420 - DNA, 176 bp, Heterodera glycines
  unsure (1)..(176): unsure at all n locations
tttattnagagagttaaaaaactgaataaaaatatcagacttatgagaaattaacgaagggattggcacatcgcagcttaaagtgtgtcttcgtcgacctcacggaagaaaatgctttttagagcccttctgggaccaaaataacacttaacatttttagtcagagtgattttatg

SEQ ID NO: 99421 - DNA, 204 bp, Heterodera glycines
ttcggacgatttgggatggaccaaattgcggaggacaaccccaaggaatttttggtgtaactgtgggagtactgttgttgtgtccattaatattttgaggatttgttgccgtttgtgcgagaagggttgccaccaaactttcaatttttctaagcgtaaatttagctgatccaaagaatttgcagcaaatttctcttttccatg

SEQ ID NO: 99422 - DNA, 151 bp, Heterodera glycines
tttcgacgaggcggacgtccctgctgtgaatgaaattttgaggatttgtctctatgaaatgtattatgaagaccagcaaaagataaccatttattaatagaaaaaatttagctccggcaagtgctaccaagaaaggtcgacccacagcatg

SEQ ID NO: 99423 - DNA, 1003 bp, Heterodera glycines
aagcatccgtaaatgtggtaattcaccaccaccaaccacaatggcatggcacatttttatttactatgctttgtgaattaaagaatttttcaagccaattattatataaaaatgctgaaattgaattgaggtacattttatggcatattaggagtaaaaataaaaaattaaataaaaaaataaaaaagatgttttagaatgttttcagaaaattttgctcgataaaattagtaaaaaaaaaaatcaaattaatataaaaaaaatttttgtggtagccaatataaatttacgagggttcatattaatacggtcaaaaaaatcttagaatttatttttaatttcttgaaatattttattgcgattttttcaaaatattatgctgaattgttagggttttcaaaaaattttccaaaaaagcacgctggtttttattgtgagctgacaaaaacgcaagaaaaaaaagaggaaagtggcacataacaacatcgaaaagccttattttgcccaatttaaaaaacatccatttgttaatttttttgtttgatttagggcttgaaaaatttctctttttaaataaatttttctgtttaatttcttattataacataatgataaatctcttctacaccttcaatattttgtgtttctagtatttgtttcttgttttctataattcatgagaaacaaatttaactcagtttttaaatgataagacattagtgtactatgtataattaaataattatcatttatgaattggcgtttgtgagtgagttactgtctaatttgctaattattgtagattcagtcccattttaattatcattcataatagtgcttttgattgactaattagctaattagcatctaatgagttgaatgactaattagctaattagcatctaatgagttgaatgactaattagctaattagcatctaatgagttgaatgactaattacctaattagcacccttttccgttttgtttgttttgttcagatg

SEQ ID NO: 99424 - DNA, 60 bp, Heterodera glycines
cccccccccccccccccccccccctcgacagacaatattcaacaaaaatttttaaaaatg

SEQ ID NO: 99425 - DNA, 185 bp, Heterodera glycines
agaaaaagacaaagcgataaaatggaaaatttttgttttttaattttattttgttatttcttgataaagaaaactcggctgtttaaacgacaatttgacgtatatattggcactttgtcctctcatttcgttgttcgtttgcaccatttttacaaaaataattgaatggttaagccaacaaaatg

SEQ ID NO: 99426 - DNA, 159 bp, Heterodera glycines
atattaataatcaataaaataaaacttcaaattaagaaattttgaatttggaagtttttgtggtccaactttcctctttttttgatcctaatttggtgtcaacttgcccttggggatcagattacggttgtacatcgattctcccttggggcccaaatg

SEQ ID NO: 99427 - DNA, 230 bp, Heterodera glycines
agttattagtgcctattttctaggcttttatttttagcgcctaaaaagcctaaaaaattttgaaagagcctatttttgcctattttggcgttttgcccaaaatttgttaacaaaaatgcaataaaaacggaaatctttggggaaaataaaatccggaattgcttaattaatttaaaaatatttgtttagaattctttagtgattaatattcaattttagtgttaaacatg

SEQ ID NO: 99428 - DNA, 128 bp, Heterodera glycines
tttcgtcccacaggcattcgtccacatcgtaacatttgctgccgttcccgaaaaagccctaaaaattctcccaataaatagcgttaatctgtatcgatgaccattttgcattgacaaattggcgcatg

SEQ ID NO: 99429 - DNA, 237 bp, Heterodera glycines
tcgtttaatccaaacacaaaatagaaacgtgcaaaaaccatttaactttgtgcgcggcatttctctttctcacgttaaatgccgtcatttgccaaaaatggggacacaaattggcacagttttattttaatctttgttgcatcctatttgtccattccattcctttttattcggttctattttaatttttgatcatttcccattttggcccctattttctcctaattgtccctaatg

SEQ ID NO: 99430 - DNA, 1003 bp, Heterodera glycines
cggtcaccattgtggacaatggcggaatcttgaaagaaaaacaaattaatttttaaaaattaaataaaaataaaaacagggcaaataggtaatttctctatgtttttacaaatctgccaaaaatttcataatcaatcaacggcggtgaatgtcggcatggcactgccggacctctcttttctattttttttttaaattcgcaacaaaaaagaaaccaaaaatccaaaataattgtttgttttttatagaaatatcagatttttaatgttaaaatgaaattttcgaaaacattttgaattatgaaaacttgcactaaggattaacaaaattaaattaaaatatactctaaaaaagcgaaatttgtataaatatttagccaaataaaacctcgtgaatatgtttataaaaaaaattaaaaaaccaaaatagtgcaaaaattaaatggaaaatatcaaattttttttaatagtgaaaattttctcaaaaaatgtttattaatcagcttaattaatctgaaaacttcgttctatttggaattgaactgctgtattattcgacggggttttttatgcgataaaaaatgcaaaaaaaatatgtaaaaacaataaatccagtgcttagatcctcaataataattgaaatttgtactcattaaaaattttttaatataatgtttataaataagttttatcatttaagtaaaatttacatgaaataaaatggtaattaataaattctgaagaattaaaaacaaaataatttcatccaattaaaagaagtataatttaaaaagaatcgtaatatagaaattttttctagattttcatcaaaatatatttctttaaatctataagtagaattttgaaagaaatgtaaatcgcattataaaaaaacaagtagaatttcttagtgaagctatgtaataaataagcataaatatggaaaataaaaccaattaataaaaggatttttaatcattttaatggctttattcagaaatatg

SEQ ID NO: 99431 - DNA, 97 bp, Heterodera glycines
ataaataattaattcttttcaagtaaatatttacttcagctgtcgaattgttgaccaacttttggcgttcgccactcgccatttaaaatgaaaaatg

SEQ ID NO: 99432 - DNA, 653 bp, Heterodera glycines
aaaaaaataataattttttatttcctttttttgaaaaaattttggagtttacatgaaaaattgaaaaaatgcttaaaatatttttaaaaatattagaaaatccaaacccaaacatattttttccgatatttttttggaaaatttctcaacaaaaattcaagaaaatcaaaaatacacccttaagaatcgacctaaaattttcaaaaaatacactcctaagactgacctaaaatttaaaaaaacaaaaattggggcaatggtaaagttctgtggtttcttcgaaaaattatttaaaaatttaagaaacacattttctaggctggaaaaatgtgctgatcacgactgacggattttttgcaaaataatttattttatttatgattttttatcaagtactagatttttccaaaattttaagaaattagtcgggcgtaaaaaacacacatgttgtatagctcaaaaagagctttcgagtgagctattgaatgtatggagaagtcatgtttttagttatttacgattttttgaaatttaattactagcccttaaaggtcatatgagacgggggtctggggttcgagcctgcttggctgtgtttattaaatttttaaacttatttttcgaagaaaccacaaaacttattgccaaaaatg

SEQ ID NO: 99433 - DNA, 101 bp, Heterodera glycines
aggtggcattaatataataaacttataaaataggatggattgcatcagcacggctggaagaagctagcggaaaattgcaggcggccagaaacttggtcatg

SEQ ID NO: 99434 - DNA, 701 bp, Heterodera glycines
gtttttaaatttcattaattttaaaggaaattcagtcacttagaattggtaactccctccctccctcccacttcggcaaaaatgtttgataatttataaataaagaaaactcatttatgaaatatctttttttgaaaggttattcggcaatttgccagtcgaccagttgccaccaccaagcaatttaattggttttaaagagatttacatcaggtagataaatacttttattttgtatataaaaaattcttatcccccatgctgcccctataaaaaatgtaagaaaaattaaaaacaaaataccttattatgtatatagcacatgtttcggaacctaaatgaattcgactcaatccaatttgaaatttttaaaataatttttgctagattttttaaaaaggaggacacgtagagctctagctgcctgcttcttacaataccaagattgattatttgattaaatttagctaaattatgatttattattttgcaaacaaataaaataataatgaaatttaaaatattactatcattgatacttttgtagtttcttctctccacggacaccacaccggtggtccgggggtttggagatttagtaaataaataaactaaattaaaaacatttaaccggcacgttcagttactttgacaactctgtgctctcattgctccattgcttaacgccgcttttcaaaatg

SEQ ID NO: 99435 - DNA, 525 bp, Heterodera glycines
  unsure (1)..(525): unsure at all n locations
aaaatcaaggcaattgcaacgttttaaagccattgaaggcgttcgcaatcattttcaaatttgctaccctccaattgcaaatcagacaggaaaattggtatgtttttttggaaaacttntaaaaaaattaaagtcaaccaacaattcacaaaattccaattcgaaaacctgacgtttttctggaagatcatgccaattcccgattcattaatttttaatagccccggaatcccggtttttggctataccttttagtaaaagcctttttcacaagagaaggatggaaatataaattaaaatttaagcatatttcattaatggacgaagagatgtgttatttgaacagaattttaagacaatgttattcaaagaaaccaaactgaaaatttttacaacggtaattcatttaaatttataacaagctttcagttaatttttcaaaatatttatgtcctaaaaattcaaaaattcctgtgccaggttttcaaaaactaattataggacgccttaaatggcacaaatatg

SEQ ID NO: 99436 - DNA, 362 bp, Heterodera glycines
tgcgagaaagccgcaattgattgggggcagaatgccaagtgtcccgcttttagggttttacaatttcgaaaattttgtgaagccaagaggaagcggattgtggaaaaaatggaataaaggagcacatgggagaacctcaaagggagcgcccgtagttcagtcgtgttagagcattcatgtggaaaggccgtgggttcgagtcccaccggggggttaaccttttatgttctaaaatttatcttggcacccattcagacttggaaactctgttaaacccatatatttttaagggcattgagggcccgcgtggtgcctccggcaatgtcggcccggctggcccgcccggcttgcccggccccatg

SEQ ID NO: 99437 - DNA, 302 bp, Heterodera glycines
tttgaaatgctaacgaaaaaatattctttccgaaaaaaaggcttatctcttttttctcttggggatttggaccgccaacttggtaccaacatttccttttttagtctggctctatcaaacactcacacgatatttaaaatacaaacgaaaaaaattcttgcctaaaaaatggctatctcttttttctcttggggatttgaccgcaaacttggtaccaacattttgccttctctagtctggctctaccaaacactcacacgatatttgaaatgctaacgaaaaaaattcttgccgaaaaaatg

SEQ ID NO: 99438 - DNA, 414 bp, Heterodera glycines
aattataaataaataaaaatattattgtgtaatgttaaaatgaataacaccaacacaacaaaacacgacatacaaattttgaattccccagaagagcctaatgaaactcttttgcatgtactgcttttttctcattatcttcttgcatttcctgtgtttttgcttttttggttcgttttaattcggtggcttaaaagtcacggtcacctctcgcccagcgaggccgagacagtaatggaagagatgaaaaatatcccccgacacccaccaatattttttgcagcaaaatgatgcaagattagagaaaactgacactgaactctctcttcagtatgacaaaatcgataatgactcatgctgatggagcattctcaaagctactcattctttttcatcattcattttacaaaaatg

SEQ ID NO: 99439 - DNA, 457 bp, Heterodera glycines
cccccatcgttttcccccaacaaatttttttttaaataaccaattaagaaatttttcgaaaaaaattttttaagaaattgcggctctagtgcactttatgagtccaatcgacttttatgagtccaatcaatggtttttatacaataactttgtttatgctcgaacaaaccctatctttttggtatcattcgaaagtacgaagtctaaataatgtaataatacgagaaaacaagaaaattctaacatttcaagaaagttacaaacgaaaataataagtatttacttaaataatcaaatcttttttggtaattgcctaaacgctgcgattttatatattttagcttcgttagactttgaattttcttgctaaaaaattctcaatatttttttttttttaattttttgaaaattctgttaaaaaattttctttaaattttcttgctaaaaatttcaaatg

SEQ ID NO: 99440 - DNA, 489 bp, Heterodera glycines
aattttatccaaaaaggttacaacaaacttaagccaaatcaacagttgagataaaataatttttaaaatgaaaattgtcaagaaaataaataaataaattttaaaggataatgaaaactaatctttacaatacttgtattataaatttttaatttgttatttgagaaggaaaaattatatttaaatgtaatgattattttatttattttttccaatatttgttcagtagaataaaatttaataaaaaggtttttctgatctctatgaaatcaatagagttgcgatttttgttatgtaaaaaaacatattaattttaaaattattattatttttaaataaatacaattttttctgagaatttttaaataaaatgaaactccacctattaatcgttttatttatatttttgatcactcaaattaatcaaatcggaacagaaaagaaaaagttggaactaaaatcatttgatgaaatatttggagaaaaatg

SEQ ID NO: 99441 - DNA, 64 bp, Heterodera glycines
gaacattaaaaaaacaattgtttttagctagaataccgtcattcgccttttaagatatcaaatg

SEQ ID NO: 99442 - DNA, 267 bp, Heterodera glycines
  unsure (1)..(267): unsure at all n locations
gcatgcnnctgcaggtaaaattgttagagcgatcaaacgaactctaataaatgagaatgctcagtttttttatcaccaattcagttatacggataacaaatttgtgctgttaataaatgcgccggtcggtgggccaattgagcagacaatttttgtggccaattcatcaaatgccaccactaccagcgctgatgctcatcatcatcaatttatgaccaccaattttgctttgacccgtgccgcaccgccaaatattttttgcaaatg

SEQ ID NO: 99443 - DNA, 90 bp, Heterodera glycines
ttgtataccatctcaaaattcaatgatggaagtgtctcttctcggcactttaactttttcacttctttttaatagcaagttgaggagatg

SEQ ID NO: 99444 - DNA, 1003 bp, Heterodera glycines
ataataataataataataaaattctaatgatataataggttgatatagcgcgataaatatttaaaaatttttcttcgtgaaaaaaaaataattttacaatcgaagttaataattcttttgagtgcgtttaatttcccccctattacctcaaacaatccaaaatgatttttttaataatttttatttatgtgatttttccattcgtcccttgtcgcttgttaattagagacattgacaatgtgactttgtccaatgtgccattggcacaaatcactgtgttggcatgggacacggagggggcaaaagtgatcaaagaagtgacgacaatttgatgtatttaagaaaatattgaatcatacacattttttggaatttttgaggtttaaaacaaattttttgacagtttttatttactccatgttttggtcatatttgagctttttagtccatgtttcgggcttttttagtcaatattatgtccatatttaaaaaaaataataaattacgagaaaccaacattaataaacttcagcaatttataatcatcggacgaacagatttttctgaattaatattttatattttttatttgaatatccaatattcaattttcattttttcgttatttatcagattatgctgaatcatccatctgctgttggtccattttccatctcttctcataaatgatcaacgatgttttattgtagttgatctgtgctttctcccattaatatggaaataatttttctaatgtaaaagaaatattagttaatatttaaataattttataaaaaaataaatcgaaaaaacaaaaattttttatacatttctttcttttttagtgtaaaaatgtgccattttttgaatgtgaatttaatccttttgttattcactgtgttcaatgtgcggttgaccaccgttcaactgtatttttattattatttttattgaaattacatttaaattttcaatttaaagttttcaacaaactgatgaaatg

SEQ ID NO: 99445 - DNA, 283 bp, Heterodera glycines
  unsure (1)..(283): unsure at all n locations
ataatgacataaagattaantcgattaaaaaatcattaggttatttaagcgtaggcgaaatatgaaatattttactgcttacgtgtagcttttaatttctatttgtttaaaatgggaattaaattataactgtttctatatgtatgtatatttcccttatgaaagaaataataattatacaacatcatcatttttaaaaagggtataattaaaatttttcaaaattagtgaatttagttaagctgaacatttacttaaagcgttcttttaatcagtgtaaatg

SEQ ID NO: 99446 - DNA, 265 bp, Heterodera glycines
  unsure (1)..(265): unsure at all n locations
aaatgagttagagatgaaaaaaagtatttacaaaaaaatagttcaacaacaattgatatcgcattctttcacatagttatattagggatgatacccctaagaaataaaaaattagattttaaaattctntatttcaatactgatttggcttaatntagcgctttatagataaaattttacgcttttatacccctaaatttgagactttttagactctattttccatttttagtgcctgattttggggttttccagaacctatatg

SEQ ID NO: 99447 - DNA, 163 bp, Heterodera glycines
cgccgacttccacccaatcccttgggatgtttttgttttatccaatgcctgattttgtcttaaatttttcaaaattcggactcaatatttttcggttctttacttctttaaataggtagttaagttatattttcactacataattttgatttgctggtaaatg

SEQ ID NO: 99448 - DNA, 402 bp, Heterodera glycines
acaagaacgatcgcagaattgcaaatggtcgccttacaacgcgcactttgaaattgcaaagcccatgcgatcgactgaaatgtttcggctgattgctgaacgaactgacgaccagtctgaaaaggaagaagcatttggagacgaattagaagccaaaaagcattttgggatggaaatggaaatgaattttgctaatgggggggggggtaattagcaggggggacggaaattgggaccaattggcaaatttaatgggaaatgcgacggatggcctaaggccatttgattgaaatgccataaaacaacgaaacatttgcaaagaccgaccgtcgaattgagtaacgcgcgaatggaggccaaaaggggaagggcgagaaattcggcggaagggccgtggcaatg

SEQ ID NO: 99449 - DNA, 81 bp, Heterodera glycines
tttcaaatgtcgaactcttgtttaatatgttttttaataatctttacaaacctttgagtaaaaacatatataaagcaaatg

SEQ ID NO: 99450 - DNA, 58 bp, Heterodera glycines
  unsure (1)..(58): unsure at all n locations
acattagacttaaatntggagggaaaaatttaaaatttattcaacaaaagaaataatg

SEQ ID NO: 99451 - DNA, 59 bp, Heterodera glycines
attaattaattataattattttctttatttaatatttcatgcatttatgcttaagcatg

SEQ ID NO: 99452 - DNA, 69 bp, Heterodera glycines
cctgaaaaaacaaatgaaattagttatttttaatcgaataattaattaattagtacagctttccaaatg

SEQ ID NO: 99453 - DNA, 1003 bp, Heterodera glycines
attgatcaatcgtcacccatttttggtgcattttttggcccattgatcaatcgtcacccatttttggttcattttttggcccattgatcaatcgtcacccatttttggttcattttttggcccattgatcaatcgtcacccatttttggttcattttttggcccattgatcaatcgtcacccatttttggttcattttttggcccattgatcaatcgtcacccatttttggttcattttttggcccattgatcaatcgtcacccatttttggttcattttttggcccattgatcaatcgtcacccatttttggtgcattttgtggcacattgatcaatcatccctcatttaacccatttattccactcaaatttattttcacctaattcttgattttttttaaaaaggaaatcttagtgtccaattttctggtgttcaattttccggtgtccaatttaccggtcccttttgaaaagggatataagaagtcagtacattgaaatatatttctataatccgaagcaaccatttcaatgaaggaaataattaaaatcaaagtaaaatattaaattatttcacaaattgtcttttctctgatttaatgttactatgttttttgaagcattttttttattaatttatttttaattaatatttgcccatttgttattcttttgagtcattcccgcaaattataccaatttatttgattcatatttttctgtaatgttattctattaaaaaaataaaagaaattattattttattcattttttcctaatgttattataatttaaaaaaataaataatttttataagaaatgattgaaaattaatacatacatattcattgatttttcgtgaattttattaatttcatcgttcctgtctctttaaattcattttttttttcataaatttacaattatgctaaaaattagaaaaaattttattgtaaatttttatgctttatattttttcagattaattaattccatcaatg

SEQ ID NO: 99454 - DNA, 150 bp, Heterodera glycines
ttattttttaaaggagttggtaaagcggtgaatgctctcgagaaaacatcatcgtgtggggcgaaagggcggccggattggtgtccaggtggaaggaagtggcaaaggcggagacggcacgcgcggcggaagaggcgcaacgacagaatg

SEQ ID NO: 99455 - DNA, 175 bp, Heterodera glycines
tgggaacagtgacaacaagtggcaggcagcaaccgagaaagatagactatctgatcaagaaggtcagccgaaagcccaaacggttgaatgagatttaatggggaaaaatatggtttcatgcgtgaccctttttcccccttttctccttactatcccctcctatttactagaaatg

SEQ ID NO: 99456 - DNA, 390 bp, Heterodera glycines
aaaatgtctaaaatttgtgtttatattaaacaattccaaaagaatgctcaatgcaatcaaacatctttgaatgtttttttgaaaacctaagaaagataaattttaaaattaattttttaatatttttgaaaattttagtttcattcttttagaaaataataaatctatagtttcttttttactcacggtttactcagtgattacccatttcacttattaaaaaaataataattttatagaaatcttttagagcatgcttttctcatcattactgtcaccaccatcatttgttttttaattccgcctaatttgtccattgaaatatgcgtaaggccaaacactgtcttgaattatattggggaattgatgtgcaatgataagaatggcatg

SEQ ID NO: 99457 - DNA, 118 bp, Heterodera glycines
atcttttttattaaatttattaattctttttaaatgatatgtatttgaaataaataaaatgcaaataataataataataaaaaaaagaaactttaaagattggcagagacaaaaaatg

SEQ ID NO: 99458 - DNA, 179 bp, Heterodera glycines
gtattaccggcttaggcgccggctttgagattaattttaggatgatgtaattaattctgaatacttcataacctttctgaaatattaaagaggtgttgatgaacctctttaattgagcctatatattgtgatttacaacagtatttcctctccttttttcttaattaagctgacaaatg

SEQ ID NO: 99459 - DNA, 212 bp, Heterodera glycines
  unsure (1)..(212): unsure at all n locations
catttgaacactttgtcaggtaaaagtctaatttntggaattaatttaatttatcccacaatttcaaatggatttgtaaatcagtcaaacagttcttgttttttttaaattagcatatccatctgaatgactttctgcgaattctttgcaaaattggctctgttctcgtggaaatattgtgcatttaccacgcaattttgaaatttcacatg

SEQ ID NO: 99460 - DNA, 770 bp, Heterodera glycines
aaaaaaaaaaaattttttttatacgttaatcataagtcatggatataaaatgaaatacgagcccatttgatattataattcattaaaagctcatggatttatctaatcaacaagtaaacatactcagtttctcggactaacttaaaagaggacaaataaaaatttgaaaacgttatgccatttcgaatttagatgataaatagggatgcaatttttaggctataaaaaacgccagaatgcttaggtaggttttaggacctaaaaaacccacactaaaaatggaaaataggcactaaaaagcctaaattaggggtgtaaaatgactaaaatttattcaaaaataactaaatttaagccaaatcaatgttgagatatgtacataaataatttttaaaatcaaaattcttgtcattaaaataaataaataaattttggaacttcttgagaaaatttccatttctcagggtatattttcaaaaaatttgggtcgatgcttagggatatatttttcggaaatttttggggtcgatgtgtatttttcatttttattccatttttgttgaaaaattctgggcaaaacgccaaaataagtcaaaataggtttttcaattttttagcaacaaccaccaaaaaactcgttttccatgcatttcagccacttggagctaagaaaaaataggcaaaaacctaaaaaatctatatgttatatatatataagaagttagcaaataactaggtcctcaacttcattgtatttgattgacaacatg

SEQ ID NO: 99461 - DNA, 412 bp, Heterodera glycines
acctgaagggcaagaagcggctctgcttttatccgcacacaatcatcctttggtgggttggcaaaatgttcaagttcaaaaattagagtctttacattaattgactggttttaattaattgttgagcattaactaattagcctaattaggctctaatttcgtcattccgtccagtgacctgtcttcaaacaaaaatcttcttaaataatttgtttaaaaaaacatggaaattttcaaagagaatttaacaaaaaatttgcgtttttattatgaaaatgaagaatttcttaaatttattaatttaatgcttagaattaatcattggtaattttacccacaaatttttcgaaaattgaaaaaaattcgctttaattaatgacaattattttaatgcctgcccttttcagcaatg

SEQ ID NO: 99462 - DNA, 554 bp, Heterodera glycines
gctgccgagaatggaaggaataatgaatgacaattaaatgatgcaattaggcttaagccccaacccttcggcgagtagagaaaagtcggggaatcgaggatgaaattcaccgacaaaatttgtcgtggatttctggtggaaacttgcaaaaaagtcttcgaaactcattcacagcaaaaaaataaaataaaataattttttatttgtttttaaataatttttatttatttttaattgctatttggctatgatcatttgtcagaaagagtgatcaaattgtactgtatataaaaaaagcaagtcaaaaatgattgaattttagttcctaattcggaaattaaatttttggaattttagcttttttctatgatatttttaaatcaaatttgtaattaatttctttaattggtctcgaaataacaaaatcatgtctcaatttctgaagggatcagcagctttaattttttttaataaaaggaaaaaaaagtaaaaaaaattttattattttttaaaatttttattatttttatcccacctgttgctgttgcccaatg

SEQ ID NO: 99463 - DNA, 1003 bp, Heterodera glycines
cagaactgcggaggagaatggaaatggatgatgggggggggggggactaaaactcgcgcacccttgaccgatttacttcaaattttactagccgtcaactcacacccccttaagctgaacggcgaaagaatttcgcctctagcacaattttgagcagtactttcccgacgccccgcccctcccccatcccgagacttgcgcagcaaaactgtggtggtaagaggaagttcatgccgttgaagaggaggtccgcggcgacggagagaggggggtccgcggcgacggagagagggggtccgcggaagagagggggccccgatccgacggagagagggggtccacggcgatggtgagagggggtccgcggcaatggaaagagaggtccgcggaagataggggggtccgatccgacggagagagggggtccgcggcgatggtgagagggggtccgtagaaaagagggggtccgcggaagagagggggtccgcgctgcccaacgaaatggcggaggcgaccagcggggaggcggccgagctatttaacgcaaaatatcgctggtggccgactggttaacgcgtcgacccaccaccatctcgggttcaatcccgcgcggcgaaactcccgcgcatttaacacccacagcccaaaatctcgcgcaaaccccatcccacacccccaaatcccgaccccacaccgtcccgcgcaccaaccaccatcccgaacccacatttcccgacacccccccccaccccctccccgcgcaccacacgtcagagacgcagacacaaccacccattaggcacgggcacgcccgctcatactctctgcgctcagcggagaaaatcaatcgatatttaaagtaggcaccctatgtagtaatcgggaaaattcgcacgtcggcaaagagagggtggccatcatcccccaccttggctacgagaagcgtgggaagcagagtgccatcgcacgaaaatacctcaagtggcgtgccgaggaagagatg

SEQ ID NO: 99464 - DNA, 66 bp, Heterodera glycines
ttattttcatctgaattttatcaaaatgtttgtctctccaaggtgtctctgtacccgtactgcatg

SEQ ID NO: 99465 - DNA, 82 bp, Heterodera glycines
ttttgccacccatttgcgcaaaatgtcgaacattttgacaatttgtcgcaatgttgggtgttcgtctgcccgtgccaaaatg

SEQ ID NO: 99466 - DNA, 127 bp, Heterodera glycines
tgatcaacagaaaaattcgactgatcgatcatgttggcgttgcggtaagacccattctcccaaatcgtatccgcacagcagtgttgtctgcaaaaattgcatcaaatcaggacatttggagaagatg

SEQ ID NO: 99467 - DNA, 125 bp, Heterodera glycines
gttatttgactaaattgttcaaaacgccaaaaataactatttacatttaaaaataaaaatttttatatttttttggaacaattatatttttcaattcgtttaccaaaaaacagtcagctaaaatg

SEQ ID NO: 99468 - DNA, 950 bp, Heterodera glycines
tgcaatttcatttcgtgggtactgtagataatgcttccttcctttaacatttttaagctcggaaaccgttccgaatactgctcagaaatctgactccatttaattgcatttttgttaatatttttgggaaaaaactaaaataggctctaaaaactcgaaaagtagcttaacaacaacaaccgaaaaaatgcttttcgtgcttttcaagtcactgagagttcaggaaaaaataggctaaaacctaaaaattcatccttagtcattgacttttttgaaagttaacgaaatattttgaaaagacagaaaaaacgctgaaacgatcattaatagaaaaatgatcattttgttattgattttttatatatattttttgttttaaatgatgctttttgactccaacgaatgaggcttttttggaaaccaaatgatttgagaatttttatctggcaactttgatttaaactatgatgaaaaagaagtaacgttgcacatttttgaatacattttcagaaatatccagaaataataatattctaatttaaattaaaaaacgatttatcgaaaatcatattgaattactaaacacagcggcccaattttgggctctcagtgcaaataggtttattatttatttagtaatcagaacgccaaaactttgcaaaacttaaaattttccggggattttcccttgcaaaagcacaagagccgatctcgagttagaaaatatactttcaaaaaacaaaatagaattcgatagatggggtcaaaaaactagcctgggcaaaatttcaagaaaatctgacccgaggaaaatttttttgaccctagtgtaaatttcaataaatttctatcatttttaagctaaaaatggtcttgacgcgcaaaaaaagcgaaaatttaaagaatatgagcaattctggtgtagaggcaagacgaaaacggaaggaatg

SEQ ID NO: 99469 - DNA, 1003 bp, Heterodera glycines
gtgataaggccatatttggcgcttaaataatgtgttgaacaaaacaatttggacagcaattaacgacgaaacatttaattacataaattgtgcaattagcaaatcaattatttgaccgaaatgcaaatttttaaatttttcatttttaaattatcttgacgatttcgtgtcaattaataaaaattaaagctgaaaaaatgcctcaattttttttcctatattaactcaaattatacagttaattatcagatttacagtaatttttgttgtacgcatgaacctgtgctgttatagctgctcaagcaaatggatgtgtttgtgcggctttcacgtgacaactgtgggcctaattaattaattaatcattaaaacagtgttcactaaataatgaattaataattaagcttaagtaatttaataattgattaatctcgaattgattaattaatcactgataaactaaattagttaatgcctaattaatgcctcatgaaatttgattaaattatttgtcatggctcattgtctaattgattaattaattattgcctcattaaaatttgcttaaatttattttatctgtcagggctcacttgtcgtcgcgtggatttatttgttggccggcttttttggctttctatctgccataaatttatttttttatcgcatttccatagtccactttattaatatgatttcggtaattattatttattttttaccatttttgtaaatgacaaaaaaattttaagaaaataattttcttaaacaaaaaatcgttaaaattttttcctcgaaattatataaaaagcaaaatgttcggcacagaaatgccgttaatttaattttggcaccaattttggcacttttcaacaatctattttttaggtgtaaccgttttttgcaatttttgcaccaaaatccgtcagaaaaaattaattaattaaatttgttttttcaaatatttcatttatccctttcttttaagggtattttgcttatg

SEQ ID NO: 99470 - DNA, 182 bp, Heterodera glycines
attattttaaaaaaatgaacataaatattccataaaataagtcaggaaaaataactgtttctaaatgttaactttgaacaaaatttattttcaaaaattttattaataataacctttaacttaaaagaaatgaataattaattataacaaattgaaaatatttaaatatttttttagaaatg

SEQ ID NO: 99471 - DNA, 305 bp, Heterodera glycines
ctgttgctgattgtctttgccgcctttttcatcagccaatgccacgggcaaaacgaagacgaaacagcggaggaaaagagaaacggggaggaggagggaggacgcgcccaactccaccagggggagcaatgccccgcgggcgatagcccaactcaaagtgagccgtgccgtggcgaacggaccgatcggcggggagaattcccccaaatgccaaaccgacattttcagaatgttcgagaagttcgacgtattgtggcactggtttctactgcaaactattccaacggaattcgggcaataatatg

SEQ ID NO: 99472 - DNA, 307 bp, Heterodera glycines
gcagttaaaggcaattaaataaatgttagtatgcaatcaaatggtaatgctaaaatgcgtcaatgtgtgaaaaaaatggcatcacattttgacgggccgcggatggcatttgacgcgtaataattgggccggccgaatgtcactagacaattttttttagcttttaattgctcaagtaattggctatattagtataaaaatattagtgacgtttaattgcgtagctaaaccattcaaaaaattatgccccaaaaacggtattttgtagaaaaaataataatttttttatttgtaggtagcacaaatg

SEQ ID NO: 99473 - DNA, 64 bp, Heterodera glycines
ggtgcgccatggccattttatttttcaaataatttttatatttaatagatattccagaaaaatg

SEQ ID NO: 99474 - DNA, 136 bp, Heterodera glycines
gaaaaattcaaattttgaaattgaaggccccgataatttatccggtgaattgccttgcccaaaatttcatggttttttaattttggctcaacaccgaatggaagaaaattaaagaactttttctcttggaattatg

SEQ ID NO: 99475 - DNA, 331 bp, Heterodera glycines
acgcatattccaattaaagtgtgtaaattaaaaaaaacacctgatttttatgtataaatctatttaaaaactccaacaatttgtgtaccgtcgcttgtgtcactccttcagaaattgacaaattttacgctatatttaattgttgggtaaagtcttaattttttttaggatgtcggggataaaaacattgttttaccggtgctattagttttcgacagtgttgatttcgacagtaaagctttttttaaaaaaaacttcttctatatggtataagtatcgaaatgttgaaatttaaaatgataagcaatggttcctatacattgccagaatg

SEQ ID NO: 99476 - DNA, 811 bp, Heterodera glycines
atttaatgatgcattaaaataaaatgggactgaattggacgcgaggcaaaaaatcgtatagtatttttcatatgcttaaacaatcattgccatgtcttagtgttgtttgtcagatgcataagtgcaatcacatttttatacacacattggtgttggcataaatctcatttttatgcgaatttccccttattaggctgtcagcaataaattggcactctgccaaaagtgggcatgccaaaatgcttacaggcaaacaaagatttatggctatgccaaaattgggcgcatagttccatagcgtgtatagtgtgggctataatagtcatagaagtatattattatgagaaaaacagaaatctatttctctatatgaatattggcactgtattttgccgatctctttcactggtgtatctcataattgcaggaacattttacttatgtatgactgtgcatagatattttatgtatgtatggcttaacaatgtatattagacacatggccaaatcattgggggggggcaatgatttcgcaaatttggccctgcgcaatgtgccaacacatcgccaactttgtttgtttctctgcccactctcttcattggcatgtgctatctgatttttgtttgaccgtcttccatgtgctattgcttcgcatttgcatgccgtgcagtcttttcgctgaaagtgccaatataaaagcggtgccaaactcagccaatggcacttcattttcaaactactctctctcactaactgttgcacatcccaattttatttcttccttagtaagtagtattggtgcacaatg

SEQ ID NO: 99477 - DNA, 248 bp, Heterodera glycines
attgaaccttaattaaggtcattccgtggcaccgttaattaccttttggcactttgttccttttttgaaatgctccatcagtttggccattttttatttgtttatacagcattttcgggacaaaatttcattgagtatcgtttggcggcaaagattttaatgattcctttgtttgggttaggtaatttactcaaactaataattaaattttatcataattgactttaggaggcattcctcctataatg

SEQ ID NO: 99478 - DNA, 124 bp, Heterodera glycines
agtgatgcaaattttactttattatgttttaattccaattttttgcaggaaactcttgtcccatttcactgttctggacgggagcaatgtgtttgagaaggaatttgtgtacaaaaccaacatg

SEQ ID NO: 99479 - DNA, 485 bp, Heterodera glycines
ttattttgttcatcctttttttttcatacatggcaaaaaactttcccgtcggtgaatcatttcttcatttccaattggccacttttggccaatccttcgtttttcattttcattgattcattttacatccgcataaattgttgcataatattaaatgacatttttccgaaccaaagtcttcaaaaatgttcaatttcttttttctgctgatcttcgcttcttctgcccaaaattcgtttcaacaaaatgtaaaataaattcgacattattttgtttaatattttattttttcgtcaaggaacatttttgccattctctccatggtaccgatgtctgtgttgaatgtggcccattggcggcggacaagcaaaaatgtaaattgaaataaacaaagaggaaaaacgtcattgtttgattcacaaaaaaattaatattttgaatcaccaggtgatcagttgcgcgtgcttttccctccgtcaccaatg

SEQ ID NO: 99480 - DNA, 746 bp, Heterodera glycines
aggggaccagagcgtttgggcccccctttttgggccccggggtcgtttgggccccaacccaaaaatagaaaaatgtgcttttttaaaaattaagattctaaaaactaagcctgagggatccctcgccacttggcataagttaggtttaattaacattcgctcattttttacaattttacttattccaaatcctattattttttaatagttaaccaatttgatgtacattctgatttggacatttttcagaaatggctaacccaattgcaaccaaaaaacaaaaagtaaaattgtcttacgaaggccacctttacaccttcgctaaaatgagttctgatgggatgacaaaattttggagatgcgagttcaaaaaatcaatttcacattattttggagtttctccggggaatttctcgcaactatcgaatgaacccgtgaatttctgttaatttttacattttttattgttaaaattattgttgaatttatttttaaaatgtttattttacatttttatgctgaaatttaaaaagttgtttttactgtgatttttcatttttctgtacttggggcccaaacgaccctggggccaaaaacgagggcccaaaaacgggggcccaaacgcccccgactcgggattgagatccaaaagcaaattcccgcgcgagctctcgtcccgccgtgctgctttttacactttaaaatattgtttcctaaaatttagcataaaaatttaatttgaaatg

SEQ ID NO: 99481 - DNA, 421 bp, Heterodera glycines
  unsure (1)..(421): unsure at all n locations
ccccccccccccccccccccccgtcctccncgcgcttccggacatttggacactggacaatcgacagtggacacatttcgactgtgaagtcattttggaaataacctggcaattggacagtggacatgaagacaatgagtgaataatttttttactattataaatggctttggcagtattaaaaaatttttttttatattgtataaattgcattttctttagtctgatcaggcattaaaataggtaagtgattccttctagtcacagaaaaattttttaaaaactaagattaaatttattgttgtttattaatgagccgggcggttataaattgactaatcggttcggaggaataatcaaatgttctattaaaataaaagccatttataatagtaaaaaaaagtcatttactgtcgtaatg

SEQ ID NO: 99482 - DNA, 100 bp, Heterodera glycines
atgtcagcgaaacacgagggcaaccaacccgactctctaggccagacgcttactacggcaaccaaacatccaagctcgttggatcggcgaaacgacaatg

SEQ ID NO: 99483 - DNA, 114 bp, Heterodera glycines
agcgccgtaattcagggtgattcttcgggctcagaggaagcgaactgtgccgaacaaagcgagagggagcgtcgtcattggctaatccgacaaaaacggcagctccgaaacatg

SEQ ID NO: 99484 - DNA, 712 bp, Heterodera glycines
  unsure (1)..(712): unsure at all n locations
tttttgttgaatatttcataataaattttttgttcacaagcaagtagaaatagttgaaaatagtccggcggtgtcgacaggcgccgcccaggggaaattttgaaaaatgtaaaatttctgccaattttcggttacattatgccaaaaatttgaaaattgtttattcataattttttttgtttatatgcaaaaattacggcgcccccacaaagtgtccaagccacgaattgttcaagccacgaattgtccaagccacgaattgtccaagccacgttttgtccaagccacgaattgtccaagccacgaattgtccaaaagagtaaaaacccacgaanttgtccaaagtctaaaaagctcataaaaagccggaaaatgggtctattttagggttttcggggtcgctgaataccaatacgacatttatatagccccttgcctaaccctagacccacccgaataagaaaaatctccaaatttgattaaaaatatgtgctttttttgtcttcagattttgctattcattaattgaacaaatgattcgtaataaactagaaagtctacaaaaaagtcggaagaagctttgtttgtcagcatttcaaacccaactgaggaggccgtaaattttggagtggagattgacgaactgcatgccgtgataacttccgacaatgttgaacaacagactttgaacgaggctgaactttcaacaatg

SEQ ID NO: 99485 - DNA, 179 bp, Heterodera glycines
cataaaaacttgtttacacgattttttgaaaattttccattaaaaaaggggggggggagtggacaaaccaaactatacccaatatttgcttcggtcactcaaatccacgaactctgccgaatacacctttttcttactttttcctttagacttacgtctccgctctttgaactacaatg

SEQ ID NO: 99486 - DNA, 229 bp, Heterodera glycines
ttccccacattcatttgttttattccaattatattgtgacccgctccctctcctcgctttattattatatttatttgtgttgaaataaatcaatatttatttcattgactgttgacgacacaaccgttattggcgcagtcagcaaacgaagacgagcgaaacaaaaagcgaggaagaaagagcagcgcaccgacgcagcaaatgcaatgccaccgatgtgggaggaatg

SEQ ID NO: 99487 - DNA, 1003 bp, Heterodera glycines
attgacaatttttaaattaaaaattttgtcaagaaaacaaaatttgggggagaatttttgaaaaaattttccaattcttagtggtgtatttaaaaaaaaaaaaaaaattatttttggtcgattctaggggtgtatagggaaaaattttaatgctgaaatgcgttttttgagctcctttcttcaaatcaatcgagcaaaaaaaaaaagttttttcactagaaatcgcggccctatttatgtttatgttgtaattaattcattaattgtgagtaatcgttgataaaattgctgatgataaaatggagttgatttaactgtgccaacacaataaatgccatggcacaacaattttagccaaaattttgaaaaaatcaagtacttgacgaaaaaacatagacaaatgcaatgattttcaaaattcgagctcgtattctttatcagtgcattttttactagagtgccacgggaccgtgaattttgggcaaacccgggaccgggaccttttcgggttgaaaacccgggaccgggaccttttcgggttgaaaacccgggaccgggaccttttcgggttgaaaacccgggaccgggaccttttcgggttgaaaacccgggaccgggaccttttcgggttgaaaacccgggaaaaaaccaggactagtcccggtcaaaaccgggaccttggtactcagttgtactcagttgtgcgctaccaggtcccggtcccgtggcactctatttttgaccatagaaaaagtgattttgtaagaaattttttttaatttattttttcgggcggaacacccaattccgaaagattaccaacaaaaagatacaaaaacttcatcaattccttttaatgactataaaaatgtttgttttttcgcttttcctcgcatttgaaaaaaaataaattttctaacgcaataattctgcaattattcttccctctgtgacgacgacatcattcggactcggccaaaattgtgttaattgccaaaaaatg

SEQ ID NO: 99488 - DNA, 53 bp, Heterodera glycines
cagctacgtccaatgcactgttacagtcgccgggttcccgtggaacaacaatg

SEQ ID NO: 99489 - DNA, 208 bp, Heterodera glycines
aattttttttttttttgcaaataataggccccttttcctttgaattttttttcggcggggcgtgcaattatttatgggcctgcaaataaacagcaaaaaacaaaaatttttcccacaggcaatcgctgtgaaaatggcaaaatgccgttgctgatggagtgcccgtcaccgccttcctcctgcccaatggacgcgtccgttttaaatg

SEQ ID NO: 99490 - DNA, 141 bp, Heterodera glycines
agtgagtaattattttgtataaattattgtcgtcgcccgcgggggaggaaaagccgcacagcagcgggggaccctttgtgtgaggcgcaagcggcggcttcttatttattggctgtaaaataagaagtgttccctgccatg

SEQ ID NO: 99491 - DNA, 296 bp, Heterodera glycines
  unsure (1)..(296): unsure at all n locations
tttttgtctcaaaatagaaaatggacattccagttttttacccatagaccaaaaatntaagaaataaaacttgtcagaaaatttttggcaggaagagcaaaaaaaaaataccgaaatttnttttctgcttattacgcgcgctaacagtgtaaatttaccacagtaatttctccatttgaaactttttaaattttggcttatccataattttcaaaaaagtaaatcatttttcagaattctaacaatttcagctatgggcggatcagtttatcagaattttcagcatttttcagatg

SEQ ID NO: 99492 - DNA, 871 bp, Heterodera glycines
attgaaaaatgttatatttttccgatatattaaaaaaacatgacttttaatatacatttcaacaaaaaatttttttatcaaatttagggccgtgaatcgatgtcatctcccatttataatgcccattggacttcgactgaaccgatttggtctttgtgcttcaattcgcaccacatgaaaatttgcgttggcatggaaaaatgtgccaaaatactgaacgtactcagtggacaaaatttttatgtcggaagcggcggaaaaaatgtcatttcgtgtattttttccaaggttactttgttatgtttttttgatgatacctaatgatttctccaaggacggaaataccctttttctgggccggaaaaatgccgatgtttccatgttggacatgcgcatgacatcgaaccataaagttggcgaattggcccagtcgccctctaccggatacatgcatttgctacagacgcgtcctcacactttagtcactgagaattttgaaggaaaggtccgccattttttgtttttgtctaaaaatgataactgaacagatcaaactttgggatgtgcgtggccgttgtcaacccttggccgaattggagattgggcaccgcaattcctcacataaattaccttgcttcgttgatgcttcagaacgctttgtattcgccgttggtgaagacgcgacagtccggggatggtcacttcacacgggcgaagttcgctaatgaaaaactatcataagactagggcgtatttttcttgagccgaaatacccatcctgaagattctctggctccgaatccgaccctcgaaaaattattgtttttttctttttgtaaagctgctgtgttcggtcacaagtccaaagatg

SEQ ID NO: 99493 - DNA, 138 bp, Heterodera glycines
  unsure (1)..(138): unsure at all n locations
aaatgttattaagcaaagtaatcaaataaaataattctataagtcattcatttaaaaatatatatgcnnaatacaacttatttataatttattttttttaatattattaagcaaatttctctcagataataaaatatg

SEQ ID NO: 99494 - DNA, 141 bp, Heterodera glycines
  unsure (1)..(141): unsure at all n locations
gcgcaagccttgctacctgataagccctcgaagtatancacagaagtcctcanccagttgaagcgtgccgttgaacccatccttcccataaaaggcaaaaaaacagcagattatcttcattaataattattttaagtgatg

SEQ ID NO: 99495 - DNA, 1003 bp, Heterodera glycines
ttagttgctgaattttttggcacatttaaaaaactatatggcaaagatccaaaaattacgagaaaggggaaaaattggaaaaggtaattaactaaaaaaattattcgactctgatcaattatgcgtctcctccctttttatgtcaatttcggctctatcagctcatctgactcaccttttttctgttaatttcaccctttgatcattccaattcgcccccttccgtgctagtttcgactctgatcagctcattttgtcacaccctttatctacgtctatttcgggctctgatcgctcatctgtctcatatcttttctatctcatttcggctctgatcagctcatatgtctcaccccttttctttcgactctgatcagctcattttgttacatcctttatctacgtctatttcgggctctgatcgctcatctgtctcatatcttttctatctcatttcggctctgatcagctcatctgtcttaccctttttctatgtcatttctctttcatctgtaccacactttctatgtctatttcggctctgatcaactcatctgcctctctagccctttgatcagcccatttatccctcttccatgccaatttcggctctgatcagctcattttgttaggcctttgatcagcccatttagccccattcggagtcaatttggccctgatcggttattggcattaccctatttcctttgcaatttcacccttggatcaatacgattcgtcactttcgtgctaattccaggtctgattacttcatttgttttacttcatttccgttccaatttcaccctttgatcagtccaatcaaccttccatgccgatttcggctctgattaaatcattttgttagccctttgatcagcccattccgatttcggctcagaacagctctttttcatcccctttcccaacccatttcgcccttttcgcgccaatttttcgggaccgatttcattaacttccgcttcccgcatcttaggaaatg

SEQ ID NO: 99496 - DNA, 324 bp, Heterodera glycines
tgttcggcgccctctttgaacttttttgccggctccacggcactctgttggtgccactaattaagcattagttagctcattaaagcattaattatctcattatctattaagtctgctggtccctgaccacctctctgtccgttctgttggccttcgagcgttgcgtggaacagactttgcccaatttggccaagtcactgttccaagggtgccgaatttggggctggtgtttggccattttggcctattccctttactacggcttcttcacaattccgctcacattcagcggcatcaccgctaattggcagttcgacccgcatg

SEQ ID NO: 99497 - DNA, 536 bp, Heterodera glycines
tcttcagcttcgattgccgctttggcagtctcctcgtttaaatataggttattacttatgacccaagggtgggtagcaaccataaatctaaaaaagcagatcattcaacgcgtatcaaactactagaatcgtataattttttcgctttttgatcactttttttgttcctcatttctaagagcattattttgttgagtgttatggcatagcagatcgattattttctcgtactgatacaatttatgaaattttgtgtttttaactcgcatttgagaatttaaattttttaccaacccagaaaccagttcctggcccggcaatttggaaattcgaattgacctgttttccagtataacggtcttggggaggtcggaaccggaaaaccatatttgaaaatgtcgtcttgaaatctcggtcttatacgtattttaaaaaaaaaacaaatttttttaaatcgacaacttgcgcttgttcaaattttcttgtagttttgccccttcttactatagcacataatctgctgttaaaaccaaatg

SEQ ID NO: 99498 - DNA, 253 bp, Heterodera glycines
agaaatgactatttaatttgaaaaatagaattttaatttcaaaagtttggccactttttggacatttaattttatgtggccactttcacaaaatttaaattccaacaaaagtcaagtatctcgctttttaaaaattaaagccagaagactttgctgttttcaaaataaaaatttcaaagtctcaaaattaacaaaaattcaaattggttttcctgatcagcgagtgatcagcccaaatttacaaaaaactatg

SEQ ID NO: 99499 - DNA, 196 bp, Heterodera glycines
ttttgatagaaaaagcatcagagagccttatttaacttttaattaacatttggtgcgtttcagagcactttctgaaaaaatacttatgaattaattttgcaaaaaataaataagtaatgaaaaagtcagaattttgaaaaattttaaaaacaacaagcgttggcattttttcaggttaagttagtcctttacaatg

SEQ ID NO: 99500 - DNA, 523 bp, Heterodera glycines
attaatgacgacaaccaaattttcaaggaagtaaatgtttgggttctaagaataattttttcttagaattttttgttacatttaaataaaaattattgggcaaaatttcagcttattctaaaaactatcgttttaatttgagataatttatttcacctaaaaaatgttatcacctaaaaaatgaagtccaagccttggatgaataaaaaatttcctgagaaaccgataccattgcgagagaaaatttaatctcatattttattttattatgggagtgtggtcggcgtatttatagcgaataaaagtttattcaaactaagtagtgaaaaatgaataaatattcataaaatattaaaataacggtaaaatacatacgattatgtatattttcataaaaagcagtaaggctaagacgaataaaaataatttttttttgtgaataaatagaaaataataaatgcgattgaagttgaagacatgaaaaattggtagacaaaagcggacaaaaaagcatataaatatg

SEQ ID NO: 99501 - DNA, 563 bp, Heterodera glycines
  unsure (1)..(563): unsure at all n locations
gaaagcggaaaaagaaagaaaggaacgacggatttaaacttnttcattatttattttgtgtatttcaaagtgattgatgattttgaatgttcggaaaattattgtttttcattctttgtgccggttttatgcatgtattgggcaaaatgacagaatctgtgttcatccccccccccctggtgagaagtctcttttgggacagttcaaaatacagtaggtgctgaataacaaaagttagaaaccaaaaatcactgtcatttgctcaattcggcattgattgtgagttctatcagacagtcccagtcggaaacaattaaacaattagcctctaataggagaaaaaaatttggcatgcctattaacatatgtaggaaggcttatttggtgcagtgataaaatagagaaaggatccaacgacaaatgccccatagagacaaataacccacagacgaagcaggacagctgtaaaaattttaaatttatttggcaaaacgtctcataataaatccaataaattattttgggataaataatcaaaaaaatttgttctgaaattctaaatg

SEQ ID NO: 99502 - DNA, 118 bp, Heterodera glycines
cagttggcaaaggaattggaggcggaccaacaagcgcaatgtgtctttctaattattttctaaactaaaaaaaaaaatttgtttagcttctaacaacaccgttcctggctggtcaatg

SEQ ID NO: 99503 - DNA, 150 bp, Heterodera glycines
tctcgacacagagcaaaaagcaaatgtaaactgtgggaacaaatgaaaatcatttaaaaatactgtaaaagtgccacaaataatttgtgccatttttccccgctgctcacattgtgccaccgccgaagagggcaatttggcgggatcatg

SEQ ID NO: 99504 - DNA, 156 bp, Heterodera glycines
aaaaagtcatatatcattcattaaatgatggcccatcatttttttctccgacgcataaaatttaattttcaattagttgggcactaacttttacaattttcaattaattttgaactttgcacaatttatttgcaggcccatcagatcaaaaccatg

SEQ ID NO: 99505 - DNA, 326 bp, Heterodera glycines
cttaaaaagcaaaatccctcacgaactttgacttttccatgcctcactttcttctccgatcagtccaatcagtttttgaatgtttgtgggcgttccctttatcactgcttttctgctgctgtcttgtcaatttgagtctatttttgccgttgtcggttggttctcttggcacgtttcctttccctcccctccctttgcttctccgatgtgtgccttcccctacctcccccccccccctccgttctctccccctccttttcccttcttccaatttattttgtctgttaagccccgcccgcctcagaaaaaaaagatgagaaaaaatg

SEQ ID NO: 99506 - DNA, 409 bp, Heterodera glycines
  unsure (1)..(409): unsure at all n locations
caatttaaatgcttcaaattgggggtcttttttttagagttttaacggtacgaaaaaaagagattaaatttgagagaaaaaataataatttgaatttatntactcatctttttaggtacgatgtgacatcagtaagttcttcaattggcgtcaattatttattttaattaatattttttgccaggaaagttcgtttttgaatgtgcgcaattggattgagtcggtgaaggcgggcgttgacaatgaaagtgtgctctgtttggtcggcaataaggtcaacaaatttaagtcatttaatatattattatactattttgtaatttcttgcaatttaaaaataataaaaaatattaaaaattggaataaaataataaaagaaatcattttcaggtggacctttacccaaatg

SEQ ID NO: 99507 - DNA, 147 bp, Heterodera glycines
ttttttcctccagatcaatcgctgttcagcaaattgtgggaaatgaacaaaattcaaacaaatatttaaatgcaaactttccaaaattttcgcaacaaataaattttgccgaaagcatcaaaaatgatacacaaaacgtccaaaatg

SEQ ID NO: 99508 - DNA, 292 bp, Heterodera glycines
tttctcggggaatctcaaaaatgaaaaattattaaaaagtattttttcctgtgaccgaattcgacgttaaaatgacattttcaaatttttaacaaataattagattttcttggagactttgtttatataaaatatttatttgccattttttggagtgccccaaaatgccaattttatacgcttttaagaattagtttaaattttgcttctctttttttttttgtttgtttcttcgcttccctctcattgtcaggtcattgccattgcccttttgtacatgtccttcaaaatg

SEQ ID NO: 99509 - DNA, 770 bp, Heterodera glycines
tcggattgtttggcatggtggccggtttatacgcgagcgtcagcaatttgataagtcatggatcgaatgaatgcgatgcgacgacgacgactgggacgccaactattatgtggaacctttataatgggacaactttgtctagcagtattcagtgatcgcccttctgtttcatttgtaaatatgttgtatttgattgtctgtacataaacatatgaataataaatttatctttgttaaaatgcatattttatcaatggaaaattttattttttcctttgggaattttgacgatgagcgaatataagggagagaacgatagttttagggaaaagtgacaaaatatatttttaaattaattttaataaattaacacagaatttttcgtttattcttttgatattttctctcttccgtccgatgattcaattgaccttttcattttaagttttcctttcgttttgcgccgtgaataaatgttttctttctaattgatttggtcctttaaattccctcgagaaaaatgggcaaaataattttcgattgacgtcgaattgagggaaaacgaaacgaacgaattaaacgcatcagccaaagcaaacgatttgttgtttttgtatacattttaatctcccaattagtcaatcgccttctttcgtctgatcgtcgcaaattaacgcccccaaaatatttatggtccatttaatttaatttgcccccccccccctcagtcattcctttcaatttttagtccaaatattctccgaattatg

SEQ ID NO: 99510 - DNA, 123 bp, Heterodera glycines
  unsure (1)..(123): unsure at all n locations
atcanntgcgcaggcccatnagccgaaaaaaagaaattcacgttggcgaaaagccgacgttgttttttttttggtccctaagaattttttctctgatataatttttcagaattaggccttatg

SEQ ID NO: 99511 - DNA, 1003 bp, Heterodera glycines
  unsure (1)..(1003): unsure at all n locations
ggaataaacaaaagcaaaaaattatcgaaaatattctaagactttttttacaaagaaatttaaatatccagtcaatttgattttcacatttttaacattaaaaaatcatattttgtttagtgaagatattattccaaaattgtttgaattctccttttcattttaatccaccaattttgtatcacttaaatacgaattactggttctctcattaaaaaaagaaagaaaaaaaataaaatttaaaagagaattaattaatgttcatatttaaaatctcgactaaaattggacagcaaaaaataataaattaaattataaaaaacagcaaaattagttttttgcggtaaccgagtttcagcctcacaaatcaaaacaaaataaaacaaactttcttttgctcctttggattattaaattcttttcctttttttttgtccacaggtttcaaaccaaaaacaaacactttattactatttttgattaattaaccaattaattactcccgatcctcccataatttgctgctgctaatgacactggccactcccctcaaattagtccaaaattacaaattacacacacaatttcctgccgcccatttcgaccacttttgaagtgcacccaaatgggttccttctcccccccccgcacattccctcgggggatcgttcgtcagcaatattttgccaccacttcacccctcccccccccaccactggcgaagtgttcaaaacgccacagttggaccaaaatttggaggaataaaacagcaaaaaaaagaaaaaaattactaccgacaaaatcaagcacacaaattgggccaacagaagaaaaaaatttgtttgttaacttggctgaacaccaaacaaaactttacgattttataattggaaaacgggcaaaaaaactanaaattttgtacaattaaatatacaatcactaaataagataaaaattggcctaatttattaacaagcttggtcaaatgatagtctaaaaaatg

SEQ ID NO: 99512 - DNA, 654 bp, Heterodera glycines
acctcataaacatcacaatttgcatcacttttttttcatttgctaaaaattatttataattaaaatttaattttgaatgggcaaagtgttgggaaagggctttttctaattgaaggctgtcaaatttcaatttaaatgcgattgacgcaccaaccttaataaaaactaacaaacggtggccgatttgtttgatttggccttccaaaatccttcgccgttttcggttagtcaatacattaatcttttctgcttggctaagcaaaatcttttggcgaagctgattaaacaaaaatggactgaattcgcaaagttatagaggataaatttagacgacaaatgaaaaggtttgaatagtttaaggccaactgcgatgggtgtgagtgaatgaatccactgttggcactatgcctacctcatcggttggcatttcctctcaaaaattggttggcatttgccaccaaattcatttgttggcatttccctccccccaccgtccattttcccactttttccccaattttcgtccttcgcttttccttcactcataagtttgtctattcgatttctatatcttcaaaaatccatttggttgcatctttccaaacacttattatatccatttattaaagagaatcactcagacgccccaaaatg

SEQ ID NO: 99513 - DNA, 378 bp, Heterodera glycines
tgccaaactgttgccgttccgcgccgtggcacacactggtgaaggagggcgaatgccgcctgataattgcatccgaaatttgcagccgaatacgcgttcactttgggcgtgccattgctgggcaatttcgaattggacgaggatgacagaagagtacgcgcagagatggtacatgcctacggcagttttgtgaagaatgggtaagccaacatgctcattacacctttttggcatttgagatgccataaaatacgtccagctgctgtgtttcacaattccacccggcttttttcaaattccattcttttctaattgttagccatttataatcgcatttttaataattgatctcgtctctcaattagtgtgccaaatatg

SEQ ID NO: 99514 - DNA, 190 bp, Heterodera glycines
gagacataagtgcccgaaggcctttggactgaggaagtggcctaatctcgaactccggagctgtcgtgtgagtgcctgtgcactcgaccacgattgctgatgcagctcgccgtacggctcgtctgcttaccctcgcaggacagcatatggtggccccctgctagctagcatccctgtggtgctgacaatg

SEQ ID NO: 99515 - DNA, 452 bp, Heterodera glycines
taaaatccggcatttgagcgattttctcgacaaaacatggcataacattgcttaaatgcaacaaccaaaatttacaacattcttggtatcattcgatagccaagctttttctcaattagtttacaaaatttaaaaaaaaattgatcaactttgcaatcaagtacaataattctgccataacttatttttgaatttgatatttttatttaaaattttgcatgcttatagagaaaacgcttggatatcgaatgataccaagaatgttgtaaattttggttgcttttaagcagagttaggccatgttttgtcgaaaaaatcgctaaaatggcggattttacgaaaggacccagcacgattgccgtttgaactaattgtaagtgaaaatttcaaatttataatatttattttttcatttaagccttttttacattgggctttcaacccggcaaatg

SEQ ID NO: 99516 - DNA, 156 bp, Heterodera glycines
acgaagagacttaaactttattatttttaaacttgcctaatttattgataaattatttcccatacgactttaataaagttaattatggtcgtttttccaatttaatgtttcatttttactattgaaaatatttgtttgtgttttgtgactctgatg

SEQ ID NO: 99517 - DNA, 88 bp, Heterodera glycines
tttttaaaattaaagcaatttattctaatttcttagcaatatgaaatgttagaaaatatatttaaatttttagctgaatttactaatg

SEQ ID NO: 99518 - DNA, 65 bp, Heterodera glycines
ttgcagcaattcgcaaattgccaaaacccaaggccaaatacaatctcacccaaaatggcaaaatg

SEQ ID NO: 99519 - DNA, 247 bp, Heterodera glycines
agggattcactttcgcaatttgcctcgccggccaagcgcgcggtgcgcacccattttgggggtattcagcttttcctttcgaaatttgccgaattcggttactgtcttttcattgatttgttccatattaggacatagatccatgcctacgtttttccgtttcttactttcaatgctttttttaactgcaggataggcttcctcctctattatctccgcatttccgctccgatttattcggatgatg

SEQ ID NO: 99520 - DNA, 152 bp, Heterodera glycines
ttcatgaagattttgtgaaaataaatttttttttgtattgttggggaatagccgaggatgggttattattcagtcccaaaaaatattttaataaataaaaaaaacctaaacattttaaaattgacacggaaatttgccatttttacgagatg

SEQ ID NO: 99521 - DNA, 405 bp, Heterodera glycines
ctgagaaggaaagtgccaaacggagagaaaaagccaatcaaacggaaaaaatgccaacaaacgaatgaatgaaatgatcgaccagcataatgtatcaatgattatgccataacaaatgaaaagccgacgaatgattaattatgaagatcaaattaattgtccgattattacgcactttgtccaaaaatcagcccaaaatatgaaataaaagtaaaaatagcaacagaataatcaatcgaatatttaacttcgcataagcgaaaacattttgggacgggcggagaatggagggaattcagcggacacttcaaaacacattttcccttgtgaattcatatacataaatcaattaaccaaaaattgtcgaccaaaatatttctcccaattaacgctaatagcccaatg

SEQ ID NO: 99522 - DNA, 1003 bp, Heterodera glycines
attaaacattggatagaaaagcatcagaaccaattgaataatattcactgatggacgtacaaattaacaagtccaatcatcaattcacaatcattttttgcattggaaaataattccaaaacaaaaaatgcattaatgtgattttagattataatctatttgtgccattaattcaaataaatttgaaaccaattaaattctctcgacaaacgattattcctagaaatttaaatttataaaaaaatttttactttattaactttctttgagattgttttcttaaaaaattctaaaaaaaaatttctttgagagaatttcttgcaaaaaaaaattttaagtgcgagtttgaagcattaaatttgtttatcaaaattattaatcgtttttcaagctaacttatttattacagcagctcaactaatttacaaaccaaaatgaacacaaaaattgcacttataatttttggcactaccatctgctggcttttgccacgttcatttggtaatcgtttttttaataaaataaaaaaatgaattttttaataaagcattgttctgcaaaaaaggatttgccgaagaattgtctggtgccgtgtaccgcaacaaaaagggtgtatgcaaagctggttttcagcactgttacactgtcacctgcacagcatgtcaatggatttattatgcattaaccagattttttttttagaattttaaaattcaaattttccggtattttttttttttgcatggactactgaatcattttgaaaaatttattgaaaaataccaaaaagttaaccattttctcatgcaaaaaatgacttgagtagtgcaaaatagggaaaatgaatgatgaaaagagggatggattttggtactgaagtcgaactttttttcaaattatttaatcaacaagaaacatttggtctgatcattttgctgtccattttttaggggatcagcctggaaacacttttcattattggggttgtgccaaatccgaaatg

SEQ ID NO: 99523 - DNA, 560 bp, Heterodera glycines
agcagcaacagtcgcaacagcaggccaaaattgacggcaccaaaacggtcaagcaacacaacaccgtgagcaaaatgagcatgtcccaaaacaggatttttttttcatcataggatagacctacccaaatttaaagtgtatgcaaatattttctggaaatttccttgcattaattatataatacatgaatttccgccagtttttcgcgcaaaataatttggatgaaaaataaatttttaataatgcctttattacgaaacatttcaaacttgaaatttttatttttgaaaatatgttgtcgaaagaatcttctaccgaattatggtctaacatattttattataaaaaaaagtttggcatttattttttgcagataaatgcaaatattattgagaaaattgatgttgtgttgtacatttgtggagcacgtgaaatgcttgttaaataaaagtggcattttaaatgaaaacttatataataatttaaaaggcttaaatatattttttaataaaatgtgccaaatccctttcatccacctatctcttcttctgataaccatg

SEQ ID NO: 99524 - DNA, 348 bp, Heterodera glycines
tttaagaagaaaacgaaacaggcttaattaagtttttgatgctatttcatatgagttcataagctattggaatttgacaattcttctatgttgtattgtaccacaccttgtcaattttggggccctagcagttcaaaaaagatttagatgtttggcgaagtggtttttgtaatatagcaaagttaaaaattttgttttccaactgtgtttggctctcgaattttgtgtcattttgtagcattttttgtcggcttaccaatgataccttacttcactataagagcccaagtttttctagtatgtttttgcataattaagaaagttgtggatgttattcaaacaaaaatg

SEQ ID NO: 99525 - DNA, 198 bp, Heterodera glycines
agcgtaaaactaaaaatgtacatttagttcttaaaaattggttgcgatcaaatactgtggagtcaattaacgcaagaagcgttgaccacggaggaaatacgcctttgatttgcgccatacagcggaatgtttgttgttttttctatttaaaaataatttttatttgcacttataatagcacctcttgcgtgcacgatg

SEQ ID NO: 99526 - DNA, 84 bp, Heterodera glycines
tgccgggggtccgtcttcgatcgctgtcatcctccaccggcgaccagcacgtcgacagtagcaacgacaacagcctcggagatg

SEQ ID NO: 99527 - DNA, 1003 bp, Heterodera glycines
ttctctctctgtttctcattttatttctctctcactctcctctctctttctctctctctcgttctctctctgtttctttctcttctatatctctctctacccctctctctcgtttttctcctctatttcctctctctctctcactctttctctttcactctctatctttcactttctttctccctctttcctctctctcccctctgttgtccctttctcctctctctttctctctctgtttctttctcttctatatctctctctacccctctctctcgtctttctcctctatttcctctctctctttctctctttctttctctttcactttctccctctttcctcactctcctttgttgtccctttctcctctctctctctctatttctttctcctctcccccttcctctctatactcgctctctctctcactctcttgtttctctctctccacccaacggcaaaaatgttttttttcacggtttttaaaaatgcattgtttattttgatctgtcttaaatcggttaatcaccaactaaactggacaattctagtatcgctctaaactttcaattttcatgtccctataggcatgcaaaatttgatttgaataacatgcagaaaaagagttatacaagtacgtcaaattgagagaaatgacaaagaaaaagagaaacgaggagatattatcgaatgaatccatagtgtatagttcatattctcctgaaagacccctctttatcatttaggcctaagcctggattccttgctcatatattattttttaatcgaaaattattaaagaaacaagagcatttcatttaaaattactcttgtttcttttccagcaaaatctcttcagcttctacactctatcgttggtttatttctgcttcttttccttatgaggtttttttttttaaatttaatctatacccatagaatttttactttaatttacccgtccgcttttcagtaatattaaatttatattgtatcaatg

SEQ ID NO: 99528 - DNA, 94 bp, Heterodera glycines
tgcattttaagcgtccaattgacttttgcaaatcaccgaattgctcccccgttttattttcaccatacaataataaatcttggtttatacaatg

SEQ ID NO: 99529 - DNA, 254 bp, Heterodera glycines
ataaacaaatgcataagccaagaaaaattttatttacctccccatgattggcttttattgctgtaattaattggtcacttgaaaaaatttgggtggagaatttcgggagggcctcttttggatttattgaataaattaaaagataaaaataggggattcatttttaaaacatcctcacttacccgggcccgaatttttgaaaatccaaacccggtgccgagccggttggtccgcaaaaaatcccggtaaaaatg

SEQ ID NO: 99530 - DNA, 262 bp, Heterodera glycines
tgttttgcgtgatgatcaaactgaagaagcaccaccctcgatgaataccaatgatgaagtgttgaacaaatttgctctgtcacgacgcatcgaaatcatcaaaatcggacggaaaacggttttttttcttcaagtttttgcttgtacaattatacaaatttaactatgttagacaaatgttgtggacgatgatgaggaggagggcttggttggcattccgcgaattgtggaatccattgaaactgtctgttggccgaacatg

SEQ ID NO: 99531 - DNA, 167 bp, Heterodera glycines
aacttattctgctgccgtacgagcactaaaaggggctggttggagcgagggagacaaagaatgacgacgacgacattgctgagcggacaaacttgggctttgtcaaacgacaagtgaccgctgcagtacagaagcggaagggaaacgtcagcgaacggaacgcaatg

SEQ ID NO: 99532 - DNA, 996 bp, Heterodera glycines
  unsure (1)..(996): unsure at all n locations
tccctgcggcatttattacagcgccactaaatttttttattaaattcatttatgcgttaaatttcaattaccgtataccgttattttttggtttttcgaattacggtagtcaaaataagcgatgcaacttccattaagcgtttcaggtgattggtaattattgggagagattacggtaattggtgcgaccaggaaaatgaagaaaaaaagcatttttatttaaatgtaacttttgtcaaaagaaacatgctttaaataagcaaaaactcttcgtattttaatcgcttagtgtaaacaaacgactttattttcttgtcagttccaatttttaaaacattttttaacataacgtgagatcgccaacttcagttttatctaaagaacaaacacaatgtcttctagcgcatgcgcaaacaaagtgaacttttttatttattcatcttattgtggaatgaaaaaatctcctaagttgaataaaattgtaaaatgtactttattcacaaattttagctgacccacaaaatgtccagcccacgaaatgtccaagtctcgaatttgagttttttattattcagatgggcctaaggttaggcaaggggtaatataaagggtatattcgtattcagcgactccgaaaaccctaaaaatcctaaattagactcattttgtttttataaattttgaaaaattttggacatttcgtggcttggacactttgtggtggcgcccaaatttttgatcggactcataaactctgactggacttacaaaaaaatgattggactcataaagggtcattggactcataaatatttgattggactcaaaaactctgattggactcataaaactcgattggactcataaaactcgattggaactcataaagtgcattagagnccgatttttcagagtaccaatcatcaaacatggatcagcgcttgtaccattttaatgactggcattatttacttaattgttggcattttaataatg

SEQ ID NO: 99533 - DNA, 320 bp, Heterodera glycines
  unsure (1)..(320): unsure at all n locations
tgtcgatataaagcctttaaaaagacaaatatcaaaattttcggccaatgtaaaacaaatgggttgtgctttatacgttttaataatataattaaattgctaattagataacaatacattcatgtacacttttatacaactgttcttcaactttctgttttgtccactagttntaatacacgcaaacacatgtgtagatacgcgaaatacactccttaaaatcggcggaagtgaaagtgtgaaaggcgtataaaaatcgatatctcattctacagtatcctttttatgtattggttgctgcaggaggcagagaaaagatg

SEQ ID NO: 99534 - DNA, 395 bp, Heterodera glycines
attttattaatttattaatataaaaaaaattaattacacaccggaaatgttaatgtatgggttgtgaaccccagcaaaatcaatccggtccgcaccaacacgaagtcgggaacggcgccaacgatagagaaaacaaatagacacaacattagtgaatgaaagaaataaaataatcaaataaagtgccgaatttggggatggtgaatcgacggggggaaaagcagcgacagcaacggccgaatcattattaaggcaatatgtattacaaaattttgtaacgttttgaaacatttttctaaatagaaaaagtaatgaaaaattaataaaggcaataaaattttattaaatacaatttgttctagacaaaatatttaggaactaaacggaaatcaatg

SEQ ID NO: 99535 - DNA, 67 bp, Heterodera glycines
aaactagcggggtcagcgccttcggcgcatcccccgctaggtagtacgattgtattataggattatg

SEQ ID NO: 99536 - DNA, 379 bp, Heterodera glycines
ataagagaaataaatttaaaaaaaaaacataaataaatttggataaaattttcaaagattaaagctaaacttaagtgaaattcatttaatagccaaacttattgaccctcttttcatttctctccaatcgttggatcttgcacccatttatgccaacattagccccttagtttaatgatgcattatgtacattgccccgccttcttctcaccaatcggtcaataaattctctccatagccactcattttcattttctgttttctttttcatcttgctcgtttatgaacatttttttttcactctttttagatctgagcaaaaattaatcccaataataatctgaaccccttcgcctgcgggcaagaaacagaaaatatg

SEQ ID NO: 99537 - DNA, 221 bp, Heterodera glycines
aagcaaaacccaaataaaggattattttcgagcaaagtcacaaaaatttcgattacagaattcattttctgatatgtttgccgagttttaagttaaaacggtcccctaatgacataaccaggctcttcacttatttaaattatcaaagtaaatcgtaaaagttaaacaaatgagaaatattaatgttttgccttttacagaacatcaatttggccggcatg

SEQ ID NO: 99538 - DNA, 88 bp, Heterodera glycines
cgtgcgttaacattaatggattttctgtggtttcggtccgagagtcttggtcttgtgactgagtcgaaattttcaactttttaaaatg

SEQ ID NO: 99539 - DNA, 1003 bp, Heterodera glycines
tatttgagtattaattcaaaaaaaatcaaatatatgtagtggcacataagtggcaatagatttggactacccttcggacagtgcactggaatgacttagcaaaaaatggtctatcacgtgcaaaacaagaggctacttcacccaaaattgtaataaatattttaattcataattttttactgttttctcatgaaagtaaattaaagtttaatttataaagaataatgcatatttacttaaagcaaaaaacttttcaatattagaaaaaaatatacattttcataatctaaaacaaactattgcctcgtctcacactatttctttaaatgtgaatgaattgactattttacagaaaataaagcattaactttgcttgaaaaaaatttgtattgaaataaatataaaattttaatctaaaaatgaccaaatattaaagaacataagattcaaaaaaacaattaccgataaacatcaatttaaagcattttgtaattaataatgaagagaaattaaatttttgaatttacaatatgaactcaggattataaccggctagctcagtaatcaactaaaaacaaataaaaacaaagtaaatacagttaaatgaaattgaaattattttgcaatggattcaatacttaaaaatttaataaataaaatcaattagctaaaatattcaaaaataagagcattctaaatttaaagtattatttacttattttaaaaatcttatgacattaatagggttatattcaaataaaaagcatttttcacaaaatgaacagcccaaattcaaaagcacgagttaccttaaaaaatgtaaaaaacttgagcgtttgacggaagaaaagattaaaaaattttaactataatcactcaatccaacaaaaattggcaatttttttttgtaaacttttcgccaaaatacctgttttttgagatttcatctacctacctaattatttttagtttcttacttacctttttggtcttttaaatgatg

SEQ ID NO: 99540 - DNA, 177 bp, Heterodera glycines
tatgcaaattttttcggagtttatgcaactgccaaaaacgaaatttttcggaaattgtaattccgagggccaaaaattcgccataaatttgttttttcgagggcccggttcagtaaattgtctgtcactcaatcaatgctaatttcttttttccttttccaggaactccaggacatg

SEQ ID NO: 99541 - DNA, 420 bp, Heterodera glycines
actcaactgtttacttccaaccgtgacaatcatttataagataattttttgtcaatatggatctctaatttatttatgaggacatcagagataaaagttagcagcaacaatgatatccataaatatggccgaatcggaaagtataaggaatattgtcaatagacatcgtagtttgcagttattttaaaattaacgactaatctattccttttgtcttaggctacaaaataaaaaacgaaaaaacatgcaaaattattcgctgctgaacaattcgggctaaatctgaaggcttcctgcttataggaacccaaaggcgcgttcaacacgaagcaaaaaattcctttatttattccaaagctgtgttataataaatttaattatattttgtatttttacaggaactcagccattgttattatg

SEQ ID NO: 99542 - DNA, 91 bp, Heterodera glycines
gctttacatattttaatgattataaattatattaagtatcatcacaagtgcaataataagagaaggtcaattagaccgaactcacaaaatg

SEQ ID NO: 99543 - DNA, 85 bp, Heterodera glycines
gaatcttacggtaccgtttgcaattttctgcttctccgataggcaccatgttcatctgcacaaagacacaatgcattccgccatg

SEQ ID NO: 99544 - DNA, 186 bp, Heterodera glycines
tttagcggtggtcagcgtgtgccgttggacaagcaaacgccaaaactcactgaacagatgatcgagaagtggcaagttctgcccatcgacgtgccgcgtggcattgacacacagcgcgacaaagcaatgatacagaacgccaacccattttttcatgcgcactcagtgcgtgtcgaaacaaaaatg

SEQ ID NO: 99545 - DNA, 397 bp, Heterodera glycines
tttagtgaagtgaagtgccattgagtgaagtgaagtgccattaagttaagtaaagtgccattccatgaagtgaagtgccattgagtgaagtgaaaatgaaatgaagtgacattgaggaataaccagtggctttaaagactgataaattcaaatcgctccaataaatctatgagtgccgtactgacgaggcccgctcatagaataaattatcaaaccgtgtatacggcttgatgggccgaaacacacctttcaggttgtggtaaacgctacgataactcaagggttccaattatttattattgcgtgccatcaacgcgcagcataaataatttaatattttatggacaatatattaatgtttcccttcccatttaggtattacaattgaattgcaatg

SEQ ID NO: 99546 - DNA, 216 bp, Heterodera glycines
ttcatatttcgctattagcagcttttgctcttttcagtttatgattttgcaaatgatttttgttttgatttctcctctctttttgcagttttttcatgcctttttatttgtcgtttgattatttaacaaaagtaattaatatatttatttgaattataattgaaaaattttttgtaaatttgtatttaatgattttctaaatttgttcagaaaatg

SEQ ID NO: 99547 - DNA, 1003 bp, Heterodera glycines
aaattttgccgtttttcctttttcgttatttatttttttatctaattttttaaattaaatttgcctctcaaaaaagaaatttttacaacaacagtttcaaccggcgttctgacaaatgcggaagtgatcagtgtgtttctttcctgccgtgctggcgcgtttcttaaaactgccatccttgaaaattgttcaaaaaattttcaaaaattaattttttttaaaaacaatgaaaattttcaacgaaaattctaagagaaaattagaatttttgaagaaatatttctaaaataaaaatgtaaaaaaattcataactttactcaactgcaaccaatattttatggtatcattcaatagctttaattattttctattaaaatattaatacttaaattttttacaaagtatataaaaaagtttgtattaaaatttaaaaatttttagtttttgaaattctagtgtttaataattatacaaaaggttttaaactccaaaaagaaattaaatttcaagtcattaaaatgcaattcaaatgattttttttagaaaagttcataattttttatttattaatttacgaataaaaattaattttcccatgtttttataattataatattccaaaaatttttaaaaatatttttcgttttcaaaatttttcaagaattttcttgaaattagggggggtggcagtttttaagaaacgcactagcacccgagagaatgagggaaagggggaggggaaagcaataattaaaatatgaaaaaagtttggagtttggataactatttataagtgaaaataaaaagatgaatttaataaatatatgcatttaatggataaattttggggtgatatttttgaaatgagacgggccaatgaatggggagggggggggggacggatttaacggacagcacaaagtccattaaatgcaaaaaaggggcccgccaattttcgctaattttattttgcacaattgtattcatttaaattttgcagatg

SEQ ID NO: 99548 - DNA, 307 bp, Heterodera glycines
ttaaaatactttttgtctaaagttcatgaaagagatgtgtgtggagcagcgaaagagtaaaaatacaacaataattatttgttcactatggaaaacagagacaggtcgggacgggatctggcgcgggatttcagtctcaactccttttttagaagttacaagggtagacagttcgccaaaaaagaaaaatttaaaaattgaaaaattaaaaaaataaatgtgatgatttttaattgaatttttacggagcttaaattttaaatgcctaaccgctttttgtaagcttgattttagcaaataaactatg

SEQ ID NO: 99549 - DNA, 876 bp, Heterodera glycines
ggaacaattttgagaaattttccacttcttatggggatattctaaaaaattaggtcgattcttagcgggtgcttttttgttctattgcattttatcgagaagttttccaaaaaaaatgtcgaaatagtgaaaatagtgacaaacgccaaaatagtgatttcgataatcgatttaaaacgacccaaaacgatgagaaaaatggaaattagggtgcttggcattttacaaataagaaaatcgggtactgagtgcccaaaaaaggaacataaaaatggcataaacaaatcatggagagaaaattgttggcattggcactatttccgagctcaaattttagaaaaacattccaatttcaaagaaaataaaaagttacaatactttgttaaaaagaattcaattagataaaaaaccccattttgcagatttatgctcttttggttgctttttggctttgccactttttagggcatctccatgttttatcaacaaaaattgaatttttaaggtaaagaccggtttaattttgtgataaaatttacatgatctcctaattattttaaaatattgaaagatttgtgaaattaatggactaaaaattttaaaatttaaaaaattataaataaaagaaaatatacatatttcaaaataatatattgatgaagaaagagcaaaataattatgaaatcacaggaaggaaatcgaacggcatagacaaatcaatggaaaaatggttggcattggcatcatttcctgacaaaaaattttggaaaaacatttccaatttcaaagaaaataaacgatttttggaggatataaaagccaaaaaaagaaaagcaaaaaacataattaattaccttttcaaatcattcaaaaatg

SEQ ID NO: 99550 - DNA, 573 bp, Heterodera glycines
aaaaaaaaataattttttggaaggcaaattcttttttataaaaaaaaatattttaccaggaatatttcagaatcccaatttcggattgcgatttagggaattttttgagccctgggaataatttccgattgccgaaattttttgagcccgaggaaaaattcagattaacgaaattttttcagccataggaaaaattccgattgccgaaatttttaagccctcggaaaactccgattgccaaaattttttgagccttcggagttccgattgccaaaatattttgagccttcggaacaagttccgattgccgaaatttttaagccctcgaaaaaactccaattgccaaaatttttaagccctcggaaaactccgattgccaaaattttttgagccttcggaacaagttccgattgccgaaattttttgattgagccctaggaatttccgaatttgttgaaggcgtcgccacatattgctgatttctacaacattttgaaatttttgatgtccagaataatcaaagtattttttaattacatttttttagatgaagagattttgcgacatgtaatg

SEQ ID NO: 99551 - DNA, 441 bp, Heterodera glycines
  unsure (1)..(441): unsure at all n locations
gatgaaaaggaggaaaaccaatcaaaaaaaatgaaaaacagcggaaggcatttggccatttcgccaaataaatgagcnaacaaacnnggattttttgaaaattttttgtcatcctacggtaataaaggtacagagtatatagagaataggtatgtaacggaattttgatactgagttggcaatttaactggaactcaataaagccacatatagcggcgagtaagccataaacaaagtgcggcgagttggccgcggtgagttaagcgccgcggcgataaatttgcgacgaattgtccgcgccaagttgggcggtttctaggaaaaatctgaaaaaagctaaaagcgctgaaacccataaaattttgagcctttttcaaattttggatagtggtaaattttatgcttaacgaattcgtatagttttaaataaattttttgatg

SEQ ID NO: 99552 - DNA, 156 bp, Heterodera glycines
tttttgttgagaaaatattttgtggtaaagcttttttaaaatcattttaaattaattttaaataaaataaattaaaaattattttaaatgcatttaaatgaaatgtttttattcatttgtgtgggaaggaatgtaaaaaaacaaagtgaaaaaatg

SEQ ID NO: 99553 - DNA, 125 bp, Heterodera glycines
gacagctttcattattcataattttaaagtatttaacaggaaaaaatgattaatcgccgcccattttgaactgaaaatgtatataaatgacaaagacaaattacaaattgcaaaaaataaaaatg

SEQ ID NO: 99554 - DNA, 155 bp, Heterodera glycines
tttttttttgagttgagcctaaactaaatgataaataatttaattatttatttaattatttaaagtgggaaatggaaaatccgtgcctctgatgggaacgaaatcattccggctctaatgcactttatgagtactatataacttgaggatcaatg

SEQ ID NO: 99555 - DNA, 317 bp, Heterodera glycines
ctgatcattccttttgcaaattatttctcatttcaatgcttgacagctaaaaaacttgccccaaatgtacagtttgctaatttgcagtccaatttgcgtaaaatgattatgagtaatgtttgatattaatttacttgaaaatttatgtgcaattgctgcgcattcatttttaaaaaatgttcttttttactacaaaattttattttttgaatatttttttgaaactaagatttttcttttcaatactgaatgaatatgtttataaaatttcattcttttcgagaaactgagtctatttttcagaaacctaaaaaatg

SEQ ID NO: 99556 - DNA, 175 bp, Heterodera glycines
aaaaataaaatggtttttagctgcctacctgagaaagtttaaaaatgtctttctcttcaccatggttttgatgaaagagtcgatctaacatataatttcgtgattaacctctaattacaaggaatacttatgtggaaattgtggtatagagcagaatccgggaaagccaaaaatg

SEQ ID NO: 99557 - DNA, 289 bp, Heterodera glycines
  unsure (1)..(289): unsure at all n locations
ggcccattttncgggaacatggatttttcctgggcctggattttttgtccaggaaattcaggttttttcaaaatgttaaactctaaatttttgaactcctcctcccaattcaatgctccataacttggcaaagaaacaaccaataaaatgctcttctgttcattcaatagcccaaaggaaaaagcttaaaattctgaaaccagtatttttcaacaaaaaataatttttttttttttttgtaaatgcaaagctaattaaaaaaccctatagggttagagttatccaaatg

SEQ ID NO: 99558 - DNA, 97 bp, Heterodera glycines
gatgagtttgcatcgtgtgttatttaccacgagccagtgcccgtgtgcaaaaacgataaaattgaattgaaggagccctttcctcccttcaatgatg

SEQ ID NO: 99559 - DNA, 149 bp, Heterodera glycines
ttcctggtgctgctttttggcatatttttaacgccagctgcagtgaatggtgaaattgatacgttcaaatatcgtccatattttggcgaacctgtgaaccatcattatcatcatagctcggcagaggtctctgacctcggggccggatg

SEQ ID NO: 99560 - DNA, 596 bp, Heterodera glycines
attttttccctttattttagaaaaaactgctaatttgtaaaaaattagaaaaataagctaaaaaatttttagcttttttaaattttctctgggcgggggcgagtatataactttaagcatgttaatttattatttagaaattaatttttcttcaaagtttgggtttcgtttaggttcttcctcctcttctgccgctgctgctgatttttcgtccacttcattcattactacagcaatgttgactttagcctcacaatcagcaaaaactctttgctgcagtgaatgtccatttggtagaaaaaaaaaattttaaaacgaaaaatttataaacaatttttttcaaaaaaaaatcaataattttctcaattagacacccattgtgcaacatatgctagaaaaagtaccgataaattaggggttttacgattaataaatttttctgaaaaattcttcttttgtcatttctacattccgcaataaaaactcaaaataatatacaatattaattattttttaaatttcctcatattccaattaattacattaattattgtacaacagaaacggtgcactcggtgctgctcaaactgcacatg

SEQ ID NO: 99561 - DNA, 506 bp, Heterodera glycines
  unsure (1)..(506): unsure at all n locations
tgcagcataaagaaantcaatgggtgaagaaacannttttgtnntttttggaaaaataaatttaaatttacgaatcatttcattcgcccaaaatgttcaggaaaagaattaccttctttagatggaaaatttaataaattttcttgtaaatgaatgactaaaattccaatttgagggatgctttttttcctttttaacaaaaaatggcctcataataaaatttgaaacaaagacagtaaaactaacggaaacaacggaattctgtccatcactgctctgcatgtttggcaattatgaaaatgaattttagcaagtcaaatgaaattttggaaattttacgaaaaacttcagcgaacatttgagtgccaagctcaaatttatcaattgtaaagccgactttgaaatttggttctattattacagagatgccaagtgcacttatttctagttataccgattttgaaggcctaaatcttaaaattaaaatgtacaggtttctaagaatg

SEQ ID NO: 99562 - DNA, 680 bp, Heterodera glycines
gcttaaaatgtaattcaattcaattttatatttatttaattatataatgccaagcggcaaatgcctaatttgtcatttaatttaattagtctaatttcattagccctgtccttaattgatttggtttgatcacttttaaaaattaaaatatttgcaaaaaatagaaaaaaatcgatatattaaaaaataataattaatattagcctaatgattccattgtagcggcgaattttccaatcagtttttgtgattgattctatttgttagttaagtacttttgatcagtgaatgaaaagtccagcttggattccaaaatgatccgttgcttttccgcttcgcgatgtgtacacaaacggatgcgaaatccgtacgcctttggcgcgcgttttggagatgttcttggcaaaaatatttaaaaaacaattggagtggcaaaaataggaaattataatatatgattaaaagcacaaaattccatttttttcaatgcctttaaattttttgagcactttgaaagttttttgcaccaaaaagaacagtttttttaaatattcaagataatgggaaaaataaggacggaatttctgaaaatttaaaatcatagaattaaagactaatgacagtcctcgaatttgtacattggttatggtttttttaaaataattttatcacagataatg

SEQ ID NO: 99563 - DNA, 263 bp, Heterodera glycines
gaagaaatcaatgatttgtcactccttccgtccgttcaggatgggattttctccttgtgttgcatattggtggagagggtgacttttgttattccataatattcccgggatgggaatgttagggccggggaacgcttggttttggtaaacagggggatttatctgtgcataaaccatttcgggattttgttggaaatttcttggattcggaaattggccatgattgcgtcggttatcattttcggagaattgcaggttcaatg

SEQ ID NO: 99564 - DNA, 1003 bp, Heterodera glycines
ttaaaatctaaatttctccctgaatccaaaaaataagatgaaaataaggacaaagagcttaaataaggacaaatcttacaaataaggacatttcaaatttggaccctcaaaataaggacaaatcttacaaataaggacatttcaaatttgtaagatttggaccctcaaaataaggacaaatcttacaaataaggacaaagggtaaccctggtattaacagtttttgttgggatgattttttcaagatttgcttgaagaaagacgggtcggcacgtcgatagagtttttatttttaaagaaattttcgccaaaaaagacttttcttgaatttggcaaagagttctctttattaatcaattctaaagtattatctttgtgacacattgggatatttacggacaattttggggaaaaaatagagtttctttgatttttttttattaattagaaaaaattctatatcttttttttcggccgacatttttaaatttctccagccattcccgacaaattttattggggaatttcctccctgaattttaaaaaaatattttttttcaagcaattttttttcaaaatccaagactcaatagactgcgttttgaaaaactcgaaacttttctcaaagtcgagactctcaaaacgaatttaaagattctttcatttttttttgaaaaatttcgtcagctattttctcaatgtttttgttataatatgcaacattaatgccaaacattgtcatagattttttatttgcatcataattttgtattgcgcataaactgcagcatttacgtcatcaaaatttgtgaatattattataatttatgtacatttcctcccatagacgtaagcaaaagcctatcaatattaattatccaattttaatatgccaattgattaatttaatagcgacggataatggttacttaaataatcaggcagtgtataatttttataaatttcatttcatttttttctaaaaaaaagtcatcaaaaaatg

SEQ ID NO: 99565 - DNA, 121 bp, Heterodera glycines
ggtggccggcctaccatatttcgttaaattgttttgttttatcaattttgtttagacatttctccgtgccaccacttctgtcagttacaatattcaactttatttttatacgacaacaatg

SEQ ID NO: 99566 - DNA, 161 bp, Heterodera glycines
agtttgtttaaatttaaaaccaaataattaatgctgtgttaaaggcggaatcaaggcgacagaaaatcaaagaaagtgtcctggccgagccgtgtctgaagcccacgcgacttttggcaaaagtgaggcgatcagcaacagatgaagcatttgtggccatg

SEQ ID NO: 99567 - DNA, 631 bp, Heterodera glycines
tcgtctttctcgtagttaaattattcgtaacataattatcacagccattctattttatcgtaataaaaattataaaaagttttcggtttttttttttattccgtcatttttcgttttcgtcatctaaaccttctattccctaatttagacccgtagccagaaaaaaatttggaaggaggaatccgaataccttttaaaatttcatcaccaaagcgaaaaacccgggctctttcgcgtcaaagaatatttttcgtcaactagtgactggcggcagggatgtgtaaaaataaaaataaaaagcggaagtgagaaggcgaaagcgaaaaggcgaaattttagattttggggtcgaaaatcggaaaattttttcaaattgcttcaaataaattattttttttaatttatttcgaacaaaaagtttattaaattagtattttcgaatccctttattaattttaacagattttgcggcgtatttttcgaaaaaacttttttgggacaaaggaggaggagggaggcatgcggtgccgataggcgccgcctggaaaaaatttgaatacaatacattgtcagattttgttttgtctaaaaataaccgctcccgtaaaaattccccgttaaccgaaaaatg

SEQ ID NO: 99568 - DNA, 132 bp, Heterodera glycines
atttattgtttaataacatcattttgaataaatgacgccttacaatgtttttggtgtaacgggagtttttcattcgctattttttatcagttttataacaatacacctaattaggttttaagcataaaaatg

SEQ ID NO: 99569 - DNA, 457 bp, Heterodera glycines
tttccccagcaaaatgttttggatggagaattggacacgcttttttggtcggcacgggatggagccgcttattgcaaattattactagtaaattcaaaaaaaattttgactcactaaatttgtccaaaacttatttcaaactccataaaattttctgaattttcacagaataatagaaaaatgtttgagctatcttttcgtaaatcctccaaaaaaaaaggtcaaatgtctcacatgttttaagacaatgatgatatcggtattcggcttggtcgtcttgaaaatttctcaacccatcgatcaacgccacaattgtcgagcggctgggtcgccttgagcagcttatacagaaacggtcaatgacaacacaaaaaataatcgatccggggactcaatgtccttctccacctcctcacccagtgttctctgtggtcaaccgccgcctcacatcggaatg

SEQ ID NO: 99570 - DNA, 67 bp, Heterodera glycines
ttccaatcactggaactcaattcttaggctttccaatcactgggactcaacccaccaactttcaatg

SEQ ID NO: 99571 - DNA, 606 bp, Heterodera glycines
ccagcatttcccagccgttaattcatttgtgcatggcttttctatcgaaaatggttggcattatttagcaaatttatttatttttatttttttattaattttatttgccgtttaataaacttcctcgttatttggtcaatgtcattcgaaagcccagcactttaatagtctttttttctatatttaacattcctttgaatatttttttatatttttgatcccctctttacgaattatgtatttatgaatgaatgtaaccaataaaactcacctatttgatcagaaaatgtgctgatccattgtttggccggtgtcagccgaagtgtgtgcctttgcctggcctatttgatgaccgtgaccaatttggactatcccaatgctttggacttcgtttgtcgtcgccatttcggtgcgaagccaaattttggtttcaaaatgcaactgaccaagttcggccagcaggtgactaaccatttattttatttattattattttattaaagtgttatttttcaacagtttgtccaaagggaacggcgccgacttttcgccgaattttctcatttcaccggccaattgcgtgaccaatttcaaagcgattgcatg

SEQ ID NO: 99572 - DNA, 332 bp, Heterodera glycines
ggggaggagcaaccagtaagcacaacattgcacaacggctgaggtgccggggcatcgtcaatcgggacaggcccaatttggagtgccggaggcgcaaattgctgctgatgctgctgctggtgttgcaaatacggttggaaagcgaactgtagcggaggaagtaccaaaggcattgtgaatggtgggaagacgggcagtggtggcatgcgcatttgcaaagtgctgatcgcctgttggacggcagctgaaagcatcggcggcggttgttggtgctgtgttgccggggcgcaatgtgtcaattgttgctgctggtgctgctcctcctcgacatg

SEQ ID NO: 99573 - DNA, 860 bp, Heterodera glycines
tcacttccacatcatataatcacttctcctttcttcaaccgttgccttgctctgcgtcaattttttaatcctaaccgcctcctcccccctttttttttgcttcaaataaattgttgttgaaagaggtgcctttgggtaggggtcgggaaacacgggaaatgtggacacagacggcgagaaacccccccaaaatcgaacgagcggcacaccctttctctcgccttctccatcgccaatctgcgtcgccgctcttgtgagcgagtctcgaatcccctcctacccaatccctcccccagtttgtccccccttcctcgacaaactttctggtgccacgacccgggaccacgaacccttcgcccttcaattcactttcgaccatccgtcactcttctctctgccgccagccgaccctttaggctcccggcaactcaacccttcgctgtccgacgaccatcttaggcctccggcactcatcactcaactcaagtcgccagccgccctttaggctcccgacaaaccctcaccgagtcgtcagccgcccatttcaggctttcgaccattcatcactcttctcccagccgccagccgccctttcaggctcccggctttcatcactcaactctttgtcgccagcccccctttaggcttccgacaagccctcaattgagtcgtcagccgtccttttaagccgaccctttaggctcccggctttcaccactcaactcttatcgtcagccgtccctctcgggctctcggctaatctccactcaacccaccaaccgacagccgccttctctaggctctcgaccaaccaagcccgactcttgcgtcaagccgccaatcctagactttcggaaatg

SEQ ID NO: 99574 - DNA, 1003 bp, Heterodera glycines
taattgggctgatccgcaatttatgatatgcttttaatgatttttcttatacattttcatatcgaataaatgggcaatttccaaaaataatttctcccatttaaaaatttatttttaaaaatttctagtaaattaataatgcatatttctaatcatttttctctcccaaaatctgatcgcaatgatttttcgtccgattactttttttccggtcccaaattgcgctttttgttggctttgcttttggccggcgccattaagccatcgccgtcgtccatcgtttcttcagctgttcagctgcacattttcaattccggtcggtcagcgccgaccaaaataatgcaaacagaaaaaaagatggaaaatgggggaggcgcaagatttgttacgatttttgtggccaaacgatgggacggacggacggaccggacgaatttggcccaaccatttgatatgaagcatcaaaaaaagggtaaatatgggaccaaaaacaatcggatgagcgaaaatgagagagagagagagagggacggattgggcggcgacggagaaaaagtcggacgtacgaaaattgggaaaaaagagagggagggaatggccaagggatgggccaagtgcagcttaaaagagtgcttcagcccattggctttatcattctttcattgttgctttgaaaatggctttttgttatttaattaataaaaaattattttagtagcggtatttctttaaaaagcgcctttttggatttgcagttttttcaaaatttatttgaagcaaaaattaagctaaaatattatttgagttgccctaactttccgcttttaatcagctgtcaaatgcttttctatttttaacgaagaattttatgggttttcattttttagattaaattctagtgggctatttttcattgaattttttttcgtccaattatttttgagtttttttaaattccaattttaatttttcatttaatttcgcttaaaagttttccaaaatg

SEQ ID NO: 99575 - DNA, 99 bp, Heterodera glycines
aattaaggcttgacaaaccaccaattatgattaattgtccttttccatttcaattatagactagcgaattgggcatagtcggttactttttggacaatg

SEQ ID NO: 99576 - DNA, 55 bp, Heterodera glycines
tggccattttatttttcaaataatttttatatttaatagatattccagaaaaatg

SEQ ID NO: 99577 - DNA, 374 bp, Heterodera glycines
agaagttcggatggaagtctatttgcttgttgatatgcaattgtttccattgtataatatgtaatgtggttaacgggtattcattcatttaacacatacattggcatatgtcaaccatactatttgtttcaataaaatatatcgcaatattggatgacatcattttgtaaaaatgttaattttacatgctttactttgtttgccttaatatttacaaaaattgcggttttggcgggctaaaaattattcttttattttcaaaaatatcctaaaaataaatgagttttagaaattgcccgaatattttttttaattaaaaattttaaatactatttgtgttcgcttgtatgccaaattctgcttcaacaccgatg

SEQ ID NO: 99578 - DNA, 285 bp, Heterodera glycines
gctggaaaaaatttaaaatttttttagttatattaaatttaaaaaatattataataatgcaataaaaaatgaaaaattttcgagataaaattttcattttcaaataatttattttttgaaaaaactttacataacaatttataaataatttgataaatttaacttcaatattaatatttccctaaaaacgaagatttttccattttaaaatttgtaagccttgggtaaaacaatttttaacaaatcttttttattcttttttcagtccaagaggagaaggccatg

SEQ ID NO: 99579 - DNA, 466 bp, Heterodera glycines
ttcgttagactttgtactttcgaatgataccaaaaagataggtttagctcgaacatgaacaaagttattgtataaaaaccgagtattttcaattgattgtactcataaaagtcgattggactcataaagtgcactagagccgattgtacaatttggttgtgaaaaccctccaaaaataattcccaaaagtcgtcattttttaattttatgcacaaaaaaaataaaaaatattaatgttgcacaacggactcgaattgttttttggtgactaacacatagaccactgagacaaaaattcaaatctttttggaactgggaggcaaaaactgaaacggtgtgttaaactaacacactatgcaaattattaattggggttcagcctgagcccatgtccaaatcgaactctaataaatatgactattcattattaattatatttttttagcgaatttactaaatagaaatg

SEQ ID NO: 99580 - DNA, 120 bp, Heterodera glycines
  unsure (1)..(120): unsure at all n locations
aatgacagattgcggattgtgatcccgcaaatcanttcatgatntatgccatgacataataaaagttattnaagctttttattttttactttgttttaccaaggatacaattaattaatg

SEQ ID NO: 99581 - DNA, 405 bp, Heterodera glycines
ttatctggttttaatgcgcaacccttcaggacaattacaagtgaggacactagggtcacaactgttcccaaaaagactgaattatttcatggatgcatatcatgatgcgaccaataatcaatttagctatctcatgattaacatgcacccaaattctgatgaggaatttagtttggcaatcgttgaaatttgtgcaaatatattgagttttagttttaaactaacgaacaaacaaaaaagaaggttggcacaatacgccgatttttatagggaaattgccaaatctcgttcagataaaacggcaagaaaaaggatacaacaggggagtggtatagccctgggagctgtcttggtcccggtactgagtgttttagctcaacatttattagaaaaaataacatcatg

SEQ ID NO: 99582 - DNA, 252 bp, Heterodera glycines
tgtgagtgcacatatgccataacgctgaagcacatcccgggtcgatgaaacaggcaaagcttgataagtttgagcaatggtaatgagtttaagcaaaaaaaaatgggatgcaatagattggctcaacaggtacctggaaaactgtcaaactcccttctttttaccggatcaattacgcagctactgtcttaatgacacagaaatcctgatgaaatccgttctacaatttcgccataaccaacggttatgatg

SEQ ID NO: 99583 - DNA, 460 bp, Heterodera glycines
  unsure (1)..(460): unsure at all n locations
cttgttttttcgtaaaaatatattcgaattattttatttctaaaanttattaatattttaatatctaanaaataatatatnctcacaatactcggctccccttttttttgtcaattgtcaattagtgtgctcaagacaatgcttctgatggaaaatttcttgcatttgtccaaactctctcagcaaatgagcatttttatttggaaatgaaaggcaaacaaatattaacggcggaagtcaagaaaaaattaacatctgaggtttgcttgctaattggctttttaaacagaaaagtataataaaaaagaagccagccataatttaataccccctttttttctttttgcagcgctttttccaaaaaaacttttggggaaagcagcagggggtccggtggtgccgataggcgctgggaaatttttttttttcttggcattgtctatgtgctgcgatggaaatg

SEQ ID NO: 99584 - DNA, 53 bp, Heterodera glycines
aacaccaagattgctctattgaagaactgaatatggtccttcgtgccacaatg

SEQ ID NO: 99585 - DNA, 323 bp, Heterodera glycines
tacactcaccaggattgaaattctagcaggcctaaaaattagggaggcgacattcaaattaaaaaaagggtttccaatgaataattaaaatctatttacaataggttttggcccatggcggtttggcccacatcaccgctttttccccatgcaaccaacgcgtcgaggagcaggcggccggccgcgtggcgcgcaagggtcagccgggctccggctgtctgatcgtccgcaagtcgcacgtgcggacgctgcttggcgtcgcaggagatgaacaatggacggacgaagaatggtcaaattggcgcgataagcgcgatgaaatg

SEQ ID NO: 99586 - DNA, 1003 bp, Heterodera glycines
tataaaataatgaaaaataaataaacagttatttgtcattgggactgaatctcagctcctaaccatgatatttggagaaataaatttacaaataaaaatacagtggtatatatataaggaaattaatgaaataatacagattctttattcctttagaacaaattttaataatacaaaagaaccttgggggataaaaatgaaatataaaaataaacaattaattaaataagtaatattaaaaaaagataattaaatatatttttttaaataaagattattggtataaatttctggctttgaatgctagtggaaaaaatgtaaaatttgattctaaatgcccaaattattggcatgtaaataaattgaaaaaactttcggtctcaaaaaaatgaatttatattatcaagtcaaccaattataataaaaagtaaaaaaaactttgttatttattatagaatttgtgcaaaaatcaagatttattcaaacattaacttaatgaattaataatttaaattagggttgctccccgaccccgagccccccgacccccgacccgccccgagacgtttttgggacctattccccgacccgacccccgacatgtgccccccggcggtccccgacccccgactttttgccccccgaccccccgacactaattcgggggattggggactccgaacgttgtaaaaatttaaagctattcaaccatttaaattataccaatacagcaagccaaacgaattttttatactctttaaaaaattaataaaaaatacttttttaataataatttgcagcttgcacataattttcaatttttctgtgattttatagggttcacccaatttattacttcaaatgacttcaaaagcatctgatatttggaatgtttttactaaaatttcttcggaatttgccaagtgccagctttgtgaaaaccaattagcatgtaagcaatcgtgcacaaaagggttgtgggggcattttaaaacgaaacatg

SEQ ID NO: 99587 - DNA, 551 bp, Heterodera glycines
  unsure (1)..(551): unsure at all n locations
tgacgcaattagcaggatactgtaggcaaaaataccgtttcataattgataaaaaacaattttacacgcttaaagcggtgccctgctggaaaagaggagaaagagggaggacagcaggggaggggaagggatgattgggggggggccattatttttccaccttccttccgttccctcgcccaacttggccttggcttctcccccccccnccctcgcttcttcgattgtttggcttaatcattcatcgttttccttattaaaaaacattatgtcgtcctcaattctctctaaatttctcccccattttaaattattttgtaaattcgagggaggggggggggcggcaaatgacacaattaatgcgaatgcgttttcattttttggctaaacattctaaatttgtgacatttaattcaatctttccatttgaagatccaaaaattagggacattttatgtttcttattttctaaaaatcctatcactatggaaagtgtcgaatgcttcggcatacgcattgcaaaaagaaaaaagccatatttttaaaaaatg

SEQ ID NO: 99588 - DNA, 595 bp, Heterodera glycines
tttgcgccgccgacacttgcgccgcgacaagtttgcgccgcagacacttgcgccgaccagccaaaatgacacttgcccgccgacatttgcgccgcccccccccccattttgattatttaaagataattttctcaatcaattttaatgtttaaagttaatgtagcattcggaattaaaacttccattccaattacattttaaataaaattcaacattaggtaattatcaacaaattttactaaaactataaattaaacgcaaaatgacaactaattaaaaaaacacaacaataaatcactaatcacaaaggtaaacacttaattttttgtctttggtcaacgcatacagtaagagcaatgacaagtttttttcttcttcactgccgagagtagcaagaaataaaaaagaaatattttcatttttgattatttttttaatgaactcaatttcaatttttccggcttttaaacacaattttgaatggtctgatcaattcggaataggttattaactatcgaattttatattaaactcaattagataaattttcggaaaatcccacttaaaatattatgtcagattcataaaggcaatg

SEQ ID NO: 99589 - DNA, 415 bp, Heterodera glycines
  unsure (1)..(415): unsure at all n locations
aaaattttggcgtttccgttgttcgcaaaaaanccgattttgccttgggccgcaaatgcgggccgcaaatgtccgattttcactggggccgcaaatcatggcccttaaaaaatcgactgcaaatatcggtttttgactgagaccacaaatgtctggaccgcaaaagtggggccgcaaatatcggaaaatggcccttaagaaatcatctgcaaatatcgggcgccgcaaatgtcggtttttggctggggccgcctatgttcgggacttgttttgatcaaacagttcaattcttgactttaaaaataagagagagagagcgagacaattagaaaattttaaattcatatttaaaatattgcaagatttcaagaattaagtaattagccattggtaattgatacatatcatgaagatg

SEQ ID NO: 99590 - DNA, 1003 bp, Heterodera glycines
attaatatcatcaacatggtgaaataagtaattttgaaggatttaattaaaatttaccaagtgactattggcaattctacaaaaaattatgaaatatacttagtaaataacaaaaaaaaaattgtgtttggtgaccaacccaccttaatagtcaagtctgaactagtattagaaaaattttaaaaaaaatccatttttttctttaaattcacaaatttttttgaaataattttatagtaaattcttaatttttaaaacatttttcatcgcaaatttcatataaaaaatttctattggcaacgccggcctaaaacctaatcattattttaattttgaattgcaaggagttctggaagcgactttttggtcatttttaggccaaaatctgctaaaaaaaatcggaacaaaatttcagtcatacttttgttttttgtaaaaattttttaggcaaaaataaaattttcacaactcaaaaaagccagcaatcccgcgcaggttccctcaaatttgaaatttccaggcactaataataaattggaagtagagttgagcggaaccagaaatttttggaaaaaccgggaccgggacctgaaaagcgggacctaggttttcgaaagggtccgcgttttcggcatttttataatagcaaaaaatgttttttcattcattttataatcacgcaatttactcgtataattattctttcttttaaaaattattattttaatttttttttaattattatttttattctactagtgttattgaattatttgattctacttgttattagaattattttatttcatattcgacatagcttttttattggtgctgattaatgatttcatttaatttttctacttggcagggttttcctataaaaccaaataaatccaaaaattaaatttaaatatccaaaattattatttcatttttacagaatctaatacaattctttacgtttaaaatcatttaattgctttatttccacaagaatatg

SEQ ID NO: 99591 - DNA, 1003 bp, Heterodera glycines
tttttcaaacaaaattttttttcgaaagatgccaaattgaacttttcataatcgtcattggttttcgaagttctctgctgaaacttcttcaactgacagcttttaatttacaaaacaattttatcagaaaaagaacaattttaccccaaacacctccgaattatttggtttgcaattgtgcgggcgaaaatgataaaaaaatgatacttaattagaatttttatgcataaagataccggatttttccaatttatagcacatattttttggtttttagcacatatttcagcattttttagcacatattttttttttattaaatttacaggatttttaaaacataaaaacctgagctctagtaattatgcaagaaatctcccaagaaaaatgtttgcataaacttttaaatttgggcacttaggtaggtccatactacgttgagaaaagtcctgttttttgggacaacaaattccggcaatgtttggccaattgtgtgaatggtcgttttcacatttactgtcccccccccttccctcatccgttcaattaatcaaataatatgtgacaaattgttacaataattgggtcatttggaagtgatccgggtcatttgcgggcctgatctgctgatttgtgctctacatctctgctcagtgctcgcgtgtaatatctcgataaaagttgcaatatttacatgatccagatcattttcaggtcattagcccaacctcctgatggtattagctagaccaatttgatggtaaaaaaaaaggaaaaaaatcaaaggacggatacgttaatttctacggtgggaaccgccgtctccacctaataaatcacattaaatttttaaaaaattaaattaaaaatttcataattacctttttcgaaattgcaggcccctatttcttataaattttaaatatttaatcaaaatttagtaaattgcctttcgtgaccaaccaaacatttgtcatttgcaaaaatatttggattaccaatg

SEQ ID NO: 99592 - DNA, 177 bp, Heterodera glycines
ttttctaaaaatgctgacgtagttttaagaataacaaaaatatcacatatgtttattataacatatacctatcatctattcgtaaacataaaataaccgaaatagtgctgaatatttataataatttttttacataaatttcagcttgcaataaccctattcaccaaacgcaatatg

SEQ ID NO: 99593 - DNA, 85 bp, Heterodera glycines
ggttatttgtaaaagggtcttaactaatttttattgatttttttatccattaaaattttgcagaattattaaatactcagcaatg

SEQ ID NO: 99594 - DNA, 85 bp, Heterodera glycines
cggaatgggagagaaggaagagtgatcggaataggacctttggaggagtgaacggaatgggagcggaggaaaagtgatcgtgatg

SEQ ID NO: 99595 - DNA, 784 bp, Heterodera glycines
ttttgcaaattttacgtccattttcctctttattacaagctttctcaataagtttgttaattgtttttttaaagttttcttcagccgactctgtataggcatttttaaaatagaattttgtaacatgccccgtaatgccgaattttttgttttccgttatataactctcaatttcctcgaaataatttgtttcgtcatttttttttgggaccgttttaaaaaaattaattacatttctttttgctcttacttcttttcctgttttaaggaattttttcggacatatttaattaaaaataatcaattttaatttttgctgctttaataaagtgagtaatgtgctacaaatcccttccttaaatacacaaaaagagacgccggccactgtccgtgataaacggtagcggctggtaccgagtttagcgaacaaagtatgcgcatggctgactgagtcacgcccctttcactattgtttggcgtgtataaggtacggacagacatcataaggcacgataattggtggacgagaaaattgtagcatttggtgatgatgaaaatggttagcgcacgaatcaatagtgaattggcacctagccaaaaactcagcccacctagtcaaaactcagacaattgattataccgcgcactctatatcaccaggcactgaaaatgcattctaagcaatatgtacaaacacttaattaattgcctatcacctattttcaccatcttcatagtatcttcacccgtcacactattttcattaacttttccctttaaaatg

SEQ ID NO: 99596 - DNA, 166 bp, Heterodera glycines
tgccgtcatcaatcaatgatcatcattttaaatatgaaattttcattctgatctattttgaaaattgttcccccaaatttaaacagtttctcccgctgcacattctcgtcacggtgcttgtctatttacgcttcatttgccggcaaagcagcgcccggagggcatg

SEQ ID NO: 99597 - DNA, 214 bp, Heterodera glycines
agggtgatcaattctatttaagccgtcaatgggaaaactgactcattttttactaattttacattaaaaaaaacaaaaaattcgttagctaattggatttataaaaaatagatttgtaaaaaaaattgtggcaaattgaatgccggaagttacgctaactcgaagtcgaagcagcagccaaggcagtgacgcgcaacggaatgccataaaaatg

SEQ ID NO: 99598 - DNA, 678 bp, Heterodera glycines
  unsure (1)..(678): unsure at all n locations
atcactttttgccattttcaccattattatttntctgtaactaaaaattcacgccctgatcttagccaaaagcaaatagtgtaaattttcttcctcctcatcacactgccatttttcttgccatttatcagtcaatgattatttttatgccctctcccctctctcgagtctttcgtttaccattaattagttaatcactattacatcactcacaaatcagtgatgacgtaaaatcatttttatttattatatttttgtctacaacttgatattccatggcttcttttagtgttgatcaattagtgaatgagtactcatcaatcctatctttcatgtttaatagtggcgacatttttatgggtcatgttttaattttttataaatttgacaatcttctaatatgtaataaagtgcttctctaatgagtcatcattatgttcaaaacattcgattaatttgtaaattctctgatttactttaatgatgaccattttacaatttgagtcttttttgtttttgtttttttgctcttttcgaccgaccattttccattttcgcttatgaacaatttataataaaattttagccatttaaatatttttcttttaatttattttcttaattggttttagcattcgccgtccgctgaattcggcggcttagtggcacacgaaaatg

SEQ ID NO: 99599 - DNA, 185 bp, Heterodera glycines
cacgaatctgacgtttatttttttcatgtacctcataaaatacgtgacagcctcaaataaacgtcagattcgttttcagcgcctaaattaccctagaaaaaatatagctatttcagggggtggcaaaatccgcgaaaaagtcccccgcagtgtaggattaagttgattactaattaaaatgaatg

SEQ ID NO: 99600 - DNA, 253 bp, Heterodera glycines
ttaaaaaatttggtcaactttaaaaaagttgtatgaaaataagaactatttcagccataacttagtttaaatttgataattttgtttgaaattttccagctaagagagaaaaagcttggctatcgaatggtaacataaatctaaaatttggttgagcttaagcaacgttataccgtgttttgcgaaaaattgcaaaaatggaggattttacgaaacgcccaaggtggcggattttacgaaatgacctagcatg

SEQ ID NO: 99601 - DNA, 621 bp, Heterodera glycines
tttcagagagaatcggacagaaatttttattcgaatggactgaatgtttaacacttaaacaaatatcgaattggaaagcgatagtaaaaaggcgttaattacaagactagtaagcaatgagtaatctttccgatttccgaaattttttgggtcttccgatttccgaaaatgtaggcaaaatttagtgactgaaaaatttaaaaatcatcttcaaatttttaaagttcgccaatccaaaaatggttttttgtttattataccaaaaaccaggcttttgctggttcgaaaaaataacaaaaatttgaatttaatttttcgcttgcaactatttttttctttttaaataggtcggtcggcggtagtatttcttaaaactacatatgtagtatgtatgcaaactttccattataaaagcagttgatttgagaaaattcttcacaactcatctataccaactcatccatatacccaactcattcatgcacaaaaaatgccacgatacagagccgcatcgtgctgtagatgagttgggttgctttcttcgttacctatgatatttcctaatttgttcatttttccttcaggcaaaaattttttaaaatatttttttgtctaaaaatg

SEQ ID NO: 99602 - DNA, 1003 bp, Heterodera glycines
aaccctaaaaaacaattcacttttttgccatcgaaatgtttgtccaccagcgaattgaaacgggacgaaaacagtgccaatttgagccgagttgaatgctgggcgatttggacggagaagcaattttaatgccatttgttagcgcacccatagaatttgtcttatatctaatgagaaaaagaaattaaaaattgtagagccttaaaatttttagagaaaataaagtttggcttgaggttaaaaatgttataataataataataatataaaaaatctgcttttaaatgaatattgtaaaaaaggtgagaaatggaaaactaagataataaatcttctaaaaaaataatacaattcttgttttttaaataggaaaatttatttattcgtatatctgtgctaaacttagcaaagagaattttgaaaataaactctaagtaattgtatttttttcctaagacgagtgcaaaaaataatgaattaatcaatagcacaccgtgcgcttaacatgagagatgcgtcaataaagagagtgtgtagagaaaatgagcaaattttattaattattaaacagaataatttttagaaattccttagtataatttgtttttaaatgaattgttcaacttttgcttacaaataagtctaaagaaatttcttgtttttcaaaaaaaattaaatttattaaaaaatgtaattattattaattagtaaaataaaaaccattttcaattaagtagaataggctcaaaaaaagaggcacgaaacaacttttttagtggtgccaacgctttttaaaaaaggttaaaaaaggaaaaatcaataaacaaaaacgccatccctactgatcattgatttttcaaaccctaaagaactcagcttgccaaaatttgaaaaattcgcgtttgccataattttaaaattctattaaaagctcaatcaaaatttttagggcaaataacattttgaaatcaattgaaaaaagtaaaaacttacagcatcaatg

SEQ ID NO: 99603 - DNA, 761 bp, Heterodera glycines
tctgaataaaaaatactcatctttttgattttttaagatatgtttttcggttttttatgaaaaaggggaggggcggggggtcaacgaaatttttgcgaaagaatccgtccggccatgtaaatcggcacgtcctttttttttgttttgtttttttagttattgcctaagaaactgaggattatcattggattggacaaacagagttcaaggcgctgtttttgttgggccatacaaatgtttttggcaaaagatgccccacgctaaatctagtttttcctagcccattttaaaaccctaacaggcttctggactagttaaccgaggacaactcagctgatatgggtcaagatggacaactcagccgtacaataattttttttttaaataaagcctaagcctaggcctagcctaaagcttaggccgagcctaagctattgtacaagttgcctttatacgagtttgtgtacaagttatcatgacacccgaaagacaactgttaaattttaaaaaatttaacattatctaaacttaaatttaaaaacttttagtttaattaatttgtttaaattattatttatttttttttcaatttttataatttttttaaattctcgtaaagctgagttgtcccatcagcagttgagttatctccagctgactgatcctgacacgccctgataaatttttgaaattttaaatccttaccccacccacttttccctctgtgtgcacagaaaaggcaatggaaacggcgcaaaatg

SEQ ID NO: 99604 - DNA, 323 bp, Heterodera glycines
tttccgtaattcagcattcccagtacacatccacgcgattgcaatatcttctgatgtactccatcctcttgccgtctcgctcccgcacttgtcccgccgtttttccattgggaagcaccatgttgtcatttgggcaacatttcttacatccgtgccacgttgtcgaagcgaccaccaaattgtgaataggcataagtttcgtatttctttggcagtttgtagacgagccaatccacaaatgcctccattgggttttcgcccactatttgtttgtcaacaacagtgcccgtaaaacggagctggcagaaagcgaccacgcgatg

SEQ ID NO: 99605 - DNA, 1003 bp, Heterodera glycines
aattcgaaattttaaactcccttcctccaaaaaagtatattggatttgtattggctcttccaatctctctcaaatctcagtaatttcgttgatttgttgtttttttaaaagccaattctgtaaacatttcattaaatttgagcaccaccttgaccatactcttctggaactgaatgagtggtcaaggcgtcgaaacaaagggattttctgcagttggtccggcctcagaaaaatgctcatgattcaactgctgtccacaaatcgcagatgcttctcattgcggcgactgttgcattttatgcaatttattagtgatgctaaaataaaatattgaaaattcgaatactttatgcctcttttgtgaatttgtgctgatttaattgattggaattgggaaaatgggtcatttctgagaagaaatgaacatttagttgcgtccgcaacaaattcgcttttctggcggagattttatcaaaaaccatatttgttgaccaggaagtgtccgtcttcaagaaatgcgtcttgctcatctcaagatttgacttaaaacggcataaatgtagggaaaaacaaattatgggccgagattctaaaagtatgattaagattaccgtaatcaattcttttttagaaaatgagccctccaccccatcccttataaaattgcctccttttttgattggaagataaaactgagctcccagtaccgtatttcaatataggtacattaagataagtgcttaagcagagtttacacagcttaggtaattcccgaaaaaattaggaaatcagaaaaagccatttaaatttaaaaacattttgccaaaaaggtaatcatttaaatttttttattttgtaatcaaaaagcaaggagtgctgtcggttttttttttactttgttttgtattttcttcctttttttgccttacattttcatagtctctaaacgacaacttttatgcattaatttacaaaatctaagagaactgtttgctaattaatg

SEQ ID NO: 99606 - DNA, 910 bp, Heterodera glycines
  unsure (1)..(910): unsure at all n locations
gggggagggggggggggccgggggggggggggggggggcggccccacccacaaaaaaaaaaaaaaaaaaaaatttattttttttgttggtggggggggggggggggggggggccccccccttggggggggggggggggggggcccccccccccccccccccaccacaaaaaaaaaaaaaagggggggggggggggggggggggggtggggcccccccccccccgccccccccccccctccccccccccctcctctcttttttgggggggggggggggggggggggggggcgcggggggggcggccccaaacacaaaaacaaaaaaaanaaaaaaataaaatataatattatttttttcttttgtgtttgttttgtgggtggtgggggcgggcggcgccgccccgccgccccccggggtgngcgggggcccccaccacacacccccccccccccacaacaacaaacaaacaaaaaaaaaaaaaaagagggagggggggggggggggggggggggggggggggggggggtgggtggctcccccccccccccctccccccccctccccccccccccccgccgggggggggggggggggggggggggggggggggggggcggcggggggggggggggggggaaaaaaaaaaaaaaaaaaaaaaaaaaaaaaaaaaaaaaaaccacaccccccccccccctccctcctcttttttttttttttgtggtggtgggtttgttatgtggtcgcccccccccccgcccccccccccccccacccccgaggaaaaaaaaaaaagaaaaaaaaaaaaaaataagaaaagaaaacaccgccccccccccccccccccacactttttttttttttttttttgtttttttttatatcaccaaaaacaaaaaaaaaaaaaatatg

SEQ ID NO: 99607 - DNA, 423 bp, Heterodera glycines
attgttttttttattatagaccaactcacaagtcctttttagtacaaaaattataaacaaaagcagctaaattttcaaatttttcccagcggcgcctttcggccttcccataaatatgcaagacacaaaaagtgtttcggaaaaaatatcaaattttgacagatttttggtcaaattataccgaatttgagttcatttggaaatctgaattatttctgtttagaacttaaaagcagcagcaattgtcgaagaaatttactgcaaattttgacggaggaagacgcaaaagaatttttaaaaataaataaaataaaatttgaaaaaagcgaatttaaaattcaaaaaaataaaattagtgaagaaaaaggaaataaaaattgggcaaaaaataaattgtcgaaaaaagaaaacaaaaagaaaatg

SEQ ID NO: 99608 - DNA, 485 bp, Heterodera glycines
  unsure (1)..(485): unsure at all n locations
agtccanntttcatagccttcaaaaacagtcatcgttttgcttttcgttgtcctcttatcgggttctaatcggtctgaaaattgatttcgattttttgtttgcttaaactacaaaacttgccttgttgtggttgaacatgacataattgaagcaaaattaaaaaaaaaactttgaaatacattctataatatttataagtgggttggtaaaaaatattcaaataaaatcgtaaaaattctacataaaaacggtgtttttcttttcatttcccgctattttcctctttttgccagccgtccgcctctcttgttattgccagccgtccgcctctcttgttattgccagccgtccgcctctcttgttattgccagccgtccgcctctcttgttattgccagccgcccatttctcttgttattgccgtccgcccgcactttataactatttcttttatgaaacgtgaaaatattattgaactctaaatg

SEQ ID NO: 99609 - DNA, 933 bp, Heterodera glycines
tattcctcaataacaatacgaagcaaaaagttttatcctgaacaagcaaaaattagagaccggaatttccaaaaatgccgggccgggccgggctgatttttccagaatcaaccgggttccgggcccgcctctcaaaacccggtcaacccggttagcccggtcaacccgggtttccccaaaaatcgccgggccgggttgccgggcccgggaaaacccggtaccgggcccggcccggtccggtctctagcaaaaattatgatttattgaaacagaaaaaaacttcctttcaaatttaaacaagcaagcggagaatttcaacttgaaatgtacatgggcaaaaacgaaaagcctatttaaatttattttgctggtgatatgtctgtctagctcttctttaacttatttgttagagttaaagcaaaaagagagacaagaaaaagagatgaacgatggatggacggacggatgacttgagaaggagtccgccgaggtgacttaagctcaaacgaagcattggaggaacgagcaatggacggagaaaggaagcgaagagcaaaggcaaagcagcggttgtagggaaaatatgttttaactgggctatgctatgccttcctttctgtttattgaaggtacataaggaagggaaatgttgtgttaagaaacggaaagaggattacggggtgatggcgagggccgggcccctgggggaggggcgattggatattgtgggtgaagaggaagacccaattttctatttacctactttccttgctgttgcccacattctcacaaatataatttgcccttgagataaattttcccattgcctgtgcctgtcaatttgccttttgccatacataaatattattgactttcaattttaggttttcactttttcaatttttatcaattacaaagttggaagtgaatatg

SEQ ID NO: 99610 - DNA, 971 bp, Heterodera glycines
  unsure (1)..(971): unsure at all n locations
atccggatcccgaccaacctccccttttcccgttacgagtgggggatcacaatgatgtattctttgtccttacgcaataaagatcattattctattattcgccaattagggataatacatcacttcanccattatcaccattaaaggaaagcggggagaacggcacgagatcagatgggccatgggccgctaaacngacggcaccgcttttttgacgtgagacttacccgccacatttttgtttttaacgataatttaatagaaaagttattttcgacttgataatattgatttttcacaaccaatcnaattgttacatcgtgatcagatcaccattctttattcaaaatttaaataattcaaaaataatttacaacgacaaattttgaagaaattgaccaatgaaattaatggaatgtgattggaaatataggaaaagaggcacaaataaacagaaatcaattttgagacattttggtcacattgtttgaagccagacgaattttttgaaactttgcataagcacaagaacacaaatgtttttgtattgcctttatcattcaaaatcgatgtccatccgatttagaatctttttttctgtaaaatttagccccattttacgacaaaaaatcaccatttgttctttcccaatagtgatcttttggacaattaaattcatttcatttcgcccaataccaactcagtccatcccggtcgtctgttgccgatttgaattttaattggtcaacaaattgatgttttggcccgagaaatttggcatcttttcgcgtcaagcatttgccgcttagattttcataatgctgatcatttggacaaattgcccgactcattttgccaacaattctctctgatctgaacctgaattcaagcagttcacttggtccgtttcccgatgtgcttgctgatgatgatgggccaaatacaactgctggctacgcgttgtcccaatg

SEQ ID NO: 99611 - DNA, 118 bp, Heterodera glycines
ggtaaaaacggtagacggctcttctctcccttcgaattttgaccctattactccaattaattaggagtaggaaatttaattgaaataaaaatttttcctccgtttttggcatcgaatg

SEQ ID NO: 99612 - DNA, 285 bp, Heterodera glycines
caggtttttaatagcatcgacccaggcctggaaaaggatgtctatttaaatttattttacaaagcaaaaaaagtataaaaatcatttaattacttaggaacttttctataatatctatttatcaataacaatgtttttaaatttatttgtatttttttgattttttcaaatagcctcggtcccattaagaaacaaattttgagaattatccaggaaatcccattttttcatatttatctgaacctgtattttctggacatgaatctataaaatttcaggcccatg

SEQ ID NO: 99613 - DNA, 59 bp, Heterodera glycines
aaaaaataataaaaaatatattaaaattaaatattgtcagagttgaacaaaatgttatg

SEQ ID NO: 99614 - DNA, 488 bp, Heterodera glycines
ctcaaaatttaaaaaggcaacaaaggcgttcgaaaatgcacctctcactattttggaggcataaatgacataagcgacgccaaagtttgaatgctgctgcttccatttcattttggattttgggataaggaaataaattgaggaatatttgtggtttaaaattaaaaaaaatgtaaggcggtacttattgctgcgctaattgatgcatatgggaacgtggcacaattttcattttttgccgtccttttgtttccttttttaagttttaaagtgtaggcacaaaacggaaaagtaccatctttcctaatatttgtttcttactccacgcataattcagaaaatatgtaatttttgttcttcaaatgtcccatttatatcttattggcagctcttaagcacgaattatttttcatttggcgactaataattaattaataagactaataattaataaaataattttttatagattaaatattttcattatg

SEQ ID NO: 99615 - DNA, 424 bp, Heterodera glycines
  unsure (1)..(424): unsure at all n locations
ttttttcaaatatttaatatattttatttattatttttaaattaattatattccanaataaacaaatataaaatatatttaaaatnctttatccatctcccatntaatctaatnnttaanatttntnnttttcacccacaccacccnanttctattccccacataaaaananattttttttcaaatatttaatatattttatttattatttttaaattaattatattcnacaataaacaaatataaaatnaatttaaaatnctttatccatctcccatgtggtctagtggttaggatttgtggttttcacccacacggcccgggttcgattcccggcatgggaagagatttttttcaaatatttaatatattttatttattatttttaaattaattatattcgagaataaagaaatataaaatg

SEQ ID NO: 99616 - DNA, 212 bp, Heterodera glycines
caatttattaaatatttcgaaagttcgatcagcgtagtcatttttggtgtaaatctagttttctaaaaacaacaaatttacgagttttcccagggtgccttcggcactgactaaccttttcccctaagaatcggactaaaaattttcaacctaaaaatcgactttttcaatccttaattatgtttaaattttaattaattattcactttatg

SEQ ID NO: 99617 - DNA, 114 bp, Heterodera glycines
attaaaaaacaaataaaaaataataattcttttaaatctctccccccccccaccgcccccttaggctccgcgcgactgcgcgtccaacgcgagttggaggcggtacaaagcatg

SEQ ID NO: 99618 - DNA, 1003 bp, Heterodera glycines
gaactctagaaaaaaaaatgttttttagtccattttcaattttttgtctccaaggcaaagccaactgaggtattttgccaaattatgaaagaatcgaaggtaagctcattcggcctagattacgaatgaatcactgtgttcgggtgtcttttttttgtgagactcaaatataaggccgcaaatataggaatcggattctccgaccgtgaaaacctctaaaatgacttcactttgtgaaaaaaattgaaaaatttttttgagtaggggttggggtactatcggcactattacctttttaagtttttcacgtaaatttcacgtaactcacgttgtagctaaaattaaacgtcagattcgtgatcagcatcaaaaattagcctagaaaaattattagaaaagaaatttcagggggggtggcaaaacccggaaataccctttttttcatccggcggcgccatcaccgctacttgactccctaattactcaaaaacgcaaaagtggtcatttgggaatttgagcgtcgagactaaagagcagaattttggaaaaccccgttcccggacaaggatccagacacccaagatgggcccggacaaaatcccagattaaaagacctgttttaacatcactcgggccttggccaggacctgggaaaattctatagtatcccgccctctgtccggtctctagtcgagaatacgttagtgtccctccattgtcatttaattttcttttatccatttctgattcattttaataattttgtcatggacacttcgaatttttcaactccaaatgctcttctaccgtattgcaaaacgatcgaagaagtactgttgggctccgactattacgtcatgcatatccaaatgtttttgctgacttgcgtattaattttgattgttattttggttcgtcaatatttcaaacttcgaatttccatccacggaaacttaagggtattttattgaaaaaatgcaatttaattacaaatattaaaatg

SEQ ID NO: 99619 - DNA, 88 bp, Heterodera glycines
acaaaatgacgaacagcgtgccatcaatcaacaaacacgcagtaaggcttggcaagaattggcacgacaatttgactacgatctgatg

SEQ ID NO: 99620 - DNA, 72 bp, Heterodera glycines
aagaatttttcgaaatctcgtttaatttatttatatttcttttttgtgggggcgtcgtcgttttatggcatg

SEQ ID NO: 99621 - DNA, 542 bp, Heterodera glycines
ttttatcgcaaaattttctggagaatattgaataaacttaaattttcttaaaaattgataaatttattttaaaaataagcaaaaaagctaaaatttcgcttttcgggttgattttcgttaaaatgaataaatcatagcattatcatgtttttttcttctaaaatgatttttaataccatttttgtccgtattgtggccattttatgtccatattttgtaatttttggtccatattttacgattttatatccatatttctccgagccatacaaatcacaaggtcatgtattcgacttttattttgccctatctcgaaacccggaccaaaactcgaaaaaaagtcgcacagattcgtacataaaagtgatttatgaaaaattctaattttcgacttttgtttgaattcgggtccggaattcgaaataggccaaaatagatgccataaaaactcctgaatactgagggtccaggcgggtccattaacattcccaaattggtagcggtgttgttaacaatcctttattcaagagtattatacaatg

SEQ ID NO: 99622 - DNA, 1003 bp, Heterodera glycines
ctttccattgccaaacaacaattcaatgatgcatttgacataaaattggcagaaattgaacaacaatatgttaaggtagaaaagtgcaaaatttttaagcaaatcgaaaaacgcagtttcgacttagtttttagattttctgggataacttatagaattccatatttttatgggttcccaattttaccgaaaaaatccaggaaaattccaaagctaagaaatcctggttttttcctgtttagcctggacctgaggcctgaacaggatctttttttttgacctggacttgtatttcctggacaaaattccaggtcaaggaaaatccagtgccgaaaaattgcaggcctgggtccaggaaaaacccaggcctaggtcctggtcgagctctaatttttaagtatttgattttcaaattttcaaaaagtttactacgagcaggaatgcatttgaaattacgcaaaaattacgtagttttccaaattaatttttaattttttctgcttatttatttatgtgcctttttgcgacctttttaatttttaactctataattaggcaattttttctttgaatataaataattaaattatgtgtaaattaagacatatatttccacaaaattggatgcaattgactgggccacagaatgcattggtattgtgcattatactgtagaaaatacagtaataccattggttggcgaagcttacaaaacgttagataaattcggtgaattggtttctgatttgtcaaaaaataagaaaaattttgcaaaaattattatggagacggctaatttggacatgaaaaatgcttataaaattactatacagaacgcattgtcacatcaaaagtaattaaatacaataatttgaacattcaaaataatttttttttcaagaaaaaaatttttctaagaaaattaaaataaaatccaatcaaaaatggaattatttttaaaaaaagtttatttaaaatgattattttttttaatgcaaaaatg

SEQ ID NO: 99623 - DNA, 1003 bp, Heterodera glycines
  unsure (1)..(1003): unsure at all n locations
cctttttttattttatataaaatgcatttgcgaatttacttttttcatttcttttattttaatagtatttttgagatttcttaaaaatattatctcccaaatatttttaacataacattgatatttttctaaaaataagaaattggaccataattttagttatctcttctaaattataagctaccgataattttggcaaagcaaacataaaagcagtcaagaactttgtacttttttggagtcactaatttcaattttaaaaattttctgcttcctaactacaaatttacaagctattttttatcgaaactattgaaggtcctaataaaacataaccatcaaaaaagctttttaaattatatgttcaaaatatataatttttgtttgtatgatataaattcaaaaatctctataacccataatttcattcctataattatctaacgcttcaattttatgaacttcttccaaattgaaaataatcatttaattaaaagaattttacttaagtcagaactcaaactttgaataaaatataataatatcagggctcggattcgtacttggatttcggattttgtgcttggaaaattttaactgtacttttttccaaaattgtacttggaaatcgggatttttgatttgagtacgaaagtaaaaatatatattttattaaaaaaatttaaaattttggattttgtcaacaaacattaatttttactanatctaacctagaaatagacaagtttcagtcaaaatctgtttanaaaaggtacaanagttctaatttttctcccggcagcgccaatggcaccgcccaaccccaaaaaataacgcacaatttttcttaacaattgatccaaaatcgcaaaaattttgtcattttttggtgaaaatctgttaacaaattacaccgaatttttaaaattttcccggcggcgcctatcggcactgccggacccccccccccccctcccttcatgaaaaaccgccacaaaaaatg

SEQ ID NO: 99624 - DNA, 297 bp, Heterodera glycines
ttttttggagagaagcaatgttgtggttaaactcaccataacaataaaatatcatattgattggcccattagatacccgggcatccacatttctcaaaaaacgtataacccattctgattttccacttcctgtgctaccggaaatcgtcaatgtaaatggatgccgaaattttgtgtccgtcacattgaatgattgaaaattttgctccatttatagcaaatcaataaaaaaacaatttaggtttaggacaattcattatatattgcttattgtactgctcaatggagcgcattatg

SEQ ID NO: 99625 - DNA, 390 bp, Heterodera glycines
  unsure (1)..(390): unsure at all n locations
ttataatgntcaaatttcacttataattgctactttttgccaccgttatccaacttatctctgtccatcatcatatttttagctattcttaatgtattagccatccattcatttatggttcacgtgattcatggccactcaatgctctgtggcaggagctaatgctttctcttaaacgagattgttccgccatttcgttgatttcaaactctgcccataatccacagatctccgctcattttttgttcattttcaatatgcttgctcatttatttatattttcgacaattatttatttatttatttttcactttcttttaatttccttttattttcaatatttatttctctttcgcttgtataataaaaataaaatttagctttaaaatg

SEQ ID NO: 99626 - DNA, 75 bp, Heterodera glycines
ggtttttttttgtaaaaaaaattctttttttttaaataatgttttatcctttttcagggaattcatttccttatg

SEQ ID NO: 99627 - DNA, 230 bp, Heterodera glycines
tgcaatttcaacccgaccacaaaaacttggggatgggtcttcaaaaagcattccaaacccaacaattttcgtcctaagcaaccaaattcgggaaattcaaatgctaccaaaacatttacaggtaaatatcaacattctcaggcaccagttagtcaaaagtgtaagcggtgtggtcaagcacacgcggtgcgagactgttcatttcctgtggacgtcaaatgttttggatg

SEQ ID NO: 99628 - DNA, 68 bp, Heterodera glycines
tttatggaaattcatttaaaaaatttattcatttacagtaaagcaaaaaaaaaagaaaagaaaaaatg

SEQ ID NO: 99629 - DNA, 109 bp, Heterodera glycines
tagatgcttgtaaaatttataggatatcccaatcgggaccggattcatgaatctcagcttgtataaaagcgatcacatttttcattttgttgtaataaattcaaatatg

SEQ ID NO: 99630 - DNA, 115 bp, Heterodera glycines
ggtgactaaaaaagctctggtcttaaaaattcatttcaatttggctcttgtcgtttaacatgtcaaggcttgcaacgagtttacgcaacatgtcatctcactgttgcgggacatg

SEQ ID NO: 99631 - DNA, 197 bp, Heterodera glycines
ttttttgatggatttgtcatgcaaaaataatttgtaaagacatccctcaataattctaatcgaaattaatcgtttcgcataaaaaaatcaatataaaacaatttcaatgaaaatgccattttaatgttaacattaataacaaacattatatattactcaaattatccatcacaaattgccaaaaaaacattaaaatg

SEQ ID NO: 99632 - DNA, 389 bp, Heterodera glycines
ggtaactttttgggtttggcaccgtacgaaattttcaagaaaaaaatcttagaaaattctatggaaacaaaatttttttgaaatttttgtttcttcgaattttttcagaaaagtttttctaacatttttttcttgaaaaatttctgtttgaaaatttttagacctgtccatactcaaaattttggaagaatggtattttgtgccgaaaaattttcgggttttcctttatgatatcccttccaagactcttttacccaaatttttccaaaaaccaaaacaaacttcctggaacagtccctgattcagcggtcgagcagaacttggcattgtggaaggaaatgcaggagggcagcgagcgtggacagcagtgttgcgtgaggatcaaaatg

SEQ ID NO: 99633 - DNA, 762 bp, Heterodera glycines
agtgcgttttggtgatgctgcgagatggacgacggcgagcaattcgagaggacagaggcggcgggtggagaaggggagacctgttgatgtggaatttttttcgttttttttgcgctaccgtatccctcgaaattcgagacagtaatgcaattttttactattgcgtgaactactgtaaccataaaaaagtacgatgcgataccgtaccagcacactactgctgatatgaacagcttataaaaatattatgtacaaaaaatttgccgaaattttggatttttgaggattccaaaaatttacctagataaaaaatcctcaaaatatgtaaaaaatgaaatatgttagaaaaaagtccaaaatataaaagttaaagctaaattagattaataaaaattttcaaacaaatttctttaattatttcaaacaattaatattttttggactaattcccggttgccctaccgggactgggacctgagcttttcaaaatccgggaccgcgacctctgaggaccgggaattcccggtcccggcgcactctagtttcttatattgtttaagaatttcgattcttaaacccacttcctcagttttttaatttgtagtaaaatggtcaggttttatttacctaattagtattaatgggccagtcaattttgaaatattcgaactcggtccttttatttgtcttgtcgacattttttttttgatcgtcaacttatccaagagcgtgtccgacggtggccaatgtcccagccgaatg

SEQ ID NO: 99634 - DNA, 833 bp, Heterodera glycines
ggtttgaaaggcaaagacctcttgaagaatttagggatgaatttattgcttataaaatttaagaaaaaaataaaaattcgagaaaaggaaactgcatgagaatcaaaggttgtgggacataaaccaaaaacaggtgaaaagggaaacaggtgaaaatagatgaaaaggaaacaggtaaaaacaggtgaaaataggtgaaatttcacctaaaaatatataggggcgtgtatttaatggggcatattagagaatgtctcaactagtatcaataaaaagtgccaaaggaaaattttgtgatggttatcgctattacaaacataaaacgaccaagttcaaactttggtggaaatgtgaacttaattcacatgggtgccagggctggggttttgaaaaggaagggttttttacaatgacgcgccgacacaatcatcatccagacactatattgattgaaatcgaagaggaaataaaatatcataatttttctgcgggggcaaaatgttttttgggtgacaacaagaaatagttgatgatgctaagaaaaatccgagactccaaactgaatttagagatgaatttattgtttgtaaattataaaagaaaacaaaaaaattaaaataaaaaaagatgaattttgaaaaatcagaaaaactaattccatattattggaagctgcaaaaaaagagacagaaagagcatggcgggatgtagctacgctaacggatgaagtaagcgattttgccaaatcttctcgcgaaacacttaatcgtgcaataaaatctagagaaaaggctccttacgctaatggtattcgagaattatatcttagaatg

SEQ ID NO: 99635 - DNA, 222 bp, Heterodera glycines
  unsure (1)..(222): unsure at all n locations
ttttatgataatagggncccggatttatatggacaaaaaaacccaaaatatagattataatatggatgaaaaaatcgcaaaatatggacganatatgaacaaaaacgcagaaatattgacaaaaaacacgaaaatatggacaaaaaaatctctgaaaatttgtttgaatttagaaaaaaaatcataaacccataaatttttaagaaaaaaccatttttcatg

SEQ ID NO: 99636 - DNA, 1003 bp, Heterodera glycines
gatattagacctaatcctgatcatttttgtagagttcgaacaatgttcgacttttagaccttttgttcgaacttttattttcaataacccagggctcccagtcactgtacaaacatttaaagtctcttttgaggtcttacaagtgctctgtgagcgaaaataacaaatgaaatttgttcgaactccaaaaagtgggtctaaacgtcgttttggagcaaaaataacaacatttcgaccccccttggagtaacccctgtctggaaatgtcttcctgatcatttttgtagagttcgaacaatgttcgacttttcgacattttgttcgaactttttattttcaataacccagggctcccagtcactgtacaaacatttaaagtctcttttgaggtcttacaagtgctctgtgagcgaaaataacaaatgaaatttgttcgaactccaaaaagtgggtctaaacgtcgttttggagcaaaaataacaacatttcgaccccccttggagaaaccccctgtctggaaatgtcttcctgatcatttttgtagagttcgaacaatgttcgacttttcgacattttgttcgaactcgttattttggtctgaatagggctctaatccattgcgtaagtatttttgacgctttattttaatttgtaattaaaaaaatatatatatttaaattaatttttgaatataaatattagaaataataattagcgaatgggagcgccgtagcatagtggttaacgcttttgattaaatgctttgaggttctagtctgcacggcgctcccataattaggtaggaattaacatcattacattacattacattacattacattacattacattacatcacacattttttttataaagtttttgttataacaaccaacattttggtatcactacttcattttagtactaatcattgtcattaaatttacaaaagctcgtttttatttattatttattatttagtttagattttattaaaaaaatg

SEQ ID NO: 99637 - DNA, 911 bp, Heterodera glycines
aatttgtgttatttcccagcaatttgtttaatttaatggaaaactttaaaataattagcgaaaagcacaaaaaatgtttttatccattaaataaatttaatttcaatttaataattgcctcattaattattgagagtacaataatttgttttgttttcaagaattcaaaaaatgctaagaattggtttgcattgaaaagggcaaattcggcggggcatggaaatgcttaataattcgttgtacttgaagctgttcggtgggcaaatatttgatcaaaaaaggtgggctgaaaagcacgcgaacggagtgatgagtttgaagcggtcatcagaaaagtgcaagaacaattcactgaaatgcttaacacaccgtttcaaaaaacgagatgtgtaccaataaatagagagtgccagagaaaaacattatctttttttctctaattttttgtctccttttggcgtactatctaatatttttattattaggaaaaacaacattcacttcgtgatgtttaactttttttctgcatgttaaatccacaccaaattttgcaaatcgatagagaaaaaaattacgaacataattggagggtttttatgaataaaagtgggttaactaaaaagttatgccgattttagcgctgacccacaaaatgtccagcccacgaaatgtccaagtctcgaatttgagttttttattattcagatgggcctaaggttaggcaaggggtaatataaagggtatattcgtattcagcgaccccgaaaaccctaaaaatcctaaattagactcattttgtttttataaattttgaaaaattttggacatttcgtgggtttttactcttttggacatttcgtggcttggacactttgtgggggtgccgattttagtggtaaaacttttggatg

SEQ ID NO: 99638 - DNA, 239 bp, Heterodera glycines
gctaaaaccaaacattattggttaacccattgctaaaatcatggtactttggttttaaattataaaaaaacgcaaaaaatggcaaattggcacacttaacgaaaggggaagcgggggtaaagccgaactgtgaaaactcggatcagaaaagcgtcgatatagccagggacaacattgaagtcaagttttaacaagactcctaagtttttgggtgattatcatgctatttaaggtcaatg

SEQ ID NO: 99639 - DNA, 858 bp, Heterodera glycines
ttgacgaaattaggtttttaaatacttatatttagggagttttttttaaagtcaaattatgaaaaaataggagttttgggaggccgggacggcccgcccgcccaggaaaaatttgaaattttaccatttttagcagattttcaccgaaaatgacaattttaaagtcaaattttggaattttcgaggaattttaagagatccggctgtaatttgttcaaatttttaattattttcaatcatttcgccggtgaccccaccccccccccccctccccaacttcattttggttatgtttcaattgtaaatgaaattttaaatattttgaagttattttccgaataagaacaatttttaaaccaaaaattttataaagaaaaaaaatttgggggaccaatttttggtaattttcaattcttcggggtgtattttcacgcgtcatttcttaggtttatttttgtttgtttctttttttgcattttgttatgaaattttcaaaaagccaaaataggcgccaaaaatggcgaaataggcaaaaaatacgcgcctatgcattaagcataaaaaccccaaaataggcgaaacaggcattaaaatgtcatcgaagaaacccctagcgaagacattttaggcctttgcctaaaaaacaaagacatttatagtttaattttttagcaattattatttttatattttttgtctttaaaaaaaatataaaccttggatttatttcgtctacctttgttttaaaaaaaatactgtttataagcaaacatatgcacaaaaatctgtattaaaaagtatataaccgacattcaatgtgtgctcctttttagttctagttttgaatcagaagtaatg

SEQ ID NO: 99640 - DNA, 1003 bp, Heterodera glycines
gcgtagaatttcgatagctacgcgccaaaattttttgtaggcataaatgctatgccacaatttcagctaagatttcttcttcgaatgggtctgcaattctactcgcccgctgttgattttaaaacaaaattcaaactttgacgcaaagcattttaaaaataaaaaatgatttcatcgattttaaaaattaaagaaaaaatttaaatttatttattgaaacagaaaaagatattatgagttaatgaaagaataaaatgaattttattgaaatagctaatcaagatgcctattggttttttaataaataaaaattctttcaaagaaagtttaaaaaaatagattgattgatttttatccaacaacggacagataaaagggcaataaaatttaatcaaaagcaattgcaaattaattttaaaaaatcaaatgatgtaattactgtaattactataaaaatacacgaattaatttatctactaaaatctaaatccatttattgctttattaaagggattcttaaaaattagcaataagaaaaataatcacaaattaaatgaaaattattatttatttagtcaatatttacactaaaagaaaattttatcataaattgatcatggtttgaacagaccgagtaaattgccatgcaagataaaagcgaatgtaaaactgaaaaaaagaaatctaatcttaatccataatgaattaaacggaatgtcaaaaggcgttcatggtgcacgataggaaaatatttatagaattaataaagaaaaactacagtttttgtttatctacgtcaattaaaatattaaaactaataataaaaagatagcatttgggaaaaaagaattataattaatttttatgtgattttgaaacataatttactaaatttacatttctatgagaataaagaggtgaacgtaatattaaaaattaaacattcactactgacaaggcaccgataattgaaaaaaataatttattaacaaaacaaaaaatg

SEQ ID NO: 99641 - DNA, 642 bp, Heterodera glycines
ttcttttaagaaatctcccgaatgatttttttcgaattaattcttaacagtaagacagtgggtgcttaatttaatattgctaattatttcgttgttcaaatgaattttttgttaatttgttgtttcaacttttaaatatttattaaatttatttattcttcattcgctattttttcctaattttcgtaaaacaataataataatttacttatttataatatttattaatttctctcataattaatttaataataaattttgtaaatccgtcaaaagtttgttcaaaattttatatcacagaaataccaccaggtttaacgattaagattgaaaaagtaaattttttttaaaaggacactgatttgtgaatcttcgcatgatttattatagtttaatgttttatagcttttaattattaaagcattttttaaattattaatttagcttttttttattgaagttgagttaatttttcatagattaccttttaaatggcacatatcaatgggatatataaacatttaaatacattatttttatttacatttttctaacagattgttttatttcaaatcatattcccattttttataattatttcaagttttataatttcaattttaagtgtatattatcaaaatg

SEQ ID NO: 99642 - DNA, 77 bp, Heterodera glycines
  unsure (1)..(77): unsure at all n locations
tagaaaaactnattccaaaaatttcataattttccgtaatggtagaaacataatatctagagctcgaccttggcatg

SEQ ID NO: 99643 - DNA, 344 bp, Heterodera glycines
atcccattgaattacggttgggaatgggtacggtaccgagatgaccagtgaatgtttggtcaaatattttcatagaaatatgatcagatttggaatgtaaaaattcggcatttctcccggattttcatcaaaaaattaaaaatccgtccgtaagtggcaaaatggtcaaactggagaagaatggacacaagcaaattaatattgaccaaatcggcgcattttaggtacagctgatcaaacatgacaacaacctttgggtgaagacaaagtgtgaagagccgcgcattggccaaatgataatttcccatttaaaaagtccgacgacccaaggccaaattcacatg

SEQ ID NO: 99644 - DNA, 109 bp, Heterodera glycines
attaatgaataaagtatataattaagtatatcattccatattaattaatgaatattaagcctaattacataattaagggtatcattccaatcttcaattgcttgcaatg

SEQ ID NO: 99645 - DNA, 429 bp, Heterodera glycines
gtttgtaacatcaaagcaatcactttttaaagaatttgatcaatttaaatgtttttttcaaaatttttaatttttctaagaatttaaaattggtttttcatgcattttccattaacccgttggacagttaaaacaggtaaaaaaaagccccaatttgtactatgccccgattcactgttttcgataaaaaattcattaaaaaaacaaacagaaaggattatttgctttttagagatgagaattgaacttttgagtgaaaattggaccaaataaatgggcataagccactacgaaaaaaagagaggaaatgcccaccaagcttcatcctgaagctccaccaaagcgcaaaaaaaaaaacttattttggaattaacaattttgggaataatattttttaaaaaatatttttaaatttcaggctaaacaatg

SEQ ID NO: 99646 - DNA, 297 bp, Heterodera glycines
atttttgcatgaaattataattttcaagtgttattaaaattttttctataatcagcagcaaccattttatttagtcaatttcctgaggaaaagaagaaggataccgaacgttttcaaataatacaaaatttatttgattgttggaaagctgctgcggattactttgtgacaggctgttggtcccatgcggatacacatgcggagacaagtacaatttttggacggactatattaacggtaagtgatatagaattatatttttttatctaaaaaagaatttaagtattggacaccatg

SEQ ID NO: 99647 - DNA, 154 bp, Heterodera glycines
attttgccgattatgcaggccgatcggatcagaaacacccccccccccccgcaggatcgaagcggtgatcgaaagcgcacgtcggatgaagcaggtccatgcgactctctccgccggcatttgtccgtccgtcatttccaattccgtgccaatg

SEQ ID NO: 99648 - DNA, 495 bp, Heterodera glycines
taattacatttggctaatttttcaggactttttttgatttatttagtgcttttttggtatttttataagactttttggttattttttcataacttttttgcattttttgtgactttttggcgttttttatgactttttcgtgactttttggcgatttttcttgactttttaagtcgacttttttgagatttttcgtgacttaaattcccatccctagtgatcagcgaccctcaaatccccataaaatgtgttttcacgactttttagaagaaaaaattttttattccaaaaaggggggggcaccagcttcactattaccaaaaatcctagtcatactagtccaattattataaagaaaatgagtggaggttcgagtgtgctttacaacactaatattttgttttttcgtctgtttcatattacattatttcccatgatttttttgtttttgtttccagattaaaacatattttaaatttttgtcgttcaataatg

SEQ ID NO: 99649 - DNA, 281 bp, Heterodera glycines
ttgaagaagagacaaaaaaagagttataatcaaatatgaagtattcttaaaagaagttatgtaaatagctaatttcgaagctagtgtgtaagtacgtgcgcaggtattttggtgtttgttcaaaaaaaaacgatgcctacaaaacgccaaaagttcggataatttaaagttaggttagctccgttccgaccattcttttcggttgcattaaatctttttattttattttttaatgttcacataaaactgaattaatggtaatttagagtcttttcacaatg

SEQ ID NO: 99650 - DNA, 478 bp, Heterodera glycines
tgtaaaaccttcattggaaattcagcacaattctgtgcgtgaaggaggatttgacattaaggtaaaaagggagagaaaaacaaaatggaaaacatttaataatcaaaaggatcactggtataattaattaattaaaaaatggcaccggataaaaagcaattaaaacataattattggctaatgtgtcaattgcattgtcattaggcaactgaaaattggataaaataccataactatggaaaaattttgacaaaatttctatttggatacctgggatgagcaaatggcagcaaaaacataagaaatttattatttttctttttataaattgtggaaatgaagcctaggtctagcgctagcctaagcttagtccatgcttaagtctaagtctaatgtgcaaaaaattattatttttctccgtttgctaaaaaaaagttgacaaatttaattagccaaattttcaagattttcaagaatg

SEQ ID NO: 99651 - DNA, 225 bp, Heterodera glycines
aactttttgcaataggttgtcataattggtggcgactggaaacagctggcaccggtcatccctggtggagccgatcgagaacaactcgaggcgtctgtcaaaaattcgccgttgtttgccgacttcaaaacagtgcggttgcgggcgaatcacagactgaagtccggccagcagcactaccgtgcgtttcttaaacgcatcggtattggcgcgctgaacaacatg

SEQ ID NO: 99652 - DNA, 79 bp, Heterodera glycines
cccaaggccattgtcaaccactccgatcaggcgccatgcgcgtgttcgtgcaaaaactgccgaaaaagcaacacaaatg

SEQ ID NO: 99653 - DNA, 59 bp, Heterodera glycines
agaccaaaaataaacgtctgcgtattgactcattaggaacctactaaaaaaaaaaaatg

SEQ ID NO: 99654 - DNA, 630 bp, Heterodera glycines
aattttgagaaggctagaaaaagttttttgagaaaaatttggcggtgaaatttttcccggcaaaattttggggtgcgcacctgggttaattgtagtgcacccatattttttatgtttatttttatttgccagagttgaaaaccatcaatcgatgggttttgcgtgtgcgaacagtggtggacaattatgtgacagaacgccaacgggcattgtcaattgcaacaaacgatgccgtcaatcaaaatgctgttgagcaagcggaccgaacatttctgaaccatcatacaaattacgtgaaaaaggttgaaaaacggaggctatttcaaaaaagagtatgcttcataatgagtcaaattccacccaaatttcaaaattttcccaaattaaaaaaaaattgaatgtttggctcaaaacctgaattccaaggccgtttgtgctgaatttgaaaacaaaaagcggggggggggggggccatgatttcaacgtttgaatgcaaaaacattttacccctttttattttgtcacagacattttatgcaaaaaggggtgtatgttcatgaccaattataatttgggtgtttttttttacagattagctcttatttggacggtttccaatcccacaacatg

SEQ ID NO: 99655 - DNA, 64 bp, Heterodera glycines
tggctaaccaatcagcgatttttgggcacaaaaaatttttcaaataaattttcagtgaattatg

SEQ ID NO: 99656 - DNA, 410 bp, Heterodera glycines
  unsure (1)..(410): unsure at all n locations
aattaaaattccaagcttcaatacaataaaattttacctcatttgtccccctcattaccttccaaaaaggtaattttgtatcatttgctaaaagttggcattctaaaaatgattatgctttgttttttattactaaattttttaaatttaaaaccaccttttattagagtatacattttgataaaagcctaatgggactgggctggggtcaatgcttgactnggtttcctacacaaaaattcagcaaaatccaggtccatgaaaaatctaggttgctgaaaaatggactggacctggactacgagaaaggcctgggtccaagtccaggtcgaactctaagtttatattacaaattacggccacaatgtttatatcaaatgccaaaaaaaaacaaaacaattcaggtgatg

SEQ ID NO: 99657 - DNA, 858 bp, Heterodera glycines
gtgacttcagaatcgaaaatttcaatacagaaatgcttttttgagctcctttttttcaaataaaagcaaaaagttttttttatgaatttttaaatgtatgcatatttttagcgccctttttggcaatattaagaatggtgtcccgacgaaaaaaatgttaaaaatttgtcgggtattttttctaggcttaaaaatgagctgatcacgaattaggcgccgccgggaaaaatttggtaatttataatacgatttgtttacagattttgtcaaaaatttttctaaccgaaaactaagcaatttgattttttagaaaaaagttgtgtgactcaaattttcattacgttataactcgggtcataaactgccgtttaattaatcatttttctattaattttaaatgtccaaattgattttatacctttataagcaaaattattagaatttgcgaattccgtgttttttcatgtgttagagacatgaaaatagtacgtcaaaatgagagaaaaagaaatcttcaaatattttccattatacccaaattttgtttgttattcttctaactatcgatatgcaaaatttagtgaagatttattaacatagggaaaaaaagctgcacatagaaaagtaaatgttgtttttacaccataaaaatgaagagatagtaaaagagaaacgacgagatagtattaggcttttctctgcacagtggggttgacccatagtgtaggtatctataaattttaaaatttgtttttaaattaatctgcatttgttgtacttattttatgtttgattctacacttttttaggaagctttgaatttgctgaggtttacattttcattattgaaacaaaatg

SEQ ID NO: 99658 - DNA, 969 bp, Heterodera glycines
ttgatatgggtgattaaattccgatggattaactcaattgtacacatatgtatgtcatggtgttgtgtatatgtatatattgctgtattatattgtataggctgtataaatgcgtcaatcgacttttaggcgattaatcaatgaccatcgtcaatttcttagggcataccttattttttcttacttggtcaatgttgtgtatttgggtaatactaccgatggtaggaatgaaattcttaggccacaaatttttcttcatcagtgtcaacatttcttggttacgcttttttagtatatcataattagggaacggatttttaggggcgaaaaagtttcaaatataagggtgaaatttattaaaattgcagtttttgtataaaataatttaaaacataaaggaatcaattttaaattacaaattttgattaaaggctcaaaattctttttaagtccattttcaacacaaatccactcaaatttatatcaaacaccgtttgttgatcagtgacaagaaaaacgaaaattaagggtcaaaatgatcgctttttgtttcaacctacctatttcacaaatttcattttaggaacaattcgaatttaattaaagtcgggaatttatttacctatttatttatttaattagcccgttttttcctttgaaattcgtataaaagacagagaacataataattgactgtcattctctgcaaaatcataaataaagtattaaatgtgaattttcttgtgctgttttactcaatgtcccatttttttccttgttaattttttaaatggaatttttggcgctagtttaaaagagtacaattttgaaaattttttcaacttttttttggtcaaaatttttttttgtttttttacacataatgatggatattaagtatccgcacaatttggcaacgggatttggactacgcaaatcgaagcgaattttatgagaccgaggaaaatg

SEQ ID NO: 99659 - DNA, 416 bp, Heterodera glycines
atgtatgtagggcctgaggtgtttgaacaccccatgacttggccatacgctaaactcccttggtccgtgcgtcaagacgagcccaacagatgaccggcttctacaccgacgacgactactgagagcccgagctggaccgaactggttgctggtacgtgtcgcacgcgaccgccaccgacccccagctcgagtcaacacggacccgaaaccattgcacaattcacccagagtaaacagcactcccccgatccgggtaccagaccccgaaaggctggcctcaagaccgagctcacgcagctactccgagcatctcagcgcactccgcctgcaaatgccccattcgccactgaacagaaggacagcaaaccccagtctggaggctagcaggccaacgtacagcaacaaacgggtgaatg

SEQ ID NO: 99660 - DNA, 180 bp, Heterodera glycines
ttcgctacgtgcgcagaaccaaaaagccatcaatgatcttacaaattgacaaggttgggtaatgaaaattttaaaatttaaaaaaaaacaaaaatttaaggataatgtaatcaattttttaggaaattttcacgccaaatttttttttattaattattcaaaatttattcgcagttaatg

SEQ ID NO: 99661 - DNA, 424 bp, Heterodera glycines
aaatttagtcttacacttgacgagaatgatttttcattgcgtctcgatcaaaaacatgatgttgctgttgtgttcaatcagcaaaatatgcttagcgacaacgcagatttaatggaagttcgacggactattgaacgatcgacggcgatcgtaaaaaataaataattatttttactaatcatttaaaataaatataaaataattatttgaataaataattatttatataattgaacagaaagcaccatcgcttgttgccgcatttgcacactcgaaaaaaatgcaacaggtcacattcattgtccaatatttgtatgccaagaaaataatttttgattttatttttctaattcttttaaattatttcaaattatttttcacattcccattttttaattattaggtgctctctgagcctgggatg

SEQ ID NO: 99662 - DNA, 809 bp, Heterodera glycines
ccatacggacttacggactaaaaacccgtaaaacccttactcagtataagtccgtatcggcccaaaaaaatacggactacggacccgcaaaaacccgtatagggtccgaaccgtagccgatctttaatctgaattataaaatttattttttatgtaaattgcctttctgttcctgtctcttgtcaacgctggaaatcaaattactgttacgccacagaatcacaaattattcattcatttgatttgacaaataatttttaattaacgaaaattaacggcaatgtttcatcgtcaaaattggcaggtgcctttttttgtctttgtgagtaaaggcaaatcgccatgttagcattaaaaaaaatcttgaagtccaattcacagcggatgcatgccacaatgtcccttttaacatcggagacaaccttccggactggatcctggtcaactaactatcaactcgatcgcaaggaagcggccctttactagttcacaattccatcccttttttcatcgtcattcgcttttagtttattttttatgctctgaaattcttttaattttatactgccctcaattttgttttctaaaatatcggcgcttcccaatttttacttgaataaagttttattccagtgttgactggacaaaatatatttggcccatctccaattccccaaatttattaacagattttttatcaacaataccaatttttgcgattttgaactaatgttttaatgttcatatttgaatttcgaaagaaatatattaagttttttgagaatttttaattgttatcggaagaaatg

SEQ ID NO: 99663 - DNA, 107 bp, Heterodera glycines
actgcaaacaaaaataaaaccaactaaatttttaattattttatttctcttaaagcccattttcaaacttttagggtgtaaatttaaattaaatttaaatcgaaatg

SEQ ID NO: 99664 - DNA, 481 bp, Heterodera glycines
tgccctcatgtgtcccttgtttcgggaccagcgtacccaagcgcgggacccgtatttggaacttgagaagtgctttgaatcattccagcacctgggtcaaaggaagcaacgtcgacagcagcagcagctgccggtcacagtaaagcaggcacgtgtgcattgggccaccaaggcaggcaccccgaaggcaagatggacgactcaagtacgtggacaaagagagagagcgtgtgtttgtgtgtgtgaagcctggtgatggaatgcgaatgtggcgctgcagtctctgtgtgtgaggttgaagcagcgttggctgctttattttgggggagaagcgctggtgatgcactcgctttctctgtgtttatgtgtgcttgcgcgtgcatttccatggtcattgtggttgtcgctagtgtactttatggcgcaatactgatggtacggtgcctgctgtgcagtgtcggaaggcgatcgacggggcatg

SEQ ID NO: 99665 - DNA, 114 bp, Heterodera glycines
attagatttttaaaaataatcatatatataaattttaatgtttttttttctctaactttttaattttctttaactattcctttttcgggacgacgaaagctaaggcccggcatg

SEQ ID NO: 99666 - DNA, 68 bp, Heterodera glycines
tttcaattttatttcagtaaaaatttataggtaaattaataaataattagtgaaatcttatagccatg

SEQ ID NO: 99667 - DNA, 158 bp, Heterodera glycines
tgaaaaataaaaaatgtcataataattagttatagattcttctaagctgacgaaagctttgccttataaaaaagcattgaaattttaattaggcgccataaatataattctaattaattaactgctttctccaaataattacacctattattacaatg

SEQ ID NO: 99668 - DNA, 326 bp, Heterodera glycines
atgaagtcacacccccaaggggaagacttgcttatgctatataagcatagtgccatggggcagaggacaattcgccctcccccactcaaaatggacaattcttccccgtccccacgatcaccaagcgaaggagacacgactccctatgactcctccgctcctttgtccccgctctcgcctctccctctttgtcaaagagggatcaaagacattaatgtggaaatggaggatgcggcggtaggtccaacagtccgccgaaaagggaaggatttgaccctcctcgaaacggaggccaaagaggtctccgaacggagacctccaacatg

SEQ ID NO: 99669 - DNA, 1002 bp, Heterodera glycines
acctcgcctcattaaaattaaccattccttcgttttgtgcccaattgtcttcttaatattatagatgaggtcataaataaaaccgtcaaattatgctgctaaataaactcctaaatccccatttgtcgtgaattttaatttacgtagcaattcaagataccatggttcagcaagagagaagttggaatgatgacgcggaaaatttttatttttttcaaaaggggttttccactatacgccacaaatgaataagtaaacaaaatctcaaaaaccggaaaaattagtaatggaaatcaaattgtttatgagatattgtctcacgaggctttgatcgtctctagcaactgatgactcaaaaaactgatcgccatctgcacgtaaataacgtacagacaacacattttctgttccttcttttttttagtgaacaaatttaaaaatttcatgtaaagttagaaaaaaaaaatagggggctggaaaaaaattcgctcactggtcgccccactcttgccccgtcatctcatgctcactaccggcgggcactccgtacccttgttggtgatccttaatttagcatttatgctcaaaaacacatttatctcgatgagaatcatcattctcggctcttaaccccttatcttcacttacttgacttttaaccatgatatttgattatacagttaaacattgagagtgactatttagacccaatttggctatttttttcctaaaaaaatgatgaatgaaatgttatgcctaaagaatataattgaaatttctcttccaaaaaaccaaaacaattctgatggaagttgtcgatggattgatgttcttattaggcatgggataattatctataccgccggtcgagtgtacccgatacctgggcaaatatttcagtatctgatcaaaccaatgtatacgcgaccggtcggcccttttccgaatgcttgaaaatttccaatgttctacttaattatacattatatagccttaattatg

SEQ ID NO: 99670 - DNA, 484 bp, Heterodera glycines
ccttttcaccggttttataaaccgatccgatgccccgtccctttctctttgttctgttctctctaatttagaccaaattggccattcctttcccttcccttttaattgcgcaattcttgccctcttctcttctcttacgaaagactgaccttttttggtcgtttcataaaatagccgcagaatcagattctctttgcttaaatttatgtttttttaattcttatttatttccttcattaattaatacaagtacaatgtttttactttgattgtccggttcaggaaacaaaattttgcttcccatttctgtgcttactctctcagaatatttgtgattttctatagctatattcttttcctatttgtccatttgattcattcctttaaatgacccggttaattcataaattttatctttatataatttatctattgatttaaatatgtaaatgtctagtaaaatgtttaatacagaataaaaatg

SEQ ID NO: 99671 - DNA, 137 bp, Heterodera glycines
ttttgaaatggtaacaaaaattcgcttgaaaaattataaaagttacataattttagaagaccggggcttaggccaattttcaaggggagagggtgttcgtaaaaatgaagtgggtgtgatagagaaaggagaccatg

SEQ ID NO: 99672 - DNA, 612 bp, Heterodera glycines
aaattttatttttacatattattaatagggctgcgatttttaggcaaatgcctaaaatttttgcacttgatacgcacagataagcacaaaaaacgcgtttttcgcttggtttggggtttttatggtgacttttagaattcctatttttacctatttgtgctttttatgtttaatactaaggcaaaattgttcttattcgaaattacagaatatttaataatttatttaaattgatatataatctaaattaattttttgattaaatttttatgtgttttgctccctaaaaatccttaaaaattttatttgcctattttgcgttttttctgcctttttaggtgcctatttcgcgattttttgtgcccaaaaatcgcagtccattgcaaaactgcaatttttgaatttatttgttagaaaattattgtaataaatttataaatttacttagaaatcaattaaatcaatacgaaatttcctaggccaaatagaattgaatttagctttcattaccattttttaaattttgaattattttaactttccgcttgattaggtctttcatgcaagtcccttaaatgcggttgacattgatgggaagccgataaaccaatg

SEQ ID NO: 99673 - DNA, 227 bp, Heterodera glycines
aaaaataatttaattttaatttgaatttttaattaatgcggaaatatcacgcggcattttttcccgcaaaaattgacacatttagatttaacagcacacatttttacggtgattatctccatattaaaatagacatttgtttagccgaagtattttgaataattttctctacaataccgatcttttgcatgccgcgttccgccgcttctcatccgccccataaaatg

SEQ ID NO: 99674 - DNA, 131 bp, Heterodera glycines
ttgcttagttttgtttttccgtcccaatgaccgtactcccattccctacccatgcacttattaccgtaccctcaccgatcttcccctaaggcgagatttgctctcgtctgaatgccgactgtcagacaatg

SEQ ID NO: 99675 - DNA, 314 bp, Heterodera glycines
cgccaggatagattttccaatattttttacgctgatcattttcctcatttcgctgtatgtacgcttttttgcggcgcgttttttcaaaaaatctcgggtaaccgggaggggggcggggtccggaaaaattttgaaaattttaggcaatttgttaacagatttagtataaaaacacacctgatacaaaaatatgtagcaaaattaatgaatcttaaacttgtttcaccaaatggacatttttcactttcgtatgcaaaataccgattgccaagtacaatcttggaaataagaacagttaaaattttccaagcatg

SEQ ID NO: 99676 - DNA, 375 bp, Heterodera glycines
ctatagaaattttaaataaattaattgaaatgctaaataaaatgttatatgttcgttatattattcaaaaatgcttagtttttattttttgttactcgtgcttaatacaatgaataacaattatttaaatgaaagatgaatttcataaaaatatatcaatgatatcaagatggcaaatttgttttttgatttttctatctggaaaaacaagcaatattattttcatgaataaatttaaaaaatggctgaacgtggaattcctcgccttttcacgtgttttctctttttgtgggtcagggcttaatcatactcatatgcataacaattgtctctaaaatcctcgaaacttctttcagtagcgattattctaagatg

SEQ ID NO: 99677 - DNA, 895 bp, Heterodera glycines
tttcaaaaatttttcgagctaggcccccttagaaattttcgaaaattttttttggggtgaaaattggggtccaaaatatttttctgggggtattttgatgtgctgagcacgaatatgaagttcatttttcgtttcagaatttttggaattttttaaaaattctttattttttggcaattttttggccctcgggatttgggcctaatatttgaaaattcataactaacctcagggtaagtcaattttcatacaacaaagctttaaaaatagcaaaaaatcaggagaattttatggcttttatttagattctctatcatgaatataaaaaaagttattccagaagttctggaaaaattcgaattttcagaaaaaaattctgaacacggttctgaaaagttattttggaaaagtaaaataatacaaaaatccgcaattttttgctctattttataaattttattttagctttttatcacttttttgaaaaaagttatagaaataaaagtgattttgggaatcgggaccaaaggggtgagtataggatttttgagttgaaaaattttttcaccaaaaatcttcaaaaaacatgtcattagggctattttatgacgctgatcacgaatacgtgatcagattttacttttgacatcgttaagacctcagaatccctgtgtgattggggattctgaggcatcattttgaagggggagggggcaggttcgaagccgggcggtgtacattatttttctaccatttttttcgtgtttttcaatttttattcatttaaaatatttttgagttaataaataaaaaattatattttatttaatttttttttgataaataaattttataagtttaaattaattatttttttaattgatagaatttcatg

SEQ ID NO: 99678 - DNA, 401 bp, Heterodera glycines
gcttggctatcagtaataatgcatttgccgtattttcttttaactccctgggttttttagccccctcggcgggggggggtgctctaatggaatgagccttataatagaagaaatacagaacattacaataaaatgccacccgagaccttccccctttagaagaaatacagaacattacaataaaatgccacccgagaccttccccctttagaagaaatacagaacattacaataaaatgccacccgagaccttccccctttttaatttattttttaatagctgaaaattgctgtaattcattgctttccaccaacagaattgtggaagtgtccggcgacaacacgcccgagccacacgaactaaacagggcatccattctgatcacaacacccgagaaatg

SEQ ID NO: 99679 - DNA, 697 bp, Heterodera glycines
ggtacttcatcagctttgttctatctgttggttaaagaagaaaaaggagtatggacagcgcgcagatttcgactattttgaggcaaagtcgggaaaccgcacgagttttccggggctgtttcccaagtgaccagctcccagcgccggacacgctacggtacccagcggcgctagttgtgaacaatgacccacactacaaacaaggatcccattggtgcgcgatttatgccccttcaaagacggaggaagcggtcatttactttgatagtctcacaaaaacaattcctactattgtaaaaacatcatttctggataaatttccaaaaggttttgttacaaataagcacccgtaccagtccccactgactaccacatgtgcaattcactgtatagtgttcatttatcatatggccttaggtcacccatttgatgcatttctgcgcatattagacgctagtgaaagccccgacatgtattctttgtgcattttgaataaaatgattaatccgtatttgtgtgtgcgtgccaatttttatctccctagggcaaagcgcataagggaaatgattgattagtttattacacaacggcgcacggtgcgcgctgttggtgccgccgcatatatacagcgaactcacgcgggaaaggctcacttttttcacaaaaataaataaaatattaataaataataataatg

SEQ ID NO: 99680 - DNA, 233 bp, Heterodera glycines
taggaatacaatcaacaaaataataattatttaataataataataaggaaatataaatggcgaaaaaaacgctgaagaaatttaatttgtttgccaacgcaaatataattttatgatctttgcataaattgaataaattctgcttgcgttgccaatgccaatatttgttgaagtctactttttaaaaaatcaatgtattttatgaaaaaaataacaattacaggcgaaaaatg

SEQ ID NO: 99681 - DNA, 58 bp, Heterodera glycines
gctgtgattttgcttattttcagcagcaatttttgaaatccaacaattaaatttaatg

SEQ ID NO: 99682 - DNA, 348 bp, Heterodera glycines
tttttgtttgaataacatccacaactttcttaattatgcaaaaacatactagaaaaacttgggctcttatagtgaagtaaggtatcattggtaagccgacaaaaaatgctacaaaatgacacaaaattcgagagccaaacacagttggaaaacaaaatttttaactttgctatattacaaaaaccacttcgccaaacatctaaatcttttttgaactgctagggccccaaaattgacaaggtgtggtacaatacaacatagaagaattgtcaaattccaatagcttatgaactcatatgaaatagcatcaaaaacttaattaagcctgtttcgttttcttcttaaatg

SEQ ID NO: 99683 - DNA, 190 bp, Heterodera glycines
tctgaaaaatggaggacgggcgcataatcattttttcataagaattccttttaaacgttttaaaggttttaaagtaatttaattaattcaatttaatgaggcgccggcgccgataagctcggcaagaaatttttttaaaacatttgatgatttttaacgccttaaatagtttcaggcttcgtagccaatg

SEQ ID NO: 99684 - DNA, 357 bp, Heterodera glycines
ggtcggcaaagaagaacaaaacgggggaaatttagcagattttaaagctaaataaattattaaaaatcgaacaaatagtgcagttaatgcatttgaccagctctgtccctgctcacaaccattaacattaatccctgccctcccgctgcaccattgaagcaggggaaaaagaactatgcggtgactggcaatcctaacctaacttgtctcatttttgaataatctaaaaaatctttttcaaaatttcctttgaattttttaaatgactcaaaaatgttcatgatcaaaattttccagcctgacactctagcctcaaaaaacaaaaaaattttttttgaatgaggagaaaaaattatg

SEQ ID NO: 99685 - DNA, 209 bp, Heterodera glycines
atttttttttgacacaaaaatttattatttttttatttgtccaacaatgatcggggtttcatttccttactattttttgtccattttttattatgcatttgttttccgttaatccccctcccctttccccttaaggtacgccgccgagcggctcgcgttcgtttgacaacgctttgcgcgtgttgcgcctgctgcacacggcgcggatg

SEQ ID NO: 99686 - DNA, 58 bp, Heterodera glycines
gaaaaacaaaaaaattcgattttttcaagtgtgcgtttggggtactcaaacaattatg

SEQ ID NO: 99687 - DNA, 260 bp, Heterodera glycines
aaaggataataaattgagaattaaaacttcgaactttttttgtaattcattaaaaaatcgtccattttacatcaattttgggctaatatccggtaatattattccataggactgggcccgatattcggatattttcatgtttgggtcaagttttttcaaaaaataaaggtcgattccgatcccttttaaccctctaaaataaaatatcacagaatttttctccctatgaaagttaaaataaaataatttaaatttgcatg

SEQ ID NO: 99688 - DNA, 91 bp, Heterodera glycines
attattttattttaattatatatatttatttgttttcattttttattttaattagagtaatgttgtaacggaaaaaggcgaaacggagatg

SEQ ID NO: 99689 - DNA, 227 bp, Heterodera glycines
aaattctacggccaaaatgaccacttcaacttcggcaagaagcgcaaggaagtaccggccggtccaacacacaacattcggcccgactttgacaaggcggattggcgagacattgaaatattcaaacatgtgcgcgaatacgagcggaagacgaagggggacaaggaggtgcactggaaggaggaggaacactttgtgccgaacagaatgaaggggggcaaatgatg

SEQ ID NO: 99690 - DNA, 397 bp, Heterodera glycines
atctgactctcatttcggtgagcagaagacaccgaaagtaactcccacagataagaaaatctgtggctgttacataaaaaagaatggtgttgtgagccattcagttttttccattcgtattaatcgaatggacaataaatgggaagaaactcttcctaatcgaacagagcaatcaatcatagcattgacgctttgtttttacatcagcataagcctgatggttctctcaattttaaaagccctttctattgggcgtaaaaccattgcttggctaatgatccaactcaaagtatcattactttcttttgaggatcagagcacgccttgctttcaagaaggaaggcaaagaggggcaatccctcaattttgtacagcgcgccatattttgcaaataatg

SEQ ID NO: 99691 - DNA, 539 bp, Heterodera glycines
atatgatcatttttaatagaaaaacattgggctggacagaaaaactgcaaatgataccaattattacgctgcgacttcatctcacaatcagccgagggcaaacgaaagagaaaacgcaaaaagtagcaaaacggagcagagggaaaggccgatgggacgaacggaacactcattacacacaggttgatgattttcgaaattgggcagtattcatttgtaatggctattcccccaaattgggaccttttttgtcttcaaaaatatttaaactaatgtcaagtttgaagacatttttttggacttggtagctgaacatggatctgacacccgttctgacaaataataattccgaaattggataaattttatcatatttattccgtgtttttcggaattggggcggggattctaattagttaaatggttgttagctgattcgtgataagtgagtggccacgaaaacccctgttaatggcaaataaaacctgagattggaatttttagcaacaattgctaattctcgcggttctgttgggatg

SEQ ID NO: 99692 - DNA, 370 bp, Heterodera glycines
agtaaggacggggaaggtacagtaagaaagtgtatataatacagtaagagaaatcgtggaaatgaatgaataatgctcgattgttctgtgtaggtacagtaagaacctgaggaacgttttggttaaaaaatcccgccccccaaaatgctagggaatctcaattcaggtcctaatatgtagattaccgtaaataaacaggtaattcaatttcttagagaatacagtatttctgacccatttataacgggaacgccggttctttcttgggatcagcagcagtcccatttcatcatgttcaaaaatgatgatttgaaaaaaacatttccccccccccctccctcattttttttttaaatttcaggcggcaatg

SEQ ID NO: 99693 - DNA, 549 bp, Heterodera glycines
  unsure (1)..(549): unsure at all n locations
acagggaaacacagagagaaagaggagagagagagagagagaaagtagatagatgagagaaacaaagaaagagaganaggtggagagtgagtggagggggagcgtgaggatcctagacaaatttgagagaagccaaaaaggagagaaagaaagagaaaggttatgcgaattttatcattaggattaagcgctagtttttttttaaattcatcaattaaataattattaacaaatttttagcggtgatacaatttgcacaagcgttgaaagtaattattcaattatcaattaaaattaaaaaatcagataaatgacacagaagagaaaaattattctacaaaaagtttaatatattcgaacgaattcaaaattttaaaagcatatattactgagataagcgatgaaagcaatgttaaaaaaatgaaaaattacgcggaaaagcaaaaagaaaaactgtcttattcggagaaaatcttttcgctaaatgaacttttgaatattttggagcaaataattacctattaaaatacaattgatttatgcaaaatg

SEQ ID NO: 99694 - DNA, 540 bp, Heterodera glycines
ttccttggatacatttggcctaactttgctcaactttgccaaaatttttgaaatttagatgagctagtagagaagtcttagggctatcgaatgatatcaataatatttaatttggttgacatttacaaaagttagagagaagagagtgagtgagtgagagagagagagagattgaagattcggaggggtagagggaatctgatattaaatgtacaatatgtacgttggccattgaactaatttatttttcactggcaaatattcaacgagtaaaacattgtttgttttgtccaaagtttcgcggttttgctttggaaatttgaaatgttattttttcaggaaatgtattttaaaatagcatttaacaaaaatgaattttatttaaaaaaataatgaaattattcattatgcaaatttatttatcttttctattttttcgtttatcttatctttcaaaagtgagccacctatcaaaaaatcagattaatttcattcccaggcggcctatcggtgttatgtcgttcttcaaaaaccataatg

SEQ ID NO: 99695 - DNA, 243 bp, Heterodera glycines
caaaatctttaaatatgtgtcaaactccaaaacattcagaaaaacatgcacatttctactcgaaaaatcccgaatatatgtaaataaaagtatccatttttgaacgcaaatacaaaaaaattgtacttactatttttttgtaatgttgaatattttcagacaaaaacatggccaaaattgactgaggagcacgttcttcaacttttacaccgttcaactgaaatagtagggccaggtgaaatg

SEQ ID NO: 99696 - DNA, 293 bp, Heterodera glycines
aaatgtcgatcgatgaccgatttgttaatggtgatgtggatatatgatcattttttgggacatttaaaaatttgtgctaaaatttgtccaaataaataagtggtggtgaatgttttgaaaggggaaatttaaaattgatttaaataatagttaaatatagctcatgttctgcaattttattgattgaccctaaacactcagtgaggtggggatgagtttaggcctataaaaatgaactgaaattgacttccgcgcattttccgttttcattcttgaaattttccgctaaaatg

SEQ ID NO: 99697 - DNA, 1003 bp, Heterodera glycines
ttaatttgttgaaaatgataaagaatggatagacaaggatttatggaatagtaaggacaggctagaccggtttttaaaccttttttattttcaaaaaaaaattaggggtacaaaacctgattgggacacttactaattagatgatactctcgcaaaatggccatccattgagcgtttattttggaaggtttcggcgttgttcaaaaacaacgactttctgatgcgttcctccacaatgtccacgtaacccaaattgaactgcttaaatataagaagcaactgaacatcggttcattgctccttcgaaacgcacctttttccatctccgaagcgtttccctggccaattgttcactttcgcaaagtgacaattcgtcccaatcgccgtacaaaaacacccaaaaatgacgaattattaatttactcaattaagtatctctctgtttaatcacctccaaaagcgtgcccaaattgccaagcgtactaaaattggatgtccttagcaaaagtagggccgttttacgcgcctccggcggacatttctataaaaaaaataaagttaaatgtcctaattaatggataatgggcaaatctcgcacattcactcccgaaaagcggtaaaacagaccgggaaccaatcaagcaacaatttggcggcacagcgaacaattttcagcgaaggattggacagttgccgaaaagccaacgaaagtgcccaatgccaacaggggaaggtgggcaaatggccaagctgttcgagagagatgaacacatccaggaaacgggtggcccatttttggatggactgtaataatacagacaaaataattggccgtattaccattaaaaggattatgaaggcgcaaaaaacccaagaaagagtaaaagatatgcataataataagccatgccaaagagccaaccgcaaataaatcccccccgtttataccaaaaccacatgatttggcacatgactttgggtggtgactttttcgtatgccatg

SEQ ID NO: 99698 - DNA, 783 bp, Heterodera glycines
gttaacaatttacattaaaaattacaaaatttttcccggcggcgcatatcggcaccgccggacccttccttccccacagtttctcaaattctctttggataaagcgcgccgcaaaaaaagggtgtaactttcccaaaaaaaaaatccaaaataatgtaaaattacttaaaatattttgatctttttaaaaaatatagaaataaactaaaaacagtttgttttacatggttaaaaatttaaaaatttagcctattaaatattttttaaaaaatttattatatttttttttgaaaaattccgagttccgacatttttggggtcggaattccgacttccgaaaatttttggggcatcggaattccgacttccgaaaatttttagtgcctctgaactccatccctgggacaaaccatataagagccgaaacatatcctcaatcccgcaataaaagattaattaagccgtttctgaatcaaaatgctaaatttgaactttcgactttttattcaaatttgggccgggattcggaatgttttcttaggtcggctccgtcgttttgttttccctccttttccttttcaccattttttcttctatccccccccccccccccctcccgatgaaattcgccggcaatggcaaatgccatggcgccgacgacggtcacgtcactgtgccggcgttgcgcggcgaaaatgagcacattgcggctagcattgaactgtgaactctgggcatttcttctttgttgtttttaggattgtgaaattataaaataaaatg

SEQ ID NO: 99699 - DNA, 229 bp, Heterodera glycines
taatttatttaaaccccaaaatccatcgttaacatttaaaaaggattctaatgacttaaggaaatgataattcacttggaaaatccttttgtgcttttcctctctttgtgcttcgtttgggccgttgcgccgcctccgccgccaccgccgccgccccccggggcactgtttaagtcaagtgcgaaccttaattaccattaaagtctttaattactctggtttactcatg

SEQ ID NO: 99700 - DNA, 107 bp, Heterodera glycines
gataatgatgatgatgatgaaaattaaaataggattttgtgtattttgtgttgcatagatgggagccaatgcgaaaaacaaacaaaaaatttttttcaggggaaatg

SEQ ID NO: 99701 - DNA, 625 bp, Heterodera glycines
ggtcggtagttcagctggtagaacactggtccggaaagccagagacgccggttcaaagccggcccaccccatagtttttccctcaaaggcttccccgctcgttcatatatttcagacgcgtaaaaatttatgtgacgtgtaaaatcattggacccgtaaaaattgaatggaataactaatttttttaaggacgtgtaaaaattttattgacacataaaaactaggacattaaaaactactgtggacgcgtaaaaatttatgtgacgtgtaaaaaatgggacgtaaattttatgtgaaatgtaaaaatttatggatgcgtaaaatcattggacccgtaaaaattttatggaatatctaatttttttttgggacgtgtaaaaattttattgacacataaaaacggttagccgactcttgcgccgcggacatttgcgccgtgccatttgcgccgcgacacttgcgccgcctaacaaaaacgacatttgcgccgtacagcgaaaaaagacatttgcgctctgattaaaataaatttatgtgctttatagaataagaattgatagatattcattattaattcctttttcgaagcctttcatgtcaattccatattgaagtgcacgtaatg

SEQ ID NO: 99702 - DNA, 838 bp, Heterodera glycines
ttccatttccccctctccccctattgccccgggacgaatcggttcacccttccccagctaatcacacatattacacattatatattgtattgatcacccttccgaataaaggatattattccatcccactcgtgtaattatggggaggggctaagcaacgaatgccaaagggcatccgagatattcatggaggtcccgccacggggcaaaaatggggaagaatttaaatagaactaattatttaatgcctttattaaagaattagaaaataagcaatgcgatttatgattaaatgaatattatttaaggggatattttaaagccaattgagaaaattgaattaaaaaaagagagagaggaaaatgtgatcggaatgtgaataaaaaaattaacaagtgaaggcttgagaagtggcgaatgaattggcacaaattgctgcctcagacagaagtggccatcaaatggggcttaaaaactttttggaggtgctgcaaaatttgattgaacttacaaccgaaattgagttcgaagagcgcaaagccgccctatcacgggctcctttccgagccgatgtggtgatgccaaccgggttatggcgagactaataaaatataatattgtaaggaagaagctggctgggcggttaaaacgcggaaagcgggggttaataagatccataaaagaaagggcggatgtgcctcggtagcttaatggtagagctgcccacggaaagggtgcatgagtgggttcgattcccacccgaggtttaacattttgcccatttcttattggtagcaccggatggttgccccaccgcgccagcagcaattaactaatg

SEQ ID NO: 99703 - DNA, 902 bp, Heterodera glycines
  unsure (1)..(902): unsure at all n locations
agaaaagagtaggaaatggtgaaagaaggagaaatttttgataaaaaattaaattttatntcatntagtcatgggattacacacatgcacatgtggtgtagtggttaaactttctacctttcataatttttcgcctgggttcaattccccacttggatagaatattcctcacattttctttaccattattttaattaaaattttaattttaaaaaatattccaacttttttctttcatgttaagcatcctaaaaacccaaaaattaatcaattggtcattttttttacaaattctgtttgaaagcaaaaaagatcattgatttacattaatttacatggccggagacccttcgcaaaattggaaaattggccgctgatcccttgttttgcaataatctgaattttgaggtctacatctgaattttagtgttctttatcctgaatttgaaaaaaaaaacttggtcaacctgaatatacatatacttctgaacaattctaatgctaaaaaacaggcactcgcgcgaaaactgaataaaaattttgtatttggaaaattttgtccaaaaatttttatgttctaaaattaccggtttttaccggtaccggttgaaaaagttggtaccggtaccggtaccggtttttgcagtaccggtcagtaccggtaccggtttttttgcaattaccgattaccgctcaactctagctctaaccaactgagctacacggacacattctacactcctctcaattccatagataaggaagagagagactcattcccaacatgagggaattgagccgcatcacatggaaacaagctgatcagaatttcttacaagagagaggcattgatcagcagttctttctaaaaatgaagatcagggaaagcggtctaagagatg

SEQ ID NO: 99704 - DNA, 256 bp, Heterodera glycines
aggagggatgagaaggaagtgtgcgcaatccaagcggaagatgaaaatatattgtggatgaaataaatattcattgtaaatgtgccgatgaactttaatattgatcgtatgcatatttgtgtattgaattgtataacatactgaaacatatatatatatatatatatatatatatatatatatatatatatatatatatatatatatatatttgtcatcctaatatacctctttttttcattagcaaaaaaaaatg

SEQ ID NO: 99705 - DNA, 236 bp, Heterodera glycines
aaattatataaggctagggaatttaaaattttaaaaaagaaaaaatttaaaatcggtgatatcgttcgtattaccaaggaaaagggaaaattttcaaagggatacctcccaaactttaccgaagaattatttaaaatcgttattgtcgacgacacccgattcatacaggatcgaagatttggaaggaaatttaataaaaggtatattttataaccaggaattagtgaaaacagatg

SEQ ID NO: 99706 - DNA, 61 bp, Heterodera glycines
ggtttagtgtattccgaccacttccttgggcaagactatttaatttcagaattaaaaaatg

SEQ ID NO: 99707 - DNA, 607 bp, Heterodera glycines
tactttgttaattagtgcgtgtaatcatcaaatataattcacatgaaaaacacattaattaacaaaaaaatgaatatgcttaagtaattcaacgaaattttattcgcctattaaatcattttttataattttttcttcaacaaacgtaaatataatcacacaacggaaccagtccatcaattaattacgatgtaaaacataaaaatagaagaagaaaatgcagtaattagcatttaattcatatgaaaggcatgcccattaattaacggaaaatgactatttaaattaggcgtaaaaattcaatttcttataattaatgacgaaatgtaaccatcaattagtcttttttcctgtttggaagcattacagaataatatcaaaaaaaattccattggctttaattttgttttgtcttagtgccaaagtcagccaaggtctttatttatgtaaagaattttcaaaaaaacgaatactttttgtcacgattctcgaaaacaaagtcccaaatctcgagaccgaattagtccaattacaggataaatttaatattttaaattatttgattcatttagaaagaaaaaagttatcatctataaaactgataatg

SEQ ID NO: 99708 - DNA, 233 bp, Heterodera glycines
tccgttcgccttctccggtgccaagcaaatataatcaatttgatagtgggacaatttagaaaaattaaatttttcaccaaaattaacaaatttttgttccattttttaaatgggaatttgggattaataagtttataatgttactcggttcgattttcaaattgtttgaaatttggtcagagttacctaacttaataatatgctcttttttaataaattcagttttttcaatg

SEQ ID NO: 99709 - DNA, 239 bp, Heterodera glycines
ttgcctttctttcccttcctttgcttatgtctttgtctctatccccttttaactttctctaactttctcatcgaacagtaattttcgctttaataactaaattttattttacctaattgaaaattttgctacccctatttgtctttctgaccgcctaaaaattgggaaacaattttttagtccagttattttctttaatgttattcatagattcagtttctttttattacaaataaatg

SEQ ID NO: 99710 - DNA, 70 bp, Heterodera glycines
atcaggaaaaagtggcgccagggattgctgcagagcacatgccctgcaaggcgtgatgcggcaaacaatg

SEQ ID NO: 99711 - DNA, 146 bp, Heterodera glycines
ttttcatttaccacgagggcactcggtttgtttggcaaaagtttattttgaaattgtgtgaaatagttttgctatttctactcagaaaaggtggcatttccgaggttccccaattgactaaacgcattttgttcgcatggataatg

SEQ ID NO: 99712 - DNA, 616 bp, Heterodera glycines
aggtcagcccaactaatcgttaattaataactagggatacgatttttcggctctaaaaattgccaaaaataggtcggctttaggtcctaaaaacctcaaaaataggctctaaaaaatggaaaatggcactaaaattacctcatttctaaggtgtgtaaaatgacaaaatttattcaaaaaagtaaaaaaattaggccaaataagtaatgagctaaataaatttaaaaaaaaattttggacatgaatttttgagaaatttttcatttcttaggggtgtatttttcgttttcttacgtttttgttaacaaattttgggaaaaatgccaaataggtcaaaatagatttttttcagcattttttgatttttggaaattttttgaatttaattgaaattttttcgaattttccaaaattccgcaataccgcacgggatcccgcaaattcgaaccctactaataagcatgcattaaaaaggggaaaaatttttaatttttttcgacccccctattttttgtatgctaacaatgatgtcttttttctgatagccaaattcaggcattaacggcagaattcagtggtgacagtttggatgcattcattgccattgtgcaacatg

SEQ ID NO: 99713 - DNA, 162 bp, Heterodera glycines
  unsure (1)..(162): unsure at all n locations
atttgtgcccccgtcaaatctcggcatatgcattctaatgtcgggatttgaaacccgtanattttatgccggtgcctttttcccaatcccgttcacagtttcccaattgcaattaattttttcttttttttttgtatatgcaggaatgtcgtgaagcgaatg

SEQ ID NO: 99714 - DNA, 1003 bp, Heterodera glycines
tacctttttgttattcatttttttttctctcgagcaattaccaacggcttttagtttttcttatcaaaagggatttttccatttaagccaaataattttaaaactactaaaccaaaacaccgaagttgtcaaatcatcaatttttgatcgaacggaacatcacacagtcgaaagtgggcgagatcggtactgatcagtgatcacagcggaacatttgcggtgcggacgtgacttttcgaagaaggcaattacggacggcgtgttcaactacgaagtggaccaaattgaagcagtctctcgaacggacaaaaaggtgaattcagtttttgaaaaaaggagtgattaccgtaggccaatcagagaaaattgccaacaaaaccgaaattatgcgagaggtggatataatggtggattcgcaccaagaaatcctaactttatcccgcttggtcaaaggagaatgtggaatggaaataattcaaattctaacagatttaacaataatgagccaaggggaagaggattcggtaacaggggcaattttcagaataatcgtggtaatttccaaggaaatggtaatgaaaaacagagataccgaataaatatggtgggagatgaacaaacacagtcaagttcatcgagacgttctccgactccgacttttacatttttaacaatttcgatggttttgtctattttgtttggtacttttagtctgtcaaatgcacaatatcaaatttgttctgaacgagttcagactaccccaattctgttaccaaatatcacgaattgctctataccaaaataccaaaaggcggctgaaaacaaaataaccttgtttttaccagtgcgcttacctaaacaatttgtcgtttataaatgctatcaaaaattaaccaaaatatgcaccggaaactttttgtttttatggaaaggagtaaatagtcaggagacaacggtgaggggagtgtctcacgaaacttgtcaaaaatttaaacataaaatg

SEQ ID NO: 99715 - DNA, 1003 bp, Heterodera glycines
tttttcttgctctgctgagtttgttgtgctctgtgctctttatcttttctttcaaaacaatttttctcattctttattttattttttagtcttatcaataattttcctgagtacacaaatttgtacatttttacttaaataattaattaattcttctaactttaaaatgacattcttttttaagcacaattatccgagccgcacaaaaatctttgaacacactcacttgtgttttgaaaagagcagaataatttgttatcccgtactaagtacgaataaccccattttaaccggtgcaaaagtctgacagaatgatcgggataccacaacaaaaaaaaaacacttaaattcgggaaaatttttgaaaaaaatcccttgggattgcaaaaatttgttctgtaaaaaataaagaagcctatcaggggtggggcgcgcacagaaaaaaatcgtgcccgcgcattcaaattgccgcggccgcggatcgcgcaaaaaaaacgccgcggatcgcacatcgcggcgcggtcccagccctgaagcctatcagaaataggacaaaattctctactgaattgccttttgatggtgggtcaacgacttatacttctgatgctgataaaaaaacctttttggatcaactttatagtagccccattggaaaaacataatatttgctgccaaaatttttggaatgggttatctacaacatttcattaagagttatggtatttgcatacagtaaagctgaataaattatgtatgcatttttacagtagttggaagttgagccaaacaaactttaatgaaaatgtttaagaaattccacgctaaaaaggaatttcgtgcattaagctgaaccagaaagattaatttcgaccatataaatccgcgcccattaataattaattataaggctcaaataattaatttttgaagtgtgaatgatcagcagaattgactattttgccttgtctccgattattgatttgtctcgcttttagcaatg

SEQ ID NO: 99716 - DNA, 622 bp, Heterodera glycines
gggtaaaattaaaattattatttaataattgataacaattgaagggaaatgagagggatataatattagatataaatttattaaattattatgagtgaaaaaataaaataatagaaaaaattgttattttaaattcaaaattggttaacaggaaaaaagctaaattcatataacaatgtaaatgcataaacaaacaaatgaagttccataaaaaacaacttaattaggtaattaagaagataaaattttaaaaattggacagtattaaaaaactatatcataatttctgcttcactgaacaaaaaataccttcttattaattgaaaatttggatatttttaaactaaaacctcaaagcaaaaatttcaacatatctcttaagattttgctcaaattttccgcttccgtttataaaataaccaacaaaactctcatggagagacgatatctgtcccatatgccgccgcacccataaaacattgagtcagttggctctagaaatattcaaataaagacaaaatgccgaaaattatggacatcacgatatttggtgcctcccatccggtgagcctctacatttgcgccccgaactaattttgggatttcattgaaataaaaaatg

SEQ ID NO: 99717 - DNA, 105 bp, Heterodera glycines
tctcaggtccttcgacaggaggccccacaactttttaccaactttccgttcgtgttcccaacctcgtcactcttcattcattttatttttagtggggcggacatg

SEQ ID NO: 99718 - DNA, 689 bp, Heterodera glycines
  unsure (1)..(689): unsure at all n locations
aaatagtggcaaaaatagtggcgaacaagttccaaatttnaggggtgtaattttttaaataggctgttttttaatttgaaaataatttaaaataaggcaaacaactttttcactgattgcagttacaaaatattttcttagcaaatattgaacaagaaaaaaaaatttgggggaagaatttttgtgaaaattttccaattcttagggggtgtatttttgaaaatttttaggtagattcttaggggtgtattttttgaattttttagatcgattcttggggtgtatttttcgtttttattgcattttttgggaaattttccaaaaaatgccaaaatagtggcaaaaataatgacaaaatgccaaaatagtggcaaaaaattattttagtggccaacttccgaaatagttttttttagtggcgaagctccaaaatagtgattcctagtgatgaatagtggcactaaaaacgaaaaattttcgaaaaagaatgtgtttttcgtgcatttctcgtcgagttaaagccgcagaaaaaatagttaaaaaactaagaatccgatccctagtcatcaccaaccatttaactttttatgaagccaaatttctcgaaaaggctagtggtgttaattgttttctttgtcatcatcgcgtgttttttgtttatttttaaagttctgtgctttatcaaaatg

SEQ ID NO: 99719 - DNA, 469 bp, Heterodera glycines
  unsure (1)..(469): unsure at all n locations
tcagttatgcaaggggtccaacaacggccggttntgagtggaagcgacgctcggcgtacgaaacaatgnaaaaaaacggggggacaaaagggacgaagaacgaatggacacggataatacgacggaattggcattttccatttggcatttaattctctttttttattttggccctttgattgccgacctccctatttaattctgtcataagttttattattttgtaaatttgcaaatgcattcagaatgaagcattattttttaattcgtattatttgctttttttgcattagaattctatttatatgaaacaattcaaccttgtctaaccaattgttttaaaagtgaagcaaaacaaaaagtcaaaatggtccatccgatgtgcgtcactgccgcccaccgttttgccacaataaacaattttggcatttttttgaatcgatggcactcctctccgttccaccgaatg

SEQ ID NO: 99720 - DNA, 392 bp, Heterodera glycines
ttcgataaaattttaatgcatgtgcaggcccctgccgaaggtcatgggatcatttggcatggcattggcatgactcaccttttcatgcgctttcccccccccccccgcttaacaatgccaaacataagaaatcattttgaaattgccaagtcaccagcagtgtcgtgtgtgcagccaacccacacaatccctcgccgaatggaaaaaacacaatccaagcacatttgatgggcatgcacccactcaccactcatttgcccatccatccattgatttagcccctattattggatttatcccgcttttccttctttcgctcctccccttctgaactcttatttatacctctttttgcccccatataattattctgccaattttccattggcatg

SEQ ID NO: 99721 - DNA, 1003 bp, Heterodera glycines
cgaccataaaaaatttacgcaacccttaaataaaatgatctttttaacgctttaaaaaaaattgtggagggatcatgcaaaaaaaaaaaaccaaattgaaactttttgaaatttttacagactaatagataatcatagagctactgatattacaattagcatggacaattcaaaagcatttccctttctaatttaacgcattttttaggcggtgttcatttctccaaagtgaacacctccaaactgacagctgcgctgcactataccattctgatgccaagcagcaacaaacaattcaggtaaaaattggccggaccatgcaaaacagcaattttacaaatactcaacaaagtttactcaaaattttggggctatattcaactcggacaactatgaaaagatttatgcccaaaaaacaggtgttgcctgcccagttgggcatcgcccaattgtttccgtcgagggaccctttctcccccgagtatgatccccgccccccccccccttcaactatgttttatatgtgtgtgcaaaaatttcatctaaattattccatcataaagacacaccaaaatctttgttttcttatttctgaaatgagccagacccttggcttcgggaggcggggctgaattcaaaaatcgatttttggggtgtattttttgttttttttaatctcgaattaggatgggtgtgttttactggcttttatagtagtttttcgccaaaaatgagtatttttgccattttggactatgtttcaaaaatatggcaaaatatgatgtggtccggcagtgctaacaatgagacaccgccgggtttgttaagagttgcttaaaatattcaaaaagttacccaatttctcccatcggcggattgtttccaacgaaattttttttttaattccatatatttttcggacatggttgaaaactaatgatatttagagggtttaattaaaaactgattcatttcaaattgtccattgtttagttgggacatg

SEQ ID NO: 99722 - DNA, 435 bp, Heterodera glycines
gggttgatttaaatttaaattcgtcgtccgatcggtgcatagataattaggggaatttttaattttgcatatacatcaaaattttgtgggtattaagtaaagcaaaatttcaaatttaccgacaacactaaacaataaaaatgggtcaagaattgtgattaattagattttttggatataaaaggcagtacgaagtttttccgttcataaaccaaattcataattcccttcaaatattgtttttatgcaaaaataaaatatattttaaattgactcatttgcccccccccccaccctgctcttttcgtttcttaaaatttttcacatttactgtttacattttaccatattgcattattccaataaatttaaaaataaaattttgtttagcatttattcataaactacatttatttatttcaaattttaaaaatg

SEQ ID NO: 99723 - DNA, 157 bp, Heterodera glycines
ttttcgcataaaaaaccctgattctgaaaatagccatcgattcagtcgaataaaagctcccattttatcacacaaaatttaccaagtttgtcggcattaaagactaagttgaattagattgacaaaatatttcacagctttcattcacttcgacatg

SEQ ID NO: 99724 - DNA, 157 bp, Heterodera glycines
ggtgaatggtgtcggtgttgtgcgttacggtagatgctcggccggggccataaacatgagaaatttgatcactgatcacctgtgcttatttgaatagtgccgagataagcaaaagcctcatggtttatttgttggggttttgaagcacttgaaaatg

SEQ ID NO: 99725 - DNA, 848 bp, Heterodera glycines
tttcgtactaagatgaaaaagacagagtcaatgaaaggatggttagtctaaaaaataaaaatatgtaccgaataattaacgatagcacatctgagaccaagttaacaagaaggaaggacatccgacaaaagtgattagtaacagaactcatcgtcatatgtgcaaacaaaatgcagtagcttttacgcttaaaatttatagagaaaaacgggagcaggaaggttcgccgacggacgattcaccgacaagacgtttcgccgacagacgattctccgataaaatgtgggacagaatgtttttaaataaaactgaaataaatcagaaactttccgcgaaaccacctccaattaacattcactcgctgactttaaaatctatttttatctcagaatccgaacaacataatcattttactgatgttttcaattatttttgactaatttaaccgtgttttaatcaattttagagcaaacgcgcaacttttgaaaaattcgaattttcgactttttgttcgaattcgggtccgggatcccgaattggacgaaataggtgccatattcgtgatcagcgacatcgaaaacccctagttatttgttttcaggatcctttaaaacaaaaaaatatatattttgaaaaaatttgaccaaaaggcggatccaaactgtactagtaccaaaatttctttattgtgatacattaagcaagagtttgtgaaaaggaattgatgtctgttttaattattcggttcgttttttcaacctaattgtcttgtaaagtctgaatcacttagaaatgatgataattgtgacctctacaaccgaacggttgtcgtctgttacacacgaatg

SEQ ID NO: 99726 - DNA, 898 bp, Heterodera glycines
  unsure (1)..(898): unsure at all n locations
attgganaatttgaccctttttaacagatttttcacataaatggcaacaaatntagaaattttatggagattttgtgggcccgcaacgccgtcaagcgctgccggaaagaattttggaagtttcaaatagttttgtaaaggatttttttttctcttttctctcttcgctggccaccttccccccccccccacaatgttcatcgttaacagtaaaaattctcgacctccgagaataaaaactcgagaaatttcacatccctagactttgtgatgatacctttccaaaatttcaattttttcgtttttgaaattccttctcccttaataaagttcgagttttcatgatgaaaatttgttttcattcgagtttatgacatattttggccaaacttaaaaaaaaatccaaattcgaacaaaaaaaatttcccattataaaatgcaattcttcgggataaagatgtaagatttacccatgaactcgaaacaaagtgtgtagtttggtaatttgtagatacattttcccaaaaattaagcatttttctggcaaaattaatttttttgttgcaacgcaaaacgtgtcgaaggcaaaaaaggaaacaattcaaaaacaattatgagattattatttttaatttattcattcatcatcaattaaaaattattaggtcacaattttgctgaaattattgggaaattcaaatatgaatgatttctatgggtcatcattttgccgcaatttattcttaattgaccctaaaaatatgtaagcaaaatcaggcagaagaatgaatgctcatttatttattcgatccctttttaacaaaataataattatctataaaaaaattaaaatctgaaaatgatttaaggaatttgcattttctaagaatattaaatg

SEQ ID NO: 99727 - DNA, 225 bp, Heterodera glycines
acaaatgcccagacacagacagacaaatggacagagacatgcagacaaatgggtattaattcagttagtatcccagttttggtcagacagttcactgtttcttctttctcccctgtagctatgttgaagaaaagaaggaaatagtgctctgtctgcctgtctggctacactttgaaaaaatttgacccaaacccgggatacaaactgaattagtaccgacaaatg

SEQ ID NO: 99728 - DNA, 979 bp, Heterodera glycines
tttttaaaaaagaaacatttgtattaaaaaataatttttacaatttaaatacattaattaatcaataaatgccaatcaatgccaacaacacaaacattcattccatcatttctaagtattatgccaaaatagccttacaacagaacttaactgtgaatctgagcggattttagcgaattcaagaaaataactcgggagcggattctttggttttaactagggtaggtcgggactgggaactttgggcaaaaccgggaccgggacttttcgggttgaaaacccgggattttttggctgggaagaccgggaataaccccgggaatttcccggtcaaaactgttcaaaaccgggaccccggcactcagttgtactcagttgtccgtgttttggtcccggtccctacctagtcaatgaagaaaaagtcgtgtaaaatcccaaaaaatggttgtagataaaagctttctccacacaaatttagccccatcctgaatccaaactcacttcctttacatccctgtacgatgtactaattattcatccactctgaaaacttttgttcaaaaatttggtggccaaaagactatggtcagaacttacaaaaaaaaatttctcagagctaagctatgtgaaactcgatcgatttaccttaaacaaaacttctactggctaacttttataatgcgccaatttttttaccattgattaaaaaatttatcaaattaacaaagcataaagttattagcgtcgaattcaatgttggttatgaaagaaattatcggaaatcatatgacggaaatgaaacaattgttcaaacaaagtttattttataaagggagagaataaaaattttgccaactttcaaaaacagctaagcaatgtgaaagatgcggttcaaattttcaatataaaaaaggtcaaatgcatataaaaatctcacaattaatattggaaagaaacccaataaaacaaacggagaatg

SEQ ID NO: 99729 - DNA, 384 bp, Heterodera glycines
attacttatttttaatttatttttgaataaattttattttattcctttgattattatttattatccatttgagaaatacaattattcaaatgctaccaaattaaaattatcgttcattttttatattttcatatttaaatgactaaatagaaaatatttaaaattatagagaaaattttgaaagtagaatcattgatggctaagtctgaaattttgccatttaagttgtcatttttttttggcattggcatccccaaaatcataattattattatttttttaattttaaataaaaatcggacacaagaaaacttcgtagaatttaattgcaatgaaatttttttaaattttttaatcatacaataattaattaagataataatg

SEQ ID NO: 99730 - DNA, 89 bp, Heterodera glycines
ggtgagggggaagggagcacccaattaaattaaaaaaagttaattcaattaaataattaaaaaataatatcctcagggcactgagcatg

SEQ ID NO: 99731 - DNA, 175 bp, Heterodera glycines
tttttgattatgcggtctcggtcgtggcattttttggttgtacggtcttagtcgtggcattaaatgccacggcgacgactcgtatcgtgctatggatgagttgggtctatggatgagttgggtatggatgagttgggtctatggatgagttgggtctatggatgagttgggtatg

SEQ ID NO: 99732 - DNA, 409 bp, Heterodera glycines
catagaaaaaataccaaaactggcaaattgagagggaaacgacagatcatcgatcagctcacatttgcacattaaagtgtggcacccacgcgaagcctataaataggtatgataatttgtgtttttcactattagatacattctctcctccaaaattcaattttttgagagaaacataaataaaaaaaaaaaacagtagaaaatgagcgtaattaagaagattgacaaagacagtgttgagggtctagaaggaagtctgtcttaattttctctatcgccaacaaatgtggccataaacaagacaaacgttcgtgaattgctgcctctgtctgctcttaatcagacaggtccatatttatttcgcctgttctcggacagtcaatattgtgacttgagcaaaacctacatg

SEQ ID NO: 99733 - DNA, 189 bp, Heterodera glycines
ggtcgtctccgtactgacatcaaatacgagcttgttttgtccgtttagggcactttgtcgcgaatgtaatgaggcggaaaaggctgcaggcactggcaaatacgtgtgccacaaatgcagggcaataattgaagacggaaaccacattaaattccgcggggacagttaccacccttaccatttcaaatg

SEQ ID NO: 99734 - DNA, 579 bp, Heterodera glycines
tttatgcctcggatataatttttaaataattatattatttgatttaatcttcatttattcttttttaaaattagaaattttttgaatttgaggggtagggcagattcgtgctcagtaccgtggaaataaccaataagaattttgggcttaaccgggaccttttcgggttgaaaaaccgggaatttttggctgggaaaaccgggaaaaaaccccccgggactggtcccggtcaaaaccgggacctcggtactcagttgtccgtgttttagtcccggtcccgctctactctagtttaaactcaaaattaaaaaagattcacccatcatttaaatttttcccaatgtgtttaatgattattttttgatgactttggcggccaaaattttttgttctgttgtttttggcgatatgcacccctggtgaaatttttcgggtttcttgcattttcttaaggtttttaggaaaattaaggaaaactaaaaaagagcagatgaacaaccgaaacaggtttttaggcgccaaactaataaaaagtaaaacctaaaaacataatccttgtaaattataattaaaacaatg

SEQ ID NO: 99735 - DNA, 319 bp, Heterodera glycines
  unsure (1)..(319): unsure at all n locations
tttgctctatttcttagcaaactttgcacaaaaatgacncaagtgctctatgaaaacaatatgcaattcgtaaactttcaattntatccagtgtaaatttttcacggaataaccgtgaattggccccgtgaatcgtgaccgtgactgtgagtgaaaaaggcatttatgtagagactacattttattaaaattaatatttttctatattaaatgaattatttttattaaatattttgtaaaaactatgaatggactaattaaaaataaaagaaaattcattaaataaataattaaggaccaaccgcaaatttanacaatg

SEQ ID NO: 99736 - DNA, 447 bp, Heterodera glycines
tttttcatcccatttcccgctttgtccgcagcggttgtgccgatgtccccttcccccctcccctctctctctgtttttcatttcgcctttttgttcagcttatgtcaccaacagaggccgtctcgtaggcgtcgtcgcattgcgcgaggtacggataccgaaatgtttgaaacgcattcacagtcaatttgtctttttctccaatcagcttgtttttccgatcgatttttccgttcttagcccactgatcactttttttacttttctgatcagtccttcgttgttaatccttccgtcttccctctcattctcatgatcctttctgatcaaccattcattctttgatcatcctctctcccctcccttcattttctccccttcgcttagctccgtgcagccctcgcccacatttacacccgcggcgctttgccgaccgcccagtcgatg

SEQ ID NO: 99737 - DNA, 324 bp, Heterodera glycines
catcgacggaatcatcgcgcaccaatccccggccaagccgatcagggtgatcactttgacctccataatgcaccggtgagcggaggagagggaccaaagctcggatggactgatcactgatccacgacgcccttcagattatgtggcaaccttttctcgatcgagaaggacccctccaagtgggaacggatgtttgacggcgcaaggcgctggagggcatacgccctgagcaaattcgccactgcactgctcgcccagcatttgaacacgcgcgagggcgtcaaagcgttcgcagtgcatccgggggcggtgaagacgcacatg

SEQ ID NO: 99738 - DNA, 562 bp, Heterodera glycines
tatttgaaaaaagattcaaatggaagaaaggttctgaatatgagttataccaaatggtgaaattttcataatatagatcctgacagtactacactgttggaaaaaagggtaatagtcaggttgttccccacttttttggtaaaaacgtgtaaaacatgttcttgtgagtggtttcggggtcgctgatcacaaaatggacatctatttcgatcaatttcggaccagccccgaattgtaacaaaattcgaactcatttttcactagaacactatgggtacgccccactgtgcagagaaaagcctagtactatctcgtcgtttctctttttctttgtaatttctctcactttggcgtactatctcttcattttaattatgtaaaaaacaacattcacttcgctacgtttaactttttttctacacgttaaatccaccccaaattttgcatatcgatagagaaaaggaaaatgagcaaactttcagtgttttgagtaaaaattttggcctagaaagttattcaattcgcatttatctgaaattttttaaattttttaggatttatg

SEQ ID NO: 99739 - DNA, 119 bp, Heterodera glycines
tgagcccttttttaaattttattgaaatttttcggctatgaaaaagcatcatcaccaacactcaaaaagtcgtccatgaaatttgaaaaattttgaaaaaatgtgccgttttaggcatg

SEQ ID NO: 99740 - DNA, 234 bp, Heterodera glycines
  unsure (1)..(234): unsure at all n locations
ttctcaaaattattaatgtcccaacaaggagaattgataggattatttagtgaggattttcccctggaattagagnattttatagttttgatnatttaaagaaaaatatagtagggagaaaagttggataanatttattanggatgtgaggnatgggntggangaaggnatagaaattttagaggngaaggagggaaagtggggtagatattgggttggagatattaaggaatg

SEQ ID NO: 99741 - DNA, 145 bp, Heterodera glycines
  unsure (1)..(145): unsure at all n locations
tctagagtcatttnntggcacaacttagaggcaaaaacaaaaaaacaaaacttattaagtgcccttaattgcgcctccgattcgtccgcccaatgcgcgaagattcggtccaagttcagcaacgccatggatttatctgcaaatg

SEQ ID NO: 99742 - DNA, 1003 bp, Heterodera glycines
ataacaaactcaaattcaacggacatatttcaatcattctccaaaaagcttatctcaagagtcgaattcttttaaaaaaaattaaaaccaaatcaaccaagacttggattacagtttataaaagttatattcgaccccttttagaatacgcaaccgaatttggaatcctcgaaccaaaaaagaaataaaccgcctggaaaaattccagaaaaactacaaaaaatgttttcagaaaatgctgtcttccctatatctcatacaacgaaaggctaaaatatctaaaactttccaagctcgaaaccaggagaaaatatcttaatatcataacagcctttaaaattatcaaaaatactactcacctcaacccaaaaaacctttataatttttcaaataggaaaaggtcaccttttcctattttggtaaccaaacaaaaaataaccaaaactgaaaactcctttactaacagaaccacaaaacatctacaagaaatctgcaaaaattcagatatttcaatatcaaattcactgcccaccttcataaaaaagtaaaaaacattttacaagattaatttcaagttggagatctgacatcatcatgtttcccggactatcattctcttccgaaagtataagcggcctttgtcccttcttttggacttttattacttgaataaataaataatatttgagaaactgatggtgggaaaaggaattaataattcacgcggtgtgctgtgtttccgaaagcgccgtgggcgcatttcccccgccgccccctcaaatcaatataaataataccacaaatgcgttgtcatcccccgggggtggttgtgctgttttgtgttggcgttgtgccttcatttccttcgcctccttaatcaattcttaaaaactaaatttatttttctctttttatgcattttaaaatttctatcacttaattaatggtccatttctctatcgaaataaagagtttaactttattttaaaatattttgccaatg

SEQ ID NO: 99743 - DNA, 616 bp, Heterodera glycines
ttgccgtttttactcgtcgccgtcgttgtcggctgtcagtgacgacgtccgactaattggcctgcctatttgtgaatgaatgtttgttgctgttgatgagtaaggctatgattttaatttatttaaatattttgatgagaaatttacgaaaaactatcattttagccgaaaatatttcgcttttaatgtgattatccataaattaaaaaaaatatttaatgtttgaataaataaaaatatttacaaaaatatttttaatttttttatcaatttattttaataatattttggcattttgggtttttatgaacccttaggaattgaactttcgaacaaattcaaaaatccaattttgcaaatatgcttctctatttttgcgacattgaacgatcattttccgattacaaaaatattcttgccgatgcttttcctcggaaacgcatgaaatgtactcaatttgtgattgcaaccagtgaataaaaaattcatgtaagaaaattacaattttttgttggtctaagttttttcatttttgaccaaaattttcatagatatttaaggggtttttcttaaaatatttagattttttataaatataatcccagccttactgatg

SEQ ID NO: 99744 - DNA, 1003 bp, Heterodera glycines
tgacctctttcacgttgttgtacctcttctaatcactgttgtacctcttctaatcacttttgtacctcttctaatcacttttgtacctcttttatcactgttgtacctcttttaaaaaattaatttcattttaaataaaataaatattattaattttcaactttgttttttattaataatttaaaattaaaatgcattcgatttttaatatttaataaaaaaaattacttatttattacattttaaatcatgttgacctctttcacgttgttgtacctcttctaatcacttttgtacctcttctaatcacgtttgtacctcttttatcacttttgtacctcttctaatcacttttgtacctcttctaatgcccgtataagcacaacaaaaatgttaaaaacctgcgcgaagcgcctgccaaagcccaataaaatttgaaaaacggggcgatcactgttgtaagcgcccctatgagcccaacaaaattagaaacgggcgcgaagcgcccgtcaaagcccaacaaagtttaaaaacgggcgcgaagcgcccgtcaaagcccaacaaaaattgaaaaacgggcgcgaagcgcctaacaagctaaaaaacgggcgctaagcgcccgtataagttcaacagatttaaaaaacgggcgcgaagcgcccgtcgtgagcctcgatgtggactaaaaacccctaataattttttaaaaattcaaaaaaatctctccaaccaattcgatcaaatctaggtagcgaagctccgaaagcgcgaagcgctttttcccagctaaatagccgacggttcacgcacccgctagttaataaaagaaatacagaaaattaagtcaaaaatagaagatgggaatttcgagtatgataaaaataattttgatgactgttctcgaatttttaataaaactaaagaaatcattcaaagaattgaaccaaattttgaaaaattaaaaattttgcaccaaaaatggcaaaatttaataaggcaaatg

SEQ ID NO: 99745 - DNA, 224 bp, Heterodera glycines
tttcgaggaatatttttgtgtgttaagatgaaaatgagaagggaaaagtgtgggggtactgtatgtgacgtgatggagaggggggtgtcacgtgggaataggccacgcccactcaagtgagagcacgcagggacctccagacgggaggatttcgaaatccatccacagtatgccctcctatgccacgccccttatcattcacttccctgtcagtcatttagatg

SEQ ID NO: 99746 - DNA, 819 bp, Heterodera glycines
  unsure (1)..(819): unsure at all n locations
ggttggaagcagcagttgggcacagcaagaattcatagagacaaagaatccgacctagtgaaacataggaggagttcacaattagccaaatgtcttgaatgcaggatagtagagtatgtgaagagtttttgaatgaaaccaagtttgttggaattggatgtcaaagaaaagagatatagtggaaaaacatgtgccggcgtccaaccgtggcgcgcccaactgagnngtaaccgattaaaatgataatttccgggagctaaaaacctattttttcgtgcatttctcagcgaaacaaagccgctgaaataatagtttaggtggtcgatccccttgacaatttttggtgaaatcttttatttaaaatattttttgactggtgagcgacgcaaatgtccatttttgcttggcggcgcgtgtccaggcgcaaatgtcgcgcgcaaattttacggcgtaagtgtcgattttgctgagcggcgaaaaagtcgcaacacgctctatccaatccccggcaagaaatccatgtatggcttttggctaagcaattaaaaatttgcaaaatcacaattttttcacaaatttcctctgtcatttatggtccactaacttacttacttattgccacgttttataaaacagatgacaaaacaatgaaaatattttcattgattctggtcatataaatatttgcaaaataaataaatgttatccttttcatttcataaataaaaacagtactaacattntaaagcaaaataaatgaaacatttcaattcttttctcataagttttctttgttgctttcattttccatcattaatg

SEQ ID NO: 99747 - DNA, 411 bp, Heterodera glycines
acagcataccccgtgggtcacccaacacgagtgaacatcattggtgaggcagagcaggcggttcactggcgacgcgccgaccaggtgccggtccgaggcattctcaaagtgttcgttgtgccgccccatcacgttgatgtgcctgtactgcccgtgaaatttgatcagcggcttcttttcccgctgtgccgtacgtgcgctctgcaacatccgcatggagcggtcaatgaagactacgagtgcacgcatcgcgaggatgatgagcgggggtgggtgtccactgtgacgtcaatcgagttggaggaggcgcttcgcaacgggtaccggtgtacggcctactatcgctccgtcgagtgggacgatacgcggtggagcgaccgcgtttttcgaggctacgttgcagaattcatg

SEQ ID NO: 99748 - DNA, 642 bp, Heterodera glycines
tggccaattgaagaaaaactgcacacggcagactttaatttgccgaaatcggagaaatgatgtgccgtaaaattggcttgaaatagacgataaccgtgcctcgagatttggcaaaaatcggttcttgtcgaagatgaaaccgtgccttgagatacggcaaagattcggtttatgtcgcacaaattgttgataaaccgtgccgtaagatatggcaaagatgcggtttagttgcacagattgttgataaaccgtgccgtaaaatatggcaaagatcggtttatgatgaatcaccacaagcaatatcagcacgagataaagcttggaaaataaacgctgtcgttgagctgctgactgcgccaaaatttgttatgtccgaagataacaaattaaataagtttatttgccgaagaaaataaaataataaataaatgcagagaatataaattgggaggtcaaaatcggtgggcacaataacaactgaatgaggggaatgggagggggaagatggcgaagtggcgtggggtcatacacctaatcaataattacttccttctctaacaataaactaaaaatgaaaagcataaaaactaatttttatgcccaacattgtttcattggtggcgccaactcggggccgaaatg

SEQ ID NO: 99749 - DNA, 275 bp, Heterodera glycines
ttgctcagtgatttttgtaggatagtcagtggaaaagggtggaggtttaaatccgctatttattttattttcaaaactaaaaatagtaattttcgaaaatatttttttaaagatttctgccaaccaaattaggtatacaagcttaatacatcaaaatgctcacaatttaagcaattggatttacctgagactgaaattgttttatattatttattgattcaaattcttttaattttagcttgtttttcatagttccacggatttttcttgtaatg

SEQ ID NO: 99750 - DNA, 494 bp, Heterodera glycines
ggttcgttttcgcgtgggggtcgttttcgcgtggttgcatataaaagataagtcattactagagtggcgcgacgccgagaattatgataaaaagcagttgaccatgacttgccaggtgatcgggtgtacgccgatctcgcaagtccacttgttctaacgtggacggctatcacatttgccaaaaactattttctgaacctaaaatctcgataatattttcaacgacaaaaataatggaaagcatttctgtgtcttaaaaaaaaattatcgcaattttttgcaaaatctttgaattttgtatacaaaaaatttttgaattctattattataatattgagtgcgatgcaaagatcgtcaatatatttttttaaaagtatggcattcccgccaatagtgccgtgtcgattaccccagggatttgttagaatcacattcgaatttaatgattattattcatcatatttaaaatattgattaattttattcagaaaatg

SEQ ID NO: 99751 - DNA, 557 bp, Heterodera glycines
gaaacattaatagttttatgaatatataactatggataggatttgtatttatgaaaaatgccaaaatatttactaaataaaaaagagtcaaatattttttaatggatattggagattaaacctaagaatttcgcgctacaaaggtctttttcgtgcatttctcagcaagaatatgtattttaaaaatatatataaatcccatccctaatcgtaatatgattcggaataaatttatgttgtatattctgagaaaaatgcaaaatcaatgcacataaaattcatttgtaaaaatgctcgcccgcatattcgtattcattcatctatatgtattgccctatttcatgtgatttacacttacattattgctgaatatctttttatgcatatgcatataatgtgaagggaaataaattttcattatttaataacgttatatttatattatttttaatttacattttacttttttaaattttttataatatttttaacgttttaaaaaataaaataagttaaaattaaagcgaaataatttcaaagcgcaacatttagaaatg

SEQ ID NO: 99752 - DNA, 699 bp, Heterodera glycines
ttattccggagtgactggagtgattacagagaaaaatggcgaacattaaatacaaatgaaagtgaaatgtgattgatcaattatcgtcgggaaggggcggtacattaagcaaaaaggaaattaaatgtgagataaattaaatgtgtaaatgttaaatcctagcgcttcggcagttaaacgaataatccaaatctcttacaaatccagactctcttacaataattttatttacatattttgagtttttgtacatatttcatgattttttttacatattcatgtatatattttgaccactagaacgaggcggtggagcctggtaaaaatgagttaaagtcgtatggtggtaatttggaacaaggaagtgaagagcaacccagcggtttaatccgccacttttaaattatttttcagaatttttaataaatataaaaaaattaaaagtggcaaaacaattacacgaaagtagaaaaattatatctaaattattaattcaacaacagttttgtcgattatgtcggaggaaatcagaaaaatatatgaaaattaataataacatcaacaaatcggaaaccaatttgttttccaacgagacaagcaaaagagagcaaatgtatataaatactgtccatatgttaactgaaaatcatccaaatcaacgcggcacagtaataaaatattaaaagatccgaaaaaatg

SEQ ID NO: 99753 - DNA, 672 bp, Heterodera glycines
cctggacctggacctggattccatgttggacctggcttccgatttcctggacaaaaatccaggaaaatccaggtccagctaaaatccaggctcctcgagacctggatccaggcctggacctggatttttttaaactcattttaaaaatcaaaaaaatgtttgaaaaattcaattaattacttggcaacatctaaaaatatctaatttacaataataatttgtttttaaatatatttaatcattttttgaaaacttgaaaaaatatcggtcacttgaaataataaattctaaaattttgtccaggaaaatccaggttttttcctgttttgcctggacctggacctggattttttttcacatttggcctggacctggatttcctggacaaaaatccaggtccaggaaaaatccaggttgtcaaaaaatgacctggacctggacctggatccaggaaaaatccaggcctggatccaggtccaggccgagctctatttgttatacataaatcccaacttttcaaaattttgcgctatcggcaccgcctgaccaatttcaaccaaaatgaaaaaacactactaacaaatatgaacttcacatttttttcaaaaatgacccaaaattactttttcttgcttttttcagaccaaaattaatttgctccctctctaaatg

SEQ ID NO: 99754 - DNA, 185 bp, Heterodera glycines
aatattcattggataaatatgaggcatactttggcattgtgcattatctgaaaaagaattggcattgtgacaaaataacagaggaatttgaagaataggaaaggacagaatgccacaaatatcgcaaatatttgtacattttgtacaaatatttgtatagagaatacatcggaattcccacaatg

SEQ ID NO: 99755 - DNA, 301 bp, Heterodera glycines
gctacaaataatgggaattcgtagtaaaccgaatttgaaagcaaaagttcctggaatttttcgcataattctgaaaaagaaaagccaggtggaatgatgaaggtaacaggattttggcttaccgttttgaggaggcggcataaaaatggaccgagtttttaatcgtttttttgtgataattataagagattttagacagtttggaaaagatgggcccccaaaaaatggcgaattagagactccaacaaaaatggtgtaattccgtgactcccaaatggtggtttccgagtccataaaaatg

SEQ ID NO: 99756 - DNA, 956 bp, Heterodera glycines
caaaattttcctcggtgcatttcaaccctcaaatgttttttctcagtctctccctctccagccgttcaaattctattgacttcataccagaaagataaaagagcactggcaatttgctttccggctgattgtccggtaaataaaccccaaatcgcattcggcactttaactgggcactgtaacaataaaataattccaatttgctttttttcatttcactaaacctgttatgttcgaaaattttctgatacccattgaaccaccgggatttgcttaattcgaccagcgacattgtcaaaaacgaagtttaaatttaaatgctttcagctgcagcggtttaacggctctttaactaacaattagccaattttaaatagaaatggatatgcaattaacgaattttataatttgtaaatgagtgcttgggcgcgccgctattatctgtaataatctgtaataaaggccagcttcttaattacacacaccattaaaatttggagtttttgatatcgctattgaatcgtttatttgccataatcactcgcttaagttttaatatccaaaaagttttacaacgaagtggcgtgtctaaataaaaattgttcaaaaatacataaaacggaaaacattgaaaaaatgtacatacacaaaaaaagagtgaacgacgtgaaagaaggggggggggggggtgattccgcgataaagcgctgaattggaatggaatgaataagcatcgatttaacaacattagcatgtttccctttgaatacataaaaataagcttcattcaattctttaattggagataaaaaacattaattcgcctttgtttaaaaatttctctgatttgatcaaattcaattacctaattaaatagtataaattacagaatgccttttcaccactaaatattatctgattgtaattaaaatttaaactaaagaatcagggcaatg

SEQ ID NO: 99757 - DNA, 852 bp, Heterodera glycines
tcgcttaaaaagtgattaagaatggaatgataacctttatttgttttttcgaagatttatttaaattgaataaaaattgttttaaatgtttaaaattaattcaaaatccttcgttaaacataattggtcgaaaattaaatagcatctacatttgcactcaaaatcattttaatatttttttttaattattaagaatttttttaggtaaatttatagtaaaattaatttttgttcgaatttttttttcttttggaattgaataaaaattattttcaaatgtttaaaattaatataaatagaaaccgtgcctaattgtgctgcattttttttgtttaaatatgagcaaatctcgtcaacatgaactttttatccgttgtgaataatttttttcaaattaaattcaaacaataaaatataataaatgcgcttcaatgcccaaataaaataaactcataaatatgaaataaattttaattgcgtttatttcataaaaaaccaaaaataatttttaagctttatgaaagaagttaaaaacacacacaaaatataaaagttgttggtaaaaaatttaatcaatgtctaagaattggtgaatttaagcaataaaactatgaaatgaacagatggatttgtcgagaatctgaagcgagaaatatcttggatttatggaagtctgaccgcccaggaattcaaatttcttttttttcgatatatcattgagaatttttaggggagtcaaaaaactgcagaaaaaaattattaaaaaactgaaaatgcgttcctggtggtaataacttattaatttttacaaaatttatcagtaagtattctattttaggcacgtgaaatatg

SEQ ID NO: 99758 - DNA, 577 bp, Heterodera glycines
ggagacaaaaaatttaaatttaatttgataaattatttatataacaatgacatttttctcttttatggaaaattgtgtaaaatcattgtctgttttggcataattcatttttttaatagaaaaacaggtaagctcagtcggggaattcgggtacaagtacagcaggtgccaggcttttttcaaaatgttcagctctgataattaggcaaaaaggaaattgagtaattaaaatcatttataataaatgtttaaatcatataaaattaaacatcatcagtctgatgattctttgtgcgctgactgccattttgtacgttttggcctcttttgcgtccactgttaatttggcggcgaattgagcagaaacaaagaacgccgatggataattaattatgaatgaagagacaacaaaggaacagaattttccaattcgatttgatctgctgaccgatgacttattcaatgcattgtaaaatagaaaaataattatagaacaattataaattcaatgcagttttacattttttggatttgaaacgtgaaaacgaaggacaacaaactgatcacttacgaaatg

SEQ ID NO: 99759 - DNA, 395 bp, Heterodera glycines
  unsure (1)..(395): unsure at all n locations
tttgaaattgtgattttgtccctccattgaacatttgtacatttttagcattagtcactacattttgtgcacaattctctgtctaaaattgctcctcctacgtttttctgtctctacaaattgctccacccccgcattttctctccttataagcatttgcgttttcacacacacacacatcttttatatttattaaataaacttcttttatttattcggaatttattttccccctttattcctcccgcactctctccccttttgccctttccaaattgcccccctttgccgtccgagccagcacccgggcncggcctactttagtttttataaggacaaaatcaccgcactatttaattattatataattattacacacaaaaaatattcagatg

SEQ ID NO: 99760 - DNA, 616 bp, Heterodera glycines
tcagtaaggctgggattatatttataaaaaatctaaatattttaagaaaaaccccttaaatatctatgaaaattttggtcaaaaatgaaaaaacttagaccaacaaaaaattgtaattttcttacatgaattttttattcactggttgcaatcacaaattgagtacatttcatgcgtttccgaggaaaagcatcggcaagaatatttttgtaatcggaaaatgatcgttcaatgtcgcaaaaatagagaagcatatttgcaaaattggatttttgaatttgttcgaaagttcaattcctaagggttcataaaaacccaaaatgccaaaatattattaaaataaattgataaaaaaattaaaaatatttttgtaaatatttttatttattcaaacattaaatattttttttaatttatggataatcacattaaaagcgaaatattttcggctaaaatgatagtttttcgtaaatttctcatcaaaatatttaaataaattaaaatcatagccttactcatcaacagcaacaaacattcattcacaaataggcaggccaattagtcggacgtcgtcactgacagccgacaacgacggcgacgagtaaaaacggcaatg

SEQ ID NO: 99761 - DNA, 82 bp, Heterodera glycines
gcttaattgaagggaaaggcggcggtaattggggacgaatttggctaaactttgaaaaagagaagaatttgggcattggatg

SEQ ID NO: 99762 - DNA, 294 bp, Heterodera glycines
tctacaagaaggtatggaaagaaaaaatagttatttctgggactttttcagaaatcagaattaattctccaatgtggcccaaattttaggcccccagccacagccccttgcttctcccagttttaagtcttggatttgtcaaataaattcaagacttcaaattaataatcaaaaattctcttaaaatttttttgaacccaattcaaaaaaggaaaaaaatttgcagtcaaaaaattattcgaatttctccaattttgtttccataatttccgaaagttattcggtatcataatg

SEQ ID NO: 99763 - DNA, 499 bp, Heterodera glycines
ttcgtaatttagttatattgaaaattttctaaatcctctttatttgatgaaatgccattataaatcagaatttctaaatcaataagaatattgtagtctttttattataatctaaatttttttattattatgagctttgacttttaaattatttagataataataaaaatattagtttaaatttggtatttaaatttatattttgattaaatgtaatgttattttaataatattctctcgcttatcttagccttaactacagctattgtgtcattcgtgtcattcgctcactgggcacatttattttcaatttatttttattaatttttagaatttttcattctttttcaattaggtttctgtttttttcattttatatttagcttttatttaatttttaaaattctttttgtattaattggaattttaattaatagcctttaaacactttcttttaatatttagaaatttagtaaatatataaataaacttcagtatg

SEQ ID NO: 99764 - DNA, 112 bp, Heterodera glycines
cctcaaatttgatgcaatttaaaattttaataacttttttacgctaaaaatgcttacggcccggaatttgtagcctcagggaaatcatccgccaacagaacaacggacaatg

SEQ ID NO: 99765 - DNA, 233 bp, Heterodera glycines
ggtgaggagcagtcaccgcccacccccccccccccccccactttccacatttcaatgtcttttcaactttgtttagttgccgcgcgaggacgtagtggagctgctgccgaacgatggggacttcctggtgcgcatgacagaagaaatttcgggcacggagcgtgtgtatgcactgtcggtgaacgtcggcggcttcctgaaccacgtcatctttccgccgacacaagggaatg

SEQ ID NO: 99766 - DNA, 191 bp, Heterodera glycines
agtttttgtgtgcatctcgcaaatccctgtataaaaaacttcgtttcatattttctaaaactatcatataaatccaacgctgactatgattcatattagaaaaaatgatgtaaccaaattcctttttaattgtctttggctaaaataccttcactaattttgcagcggacagtcacaaattggaggaaatg

SEQ ID NO: 99767 - DNA, 162 bp, Heterodera glycines
attaatattaattaataaattgcctctccattcaatttggccaatttgccattcattcctttgccttttatcgttagtaaattattttaggcgcagcactttccaagctccactaaatttgtttttttgtgaataacagtcagcaaaaacaaagcaaaaatg

SEQ ID NO: 99768 - DNA, 322 bp, Heterodera glycines
tttcggaatttctttttttttaaatttagcttattaaaatatttagaatatttgattatatttttattttttcaaaaatttccgatttccgacgtttttggggtcggaattccgacttccgaaaattttttgggcctcggaattccgatttccgaaaaaattttgacccccggaattccgatttccgaaaattttttgagcctcggaatgccatccctgatacacaccgtcaaaaaatgggacaaaaaaaaaattttttttttttcttgaaatgtcactctcattttttttttgattttttagctaattttaattcaaaatg

SEQ ID NO: 99769 - DNA, 116 bp, Heterodera glycines
cctggcactgcggtgttggggcgcaacatagtcccgtctcgatcgcatgcgatggggcggagacagagcgtatgcgctgagacccgaaagatggtgaactattcctgagcaggatg

SEQ ID NO: 99770 - DNA, 125 bp, Heterodera glycines
  unsure (1)..(125): unsure at all n locations
gagagttcaaatacaaccaanaattacgaccagtttttgatgcgtccgcaaaacttaaaggaaataattcactaaatgatgaaattcaccaaggaccaaaattactaccagatttgtgtggaatg

SEQ ID NO: 99771 - DNA, 167 bp, Heterodera glycines
tcagtgtgttgtccgacgggtccaactcatccccctaattaattcccaaaattacacttaattagtgcgctaattaacaacatatatttgtataatttcggcatttctcgcaactttggcattttgtttttaacatttttaattttaaaatcctatccccaaatatg

SEQ ID NO: 99772 - DNA, 552 bp, Heterodera glycines
  unsure (1)..(552): unsure at all n locations
ctgatttgcctattttagatcactactaatcagctntattacaaaatttttggcgtccgttacaaaatgatcatttttgaaagtgcaaaatgcggatgccttttggtttcaaaaattttctctttgtgcataatttgcttatcactttgctttgtaattagcgccaattttttattcgacaagctgattgtcttccgtttaattggttcttttcttttttttttgttactatatcttccaaaaagattcgaaccatttttaatttctaaagcccattcacagcaatgggacaatcagcttgtcgtttttgtgtaccattatattgtcccagaacagtaatcacaaattgccttttttatttttgtattcttttttgtacttgaaaatcatttaaccctttcttttattctctacattaaactaaatttaatttaaagaaatttttttatcttttttatttttgtgaaattaacatatttttatgcgcttttccctaaccaaatttagcccatagttagaataaagcgaaaacgcttttttaattcgaaaatg

SEQ ID NO: 99773 - DNA, 124 bp, Heterodera glycines
ataactcaacacactctttttggatgacaaaaataaaacgattaattgtacgcccctcccatacaaacaaatcaatcggaccgatgggcttttgcaagtgaatgaaagcataattgtgatgatg

SEQ ID NO: 99774 - DNA, 871 bp, Heterodera glycines
aattgaatttaatattcatttaggcatatcattcttttacttgctcataaaagttttttaaatacatcaatttataggttttgggtgccttagatcatggaaatatcatcatttaaaataggtcaattttttaacccctaacaatgaatccctaaactttatgaatcaggatcaataatatagggtttgggtgagtaagaaagaattatgacctgaaaacctagggtgatcgttttatagaacgcctaaaaaattttgatagggcatatattttggtttatttttttgaaaaatctacggaaataaagtttaagctgaaacagacgacgccaaatcaattatttttggcttttttgtgctctcaaaaatgtgatttagacaaaaaatcaaatcttttctttttaattttgaatgttttgggatttttaatataaatatatatttctaaaaaaaaacgaaagaaaaaaaaaagaataaaaattaattgcaatttaatctaagaagaatagtgtctataattgctgataaatcataaactaagtatgcagtttttcaaatatcaaaatattttcgtttagttcaacctattaccttcaatccttgtaattaactagtagaagatactgtacttagatatataaagttaattatttgataaaaaaatataaaaatataaaacccctcatctaatgtgttaatagacttttaagctctaaaaaaaattattctctaatatttcgtttttcaccggtttattaatccatagtcacaaatacaatatatatatatataatatatacacatatagatatatacataaaaaatgttttttttttttgttattttgtagttttttttattacaaagtatg

SEQ ID NO: 99775 - DNA, 806 bp, Heterodera glycines
aatttttgggaaaattttgaaagtaattattaagtcgccctttcaaaggtaaatttccgttttggctgaaagtatgcaaattccaagattttgataaatctattataatggaaatttcgttcgatgggaaaaatgaaaattaaagattaaatttagcataaatattaaattatgataatattaaataaaaatttaaaaattaattaaaaaagagaaaaacttaaacaactctaaaaaattaagaaattataaattaaaaatattaaattaaaaaagaaattaaatttaaattcttatgaattaaactattttaaaatgataaatgatagagataatttcaattaaaacctaataaaaagaatatataaataaattattaatttgcccattttattacaaaattaatgaaataaattcattttagtaatttgtggcatttgtttttatattgccaacctattgaataactggtgtttaaataagaaaatttcagggaattaattggtattttatcccaaatttaaaacctgaaaatgatggcattgtgctatttttatgaaataatgagttgcgtttaccgttaattaacacataaaggcatcattggtttcatgtttgaaaatcaaagtttatactaattggaacattcatcattttaaaataattggctatccttttttgactttaaaattccaaaaatttaatactaatactaatgggcataggcttttttgctctaatgaactcattaaaaactaattatcttcactagttaaccctttttagcatttacattacgccaaatg

SEQ ID NO: 99776 - DNA, 370 bp, Heterodera glycines
cgaaggaacttatgtttccaaattcttcgaaaattaccaattcggtgccaatgaagcatcagaaaatgccgccagtcaatttcaaaaattttggtaaatttcaacagaaacaccaaaatatggaacggcaattcaacaacaaatacggcgctaagcccatcactttccaaaatggagagccagttttcatttggaatttgaaaggcaataaggcaaattggttgccggcgacgattatcgagagagggcaactctccgacttatcgagttgacgttccgacgctccgttgcgcagtccaccgccttgtcaaccaaattcgccgccgtttcccagtagaaatggagaaaccgcaacttggccaagaaaatg

SEQ ID NO: 99777 - DNA, 105 bp, Heterodera glycines
ggtcgcttttttaaaaaatttctcgactgatttgcagtttttttaaaattttttcattttcttttctcatacgaaattttcaatcatttttaggtttacaaaatg

SEQ ID NO: 99778 - DNA, 366 bp, Heterodera glycines
  unsure (1)..(366): unsure at all n locations
gaacagacgtgccccacaaaggtactcgccgtgagcgctcaaaaaggggaggtgttcggatgagcctattgnaattatattggcgatctgtctattcaaatcnccgcattttgttgttgtcactcgcccttaaatagacggtcattccctccctcctggtcttttcctctcattcatttgattttgttatttttcctccgaccaaattgtcctccatttttattttattgttcgtcaataaacattattgatcgtgttccttgacccctcggaccgaacaacacccgaccgtcgacgttccgctccgtaaacacaggccgtggtccgttggagcagcagtggcagaccaactgcgagccggtgatg

SEQ ID NO: 99779 - DNA, 61 bp, Heterodera glycines
agtaaaagcaacatattttttttatggtgataaaatttcaaatctttagggcaacaaaatg

SEQ ID NO: 99780 - DNA, 241 bp, Heterodera glycines
tttagagaaaaaaaattgctacattttcgaattttggcacaaaaaattaatattgataatatgcattagttaattatacccctcccctctcccgcctcattagggcccaattgcgcgccaatcgctcgaccaacgaccaatcaaattggcgcaggtcagcggcagtccgcaagtggccgacaatttgccaaggagatcggcaaatgcatggaagccgaagcgcgaggaacgttttgacatg

SEQ ID NO: 99781 - DNA, 805 bp, Heterodera glycines
tttaaataagagtagttatagatttttaccaaaaatttaccaattttgcgattttaggccaattttttaagaaaaaataggaattattggggtccggcggcgctgataggcgctgtgattgtttcaaacgaaaaatatgacagttaactgactttgttcgtaattttatgatgtttttaaaaatgaggatttttcatgccaaatgaagatttttttggggtattttagtggcaaatgaggatttttatggcggaaatgaggattttcaaaattttaagatcgaagccctggagaaaagcatgaaaaccacgttttctccaaaagtttttgaattcgatcgattttttagcaacaattttcaagaattttggggtttttgtcaattgccaacaatttttttggcatgtgaattttttaaaaactatttttggcttgtcaataaaaattttgttataaaaaataaaatacctaacagactcaaaattggataaaaaatggggggggggatgaatgaatgaatgaatgttgaatgaggaggaaagaagaaacaatggcatttttatacaaaaatattagcgtatatttgagtaccggtgtgaaaaattgatataaaatgcagagaaaattgacagttaatgtcatttgttgttttgcaatcataatttatgatgactaattaattggaagcgtgctcagctaaatgccgcaaaatagttttttactcaatccataatccacgtcttaatttttgtgctaatttgttcaaaagttttatttattttaggctaaattatttgtttaaatg

SEQ ID NO: 99782 - DNA, 698 bp, Heterodera glycines
taagagaggatgggagctgggagagagagggggggcttcgagagatagagagacaggaaaagaaagaaagagagagagagagagagaaaacgagagagggtgggagctgggagagagaaaacaaaataaagagaggaagagagagcggaagagagagagaaaataagagaggatgggagctgggagagagaggggggggggggggagagagagagagacaggaaaagaaagaaagagagagagaaatagagaaagagaaaacgagagagggtgggagctgggagagagaaaacaaaataaagagaggaagagagagaggaagggagagagaaaataagagaggatgggagctgggagagagagagagagagagagacaggaaaataaagagaggaccagagacataaaataatagaggctggaagctgtgaactttggttctgcgttggatttttgctccccataaatgtttgagtaccccaaacggacacttgaaaaaatcgatttttttgtttcataaatatttttttcagaaagtgctctaaagcgcaccaaattttatttacaacttaattttagcactctgatgctttagtatcaaaaaggaagatggagaaaaaattttttaaaaaatttttccttatattttggttatatcgttttgcttttggtggggtgcttggaacagtggaatcatg

SEQ ID NO: 99783 - DNA, 1003 bp, Heterodera glycines
ttttcaatatctttacttaaaatcaaccaaattttaattcttatatcattcaatagctctagttgttttctattagcatgcaaaatttcaaaaagggtgtgcgtacgtttcgcctactggacatctcgcctactgacacttcgcctactggacatttcgcctactaagccaaaatcggacgttccgcctactcacctaaaatctgacattttgcctactaagccaaatacggacgttccgcctactcacctaaaatctgacattttgcctactggacatttcgcctattgaatatctcgcctactaacctaaaatacctagctctctcgacagcaaatttcaccaaatatatattctaatttgacatataattcgctatatttataatgctaatgaaatttagccaaaaaaagcaaataaatttttcaaagaacacagaaagtgtgcatctccattagcttcttaatcactctctttgttttccatggatgtgaagcctttggcttagtagacgaaatgtccagtaggcgaagtgtcagtaggcgagatgtctagtaggcgaaatgtcagattttggcttagtaggcgaaatgtcatcgtgccttcaaaaaggtttcgttaagtttcaagaaagttatgaccaaaaatgttgtaaaaaacttggttttttgagcttctcaagttataacttttttgaaacttaacggaactttttgaaactttataggctaatagaaaacagttgggcctattgaatgatatcaatattttaaaatttggtttcattttgggtgaagttatgaataattttctgtcaaaaattttccattttttggaaaacattcgttaaatgtgattttggtgcttcttcatcaaatacaatccgtaaaaaaataggaaaaccctaaaaaccaggttttatccaacgcaattaattaattattctgctatttgtttgacctcattcggaactcggccaaattgtgctaattaccaaaaaatg

SEQ ID NO: 99784 - DNA, 130 bp, Heterodera glycines
tttgcacacggacaaagtgaggcctaagcaaattcacacttgtttcttagggaatggccaaatactgcagacaaatgggacacgggaagggcacttttttgggagggggggggataaagtcccaaaaatg

SEQ ID NO: 99785 - DNA, 950 bp, Heterodera glycines
  unsure (1)..(950): unsure at all n locations
aataccctaaattttgaaatttttcttagtgaaaataagtgaaaacagtcaattcaaggattgggagggaatcattaaaaactgaacaatgttggaactgggctcccagtatgcctaaattttcgattttagaggccttgtaaaactccttggggttttgctagggtgaaaaacaataaaaattaaatagcataaactaatattcaataacaaataagtttttaaaaaatgaaattgagaagcaaatgtttgggtcaaaataatctcaaaatgttgtataatttgcttaataaaatccaaaatgattagatttcactattaatgggccatttatttatttgtgaaatgattttaaaaaaataaattggctttctaacgttttanaatggagaaaaaaaattggagaggactattaaacgagccatttaatgaaaatagttgtaaaatttaaaaattatggccttttgttgtctaccttattttatttttattttgaccacatcaatttttgtattcaccgtattcttttcatctcataatttttgtattccattcaaataaaggagtaaaaaaggttagccgacatttgcggaccgactttaccaaagcatggaagtgaaacacgtaaaaattttccttggtataatagtcacttttctccgctgctttaattgcttttaattaattaggcagggacacacggggacagtcttttaattaggtcggaaggatggggacaattgattaggactttgaccaatgattattgttcacaaattatccaactccgtcaaataatattaaaactcaaattggcacagcacagcacatatccaattattctccaaattacataaaacagcgaactaactaaattacacaaaacaaaataacaaaacaaaatcataaataaaatgccaaacaaatatgatttaaaataatatcaaatg

SEQ ID NO: 99786 - DNA, 77 bp, Heterodera glycines
agaaacagacagaaaagaaacagaaaaaagcatagtgaaagagagaaggagcagtggaaaagataaagggcacaatg

SEQ ID NO: 99787 - DNA, 54 bp, Heterodera glycines
gccactgctcggctgccgcagctcagtcttcctgttttttcgggcgaaccaatg

SEQ ID NO: 99788 - DNA, 1003 bp, Heterodera glycines
  unsure (1)..(1003): unsure at all n locations
taaatttcttttacccatagaacaacaaagaatatattaaaagctataaaatgaattttattgaaacaatgggatgtataacctaaaaaaatatttgatacgttcgatgcagaatttttttctctatcgatatgcaaaatttggtgtgtatttaacgtgcaggaaaaaagttaaacgtcacgaagtaaatgttgtttttcctaataatgaaaatattagatagtatgccaaaaggagagaaaagttagagaaaaaaagtttctctgcactctctctttattgacacatgtctcgttttttgactcggtgtgtgtgtattaacgaagttaggaaaaagttatgacctaaaaaagcaagaatagtcactgattggacgcgtaaactggaatagagccgattttttgttaaaaacatgaataaagaactgaagggacagcttttagtagagacaggacaagagggtcggtcgaaacggtttcggttaaaaaccgaaaccgacaaaaccgaagaaaaattnttcggttttttcgaatttgtttatttattttccaaaaagcaataaactcagggatggtatccgtccttgaatggcaaggacgtccttgaaaatgagcatttggaaaagtttaaaaaaaatcaaagaaatttgagaaatctttgtaattttcaacaatattttgattaaattatggcattatgtaatttaaaaatgtaatttttgagaatttttgaaattttatggcattaagtcactatttttcttaaaaaattagccaaaaatcgcaaacttggaagccgacattgggcgataccaaccctgaataaaccattcgcgccctttgttgaccttttttaaaattttgaggcgtaggcccaaaacagaaaagtaccctctgcttattcgtagtttttggctaatttaaaaaagccagattaaattaaagaataattttaaaattaaatcacaacttacgacaaaagtgtgctaattgtagaaaaaatg

SEQ ID NO: 99789 - DNA, 51 bp, Heterodera glycines
acgaaacttcggtgtattccggaggagtgatggcctgacaaatgaatgatg

SEQ ID NO: 99790 - DNA, 321 bp, Heterodera glycines
aattaattaataatcagaagaatgtgcgtcaaaagtgcggttgttgttatctgagggaggagaaggagaataatcgaaatgagactgatcaatgaactcatcacaaattaaatgaatgaaatggcttatcattttttgtcacttttaaatattttcagtgttgatttgtgtttgttatctctctgttttgacagtgtaaaaaatgggcctcgttttccgccacttatcagtttgtatttttaaattctaatatctgtcgtacttcgttaatttggtgtttttattcaaattccgctttttggaatttgtcaaaagcgaatg

SEQ ID NO: 99791 - DNA, 175 bp, Heterodera glycines
ctgttattggtcaatttcgtgcggctgaacaccgaacatccctctaagaagttgtgcccacagaagcaatgagccaactatttagtaggctagagtctcgctcgttatcggaataaaccagacaaatcgctccacgaactaagaacggccatgcaccaccatccaccgaatcatg

SEQ ID NO: 99792 - DNA, 73 bp, Heterodera glycines
ggtacgcattgagatgagaaacagtaatcaggtcaattaacccttgaatttatttagcccttttgatggaatg

SEQ ID NO: 99793 - DNA, 179 bp, Heterodera glycines
ttattctccggcacggctcctgctgctgctggtggccaacacaacgcgtatccgacgggggacggacggcgttgggacccgaaaatttttaaaatattacaaacaatttaaaatgcacaattttcttagagtttttgcattggtatggcatcgcaaaaaaataaaaataaaaaaatatg

SEQ ID NO: 99794 - DNA, 782 bp, Heterodera glycines
cctccataattaggttttacccttaggggccgtcaaatggcccactaggcaatgtcattgccaaactcggcacatttttagtccttttcactgatttgctgaccaaattaaataaaactatttattatacatatatttaaatttatatctttgttttatcatttattacaatggaaaatggttggtctttggtgtcggtgtttggttagcaaatgattttctgccccgcctttgccttcgttatttttgttttcctcaaaacgttttgtttgttttcgtcaacaattttgtgtgtgttgttgcagttttctatcattcttttctttaatatttttatttaatttttcttataaataggtatgctaaaataaattattatgagttctaaaatattattggctttttctaaataaatacaacaaatcatttgtaaattcgttaaccattttatcattttgctacacctcgttgattatatgtattattggcaaattctgaagggtgtggaaaatattaagtgatgttttattttacagttgctttggggaggagtaattcttcccgaatcttttcaaaatggatttccagcattatctaatttgtcagaacaaatagcttgtacgttgccacagctttaaggatgagcttaaaccacgggaagccagcactgaataataaattatttatattaaatttgattttaaattagttgaactttttcattaatccgcagatatattgataatcccccctcactttcacttaaatttattggcgaaatg

SEQ ID NO: 99795 - DNA, 539 bp, Heterodera glycines
ttatgatctctgaggaaatgcattactgacgaaatcccaagtacgataataataattatttgttacatttctttatttaattcatttgctaaaattttgttgtgttgggatcaaagggatggcatctgcaaaatttgttttaacaaatttcccagtaattaggttggcgtctctagtgaaaatggtaattgccagccacagaaaactaacgacaccttaagccaatggcaaacctaataaagtctccattttcatcagatataaatctttttcatgaaaataaatgtttaataataatgaaaatattttttacattaagaaaaattttaatgagaataaatatttattgtgaaagcaattataggaaaaaaataaatattttttttacaccgaaaaaacatttaaaacccgaaaaaactcctccttttttatataaattcctggcgcagcgtttttatgtacacaaaaaaacgtactttttttataaaacaagtttaacaaaatttaatttctttacagaataaacgccctttaaaatg

SEQ ID NO: 99796 - DNA, 1003 bp, Heterodera glycines
taatttatttaaaatattcaagaaaaaataaacggttcattttaaaaagcaagaagtcgttcaaaatcggaatgaaccttttacaatggtctccgaaaatgcgatgtagggcttttgtaataccattcgaatcggggataccgggcgttgtaaaatttaaaagttatttcaaccaaatatttaaattttaccttaacaccatgccaaaataaacctttttttcatagccaactcacttcgaaattggtcaaaaatcataatctggtataaataattttttgatcagggtttccgacccccgacaatttaacctcccccaccgacccgacccccgaaatcttgttgttgattaataaaaaaaaaacagttttgcaaatgttttttgtaaaacaacataataaattgagccaaaattttttaatttaaaattaaatgtatgccttaaattagagaccggacggaccggggcctctccgggattttgccgggactcccggccctggtcccgttttttggacaaaccaccgcgaccgggagtcttggaaaaacgtgtcccggcccgggccgctgttcccgaatccggcatccatttcgaccaatttcgaatccggacccaaattcgaagaaaaagtcgaaaattcaaattttttcggttcatatttttagtctaaaaataatttaaatgttcttttttgttgaagcaatgatgactttcagttttttccgtgtatttaaataaagtgtgagccaaaatgtgcaagttgagtttccaaaaccgctttttagggaaaaaaggcttcattatgaatctgatcatgtctaggtccgatctctttcaattgaactgaatccccttttaccaactaaaaaatatgcataaatttcattgattttattgtacgtatagttttgtatatcaatgatttaaatttttgatgatgattatttgataacaaataaaattgatttgaatatataaattataatttgaatttcatcaatg

SEQ ID NO: 99797 - DNA, 110 bp, Heterodera glycines; identical to SEQ ID NO: 98226

SEQ ID NO: 99798 - DNA, 265 bp, Heterodera glycines
aaaggtgtatcatgttttgattacctacgaaaataaaaaaagtgggtaataaaactattcagaaatgatgatatagccggggcgttaagtactctccaccgacacggatagtcttgttttctcacatctacgcgatgctttttagctgaataagatcgacactataagcagttaattgatggaaatcgtagaattctgcactgctggtgcaaaatagtatgcgttggctttaagacgtataaatgttctacatgatgcggaaatg

SEQ ID NO: 99799 - DNA, 899 bp, Heterodera glycines
agcatatactgcaaaaagaagaaaatttaaaaaaaaaagttcggaaaacaaagtttttgagtcccttcaggccattattttttttaaacctaatgcacgggtgtgatctgttcttattactaagatatgttctgatttcttaaacacactcataattttgaagttttatggcataatgtcaatattagtcaagaaattttcaagtttacgcaaaatttggtcatttttgggcaaaaaatcttaaaaaattattcatttaaaaatgcactgcaaaaaatgttaaaaatcaaaaaaataaaaaaaaatctgaaaaaaggttaaaaaccattttgatcacgattacactgaaattattttctgttaatttcctccacaacattgttataaatgatggaggtgaaaaatataatattttgatacttttttgattaaataaattgtaaaaaacagctgattaaagcaatttgcaaaatgttcttatttttggctttatgttcttatttttggctttatgttcttatttttggctttatgttcttatttttggctttatgttcttattttgaaatattaatggcaaaataataataaacatacagagaatattgaacaacaccaagaatgcttaatttgtattgataacggatgagaaaatttgtttttatggaaaaaactttttggaaaagtatggtaatttttaataaaaacaattggtaatttttttgcgcgatccgccacaactttttcggttccgcttctcaccccatggctctcttttctccttgaggaggaaatactttttttgaaaatgccgccaaataaaacgcaacaccaaaaaaatataagtacaattttcatttttttatttaaattttatgtcaaatgattaaggaaaaatg

SEQ ID NO: 99800 - DNA, 94 bp, Heterodera glycines
tacattaaaatcgtttcttccaaaaaatgtcttagaaaccaatctttttaaatagatataatcttattttaagcctaattaggtcattgttatg

SEQ ID NO: 99801 - DNA, 1003 bp, Heterodera glycines
tattgtttccaacccttttccgtctatgattattaatcattgattaatattaaaaaaaaaattggtccccaagccacaaaatcacaattcaatcgtccgcactccaaaatctttaagttagtcccgtgattttttaatcgcttattccgttcagattggggagggaaaaattaaatggcgaaaaggaaacaccaccgaccgacccatggggagaattaattgacaattattcccccgagaatttcatttttggataatttccaaaatcgtagagaaaagtgatttatgaattattttataaaaattaattcattaaatgtgaaattggtacgtttatgaaacatatagagctccggtctgaaatttttcgaaaggaaatttgtagttgggaaaagctaaaatttcatttttttcaacaaatcagatgtttagaggcattttttattgcctccaagcaattccgacatcgaaaaaaaatcgaacattgaatagagtctgtttttaaaaagcacttaattgcgtccggcggtgctggagaaatagcccactaattaataatgcaaataacaaaaaatatataggtatataaaataaataatgttaggataataatttagccggatatcctgtttttatgacattaaaatttgtcatagttcgtcatctctgtttcttttttttgcgtaaatctttgcatatttaaaaaagtttcaattaatttttattcacaatttatcatttgttttcaactgctcaaaaattttattaattctctaattaaggctttaattcggtttttaaacctattaatgcatttgttttaatgtcaccataattttctttcaaaaagaataagttttatttgatatacttttccaatcgtttaatacatcgatttggtcaaatataatttaatcaaaattccaaattttttgcccagcaaatcccatcgccaccaccgaaattatagcctaaaaacacattcttttagttgcttaaaatg

SEQ ID NO: 99802 - DNA, 410 bp, Heterodera glycines
ctagagtcacttaaaaattgggcatccaaattctttttttccccaaattttgaccgtctctgccccatgttcccgaaaagtttttaaaaagcgcgccacaaaacgggttaaccgaaaaactatcgatgattttggccggaccccactcgcaaaattggaaaattttccgaaaattttcaccttttttggaggggaatttttcaaaaaacttagtaatttatcataaaattttgagaaaatcgttagaaaattttcaatttttttttttgttttgagatttgtttaggtatgtaaaaaaatttcggggttaacgaaactggggggggggtgaacttatcccgatctacatccgcacaaacaattgcgccccatcttaaaaaaaaatgttcctcatccatcttccagggatg

SEQ ID NO: 99803 - DNA, 157 bp, Heterodera glycines
agtttctagaggccatcaattatctgaacggaccttttctgcccaaccgtaattcatgataatgatttattctaatatatatcgtgaggggttgaaaatatgattttttattttttttttaaatggatttccaattttagccaaaaatgtgctgatg

SEQ ID NO: 99804 - DNA, 78 bp, Heterodera glycines
aaaatttccttaaaaaccccttaataatacagatagataacataaatgaaatgcattcattttagaaaatacgcgatg

SEQ ID NO: 99805 - DNA, 255 bp, Heterodera glycines
ggtaaccgaagtcccgagaatggaactcattcatgtgccatgtttgtcccggtgccaagcccttccgtatttgccatcatttcttccaaccaatgcttccatttttcgtcatccgaccgttgaatttgccgcgtcccttcccattttcttcgcttttttccggcgttcatttgaaattgaaatttttaatttatttaatttaccattttaagattgattatcccactcgtaattattcattgttctgtcaaaatg

SEQ ID NO: 99806 - DNA, 367 bp, Heterodera glycines
aataataataataatgtgtttttaaatttatttaatctgtttttgaaaacttgaaaaaacatcggtcacttgaaaaaataaattctaaaatttcgtccaggaaaatccaggtttttcctgttttgcctggagttttattccgtattattcatcggttgggtcccctttttggaagaaaaattctttttatatttatgcttgtttagtatgatagttaattttttatcttaaaaattttctttgcaaaaaatgaagggttttttctaaatataattatgtgatagtacaaattttaattattataataaatctatacattgaacttatttattttttaatttacattttttttatatttatagaaatg

SEQ ID NO: 99807 - DNA, 189 bp, Heterodera glycines
tgggttccgccgccttctatttttagtaattaattataaaaaatatttcttattaaaaattttatttttagctacagcggtgtaagagtaaaggtctttttggtaacttaaataaattaatgtttaaaaatttattcaattaaaaaaaacaattaaaaggtacttctcaatccttgcaggactgaaatg

SEQ ID NO: 99808 - DNA, 1003 bp, Heterodera glycines
ataagtgtttaatcttacatataaaagccaaaactatatgaataatttaagcttttaaaatcaaatatgaccgaattccataaaattattagccaaaatactcacaaaatttctatataatatgtagacaaaagtctcttttaaattaaagaccgaacttttgagaatttgggattgggatcatgcagtcttaaaagtgaaaaagtcaacgctaatgatgggttcatttttaagactcgaaaaaatgataaaacctaaaaacaaagccaataaagaagttagataaattaaaaaaatataatgtgattatctggaaatacgaagaagcactcgctgctttaaagtttaaacaattatgtttaaccaatcttcttgaaaaaaatctatattatatttaccctttttatatacagggtaacaaataaaacttcctataatttaattactaaatatagtcaaattttaaaaataattataaatatatgataacaaaaaaatgaaatctactaattcgaaaaaacttaaacaaattaaaaagtttaaaaatgaatttgtgataagaatatgctcaaaaatattatatattacataaaaattaaattcacaaagattaacatattcaacatgtaaaatctcaataaatatttatccggatgaaatggtaaactcccatgaatttctaagtcgaacaaaaattccaatggagagtgtctttcttgtcttccaagggaaaagtgaaataaagtcactttgggtacaattatttattgtgaggcacagagacggaacatgattataagcgatcatcgatcactttgtgttatctttttcccgcccctttcgcttcctttttcccgttcccccgttctcgaaaaagtcagttgagtggggataggcagtcgagagcgatggagcgagatgggctttttgcgattggatttcaactgtttttatcggctaataaatgatgttgtgttttactctttctcagcatttttccatg

SEQ ID NO: 99809 - DNA, 65 bp, Heterodera glycines
aaaaaagcaattaattagcaccaaatccaacacaattcacgttttcattaattttaggcttcatg

SEQ ID NO: 99810 - DNA, 500 bp, Heterodera glycines
gttacccgatcagggacttttggtgccctttatggttgtttagtaggctccggcggcaaatgactgataaaatttggtagtttttacaccgttccggaggccaggcgagtaccaaatcggatattaaataataaaataatttggttgatgattaaatttataaattaatatattaaaataattaacttaattattcgaataatttttccggactgaaacggccattccctccaaattgcgcacattcattcttttttcgcttcgcccacacttattcttttttcacttcttcatagcaccattttgttgcatttacattcagattctctctttttcccctccaatgcgtttcgagcggcggaaacagcgaaactgacaacgccgcttcaatttcacaacagcagcagcagaacttttttccgcttggccaagtaatttttccgattttcttttgctaccgtaatccaccaatcgtttagcaattaccgtctttcgcgatg

SEQ ID NO: 99811 - DNA, 604 bp, Heterodera glycines
cgggcaaagaaccggggcaaagccaaagggggataaatttgaggagagaaataagcaaaggaaatgggagaggaaaaggttgccaaaaaagattaaaacaaatgataaaggaaaagcaaagaaaaattgggacgataaaacggaagaaaaggcaaaagaaaggacaaatggtcaaattgggagaagataagagacggaagtgataagggacgatgattcatcagcagaaagaaccaaaaaacaaaacaaaagcctacacaaaactgttggtgaagtgaagcggtgaatttgggcaaagctttcaaagggacgagaaaattttgaaggatttgccgcggcgaaaagagacgccgactccgttgggaagtgagcagcggaatttcgggaggaagaagccatccgacaagcaatcgcagggggaaaaagccaatcagagggaccatctgctcaatggaccaaaaaagagaacgccaatggcgccgaaaataatccccggaaggcatatactcaattttgatctaaacactcgaataattaggtaacaattaacaaattaatcaaccaaacaactcacgccgcctctttcgcacattctctgcgcatg

SEQ ID NO: 99812 - DNA, 134 bp, Heterodera glycines
tttttacaatgttataaaaatgtgtgggttcttaggtttcatttgtatttacctgttttttatttaaattatcacggaaaaaaacatttttagcccggaaaatcattattaaaacggaaccaaaagaagaaatg

SEQ ID NO: 99813 - DNA, 161 bp, Heterodera glycines
aaaaaaaattttcgatgataggtatcccaaaatttcacatctgttcaatcttttgcacaatatcatgtcagattttattacatctttgttggttggaaaatgaattttcgaattttgtttgaatttgtagccagacaaatgagggcagaacactgacaatg

SEQ ID NO: 99814 - DNA, 1003 bp, Heterodera glycines
ctccgttgtaactttttgactgttttgcttgattttgctgttattttttgtatttctctttacatatttaatatgtaattaaatatttatctaccgttaataaggataatttactttgtgatttataaagaacatttgattaatgatcagtgatcaatgactacggtttaagttaagacactttgatttatatttgaatttattggcattttatttattacgccaatgatttattgacacttttctcttgttccgccatttgtgagtttgtgctctttgtaaagctcatcagaaatttagtttatgacatccaatttttcatcattttctacgcggattggatacgaatttgtggtcaaaggcattaatcgcgagtggtttcgacataaattgccaactgtattcatgcttttttcatttcgatggtcatcttttgcttaaggacgacattcccatcccacccaaagagatcccggaccaagactcggaactcaactatttgttggaggcagacgaaagccgttggcaggaccaaagaccgcccaatttctgtttcgaacaccgacacgcggtgaaaaaaaaatagaagaattaccacaaacaaagacaaaacgacggattgcttaacaatggaattggtttattcagtgaccgatggatttacggcgacaatttattcttcagcgatgggatcttttcctgacgacaattgcaacggaagagtcaaatcaaacggaaagttagtgacccaaaagggaaccaaatttggcaaattgggtttgaaaatgataatttattatggtttggagtaaaacaaaaaagactgccaatttcaaaaattaaacgcataaattgactgaaaatgagtcactttttggctgtcccttttggacgttggcatttctttcattttgcctttattttcccttttactcctttagcgtcccccgtcccttttccaattgactccgccactttggaccgcttaaaagaagaaaaaatg

SEQ ID NO: 99815 - DNA, 110 bp, Heterodera glycines
  unsure (1)..(110): unsure at all n locations
caaacgaacgaagcgacagatcgtgnaaaaatttccaacggatgggcggcggcgccaattggaggcctatccaggacgtcaaaatcacttggatttcactacgccaaatg

SEQ ID NO: 99816 - DNA, 76 bp, Heterodera glycines
taattaataatacaggtctcaactgctgtcaagtgttctacaatgttgacacgaatgtgtcgctggaatcgtcatg

SEQ ID NO: 99817 - DNA, 104 bp, Heterodera glycines
ggtgattgtggcttttcagcagggcacgcacatccatcggctattatcaattaaatttttaaaataaatatttaaaattttttaaagcaatttaaccaccaatg

SEQ ID NO: 99818 - DNA, 143 bp, Heterodera glycines
agtgcgcggatgtctgttccacctcgtccaaaattttcacaaaaaaatttcagaatttgggcttaaacaggttgaattcatgatcatggttgacagaataatttttttagcgttatcaaagtgacccaacattcgccgaaatg

SEQ ID NO: 99819 - DNA, 136 bp, Heterodera glycines
aattcaggcatacggattccgcgtcaaattggcgaaatgcaaatttttccgtgatcaaatcaaatatctcggacagattatcgataaaaacggacgccgaccggatccagcaaaaatttatgcaattagtcaaatg

SEQ ID NO: 99820 - DNA, 775 bp, Heterodera glycines
cttgtttgtttaaattcatttttcatttttatgaattcttgtacaatttcaatcttttctttatctgattttgacttgtagcttttttgtattttttgattaagcccaaattctttgatccatttttgaatataatttcgatttgtccccaattttttcgctattttcgtattaattttattccattcttttgttgaatattttcttcctttttgctttattttttctttaattttataatattttccaattatttctcgttttttgagttcatttcgtttttcttcttctttttcttgccatttttccccaaatatttcatcaaatgatttctgctgaagttttttcttttctgattcaattggaataattagggcaatcaaaaataaaaataataaaatacagaatttcattttcaagattttattttatttttcttcaattaaatggcaattcattttttgaggcatttaaatgattttttttctgattaaaatctgacgtaattcataattctactgatttaacgaataaaataaggaaatcctgtttaatttcaaagaaataataataataattttatcttaatgacaaaataattgccaattggtaaattaatgattaaataaaattttattactttctactggagctcattcgaaaataataaacatattttcaataaaaataaaataaattcacaatgtaaagagattttagaaaaattaaagagattttatgaaatttcattatttcagaaaattggtgtaaaatg

SEQ ID NO: 99821 - DNA, 399 bp, Heterodera glycines
ggtgcgcatatggcgacgggacaaaatatcgccgcagaaattaaaaaaaaattattctgaaaaagtttcagttttttttaaattttcttataagaaatttatagctttttgtttctaagtttaaaaatttttcttttaaatttctacggcgatattgtctcggcgatattttggggtgcacccgcgcatattccccgcgctttaattacctatttcaattggtgctaatcgtttcgttaaaatccggcattttagcgaatttttcgacaaaacttggcataactttacttaagggcaatcaaattttacattcttggcaccattcgatagccagctgtttcactattatcctataaaagaaaaaaaaattttggtcaattttagaaaaagttatatatg

SEQ ID NO: 99822 - DNA, 293 bp, Heterodera glycines
ttgctgttgttgtcgctgttgtcgggctggctttgtgggtgcttgatgtgtgatcgttgagagcgttgcttgaagtgttgctgctgctgagtgaggagaatgtgcaaaatccacctccttatatacaaaattcgggtgcaaaaattcatgcagcaaaaaaaagtgtataaaaggcgacggttttcttcacttttcaccagtgccagccagccttcaactcaacgcaacatcaacaccagtgcgcgccaagctcgtctacacatttcgtcgcgacaactcatcacttcatcatg

SEQ ID NO: 99823 - DNA, 221 bp, Heterodera glycines
attcactatttttcacgtgaaaatcactaattgaaaatataattattacatcagaatcatttatgtttacataaattatttaagctttattttttataaaaattcatttttttctcattttttgcatttagatgaaatattatacataagaatttttgtaacaaaaattaaaaatgtaaaatctttcatttaatattttagaataaaatttttccgaaatg

SEQ ID NO: 99824 - DNA, 122 bp, Heterodera glycines
ggttggttttgtcaactttgatcagtatatacatgaaaacatttccttagaaaaagttgtacgtttttggcggagtgattaatcagaaaaaaacgaccaacgaattttgggagttcgacatg

SEQ ID NO: 99825 - DNA, 77 bp, Heterodera glycines
  unsure (1)..(77): unsure at all n locations
gtcccgtttgntgtcaataacttgggttaacacagcccgttgctgtagcccgtcacaaatgcaacaaacaaacaatg

SEQ ID NO: 99826 - DNA, 498 bp, Heterodera glycines
aatttaaaatggtttaaacattttaaatattatttttaaataatatatcatttcaaaatttttttttttattcttgaattttcaaactttgtctaaaattagcagcaaaactttctcaattatgccattcattcatttttatgtccttcaaagttttggccgtgtgcctccttttcattgccaaattccacggcaaaaagtcagttgcgatcgcccgcggccacaaatgattgatcatgggacaaaaagcataagccaacgaacaaaaatagggccaaaaactttgagtgggaagcgtgtggcaatccgtcagttgtgttcgtcaatttgtcagtgctttgaacacaaaaaattcatttgccagcgaatgattctttggtcaaatttcacttgtgaaatatttatactcactgataattgccaaaagcttcaaaagaaaagcattttaaacacttaaattaaataaatattttttttagaaaaactaaagaaataatg

SEQ ID NO: 99827 - DNA, 1003 bp, Heterodera glycines
aagaatgtataagacttacgtcagacctcaattagagtatgctgttgaaatttggaaccctaacttaaaaaaaagatatagaacgaatagaaaaagtccagaaatttttcacgagaaaagcctttaaaaagtgcggacttttacatagatcatattcagaaagacttgaaatctgtcagcttatagaattagccaaacgaagaaatattgctgacttaactatcgcttttaaaattatgaagggttttacgagtcttgatgctagtaaactttttactttttctgatcgatcctctcgtaggccattacttttgagaatgcggcgcacaaccgcaaaaagcaagaataatttttttaacctataggtaagaattggaataatttaccaattgttccaattcagacagttgtgactctcgcctctcgccaaaactctcgctctcgtcttttctgagacaagtcacatccctgttacagggcactgaaaaaatgcacacatttaatgaaaattaataaataattttttgacaactattctcctgctgattgcatcaaaatttctgacttatgtacataaataagtaagtgttttggtgaatgtcatttccaaatatatttctcatcaatttcactcaaattcgaaataaattatttaaaaatataaaaaaaaacaattttattattttataactctgctcaccttatgatgaaattaaactcggcgtttgaccttccaaataatgatgcgttgtgtttattggaattttttatttacccaattggcagcggcagaagggaagtgtttacctcgttatttttgtttttatttgccacatttgtcttcattcgcttttttctctttaattttctaacaattgaattgctttttttccataatgaatttaaatttgattaattacactaattactgccattagttaatctatgccttttattattggcaatttcagtcacaaagcaattatttgattttccaaaaatg

SEQ ID NO: 99828 - DNA, 687 bp, Heterodera glycines
  unsure (1)..(687): unsure at all n locations
agttttttgaaagttatggcatttttgcatttctgaaaatgaaagaaattactgaaattttacactaatagagtaatccaagaattatcataatgataccaaaattattgattctagttccgtgcattttctatgtccatcgtattntagccgtcncaataactaagaagaaacatgttttattgcccggtactcagtttttactaaaaatttcggattgttaaacctaagatgttatcacaactcgtacacaagcaacttatacaatggcttacttagactaggctaagctttagacttaggcctaagcataggcttaatttttaaattttttttaattgtacgagtagccatttcaaaaaacaaactgtttttgggacgcgtaaaatgttatgggacgcgtaaaatgtcttaggaagcgtaaaaccgactagaaccaaattattgaatttggctgagttatggcgagaatttctcaaaaatctgtaatattggcactttttacgaatcgatcccgcctagcatatgggaatttatttatttttaaaaatgttttggctcttaatgaaaaattttcgcagtatttttttcaaatttaaaatccatttttattagtttcgtggtctcaatgaagaggaatcggctgcgctccaactttgtatgtatgggctgaaacatcaggcgatg

SEQ ID NO: 99829 - DNA, 501 bp, Heterodera glycines
cttaaaaaaattgcaagaataattaagtccaaaaaagatatctcgtgctttatcattgcaatattcataatcttgacacatattaactttaaatgtataattattaattataaaataggaaatatttaacagtagaaactgcattaaaaataaaggtgtataaatttatggttatgttattcggcaatacccatatggaataatctcccgaatccgttccttttgattctttttttaaacggggcttatattcatatggtaattcggggagatagaatcatactgtctcgcgacggtagctaatgtttccacataggagagatataccatcaaagtaaagcgataatgtatgataataagatattatcgttatcctctatggttgataagcataagaaaattttcgcctaaatattggatctttgcataaaattaaaaggttttaaaactatattaaaaaaaacaatattccaactttgttttttcaaaatttaaaaaatg

SEQ ID NO: 99830 - DNA, 97 bp, Heterodera glycines
tcgcatcaaattaatggcagtgccatttgcatgtttaagtgccattgttctgttttgacctgggtcgcgcggacgtctgagcacattgaccacaatg

SEQ ID NO: 99831 - DNA, 179 bp, Heterodera glycines
atgtcacccatcccatcgtgctcaattggactcattctccgcccaatccgtcccaactcggctcttccgtttccgcttcgtccccccttccgtcgtccgttgcgcccgctttgaatttgtcttccctttctccggcatcgacgccctcccgcccattctctcccgccaccccccaaatg

SEQ ID NO: 99832 - DNA, 544 bp, Heterodera glycines
aaaatttaaattttgggaattgaaaataaaataataattaaaaaaaacaattggaggtcagaggaagaaaacaaccgccgattatgaacaattaaaataattactgctgattgactgactgactgatcattaagtgatcgccaactcgtaattaaattaacaacaaattttcctaattatgtttttatcattcaaatcaattaatatcaattaaataataattataataatattagtaatggtcataagatgctgacgaaattaaaactcaattaacaaaataataataattgtaaaaaatatattctatttaaggcgttcataattctcaaaggattaacgcctttcatttctaaattttattttttaaatttaaccttttcagacattaaattgaacctgtttttaattttaccgtaatttacagtaatcacaattacctatttaatttgtttcattatttaccgtattctacaataataataattacctgtttaatttattttctcatttaccgtatttacagtactactccaatcaaatg

SEQ ID NO: 99833 - DNA, 670 bp, Heterodera glycines
aaagctttataatttgattcttaaaagtcccagcctttcacttaacttttcttcttgtgaaatattttctcttcaagataactattgccgacaaaaaagaagtcagacgtttaattgaaaaaacctttaaaaaggttaagtgcggcctgcgctctgtgtggaataaaacagaaagtgtaagcgacaaaatgattattcttaattaaaatttttagctggtgcgcaaattggtccgagtgggatcaatgaacgcagaacaagtgtatcggtcggtgatttttgttaaaaatttttcaaatttttttttcaaattttgtaatattttaaaaaataatttttttttattattattattaaattttctcaattaaataagctaaacattttaataatagcaatttcaaccttttcgaaaatagaatttaaaacatccagaaatttaagcgagattgggaatttgcgtcttccccggccgtaaacgaacaagaataatctgcccaggtgaaaattaaaatatgaataacaagaactgtataggcaagtttatgggtgcatgaaatacagataatttggttgctaaaattctgtcattatttgaaatattttaccagttttagaatgtaagctcgcgacaaattccacaataactttttttaatttttcggacatg

SEQ ID NO: 99834 - DNA, 169 bp, Heterodera glycines
ttttcattcaaagtttttattcgcctcaataatttaaaccggtaatattttattttattttcattcaatcaaatgatttacaaaataattgctctaattcgtatcaaaaaaatttgaatcactaattgagtctgaatctaaatttagtcagataaaacaagcgaaaatg

SEQ ID NO: 99835 - DNA, 649 bp, Heterodera glycines
  unsure (1)..(649): unsure at all n locations
agatttcaaaattatgcgtgcgtttttttacccccgaattttcaagtttttttatatttttctttttaaactgattntaataaacaatttaagctttttcctcctaaacaaattcattaaatatgtagttacgcaaatgctcaaacaaattcaaatataaaattggattttttgaactttttctttgcttattgtcaccaaaatgaaattcatacattagtgtcacacttctttgtgaatgtgatgacattttgtctgtttttttcggacaagaaaattaattttgtcacgcaaacaactaaaaagtcatttacgtcgtgtgtgacattctgcggcaatttgttgacacttttattttgcaatttccgggcaaaaaataaaagaaaaaataaattaaattaaattgggtgggtgagagggacaaaaaatcttttaaataaaaaaaattaatttgttttaaataaaaatgtcagtagagacattttgtcgaaagaccaattcaccactcataattatctgtcactaattagggcgtacactttatgtttgtgtattagtactgatattcatgagttggcacaagcaaaacaaacaattgcctggggcgacttaatcttcctctttcggacatgtatttttgtattttatg

SEQ ID NO: 99836 - DNA, 1000 bp, Heterodera glycines
  unsure (1)..(1000): unsure at all n locations
tcaaaacattaattatcgctaaatatattttaaaatattttatatcatattaaanttgtgtgttatnttctcataatttcctgcttttttttggccacaatcaaactttgnttcgaattcgggccggggtttggaattggccgaaatggacactgggttcgtgatcagtgaccacaaaaaccaagggaacttgtttttatgacattaaaatttacacttacgcattttcctagagccaccaaaagatttatgatgtttaaattcaaaaattcatctccttaaaataacttttcttttacaaaatttttaatttactgttagtttattttaaagaattcttaaaaatggtgaattgactcaaaagtttgccacaattaatcattggaaaaattattttatgcgcgcgtttttagttaattctttgttttttcgtataccaaaatgatgtgtctctcatgaattttgacttcttcttcttttgctaaaagggattttaaaaggatttttaaaatacttatcagtaagtttttggaccaatttaaacatttaaaaaaaaattctttaaaataaacttttttaaaaattatttaaaataaaccaaactgtaatttattttatccctataagggtgccaaatatcccacattatcccaaaaaggaagaaaaacaaaaacaaaatttttatatgaatttaacgcatgaattttgttaaataatcggacaaaagttggtggtaaaaacggaatttcgtggtcattttcttcttctacggatctaccactaacttcgtagtcatttgaccaggtttttttctacgccttttagaattaggcgacgagtacaaatttttaatttctacaaagaaatttttatggatttatttttaagaatttttagatcaattcttgggggatgtattttcatttttattgcatttttgttaaggaattttaaataaaaatttaaatcaaaaatacatgtcagatgaaatttacatatg

SEQ ID NO: 99837 - DNA, 361 bp, Heterodera glycines
ctttgaaaaggtaacaaattttttgaactttgaatctttcctataatttaataaaaaagatgaataaatttagaaataactctttttagtttttaaattttcggaagggggggggggggttagttgttgaaaaattaatgaaacttgttaaggaattagtgtaaaattttgaaaatttcctaatttctcacaattttatggggatgaggcgcaggtggggttccatttatagtgatgctctctgcgcgggatcggtgtctcaacataatcaatactgatctgataaactgataaaaaatgattgcagaacgaatgtaaaaagcggcatttggcggtgtctggctcaaagcagcagctgatg

SEQ ID NO: 99838 - DNA, 226 bp, Heterodera glycines
attttacgcgtcccaggacattttacgcgtcccataacattttacgcgtcacatgacattttacgcgtcgcataacatagtacgcgtcccatgacattttacgcgtcacataacattttacgcgtcccataacatattacgcgtcccataacattttacgcgtcccatgacattttacgcgtcccataacattttacgcgtcccatgacattttacgcgtcccatg

SEQ ID NO: 99839 - DNA, 763 bp, Heterodera glycines
cctgaaaatcctcgtggtatttgtaatgtatcataaacaacctcaagacctaaaacatggattaattggtgccaggataaacggtagttcattaattagaattaccgccctggttaacagcaagaaaaaagtatatagcagtagaaaaaatgaaagaaagtgcatgacgcatccttttatatgccaccctgccggaatctaggtcaagtgttactatttttagaattacaagccatttttaaatttcccgccaattttttgaatttgaatttcccgccaatttttgaatttgaatataacgcgaagacttttcgtttcaataaacttttggcttcaagtatatattgtggcgttttgccctgttttgcgtattttattgcgaatgttcaccggactacagtatccctcgcagtggtgacgtcatcatctttccagcatatagtggataatttccttttgcatgcaagtgtttgcgtggcagagtggtagtgtgttggattggtggcagaccaaaagttcgagcccgctagtctgcggcagaatttttcgaataaaaaattttaaaaaataaataattttcagagaaaaattttacaaaaaaagtcgcgcacccctgcaataggttttggtttcagaaaaaaagtcgcgcacccctgcaataggtttgggttttcaaaaaaagtcgcgcaataggtttgggtttcagaaaaaaagtcgcgcaataggttttggttttagtactgaaaattttggcgctcagatg

SEQ ID NO: 99840 - DNA, 401 bp, Heterodera glycines
tcccccccctttaccttattttttgaaaattttgaccttaaaaaggtaaaaattagtcctttaaaggatccttgttttttttttgctctccggcgctgaaattttttaaatttgaaatttttttttggcccgatggcaaaaaaattttttcgggttccgccctccgacttggtcagtgctgttcaatgcctttggcaaatgtcaacaatcctttccaactaactaattgcaccgaccaactcaaaatgctctgtgaattcttcttgaccaaattattaatcacggcttttaaaattcacaattattttgtcaatgcttttccttctagtaaattccctccttaaaaattgtaattttaaatggcttaaaagccacaaatccggggacacaattaattaatg

SEQ ID NO: 99841 - DNA, 216 bp, Heterodera glycines
acatggcaaaggccaatgtgacaaaaggccaaaatggaattggtcaacgggcaatgggacaaaaggccaaaatgcaatggatcaacggccaatgggacaaaatacaatggaaacggccaatgggacaaaaggccaaaatgaaatggatcaacggccaataggacaaaaggccaaaatgcaatggatcaacggccaatgggacaaaaggccaaaatg

SEQ ID NO: 99842 - DNA, 190 bp, Heterodera glycines
tttgcttttcggtgcccgcatattaatcagaacaaatcccttaaacttgcgtccaattgtctgtttttgtgaccgcattttctattccgttcagtttattactaataaatgcccagaattatttttctgaaaaatatttcttagccaaaaaaaaaaatttttaatttaaattgggatcccggcaaagatg

SEQ ID NO: 99843 - DNA, 74 bp, Heterodera glycines
tcgccgaattcttgcgagaacggaggcgcgaattggacgaattggagaggcaaaagcagcagttggaaaaaatg

SEQ ID NO: 99844 - DNA, 836 bp, Heterodera glycines
  unsure (1)..(836): unsure at all n locations
agtcccccccgaacccgatgcgcncagatttatggggagaccgatcgcttncggnaatagcttccctatagcctgtactntaattctgcgttggatttttgctccccataattgtttgagtaccccaaacgggacacttgaaaaaatcgatttttttgttttcggggcagtccccccgagccgatgcgcccagatttatggggagaccgaatccttccggaatagcttccctatagcctgtactttaattctgcgttggatttttgctccccataattgtttgagtaccccaaacggacacttgaaaaaatcgatttttttgttttcggggcagtccccccgagccgatgcgcccagatttatggggagaccgaatccttccggaatagcttccctatagcctgtactttaattctgcgttggatttttgctccccataattgtttgagtaccccaaacggacacttgaaaaaatcgatttttttgttttcggggcagtccccccgaaccgatgcgcccagatttatggggagaccgaatccttcgggaatagcttccctatagcctgtactttaattctgcgttggatttttgctccccataattgtttgagtaccccaaacggacacttgaaaaaatcgatttttttgtttcataaatatttttttcagaaagtgctctaaagcgcaccaaattttatttacaacttaattttagcactctgatgctttagtatcaaaaaggaagatggagaaaaaattttttaaaaaatttttccttatattttggttatatcgttttgcttttggtggggtgcttggaacagtggaatcatg

SEQ ID NO: 99845 - DNA, 453 bp, Heterodera glycines
tttaatgtttcagggattttataaatatttgctatatgacttggcttatatatttcgattgtgaggattttttactggaatttttggaaatgtccaaaaaaaattcaaaatttcgcaattttttgtacattattttttatattatatatttgagattttttgaaaattattcaataaattttttagttttcaaatgcgtcccaaatatcgattcctttttaaaaaatggctatcaaaaatcaatatttaaaaagcaccaaaaacgttattttagaaaatttagggttttttatggcattttttttgcttctttacgcttttctaataattttgactaaatatcaccattttttgaaaatatgttgatattttttgtaaaattattgcattttctgattttttaatttgtataaaatcgatttttctaaaaattttaaacaaaagcaaattatg

SEQ ID NO: 99846 - DNA, 538 bp, Heterodera glycines
gtttttgtccatgtttcgtccatattttgcgattttttcgtatatattataatccatattttggatttttttttgtccatgtaaatccaggccctactataatatcaatctattcctcaataatttacagaccccgagaattttggttttttcaagcagtttttggtttgaggctttgagtaaaattataaaaaataaaaatttaaatgccatttgattgccgaagtaattcattatacgaattattttgtaaaataatgaaaaaataattggaaatttgcatttttaagctcacaaaaattaccaacaaaatcaataaaagtaattaaaaagtgctaagttcctctttaaactaataaaatttttcgttcatttttagaaaaaaaaattaataataatgataaacgcataaattattaaggaatatgaactaattttttatttaaaattttggttaattgatttggtttatttttaaaattgattttcgtttaattttctattaaaaatttgcagaattatttccttttaagaaatg

SEQ ID NO: 99847 - DNA, 458 bp, Heterodera glycines
ccttaaagacatattttttgaagattttgggtgaaaaaatttttacactcaaaaatcctgtccaccccctttggtcccgaattccaaaatcacttttatttttataacttttttcaaaaaagtgataaaaatgccaaataaaatttatataatagagcaaaaaattgcggattttatcaatatttttttataccttagcactttgtttggagtgagttattaatttttatgtgaaaaattgaaatcttcaagtttttcaggaataacttttattgtttgcaagatagaaatcccaaataaatctcataaaattctccctatttttctctattttttaaactttaaatggactgaattggacctttttgatgggagttatgaattttcaaaatgtagcttaaattttcaagggccaaaaaattctaaaatttcaaaaaattttaaaaaattccaaaatg

SEQ ID NO: 99848 - DNA, 857 bp, Heterodera glycines
ggtgccatggaaaaggcggcggcactttttataaatttaaaaaatttggcaaaaaaaaaaatttaatttggaaaatttggccaaaaaatttaatatttagtgtgcaatcaaaaattgccaatgaggaagagtgcctaattagtataaattaattaatatgaaaaaattaagcaaaagtagaaaagggagaaaaatggccgtacgaaatgccaaaattggaaaaaataaattaaatgccaaacaatgcgaaaaaaataaatttaaatgccaaaattggataaaaaatatatttaaatgccaaacaatggggaaaaataaattttaaatgcacaatttgattcactggacaaatggtgccattgcatccaacggagggggagaaaggccattattattcataggactaaagccttcttgacaagcccagaaaatcccccggggtgaggagcaaataaatattaaatgcaaaaacaaaatacgaaaaaaaaatattttaaaatgcatttttatgaaattaaaatttatttgatgtaaatttttgattattattgtttataaaatatatttaaagcataaaatttaaaaaaaaatgtaaatttaatgaaataaaattgaaaaaataaaaactatattaaatattaataaaataaatttttcaatatttttcgaaaatatttttcaacaaaaatttttttaataataaatttaattaaattccttcaacaaatagaatatttatttttgggacctcggatttgtagggatccagttttttttttacacatttatatcgatctaaaaatcaaaaatatattttttaataatttatttattttaagataaagaaaaaaaaaatg

SEQ ID NO: 99849 - DNA, 718 bp, Heterodera glycines
tttttaaattgctaaagaaataagaatttaaacaaatgtatatattttctttaaataaaaatagaaaaaaattcattttataaaaaataatcttacaagaaatcgtctcgaaaaataatccaatagtcaaattacggatcaaaattgcggataaatcccaaaaatccgcaacccgcaatccgcaattacgggggtccaaaaaccccgcaatttccgtaatccgcaatccgcaatccgcaattgcgtgcagccctgatactgtagcaccttaggctcaagtgatggcgatgttttttaaaattttaaatgtggagggattattttaattccctttttctcaattttagatttaaaatatttttgtctcaacttttttcttcaatatagtagtatcatatagaacatttacaaaatttttatccatcattttgatctaactattttcacacttttacgaatttacatagatattttatgtgggcaaatttttttcggtattacttagggtgtaacataagtttccgcacaactttttttaaagaatttttttatgaatataaatttaaaaaaccacaatcatgatccgaaatatctgacattattattgagaatgagtttgctatttatcgggcaagggataaatcccattagaaaagtatttaaggagttagagttgataatgtaaaaatggtcattttcgaggtatgtatttttgatg

SEQ ID NO: 99850 - DNA, 952 bp, Heterodera glycines
  unsure (1)..(952): unsure at all n locations
agtcatttatccaggtcggcttcatcatatcacattatcatttttcatttggccctccatcccccgggcaaaaacaattttaaggncggcacaaacaattgttatcccccaccgccgcccgctttgttgcccccctccgccgacggggcgttttgtcgtccgccgtcgtcggttgaatggaggaatttttgaagaaaaaattcatcatcgtcatcaccttccttcagcattttggatatatagtataaaaaataaaagccagaaaatcaatcaaaaggattaattacctatggaataatatgtaataaaaaaaaactggtgctaattaattgatgcattaaaaagcggcattctttaaaaaaaagaaatgaattaattcgtggaaaagagaaaaaaatgttaaaaaaagataattatttgacattcaccacattcattaattaggactgattaataaatttccaaaaaaaaacaacaattcctgtgaaattggaaaattttattagcaaaatcttaaataaaatgggaatgaggcaagaaaaacaaataaaaatagaacaaatataaattaattatatgtgccaataaaaaataaaaatttattgtcaaaattctacgaaaaaattaacaaaattaaaagatacatctgtgatatttataaagattttaaaataacaaactcataacaaaaatttatttgattctcttcaaaattgataaaattaaagcattttcattaaaacttttaaaatattttattttaaatctacaaaatattttaatattcatttacagaaattgtccaaatttgataaattaaaattaattacattttcacaaaaattattatgcaattttaaattaaaaaatatatttaatattattttataaaaatggaccaaatttaaactatagaataatttttattaaattttaaaacttttgcagaatg

SEQ ID NO: 99851 - DNA, 65 bp, Heterodera glycines
ttttatttattttttatggaatgctcattttatttatatcttttcattttcatagatttgaaatg

SEQ ID NO: 99852 - DNA, 721 bp, Heterodera glycines
ttaaatataaataatattaataaataaactaaataattcaattattaattaattttgattattattgttacaatatgtacaagattttgtgcgtacaaattattaatgtgtatgtttatttgttctctctccattcttgaagagtcgtcgattcttatcgttttgtcgtccattcaaatcgtcgccaattttatgagtttgattgaacttctgttattcacaccagcacacaaatccatttggaaaataatttaaaaacaattttttaacatttaatttaatttaaaataattttttttttaatttcaaaattatttacttttaatttttaaattttaatagaaatttgaatttttaactttgaatgaatgaactttcccttttcatatcataaaaaattcttttaaatttttttatttttgctctttatttaattattaattaattttaattccgtttttaatgtttgttctttttaagcattttcgtaaatatgtctattgaatcattttcatctgattttcaacaacagaagaaggtggtggacgaaaatgtgccaaaattggaacgaccattaaaggcattgttaatttttaaaactaattaaataaaattatattataattatagtttcagcatttgtttatttttgattaatccaaatgaattaaaattttaaaaaatattaataatcaaaaattttagcatattctatcgcatg

SEQ ID NO: 99853 - DNA, 469 bp, Heterodera glycines
ataatttgagagatgtccgaccgttttatttgatgataattttgtttgctgttctgatgaccattttggcgatgaatattaaaaataggaatttgagttgggcggataaaaaaaaaaaataataataataaatggcatttcattgtttcgggaaaactgagaatgttttgcgggattgacattggcaccaaaaaactctcacaaaaaagaaaattaaataaatgtaagaatcaacaaaaagcatttcttagaaaaaagagagcatcaaatccattttcaattggtgcgataagttcatttccaattgggattatttttcaaacccctcctagactgggggataattggatattgggggattaatggagatttggggataattagagcaaatacggtagtgagatttggccatgcctcaaatataattagtagggagtccaaaaatatggatataaaattgcgaaatatg

SEQ ID NO: 99854 - DNA, 486 bp, Heterodera glycines
acttggcttaaataagtccagacttatctatgtcaaggacgtccttggaaatggacccacttttctgaaaataaaacttctggccaaaaattacggcttttattcttttacatcctgggaatgcattcaagaatgacatgttttgttacacttgccccaaggacttttttaggcgtggtcgacctctaagggcagtccttgaaatcggacaatttatcgctaattataccgcttttgttagacatactttttctgacaaaaatagcgtcctaacacagcaaattcatcaaaatatagtatcaataaagcattttcgacaggacatataccattgggttacggtattattcaaaattttatttcaattagggcgagggaatggcggggggggggggggtgtcaatttcttatagtctactaattgcattgctctaattaggctaattacccacttataactaaagggttgcgagtgttgtgagcatg

SEQ ID NO: 99855 - DNA, 793 bp, Heterodera glycines
tccgtcgcgcttccgcccgcggtgcaatgtcgcaaattttttgccgaccttcgcccagtccgtgtttgttggttttgtggtgttagagaaaatgacatataaattttttttgcattttcatttgtttatgtgtcggccctttttttctctgtctgtgttttctcttctcatgcaacgagaagagactacggtattgtcagtttgccctccattttgaattctttcttgtcattcattcctcaaccacacttgcagaggctgtaagtatcttagctagagttggcaaaattgaggcttggattttgtaaatgtttttccagttttaagtggtccgattttgggcctaattgtaaacatgagagtatcatgcattcttccactaagtaaattggcgattatgaccacaattcacctttcccatgacctaattgcacacaaagtgcccattaatggggttggggttgagaaatatcagtttttcttccataaattagtcttctccacaaaatggtacaaaaaaagaaaatcctacccctcgaattgctttttgaattgaccaacgcactccgtttcgatgtccggtgggcgtctgtccgagtttcggaaatttttgaccactttatgctcaaaaaacaattcgcctggattcgggttgaattggcttcctgggaaacccttcgccagatggtttatataatccaagctttaaaccatcaaaattttgatttgatatgattgaatttagagggctgactttggcagagctaagggccagtttaaacgtgctgtcatg

SEQ ID NO: 99856 - DNA, 471 bp, Heterodera glycines
gtaccggtaaaaaccggtaattttagaacataaaaatttttggacaaaattttccaaatacaaaatttttattcagttttcgcgtgagtacctgttttttagcattagaattgttcagaagtatatgtatattcaggttgaccaagttttttttttcaaattcaggacatacagtcatggtcataagtgttgtcccatcatgctttgaaaaaaataatgcgtataaaattgtcattttccaatttcaacagataagtagcataccattggatagcattttttatggactttccaatgataccatatttgcatttgtgacataaacatttatttgatttattttaccatattcacaatttgatcaaaatataggtggtcaaaagtgttgtcccatttcatttttaaaatattgcttctctggatcaacattaaaaaaatctaaaaaaattcaggtaagcataactttggatg

SEQ ID NO: 99857 - DNA, 589 bp, Heterodera glycines
ttaatgggtacatttttggatttagtcaatttttgtaacaaagtgcacttaaatggtataattagtttgaaaacaatttctcttggaaaattgcgtggttggtagcggtctcggtcgtgaatagaggtaccggtacctgccttttgtggtcgcggtaagtaccgctcgcaatcttgtcacagttttcggtcctgtccaactcaaatggacagcgagtaaacatataaaaaatcatattaatagacgcatagatagtcagattctagatcagcgctcaagctacacgagaaaaaatgcttttactttgccgaaaattatgatatttttgcaggcgcataaataatataacaactgctttaactgagaaaatactatgaatggacagttcccctcccccccccccccccacgttctttcatgaccctcaatagtgacacacttagtataaacaaattaaacttattttaacttatctttcaatctttcaataattattattaggttgtcattggatgatttaacacgtctgttttcaaaagtgcacatttgtttcctggacgcgcatgcacttgccgaaattagagaaatg

SEQ ID NO: 99858 - DNA, 213 bp, Heterodera glycines
aaaaaatttgtattttttaatgcgattggtaaacagaaatttgtaaaaaaaaatgaccaattgattaagttctggggtttttaggatgcttaacatgaaagaaaaaaggttggaatattttctaaaattaaaattttaattaaaataatggtaaagaaaatgtgagggaatattctatccaagtggggaattgaacccaggcgaaaaattatg

SEQ ID NO: 99859 - DNA, 61 bp, Heterodera glycines
ggtcatcaaatgccttttttattttgttatttttttttgtttagctgaccaatacttcatg

SEQ ID NO: 99860 - DNA, 83 bp, Heterodera glycines
cgtaagaaaaatgggaatggaaaggaaatgggaaaaagtgccatttattccggagaaattggggggagggcatcaaacgaatg

SEQ ID NO: 99861 - DNA, 98 bp, Heterodera glycines
attattgttatttcatattttgaatcaatcaatcaatttaaaatttaatatttttctttttttgttttattgcattttttagcaaatttcaaattatg

SEQ ID NO: 99862 - DNA, 87 bp, Heterodera glycines
tgccaatttccaagtattgcttaattttgcgttaaatgttagatttttttccaattcctcagcctgaaaatttattttttgacaatg

SEQ ID NO: 99863 - DNA, 217 bp, Heterodera glycines
  unsure (1)..(217): unsure at all n locations
aattttcaatttcatttcttaggggtgcattttcccgatttnattccatttttaatgtaattttccttaaaaacgccaaaaaaggcaccaaaacggcaaaatgccaaaaagccatttaaggcacaaaatcccgaaaaaggcaaaaaaaggcataatgtgtctcgagactccccttttatatgtatgaaatgtacccccctacctttcggttgccatg

SEQ ID NO: 99864 - DNA, 80 bp, Heterodera glycines
  unsure (1)..(80): unsure at all n locations
gctttttcactattttatgnaaaaatccggggaccatttttatnttaatgccctacaaaatgccaatttnagtgaaaatg

SEQ ID NO: 99865 - DNA, 453 bp, Heterodera glycines
tttttgtattgaagacaataaggaattcgtagaataagaaaatgaatgcgtgaattgtaggaagaatgtgaaaaatggtgaaaaacaactccttttatacacatttttgtatcaatttaccgactttccaatttctataattttcaaaaattctataaaagactgaatcattttgaaaaaagcaacattttatttgtttaaaaatctatcaaaaaaattttcgacttatttctttagtcaaaaaagtgttttatgaattttttttaattaacaggctttaaaaaattttctcagataaaaacctttttttttgtgtattaagtttaattaatcaataaagaaaaagccatttaaagattcaattaaaaatggataaaaaacgaaatttaacaaaaaaccaaaattctaaaaggtaaaaaaggcgatttgcttcaagtcgactccaaccgaatg

SEQ ID NO: 99866 - DNA, 306 bp, Heterodera glycines
gtaatcagttttttctaattggtttcttttaaaagcttagaatagacaaatgtgctagaaaaaatatttctaaaaccataatttatttgactaaaaaaatggtttttataaaagcaaattcaaatgtataaaacaggggaaaaatatatttaataatgcagttatttttcaaagtaattaagacaatttcaaatattaatttatgctggtttctttttcaaattattaaaatatttttactgtaataattcaatataataaaatatatttaataatcttttgtaaaatgctttaagccccgcaatg

SEQ ID NO: 99867 - DNA, 347 bp, Heterodera glycines
aaaatgagtcaatgagatcattttggagttcattttgttatttgtccgtcaattagttgttggatttgtaatttagcaaaaataaataattattaaaccgcttaattggaatacattttgcatagacttatttaattgaaaatacgattattaaatcattggcatttattgccggcattttctgcttgcaaattcatttgtcgcccaattttccaacttcgttcgccaacgcattgaaacataatttgttggctaagcccaacaaattaaattggaaaggtaaatggctaatttcgaagaatggcattgtgatagtcagcatttagtagagtaagcaaaaggaaatg

SEQ ID NO: 99868 - DNA, 234 bp, Heterodera glycines
aaatgatcaatagagtcaattaggactactgatcaatgatcacttttgatcagcagtcattaagaattgaacattttgatcagactactcaattaaggactgatcacttccccttgcatgtcttaattgttggaattattcttttttgtttccctcattgtctctgttcactgctgctggactccctgcgggacagaatgcaaatcacttccgtccttttcctcacagattatg

SEQ ID NO: 99869 - DNA, 78 bp, Heterodera glycines
attgcctttccaataaaatcagatttaacaccaagcgaaataaaccaattacaactcaaatattatctaaattatatg

SEQ ID NO: 99870 - DNA, 381 bp, Heterodera glycines
atgaaaagttattaagttttttcaaaaaattatacaaaaatttcaaaaaattttcgtgaggaaaacgataggggggacgaagtgcaccctttatttttatcccggcggcactttgccaaacatgtttcccaaaaaaaagtgtgttttgcctttttgcgtcaatcttggcattctaaattaaaataaaaaatcctcccgtgatcacaggaaaaagatgttaagtccaattggcataactattgtcatgaccgtgccacggcatgccttggtagtaaaattccgagggcgaggaggggggggggggggtaatttgtatatattttattgtttttgcctattttggcacctctaaatttgattttcagcgtgccatagccaatg

SEQ ID NO: 99871 - DNA, 764 bp, Heterodera glycines
cctgtcccccccccccacattccccagttttttgggaaaagcacaccgcgaaaaaaaactattttgggattttcacctcaaaaaaacaagcagatattctgatcataaattaatcttaacaatttttagattggattttttaaatttaaaaattttttaaattaaaaaaaaattttgaaaattacggattacgccaaattacggccttttttgacccccgtcatgacggattacggatggccgtaactgaaaaaatcgccgtaatgacggattacggatggccgtaactgaaaatcagttacgtccagccctggtccaaatccaaccgggactctactgaccacaataaaatcgccacaaaagcctttataaaaaatattttttatttattatgactagggaccggatttgtatggatttccatatttttttaacactcatttcggcctaaaaaccacgtaaatagtatttttagcttaggcttctaggatgcctttttacttccacccccggtccccgacatttttgggcctattccccgccccgacccccgacatgtcgccccccgaggttcccgaccccgactttttgcccccccgagggctcggagcttaaccctaatttaaaaagaaaaatcaaaattcaataatatgccttaataaataatagggctaattgatttcattgtttatttggtaatatttaaaagaaagatagaaaagcaaatttaatattttcaatttcattcatttggacaaaaaatg

SEQ ID NO: 99872 - DNA, 295 bp, Heterodera glycines
agttgggggtgaagccgaccgatgcatttcgggaaaaaactcgttgaattggggacaacccgatcgaatggaaattgatacgaaaacgaccggaatgaagccgatcgtacagaatgggacgaactttgaggatgaagctgatacctagaaagggttcaaaccgatcggatggatttttacaactgattcggtcgggttgaggaccaattggtccattggggattttataaaatatacgattggccatgatcggtcaattcaataacaaaatgcttttcagtccatcgttcgaatg

SEQ ID NO: 99873 - DNA, 274 bp, Heterodera glycines
agtaaacaaacaaagattatattcgtaaatttaattaaatacacggaaaaaataatttactaaaactttgaaagaaattttggaaaattcgctggagtcaatctaaaatatttagtttaccaaaaaagaatctatttgtaccagtgtatttttaatcccgcatttggtgagaaaattgacgggaatgtgtttaaaaagggcggcgtttacgaacgaaggctaaggtggggtcgatgtttgttaatttgcattttcgattgtttgggagtaaatg

SEQ ID NO: 99874 - DNA, 1003 bp, Heterodera glycines
aggccgaaaattacaacacattcgtacgtataccaaacaaaaagtgtgaggaataaaaacaaatgactgctgctgctgttcactgtgttcagctgcaaaacatttggatgaaagggggggggggggactccaataattcattccgttccgctcaactcattgagtttaaaaatgtaatgaacgccgacgacagatacataaatcgcaactcgttctcgtctcacaaatcagcaaattatattttaaaaaacagagagaaagacagaaaaagatcaaatctcgcaacaaatggcgaaggaaaggtaaatgtcagcgctgtgcaaaatgattggcaaaagaaaacattccgagtcaaaagtgtactggggaaagaaggggagggaatgaacggatgacgtaaccaaaagcgaaatgggaaaaaaggggggggggagagagaggaaaagccaaatgaaacgacggacggaggaggaggcaaaggaatgcataaaggaggacaaaagcacaacaaaacaaaaggaatgaaaaatgacgagaaaacaaaacaaaaaaaaaattctgaaacttttggattttataaaataaaaaccaaaataaaaatttaattatttaatattttcacttgaaataaattaaaatttgaattttttttattttttgaatttttttgaatttttaaaaattcccggttggtcccggttcccggtcccgaacaaaaatcgaggtcccggtcccgacttctcaggtcccggcaagtcccggtcccgacttctcaggtcccggcaagtcccggtcccggttttgcccaaaattcccggtcccgctctactctacttaccaaagcttaagactggtggagcttttaaggaagttgaaatgcacaaaaaaaataaaaaatatttgagattgtgtaaatttttaaatttaaaaattattaaatttcgatattatttttgccaaatttaaaaaataaatttgttttggccttaatttcacgacaatg

SEQ ID NO: 99875 - DNA, 917 bp, Heterodera glycines
tatgtcgagccccgaacccgaattcgagcaaaaagtcgaaaattattcaatttttatttttggtctaaaagtggcttacatatcgagaaacaaactaaaactggtcaattcattaaaaaaaaatagttcaactatttctagaccaaaaataaaaaattcgcaaatttgaattttcgactttttgctcgaattcggggttcgacataggtcgaaattaacgtcagattcggattctccgacccttaaaacccccaatataatcttctctcgaaaaagtttcaaaaatcttgttttcgaaaaaaggggggctaaccatcggtaatatatttacctaatttaatgaaaaatttgggggaaatgcatgtgaaaaatgaggcaaagaaccgtgatgaaatgaattttgtgaacaaaactaagtgtaaagtgacgaaggctgaaattcggacaaaagtctgacggacatcgaaaaaagagcgatgaatcatcggaagaaaaggcgaaaaattcaaacggaacaccaaaaaatatttggcgaaaagggagcgcaaagaacggggaaagaatggacgaaaggagaaaagcgatcggaaggatcaccggcggaaagatgggaaacgatcggagagtgatcggaacaccaaaccgcgccgaaacgaattgagtgatcggaggggaaggagtgaatggatggtggtgggttgttgtcgttgtcacacttaaaacatttttggagtttgattcgaatgaatgcgccacaccccaaaagatgggcgatcgattggactgtcgggggaaatgaggcaaaacgccaatgaaatgtcaaaatacgaatgaattcaagaggaatttacccacaaaataaaaataaagatctttgaatgagaaaaattacacagcagaacaaacaaacaaaaatg

SEQ ID NO: 99876 - DNA, 284 bp, Heterodera glycines; identical to SEQ ID NO: 98949

SEQ ID NO: 99877 - DNA, 303 bp, Heterodera glycines
  unsure (1)..(303): unsure at all n locations
tccatgacagatttggaagaattttttaanttgattgggactccgcccggccattttctacgataaagcgtggaaaaaataaaggacccccttaaaaaagttgaggaattaattccggaaatagaggcattaaatgatcactttgattcacaatttgttgatcattttaaagaattgggcataaaatcgaaaggaaaaaaattggaaaaggaaaaaggaaaacgaaaacttagtgaaattgacaaattggaagatgaaaatgagcaaaaaagaaaacaaattggaaaattaaagaaggaaatg

SEQ ID NO: 99878 - DNA, 98 bp, Heterodera glycines
aaagaaataaagaaggcgtttatattaggaagaaacgcattatcgaacccaaattcttcctgaagtttataaacaagtcaaaaacaaaatcagagatg

SEQ ID NO: 99879 - DNA, 1003 bp, Heterodera glycines
taataagagcttaataacaaataaaagagttacatttatatggcctattgttgtcaattttttttatctgagatttatttattcatagttgttattattttatagataaaaaaattcaaatttatccattacaatggtttaaaaaattttgcaatgagcactgtacacaaaaaaattaaattaattaataattaaaaaccaaattatgttctatcggaaagtctgcatttactaatttacataatgttataaacattttatgattgcgatgtatttagtaactaattaatagggttataaattgtatgattttatattttgggagttttcgagaataaatgcatattttgccatttttgggcttttagggcattttggtcatttttggcaaatttacataaaaaatacaattcaaaaaaaatacacccctaaggcttgacctttttgggaattaaaaaatataaatttgaaaatcgaaaaattttgaattttacaattctcaatattttgtgaaatattattcttcttattttagtttgatactaaatattggcagatacgtagataatttcatgcgaatttcagtgaatattttattttttgatttatttataattttttcatatatgtagatgtcaaggtatagaatcacatttttgtacatttaaaaaactaaattttggtgtgtctttttttaaaaaacccgttttttaggataccttttttaattttaacaagaaattcctaaatttatgaaaaatgctaaaaagtctaaaatatgtttatcaaatatgtaaaaatatgtaaataaaagtcttaacttttgttcatggaatttttatattttattacatatttcaggatttttagcacaaaaaacccttttctagtgttaaattaaattaataaatgtcaacattattgtcaaaaaatattgatttcctcttttaggattgaccctattgatttttttttctattgcctcaaaaacatacacacaatg

SEQ ID NO: 99880 - DNA, 595 bp, Heterodera glycines
tctgttaatacaaatatttaattttaaatagatatacgcctaaattttgtataaaacggttgaaatcacccaagacaaaaagagaaaagataagcaaagaatttcatttcgaaataaattgagcaagttttgctagagagattcggcgctacttgcaaagagcactattttgaaaattttttcacttttttttggaaaaatttttttttgtttttttgacacataatgatgaatattaagtattaacagcataattatggcgaataaaaaatatattcacgattttttatctcaaaaaaattttgcaaaacaatagggtcccccctttggtttggtttttgataaaactcaaaatttgtcaatttttaactagcgctaaattttcttttaaaatgtttttttcagtttattaaatagtatgcaatacgttccatgttaaaaaaacaaattctgcataaaaaaaacaaaaaaaaatttttccaaaaaaaagtgaaaacattttcaaaatagtgctctttgcaagtagcgccaaaattttgtacttttgagttttttgttcgagtccgggttcgagattcggaaataggccggaatg

SEQ ID NO: 99881 - DNA, 713 bp, Heterodera glycines
ttttgagattattattagaaccttcacaatttattattattagcatatttttaaatttatttaaatttttcgccgtagacaatggccacaaaatgggcatggctaagccggagattttgacggatcgaatgaaattgttgctgagcacggccaaaggtgccgatgcacattttttggttgggcaaagtgacaataaagaggcaagtgaaattaataaacaattaattaattacggtataattagcgaattacatttttagacaattaattagggtaaaattaaattttaagcttgtgcatgcgcacaaaaccattctgattgcttcttccaatgtttttgaggcgatgttccaaacggagcaagaaaatgcaaatgacaccaatgcaggaaagagtaagcaaaagggattacctaattatgaaaacataagcaaattaatacataagggactagccccactccttttgttttttctatttttcaaatttttctcatttaaaaatttttcatttttgccttcccaccttccccccccccccatccctaaatacgcctgtgataaagtctgttaatttcaattagtctctactaccctatttaaaattttcacttcgtctctgctaattgccctaattattttcaattagtctctgctaattgctctgtggtggaggagctccccgactttgaaccagcagcgttcaaaataatg

SEQ ID NO: 99882 - DNA, 52 bp, Heterodera glycines
ttttcagtcagtttattttgaataaccgcgatagatctttggaaatcaaatg

SEQ ID NO: 99883 - DNA, 458 bp, Heterodera glycines
tatgctttagatgtcgggctctttttgaaaaaaactgttttcagggtcggagaatacgaatccggcatcaatttcatcctatactatacccggaatcgaacaaaaagatcgtaaattcaaatcctttgaattttaaaaatggtgtaatgcccaccatttaaagtattattaccttaagatttatactactaaaatatttagttagaagattttggtttgttctgtttatttatcattttatttttatcgtatcgtatttattccaatttcaaaatttttatatttgtttttgctgaaaagattgcttatttagtttactttctttttattacaaggaaagatttcctcggattttgaatttgcaattttccatgaaataaatgtgaacatatgtcttcttcaagaaaactttttataaaaaagtaatcatttttctaaatttcaacaattggaatatg

SEQ ID NO: 99884 - DNA, 376 bp, Heterodera glycines
agtctcacacaatcgaggtcgccggttcgaacccggctcgtgtcaattgttttttggcgtccagaattcaattgcacttttgacagggaccctggagaatagaggagaatctcttagtttttttattggtgagaattgaagaatcggccacgtaaatctcgagtcgagaaccgacccttcccgctgtcattactattcgtctctgtcgccccccccccttgtaaattgcgttcgctccgtcgatgccccaattccgattcgacactttccttaataggtcgaggtcactcgctctgccaccactttgatcactgattgttcctccccaatttctccattttatcgcttcatttgaaaggcgactgattcaagaatg

SEQ ID NO: 99885 - DNA, 502 bp, Heterodera glycines
atttggtgaaaatgttaaacggcaagttctaaaggcggtttcaaaaactgaagacggaatggagtattggcgttgccctaaccgtccaccttattgcccagggcgtgcttgtgtacaatgccgctgggaagtcgatgacgatgggtcgcaatataaaattggacgaattaccgggcagcataatcatccacccgttttgggtggtcatatggtagaaatttaaaatgtaaagtgcgttaagtagctaattaggtgagagaagcatctgaacgtctccgacaagaggcgaaaagcgaatttccgacaacaagccgtaacatcatcagagaagttcggtcgaaccttagtgatgaggttcgggcaatcagtgcaccatctgcagccgacatgaggcgaacatataattatcagaaacggaagcatcaggaagaggcaaaatgataatttaaaaaataaattaaaacaaaataatatttaaaaataattggttaggtcggcgatg

SEQ ID NO: 99886 - DNA, 798 bp, Heterodera glycines
tcgccgactgatcgccccaaaaagataatgcaaatgggggcggcggtggcacggcagatggtgccagcagaagctcatcaacttcggcagtcgttgagcggggttcgctttttggttggggacaccttccacccagagagaaattcgaaaataaattttaaaaatttcataggaaaatctttcttttttttcttattcgtcttagtttttccaaccgtgctatttttcagatgtaacaatgtaacacaggcttgaaaataatttgcttaaatggcaaatttatggattttgagggcaaaatttgaaaaaaatctatgaaatttaatgcttgttggggaaattgtttggaaatattagtgaaatttaaagaaaatgccttaaatttttagtttccttttcttttaaatttaagtctgagggctctttctattcccaaatatttggctcaaatttcatttctttagggcaaaaggaggccaaatttctcagctttttggagcagttcacactgagcacaatgtcccgcatttttggccgtttcgtcggcacttatcccatcgcatttctgatctcctcactgatctttgcctcgctgtcaggttgagcaaagttacaaaaaatggaggccgaaattcagaaaaatattgatcatggccctgtcttcacttgctgatcactttttggcccagcgactgatcaattgctgactgatcgctggccgatcactttgatttaatcaataaaaacaaccacaccattaatcacaacgatgggagcagcagcaggtggtgcaaaatg

SEQ ID NO: 99887 - DNA, 139 bp, Heterodera glycines
aaaaatttttgcttataatacatttagttggtcaaaccaccaatccaattaatttttttaatttttcctggttttggtataattttctggttttttttatttctggttttttattatttctggttttttttaaaagatg

SEQ ID NO: 99888 - DNA, 631 bp, Heterodera glycines
tgatgtttaattgtatttttcatttcaaattttgtatcaccggaccaaaaattcacttattatttaaatttaacgcaaatccataaaattatgttttttttgatgctataagccaaaactgtgccatgtgatacatttttcaattcccttttcatttttgccattcgcctttttaaggccgcttttcgcttgaggcgcgtgcccaccaattgttggccattgctcggcttcactgttacgaattctcaaatttttatgccaattgcgtccccaatttgctcagcgaattcggacgagagaacggtttgggcgagcagagccgcacaaaacttgagaaagcattggcccattcgctgttcaaagtcagtgagagacaaagcaaaacaaagcaaaaaaaaaaacaatgcttaaattctttaatttttgaattatttaattttcaatcatttaaatttaatttgaattacgtaatttagccattgattaattcgggagcagttcgtttgctcttattgtgtatatatttgattctcaaatatacaaatttatgtacacaaaaaaaatatttattaaaattatacaaacaattgttatttttctaattaatattattaatttttaggactttatg

SEQ ID NO: 99889 - DNA, 191 bp, Heterodera glycines
aaaatttaggaaaaatttgacaacatttccatttctgttgttttgcttggagaagacaaacaatttttggcgaatttatcattcaatcggcaggcaaataaattaacatattttattactataattaataaaataaattctttttttttttttttttgctttttgccaatgtttatttgtcgaaaccaatg

SEQ ID NO: 99890 - DNA, 214 bp, Heterodera glycines
taaataataaagaaaacaaaattaggagagatcaagaaaaccaaaggaatggaagtgcagttgaaaagcttctgtttaaattttattttattcacatggcaaaaacaaaaatgctaatatttgttttttaatcgcttttggcatttttattaaaaatcgacattttttaaattttggatggaaaaacggtagttgactttaatttggactaatg

SEQ ID NO: 99891 - DNA, 540 bp, Heterodera glycines
aatctctaatgacctctaatcatcgtaaaaaatagtcccaagatgcgggaaaatcaacggtttttgaacgggttaactcacgaacaaaaagtcttgggaaattgtcacggcgctcaattcaaaaaccagttttttcgcacgtcgggagtgtttttattagggttaagccctgagccttcggggggcaaaatgtcgggggccgtggaccatcgggtgggcacatgtcgggggtcgggtcggggggagctcaattgtcgcgggccggggaccccgatcgggtagtgatcaataaaaaattttaaagaaaaaaccaatttttatttttaaatgctcgtaaatcttcctttttttctttaatcatctgattcaaattcgtacgttggcgccagtaaaagtgcgtccaagttggcctttataacatacagtcatggtcatatgttatctacacccccatcttattttatttttgtcgtcatactataagtttcggttaaacccttccaataagacccgaattcgaacaaaaagtcgaataaaatg

SEQ ID NO: 99892 - DNA, 526 bp, Heterodera glycines
ttttctaagaaaaaataggagttttgggggcgcggcgatgccgataggcgccgccggggaaaaaattggaaattttgatcatttataaacaggttttcactgaaaattagccaatttataggtaaaattttgaaaaattttattggaatttaatccaattcttaggggtgtaaaagtcgcgtttcgcgccaaaatgcgaaacgccaaaaaatgcgaattatgcgaaaggcgaaatgcgaaacctaggcacatccctggcgggcacccaccaaaattttacaataattccatcaatgagaagggaaataaatgaaaaatattgtggaatacagtatttaaatacatgtgtaagtaagtgtctgactggcattttacctacctatttttataccgacctattacctaacacacataggtacaaacgagttgaaaatgtgtttaaataggattattgattttcgtcatttttcacttacatttgtattaaactaaagtgtcttgggctgacaatcaaagcgcaacaatg

SEQ ID NO: 99893 - DNA, 1003 bp, Heterodera glycines
aaattttttgttgtttactgattcaaaaggagggcttccaactgaaaatggaaacaaaaaaattccaaataaaaaattttttatggcgcaactttttccaagaattttttgggaacagagggccggtaggcaccgccaggaaaattttcaaaatttgagtttattttgttaacagattttcacgtaaaatgaacaatttttcgattttgagcatttttaatttaaaaaaaaataagcggggtccggcaagaaatacacttttgttttgttttagtagttgatgaaaaatcacagaaaaatcaatgatatgtaaatccgagctcagattcgtggttcaacgcatttttttaccccagaaaaggtgcttcttaaattattatatttattttctcagaaaccacaaaactttaccattgccaaaattggaaaacactagtgatccaaatagggtgaaatggcgccattaattatgaattattaaaatcttaactaaattggaagaaagaacatcaaaaatattattcctcatgagaaagttgacaagtaaatattaatctgactatttaattttggcaaaatgttttgccaaaaattcaaaaaattccaattcttaccagtgcatttttactcccgttttttgggtaaaatttccaggagcgggatcgggagttcaaaattttccgggacgggagtcccgaacgggaatcccgtaaaaatcccgatcccgtaaaaaatcccgttcacctaaaaaagcgggagtcgggagcgggaatcccgtaaaatcccgcgggagtcccgatcccgccggactctaatttttattttttcaaaccaaatttgtaaaagttaaataacaaataaaaagagaccatttattcagagaaattgtaacaatggtaaatagtgaagataaaagacatgacgcacaaataaatggtgaaatggtggatgccaagaatagcataagaaacatagataacggatgaagcaagaaagaaaaatg

SEQ ID NO: 99894 - DNA, 314 bp, Heterodera glycines
aaactgagcaaagtgaagaagatcatctgcagacgagcttacatcagcgtcagcaaggccatgttcatcacgctcaacaagaacaacaaagactacaatgtacagccatcaccaacccaattcaattttcggcacaaatttttgttgagattttgtccgtttttttgagtccattttgaaagcggaaaatttaaatgacaatttatgaaaaaagcgcggacccaaattcaattaaaatagcgaattttcattttttaattgatatatgcaattaattcccacccctttttttacaggaagaattttcacaaatg

SEQ ID NO: 99895 - DNA, 74 bp, Heterodera glycines
tgtgtgcatttattggttaattacctcatatttttgccacatttgcaaacttttctgatttgttgtttcagatg

SEQ ID NO: 99896 - DNA, 1003 bp, Heterodera glycines
acacatttttggctttttaatgatacaaattgtgaaaaaagcttaatgaaaaaccaatgaaaacgaaagaattttttttctttttaacgcattaaattataaaaaagaattaaaattaattttcaaaagaagaaaagcgatatttgcataactgcggaaagctttgattaatttcatttttatttgtacaaatttatgcggatcaaagaaataaattatggtaagaaaatagggagggcgggggagctggtcaaatcgggtaaagagcattcataagagttgtaaaccggggaacgggggtccctgttttccagtttttatagaaaataaaaaattttcatataaatttcactcctttattgggatgagacattttaaaacttgttttcacatttttgttaaaaattttcacaatttattaacagattttgatttgccaaaaatataatttgagcgttttgggtcaaaatttttattaaactccgagatttactaaattttttataaaaaaataatagaaatttcaattttattttgcaattaggaaaaataaacaaaaagaaaagattatgggttaaaatcttaatctttgcataagctttgagctggcccattttttttacatgtggctaataatcccttcttctgcccttccgttttgttctcattgatccgaaagcgattaatggcgtgccaaaactgacaatgaggaggatttcattcgctttatcttttgcccccgggggcatttgactgaaacgccccatgccccggtgggggatcacttgcacaaagtttcgatgtcttcctttcccagcaaatgcggcggagttggaatggaattatggcggtgccactgccaaacgaccgacgcttcaatacgcttcgacgcttcaaaccggttgctcatccctcgcgggtccgtccgtatggcgttgggggggggggggggggggagggggcgtcaaaagaggacaccaaaaacgggaggacgaccaaaatg

SEQ ID NO: 99897 - DNA, 1003 bp, Heterodera glycines
ggggttgacaaatcgttcggggtcggggtcggggtttttcaatttttgccttatgccatatagtcaaaaaattttatattattttagctttaatttttttattattaataataataattttatgtgctttttatcataaatatttttgtatagaattaattaaaaatgcataaggcattttaaaatggccaattttcagtgaaaatctgtaaaaataatcaaaattttaaatttttcatcctgcgcctgacccccaaataaaaatagtagattttattcaaaaaaaaatgccaaaaaatttctgcttattttttttttgtttttcaaatcatctattttttcgcggcgttctttttctatagacttttttttaggagaaaggggtccggcggttgccgatatgcgccgccggaaaaaatttgaaaatttggatggctttgttaacagattttgttcaaaaagtgataaattttttctattttgagtaaaatttttcaccaaaaaatttatgaatttctgataaatttttagttttttttattggttttttgtcaaaattattttgaaattcataatttttcatgatttagtcaaaaaattaaatttttaatttcaacgaaaggaaaattgggttcaatacgtcaataaattatgccaatgatgaccaatttttatgggtatttttgtttaaaaaccctataaattaaaaaagaagtcaaccaggatccgaactcatgacaaaagtagtgcatgtgctaacgcaattaccactacaccaatattacacatgaatggacaaaagcaaattactttatttaataaaaatttggcaaaatggttaaaaaaaattcaaatttgtataatttttttcttttctctcacgaaaataccattcttaggggtgtatatttaaccccgagccgagtcggggttaagggtcggggttcggggtcgtcggggttggaagcgtcggggttcgggtcggggttaaccccgaaaaatg

SEQ ID NO: 99898 - DNA, 181 bp, Heterodera glycines
  unsure (1)..(181): unsure at all n locations
cgatagggatgaatagtttgatnntcgtctctttnttcttttgcctattttgccgtgccattcttttttcggctttccttaggcttcgctttcgtcccactgcctttgatgtgctgttgtacgctgttcagcttctgatcggctacattttgatgatcattgtcatgacgttgaacggatg

SEQ ID NO: 99899 - DNA, 142 bp, Heterodera glycines
ggtagaaagaaaagggagagtgaaatcggaattttttaaatggaaaggataaaagcaaacccaaaaagtagggaaatgtgcggaattgggacattgggtacgcacattttgtcagttaaactgtttgttttagtacaacatg

SEQ ID NO: 99900 - DNA, 638 bp, Heterodera glycines
ttaacaaaaacgcttgcactttaattctttaatatttaaattcaaacaatggcgcttgttggttggcctcggttttgtatatgtgttgataaaagtaaaattcttaagaacatcattctgaattccgaaccctagacccgaactcgaagaaaaagtcgaaagtcaaaattttcgaaattagcatattactgaaacaaactgaaagtcatcaaccatgtaataaaagatcatttaggccgtttttggatcaaaaatgctaaattcgaatatccatgtttttcgtgcctacttagacagggattttttccgatatgcctatcgtctttctcattttccttctcgtcctccttaaaagattatgtctaaaaatgacttttttgtgattaagagccaatattttaaagaaaatttaaaattttttgttagcgtcgaatggttttttgagaaaaataatccgtttccagaaattttttgtttctaatatgaatatttaaataaaacaatcagttcataaattttctttataaaaatttagaaccaaaaagccgcgagtcgctgtcgcgcagtaaaaaaacccgtggtcgcgggtcgcgcatcacgaatcaagtatccgttgcggtcgcgctccacccctgatg

SEQ ID NO: 99901 - DNA, 281 bp, Heterodera glycines
actgaaaattgtaaatattctatgcatttaccgcacatttagtttggtgtactgtaacagtgggatttattcggacgtaccgaataccgttccatcatatgccatccttttgttgtgcaccttaaattatgcagtaatttttggtcttattttatggcgccatcaaataaacaaaggaaccaatgaatcaaacgcaacaatcggctgcaaaatgtcgcaaataatttgttttaaatttaaattctaattgccatattttagcggctgctgatcggtcaatg

SEQ ID NO: 99902 - DNA, 303 bp, Heterodera glycines
tattattacatatcgatcgaagaaagtgcagcaaaattttatgaatttccaagggcggtggttgacacaaaaatactcggtcgggttcaatatgaaaatactttataaaacctcaaacaggaaatttttttagattttctggaaaaaattactgatcaactactgagtctggttcgaaaaaattctaaaaaatttgaaaaaaatttactaaaaaaattcaaggaaaaaattaaattttttttttgcggcgactattcagcaatttaaccaaaatgccaaccattttccagccgtgtgggcatg

SEQ ID NO: 99903 - DNA, 255 bp, Heterodera glycines
tattttttttgaaaatctgatcaaaatgaaactaaatttgtttgtccccatttatataccggaccgttcatcctttttttagctttatataatttgcataattttttgagatggcccctttttcttatcagcgtaataaatattgtgagtagatcgagacgcgaacggagaagagcaaacatatgccgtcaacgacgacgagaatgcccttctcattcatttctttttacattttttctgcaaattcttccaatg

SEQ ID NO: 99904 - DNA, 79 bp, Heterodera glycines
  unsure (1)..(79): unsure at all n locations
ggcgaatttgccgggnagtaaattcttgaaagggatgaccaattaattaattaattgattggtggcgagcggcaaaatg

SEQ ID NO: 99905 - DNA, 136 bp, Heterodera glycines
  unsure (1)..(136): unsure at all n locations
cttctctacaagttctacacattcaaacggttgctgctttcttacagaacttcgccaggncggtcatattctccatgaattgtttatcgacaactcttcccccgtggaattccacgccgttctctttgaggagatg

SEQ ID NO: 99906 - DNA, 263 bp, Heterodera glycines
aataaactaaccattttaattttatttccaaaaaccaacaaaattgtccaaattatcaaatctcttttatccattttgtttttgtgcaatatttttttcctatttttcaatttgcatataaatttgatcccaaaaagttggacactttttcactgttcggaatttgcctaaataaaactattgtacctatggtgtttatttccttatgtctgtggtgtttatgtgtgtgtttttggtaattttcaactcaaattttgctgatg

SEQ ID NO: 99907 - DNA, 450 bp, Heterodera glycines
  unsure (1)..(450): unsure at all n locations
ctgtgcagcagcattgtgtgtgggaaaagggaagaagtgagaaaaataaagaaggaaatagtgcactgtctgactgtctggttatgcttttgaaaaatttgtcccaaaagggggatacaaacccaattagtaccctgaagggctttcgaatgataccaacaatgtttgatttggatgacaaattaaaaagttataagctgaaaacccgcttggggctcgaaaaattnctggggcccgcgaaaactctggaggtccgtggaagtgatatgctgttcgaaggtgtttctgttgaaattttcaaataaaataaaatttggcattcttcctcccgccctttctaaattttaaattttttcggttcaatacagaagcctcgtttaactcatttttacatattttaaaattaagaatcagaaatttagaaaaccaacgcaagcattacgtaaaatg

SEQ ID NO: 99908 - DNA, 564 bp, Heterodera glycines
atggtgctgaaccgcccgcgcttgcggtcacaacgcttgtgcaatttgcgcgcgtcccacttcagcactgtgcactgccggacaactgtgcgcgatgtgtggcactgcgtgatccggcacgattttacatatttttatttatttattattacatttatttatttttttatttagcattgcgcatgggatattgaaatacgacgatgtgtcagcaaaaggtgacgacacattatttattgacattaaaaaatgattttgacggagcaaaaacattaaattttgttttaataaatttaaaaaatgataatctatattattttaaaatattctatacgataaatctcacataataaattaatttttcaaaaaatattcaaattatcaaatttttttcgtttttgttaaaattaaactaagtaaaaaaatgtttaaataatatttccgacaaaaataaattaatctttgaaaatttttttatttttttaacacgcttttactatagatgtaaacgaaaaatattccgttctaaacccaatttaaaaacttgttttttgcctaatgatg

SEQ ID NO: 99909 - DNA, 83 bp, Heterodera glycines
tttttggcgccactgtataaatatataatattttttatttttaaatattttacaaaaattatttttagctttttcttcgtatg

SEQ ID NO: 99910 - DNA, 165 bp, Heterodera glycines
tttttaatgaactcaatttcaatttttccggcttttaaatcaattttgaatggtctgatcaattcggaataggttattaactatcgaattttatattaaatttaattagataaattttcggaaaatcccacttaaaattattatgtcagattcataaaggcaatg

SEQ ID NO: 99911 - DNA, 367 bp, Heterodera glycines
tgtttttttaatgacaggagtttgtaaaaaattaataatttttttctacatccttggatttgtttcgaattcgcattcagaaattcataatcatttgtgcctccttaatttcatcatcaaatttgaacattgaacaaaaaacatttatcatttaagtttatttccattaaaaaagtcacatgtcatggaggggactcgaacctccgactccactttgttgaccatctgaccccaaaagacaataaaaggaaaaattgagtttttttcaaccgggaggcctaaatcaattctctgttttattacaattttggatccgctttttaatttaatttttaaattttgatttttttaagaccccaaacaaatg

SEQ ID NO: 99912 - DNA, 82 bp, Heterodera glycines
cgctacagtaccttttcattaatgatacggtaggaaataattaactaattatatcttatgtaattatgcctgcctaattatg

SEQ ID NO: 99913 - DNA, 392 bp, Heterodera glycines
ttgagtccccggatcgattattttttgtgttgtcattgaccgtttctgtataagctgctcaaggcgacccagccgctcgacaattgtggcgttgatcgatgggttgagaaattttcaagacgaccaagccgaataccgatatcatcattgtcttaaaacatgtgagacatttgaccttttttttggaggatttacgaaaagatagctcaaacatttttctattattctgtgaaaattcagaatttatggagtttgaaataagttttggacaaatttagtgagtcaaaattttttcgaatttactagtaataatttgcaataagcggctccatcccgtgccgaccaaaaaagcgtgtccaattctccatccaaaacattttgctggggaaatg

SEQ ID NO: 99914 - DNA, 52 bp, Heterodera glycines
ttatataataattccctttgaaaagattgccttgtgcagtaatattgcgatg

SEQ ID NO: 99915 - DNA, 66 bp, Heterodera glycines
ggtcggccctttcacttgtttttaatttatttttgccatattttccgcatctatcccctcaaaatg

SEQ ID NO: 99916 - DNA, 272 bp, Heterodera glycines
ttatagcttattcctaaaatagagcacccgtggctttattttcacccactctcaaaaggggggctttattttaggggggagggtttaatttagggagggagagctgtattgtaggaaattctgtaaaatcatatagcatcagatactttttgtttgtaccgaacgaatccgaaagaattttgcgaaaatccacctgctgattggcttataatttttttccactcagtttttatttgtccataaattctttcgcatttgaattatgaaaaatg

SEQ ID NO: 99917 - DNA, 209 bp, Heterodera glycines
ttctggcaatggcatgaccaaactgttcaatttgttaaggtgttggccatcctcaatcaggtgagacgaaaatttgcgggaagtgatcagaaaaggacaaaatgattagaaatgagaaaagaaacagttatttggataatcaaaaagtgattataaaatgatttttgccccccccccaaattgaagacgagcaaaaagatgaccaaatg

SEQ ID NO: 99918 - DNA, 92 bp, Heterodera glycines
ttaaataaagccgaaattcacgacgaaaattgagtcatttacaaagatctttttttagaacttccacagcgccacagaaattgcctaaaatg

SEQ ID NO: 99919 - DNA, 933 bp, Heterodera glycines
ttttgttctctgcaattttttcctaattaatttacttaattaaatatacatttatgattttttccattacctaacatgatcctcttatttccttttcagtttttatttttaaacaaaaactttacgaataaaaggctgacccataaaattaaattaattttacgctttattctaatccaaaattataaattatctgtttcattaatattaatataatttattcaacctatgtacacaccattttctacaatgtttctttgtattgatttggatcaattttttaccccgaggggcaaagcgatgaataaatgaaaaaaatacgggaggatgggaacaacaaaacattacactcttctgacaattgcatattgttttgaatgagctttggatggaagatgatgggtaaaagtaaataattttccgatgatttgggagttcaatttccaatttccatgaatgaaagttcaaatcgggtaaggattttccaccctttactttttttaatttgtttttacatacaaattgaaaaataaattaattaaaatgtttgcgatttttaaatcttccccccaaaaataggggaagccttcaccattcactcattcgttgtttatgggcttggcatatgattagccagctgaatagtccagtaaaatcataaggatttagccgattttgttatttattttattgccaattttgaatatcttaattcacttaattcccattatttcatttcattacattaatagataaatacgattttcatattgcttatcatgtcccaatcagtgcttgatcggatgaagcatttgttgagcacgcgtgaggacgcggatgtttattttttggtgggcgacggagacgcaaaagaggcgagtcttcaaattaaaaatttaatttattaattataaattggaaatttagtgaatg

SEQ ID NO: 99920 - DNA, 82 bp, Heterodera glycines
tgatgggttaacatttcttagagcaaaagaagcaaatggccaacccccccccccccctaaacccgggaagccattctttatg

SEQ ID NO: 99921 - DNA, 608 bp, Heterodera glycines
tcgtctatttattttataaacgccagtctatgcatatgatattctgtccatttatgatcaattaaaaaacttttctgtgatgccttttcttgtcagtgcaattttttatcatttaaatgcgtttatttttcgttgtactttttccacttttaattggaaaaatgaaaataaaattcattttctttttcttatccataaacaattagatattgaaatttactatgaaattaactactgtaatcgaacacaatttttaaattttttttttaaatttatattgaatttctttatttggcgttctgttattaattacgtcaaaacacttagcgttagcgtttttttcacatcgtcgaaaagaaatgatgacaattgaatttacacaatgtcgtgcctttgcagatgattttgtgtttatataagctgaattatatctttttttgcttactatcattttaacagtttcttaagccataaatttttgtatttattaattcccgagacttggacgctcacttaaatttcatagagccgttttttcgttttgactttcttcccccaataagctaaatttttacctttttagcgatatttctgagactctcaaaatg

SEQ ID NO: 99922 - DNA, 294 bp, Heterodera glycines
agtgaatatttgtcgtaacatttttaatatttaaaaaaaatagttgtgtgaccgattatccgattggacatccaactctccacgtgctctgcgaggaagttgattggcgccgacccgaggacaacccatacccgctcgccattctaaaagtgttcatcattccaccgcgacaaatcgacatccccgttttgccggtcaaagttgacgatcggctttgttttccactttgcatcaaatgttgcaaaaaatttccgtatggtgccgtcaaatcatcatacagttgtactcacgatg

SEQ ID NO: 99923 - DNA, 249 bp, Heterodera glycines
ttcgattgactgtttgggtgggatttcaaggacgagttgagaataaaattcctttttaggttccatattgtgaatatttatatgctgcactttcgcgtttgccgtcaattaataatttagagccaaaaataggtgaaattttggccgcggaagtcaatgggagatgggaaagagttgaaatgatcagaccatcgttagccgaccccaatttttgggtattagattgaaatttaaaaagagtaaaaaatg

SEQ ID NO: 99924 - DNA, 188 bp, Heterodera glycines
tctcaaaaatgaatttaataatttttcaattgcattttattattaaataattaaaacttttccatttttttgttcaaatgaatttaaatcactttggcttttccaattgcttctgcttcggtgccctttcaattgttcagcactgagtccgaagtgagtaaacccaaaagcaatttggccaaaatatg

SEQ ID NO: 99925 - DNA, 1003 bp, Heterodera glycines
aaatagcgcaaaatgtgccaatgattgacagaaacagacaaataatcggtcgatgaacaaaagtatcgaaaaaccggtaggcaactccgtctggccaactccttcttattgtataaggggccaactccgtctcagaaagataaaattcattttaagttaagaatttttctcgcttcattacaaactaatttaggaacaaaagtgagaattttcaaaatatttttgttcgaattcgcgtccgagattcgaaattgttctaaatgaaggtttttgcaaaaataattcccattaaaaagttattcaaaaaaaacaaaatttcgaacgctcatatcttttttctaactcatcaaattgattagcattgcgtagaaaaagcttatccttgtcgagagctttatgacatagccacaaaatgacataaaaattactttttttttggtatttttaggcaacattttcaaacttattttttctttataaattttcaaaatatgtaaaaaaacgaaaatatgtacaaaaatatttgccgaaattttggattttttttgaggatttccaaaaattccgtaaaaaatactcaaaatatgtaaaaaaaaatgaaaatatatatgaaaaaaatctaaaatatgtacaaatatgtaagaaaatcccgaaatatgtataaaaaccccgaaatatgtaaaaatatgtaaataaaagtcccggtttttgttcgcaaacacaaaaaagaaagtgtttttcctgctatttagagcaaggagaagccaggaaaaaaatatgtatttacataaaatttgcagccctaaatatatatatcaataaaatttttctctactaacgttttgtggaaaaaatttataataatcagcagaaacacggacataataaatttgcattcaaaccccggaataaattgaatcaataacatctcagagggatgggtcagtgcaattagttaattgggaaaattttgtctcaaggcaaataatagcactgacaaatg

SEQ ID NO: 99926 - DNA, 175 bp, Heterodera glycines
ggtgatgacggacgtaacacatgcatttattggatttataatattggggaggaattgccgggaaatggacgcaaaaaagggcaatttggcgcaatgggcaggggaaaatgcaacaaattgagaactcaaaagttaaatggaaaaattaatctaaaaataatattttaaggaaatg

SEQ ID NO: 99927 - DNA, 265 bp, Heterodera glycines
taaatggtcataaacttacaataatccattcatgttatgtttgtttttaatagattttggaaaatgtgttattttttgaacatttcaaaaattaaaatgattaaaaaaatattcactgcacagaactctaatgcattttccgtgatcctttgatggtagtaaatgtatgatttgtctttaaaaaataattattaaatccgcttctcgtcattgttctaatcggtgtaattttgaaaccatcaaagttctccatgccaatgtgatg

SEQ ID NO: 99928 - DNA, 1003 bp, Heterodera glycines
atccatggccactcccgctgtcactcaccacaaatgggcggtgggaaaggcgcgtcactaattgccttgcccattaccattcatataaataataatttgtgttgacattgggctagtcggctcaccacccgatgaccaccacagccaccaccataataaataaacaaataaatacacaaaagagaataatttattgttccaatccttcgattattcccctaattaccccccccccccccccgccacgcgcctagtttatggggacggcggttctagaatttgggatttggaggggataggggcagggacagtccgaggatttgggatttggtaggggtagtgaggcggtcctagaatttgggatttaggggataggggcagggacagtccgaggatttgggatttggagggggtgggggcatggacagtccgaggatttgggatttggaggtggtgggggcatgaacagtccgaggatttgggatttggagggggtgggggcatggacagtccgaggatttgggatttggagggggtagtgcaactttctcttgggcggtcaaaatgttttccgcatttaaaaaaaatctttgaaaaattcataaatccactctaacttgtccatatgtttcaccttagacgggatacgaactcgaaaaatccaaatttttcaacaataaatctatttttctcttatttgtgggtgggcgggagtcttggggggaggggtgggtgctaaaatgtttttcttttaaaaatattttaaattaattttgtcccaacaaaaaatcgctctttaattattccgttttttttattttctccattcattttgtcaaaagccctcttccccttgtgatgccccaaaaatgtattaatattaaattgctgccaataaggccaacctcacaattttcaggcccatccaaattgattttcccgtacaaccaaaattctccgctattttttgaagaattaattcattttttgagtcaccaaaatg

SEQ ID NO: 99929 - DNA, 1003 bp, Heterodera glycines
ctcacattacaataaatgtttagttttgctgtaaaaaactatattttctaatgagtttttatgattttaaaacatttgatcagatgaaaatataatttgtttttcaatttgagtgtgttggcgttttgttttacgccaattattttttggcaatttctttcgttttttaccgtccatgacttgttttataggttttcggggtcgggaaaaccgattctggcatctgttttgacccaattcgaaccccgaacccggattcgaacaaaaaaattaaaatccatttttccacgaaaattcactttgtcccaactataatttcattgggtgaccatttgtacacgtgcgcttggcgtgaagaagcccgcgttcttggaaaaaaacgatggcgtttcatcatttaggccaattttgaactccggatcaaactcgatttcgaataaaatgtcaataagtcttttaaaattcgcattatttcgaattcgtataaaaagaccaaattttggttatgaaatgtttccgtattgattttacgcttgttaaaaaataatttatttcaatcaatctaaacacataggtatacataaatgattaaatggacaatatggaatatgcgcaacactatacacaataaatacatacatactggttcgacttcatttcctgatttttagattaagctcgtcaagagctttcaaatgataccaaatttgtggggattcgatggtttaaaaaaaggtagagtgcgaaatctctcaatttttcgagttttgaaccggttcaaaaaccggttttttggcatttccgcaactcgagacatatttttccatgcttagctccttgagacgaatcgatcggtatatcatttgaccctttttttcacggggcgttcactacagttcacccgtgaagcggctatatgtaaaaggttggaggattgaaaaaaaaggaagaaacactggcgaagtgcacctgcgattcgcgtgacttctgatgtcgtaacatg

SEQ ID NO: 99930 - DNA, 147 bp, Heterodera glycines
acgatagcggatttaaaaatttatgagattaagtttagaagaggcgaaaaattcccgaaaattcattttcgggacagttggcttttaatgcaaaataaattggctcacctaccaaaaacatttggtttggattgtgaatcaaaaatg

SEQ ID NO: 99931 - DNA, 634 bp, Heterodera glycines
tagtgatcagtgatcagagtgacaccagcagcagttatccgagtaaccattagtgataacatggtgatttattgatagcagtgatctgtgatgacaaaaagattagcgattagagtgatgccagccgttatcagattgatccattactgatagacggagatcattggtatcattgatgagtgtgataaacatagtggtgatcagtgattagactgataactttatgtgtgaatagagtgagaccagcagagtgattaattataaagtgattttgataccatatcagtgatccgacacaatgccaagaaaatttttgaaaaatgccaatttaaacgagtgccaatttttcattcagtcccctctccaacaacagctgcacaacggttcaccaccagcagttggccaccaacagtcatcgttgtttttgctggaacagctgagcgggcccaggacgccgttgggcggtggcgccggaggcgcaggaggaggaggtgaaaacaatggcacaaaaatgccgaaaattggcgcttagtggtgcactaagccatcgcaaaatgccaatgccaattttgaatgccaaagtcttaaagtcacacaattaactatttatgtattaaaaaacccatcaggcatg

SEQ ID NO: 99932 - DNA, 856 bp, Heterodera glycines
ttttagggctgttcgggatggtttggttctcgatttttcactcctctttctcgggtttttgaaatcaccgagaggagaaattctacaatgtactaaaattgaaaattgctaaaaactaaaaagttaatatcggattttatgatttcacgtttcttggtctcggttttttactcattgtcattcttcggtctcggtactcggtaaaactatttcagccctaataaataaaatattaattttttcttttatttaaatattaaaaagggattaaaattagtgcttcgatttttagtcaaatgcctaaatttctgcgcacttgatacgcatagataagcacgaaaaacgcgttttcgctaggtttggggtgtttacgatgacttttataatgcctaactttgcctattttggaatttttgtgctaatgcctaaattccaatttttgtgactatttcgccacttttggcgcctttttcagaattttcggaaaaatccttaacaaaaatgcaagaaaaatgaaaaatacaccccctaagaattgaaaaaagttttcacaaaaactgattcccaaaaattaattatattttcttgacaaaaattttggtttaaaaattgtctttatttaaaaaacgttaaaatagttgaaatataagcaaaattaagttttttgattaatttttatatgttttgctacctaaaaagtgttaataaaaaatgttatttgcctttttttgtgcctaattaatgtaatgcctatttcgcgattttttttgactaaaaatggctctaattataatatttaaattcaccaaaatctccggaaacaaaaaacaccgaataattatttcgtggtaaaatg

SEQ ID NO: 99933 - DNA, 224 bp, Heterodera glycines
  unsure (1)..(224): unsure at all n locations
aagcataantttttcaaatacataagttcaacaaagatatggctcgcggcgccaaaatgggcggaaaatgaaatttttggtgtttttttgaccgtaacttttatctaaatttttgaaatttggcaggctaataaagagactgtcaagcactttatcaagcttgtttaatggatgcaaatgaaaaatgttatatcatttggagctaaaatagcaggcgcaaaatg

SEQ ID NO: 99934 - DNA, 204 bp, Heterodera glycines
tcataattatgggttaactgcatagcaagcgcaaaaattttccaatttttttttgcaattaaatatttttgggttatcttttggcaaaaaaagcgcaaaatttttcttaattattaaataattatatatttttaatctttttaaagaaccgaggcgcagctgaagtacagccaggcgatcagtcagtcaattgttggcccaatg

SEQ ID NO: 99935 - DNA, 1003 bp, Heterodera glycines
tgaaccgttttgagtagattagactagaaaaaattgaaaattttgaaatcatgtttcccactcccttctcccaggggtattattttgtagtctttttttccccaataaacttgtcaaaccccatttttcgcaccgtgaatgttatttttattgaattctgaaccgttttgagtagattagactagaaaaaattgaaaattttgaaatcatgtttcccactcccttctcccaggggtattattttgtaaagtctttttttccccaataaacttttcaaaccccatttttcgcaccgtgaatgttatttttattgaattctgaaccgttttgagtagattagactagaaaaaattgaaaattttgaaatcatgtttcccactcccttctcccaggggtattattttgtaaagtccttttttccccaataaacttgtcaaaccccatttttcgcaccgtgaatgttatttttattgaattctgaaccgttttgagtagattagactagaaaaaattgaaaattttgaaatcatgtttcccactcccttgtcgcgtcccgaaaattaaacgctaaatttcgtcccccgagtgagtcatccattccctccctttgtgaatcgccgcctattttttcctttgtattggccctaaggacaggtgcagacaaaatgaacccctttttctcacgacaactccccccccgccccctttttctctacatataatcacttctgccgcttctgcttttcacttcaatttttcccccttttttcacttcgctttccatcgcttttcctattcgccgaaaatcgccaataaattcgttttcttttcaacttcgcctttggaaaataaagttttggtcagacttaattcgtggtcaaaacccagctaatcctaagttcgggttccccttcccatcccaaccacgacacaacggccgggaaacggctcgaaccctcaaatctcgtttcccattttcctaatcttattcttaaccaaaatg

SEQ ID NO: 99936 - DNA, 209 bp, Heterodera glycines
caggacgttttcgcgtggccgttttcgcgtggccattttcgcgtggttgcatataaaagagaattcataactcacacacacagacacacagacacacactatattttaccaaaatttgttcgacttttattttctttcgagttttaatttattttataattaagtgaatttgataaatttattaagactttttaaattattacaatatg

SEQ ID NO: 99937 - DNA, 218 bp, Heterodera glycines
ttaactgaatttttggtgcagagattaacgttataatttaggtctgattaatatgtagaataataaaaaataggccaaatgttaggctcgtgtgggaattgaacccacgcgtccacccaacccgggggcagctctaccattgagatacctttagaaacagccggactgagtacaacctgagcttgaactatcagatcaatgagaacacacaagcaatg

SEQ ID NO: 99938 - DNA, 891 bp, Heterodera glycines
aaagccaaaaactgctgaataaaagaagccatgaattttataatgagaggaagaagaactgagatgaatttagtatatatataaaattcttaactcctattgtagattttttcagtatttctttagtttcggtcgttatatataaatactttaaatatttcgtgccgcatttataatttattcgagaagaagatttgaattttgaaaacccggaccatgatttccgaggtggaccaggagaggtttcggcaaaaaatcatgttttaacaggacaattcccaaggctgcacgtaactagatcttcaattacggaaattcgtaatcccataattgcagtgatttttttttttgaattatggaaatcatcctaataatgaggggccccattatttatcttaagaaaatttaattcaaattttacaaattttttcataagctcatgtcggcaccgctgactcgttcttcctattttattattattataatataaaaataaatattacttataaatttaatattttttttgcaaattctacattgatttttttgaaaaattcatcaatggctttgtttgtcatcatgtgtataagtttattcaattctattcttatgatatattaaaaaaaaaatttgcagctaaatctattgcgaatatttaattacctattctgctaaaacaaaatcataggcaatgtaataattttaaagaaaattttttatatgtgggatggaaggagtttttgctaaatttaaatttaaaataataatgataatggtaaagaattaaataggagtggggtgaaaaaatttataatttaattaaaaatgtttctttcatttatcaaaatacttttttattaaaactgagagaatttttaacaaaacatcatg

SEQ ID NO: 99939 - DNA, 379 bp, Heterodera glycines
atgtaccgcgcacttctaccccaactcgaaatgttgaacttcccgagcaaataggaccattcccgtttgttgttgaccgccctacagagcaccaaccccacctttaaacatacggcaacaaattttccaccccatcccactgaatgcacaccgcattaaccaagtgtcggttaacgcgcaacgcaacattgacgttcagtacgtaacaaataattgcgttaatgtcccgccaaacgtacagcgtcattgcgacattcagtacaccgctcctaaccctgtcgccgcgccatcaaacgcgcaacaaattcaagcaggaagtagacttattcaaaacattccaatgcaggctcagctttggcagggccctgatggaaaaatg

SEQ ID NO: 99940 - DNA, 391 bp, Heterodera glycines
tgttagtggaataaagcttaaaaataaagaaacagaattacatgaccaaaaatttttttcatattatttagtagagtgccacgggaccgggacctggtagcggacaactgagtacaactgagtaccaaggtcccggttttgaccgggaccgggactagtcccgggtttttcccggttttcccagccaaaaattcccggtttttcaacccgaaaaggtcccggtcccgggtttgcccaaaattcccggtcccgtggcactctattatttagctatgaagattccaggaaaaaaaaatttatatttacaaaattgacatccctaaagataaaaaccaagccttgctgagatgggatggatttttttttgacgaacgaacggaccaacgaaatg

SEQ ID NO: 99941 - DNA, 1003 bp, Heterodera glycines
aaatatttatcataaatgcatagaatgaaccgttggtggcccgggtggcttacaacccggtacggagcacgcttgtgcgcaacttagaagtcattcttcaatcaaagatcagttttgccctttttaccaatgtccatctcattttatctgtagattgattcaaattgttaggttttctgtttcaaaaattgatggtgacttttcaattgggaaatctgaaagatgatttaatcggcgtaaatttggcaaaaaaagaactgagaatttaaaaaattatccaaaaataataataaaacgaaaaaaaatgtggtactcttagataatattattattcaatctcttctgatttataagcggcacgaggccaaggcggcaaatattttgagtaagtgcctgttttaatttggtttccgatgacaaattttcaataatcggaattcgcttctcgaaaatgcaaatccatttttaagaaataatatggccactttgcgctttcgcttcctttcaatgactgtaattcgaatggaggaatcgcgcgaatataacaacttcaatttgcttggtaatattttgcatgaactctgataatggtctaattgactgttttattttggcaaattaaaagtttttctggtcgttttggcattgataatttttaaattaaaaacattttatttgataaatgaaaaactctcttgggttatctcataattattgtgtcaaagttaaataaaggcatcacaattttcttgagtttgaccattccaatgaacaatcgagcaaatggaaaaattgttttattttttaagctcacaaaattggaaatctttataaattattttacgtattttataaaccaaaaattgggctttttctgattttgggcgtccatggccatgcttatttgcttagttgatgtcttttcgttcaataacattagcaatggcattggtaatgcattattttaatggtctttttttaagttgaccttggctctacaatg

SEQ ID NO: 99942 - DNA, 1003 bp, Heterodera glycines
tcattttgttgtttttccctgtttggtctcccctttttccttataaatatctccatattataaacgtatccattttctccattaattattcaactcaattgtatttttgattatttttaaccaatgcttcaaaaatattcatagaattcaggataaattacaattagaattgcaggtccaaaatccagtaaattattgtctttttgctttttgaacgatgccatcccaaaaacctctaaaaaaaagcatttcacaatataatgtattgagactggattaatggacaaaaccctaaaatatggattatggatcaaaaataaaacgcagaaagaataaaaattgcaaaatataaaaaaaaattgtcaaaaatggagttggaaaatttaaaaaaaaattaaaatattaaattttcatttgtcattcacgaaaaatagttgaaggcgcattttgtcatattaatttattttttcagttaggtatatgtttttttttatgtagcaaatatttttaaataactatattattttaaatttaaaaattattttactttttaatttttaaaatattgaaaaataattctgttgacaaaagaaaaagtacaaacagtgttagagacatggaaatagtgcatcaaaatgagagtaaaagaaaaactgtgcttttgtaaaaagttccttattgtttaattttcttcagattttcataggcctataatttgaacccattccttcatcgatttctatcaaagtattttgaaaatgcattttggtggcttttgtatttgtcaagggaaaagctcgttttttaaatttgcaaagttttgcgttctgattatgttaaaaataaatttatttgtagcgaatattttggtaatgtaacagatttctttttatttctcatacataatacatacaaattgttaaaaatattgctcggttattgggaattgaatttacaaatataaaaaaaaacaaacactgacattaagaaaaacaataaaatg

SEQ ID NO: 99943 - DNA, 366 bp, Heterodera glycines
gcattcccaacagggctgggcaactgagtttttaaattacggaaaccgttaatccgtaataacggcaattttctcaattacggaattccgtaatgacgggtgaaaaatgccgtaatttcccgtaattcgtaattacaggatccaaaaaggccgtaattttcgtaattacgcccagccctgatccctaatcatcattgaccccttgaaaagcaacaaaatgatgataaatcagcagagttgggagccatggtcataattaatgaattaatgttgaaaacataggacggaaaagtgacggattatggcaaaacgcggacgctgaccggcgcagaacgtgccaaactgaagaagttcatcgacgaaatg

SEQ ID NO: 99944 - DNA, 949 bp, Heterodera glycines
aaaggggggagggagcttttccatcacatcctcccccccccccccccggccctccttaggggggagaggtgatttggaaaggacgacgaataatggaaggggaatgaatagtcagtcagtcccaatagggccccagggtacgacgacgacgacaatttgtgcaaaaaatagtccgcgtttggctgatccactccacagatccacctctccaccctgcctctgtgccgacatcccatcagcttttctgggttatgcacagcgaaaggaaaatccgcttcaccctcggggccctgacccccgcgctctcaccacccccctcggggcagggggtcgttggtggcaggaggccagctttccgacccacatcatccacttaattcgtgtcccaattagatgacgcggattggtggggggggggggggacagggctgcggcgcggctgacgggtccatccttggccctttaccccccgcccaaaaattccatgggcccttcccattattcccaaaaacattggctccaattgtgtgtgtgttttgtaaccccaaaatgagttggaggagggattttgtccttttttacaggatttgttggcttaagcattcattttttgttgaaaaagaaaaaaaaatggaacataaactcaaaacaatttattatgaaaaatgcattggcattattaattttagtcaggctaagtagcctattaattgtttaattcatgaacaaaaaatgaccaaattgtttgtggtggtgacaattttttgaaatatttttgcttggctaaaaatcataataaatatgtaagctctcttcatctgatcaggccaaaaattttaaatttcttccctgatcaaggtccaaacaaatcccacaatttacctgttttctaaattcatacaaaataatgtgatcagttcagaagtgatctgactagcgcaacgccatg

SEQ ID NO: 99945 - DNA, 75 bp, Heterodera glycines
agagagttttgtagacgaagagaacgagcagacagacagtcagacaaaattgttataagcttttgccgacgaatg

SEQ ID NO: 99946 - DNA, 580 bp, Heterodera glycines
  unsure (1)..(580): unsure at all n locations
tactttgtgctcccctcccccgaantttttgtggcgcgttttacttacggaaccgatggggaatttttttcatatttctgaaccttataccctggggaatttttggggtttttttttggaaatcttatgacccatttcgttaaaaaaacttaacttgttcacatttttcctaatttttacgcttaattggtactttccctgcaatagaagcaataatcggcgaaatgaataaaactgatgcaaataaatttaaggaatttcttgaaactaatatttttgagaattttttttttttggcgaaatcccatgaaaatccttttcgggtgaatttgacgaaatttttacaaaaatttactggcataagccccccccccctagaaaaatggtgaacctttattttcttaaattccaataaaacaacttttttcgctgtcataataattaaatcaattgtaaaattttctattcttcatattcttcttatttaatgtattatttattccatgtaatttaagcaattttcaattttatttaattaaaattttcaatttaaattatttccagcaatttttgcgccatg

SEQ ID NO: 99947 - DNA, 123 bp, Heterodera glycines
ttgtttaacaaacaaactaaaacaaaaataatgtataattttggaattaaatttcggagcacaaacacatcgacttgaggatgggagaataaaaaggccaagtccatgtttgtctaatccatg

SEQ ID NO: 99948 - DNA, 61 bp, Heterodera glycines
cacgaaaatgcgcgagttttctccgttgctcagtccgtcataaattctggcgaaaaacatg

SEQ ID NO: 99949 - DNA, 96 bp, Heterodera glycines
tgtacgatggaaatgatgaggtcctgattgaggactctcccccattgtacgatggaaatgatgaaggggtgattgaggagtcaccgccccattatg

SEQ ID NO: 99950 - DNA, 61 bp, Heterodera glycines
  unsure (1)..(61): unsure at all n locations
ctgagttgggcctganattcgggcctaaacattgggaggccttggagccgagtcggggatg

SEQ ID NO: 99951 - DNA, 131 bp, Heterodera glycines
ggaggaggaggcgggagtggatttgctaatgcccatgaccacttttggtaaatttttgaaaagatttttcaaaaaataattaaatgattatttattgaccacttttgtccatttttttagggctcgaaatg

SEQ ID NO: 99952 - DNA, 80 bp, Heterodera glycines
ttaatttaaaaaataaaatatgcgcaattgtattacaattttggatcatcaccagtccagttcataatttacattcaatg

SEQ ID NO: 99953 - DNA, 62 bp, Heterodera glycines
ttcatttgcgcatgctttggtggatacgaataaaataggtgttgagcgaacagttgaagatg

SEQ ID NO: 99954 - DNA, 742 bp, Heterodera glycines
  unsure (1)..(742): unsure at all n locations
gaaaattcaaaatttttgaattcaaattgttgattacaactttatttaaattcacggaaacaaagttaaagtcaaaaaagtggcaaagtcatcactgcttcaaaaaagatcaatttaaactaattttgactaaaaatggaaaatcgaaaattttgaatttctattttttgttcgaattcggatccggggtttggaatagattgaaatggatgtcagattcgtgnatcagtaaacccgaaaaccattaaaaatatattttcacttttgaaaacaaaaatttttttcgaaaaatggggggggggggcaagactttttgggtctgaattttgaccatttctcacttggttgaccataccacattcatttcatattgtttcgggggtttttttttgttgctaatgtgaagctgacataatgaaccactaattgtaaatggagagacatttgcccgaaacgctttatttaattagcgtttgtgaacgcagagaaaaaacatgtatggttgttcagacttttttgggtcagtgtaccataaataaacaaatgacaaaatttattttaaaaagtttgggtattttgttgttcattcataaaaatttatattcggaggtgaacaattttcgttcgttgaggcggcgattgaaatgttttggaaatgtccgcaacaatttacatgtccgccttcgttgggtttttttgcatcagcaaaaagtgacgacaaatagcagggagggacgaaatg

SEQ ID NO: 99955 - DNA, 177 bp, Heterodera glycines
gctaaatgaatgggaatgttaatggtaatgggatagtgcacaatcagtcagaaattaggaatgctttgaacaaaatttggcgaattttgaaatttcaagccgcaaaagttaaagtaatccaagacaatttggacatggatgatgggtttggaaaatccgctaaattgtgaaaaaatg

SEQ ID NO: 99956 - DNA, 643 bp, Heterodera glycines
  unsure (1)..(643): unsure at all n locations
tcgttccaatagctcaaagtttatttattttttcaaaagtcaaataaaattccataaataaaaaaattagctttttaaatttnaaaactttcagaaaaggactatagaactaactaccaagttattttaagtcatgttggttctgcaaaacaaacaaatgtggttacgaatggaagtatttaagaaaggtcccagcaggaacaaagcttacttgcctaatttattctatatttatatttaaatttatttaatttaatttttttctattaaaaatcaatattcaatgaatgccctccaacaaaaacaacttttttttgttcaagaaaagacaactttggatatgaaattttaatatttattaccttaatcagtgttatttttcaaattatttcttaatttcggtttgattcaatcttcagttgagtccattcgaatggctttgtgttccaaaaaatgccacactcgcgctgatcaaaaaaaactacaaaaaacttgcgatggccacacacccggacaaaaacaatcaatgcagcggcaaattgtttacggtttgggttactgtacaatttaatttgtaatttagcaaaaagaaggtaaagtttaattgaaaaattctttcagctcattaccaatgccaaagatg

SEQ ID NO: 99957 - DNA, 776 bp, Heterodera glycines
tttgtgcaaaaaaaaaaaaagcaaacggacactttcactactcattttatttacagcaaatgggtaattaaacaattcatatatacaaaaattaattagaaaaatgaattgccgattgatatggatggagtggtaatctctaattgatatgcaatttcaaaagtgatttaacttttggctgatgtgcatgatgaatcccgaaaaaaatgttcgatttaactgaactccgtgtgaatcgaactctaaaatatttttgttggtccggactgtgaaccgtgcgtagcccgggactcatcagggcccattgtcagtcttgaggacattctcggccttaagcctcagaaagttctcaatctcgagaagtcaatgcttcgaaatgatcgctcatttctgaacagcctaattagggaaaattagaaagcaatgatataacaaaaagcgattaaaagtagtgattcagaatttatgaaacaacaaaaaaaggatggaatgggaaatgaatgaatgaatgtctgatcagtgatcacattgtacaagaaaaagcaaataaaattctcataaaatcataggccaccaagaaaccgcgacacttcatcgtcggcgtggctaactaacggctgatgttggccaaggacgtggtcaattacaaatttcatcacaaaatctcaatcgatgattttgtacgggaaaatcaagtgttggaaagtgtttcggcgcaaggacaaaaagccggcattgggggcgattatggaaaaaaattcttccaggaccaaatg

SEQ ID NO: 99958 - DNA, 121 bp, Heterodera glycines
  unsure (1)..(121): unsure at all n locations
aatttaaaacttcacaaatcaaaaataaattttntggatcttcctgataagtaaaaattaaaggtttgacacaatttaaacgtgaattatataaagcattggttaattagcattagaaatg

SEQ ID NO: 99959 - DNA, 106 bp, Heterodera glycines
tttggtcagtttttaaactgataataataattgttttaattgtcataataaagaaatattaattatcttatttacataatttgttttaggtatagaaaaagaaatg

SEQ ID NO: 99960 - DNA, 202 bp, Heterodera glycines
aacgaagtgcagtgcgccatggccatttttatttttcaaataattttttatatttaatagatatcccagaaaaatggctatctctttttttgagaaattttctatgcaacaaacgctctcgaacatgaaacgaagtgcggtgcgccatggccattttatttttcaaataatttttatatttaatagatattccagaaaaatg

SEQ ID NO: 99961 - DNA, 79 bp, Heterodera glycines
caaattccgccgaaaactcctagcaattgcgcaaaattcgcaataaattccaaacgaaaaaggcattttcgttaaaatg

SEQ ID NO: 99962 - DNA, 170 bp, Heterodera glycines
cccgtcaaggcttcctgatcaatgaacttggcgtattccatttccatgaatcagttcaacaagccgatggaacatcgaatgtagtcaaagactacgttaaaaaactggagaaaaatatcaaccatatggccaaattccactgtgtcaaagttaagtcaaagttcaccatg

SEQ ID NO: 99963 - DNA, 475 bp, Heterodera glycines
aaaagcatatgacactagttcgactgaaagatcaaatcgcgcattgatcagtgatcacttttctatacctatgtaatcccttttcattatgtaaactctttttctagtgatcatagtagtgttctttttgtagtaaacttgttgcagtattatatttggattagataacaggactaaaaatgatctgccgtcctttattgcaaatgaagcatcatcagttggcataaaaatgtatgccgatgatgttaaattatattatgcccatgaaaatgatgataaaacaaatcatttagaataattaattggactaaagaacaagtttaatttgtgtcaaatcattccatataaatgcattatttgtcgtcattattttattctgcacattttatttttttgaatgtcgctatttaaataatccatttcaatttaaactttaatagctaattaatttatttttaatgtttcagttaaaatg

SEQ ID NO: 99964 - DNA, 327 bp, Heterodera glycines
  unsure (1)..(327): unsure at all n locations
aatttttactaattttttaaaaatccataaagatagcagaggttcaatacgaagttcattaaatttgattaaatntaagctaaattataaaatcgatcaatgttcattttcatctgacttccaatttaaaaatttattattttttaattattcatntaatccgagcaattttctggaagtttccccacggtttcactcaccaaacaaaagtggcaaaacagtgaatcatccgcgcaccttctgaacccgttccattgaatttggcactttgccttcccaaaaaattttgccgctctccaagtgcgtaattcgggcacaacacaaatg

SEQ ID NO: 99965 - DNA, 560 bp, Heterodera glycines
  unsure (1)..(560): unsure at all n locations
caggcaaaataaaccaatttgctcatgatgnaatccccttattattgtatttattgtctctcactttttcaatttttgaaacaaaaacaaaaaaagggacacagacaaaatgacaaaattgaaaataaaaaattgacaaaatgtcaattgctttaatcatttttgttcttctcattggcttggttgattgattggaatttttgctgatcagtggaaaaatggtgggaattgaaaaggtgatcaaaccggtttatgagcccacagctcaacaatattgcagcagaagaaaagcactaaatatttcaccaaaacgccaatttatctattggtcaaataaatgggaaatttcaatgtttgaactcgaagaaaaataattttaaacatccattttttttaattttttgccggtaattagctaattatcgtgattaaacgaataattaatcatttggcaataccgtgcgataacagaaattatagagcattcatgaaaactagaaattagaaaaatttaattaaaatttaattagatttttacaaaaattaaattcaataagatg

SEQ ID NO: 99966 - DNA, 1003 bp, Heterodera glycines
tagaatttccttataaaaaaccttcaaaaattttttcttgaaaatttaatcggattaactaaaaaattgatacgcaaaattcaatccgatcaatcattaatcccatatgattgattgacgaattagccctaaccaggatctgatcacatatttattaatgaaccagattaacgaaaaatttgatacgcaaaattcaatccgatcaatcattaatcccatatgattgattgacgaattagccctaaccagggtctgatcacatatttattaatgaaccagattaacgcaaaaatttgatacgcaaaattcaatccgatcaatcattaatcccatatgattgattgacgaattagccctaaccaggatctgatcacatatttattaatgaaccagattaacgaaaaatttgatacgcaaaattcaatccgatcaatcattaatcccatatgattgattgacgaattagccctaaccagggtctgatcacatatttattaatgaaccagattaacgcaaaaatttgatacgcaaaattcaatccgatcaatcattaatcccatatgattgattgacgaattagccctaaccagggtctgatcacatatttattaatgaaccagattaacgcaaaaatttgatacgcaaaattcaatccgatcaatcattaatcccatatgattgattgacgaattagccctaaccaggatctgatcacatatttattaatgaaccagattaacgaaaaatttgatacgcaaaattcaatccgatcaatcattaatcccatatgattgattgacgaattagccctaaccagggtctgatcacatattaattaaacacagactgatcattgatcagatctatacacaccgattaatccactacagatctatacacaccgattaatccgatcaaccatgccaaataatttgatcgatgatcagtttgaacttcacctgatcagtcgttccattttcctatacacattgtgattgggatg

SEQ ID NO: 99967 - DNA, 1003 bp, Heterodera glycines
agaaaattaccacaaactgatcacataaaaaaaaagttggaaaatctgtttatccaggcttatcagatgaaaccggcacttttccatacgggatttgaatttttgtaaaatcattgggattttttgtcataacaattgtgaaaatttgtttctaggaattttttgcggtcgctgaccacaaatctgacaaatatttcaaccaattctgaatctctaacctaaattcgaacaaaaaaaaaagaaatccaagaattttaaatttctacctttgtccgagtttaggttagagattggtcaaaattgatgtcagaatatagtaaaccttcttggtttctaaggaggttcccatctgaaaagtgcatgaaatttataaaaaacatcttcattataaattttcaaactgttaaaaatcaaaaggagtttatggcaggcgggaaatttaaatttcaatgcaatttataaataatttctataaaatcagatcaattcactcattccaaaaatttgaattgcgtcatcctttaagggataaataataaattatatatttaataaataagggtttggataaataatattcaaataattctactgttgatcaatctaagttttaattatattcttatttaatatatataaactattaaatatataaataaaaaaggcttaattgcattatttaatttttcatttaaaatagatttaaattattttattatatattttttttattaattagaaagtattcgttaatttcataataataaaaataatttttacttttttatgtaaataaattgaaaaacaattaatgttcttttaattttcatttgatatttaattcattaaagaaaatataattgttttattctttttctataatcctttttcaatttattattcatcatattttaattcacatttcaactgcaatttatatgtgattcttaataaaggcaattaatttttctaatttttttgcttagggagacgaccaaaaatg

SEQ ID NO: 99968 - DNA, 1003 bp, Heterodera glycines
cctaatattactctaaaatctctcctattattgtctcctttctcacagaatttttttttatttaacaaattttgaaatatttttgtaattgacaaaaaataaccgttaaattcatattagataaatagggcccggatttttagtgacaaaaattcccaaaataattaactaaatagtggccaaaaaatgccaaaatagtggcgaaaaagttccaaatttagtggtgtaattttttaaatagctgttttttaatttgaaaataatttaaaattaaggcaaacaattttattcactgtttgcagtcacaaatgaggaacatttcctttccaatattttcttagcaaatattaagcaattaaaaaaatttggggaagaaattttgagaaaattttccaattcttagaggtgtatttttgaaaaattttaggtcgattcttaggggtgtatttttgattttttttaggtcgattcttggtgtatatttttcgtttttattgaatttttgggaaattttccaaaaaaatgccaaaatagtggcaaaaaactattttagtggccaacttccaaaataattttttttaatggcaaagctccaaaatagtgattcctaatgatgaatagtggcgttaaaacgaagaatttccgagttaaaaatgtgttttttgtgcatttctcatcgaaataaagccgcagaaaaaatagttaagaaactaagaatccgggccctatagataaattattgaaaatttttttagcatttggctaattttttttgatttttttgtattttcatgattttggtagttttttgacatttagtcgactttttgctgatgtgacttaaattcgcacctctactaatgatatgctaaaaatttaaagaataaaaatgctatttcatttttattaatgaaaaattaaaatataccagtaaagtgaatctcaattgaaattcaattttagttgttttgcaattccaggacttctttatagtcataaaatg

SEQ ID NO: 99969 - DNA, 1003 bp, Heterodera glycines
attttaactgacaaactttgaaactttctattataatttcattaaaaaatccttccttttttcgttttatttttaaaattagacatttaacttgccttcgaatttactaaaataattttattggacataaatttgtgaaaattcacagtgtaaacattttaaaattataaatttgctttcataaatttttttatttaaaaattgaactcaatttttgagaaactttttgtctgcagttaggcgttaattgtttattctatgatcagcctgtcacctgatttcgttaaacagttgggggctgaacgaacgtgcgcgagaaccttccacaattgaagctcgccaattttcgaggaaatccaaattttaactgataaactttaaaactttgttttataattgcaattttttttttcgtttgttttaaaattttattttgttgtagtatttgttatgcataaattgaggtgaatttaaaaatgtttcttattttatttttgtataaatttcttttcaatttatttttgtgcttattcatcttttcattctttcttccgacattttaattatttttttcattctttggctttttcatcttgacattaacacattgttaaaataatgaacataaaaaatgttttcttcttttttgcttattcatcgctgtaaatcaactgcaaattgttcaaatttttaaagatgaataatttctgaatatatattttttctatttaacaaaaatcatttcaattatttgcaattaaataattataattttattataataaggaattaataatagattattttgtatttgtgtaaaaattatgcattgataaattaagtttatataaagtttgttaagtgtattatgtatttattatttattaatttcttcacattttttaccgtactattcaactccgtcaatggccaatgcttcttcccctctgaagagtaattttacattattaatttttattttaagtaatgttcaggtcgaatg

SEQ ID NO: 99970 - DNA, 219 bp, Heterodera glycines
attttcaatgctttaaattttaccatgatcagcggcaaaaccaggctccaatgacgtaggattggactaggtatattgtttcaaaattttcacatgttaaaagatatagtgaaactgtgcgggggagggtcatagcccaggaggagagagaattttttgtgcttaatagtcgatttgctattgccaattttcggtttttttggctccgcgccaaaaatg

SEQ ID NO: 99971 - DNA, 360 bp, Heterodera glycines
ggtacgttattaaaaaataatagtaataaaaattaattttataaaaaaatgtttattattttatttaggtaatgatgtgccaagattatgaattttggaatgatcgcattaatgaactcatttttggaatgattttgctaataatttttttaagtttattaatagttttggcagttgcaataattgcccaatgttttaacaatttttttcgtgctgcaaacatgtaacatggaaagaaaatttgacgaataaaatattaaatatttgtgatttttttaaaactgtctcaaaaacagtttatcatattttttttgaaatcataatatttttatttgtgtttcagctaataaaaagaaaatg

SEQ ID NO: 99972 - DNA, 614 bp, Heterodera glycines
gttaatttaatttctaaactttcataaattttgacccaaaagtgcacaaataaaaggtcattatttaaaacgatttaaagttaattactaatagattagaagtaaatggaagcatcaaagttaattaattaactaattaggtaattgatgagactttgcgccaattatttgaattttaaacattttagaggctggaagaccaaaaagaaaacgacaattttttggagcattcggatggtgaaaatgaagatgacgctgtcattgatgttattgggtgatcaaattttgttttgttttttaaatttacttaaaaaatttttagaataatatgacttaattatttttattcgttgagaaaaacgtgaaatattgcttaattaaatatataactcaggtgggattgaacctgggactccctttttggtggcaaactcacagaccactgagacaacaaatcaattagtttttgaactgggggctcaaaattgactcggtgtgtaaatgcttttgagagaaactctctgttgctatttatctatttttttatataaatttttacaatacaattcagggttttaattataaataaaaataaattatttttgtaataaatg

SEQ ID NO: 99973 - DNA, 223 bp, Heterodera glycines
tgtatctcgataagcgaaacggagttgatcacttttgcacattcctgcgcacttttggcatttgcaacgagtggggcgcaattttaggggaaattgtgttgaggaaaatggcttctttgtgtcgtgtttatcctgcaataaggtatgagacccataatttttgaattttcttttcaagacattaaaaagccaaaattgttatgatcatcatgttcgcggcatg

SEQ ID NO: 99974 - DNA, 64 bp, Heterodera glycines
ggtaaggcatgccgaggtgtgccccgtccctcttaaactcacttctttgtttaagcagccaatg

SEQ ID NO: 99975 - DNA, 659 bp, Heterodera glycines
aaaatggatcgagaaattattttcggattttcaaagatttcatgacatttttcggaccaatttgttcatggacatacaattaattttgtatatttaataaattaatttattttcaatttaatttaattgataattgttaactttttttaaagaatttatttaatattaattaaaaacatttaggaagtttgaacaaaaatttttcataaatttattgctttctttaaaaatttaaattcatttaattaggtattttaagcaaaaaaaataaggaaaaaagttattaacaatatttgctgacaaccttcgcataaaataaaaagcaatgattaaattttagacaattttttcttattaccaatgttttattaaaattgtttttttttctaattatcaattttattttttcaattaaaatttctctttttgttttttaaattatttcttcaatcgattaatcccatcaacaaatttgcctccgtaaatccgtaaatatgctttacgacaaacagctgttaaagtgggcggatattggcgtttattttcgaaagaaaatgctttttgtttataggaatattcaataaaataatttaatgatttcatttttccattaaattaaaatatttattttaaattaaatttgattatttctaaaaatg

SEQ ID NO: 99976 - DNA, 216 bp, Heterodera glycines
aaatccgccattttaacgatttttcgacaaaaaacatggtataacttaaaaagcaaccaaattttacatttttggtatcattcgatagccaagttttttctctattagcctaacaatttaaaaaaattaggtcaactttagaaaaagttgtatgaatataagcactatttctgccacaacttatgtctttatttgttattttaatattgaaatatg

SEQ ID NO: 99977 - DNA, 145 bp, Heterodera glycines
aaaatcaaaaacaaatgcccgagcagaaaaaactactcgccttcttgtaagggacgatgaggaggggcgtttgatcaaattggcggcggaagagatcggcaaattgcacagattggtgaagttcggatgccgttcgagcagcatg

SEQ ID NO: 99978 - DNA, 62 bp, Heterodera glycines
cagcagtttccctgcaaaatttgtgagcttctgatcagtctagaacgttgggtgataaaatg

SEQ ID NO: 99979 - DNA, 1003 bp, Heterodera glycines
atttcaatataatgaaataaataatacttctttttattatatcagcttcatttatttgcaaagtttgcgcaattttcattattgaaccccatttttattcattttcaatttaccatttaatttataattactttttttatataattttttagggatgatcgtagctttccgtgacctgaaacgcacgaaaaacatgtttttttttgtctattttggcattttgcccaaaataattttaaaaaatgcaaaaaatataggcctataaataaaagatttctcaaaaattgatttatttattttcttcacaagaatctgtcctttaaaatttatttaacttaaaactgatttggcctattttttttaacttttaataaattttatcattttacacacctaaaaataaggtttttagtgccaattttagggtctttacagtctagagcctatctattttggcagtttttagagccaaaaatttaatcactagtcgataaatgaattagggacggaggcggtgcttaaaagggagtgaagctgcttaataagcaacttggcgtagtcgggaatggagttgtctgtgtcgatttctttggggatttgtagttggtcaaggtcggacagaaatttttttggggcagtgttgtcagaaggaggagaaaaattcgccataaagaattgttaaaagcccagaaaaataagtgcgtaaatcatattctgtgggtgaaacgaatcgatgatgcatgtacgaacatttgagaaatttttagaaaagagcaataatgttaagcattttttttttggtttgccatcagaaaatttttttgcattattatctttgcttctttttttgttcattacatatatgttgtctaacttatttttgctgtttaaattttcattcattttgtagaatacgtgtttaaaaacgttccgttactgaatatttattatttttgcaatcagtttttattttatggtattctgctaaatggaacagacgatg

SEQ ID NO: 99980 - DNA, 407 bp, Heterodera glycines
  unsure (1)..(407): unsure at all n locations
aagtcaagaggctcgcgcaacacgggaaacgtgacagtgatgaatttccaaataccagcgtaaccgtgaaagatatccctttgcaaagcattccagggaacccaatgaattggccaccttcagtgtcaagttttcagaccatattttcatcttctgacccnacagcagcatcaacgacaaccaatgttgtaaacaaatctccacgaaaaaggcttaggccctcttctgttttgcaaatcggaacgagcacaaccactttgattttgttgctgatgatcgcgttggtcgccatacctgtgaacgcagaacaagcatcggaatccgacttgaaagccggaacgggtatttttctcacattttcggatttgttggcactgcttggaatcgtggtctctcttggtgcaatg

SEQ ID NO: 99981 - DNA, 142 bp, Heterodera glycines
cttaaaatacaaaatgaatattcatttttcgaaatcgcacatttcgattcacttttgctttatccgttgttaatttatcttccctttaagtcatcaattaaactttctctttatctcttaaaaccttttaccttcttagatg

SEQ ID NO: 99982 - DNA, 301 bp, Heterodera glycines
ttatgttaacaataagaattactgaaagtgaaggctttaagaaaacatgtaactttcttgtgagcatttgtgagtaaagaaaaacataacttttaatttatttatttgacgtagaacaattaataatttaatttgcaattgcaattgtattttcttcattaataaaattatttaaaaacctacaacttcaatttttatgcattttcactcccttcgctttgtttaagctctaattcgattcaaagttttgcaaaatcctaatttacccaatttacattaatttctcattttcttacgaatg

SEQ ID NO: 99983 - DNA, 409 bp, Heterodera glycines
aattatttttcaaattctaaaaaataaagtatttttttatcgaatatacatatcatttcatggttgcttaaggcagttattttttaaagaatctatcatttttaggttagaatgaaactacacggaaaaaccgataatttaaacaaaaatttgcataagaaaaacctcccggctgaactactgtttcaaatttttacttttgttccaataatcttattatttggagaaactagaagaaatgcaggttaaagtatttggtttttaaatgaattaatgcttaaggtaataatgtaacaaaggtcattgaaattatttgtcggcaaattgaaatatttcgaacatatcgcaaacagcaattaaaattcatggttaattttcattattacaaaatcattttccattttagatg

SEQ ID NO: 99984 - DNA, 217 bp, Heterodera glycines
gaacaaaacttttgaaaattcaaatagaaattttggttcaacgaaaccaaattcttcgaattttcttcgacaaaattgcatcgtggagcaacaagaaagcgtgacaacggatgtttgccttggcaaaatcgaaattgcgccagaagtcgatgattttttggaaagacttgttgttggtcgtgaaaatgaggcagttcctcccatcggaaaagtgatg

SEQ ID NO: 99985 - DNA, 166 bp, Heterodera glycines
acctttttcaaaactatttggtgagttagcttaaaaaaaaattgttttagtcttctaaaaaatatttgactttttgaggaaatcaaattaggtagataattaaatttaaaaatgtattacaataaattatcaacattttaaataattttaaattaatataagtatg

SEQ ID NO: 99986 - DNA, 159 bp, Heterodera glycines
attttgaccagcgtgatccgcttgaataccttcgcgcatgtgcctaccacttacacttttaaaaaattaagaaaatcattcaaaaatatatcacaatttaaactatgtaattattttaacaaaggtattccaaatatttgtgcgataaataaactcatg

SEQ ID NO: 99987 - DNA, 1003 bp, Heterodera glycines
cctgagcttttcaaaatccgggaccgggacctcggacgatcgggaattcccggcccggtcccgtggcactctggtttccaccaccgttcgttccttgcttaaaaactatttttgtaaattaaaagaaatcaaatttgtgtcccatatcaaacaaaaacaattttctaatttaaattaaaaacaaataaattttttaccagtttaaaaaaacaaatttaaattcttctcaagtaaaaactaatatatttaaaaacattttaaataaacataataatattcttatatttagattacctaaaaattctcatttttaatcacatttcgttagcacaattacaaatttaaaaatgtttcaatgctgtttagagtaaatatttttctcactctcaaagatttataattatttttcggaatttcttcgccaaaattcaaattttgccctaaaagtgaaaaaaagtcataaaaaggtcaaaaatgcaaaaaaaaaaaaagaggaaaaaacttggacattttgccaaggttttgatgccataaaggctaattttgtaataaaaaaaattcaaattttttcaaaaaatcgccaaaatatgtgtcaaaaacagtcaaacccccaaaatatgtttatatgaacaaaaaatccaaaatatgttttttagttcctaaaaactcgctctgattgcaaataaaactggtaaaaatgcctttcatgcgttagcatattctcaaataaatatgttaaaacataaaaatccaagcctgtatcctgtatatctatattaaaataacagtaagtgatatctatgaattttaaggcatgttcaaatatttaatgtcatcatttaattttttaccatttgtcaaatttatgaagctaaacaaacaccgccaaaaagcgcaatttaattatttaagaaataagggttgtaatttcataaaattaacagctgctgcattttcatttcttattcaaattaataattaaattttaaggtgaacgaacatg

SEQ ID NO: 99988 - DNA, 270 bp, Heterodera glycines
agataacaaataagtaccccggaatcttacagttcgaatggtttccttgtaatctacaattaggtaggtatacaattattactataagacatgcatatttaacatcaaaatttttttaaattttttaaggctagcagaaaaattagggaatgtcgaatgatatcaaaaatgctaagctttagtgtttgatggatttaccaaactcttgctcaaaaatcctcaaaaagcccctggttgtgtaaaccttatgtgcacaccgaggccccgatg

SEQ ID NO: 99989 - DNA, 563 bp, Heterodera glycines
ggttcaaatccggccttccaccccaatttttcgcctaaataatatggtgacacttggcggacaccccaggtcgtttggtcttcacaccactcgacactccagaaacaacagctggcactggggcaaaagaaccggaggcgcgccgatccttgcatagcgggaacggcccaacgccatctctcgagcgagggcgctcgaatatgagaggaggggaatgtaatggctgatcgaaaatagctatgggagctgaaaatgctgtgggagcaaaacaacaggggccaaaatgaaggaaagatgcactggggcaaaagaaccggaggcgcgccgatccttgcatagcgggaacggcccaacgccatctctctagcgagggcctctaaaaacggccaaaagcggattccaatatattctagcgatcatcgattctttctcaaaattctgtgaccacaataccactacgagaacagtcgacaacaacaatcacctcggcttttgtggaaaaatttctatgttcctttggcttgccgaagatagtagttaccgactgtggtacccaatttatg

SEQ ID NO: 99990 - DNA, 837 bp, Heterodera glycines
aaaccacttttcttttttgtgtttgcgtataaaaatcggggacttttatttgcatatttttgcatattttgaggtttttgtgcatatttatgcatatttcgccattttttggaaaattgttaacaaaaatgcaataaaaacggaaaatacaccccttaagaatcggccctaaaaaattcagaaaaatacacccctaagaatcgaccgaaaatttttaaaaacacaccactaagaattggaaattttctcaaaaattcttcccccaaattttttttcatgagaaaatttttgatttaaaaaatgtcaatatttgctaaaggaattttataaaagaaatgtagcagctcattggcaagtgcactggtaaaaaaatttttttttattgaatttgcagccctaattttcaattttttagtgcatatttggtgcatatttcacgactttatttgcatattatgtgcatattttggccacttttcgtgcatattttttgcatccctgattatcaaagtaatttacaattagaacaattcaatttaaaaatttaaattctcaatgtgtaactataagtattattaatgatatggtgcttggatttattattttttattattttgtgcatatttatcgcataaaactcgaataacagtattttacaggacaggacttcaactcaattagagcgaagtagtttttcagactaatgaaactgaataattagcgttttttaataaattaattatttttaaacaattttcgggaacttttccgttatgcctccccccccccccctcggtctacgtcagttgggccccggcacttatgggccccagcatg

SEQ ID NO: 99991 - DNA, 177 bp, Heterodera glycines
ttttttggcattcgcatacgccgtttttgttatttctcattttggtacggagaaagcgaaaattcaagaaaacgcgctgctggctggacttgttgaggaaaattggaaggatacttcgaaactggaccattttctgagggatttgcgcaggaatgttggtgacaaaaagaggtgatg

SEQ ID NO: 99992 - DNA, 77 bp, Heterodera glycines
ttcacccgtttgttgctgtacgttgggctgctagcctccagtatggggtttgctgtccttctgttcagtggcgaatg

SEQ ID NO: 99993 - DNA, 182 bp, Heterodera glycines
  unsure (1)..(182): unsure at all n locations
aaaaaaaaattatttttttgattcatttttattaataaaaaaatatttttttttgaaaaacgcaacatttttactgggttttttttaaatcattaattttttctaaacaatcccaaaaattcgaaaataaaaatttcggtttttttaatgtccccatttcnccgtcncaggtggacacaatg

SEQ ID NO: 99994 - DNA, 304 bp, Heterodera glycines
ccgcgccggtctctaattataagccagcaaatccagggcgaaagtgtccaacttgttgccgttggcccaggtatctgaccaatagaattgattatgcatttttcaaaacattaaacaaaacctgaaggtggtgagagagaaggaatagcgttccgtgctcattttggcaacaaaaaaaaaatgtattttgtgaataaattggcttaaaattgatacattaaacggtaatactgaagtttatcccccccccattttttggaaaaaattttttctgttctaaaaagtcgtgaaaacacgttttatg

SEQ ID NO: 99995 - DNA, 954 bp, Heterodera glycines
aatggcaggaggacaaaaagcaaatcaaatgtcgaaatcggagacgaaaattgaaacggacgatcgatcaaacggacggacggacgctttctttcttttctttctttccacgacaaatgacccccccccccacagcgttttgtttggttttcactcactttcggatcagcagataaatgctctatccatccattggttttgactgctgtttgatcaattctctcttcgtcccatcctttgctttggccagcagttgctttttgctttttgccttttgccccccggcgctgtttcatcacttcccacaaatccctctcgccctcttaagtttccgtttggcgtttgcttcatttccctcattcttggccatgtttccttacgaagtccttttggacatttgcaaattcctcccccgtgcccatttggtctctctccaattcgccgaccgccgactttgcaaatttgtcaacgacaattccctgtattggcccctgcacaggtgctaccgattgacctttctcgaggtgatttcacatctgataattgccggtcaattgcctttttcagttcttcgcccttaaaactctctgccgcgcggataatctcagcgattttcccgtcgaattaccggtaataatttttataattattagagaacatttagtggattttcatctaattagacctaattacccccccccccctcccccaccaaattctcagccaaatttgtccgctcggctcgcgtcactccgttggccccccgcggcggatggccaaattccgctgtttctcaatgagactgagcccactttccttctgttcgagttcgtctctggccacaaattcttcgttcaaattggcccttttgtcaccgcccaaaatgccgcctcattaattttttggcttcatcaaatatcggaagtgtttttcgaagaagaaattcgaggaatg

SEQ ID NO: 99996 - DNA, 100 bp, Heterodera glycines
ttgtgccggtcattgatggtacggtttgaaattgtaaaataaaaatttaataatataaataaaatcaaaagaatttgtcgtggatgacgctgtcaaaatg

SEQ ID NO: 99997 - DNA, 172 bp, Heterodera glycines
ttttttattttatgaagaattttaaatttgattaaaaaatataaatttaaaagaatttaaaaatattttattggctcaaaattttatgttgctcaatgatcatgagcaaaagttaataattggattcatttagattaagaaaaaaattaattggttaatattacagaaaatg

SEQ ID NO: 99998 - DNA, 241 bp, Heterodera glycines
ttttttctgctcttcgtactgtgtacatttggggccgtacgagtgacatccttttacggtatatttaccattaccaagaagtacaaaggttttctttagggaatgataaatccaattctcccctcccaatttgcttttgctttttgccgtggcttcgctttttcacctgtaagtgaatttgcttggtattcgggcattgtcaacataacgttttgatgatgtcataaatgcctttaaaatg

SEQ ID NO: 99999 - DNA, 242 bp, Heterodera glycines
ttgtacatattttaggaatttttcttacatatttatgtacatatttggaccactttttgtacatattttttgcagccctagtaatagtataaataaataaattttattttaatgtattaatatttttttatgtttttttgtttgcgcgagtgaatgtttttttttttgagttctcttttcaccgcgcgacaactcttttcgtttcattgttctgatattttgggcaaaatgtgctgagaatg

SEQ ID NO: 100000 - DNA, 157 bp, Heterodera glycines
cctaaaataaaagaatttaaattagggagggatccccattctttaggactattgcccaaattcgttatttttttcgaaatttagaatcgcaaagcgaaaattattgtcatgggttcctaccaattgggcgcactcaccaaacaatcagacatcgatg

SEQ ID NO: 100001 - DNA, 581 bp, Heterodera glycines
ataaaatttaattaagcatttaaggcaaaatattggtactttctttatgttattgaatttaaaatatagaaaattactatctcaaaattatgtacattttcagagggtatagcacataaaatcaatcctagcattaatagttattttaattagtctaattaacaaattaattaggtgactaatgaagcagatgaaacagtggaagatggagttttaaatccgttgaaagacattgccaatgccgaaatgaccatcaaaacgttgcataaattttgtattaaaaatggaaaaacgaaattttcagcggaaaattatgcaaatttattgtatttgaaggaaaatttgaaaataaaaaggaaacaaaatgccaaagaaaaattgcaaaatttgaatcagaatttgattgacatagcttaaaaaatgagttggccaatttgatggttgaggccaatttggacacaaccatagaatatgaacaattgatggaggaatgcgcaaagtttggcaacgaaacgcaaaaaaaagcgaaagcaaaaaatttggtggaaaaatttttgaaccgaataaatgtacaagaaatg

SEQ ID NO: 100002 - DNA, 483 bp, Heterodera glycines
cattttgctcaattacacttcatgcatcgaagcaaaaatagcatattcgcttggttttatttatgaaatttatattaaattaaatattttttgctgtttcggccatttcgaattgtttagtgccaattttcttttatatttttagactgccgaaagccgttcctttggcattctgttttcccacaaaaaatattgccaaattcgactttggatggtcatcattttccttttcgttaccgttttccatccgtgccatgccccgtgggcaacaaaagtgccgaattaatttgtgtcgatggaggaaaatggcgagccatcggatgccaagaagaaggagatgagaatgaaaattatggtaaaaccgtaaaacattaataatcattaatttgttattacattagcaaaaattttaattttcgcacatttaaaaaataataatatttaaattaaaaaataattctaatcactttttttgacggaatg

SEQ ID NO: 100003 - DNA, 174 bp, Heterodera glycines
aataggattggcaaaattaacgttttggaaaatttataaagttaaataataaaatttgtaatattataatattgccttttatggtaaattaaaaaatactactagaaaaagaaattttaattctcaagataattgaaacaaacataaatattttttaaaatatagaacagcatg

SEQ ID NO: 100004 - DNA, 453 bp, Heterodera glycines
ataaaaatttgaaactccaacaacttttttctgagatgtcaaattgcttagccattcgctttgaaaaaaattctccttttcaaaaacttattttagatatcaaatttgttcggtttagttgggaatgaagcgagttatggctgatcatcaaaataaattgtgcaaaaaaaaaaacatttaccagtgtaaattttgaattagcgcgcaaaaattacgccaattacgctatttggcgttatgaacaattttgtctgacactggacttgactcatagtgagctaatccttaaattaatttgtccattcattctccgcactacaaatgaccatcgctatgtaccgcaatgtgttctcaaaaagtaaacaaatttgccccgcttggtacaaaattctgttgcgctcatcgcatgccgggggaagcagcagaggtcgtgtgtatgccgagaacaaaatg

SEQ ID NO: 100005 - DNA, 68 bp, Heterodera glycines
tggcaacatatcggtctgcttagcgaccatgatatgtagtgctcacgccggtctgctttgcgaccatg

SEQ ID NO: 100006 - DNA, 361 bp, Heterodera glycines
atttttgtgatttttttaaaattcttaggggtctattttctgaaattttttcaggtcaattcttaggggtgttttttcatttttattgcatttttgagaaggatttttccgaaaatcccgaaaaggcgccaaaaatggcgaaataggcaaataggcattaagcacaaaaagtgcaaaataggcaaaaataggcattataaaagtcatcgtagacaccccaaaccaagcggaaaatgcttttttcgtgcttatctaagcgtattaggtgcgcagaaaaaagaagccctaatgatcagtccctgtaatattatacctaatgaaataaatttgaaataaaaaaggttcaaagcgttcaattatg

SEQ ID NO: 100007 - DNA, 1003 bp, Heterodera glycines
catttatagggttttcagcagttcccctgcaaaattgggttagctttcgatcagtctagaacgttgggtgatcaaatgcaaaaaataattttaaaaaaataataatttaatcaaaaaggaacaaaatttaagagtatcacaaatagaaaaatttaaaaaaatgccttgcatacgtggagaatcgaactttagacctattcaatgcgaagtgacaactctaccgactccaccattgtgaatgtaagatgttccaactctcactttcttaatccgttatgcaaaaatgtttacaaaattaattttattttgtgacaagtgtataactttttattggtaagtgatttcggattttgaattacaaaagaacaaatcccacggcccggttaagctgcacaaaaaaagaattaaaatttgtcattcgaatgctcaaactttctcgaaactaggggaccggactggctagaaacggcactgatactggatagtctcggttacggtcttttttaggagaaaaatccggtccaaacctatttattattatccggactcggcgacggctgcataaatgggacatatagttgtttttaaaagttaggtctcaaatcccgggacggtccagtcgccgggatagacacctggcttagtccggcactgatatgaagccgatgccatgacaacttgtacaatggcatctcatacaaaaggcaaaaaaatcaacaaaagagcgcgcagctgatccattttacgaaattttttctgaaattgctgcatttatgcctttcattagtgttacgcgcgccttgtttattttgcgcgctcttttgttgattttttaaattttttgggtgctgataactccactcagagaagagctaaaaaaatctgaataggcttggactaccgtaccaactattatttttataatggatctgttaaatgcaaaaacgtcaacaaaatttgttataactccattcatagttgagatagaaaaaaaaacaatatg

SEQ ID NO: 100008 - DNA, 622 bp, Heterodera glycines
  unsure (1)..(622): unsure at all n locations
tgaaatnntgaccacagcgatccaaacaataggcgccaccgcgagtttcgccccacccgccgttgaactacctgttggacacccctttcggttcaaaaaggctgaaaggcggggacgcctttttttttgattgttgagggatgttgtattttgataattaaattgactataattatttaaatatttcttggcttaatgtattttcttttgttatggcgttatttttttcatttaagaatggttctttttattcttctcagtctttgctttttgattgacttcaaccaaatttgtttgttctttttctcttttaaattttgtgttgtgattaaagtgatttgaattgactccggtatccttattcggttttatccctgcctctcaacccaaaagacccggaaaaattacaattgtgaaattttgaattttattttaagcatcaagaaaaatttccttaaataaagcctcaaaaaatgcagaaaaagaagtccaagtaggaaaatatgtacatttttgtgcatatttgcacacattttttttttaaatttgaaattttggattcattaattactttttattttgaaaataatttaataatgaatttaattcaaaaattataatg

SEQ ID NO: 100009 - DNA, 1003 bp, Heterodera glycines
tgaaaattaaagaaaaaatcactgcagcagagaagccaatcatacattaagaaatgaaactaaacagaggttaatacttgaacaaattttctcggtaagaaaaaagtgaaacgatcccagaaaaaccgaggaatgcaaaaataacaaatagaaaatgaatgtcagtcagtctatgtttcaaaatttaaaagcgttaaaatttttccctacaaatgccactgtgccgtacttcaaagtcaaatgcggtgatgtcgtttcgtaaaaattcgaggttttttaattaccacaaaattcaagaaatattttttctagataaagtaaataataaaaattttaataactttttttgaaaaaatactgaaaaatttcaaaaattttctttgtgaaattttcgaatttttttaagtttctgaaattgaacggggggggggggggtacgacacgagaggaaatgacaaattggtacttgtgcagtacgccccataaatttttttttatttttaaaaccaattttttataagttttcggggtcgctgatcactagggcagcaacttttagtgaaaaaacttttttttgctcaattgttttgaagaaaggagctcaaaaaacgcatttctgcgttaaaattttcatttggacgtcatttttcgtcactagaaatcaatattttggcgtttcgtcacttaaaatagtgaaaattcacttttttggcgttttgtcactatttttcactatttcaacattttttggaaaattccttaacaaaaatgcaataaaatcaaaaaatatacccctaagaatcgatctaaaaaaatttcaaaaaaatacaccactaagaattggaaaattttttcaaaaattcttcccccaaatttttttcttgacaaaatttttgatttaaaaaatgtcaatatttgctaagagaattttatataggaaatgtagctcatttgcaactgcaatcacttagcacacatgctactcctatggcaagttaatatg

SEQ ID NO: 100010 - DNA, 483 bp, Heterodera glycines
tgctcggatcggcttcaaacaaaatagaacagctgttttttaaggattctgcatcgaatggtgaaaagtatttttttaaagctctaaaagaaaaaaagtttcttcagaaaatttttgaacatgtttcagaaaaatggctgtagcgggtcggtgtgcggatagcgtcttgggcttggagaaagggcacatcagaagactctgacggttcaaatgagctatagagcatgattatcagggctgcaaaaaatatgcacgaaaaatggccaaaatatgcgcataaatatgcaaataaaatcgtgaaatatgcatcaaatatgcacaaaaaaacttgaaaattaggggtgtaatataatttaaaaaaaaagtttcttcagcataaattttatcggttatttttgcaattgtagatcaaaaatttttcaagattttcggcagtaaagctcatcctattgtctgccaaaatattcttataaattgaaaatg

SEQ ID NO: 100011 - DNA, 691 bp, Heterodera glycines
  unsure (1)..(691): unsure at all n locations
tttttggttctttaactaatagtgtttaatggatttaggagccccaacttttctggtttcaaaaatggatgaaatnnatattnttccanaattcattattcttttgatttttttattagagtgtcgggttttttagggtctcgccgggacaaatctcgccgcaaaaattnaaaaaaaattcaaaaattgaatttttcaaggaaaaaatcttagaaaaatttattataagaaaatataagaaagaaaaattattgttaagtttttcttgaaaattgcgcggccaaatttggaagttccatggcataaaaaagcaattttttctaaattttgaaagtttttacttttaatagaaaacttttggttttgtgtagcagtctctaagagattttggtcaaaaactttttgtcaaaaacttattgtaaagatttctcattcgttttttggtgcaaaagtgccctttttagggtttttgcttttttgttgaaatttattagaattttcacaacagcttagcaaaggaatagttttttttaaatattgtgtgcccaaaaaacgcgctccagttttaaataggctatgaaaataaaaaaaaactttctgaattcggcgttttttctaagggacagaggctttttgctgcaaattttttaagatttataattttcatgactttttcagcacgtgcgcaatg

SEQ ID NO: 100012 - DNA, 629 bp, Heterodera glycines
aacgaacacctgatgaggcgacgatgactgtgacagaagtattaaaatggttcattaacggacaaacaaacaaaaaaacaaaaaaacaattattccgattccatttcattttggaaatgcatattcattttagaaaagtaaactctttttagtgttttaatttgcaaaattgctaatttgtaaattataatcaaataattttatcaaataattataattctaaatttattttcctttaataatgttattaaaattaaaatgcgaacggacaaccaaatcaactaaaggtattttcaattaagactgaatgaaaatgctcattattaattaaaacaggttttaattgtttgtttgggtttggctgtcaaaacattatttgggcacaaatttagaaaaattaattttctcatgggaaagaataaattaaaagaaataaaaagttatcgagaatattaaaatgtcagccgattcgccagtaattagagtggatgttaattaattaatgattgcctttgtctgtcaaaacaccgacccaaggcaaaataatttgactataaaagtccacccgaattgggcccacttttcattaattactccattttttaccaaattattaaattaacaaaatg

SEQ ID NO: 100013 - DNA, 170 bp, Heterodera glycines
ttcagagtaccaaaatagtgaaagaactgttttccaatcatcacttaagaaatcaaaattcctaaattgagtaaatcaaaaaaccaatccacttttttagcttatctgactcaattgctctctcttcctcttcttaccaataaacctattcaaattttggtcgcaaaatg

SEQ ID NO: 100014 - DNA, 263 bp, Heterodera glycines
gcgacaaaaagtgcaaatttaaataaaattccatcgttgggcaaattttagattttcgaaatttttcatttttttaatcaacaagcatcaaataattgattgggggaggtgtgaaaatactcggcttgagaaattccaagggttttccggtctcaatttgggagtgaataatttttaaataacttctttaatgactatttttgtttcgtcctatattaattttggccaattcccccgtcatccatttcagtacattcccaatg

SEQ ID NO: 100015 - DNA, 213 bp, Heterodera glycines
aatttgaaaactttgatttgcccactatggcgctaatcacaaaactcattaccactgccagcagtcttctaaatccctgattatttgtctaccattttcatgcaaaaaccgtttactaatggactaaagaggctaatttttctcttctaattttgaaaagggaataaagagcaaaaatgctcgcttttgtctcttttaatttatcaaattatg

SEQ ID NO: 100016 - DNA, 182 bp, Heterodera glycines
  unsure (1)..(182): unsure at all n locations
agaggaaagggattgttgatgaaacttttnaatgtgttgccttttggatattattgaataaacttttgcttttattcctccgccttgtaaaaaagtaaatcatcctttatataaggcatgaattgtatcaatcatcatctatttaagggtagaatttatcaattaaaaatactttaagaatg

SEQ ID NO: 100017 - DNA, 1003 bp, Heterodera glycines
aaagttggccgaatttttccattctttatgcgcaaattattatcaactgataaagtttcgtctaatggattgattattaaaaatattagaaaatttaaattataaattttcatttcaaaaacaaaataataaattgcttttgctttttttattaatgaaatggtgacatttaaaaaatataatttaaaataatatgaaaatatgacttcgtcatattacgtggaaaatatattaaatggctgtaattatttaaaattggtaaaagattgatttacaattgtttaacatggataaagtttaaaaatgagcatcactgtagaaaatggaggaatcaacaattttcaattttatgtgcaaatttatagttttttcgctgccctaatgccaaaaaaatccggcatgtttcgaaccagcaaccgcaccaacccgtaccatggtgtgcaaaaaccaaaaaaaaaaatgcttttcaaaaggaacgaaatatttatttttcacgaaaattaaaaaccgaacgaaaagaaagaaaaacacacgaaaattttcaaacaaattttacgcataataaaatcctcaaattctgatgcaaaaattaaatttttcaaaatgttcgggtggagacttttccgcatataattaagatgaaaaatagcagttgagaagcatcgtttaacaactattggggtgatggagtcctttggataaaattttaaaataattaacaacaaatatttttaattactgagaattgttggagaataagaaaaatgtacaaaagtcttacattttttaaattttattcatattttgaataatttaaaagagcaaacgttgtgaagcgtcatttcccccaacctaattttatttttctgactgatttgtgtggattcggccctccttttatattgcctagggcacaaagtatccgatattatttgatccattagcattttatgtttgtgatgccaaaaggaatcggtgtctgtgagagaaagtgggataaatg

SEQ ID NO: 100018 - DNA, 1003 bp, Heterodera glycines
cgacactgagtattttcgacactaagtaatttcgacactacgttttcgacatagagaaatttcgacactgaactatttcaaaaactttcactgttttcctgcattttcgacactgaaccatatcgacattgagtaaattcgacactatagagaattttttagaaagtaatatggaaaatttgaaaatgttagtacatatttatgataaatagggcgaggatttctagttttttaacaattttttctgcggctttattttgatgagaaatgcacaaaaaacacattctttttcaaaaaattttcgtttttagtgccactattcatcactagattctcagatttagttggagatgctgcgagttatggatgatcaaaacaaccaatgcaaaaagggcagtgatcactgatcagtatttttttttgaattagggcctaaattatgctatttggcattatgaatcattttttctaacactggatttgatttgtctaacattgatttaaccaatagttataccatctacctttttaagattacgaattagaaaataacaggaaaatttatcataaatatgtactaacattttcaaattttccatattactttctaaaaaattctctatagtgtcgaatttactcaatgtcgaaatggtccagtgccgaaaatgcaggaaaacagtgaaagtttttgaaatagttcagtgtcgaaatttctctatgtcgaaaatgtagtgtcgaaattacttagtgtcgaaaatactcagtgtcgaatttacccagtgtcgaaattacatagcgccattttaattacatgtgaaaatttaaaaaaatataaattttgatttacacccatttttaatacatttcgccataaaaagacgaaaaaaatttatccaggaaatccaggtttttcatgcctggacctggatttccaaactgacctggacctggatttcctggacaaaaatccaggtccaggaaaaatccaggttgccgaaaaatg

SEQ ID NO: 100019 - DNA, 316 bp, Heterodera glycines
aaaagatgtcatctcaacagcacataattaattcgaatcgtatactatcattgttttttgtcattgatttatttttttgttttcgtttgtcggccgttgttttttatatctgtcgtatgcgccgccgccgttttttgtttttgacaaaaattttttgattttttaaaagattatttcatcaatcatttgatatagtatacttatttatttgtccggattaaaacatttttttatttgcctaccgatttttatttgtttgtttgtgcttttttctccatttgattattccaaacaaattttgtaagccccgaaaatg

SEQ ID NO: 100020 - DNA, 57 bp, Heterodera glycines
  unsure (1)..(57): unsure at all n locations
aattttntggtgcagacaaatggcacaattaaaaatgggggattggcatcgaaaatg

SEQ ID NO: 100021 - DNA, 1003 bp, Heterodera glycines
gatgaataagcaaaaaagaagaaaacattttttatgttcattattttaacaatgtgttaatgtcaagatgaaaaagccaaagaatgaaaaaaataattaaaatgtcggaagaaagaatgaaaagatgaataagcacaaaaataaattgaaaagaaatttatacaaaaataaaataagaaacatttttaaattcacctcaatttatgcataacaaatactacaacaaaataaaattttaaaacaaacgaaaaaaaaaattgcaattataaaacaaagttttaaagtttatcagttaaaatttggatttcctcgaaaattggcgagcttcaattgtggaaggttctcgcgcacgttcgttcagcccccaactgtttaacgaaatcaggtgacaggctgatcatagaataaacaattaacgcctaactgcagacaaaaagtttctcaaaaattgagttaaatttttaaataaaaaaatttatgaaagcaaatttataattttaaaatgtttacactgtgaattttcacaaatttatgtccaataaaattattatagtaaattcgaaggcaaattaaatgtctaattttaaaaataaaacgaaaaaaggaaggattttttaatgaaattataatagaaagtttcaaagtttatcagttaaaatttgaattttcctcgaaaattggcgagtttcatttgggaaaggttctcgcgcagaccggatttgaatggacaaaaataaaatccaaaaatgcattaaaaaatggacgaaaaatttcagaatatggatgaaataagcttaaaaacttcaaaatagccaaagtaaagacaaaaaattcgcaaaaaaattttgttctatttttatagttggcatatgtatttagaaaatttgcaaaagtgcaaaaatctgtcctaaaaatgcaggaaacatttttttgagaattatttttctcaattgaaaaattttaaataatttttattaaaaatagaaatgttgaagattaaatg

SEQ ID NO: 100022 - DNA, 126 bp, Heterodera glycines
ttcttttgaagtattgggaccgtttcaaaaaaccaccaaaacaacgaggccatcgtaaaattgaaaaagtgccggaaactgtcttgtcaatttgctccgacgaaatgtcatcagacaaccaaaatg

SEQ ID NO: 100023 - DNA, 762 bp, Heterodera glycines
tagatttaaaaaaaattttccatgtcaacgaccgatctcctcccaagacatttggtgccaaggaatgtttagtaagcaaaccttttgtgtcagcttatttggccaaaatgcgaaagaataataaattggtctttgggaaattggccaataaaaaaatagaaaataaaaaattgcgtcattaaaactgtaaattaattgtaaagaaacaatgccccgaaaaaaagcgacgtcaatttctacctgaacaaatagagcgattggatcaagaatatcaggctaacaattatttggctgcttctcaacgagaaaaattggccaaggaaattaacctcaaagaggcgcaaataagagtgagaaatatacaaataattatttaatttaaactattaaaatatggaaaacatggaaaactttgattatgcaattaagaacgcggtcattaattaataattaattgcaatgggttagtcttttcagcgaaaaaaactttgaattatggcgtgtttcgtcctaaaaagccataaaaagttcattttttcgccctaatttatttttctgtgcaatttttttcccttttcgagatataaagcttgataagcattctctggatgaatgcaagattatttacatgatttgtttacatgaaaaatgaaaacatttgtcgccgaaacggccatttgtccccaatttttatagatttggttccaaaatcggcgttacaaatgtggactaaaagaaaaagaagcaatctcttggtaaatg

SEQ ID NO: 100024 - DNA, 169 bp, Heterodera glycines
gctctaacaaattcaaatacttttgattgataaaaaacaaagaaagaatttatttaaacatttaaatttattatttttgttaatttttttaattggaaaagaaaaaaaatttgttgtcagtttttctgtttatccgacatttacatttaattttttttttcagaaaatg

SEQ ID NO: 100025 - DNA, 93 bp, Heterodera glycines
ttcttcggtgccgatgacaaataatggtatcaaactttgccttgttttaaatgtttaattttgcatattgtccttttaggcattgtgccaatg

SEQ ID NO: 100026 - DNA, 87 bp, Heterodera glycines
taattagttgttgattacttacgaaagcaattaaattatcccttttcccgtccgacaaattgtgaaattaaaaaacaaaaataaatg

SEQ ID NO: 100027 - DNA, 418 bp, Heterodera glycines
tatatggttgggatagagaccgtacggcatcgggataccgacctcgagatccgtaccgatggctttttcataaattctcgagactgatcgggattcctccgaccacagagcgagcggatccggtgaggggaaccgaagcagccaccactctcacaatatttccaaggcttggaagcgaatttgtctcggcagctgacgcacggtgagcggaaatggagccgtattgttggcataaagttgcgctttcccgcgggggcgtgtcacgcgtgacacgagagcagtcagcacactgttagtgtgcagctggcactcagcatgagacggctcctgcacgtggccgttgcgcctgtcggcacagccgccgcaaattggtggcgtcactacgacgagtgccgcagcggcggccgccgcgacaatg

SEQ ID NO: 100028 - DNA, 141 bp, Heterodera glycines
aggggaaattcatcatcatatgatggagaaagctcttataattcatgcgcatggtgtgtgcttgtggggagggattttgtccatttattttgccatttccccctaatttcgcattcatttgatttttttatttttttcatg

SEQ ID NO: 100029 - DNA, 255 bp, Heterodera glycines
cattcacaatgaaaggtcgattttgagcttgacagcggtgccgatgtcacagtgattgacgagattgattggaaatgcatcggaagcccaaaattggaaccatcccaaggattggtagcctatggcggaaaagccatcggtggcattttgggaaaggcaaaggtgaaagtgacgcacgaaggcagaacgattgagtccaatattcatgtcataagtggtaagcacaaaaatttgtgtggccgcaatttgatcatg

SEQ ID NO: 100030 - DNA, 719 bp, Heterodera glycines
tattttatttttttataaaatagttagatatgtaaaaaatatattttattttaaaaaattaattaattaaaaaacataaaaatagattaaacaaattaaaaatagaataggtaaacaaaaaaatgtaatatataaaaaacacagaattaatgggagtcgaaccctcagccatcgcagcacaaaagtcaggcacactaaccacttgaccaccgagtcacttgccccattgccatttaattcccttttccttttccttcttttttggaagaaatcccgaccaaaagtgcttgagctccttttttagggcacttcccggacccggaccaaaacaaccctggtatcattcgaaagccaagagtttgtagatgtgcacaaacatatttgttttttgatttgaccacttttaaggcatgcaaaaagcgttcaaaaatgggacattcaataaagtgtgattttttgacttgtttttcgaatgcagttcgaacagttctaaaccgatcgaaaccgcactatttttcccttatagcccttaaaaaactacgtcgatagaccccacgatcgacctgtaaaactcgctagaaagtcttaaattagtttttatgcttggatcatgggtataaatttcttatatagggaatatgtaaaaacaattttagctgtcttctccagtcaattatcactggtaaaattaccatcgaaaagaagttgaggaattcatg

SEQ ID NO: 100031 - DNA, 1003 bp, Heterodera glycines
gaagtctttccgtgccatacctggtgcctatcgacatctgcgagaaattttatgaaatttaatacgatttgttaacagattttgtctaaaattgaccaaatgacgcagtttttgactcaatttctacaggattattaagtaaaagcctatccggcggtgccgataggcgccgccgggaaaatttcacaaattttgaatgaaatttgcgatgaaaaatgagttaactttaattaaatttattatttaatttatttaaaaatatttggcattctgtcttagaaaaattttcaaaaaaatcaataaaatcccgcataatcccgcacaaaaaatcaaatttgcggatcccgctgcgggattggaactcaaaattctttgcgggacgggatcccgcgagattaatcccgcaaatcccgcattttccaaaaaatgcgggattgcggactgggatcccgcaaaatcccgcgcgggatcccgtcccgcgccggtctctaaatgaaccgccacactgatggatgatgacacgaaaaggcgcgttgcaatcgccggtgtgctgcttccgcaaagttgttcgtccgatcctgctcgtgaacagttctttcgtgcaaaatgtccttattgtttttgttctcacacctccaaaatttgataaaaccatccgcactaagttagcgaaaacataaagatgcccttcatgctcaattttttttgtggttattctgcgataatatattatttgccatgaaatgatagttaaatttaaaaaatagctgaagaaaaggtattgtagttaggcactgaacgaaaaaaatataaacacaaattagattattgtaaacgaaacacacatacctatgtgtatgtaatgaaaaatatataaataatattatacaataatggtggaaaaattattgtcccttggggcccagttggcggggcccagtcggcggggcccagtcgtgcccgtccgttcttttgtaccgttttcccgctaccgtatcagatg

SEQ ID NO: 100032 - DNA, 410 bp, Heterodera glycines
ggtgagtttatggagtatttggtgtgtattgtaattattgttgagttttttttctcgaagtgagcagctcgcttcccacacccgaaatttaaaaaaaaatttagaaaaaaacgaaaatttttataaaaaatacaaagaaaattttcatagcattaggattatgcgttgaatatcctaaaaaaattgccccgtttttgtgaaaattcaaaatttaattttttttttttttttttctttaggttacatgcaaaaaatccgcgacctggtcaacaaatttcaaagtgcaaaatctgagcgaccggggcgagtacgtgttccgcgttgcggcaaagaatgcggcgggttggagcaaaccgtcgccccaatccgaccgaatcaaattgcgacaacgctatggtccgccgggaatg

SEQ ID NO: 100033 - DNA, 71 bp, Heterodera glycines
tagcaaactaaaaatgcaattgcatttgcatattgtttttagaaaattcacttcaccatgccatccaaatg

SEQ ID NO: 100034 - DNA, 232 bp, Heterodera glycines
  unsure (1)..(232): unsure at all n locations
ccccttttcacacagttatgatgnntatcagggatggccgagggtttcgcttttcgcatttcgcctttcgcattattcgcatttttggcgtttcgcatttcgcttttcgcatttcgctttttggcgcgaaatgcgacttttacacccctaagaattgattaaattcccataaaatttttcaaaattttacctataaattggctaattttcagtgaaaaactgtttataaatg

SEQ ID NO: 100035 - DNA, 261 bp, Heterodera glycines
ttggtttctgccacaactgttcaagttgaccgaccaccggacttggcaattgggcagtttggactcttcattttgccggccaagcacgacaaagcttcagatcagaaaatcatttctcataggccaattatgggaaaagggataattgaaacccttcccaagttccaattccccttcagtgccgcaactgacattcattttgctgaaaaaggcatcgcagcagcattgtcgtcttgttttcttaaaaatcggataaaaatg

SEQ ID NO: 100036 - DNA, 742 bp, Heterodera glycines
agaaacactgaggatccgacaatctgagctttaaattcacacacacacacatatatcattttgcattttcatataatcatttttaattgcattttcatataaccatttttaaattgcattttcatttatcattttcaaattgaaatttccatatacgcattgaaataaaaatttgaactcaatataatgccaaataattatataagattatggtatgattaatgaattttgtccaatggtagaccagaaagggtccatatttaatcattaaaagtgaaattttgaattttgggctttgtgtaaatgattcataaataagcagtttgcacacgatgggatgttttgcatattaaaatgggtcagttttcgggatctcacccaaaaatttgaattttgagcttcacatttgggcttagtgaataactaatcgcgcaaatattggtgggcatcaaagaaacggggtgaaaatctgggtcatcaatcggcacgcgagaacatattgtcaacatataaaggcgcaaatccccgcagtcatcctcatttttaaatgtaattcgtccaacattgttcataatttatttttatttaatttaatttaataattcaaattttatttccatttctttaataattaaattccaattaaaataattaaccactttttataattttaattccattttccctaaatctcaatttatcccatcattttcaaaaatgtccaactcttctttaaaaaatg

SEQ ID NO: 100037 - DNA, 271 bp, Heterodera glycines
gttgcacactttttttttataatgcaaagtagtcagataggacacagtagtgtgtctgcacgggtaccaccacacacataaatgtgtcccagtcaataagtgctccaagtagtcagataggacacagtagtgtgctgagcacttttgtgtctgatttaaagaacttaaaaagtttcttaaaaattcacttagggaaaaatgtctcaatttaaaagtctcaaaagtgtatatttaactagatggaatcggttttgaagtgccattgactatg

SEQ ID NO: 100038 - DNA, 417 bp, Heterodera glycines
aaaaggaggcgagttggcccacaaaagaatttttataaactccaaaataaaataattaataattattaggaaaatgattttaggcacagaaaatttcaaaatagatataatgtaaaatagcacaaaaaacagcaaaatagaggtatataaaaaaaattttattatgatttttaagtagcaaatttcaattgaagacaaaaaatcaaaacaaaaaaaaaagaaaccgaaaatgagctaaattttaaaaaccaaactttttcgagaaaaacaaacaaattttaggtgacgaatttttgaaaaatttattttgaaattttagattttttttttattgtattttttgttaaggaattttcatttattccccaattttattttgcattttcttagcttttaaaagcgcacaaatgcattatg

SEQ ID NO: 100039 - DNA, 826 bp, Heterodera glycines
  unsure (1)..(826): unsure at all n locations
catcaattcttgnnttttattatttctttattntnaataaaaaactnaaatatcacaattaaaanccatatnaaaaatttnaaacccaaaatntnncnattccctccaaaactaattnttcancaaaatactnantnantttatacaaccatncataacatatacatctacttatataatnnaatacaacantttatnaacatatanntaatctnatatatcatatatcatccatcaatcacattattntttctgttcgggtggtcaaccccgagagatgaaagttcacaattgcatttattttcccttggcatttgtctctttcttttcctcttattttccccactctctaattgttgtgtcttcctttattaatgtaagacactattgatttatttggtccaatgcatgtccattcccctcattcattcggttgctttttatgcacttatttctcttcgcctaaatttttgttctcctccaatttatttattccgcctccgacttcgcccatttttatttaaaattgtttaatttatttgttcatcaaataaacattttattgtgtcggcttgaagaccgaacaattggcgacgcccgtcttaaataaagactcaacgacggatattttggcaatttcggacagattccgaattgctattcaactttcttcaaaaaagcaatagacccaataagggtgagcttccgccaggtgcggtttattcatcgaaaaaaaaccaagatacccaggtggttgcggtttccgccaggtgcggtttactcaacaaagacaaggaaattccccaaaagttgatcaacaaaaatg

SEQ ID NO: 100040 - DNA, 64 bp, Heterodera glycines
tgtgggttatatttaaaatttatagaattcgtgcacaaaaaaagcaaattcttagggccaaatg

SEQ ID NO: 100041 - DNA, 51 bp, Heterodera glycines
taattgacttaattaccttttaataccctcgcactaattactctcaagatg

SEQ ID NO: 100042 - DNA, 60 bp, Heterodera glycines
ggtaagaacagtgccaaagatgctactgtacaatggtaatacatttcaggaaaaagcatg

SEQ ID NO: 100043 - DNA, 1003 bp, Heterodera glycines
ctctcgccaaactctcgctctcgtctttttggggactctcgcctctcgccaaactctcgctctcgtctttttggggactctcgcctctcgccaaactctcgctctcgtcttttctgagacaagtcacacccctggtgtataatatgatttaaatggtgctatagttttatataatcaaatataaatttttaaaactatttgcgtgctcccgggacagaacccgcgttgcatcgctcccctgtggctgcgctactaccaagtgcgctatttgcacgactaatccgttcccttctaaagaaaatttatgatgaaattttcctttctttttttgattattatttgttaatcataaacagaaattttgatttttttttttgcaaaattaaaatgggaaatattataaaagggcgcaccccatccgtgtctcttttaggtggggcttagaaattcaaaaaaaacatatcaattcatttttaaaagtttaggtttaggccttagaattttttttttggtagcccaggttaactactgaattatactaaaaacgtatgttttgtaagcattggattaaaatttgaagaaatgtccctattattcaccacaacatttttcgcctcaaacatcataaaattgaatgaaaaatcaagatgaaatctgagtgagaacccaatcatttgaatttatcacgataattgaaaaatgatgaaataatgaaagaaattataatggacaaaaagaaggacaatgagaaagcgaattaatggtgatattttcatttagaaacagcaaaattcggttcgttttggtcagttgccaattacgatttgtaatgtttttaccgataaaaaatcgtaatcgttgaaattgtgattattttttgttgaaaaacgtgaggaattgatatttgttcatcagcaacaccggactttttgaagccattcagctgcagaacctttgaacttatgacgacggtccaattcaaaaaatccttttattcccgatg

SEQ ID NO: 100044 - DNA, 268 bp, Heterodera glycines
ttaaatataagcctaaactttttggcctgtttaaaaggaattaaaaatttttaaaatatttattcatctcccttttgatagaaaaagcatcagagagccttatttaacttttaattaacatttggtgcgtttcagagcactttctgaaaaaatacttatgaattaattttgcaaaaaataaataagtaatgaaaaagtcagaatttcgaaaaattttaaaaacaacaagcgttggcattttttcaggttaagttagtcctttacaatg

SEQ ID NO: 100045 - DNA, 351 bp, Heterodera glycines
ccaataaagctgttaaaaacgattttggagttatgccaaaaaatgttttctgttttttagtaaaaaggttaaagcgtataatcgaattccaaaaaaaaaaataaaataaaatttcttcttagaatgcgtatatggtttaataatttatagatttttaaatttatttaccgttataattgttttataagaatataaatttaattatttgaaaaattgagccccctgcggctctattagaggaaatgcttatgtaaatcgatttgcaaatatttgttacctaaaaaaactattttggagttatgccatcattttcattttctatcaccattattcttttcgtcacattgaatg

SEQ ID NO: 100046 - DNA, 453 bp, Heterodera glycines
aagtttggtagcttttctaataaagttatcaagcaaaatttgtttgatttttgagggctttgtattttaacggccgcgcacataatgatgattttttaaataacgacctcaattttccgatcccgtccgggagccgttgtaaaagaaggtggttatggttaaataacctctgatgagggggctaaagcccccccgaaacccaaaaagtaaaaaattctcagaaatttttttgaaattttaagcaattttcttaacaaaattgcattaaaatactcaaaaattttcccggcggcgcctgtcggcactgccggacccctccctattttaccatagaaaaatggaggacaaaatggcaaaaaaatattaatttttggcgaaaaacggcgaaaaattttgtaaaatacaccccataaatagggatttcaaaaaaccaaaaatacacccctaaaaatg

SEQ ID NO: 100047 - DNA, 91 bp, Heterodera glycines; identical to SEQ ID NO: 98538

SEQ ID NO: 100048 - DNA, 367 bp, Heterodera glycines
aaagatgcacatactcatgaccttgattgttaattaaatgatttttctgttctttctcgtcaatttcatagtcagatttaatggaaggggcaattaaaaataacattaaaacttttatttatttattatgcataagtaatttaatgcagaaatttatgtaaatttattatttgctaaaaatgagaattgcttaactatcattcgatcagtaattattattcaaaaagtggatgtatagtcaacaagaataattatttttattaaatataataatacaattttaatttatattaatttataatgaaaattatttaaaaagtaaaacatatttccttgattttttataaatttgtagaattaaaaaatg

SEQ ID NO: 100049 - DNA, 165 bp, Heterodera glycines
  unsure (1)..(165): unsure at all n locations
ctgccaatttggcgatgtgtgcacgggtggtgtccacgcgtggtgcgcaaaccaccggatgccagaacgatacatcgaattggacgaaaacggcaacaaatttcggccacncaacancaacagcaccagcaacaacaacaccgtgtgccaccactgtccaccatg

SEQ ID NO: 100050 - DNA, 1003 bp, Heterodera glycines
ggaaattccttaacaaaaatgcaataaaatcaaaaaatacacccctaagaaacgacctaaacattttggtaatactttggtttgtcccccccctattcaaaaaaaataaaaaaattttaaatctcttaaaacatctctcctggggtttttggggccactgatcacgaatccggcatccgtttcgacccatttcgaaccccggacccaaattcgaacaaaaatcgaaaatttatttttcaccaaaattcacactgcagcgactcgtggtcacaaaagacgttcaaaatgaaagagcgatggacaacggccaatagattttgaatggagaatcgcacgactgccaacgaacgacctgcacccctaagaattggaaaattttctttaaaattcttcccacaatttttttttttagttaactatttcgagattttccgtcactaaaagtagcgaccctactctgatgatgatgcagggctggatggagtcggagatgggaacgaattgttcatttattagccccttttactgttgaattgagtttaattttttttttggaaaatgtgccaaaaaaattatttaaaaaattctatttatcccccctggcacataaatggagactggtatattatttttcaacctcctcagaagggggtatataattggaggccggcagattaatggagactggcatataaaaagagtatatacggtaacccaaaatcggtcatttcgcctactgacatttcgcctactttcatttcgcctactaattagtaggcgaaatgaatgtttttggcttagtaggcgaaatgaatgtttttggcttagtaggcgaaatgtcggtaggcgagatgtcgagtaggcgaaatgtcagtacattttgcatatcgatagacaaagaaattaggaacaaaatgtaagggtttttaagagcaaaaaaagggttaactaaaaagttataacggtttctcttctaaaattcttattttttaaattttagatg

SEQ ID NO: 100051 - DNA, 88 bp, Heterodera glycines
ggttagaaattggatgaatttatcaatttttagctccaattgggtcgtgtaaaattaatttatgcaattgcttcttcttcttcagatg

SEQ ID NO: 100052 - DNA, 585 bp, Heterodera glycines
ttttgaaaaaaagcctagacctggacatggatttttttccatatttcgtctgaactggatttcctagataaaaatctatgtttgcaggaaaaacggcttgtcaaaacttgtttaattaaaataagcaaatcatttgtaaacgaagaatttggggacaaaaataagcacattttaagttaattttaaggcttaaaacggccattttttcaacaaaatgttttcagcgcattttttaaagtccggcagtgccgctaatcagtgccggaagtttttgaaaaattcaaataaattttaagaaaatatgtatagatttcttatatatttttttagtttttattgggacctttttaaagagttttttgctttttatggtacattttgccattgacctgagaaccaacgccttttttacacacaataagtgctattttgtattaatatccaattgatttttgccgtttttgtgttccatttccctcctccaaatgaccaccaccaactcactcactaattattcatattccatgccaaattttttaattatttcactaatatccataaattatttaaaatttttaagccatg

SEQ ID NO: 100053 - DNA, 310 bp, Heterodera glycines
ttttgagaggcgacggcattgaaatgggtgaaaaaaatgaaaaatgaaatggacaccctcaacggagcgccgtgccgtgggcaattggcggcaaatcgcgcaaaagagcaaaaagttgtcgcccgaaggcattgcgaaacaaaaaattccgtccattgaaatcaaaacaaaaaattttgcctaaaactgaactgcaaatttttgttttgaagcgattgcttcggtataatttttagtgaatttttggggtttttttttttaattttgaggtgaaaaatggaattttctatattcagagaaacgaaaaatg

SEQ ID NO: 100054 - DNA, 283 bp, Heterodera glycines
agatgtgtaccaataaatagagaatgccagagaaaaacattatctttttttctctaattttttgtctccttttggcgtactatctaatatttttgttattaggaaaaacaacatttatttcgtgacgtttaacttttttcctgcacgttaaatacacaccaaattttgcatgtcgatagagaaaaaaattctgcatcgattcatctgttattttttgattctatctgttagtttatgaattatttagtcattaataacaaattatccaattatagctttcatg

SEQ ID NO: 100055 - DNA, 418 bp, Heterodera glycines
tcgcaacaaaaaaaaatgggaaaacgaaattccaagactccattttctgttggcttaaaaaaatatggaaatcataatcccgataaatcacgatgaaaaaaatatcacaagaatggggaaaatctggcaataaaatttaaaaatgagcacgaacgggaaataggtataatttttattctaggctaaagggtagggtggggagcgtgccgtaaaacttttacggcggcaggaaatgagaaatgtatgtaaaaaccaatgattacatagggagtgcggggggcggcacgcccgcaaggcacagcgccttagggcgggttggccatcgacgaggaaggaacggtgccgtcgacagatggccaagacgcggcggcggccgtggcaccgccgcttctctaagagaggcgcttgcgcttaaatg

SEQ ID NO: 100056 - DNA, 510 bp, Heterodera glycines
atcattttaattgattaggaacaataatttttgcgctgtaatctgctgatcgtcttttgcaaatgcaaaaccagcagacgaagctttgtgccaaaattgatgcggtggaaacgaactcttctgcaaaatggagtagtatgattcttgagttgttgaatagaggggaggcggaaataatgttacatttagttgatttatcagtttttgtgttttcgctcgcaaatagttacaaaggatatttttaaaggatgaattatcttcagtgtcgagaatggttagttctgcttgttgaataaataaagaaaagtttcaataaattttttccagtcatcaattaaaatggatatgcaataatataaaaaaattcaaaggagtgaaaagttttccaaaaaaactgcatatattttctagcttgaaaaattataatcaattaagagtgttttcccttcatgttttttcaaaatttaacctaaaatcaataaattattgatgaatcatgatttcagaatg

SEQ ID NO: 100057 - DNA, 488 bp, Heterodera glycines
tgaaaaaaaaatggcaaaaattggccgaatgctatgaatatttataaaatttatacttcgaccttgacctggacccaggcttgggtttttgtcctcagatccaggtcattttctgcaaattagttttttcttgactttgtttttgtccaagtcttgaaatccaggcaaggcatgaaaaaacccgaaaaaaccatgaaaattctgctaataaattacacttaaattttgtaaattttatccggcgacacctttctatacagccgaactcaactctacatattaaatatttttatgaaatgtataaaataaaactgatgagaaaacatgttgttaaatttaattttttaattttattttcaaggtcaaatttttattttataagttcaaaacgagtaaattgattaaaaaacatatttttatatgtctttaaaataaatttaattctaattgtataatttattttaacaactttaaaactccaggcaatg

SEQ ID NO: 100058 - DNA, 444 bp, Heterodera glycines
tatccccccggactttacagaacatttttccgggctcccggaagtgataactatttttttattttttaactttttaaaaaaattaaatttttttaaattaattatttaagttttttgttcttaaaaatctttaattttataattttaatttttacgataaatgttttaacagaagttgcaactcttcaaaaaaattttaaaagttttaattttattaaaaagaatttaacacaaattttacatttatattaatttttaaatcatttttaacctttataatttctggattttcccggtcccgtggcactctagtcgagaccgaggcgaagtgggacggaaatggcgacgactcgttgcacaatttcggtgagcggctgcaaaattgagtctcggaaaatgaggcattttgaaacacccttccataattttttaacagccaaaatg

SEQ ID NO: 100059 - DNA, 466 bp, Heterodera glycines
agacaaggcgattgtaatttggcacaattaacaaagctactggcgcagaccttgccactaattatctcctcctttaattttgctttttcgcagggaaatattgccgacaaatgccaaagattggtttctttaggatagggcctaatgtaatgaaaggaacctccgactcattcagttacttaaatgggcatttttcatttggccataaacccaaaaagtatgacgtgccgtcgccatccatggcttaataagtgttattactcattttgtttgcgtataaattggtagtgccctgctgaaatttgacacagcttttaatctcttctcgcgtggacatttaacaattttaattaatttcttcccccccccccccccacaaaaaaaaacggaagaaaaccatttcttttaatgccaggacgaaacgctggtacactgcagtctcagcgagttgccagatgcgacaatg

SEQ ID NO: 100060 - DNA, 830 bp, Heterodera glycines
caaaatttgaatttttagcgaagaaaatgccgaaaaatactatttagatcggtgaaaaggcacggaaagatgaaattgttcgtacttaggaagaattacttttttatgcctattttaggtattgatgattatgtgatctaaatgttggactttgccatttacgtgtaacatatatttgatttttacacatgaattcataaaaaaagattggcatttagctgaactatgtacatatagtcaatcccccccccccccaaaaaaaaaagaaaaaatatcacaaattatacaccattgatttgtctcaaggagttaagcactaaaaaaagggtctccagtagcgggaatgggtttaaacagttttaagttggttaaaacttcgaaaatggaaagaatttggcacataactttttaattttaatttatcagaccaaatgcgaaaaatctgaagtttcgactttttgttcgagatcggttttccaagccattcccccatctgtttgtgcatcgctcaattaccacgaattaaatggcaatgcgacgaattgcgccgagaattaggccaattagagggatcatttgccctgcgggtacagtgtgatgggcacgggtatggtaaagtgatgtcaattgggctcaaagaggcgaatttcttcaattaattggatggaccgaatgaccaaaacggcaaattgagggccaaacgaaatggcttttcagctgtgaagcggacaaattcctccaaaagaagaaaaaaagtctcaaaaaaattttttggataatattcaatttttataaaataaaatatattatttctttttattcagcagatg

SEQ ID NO: 100061 - DNA, 292 bp, Heterodera glycines
ggttaatatttattcaaatggcttgtatttttcaccggaatggattttttccaatatttttttatttccgctgatcattttcctcatttacgacgacttttttctgctttaaaaacgctttttttgtggcgcgctttttccaaaaattttgtgggacagagggggggggtccacggacactaattgaccattggtgtaacggtgaatcggttccattctcacggaataattccccatttgcttgcaaattattaatgcagaatggcactcccactttccatgtgccaatatg

SEQ ID NO: 100062 - DNA, 230 bp, Heterodera glycines
agtaagtgccatgggacggggaaaatgcaaaataaaataggggaagacagggcggggccaagcaaatttgtcgaattttttccatgacaagatggataaaatttctttacctgttaataacttttggattactttgacttggctttgctcagccttggaattcgagcagtacacccaatgttttagcaccaatcaaattcttattgttcttttttaggtttaactacatg

SEQ ID NO: 100063 - DNA, 117 bp, Heterodera glycines
tttgtttgagcagcgacgacgaggaggaggaccgtcagcagatggcacgtgccattgctgccagctcacgtcaacagcagcagcagcaaatgtttggcgccgggagcaccgaaaatg

SEQ ID NO: 100064 - DNA, 1003 bp, Heterodera glycines
tgcgatttttaggcacaaaaaatcgcgaaataggcattaaataggcacaaaaaagcccgaataggcacaaaaataggcaaataaaattttttattaacgctttttaggtaacaaaacacgtttaaactttaaatatttcaattgtaaatgaaattattaatgttttaaagttttttttcgaatatgaacaaatttttaaaccaaaaaatttttattaagaaaaaaatattaaatttagggataatttttttgaaaaattttacaattcttagggtgtattttctgaaaaattttttgggtcatttcttaggggtgtatttttttgtttttattgcatttttgttaaggattttttcaaaaaccctaaaataggcactttaggcacaaaaaccccgaaataggcaaagttaggcattataaaattcatcgtagacaccccaaaccatgcggaaagggcttttttcgtgcttatctgtgcgtattaagtgcataaattttaggcatttgcctaaaaatcgcatccctagtgctaacataatttatttgcttttggtcttttttgttatgtttaaaaaattatttgttattcaaacctatcagaatttaaaaagctcacttttataaaaaagcacattttgaacaaaattttgagaaatttcattttaattttcttctaaaacccaattttttaaatgtaatattttattgttttttaaaaatttcttttatcaatttaataattttttgccatttttaatatacagattttcactttttcactaaattccctgattcaccaattctgtatcgcaaaaatcaaattcttaatcgacaaaattttagcaccccaataaattatggataataattaagataattttagaaaatgatagagaaacgcccgcttttgatgatgatcgtccgaatgctagtccagtaaatagaaaaagtagcgaaaaactatttaatttcgtaattattaaaatttttttaaggaacaatg

SEQ ID NO: 100065 - DNA, 819 bp, Heterodera glycines
tccggaagtataagggtcaccaagcccatacaaaatcaagggttgacaaacccaattaaaaaaaaaacacacacacacacacacacacggatcaccaaacccaatcaaaaaaccgaaaaaggacaccataaaaagccaaacataattaaaagtcataataaaccctacagcaaacccatcactaatttaaataattaagtggacagagcgactcctaattcatttactccgactaccaaagccaacacgaaaaagaaacaagtggcgaaaagcactacactgactgaacttataaaattaaaaacacaaacggaatacaaattaacgaaacttcgcccaaaacatacggagaatatattgaaagaattttatgaaaaaaaggagcaaataattaacaaaaacaaataaaattctgtgatcaaatttttaaatttgtgataacaattattaattctgtgatcattaaattttaataaaaattatttaaccagtgataaaccaattaaaattcgactcgatactgattatccactaaataaccataaaagggtacttagttaattattttgaatttttaaaatacaaactatgtccggtacgcttcgtagcaaaatacccctccttaatcgcgtattaaaaagggaaatagaaacgatcaaaacaaaaattgaggaaaacaaattcgaatatgatcaaaataatcccggagaatgcatgcggatattcaataaaacaaaggaaattatccaaaaaatagagccaaattttgaaaaattaaaagccttaaataaaagatggcaaaatttaatgagaaaaatg

SEQ ID NO: 100066 - DNA, 273 bp, Heterodera glycines
ggtacaacagtgataagtaaattcattaaattaaaatgaaaatattttttaacaaatttaattaaaaaaatacatgaaattctatcaattaaaaaaataattaattaaacttataaaatttatttataaaaaaaaattaaattaaatataattttttatttattaactcaacaaaatattttaaattaattaaaatcattgaaaataacgtaaaaatgcacaaaaaaataatgttacaccgtccggattcgaacctgcccccccctcaaaatg

SEQ ID NO: 100067 - DNA, 321 bp, Heterodera glycines
aaaaatcacctttttgtttttcatttgcccaagccctggtattagacgattaaaaacagtcaaaaaatggtgcgacaattcataaaaatctttttccctaccattttgacagtaacccgcaaattaaagaggtttcgtctgaaattgttcatttatgtcaccaaaaataattttgcgcgtcattttatagactttttaggggtgtacaacacaggaaagcaccgtaatttttcaattttatattatttattttttttaagatttgagtaactgtggccgaaaaactgtaacaacaacagcaaccaattgtttgcagcaatg

SEQ ID NO: 100068 - DNA, 669 bp, Heterodera glycines
accattttaaacagttgcattatttaataataatattataaattatataagtaaaaaattgatttgggataatcttacttatgttcattcaacattttaaataaatgcatcataatttataataatatataaattatataaagtaaaaaatagattggtataattctactgatgatcaatcaccattttaatattagctttattatttaatattatttatttaattatatgaagtaataaataatcctacttaggataaattactattttaaatatatcattattatttaataataataatattatacaaattcaattaagtaaaaatagatttagataagcctatttatgataatttactattttaattagaattattattaaagatttgttatcttactctgatgatcactatttcaagtcatcaaatttttcttcctttataagtctatgtgattttatgattactttacttcatttgacaatttcttttttctttaaaaagaattcgttattttaaatatatatttatcttctattctaattatattaatattagttaatttcttaataaaaaaaatttgtttaaacttttatgtaattaaatgaaaccaaaaattaatggattttaatttccatttgaataattttatttaagaaaacgtaatg

SEQ ID NO: 100069 - DNA, 1003 bp, Heterodera glycines
aaaaatttttttaagataaaaaaccatgataattttttatccggggttttaaaggtcgctaatcacgaatctgacatgtattttgactaatttctaatccctaacccgaacccgaataaaaatcgaaattttgaatttttaaaattatgattttttgttcaaatttagattaggaaatcggaattgatcaaaataattgaaggattcgtgatcggggtcccccaaaaaccccagagaataaatttttatgactatcacaaaaaaaattttgcaaaacaaaagggtccccccttttgaaaaaattttcaaaaacggtaacttttacagtagcgccaaaaaagttatgtccataagaattcaaaaagctagttcgaacattttttggaataactttttttgaaccttaatgatatttttgaaattttgcagaatatgtagaggacacttaggactattgaattataccaatactgttggatttggttggcaaagaaaaaagttatagccaaaaacttgtgctcgtatgaaaacggtctggtataaaaagcatgtgaccaaccaaatcaaatattgtattgtaattgtttaggtatcccttcccaaactgattcaattcataaaaaataatgaataaacattattgtttttggttctattggactttatgaatccaatggctttttatttgttaagagcaaaccgcaaggcaactaggtagttgcacttaaatgataccaaaaaactaattggacacataaaatgcaatagaaccagaaattattcttggtgtcatttgatagctccaagagtcctctattaatctacgaaggatgaaaaaaaatttctcaatgattcaaaaatttatggttcaaaatatcagaaaaatacttttttggagtttgtaagagttgccaaattttttcctgctcgtgtaaactgcaatagagccgtgattttaatgattcttaaataaatacctttagcaaaaaagagtccggtaatg

SEQ ID NO: 100070 - DNA, 228 bp, Heterodera glycines
ttgtccaaatggttgcactctccgagaaaagatggccaacccaagcgattccgtttcaatgatattaatgaacaagtgggcgtccatttgatcaacaatttcaagcaggtggcccacattttcggcaaatcactgatttttggaattatttaggaatttatgcgtgccacttcttcagtcagttacgaaattcatttttctgttcgcgtgccgtcaatgccaatgatg

SEQ ID NO: 100071 - DNA, 788 bp, Heterodera glycines
agttagttgattggacaacagaaatcagctgtattcctccgaaagacatataaaatcccgctagaagacgaaccgtccactagtgcgaacaatttggagaaaaaagattgattttttttgacattatttgaaggcgatcagataccaagatttttgatcactattgttgatactgtgatcgtattgttaataaaaaaaaaaatttccaaataaacgtcaaactgtgtcggccaaagaaactaatttctgaactggaaaaggaagaagaaaattttgaaaattttgatcaattggaagaaattattgaagaagttgaagaatttgtacctattgtagaaattccggttttaacacccgaagaaattgttaccgagcttgaaagaagggcaaactttccctttccaatagtgcatatttacccaggaatttccaaattaacgaaccaaattttaaaaactgaacccttcacataccaaaacaaaaccgtatataaattcactttgacaataactatttttccatactgcattttagataacctagataaagccgattctttggaaagaatatcacaggaagtaattttagaagcttacttaaaagtaagagaaacactcaactctaaccctgaaaaacgactgaaatttgtcaaattcattctaaaagttttatcaagagaaagaaaaagtttattaaaaaagtggagaagatctgaaagaagtatagtattacaccctattaattcattagtccacaaagagtatataatttaaaaacttacgaaaatg

SEQ ID NO: 100072 - DNA, 532 bp, Heterodera glycines
caaataaaaacaacgattacaacaacaacaatcgctctataagcagcttcactaataatagctcaacttttggcaatttttgaaacaatcgcacgaactttgacactgggaataaccaaaacaacgcatacaacaatgctaatgaaagtgggcaaatggtaaataacaatgtcggatggatggattgatcacaaactttaatcaattttgcaaaatagttcatgtatttgaatcatcatttcataataaatttaaatattaatcattataaatttctttaatcccctttggtgtttgaatacacccgtaaatgtgacaagcgcatcgccggttagcggcatgatgcattagtttctcttttgtgccggttcagaaatgccgcacatccctttgttatttgaatttgaccccgttcgcatcggtcaccgaagcgtcggaccttggctacacagatggccacgatcccgcctcatataaaagggcacatgggaaagtcgccctcttttttttcctccattcacccccaaaaatg

SEQ ID NO: 100073 - DNA, 133 bp, Heterodera glycines
tgactcgtcgaagtacaatccccgttcgggcaagaatcaaagcgcttacaaaataagcaagcccattgtggccaaaaattaaataatattaaaataataatgaaaatgatataaaatagattattcaacaatg

SEQ ID NO: 100074 - DNA, 86 bp, Heterodera glycines
gggggggaggggcactaaaagaggacaaatggccaagtgacgcacggatcagctgctggggcgcctaaacaaatgccaatgaaatg

SEQ ID NO: 100075 - DNA, 347 bp, Heterodera glycines
  unsure (1)..(347): unsure at all n locations
aaataaatataagcaatatttattgtannataganaatttcggtgtttctaagataatattctcggtccctgaaagctgaaaacccgattggctttcaaactcgcaaatttgaagccaaatgttagtccaatctccatgcaaaaatataaggggtcaacaatgaatgtgtggagggtggagggggaaataacaaaaacataatgcacacatattcaaatggtgtctcccgaacacaaacatttaggcctttttgtgtgaacggacaaagtgtagacaggcatgacaaaatgtccatatctcttgaaaatacaacttttatataaatctttttttacaggcaacaatg

SEQ ID NO: 100076 - DNA, 92 bp, Heterodera glycines
ggtcaatttcttactaattaccatattgactgtttaatttttggtaatttagtggtctactacaattgttatatattggttggaacaaaatg

SEQ ID NO: 100077 - DNA, 133 bp, Heterodera glycines
ttgggaaaaaataagattttctttaaataattgtagaaaagatttgatttgatgacctattactgaaaatagtcgcaaaacatggaaaattaaaaataaaactttatcaggtaaaagctgaaaatttcagatg

SEQ ID NO: 100078 - DNA, 788 bp, Heterodera glycines
gtgtgcatttaagcgactcgctgtgcttgcccactgcatatcaaatagctggtaatttttatttctccggcctaatccagaaaaaatcactatctctttttttggaatattttacgtctcaaagggtgtgcatttaagcgactcgctgtgcttgcccactgcatttcaaatagctggtaatttttatttctccggcctaatccagaaaaaatcactatctctttttttggaatattttacgtgtcaaagggtgtgcatttaagcgactcgctgtgcttgcccactgcatttcaaatagctggtaatttttatttgtccggcctaatccagaaaaaatcactatctctttttttttggaatattttacgtgtcaaagggtgtgcatttaagcgactcgctgtgcttgcccactgcatttcaaatagctggtaatttttatttctccggcctaatccagaaaaaatcactatctctttttttggaatattttacgtgtcaaagggtgtgcatttaagcgactcgctgtgcttgcccactgcatttcaaatagctggtaatttttatttctccggcctaatccagaaaaaatcactatctctttttttggaatattttacgtgtcaaagggtgtgcatttaagcgactcgctgtgcttgcccactgcatttcaaatagctggtaatttttatttctccggcctaatccagaaaaaatcactatctcttttttttttggaatattttacgtgtcaaagggagtgcatttatccccccccccccccccaaatg

SEQ ID NO: 100079 - DNA, 316 bp, Heterodera glycines
aaaaaaattagacagaaaaaaatttatttattaacaattttaatgaccctaatgatgaatgataaaatgcacgaaatgttttttaaaacaatttaaataaaaaccaatttcaaaatatttaaaataaaataataattaatttcaaaatattttaaattttgtgaaaaagatgaattggacatataaaaatattcattttatacatttgtagagtaacaacaaacggttgatgattgttcgtcaacattcggcatccttaaagcttggcaaggcgacaatccatgcgacggatgccaaaaacaatggcataataatg

SEQ ID NO: 100080 - DNA, 223 bp, Heterodera glycines
  unsure (1)..(223): unsure at all n locations
aatttgatgtcaaaaattttttcagactncattccgtttgagttgtttgtgacaaagcactcgaaaattgtttgggtcaagactgaagttttgcgggcgnagaaatttacgcagcttgtggcgggccgttttnatagtaatgcattaaataaaaatcttttaaattttcttttnagaaattaagtgtgttttaacgactccgttttcattaattggagaaatg

SEQ ID NO: 100081 - DNA, 333 bp, Heterodera glycines
ggtttaaccagtttgggtcgtattaaaaatttagcaaaagatttaaaaaagcatgaaaaaaatggattgccattaaagcataagaaagaaaagctttttttaaatttccatttctatcttatgtataacgcctaattttaaatgtaataaaattaatttatctattttgattattttggacaaaatcgattaacaagggaatgccaaaccagattaaagacggaattcataaactctcaggaagttgtgtcaccggtgccaaccgaaatgtaccggaaacgctttgttggcacattgttgggctgcttgttcagccccgaggcgccaacaatg

SEQ ID NO: 100082 - DNA, 98 bp, Heterodera glycines
  unsure (1)..(98): unsure at all n locations
aatttntggtggattcgaaatgagataattcgccctcaccaggtaaggngaaaagntgtaaaaaaaattttgtaaaccttcaattatttaagcaaatg

SEQ ID NO: 100083 - DNA, 1003 bp, Heterodera glycines
agtgttcattgttaattagttataaaaattagttgtgtgtataatatttgccatttagtgcaccaaattttttatatcaaaaataaatgatttccataaatctgaattttttaatataagtctcaaacttctaaatctaaaaattttaaatgataatcttttaagattactgtcattttctaatgtaatacataaacatgaactaattggcgggatcttctcactttataaatttttaaatttaaaaataaacgagtttttgggtatcgaaaattcaatttcaaaaatcaaaagaattcagtgagaaaattcttttttttctttgcctttttatcatcgtaaaatgttgggaatttaccggaaattcacatggacttcaaacaaaaagaaatgatttttattctaaaattaatgaaagagttggtttattggtttatttcccatgacaaattacataattttttcggcttaaaatttaattaaaaattgattaaaggcacaaaaaagtttcgatttaaatttgttgctaattttttgttgttcaaatacttctcattttcccagaaattgaatggtcaaaacaaacaaacaattagagattgaaaactgaagggttttcacaatttattgccactaactcaaacagatgtttttgacagtttctgttttttggcaaaaaatattaaccgaaattaaaaaatgacgggggaaacagctgctcaattggacacaaaacaaaaaaaccaaaaataaattaaattaataaatttattttgaaaactcataaaagatgagttgttgccaatggaattaatgggtttttgtttaattgtgagtgaacttatggcttcctttaacagattaatgatttgttaaaggaaaacttttaactaaaatttagccctttcgccattcgtctgaatttcaatcgcccacaaagcacatccgataacgtaaaatgagaaatgtccttccgctgtcaccaaagataagcgtaaaaatg

SEQ ID NO: 100084 - DNA, 52 bp, Heterodera glycines
taaaaactggtgcctggcaattgacgagcccgtcaatgtcccgccgcagatg

SEQ ID NO: 100085 - DNA, 90 bp, Heterodera glycines
  unsure (1)..(90): unsure at all n locations
tcagctgacanncaaaaataaaaaggaagaggcgcaagaagcgttattacctggacgtgctctanntggaattctagccttagttntatg

SEQ ID NO: 100086 - DNA, 203 bp, Heterodera glycines
actggaacagctgggaggttccgtcaacaaatttgaaacgttgaaactattgcttgagctttttcggttggccactgtgtcgccaaaagttcaattggacagttgcgaaacaatgaaaattcgttcatcgccaattcaagggattaggtaaagaaaaaaccatttcaaaatcatttttcaaattcattattagcctcattatg

SEQ ID NO: 100087 - DNA, 109 bp, Heterodera glycines
tccgggaaatgatcaaatcttgttagcaaaagcgcaacaaacgcatcgctaattaggggggggggctaattaggcgtgccaattaaaccagattaaattaacaaaaatg

SEQ ID NO: 100088 - DNA, 376 bp, Heterodera glycines
atcggtgtgccaaaatgtgcggcaaacatgcttttcaatgccaaatcgtccatattttctttccacattcattttcagtcccgtaaccggacaaaaaaaaattttttttttcgtagccccctttggtttttttttgataactgccttcccctcaaatttgttttggataaattgttcagcgcttttttaatatttttgaaaacttttcgacggtaaaactttatcaccctcttggagaggtctaatttttaaattgttataagagaaaaacaaaacatggcccgttccgcgctgtttcattaaaaaaaatttttttttcaaaaaacccaaacaatttgtttgccaggtttttgacactctgacgaatctgagcatg

SEQ ID NO: 100089 - DNA, 226 bp, Heterodera glycines
ggtaaagcacaacaaaacagcaccatggacattgtgaattaccctcaaaaatattttggcatttgaatttgccaatccatggcttaaaagaacgccacttttggattcttccccaaagctcgactttgatttggtttcaattaattggctgttaatttcttaattcaaagattgtaaaaataaaactccgcgtgtgcattgaaccaccttctcacagtgcgaaatg

SEQ ID NO: 100090 - DNA, 51 bp, Heterodera glycines
tgccgccgccatcgcgcacagaattcaataaaatagtccaaatgctctatg

SEQ ID NO: 100091 - DNA, 402 bp, Heterodera glycines
  unsure (1)..(402): unsure at all n locations
gtccaaaaatttctaaggaaaaataatattatggcggaaaaattttaggttttccatgcggggctggtaccccccccccagacctagccacacccaaattttccaagaaatgtcgctaaatttttcaaaaaatccacaaatttttaatgaaaatctgctaaaaatggctcaaaatcacaaaatttggtcattttttggacaaaatctgttaacaaaccgcatttaaaaccgcaaaaattttcccccctgtcccccaacaattttttttggaaaaaccgcgccacataaaaaacgggtgtgaaaagcaaaaaaaaaaaaaaggtgtcgcccggggggaggtgccccccccccnccaagccaaaatcctgggaccgtccctgctattttctccacccaaaaatg

SEQ ID NO: 100092 - DNA, 53 bp, Heterodera glycines
ggttcgtgccaatatgacctttcgaaatggggagttttgcctgttcagaaatg

SEQ ID NO: 100093 - DNA, 109 bp, Heterodera glycines
gctaaaaatgtgtttttcgtgcatttctcgtcgaaataaagccgcagaaaaatagttaaaaaactaaaagcccttttataatattcttcagaattttcccttcaaaatg

SEQ ID NO: 100094 - DNA, 722 bp, Heterodera glycines
tttcattttttcttcaatttattcccacgaaaaattcaatctaaaaaattatctaaaattcctctttgcgtatgaacagaagttttccaagacgttcttcgatccaccaacaggtgctgtgggtggtgttttgtctgctgatcaccagcgtgtttctatgctcgcccatcaattactacgcggaactgaagcccctgcaagtagcgccttggccggggaaccgggatcgtgaaaacaaattttgtgggatcccgaaccatattttgggggttttcgggaataaatccatatttcgacatttttgcattttaagtccatatttcggcatattttcacaagaaaaatgcaaaaaaaaagcaaaaatacaaccccgaaagatcgactttttgtaaatttttaaaaattacaccccaaaaatacgaaaaatttgcgttttcttcgtcattttggcaattttaataaatatttcaccactttttgcgaatttttctttttttaaatgagaattttttttttaaattggcaaacttggaggtgttttttatacaacggatgacaataaatcggtgtgccaccgccaggccaaaattggcggaattattaatagattagcacacccccccccccccataaaaaaaataaattgctaaatttatgatttttgaaggtaatttggactcaaaaattaaatttttccaaattgcagttgagttacgatgatg

SEQ ID NO: 100095 - DNA, 374 bp, Heterodera glycines
ttgtttattttggacaattatcaaccatcgatttggcataaatttgacaatgccattgtgggaggcccataaaaaactaaggatttttgtgaaattcgcaaaaccgtcattttttgtagaactttgtcgttagatataccaagaatattgctttttttaattggtatcagcatcgagaaaaactatggatgactgattttttggcatcccttggatttttttaattagactcaaattaaaaaaaaatcatttgtgctagggttgaattggaccgcctctacccattggttacgcccttgtatcatgtttttcttggacaataacattgtattaattgctgtactgttttcaggcactgtgtcaaaaagggaatg

SEQ ID NO: 100096 - DNA, 214 bp, Heterodera glycines
atttgggaaacagaattaaaaaatttaatttatgacatcattcaaaatttataaaataaaactgctaaaaatttaacaaaacatttttctggcaatgatataaattgatttaaataaaaaatattaaaggtaattaattccatataatgatttttcagtcgagcattttctccgacacagcgccaagttccccggtgaaaacgcccaaaaaatg

SEQ ID NO: 100097 - DNA, 245 bp, Heterodera glycines
agtgggaatgacaaaagggcggaaaaggcattccattcattcggatccgtaaccagaaaaaaattcggacacggcaattggcaattttttatgggatttgtcaacagatttttctaaaatggcctcgaagtgttttaacattaatcaaaattgattggatttgttttttgaatcttttaagctattgttccctttttgcagaagaaagtcgcctttttcgcgagtcggctgacgtgttcaacatg

SEQ ID NO: 100098 - DNA, 231 bp, Heterodera glycines
attctccaatgtggcccaaattttaggcccccagccacagccccttgcttctcccagttttaagtcttggatttgtcaaataaattcaagacttcaaaataataatcaaaaattctcttaaaatttttttgaacccaattcaaaaaaggaaaaaaatttgcagtcaaaaaattattcgaatttctccaattttgtttccataatttccgaaagttattcggtatcataatg

SEQ ID NO: 100099 - DNA, 97 bp, Heterodera glycines
tgttgagaacaatgttttcatttttattttcaataataatttattttttaattgttttagttgttggtacaaaactaattttatataaaaataaatg

SEQ ID NO: 100100 - DNA, 155 bp, Heterodera glycines
agtgagtgggtggtgttgatgatgaaatcgttgttaccatgcatcgaattcgggtccctggattcggcgcggaattggtcgaaacggataccggaaaataattatatttttgctttccctgaaaataatggtgtttccccatttgtgcagatatg

SEQ ID NO: 100101 - DNA, 342 bp, Heterodera glycines
ggttgtgcggggcagggccctgttatcgaatataaaaaaaaataaaatttaaaaatgggtagtaatacaattttttgtaaatttctatcaaatttgacccaaaaacgacaaattggcgatttcttggtatttcgacttgctttgatttaatttttaatcactaaaattttgtagcaatttaaattgaaatttaattaaatgtttcgaatgatggcgaaggatccgctgccaataatattatgtaaataaataaattttgcctaattttcccactttttttccgccaggttcaatgagtgcgcctgcacgccgtacaacgcggactttgacggggacgagatg

SEQ ID NO: 100102 - DNA, 182 bp, Heterodera glycines
aataaattaaaatacaaaaaaaataataaaatgttttttatttaatgataaattgcaaattttgatcagtttttggagaaagtgaaggcgaaagtgagggaaattcagcagcaacgagcccaaacaaagaaaggtcggaaaaagcgattgactcaaaggaaaagcggcgacaaaaagccatg

SEQ ID NO: 100103 - DNA, 266 bp, Heterodera glycines
ggtaataaaaaccaacaaatccatataaatttaacagtgtaaaattttaaatatttaaaattgtattaacaaattcaaattataaaataactaagatcgaaatttgaaaaactttgtattatacaattatttaagaaatgaaaaaagaatatttaattgttatacaaatgcttgtcccaaaaagatatttctttctcttttattccgtgatgagaatccaaaattagtaaattaaattattacgccaaaactaatttttaaaaatg

SEQ ID NO: 100104 - DNA, 481 bp, Heterodera glycines
agagcggaaacaacaacggtaacagcagcagcgacagaccagaaacaatacaacaagaaaagagacaacaacaacaacaacaacaaaagcaagcgaagaaaaggccgaaaccaagtcaatacattcaacggaacactagctttttcaagcaactgagcaactgtcgctcggcacgcgcacgtgcctaccgtcagctggtgaggggggcgagcagtgagcagctgttgtgtctggtggaaagtgcgttgaacattctccgtgcacgcgtcccgctccggagcactcatcttcagcacttgcgcgctcaggcccaacacgtgcgtgcgttgggccgtgcgagaagcggccacggggcacgtcgactgttgctgagacagcagaccgggcgcggcgtcccggccttggctggcttggtggccagcgttgtgcttccactgctggcagataggtttatgaaccgccaagacagcacacaaacatg

SEQ ID NO: 100105 - DNA, 368 bp, Heterodera glycines
caattgataatgaccttttatatatatttttttttttgcctcatagaacataattccaaggatgaataaatattgacgcatgtaatttaatttttaaatattaaaaaaataaaaatgacagtcaattaaataattaattgtccctaattgcccctgcctgtctcacctgcaacgggcgatagtcccggtcggcgcgttcaaactgttcgccgctggcgccgccggacggctgcagcggcgccgcttctgctgcacacgacagcaagcagtagcagcaacacaacaccatcaacagcagcgagcaggacgatgacgaagcatagcactgagcaggaaaagagaacaacggtggcgacgaggacggcatg

SEQ ID NO: 100106 - DNA, 705 bp, Heterodera glycines
  unsure (1)..(705): unsure at all n locations
tttcttttgcgggtttgaccgtgtgaaagacgaacgaataacaagacaaattttcttagcttaaaaaacaaaaaataattgcaagtgcatgtacattcatttacgaaaattctttacacaaatttttcggcagaactcggcagaactcaacatcctaaagtaacaataacaattttggtttttcgaaaaaaaggatggactaatgaaaagataaaatctccctcctatccaattcgtttcactagtccaacgccgaaaacgaacacgccctctccgcagtgaatatccccaacttgccacattttcatttttttaacagaaatacagttttaaatcaataatcgagaaaatgtattaaagcgaatgaaaatcattttataattcaatttttaaaaattctaataatagatcctttgagaatttgaaccgaaccggaacgtgatcggaattacgcagagattttcccggaatcccggcaaaagcgggattttaaccccagtaatcctacccgactttttcaaatttccgggctctacataggatagagtaggaccgggaattttntaaaaacccgggaccggggccaggatcttcaacatggattgtgactcctttttgtcccggtcactttttttttgtttacttatgagttaactgacaaaatatattttcaataaatttaagcatatttatttatttaaaatg

SEQ ID NO: 100107 - DNA, 1003 bp, Heterodera glycines
  unsure (1)..(1003): unsure at all n locations
tttaaatgggggagggggtaaaacgtttaaagtttggccaatggaaatttttgtgaaatgggggacgaaagtttttgctaatggggggggggttaaacttttaggcggtgatgaaaaactttttggcaaaaaaaaacttttggtcagcgatgcggtgattaatgatcatttggtggcggcggcgcggggcgcaggcagtggtgtggggcagagaaaagaaaagagtgagagatggaggagagggggaagagggtgggaagggcgcaagggatgaagagagatagaggaaggagagattgtgacgtaagagagaaagagacagattgtggggcaagggaggaagagagatattgcggggggcaagggagaaagagcgggtagagagagagcaaattgtgaagtggcagacagacagagaaaattgggggtgccgataagggggaaagtgatgatgcggggcaagggaggaataggagaaagaaagaagagagattgtgggcaaggggaggaagagcggatagagaggcagtacagcaaattttcaagtcaaacagacagagaaaatttgggtgccgataagcgaatgtgggggggggccttaagaaaagaaaaagggaggaatgttgcatatattaatcaaaacatttttgagcgttgggaaaggggggggggcaagcaaattatacgaaaaatggggggggggatcccaaaaaattgtcaaaaataatgttgttgatccaacaacattatgatcttgttgttgatgggtaatacagcaaattatgcataaaaaagttaaaaatagagtaaaattggtagngggggggattgggatcactttcatttattttgccatgcagtggttcccctttatttgcactgagtgcgaacccgggcttacgtgttatcatccagataactatcgtaagcccattctatgtatacacagcagtattgaaaacctcaccgactttttgaggcagggcaaaactgaaacaacatg

SEQ ID NO: 100108 - DNA, 657 bp, Heterodera glycines
cctgaatgtagcggcctattggtcatttatatattgaagttgagcaaggcatttaatacgagaaagaaaacttattgcagtctacaacgcaactcaggctgacgtgtaaagaaaaccgaaagtcaaagaaagagctgaaaataattttcataatattttggggttaataaattttaataatgcaaaataaataattaactattgttatgttcttttttaaagctgaaatggttttcaaataaacaataattttaaaacaaaaaacaagcaacttttcccatttgataaaaataaatacacaaaaaataaattaaattttaaatttttgttcatttctaactacttttaatacatatcacatttaataaattcctttaaaattttctaattaaaaaatatttaatccagtatttttcatttttccatcaattaagaggcgcttctcttttccatttctgctccgcagctatttttttattagcggtgacttgtatcaccgtggctggcagaaatggagagaacaaaaaaaactgtttgtaatttgtttattggacaagtcttttttcaaatttaatttaattattaaaaaaatacatttgtattttgtacttgtaattttagtaccggaaaccatgtattttcgctttttccagcatg

SEQ ID NO: 100109 - DNA, 275 bp, Heterodera glycines
tttgaaactaattaatgggaacgcatttttggatttattctgtttcccattaactttgaattactctctaaataacctaaatgttgttttgagttattttcgaattttagatcctaaaaatcccgtccctaatcatcataagtcctttgaatctttgttccgtgtggggcataatttaaaaaatattttttaaatttaatttttaatattttttttttgttttgattttagtcccgtgaaatttttgttttttatgggaaatatttgtcaaaatg

SEQ ID NO: 100110 - DNA, 157 bp, Heterodera glycines
  unsure (1)..(157): unsure at all n locations
atattctcagaataaantttagaaaaaaaacacaaataaaatttttgagagatttaaaagtaataaaaatttaaattaatcatttttataaattaaattttaattgcataacttaaattgcttattgaataagtaattgtttgttttcaacagcatg

SEQ ID NO: 100111 - DNA, 52 bp, Heterodera glycines
ttgtcagcacacatttttgccctcgctgaaggtgtgcattcgaacgcgaatg

SEQ ID NO: 100112 - DNA, 320 bp, Heterodera glycines
aaaagctgagcaattaatggattaataaaagtaatttgtcatcagaagctctttgtcgccctactaaaattttctaatttttttttcaattttgtgatttttaaatgtaattcatacaaaaaataaggagggtgagggccgactacaagggggcaaaaatgggagactccttaccatcgttcaaccatttctttatacatatttatttattgtcgcgaatatgcgtatattggaatataaatatatttttataatttttaaataattttattttaattttataccttttttttttgttttcagtcggtgccacggtaatg

SEQ ID NO: 100113 - DNA, 56 bp, Heterodera glycines
tctcaaattggaggacaacacttcctttaattggccaacatgtgttgatggaaatg

SEQ ID NO: 100114 - DNA, 1003 bp, Heterodera glycines
aaagcacgaaaaaatgcaaaaaatttctgaaaaattaggcgaatgttaaaaaaaatcccatttttaacaatttatagaataacatcttataaatagagatcggatttttaggcacttaattttacaaatatgtacctaaaacataaataaaaaagttattcttccaacaattacgaaaaatttcatccagatttcattgccttttcaccgatggaaattttattttttggagttttctttgtatttttcggcattttcattggttaatttaaaacttggcctcaaaaagtcaaaaaagtcacgaaaaaagtcataaaagtgtaaaaaagtcataaaaatcccaaaaagtgtaaaaaagtaaaaaaaaagttacaaaaaaagtatgttagaagcttcaaacaaagtttagaacactttttaagccattttaatgccatttagaatcagcaaaaaaagtcatttgacttaaattcccaaccctagttatgtataactttgtaatttttttatggtcgtgtaaactgcaattgagcccgaatttcggcaatctttcagaattgcggtcccgaaatttgactatttgttttgttttagtcatcaaatattgcgacaccttttcatttgaccaagtgcggatcggtgttcatcttttgaactatcgtaacaatcgtgatcaacgtatttttttacaccagaaaatcgattaaaaaaatttcataaatcaaatattcgataaaaaatcatagacaataatcaaagattttcaaaatccgtgttcatatcgtgattagcatatttttaagcctagaaaaagtgccttacgaattaaaaaaaaatttttttttcgggaccgtaattccgaaagattgcccaaatttgttccataatttttgaaaattccttgctggaggcacctacgccggcccacaaaataattaacttcttttaaaatttaatcaaaacagctaaatttttatcatttcacatcgtttagcttaaaatg

SEQ ID NO: 100115 - DNA, 398 bp, Heterodera glycines
cctgcattttttggaaaatgcaggatttgcaggattgcaggatttggtaatactgacttttactggtcccataaaaaaaggaaataaaaagacggccttttacgattattcgttctattcgagggttatcgaggccgctgatcacgaatatgatatcataattgtcatatgacatcatctaatctttgattttcttcaagtatttttttcattttttagaattatagtcataaaatattttacggggttatcggggtcgctaatcacgaatatatcatccatttcgactaatttctaaaccaggacccgaattcgaacaaaaaacgaaagttcacatgttaaacgaatttcgaaatttccgtattaaaaatgcttttatgatttttattgcaggaatg

SEQ ID NO: 100116 - DNA, 103 bp, Heterodera glycines
tggaaaatcaaattgcccatcgcaaaattgcataacaaagtgataatgaggagagggagcaaaagggcggacaattggacggtcatttcgggggatcaatatg

SEQ ID NO: 100117 - DNA, 273 bp, Heterodera glycines
ttattttatgaattacaataaatataataatatttcaaagatttttttactttttgagtccggtattttttcctttatttcatgacattttatttctgcttgtgatgctccatttttattaatcaacagatcataattaatatcacgctgattattatgcagctttgggttagggcattttactgccatataaaatttattcttaaaattaacagtaaattatttgataatgtattaatattgaatttttaagcgatttagcagtgattaatg

SEQ ID NO: 100118 - DNA, 491 bp, Heterodera glycines
gcccatttgaggcgctaattgaatgggcgagggaccaaacggaaacggagggttttatcccctccagcagcaatttaaaattaaatgttttgtttctattgtatatttcagtgtgccattaaagtcagaaacctaaattttataagtccgctgattttgttttatttggtacactttaaaaaagggaaacgtgccaaatttttgtttgctataatttaattttcaacatttttaaataaaaattctcattgatttattggtcctatgaaaccaaatacaaaaaatcccattgggcaagaacggatttaaggaggaaaaagaaaataatctaattaaggaacaaatgacaacgaaatgagagaaagaggctcaaaagggggaattgacgatgagtatcaaagaaaacgcactttaattgggggggggggggggggacattcgtacaatgaatggaatggagtccaaacaaatcctccgctaacaaagcaatg

SEQ ID NO: 100119 - DNA, 78 bp, Heterodera glycines
gggggggggggcggtgcgcccatggccattttatttttcaaaatattttttatatttaatagatattccagaaaaatg

SEQ ID NO: 100120 - DNA, 89 bp, Heterodera glycines
tgcatccccttaacaataactcctttaagggtccacgcatttggctaagaagaaaactttggcccaagtgttggcgccgcctaagaatg

SEQ ID NO: 100121 - DNA, 736 bp, Heterodera glycines
  unsure (1)..(736): unsure at all n locations
cagttcaattcgcgatttatttaggtgagttatnagagaattcttagggctatcgagtgctataaagaatgtctaattttattgatttggacaaaagttatgggcagttttttgttgaaaattttcatttgatcgttttttatatagcgccctttttgatggttttatataacgatatatcaccaattatttagttttctgacatagtttttctaatcaaaatgttttgacgaataatttgaacatttaaaaataatattttaatagggaatacctctaagaatagagaactaaaaattttagtttgtagagggcctagcaaggagttcacgccacttataattctctcataaaaattattaactacgcaaatttctcttattcgctgatatctatagtcagtcgaaatggagactttattacctggaatctaatacacaaaggaaagactaagttctcgtatgaagacgatgtgcataaactttgggtaaaaaacttgccttgtaacaaatttcttaaaaaaacctttaattcagattttgagtcctattcccggttttgctacaaaagttagttggaatcacaagaaaatataattaaataatttaattttcgcaacctcattttatttataaagcctccctcatatgtttttcatcattggctcaaaaaaaaaacagtatacaccttaattcatagaaattttttaaatattttgttattaaaggaagacatg

SEQ ID NO: 100122 - DNA, 1003 bp, Heterodera glycines
tcggcacggagaccggcaaaatatgtctccaaggcttaggttaataatagataatatatattttttaaattttttgtggaacttctccaaaattaaaaatgaaaactattctttttatatttattttttaaaataaaaaataattttttattaaatttaattgaataaatgttcagcaaaaaaacttactccgattcaatggctaaaaacggaggaaaagcaaatctttggcattttcaggaatttgtgaaatttcttcgaaaaaattagagcaaatggaaaaaatttttttaatatagtttttaaaacaatttttcatcgtagcaaaatttgctttccaaaacttctccgattcaatgccaaaaagggaggaaaaagcaaaaacttggcattttcaaaaaaaacaaaaaattattttcctttgaaatttattttttaaagtttggaaactacgaaattgttgccaacaccaatttattatttagagtcagtgttcaacgtgaatgagccgatcacatgtttggccatttacccgcgaatgcaaacggacgccgaccattacgacgtggcactgatcgggactacggtataaaaaaaattgaacaaaaagagttatacggtaatatgtaaaataaaattttcaaattatatatgaaaagctgattttggtgccaaattttcatatatttttaactaaaataattttttttaaatttaatttgtgcaatttttgcaattttcgaaaaatcaaatagcataaattttaattatttagttaagtatattcaaataattgttatttaatttatgcaatttataacaacagtttttggacttatttattataattaatctcgaattaattgtgtaattaatttcatttcctgttttagggaagtttgttggcattggacgtgtacaataatcgcacgtactttaaattaaaaagtaatttaattagctaatttgacgcatttaaaaaaggcttttccaccgccacatg

SEQ ID NO: 100123 - DNA, 115 bp, Heterodera glycines
ggtgaacagaggggggggggggaagacgttcagttaaaatttgaaagagagggacggaacgaattgcgaaatttgtccctctcccaagcggatttgacagtgaaaaccgaaaatg

SEQ ID NO: 100124 - DNA, 1003 bp, Heterodera glycines
tattaatggcacagtatccaaaatagtaaccactacccaaataatacggtgaaatttacgtataaactattaaactattttgtgcacagcaaaaaaatgtgttggaatccaacaatcgcgaagcgatagctagacagatttaattcgttttttaaaatttttgtcttttaggctttttcctctgcttcttctcctgtcaatttctacatttctgtttacaaaacaagcactcgcgtgaaaattgagtaaaaatttcgtatttgaaaaattttgtccaaaaatcttttacgtcggaaaattaccggtttttaccggtaccggtacaggtggaaaaagttggtaccggtaccgtacagatttttgcattaccggtcagtaccggtaccggtttttttacaattaccgattaccgctcaactctagtcagaatatcactcactatcttacgaagaaaatataagattgaggcaaaatttggtcatttttggacaaaatctgttaacaaatcgcattaaaaatgaaaaatatttcccggccgtgcctatcggcaccgccgggcctctccccctcccccatgttctcaaaactttttggaaacatgcgccgtaaaaaattgttaaaaatctgattttctgatcccaaatgcgctgaaagttacgaattgcttatttcttccccccccccccaaaaaaaaaaatttaaatggtttaaaaattggaaaaatttttaataaattcgcgatccgcggcaatttgaatgcgcggtgcgcggccgcggtttttttttgcgcgatccgcggccgcggcaatttgaatgcgcgatgcgcggccgcggtttttttctgtgggcgccccaccccttggtgtacccgagtatataaagccgaccaaatccccttccagtcatattcttcagcccattcattccatccgcatttttttttttgataattttttttttcagttcacttcctaaattctgtttgattaccagccaaaaaatg

SEQ ID NO: 100125 - DNA, 239 bp, Heterodera glycines
aggcagaatcagcagcagcagccgtagttcatatcgatcataagcaaattttggttctcaataataataaagtgttgttttctattggtgatcaaaagcacaggagtcgcccaatgtttttttttaaaacacgcaacccgtgtacatccatccatccataatatgtgacaatgccttgaatataataataataagcataaagaaagcagcccaaaccgaatagatttttgcccaaaatg

SEQ ID NO: 100126 - DNA, 210 bp, Heterodera glycines
ttaaattaaaattaaaaagaaaaaataccgaaagaaattctcccttttcgaattttttaaatttaacaattaatatgatttacttagtcttatcgaatgtttcaaaaaaatatattttttaaatttaatgctcaaataaaacctcatttccttaataaaaatccctcgttaattaccctcattagattactttaaataggcttctaaatg

SEQ ID NO: 100127 - DNA, 675 bp, Heterodera glycines
ttttgacatgggaaaaaatattccttatttgccgaaaatcgagaatcgagaagttttattatcattacagacaaaaaatcaaagaaaaacctatttaagcaaattgcaaaaaatgactcaattagacttaactaagaataacattttagctatttgaaaaattaacttcaaaattcttttttttgtgaggaagttcaaaaataaatttcgtaaaaatttcaaaaagttcaaaaattggtaaaaaaaaattatatgaaaaagttctgaaaatttgcattttattttgggcatttcatgcctattttattcattcaaggaagatgcctatattaattctttgtattttaatattggtcttgtgtagatatttcgttaacttttttttcttgatgagcttcctatgttttagtatttacaatccgttaattcaacttagtaagaaatctattaacattcataaatttaaattcttgttaacttaaataaaatttttatagatttcaaagtttaaattattaaatgaataataatttatgtctaaatataagttggaataaaaaaattattaacaaaattaaatgttaatttattacatttaatgaattaattttctataattttatatgtgttaatttatacaaatttcgtgttaataattctttcagatattttatg

SEQ ID NO: 100128 - DNA, 54 bp, Heterodera glycines
acaaaaagggaaatccaagcgaatcactgacaaaatcacccataaagaaaaatg

SEQ ID NO: 100129 - DNA, 188 bp, Heterodera glycines
tcaagttcgaaaacgaagggaaagaaaggccctgagaagaaaggacaaagtcaacagggaaagcgaaacgccggacccaaaccaaccggaaaagcattgcggggccaggccttgaagctctgctcagagcaattggagggaagaatgtggttcgacgagaactccaagaacagaggaacccggaaatg

SEQ ID NO: 100130 - DNA, 83 bp, Heterodera glycines
atttttctctctccaatgaatggtcctttagtttgccttcttccactgccgtttcgacgtcgttgtttgggccaccgccaatg

SEQ ID NO: 100131 - DNA, 293 bp, Heterodera glycines
gggcggaaatgcctttgtatttttaatttaaaaataatttatcggttgtttcctttaagttgtcattagtaaaatatcacttccttaaatttgggggaatgtaaagattgtcataaatttgtttttcattttgcttggtaattttgtcacgttcaattttgtgccttcgctgccgctggtcgataaatgccacacttcgcctgcctttcgtgccacccttccctttcctctcccattttatttataatgattctttttacaattttacatcccaaataataattaatcaaatg

SEQ ID NO: 100132 - DNA, 90 bp, Heterodera glycines
tgtgctcgattatgcattcgaaaattcgggaaagtatggcgcaattcaaaaataactaatgttaattaattaattaattaattttaaatg

SEQ ID NO: 100133 - DNA, 339 bp, Heterodera glycines
  unsure (1)..(339): unsure at all n locations
tatanttgtgtnntagtggttagtgcttcacccccaccagtatttctttttggagtcgccaccggttgacgttttcatttgaatttatttttatctgattaatccagggtttctttatgtgcttatttctaagaaatgtccctgattttagggcgtattttcatccaaaagaatgaaatttatgaaaaatttgactaatttctaacaaaattcattaaaaaatttcccccggcggcgcctatcggcaccaccggcccccaaaaaacctattttttcttaaaaaattagcataaatcaataaatttggtaattctttagacaaaatctgtgtaatttatg

SEQ ID NO: 100134 - DNA, 796 bp, Heterodera glycines
attgttaaaaaaatacaatgagtccggccaaaaccgagcaaagaatcacagtggcaatgcaaaacaaagtggaacgggcacgagcgaagcgaacgccaacggacgaactgacaaaagaggagccaaaagatatgatgccacatttgggatgaggttgtaaaatgagtttgaccaatcaaaaatgattaaataattttaaaaacatgctattttaaatcagattttaggtaattgatttttcaaaacatttttttgctttttaaaaaaacccaggcccaggcttggatccaggcctcgagttttttcctgggtttttgtccaggaaatccaggtccaatatggaatccagttccttttttcaaaatgtcgaaatctagtgtttgtccattttttggtgattggtcgctttttttttatggctgaccattaaatttatgccttcccccctccctgaacttacacgcctttgcagtgcggacaatgggccaccgtgttggacagcgtgttgaagattatcacctcagcgcagtgcgcgcactgcacgcggcacgtgccggccggcgcccgcaccgccgtgccgacgggagaagaggcggccaaagtgatcacccgacgacagttctgccgagggcacgcaatgcgcgcggaggacgccttgcacacgagcagacagttgcaggggcagcgcacgtacttttttccgggcggtgcggcacggatgggcgtcacctatgacaaaatgaggggaaaagcggtgtaataggaaacggccgacaaaacaaaatggtttcaaatg

SEQ ID NO: 100135 - DNA, 154 bp, Heterodera glycines
ttatattaatagatatcccagaaaaatggctatctctttttttgagaaattttctatgcaacaaacgctctcgaacatgaaacgaagtgcggtgcgccatggccattttatttttcaaataatttttatatttaatagatattccagaaaaatg

SEQ ID NO: 100136 - DNA, 120 bp, Heterodera glycines
tcactcaccccatataaaagctctccaaattcacccccaatcagttcaaccaaaagttggattttgctaaaataagattgtgcgtaaatatttagaaattattaaatattattaaaaatg

SEQ ID NO: 100137 - DNA, 94 bp, Heterodera glycines
tcgccatcaaaatgttcaaaaatggtagagtttcaaagaaagtggcgacggaggcaaacgcaaagcaaatttaaagggaaagtcgaaaagcatg

SEQ ID NO: 100138 - DNA, 604 bp, Heterodera glycines
aatgaatgatcaatcggtgattgtgaatcgaaaacaaatgttgtatatttttgggaacgtcgaatggttttgacattatttgatctctccaattaattttcacttttgcgctgcataaaattctatttaatttgtccgttttgcattttcaatattaaaatcgttttgtacacgatttttatttcaatattcgcaccaattttctgttttttttaatttccttttgaggcctttcatttttctctttccgttattgcctatgtttgcttccgtcgttggtgtttttctgttcattttgcctttgttcgccggacagtcggccgacagtgacgagtcgttgggttggcttcgagaatctcggcgagacggcaaaaacagtgcgtttttttgtcgaatttttacaacatttgggcttttcgcctgatttgacgagttttctctttctttcagggccaaagttcacttgctaccagggcaaattcaacaacagcgtaagggcgcctgtgctgacgaaatgtgtgggcaaagtgtgccaacggtacactcacattcaatgtacggtagcgcggcgtaccgtacttttggatgttcttattcagttatg

SEQ ID NO: 100139 - DNA, 58 bp, Heterodera glycines
aaataaaataaattttaaaaattaattcaattttataattaaagaaatttcaaatatg

SEQ ID NO: 100140 - DNA, 199 bp, Heterodera glycines
tctgaaaaaaattaaattcctagtgaattattgaatgatgcatccatttcttttactcgccttttatatgagaatttccaatgcgttaaaattgcgacagttaagcaaatatcatttttctaaaatttcagcatcaatttcgaataaattcgttaaaattgcagtaattcttactgatgatcattaaaatttgcagatg

SEQ ID NO: 100141 - DNA, 442 bp, Heterodera glycines
agtaccgttttgccctctatgacgcgcagagaggtaggccatcaaaagcaattttaaaaactaattaattaatattattattgggagaaacgatttatataccgtatgatcaccgtgcccgttaaccgttaaaggagtgcctccccattcgggccttttaccgcccaccaaggcggtggtggtgtacaaaagcaatgagcgagtgaggggcgttcagggtccgccaaaaagtgtggctacttcctactgcagtccgcaggtgaaaaattgttgcaattggacaatcatttttagactttttcattttttcgaactccaatggacccgaaagtacgaaaaagttgttcttagcattaattttacaattctagtgcatatttaggcttttttttctataaaatgttctttcactgccaaggcggtggaagcgaatcgcgcgatg

SEQ ID NO: 100142 - DNA, 111 bp, Heterodera glycines
ttttgcaatggacaaaaattaacacaacactttcatttgcctacccattcttttccctcccgtttttgtttgcttgatttacatattttgcaggagatacttttaaaaatg

SEQ ID NO: 100143 - DNA, 161 bp, Heterodera glycines
actaattaatcattaattagcaaaatgatggctcattaaggtgccaaactttgttgtgccgcatcactcactgatctgaacgcaaatgaatacaaaaattggattgaggcggaaaacccggacatggacattgtcatttccgcgcacctttcaacaaaatg

SEQ ID NO: 100144 - DNA, 447 bp, Heterodera glycines
atgattagagctcgacaaaacgacttttggggggttttaaatgcatttctttgaaagatttgttcagcttttattaaaaactgtttattaaaagcgcaaattgtgataattatttaaatatatgcaaattttgtaattttttttataaaataggtcttttgcgagtaaaaaataattggcatcatgtcaaaattggctcgcgctgttccaatgcctcccttctgctgtttaaatcatatgatgccaattttacaaatcaatttgccagcactgtttaaaggcatcatgccaaaatttaaaagaaaatgccccaaatcggaacaggacggttcggtgcccgccgtttcggtgccagcccaagttttggacgacaacttttgatgtagactttgattcctccttttattgtcagtgggccgaaataatcgacgccagtcttctcaaatg

SEQ ID NO: 100145 - DNA, 205 bp, Heterodera glycines
tggtagccgtactcatattttgtgtatcatcgtgctgaattaagatttaatttgaaaaatattcaaaataggaaactcgcacattttggcgcactgcaactgcacacaatgcaaaaaaaaaacgtccaaaattgtgtataaaagtcgctgttgtgatgcatttttctcatattttactaacggggcgtaacacaacgagaagatg

SEQ ID NO: 100146 - DNA, 1003 bp, Heterodera glycines
caaaccactaatgtttttcaaaagcatgacacacattagtgtctcacactaaagtcacagaacaaaccactaatgcttttcaaaagcatgacacacattagtgtctcacactaaagtcacagaacaaaccaaagatatgcatttatatttcattaaagttcaaataacattaagcataagcataattatttcacgtaaagaacacaaaaacaaaataaacaaataaacaaacaacaaccactaaatcaaactcaaacaatatactgataaattttttcgtttacaaaaaacaaatttatttttcaaatgcttttctaacgcaaaacaaaacaaaaatattttcattttcaaatcattttttaacgcaaaataataacaaaacgccacgccaattcaaagcatggcagatacaaacactcatctttattatataggattatgggaaaaaattggcgttctgtcacatttactttttatctttatttctctcacttttacgtactatctcttcattcttaataatgtaaagaacaacatttacttcgtgacgtttaacttttttcctgcacgttaaatccataccaaattttgcatatcgatagagaaaaaaattacgaacataattggagggtttttatgaataaaaagtgggttaactaaaaagttatggagtgattaaaatttttgcatttcttttcctctcgtgttggcgtactattttcacatctctaacacacaaaaaacaccaaattcgaaaattctaataattttggttataagggtacaaaatcactttgaacatttagaatcaatagaaaaaagaataaatttagcattttggttagaaagagctgcctaggacttgagttataacgtgatgaacatttgaaactctcacaacttttttctgagatgtcaaattgcttagcattcacttagaaaaagattctccttttcaaaatctttttttagataccaaatttgttcatttttgttgggaatg

SEQ ID NO: 100147 - DNA, 244 bp, Heterodera glycines
tttttttagatttaacttagaaaatttttcgaaaaaacttttgacaaaaattttttataagaaaatttcaaaatgaaaaaaaatctcagctttttttgggaaaattttgaaaaaagataacctatcgtaaaaagttttcaaaaattgctaaaaaatgaattctcaaaaaaaaattctaaattttcatcaatcattgaaattgctggatatagggacggacatacattggtagaattgaagaatg

SEQ ID NO: 100148 - DNA, 600 bp, Heterodera glycines
ttgtagcgaaagattagtttttgaactttgttcttaattaaaaacaaataaacaaacggaggaacaacaaacggtttttaaggaaaagtgaacaaattaacacacagccaaaagaacggattctcgaaaaattgttagttttaattattgatgagagcgtttggcttttaataactgtcgaaggttgggttgttttccggtgtaacagcctcagcctgtgtagatggaagttaggaattttagtcaaattgtcagttcatttttaggtaagcatcattcatcaaaaaacaatatcgttttaataaaagaagaaacaaaaaaaaaaaaatagttaatttcggaaacatttacaaaagcattttaaatcaacgcagaatcgcataaaacccgcgtttatatatttttttattttttggggtaccattaaaagtaacgattacctttaaaaagttcaaaaaagagaaataaagtgtataaaagtaagaaattttcgctctttgccctcacaattttaatatttatttcccacaattacttattgaattgtccttcgactacaacatttaatctcacgaacggacgtgccctggtgcaacaatg

SEQ ID NO: 100149 - DNA, 386 bp, Heterodera glycines
aacaaaaaaatcaataaaaacaaaatttctttaaaattcgaatctaagtttggcatttcaaaaatgggttcaaacaatttcaaattataagtaaaagtttttaattttttaaaaggtcttttattctccattttgtgccaaatggaacataatcccaaaaactttttgtttccctacaacaagaattttagacaattttctaaaaccttagatgtgccaaactttccggcacttctatcacaaaaagttatcattccctcagcaaaatttgcttccattttttggatttttaataaattaataacattcagctgtttcaacagcagcattcttcgtccgtttaccaaaacaataattttggcgattttggcacttcaaaaacaatg

SEQ ID NO: 100150 - DNA, 499 bp, Heterodera glycines
cattaaaatgcatatgatattggtcgtgttctgttgctatttccgcgggtgctgaaattggcatttgtgccgacaaagttggcattgttccgtcctctcaattggaccccgcgcaatgccgtcattggcattatgttgagtgtttgcgcttgctgttgatgagaacgatgtgtacatttgttgtaaacaataattttggcatagcgcacaaagtctgtacgaatggttttgttcagtgccaaataaatcagcggcggaattttaaataaataaataaataatttatctaatttttttaactttattcaatgtataaatttaaaaaatttccaatccttaaatttttcgaaaattttcacattttcagtgtatttagggatttctaggcttccgaaaaaatgtccctattttaaacactcgttttcgggaaaaaatgtcaaaatttttctagcttacattttgctttccgactttctgggtctgcatatttttagaaatg

SEQ ID NO: 100151 - DNA, 438 bp, Heterodera glycines
ttataccaaaccccgaattttttaatcggttttcagaaaaaaatacttggggtgaaaacaatttttccacatttcactccataacttcgtgagttcggctcggatcgagaccgggataagtccattggaaagagcagctcgagctctacaagaaggtatgaaaagaaaaaatagttatttctgggactttttcagaaatcagaattaattctccaatgtggcccaaattttaggcccccagccacagccccttgcttctcccagttttaagtcttggatttgtcaaataaattcaagacttcaaattaataatcaaaaattctcttaaaatttttttgaacccaattcaaaaaaggaaaaaaatttgcagtcaaaaaattattcgaatttctccaattttgtttccataatttccgaaagttattcggtatcataatg

SEQ ID NO: 100152 - DNA, 615 bp, Heterodera glycines
atctatatattgtgaaatggtgtttatgcattgatttgttctttacttttcctcgctttgtgacaaaataaacaaatttctaaagatccatttccacttttcttactttgccccctctcttcctattgtctttctcctccattctccgctaaagaccgtttcaccaaatctcccacctccccggcatttctcatattggtacttttactttgggcaattatcataataaaattagctcgttgagcagccgtttgagtgcgcttgtggagacgaggcgacgaaagtttgacaaaaggtcaacaatcggaaattatctgtcaaatgctttcgaaaagagggacttgaaataacgcagatgaagttttgggtagagaacattcattgcgtcgctgatcagtgatcacaaactaactgtttttagcctcatccacttgaaaagtgttgggttttgcccggcggacggcgaactgaacagaatttgcgtgcttgaaactgatggaggtcagtcagtttggaagtatacatccgtaccgttttaatgtgccacttcccccgtttaatccataaaattttgtgtttaatgccttttttatggcataaaatgaataaaaaatg

SEQ ID NO: 100153 - DNA, 799 bp, Heterodera glycines
gccgttttcgcgtgggcccgagtttttgaactataactttttttattgtcaaccaaatccaacaatcttgctatcattcgaaagccctcttcacatgctctatctattagccacaaaaagcaaaacgattttgtgaacagtaaaaaagaaatttaaaatttttttcgagtttttcgcaattttcatgttataaactttgtcttggtattttaactgtctaatcgccaagcaatagtttactaacaatttctaaacatattaagctttccaatgatacccagatcgttggaagtttttttgatttaatattaaaaaatcttttttgtaattaaaaaacccgcaatccattcggttatcccacatttgcgcctcggacatttgcgtgtccaaaatacggttcaaacttaagtttttttaaaccacagatagattaatcagctttaaataagcgattgaaagtgattgcatgcaatatttgatggtcagcaaatttttgaaaaaataataaatttttcaaaataacagaattattgttcctaataaattgggcttccaaaatatggatataaaatcgcgaaatatggccataaaatattgaccaaaaatcgcgaagtatgaatataaaatggcaaaaatttggacataaatttcccaaaatttcggtaaaactttcaaaactcgcaaaatttttgttaaaaaatgattttcggggattttttcaatctttagggggtcaaaaaggccaattaagttgatggggccgttttaatagagatttttggaaaaatgcaaaaatatg

SEQ ID NO: 100154 - DNA, 954 bp, Heterodera glycines
  unsure (1)..(954): unsure at all n locations
agtaattaagcagatgcagcggcggtggaaagcgaatttcgcaacggagagaaatgacgggaaacaatttttttttttggaattggattttgcattaattttggagacggactttggcgatggttgtccaatcgaatgaaataaatttaaacaaaaaaaattgacgaaaaattatgaaatggaaataatttaatttattaaaatgatttaacaaaataaacatgacaggaacaaatcttagtaattaggacaattggcagtcgacaggacccaaattgcaaaaagctatgctaagaatttgtctaatcacccactgatcggaccgcctttcccggtcgctttcatgtgcaaactgcaaaaattatcaaaaaattatgcttacaaaagatctgatctctacaggtctacgttaaatggtttagtttaaggatttagatacaaaaaataagaacaactcatagaaataaggacattttgtagccctgtcgttattgcaaaaaattatgcaaaagaatttctctgatcaccactgatcggacacaatttccgattgctttcatgccatttttcaattcattaaagcattgaacccaagccaagttggcaccatgccatcattaccgatcacagcgatcaaaacttcgcaggtgccattgcaaatgttgaggagcagcatcgacaaaatggaaaaacttaatttattanatggatataaaaatttaatttaaatttaaaattattttagtttttcaatttccattcatatgatcaattttgtaatggccaaaagcaatgctaattgagtcaaactcaaactttttcttcaatctgatcaattgaaagagttttcttttctgtcatattaaaagttgatttttgcaaaactttttttttaggaaaataatatttattactacaataaaaaacatttaaaaagtacaagagcattaaatg

SEQ ID NO: 100155 - DNA, 393 bp, Heterodera glycines
tttgcaaatgtttcaaatcttttcatcttttattaccgcgaattgtgtccataattaaacattcattttttaaaatattctccccgtttcctcaggttctgttcaatttctgctcgaatctctgcaggacatcagttccaccaattgtggtggtgaattctctctccaatctgtcctccaatgcgctcttcactctttccaggcttttcctttgccttttccctttttaaattcgttcgctttttagggtttgcccgcccattccagcaaagagtgcattcttttgattgccagcttaaggtgataattttgcttttgattgtgttaatttgcgtcttttttcgttccgtcgatgcgtcccctctccgccacactttcgagcagctcaaaatg

SEQ ID NO: 100156 - DNA, 118 bp, Heterodera glycines
  unsure (1)..(118): unsure at all n locations
ttcattttatatgacaacaaacaaagtggactttttatgactgccagagtcggcatataaaagcactcattttgcncatattttacattccttgtcaattgtttattcgtcagcaatg

SEQ ID NO: 100157 - DNA, 277 bp, Heterodera glycines
ttttcttgctttaaaaccgggaaaaactaatttggtgttggacacaacactttttggtgccacgacccgggaccccaaattacatttgttgaaaatttgggggtgaaggctaaaagccacaaataaaagcaggaatttttgagctggtcaaagctgtgtgcttccagccgggctgttgtgccaaaaataacaaagaaaggagaagctggtctaagtgtgttctttccagctaagctgagtgctgtaatctgaataaaggcattaaaaaaaaaaaatg

SEQ ID NO: 100158 - DNA, 190 bp, Heterodera glycines
atttggattttttagaatttctcccccgtttatttattcagccatggtttttctagcaaattttaaaaattttcccaatgttgggcctatgtaatgccactttttgacatgggcaaaatattgggaaatatttaaattcccacgaattttttttgcatttaaaaaaattcaaataaaattattttaaatg

SEQ ID NO: 100159 - DNA, 1003 bp, Heterodera glycines
atcttttaccttctttttctgtgctatttcttttgtcttcttcttcttcttaactatttattttcgtctcttttctttatattctcttctttttcaaaacaatttcttttcatctcttttcaaattcatttttaacgcaaaactcaaacaaaacgccacacaaattcaaacaccggacacacacaacaaacactcaactttattatataggataacttttttattacttggtaatccaaaattctttttgtttacgtttgcattttagtcggatcaatttttttttaccgatggcaaagcgatgaaaaaatgcataaaaacagggggggaaggagcacaacgaaacatttgcatgtttttttttgctacaaatttcctcaaaataatcacaaagcccaactgaacataaagttttgctgattttgtgccgtggtttttatttcttgccaattttgaaattgccaataattttaccgcatttaaatagataattaaacgaatgatggaattgcttatcatgtcccaatcagtgcttgatcggatgaagcatttgttgagcacgggagaggacgcggatgtttattttttggtgggcgacggagacgcaaaagaggcgagtttaatttaaaataaaaatttaatttattaattaaaaattggaaatttagtgaatggtaatttttgttgtgttttttaaaatttaatcctcttaagcttgtgccagcccataagctcattttgaaacacgcttccgacgtttttgaggcgatgttccgttttgatgccaaaaaggaaaaagcggaattcggtaaaaacattactgaatgacatttacaatttagtctctgcaaattaccctaattaattttcaatagtcctccgctaattgctctaattaaattttcaattagccgccgctaattacactaataattttcaattagcctctgctgattgtcccgtggaggtccccgacgttgaagcagcagcattcaaagtgatg

SEQ ID NO: 100160 - DNA, 1003 bp, Heterodera glycines
gacacttgcggcgccgacacttccggcgcccagtcaaaaggacacttgcggcgccgacacttgcggcgcccagtcaaaaggacatttgcggcggcgcaaaattcaacgaccccaaaaatatttcaacaatttatttccattaaaaacattgataatgactctctcagtcccattcttcaaagcctttcatccctaggcgatgatgactaatcgtcggatcgcttcatcatttctcaaatatttttttaagcgtggcctttcagcaattccacgagttgggtcaatttcgtaaggtctcagacggttttgttggtgttcttcctcatttttgatggcgataatgaaccttattgaaattattttattacagtacccatttatactttgaaaatgatgtgtgtggcgaagtgaaacgttttctgttattgttatagttaaattagtcattgttaaaaaataaactattaaaataacaattctgttaacttaaataaattgttgaaattttttgggaccatttaattctgtgcgcaaatgttgttttgactgggcgccgcaagtgtcggcgccgcaaaagtccttttgactgggcgccgcatttgccggcgccgcaagtgtcgtcgccgcaagtgtcacgccgtaaatgtcagcgcgcgaatgtcgctttgactgggcgccgcaaatgtctgcgccgcaaatgtcagcgcagcaaatgtcagcgcagcaaatgtcagcgccgcaaatgtaggccaatcattcaaatgtgcgtcactcttcctttgcattggatgccagtactgaatccgctggactcagttttctgagtcgatgactaccataatgccgtggtcaatttcatccggcatacgattttcaggagaccaaaattccggttgcacaacagagagttgcagatggccagcagggcacatcagaattattaatcaaatttgcaaataaattggcaaattattatattttcagtataattatgtgagcaatg

SEQ ID NO: 100161 - DNA, 68 bp, Heterodera glycines
agggatcacacatcagctcgtaaagaagccttcactttcattgcgccttggggtttgaacacccaatg

SEQ ID NO: 100162 - DNA, 859 bp, Heterodera glycines
attttttaaaattatatttaaaaaccaataaaactaatcaatttgtaaaaattggaaatttcgctgtgtgtaaatgtggcatttattgccgtgttttccccggttgtccatttcacatggcaaattgcattattctcatgtgtttattaaatggaaaaaaagaaatttaaaatttaaacaaaaattgactaaattttaaaagaaaattgacaaaatgtttacaaaattaacaaaattttatatattataacatatttttaatataaaagcaataagagaataatttaaaataaattggcaaaatttttacaaaaattgacaattttttataagaaaattggcaaaatttttacatactctagcatatttttaatataaaagcaataatgaaatagcttataatgtaatttattacatatttggttttataatcattagcgttgtgcgtttgtatgctaaaaaaatgccaaaattataaaaaatatgccccaaaaatttaaaaaatggatttaaacaaaaaaactgcagctgtataaattcaaaattgacctggataaaaaaatcacaaaaatttttttattttataaattaacgtatgaaaagtttgaatgtttttaaatttgtatttaattatctggcaaatgcaattatattgccaaattgagaaagactttcttccgttaaataattttacgagttttttggagcagatttttgaaaattccataacccgaacgaatggaggggcaccgtatccaaaccgaatcgagaaatttcaagttttccattttaaagtttcggtttaccgaccccttgaccggtctatattattaatgacactaattaattataggaaatg

SEQ ID NO: 100163 - DNA, 597 bp, Heterodera glycines
  unsure (1)..(597): unsure at all n locations
atattccaaatatnctatcatattnnctccatcaatattccannctcnnattttattnctttttatnatcccttnccaaatnaannctcaattnaaaaattttatttttttaccttttttgaaaattttcacaaattttttttcaaaaacaatacttttttgttttaaaattttttagaaaaactgggatttttcatcatctacgtcttaaacattttttttgnatttttacagcctaatcaaagcatggttcactgaatcgtacaagcacatgaaaggggttccgataacagtggaagagatggaatcgaaatgtgaaatttttttaaattttaatattttccataaaaaatatttggcgctaaaatttttatttgggtggtttggaatttttgctatttagatatttcctatttaattataattagttttttgaatttctaatttagggcaaaaaacttttattaaatttaaaaaagaaaaaacttagtttttcgatcaaaaacgggaattttttaagcattgcactaatagacgtaaatgcattaataattatccagggcattttctgtcggcatttttgccattgacggaatg

SEQ ID NO: 100164 - DNA, 931 bp, Heterodera glycines
tctttcacccttcccgtccctctttctatgtccctcccccttccgtacgcttccctccctttcgtgtctctcccccatcgttcgccttctctcttctctctcccttcgttctacatattttattctcaattccctcttttccactttcatcatcgctctttcttaataatatttcatgtctttgtgcagaattgacgtaaggaaagaatgttcgttggatttcgtaaaatgtctgtgtacatatcaaacagagaaggatgatgttttgtgggttgttaaagaacgtcaaacactcttaaggcacgcatggacggtaaaaaacgaaaaaaattgccaaaaaataattggcgtaaaaaacaaaacgccaaccagggttgttccgggttacccgaaacccgatacccgaaacccggcctttttctcgacccgaaacccgacccgatgattttgggtcgggtttcgggtcgaaataagcactggtaagaaaggggtctgggtgaaaattaggtggataaggaaattgagaattttttttgaaacgattgtgttcaatggaatcgaaaattttgtatttgtatttgttcattattatcctttttctaaagatattttgtatgaatttcttgaatttaagcaaagcagatggctgaaaagcctgattccatttggttttatttccatcgtcctataaatggcgcaattcgctgcaaatattgcagtgccatttgatttttaaacaaattaaaaatttgtcaattgacccgaaacccgatacccggcctttttctcgacccggaacaaccctgatacaaaccgaaagagtaccaacttttattccattgttttcaacgaattaaatgtatctttcatattatcccccataagatggtttctcaacatatttagtttcagatgaataggaataaaaatg

SEQ ID NO: 100165 - DNA, 304 bp, Heterodera glycines
tttatattgagacattttcaaaaaatacaaataaaaaatcatggtccagggtccacttagtttttggttttcttacccccatttttaccaaatttttgaggcatatggtagtccctatgttgttgtttcgaaatcactgcaactgttagggaatagaggtgatgggtgtaaacaaaatggtgatgactcacttgcatctaatgataggggagcgtgataaacaagcattgattacgctttccgccccttttttgtttcattgttgccaccacccactcactcaccaccacctttccaggttatg

SEQ ID NO: 100166 - DNA, 811 bp, Heterodera glycines
  unsure (1)..(811): unsure at all n locations
taaaaattactttttttggtatttttaggcaacatcccctaacttatttntttctttataaattttcaaaatatgtaactaaatgaaaatatgtacaaaaatatttgccgaaattttggatttttttttgaggatttccaaaaatttccgtaaaaaatactcaaaatatgtaaaaaaaatgaaaatatatatgaaaaaaatcccgaaatatgtaaatatgtataaaaaccccgaaatatgtaaaaatatgtaaataaaagtcccggtttttgttcgcaaacacaaaaaagatgtatttttcttgctatttagagcatggaaaagccagggaaaaaatatgtatttacataaaattgacagccctagtaatgacaaaatttatccaaaaaagtaaaaaaataggccaaatcagtattgagctaaataatttttaaaatcacaaattcttgtcaaggaaaaaataaattttggggattgatttttgagaaaatttttcatttcttaggcgtgcattttacagaaatttttgggtcgattcttaggggtttattttttgaaaaaattttaggtcggattcctaggggataacaacaaatttttattcacaagcaaaaatgttgaaaatagttttttttttaattttatagttttttttgttgctaaaaataaaaaaacttttaggccacggagagctcaggaaaaaaatagtgaaaaaacgttaattattagcactagtaattattagtaactatttgctaatataatggttagcatttgcaaatttcgtattttttaatatgttagagacatg

SEQ ID NO: 100167 - DNA, 378 bp, Heterodera glycines
atgagtgattaattggcaataatcatatgttaaggagcaataatcattaaggctaattagaccaatgttagttgccgcgggtcacaaaaagccaatttcgtttcagctaacgcgaggcgactctgacgaacaaatatgaatttgtttgggaagatttaattaagcctttttgttgagtattttagatcaaaaatttctcttttcccttcgaatttcaatgctccgctttttcgtcttccgtcgcttttttccttctccccgccattcgtccgttcatttgcttacaattcccaaaatcattttgtcccccgcccctcgtgcctttctccgttgtccaaatgcattgatttctgcgttgagccatttaatcagacaatg

SEQ ID NO: 100168 - DNA, 61 bp, Heterodera glycines
cgttgtggagcagttcagcgacggcgagggaatgctcatgaaccgatcaaagccgaccatg

SEQ ID NO: 100169 - DNA, 557 bp, Heterodera glycines
caacttaaattcatattttttagtaatatcaaatcttaactaaaaaaacacaaaaaataattaaagtaaaaaataaatacttgaattacattgtacaggggcaaaggcaatcttcgactacaattttaaactaaaaataaatataataatccaaacgctaatccttaaggggatggaagctgatttcatatttaaacttaatataaattttaatcaatgaataaaatccttctttatcatgaaaaaaatcagcaaaaaatcttatgggcatataaactgaaaaaccgtgccaactgtaatgtaataaaattaattaaacataattgcatcattagagcgcttagatttttgaaattctatattctgataaataattcttataattatttaatgtatcacaaatattaaatttttggctgattttgtgatgtaactgaaattgcttaaattatatttgaaaaaataatcactactcaaaaaattttggcaaaaatgaaggaagaaattgaaatacaaagagcacaagtaccatacaacaataatctgtttggaaaatg

SEQ ID NO: 100170 - DNA, 129 bp, Heterodera glycines
cgtaattctaaataaataaacccattttccaaattaaaattaatttggttcatttagcggactggcaatggcgcttgcactgtgccgagacccaaccgaggaatgtggttgagctgggccacaacaatg

SEQ ID NO: 100171 - DNA, 1003 bp, Heterodera glycines
gtgagggcggcgttactccggtctcgatctaaacatttttgagaccaatgcttaatttttgcgtctattcgaatagagaaacataaaagatagctagattaattaagcaatttattcgttttggcattaaacaattatattttttaaattaaactaatgtcgagacccttttaaaacgatttttaaattatgaaacttagacagcaaagtaaaaaaaatttagaattgaattcacatcctgacttaatgaaatgagaaatgctcaaaattaattaaattaatgttaatagatttatggagaaaaccttacttctctgatggcgacataaatcaccaacatcgcattatgcgacacttgacaaaacttgtaaaagttgtcattcggaattttcagacgcaccagatcccactcctttaaataaattttaaattaagaaagaattcgatttattttgatttcctaattacccaattgaaggggagagagagtcaagaattttgcaagtggccaggggtcagaggcgaggaattacatagatcctaattgttttcgttttcctctttctattcttcgttgggacccaggggagaaaacctttagacccgccttctttccctttttatgtatattgtataatgaccaaattgtccatcaggaaatgatgaatttcactggttccaaattggttgccgaaactcatgataacgttctcttgttgaaagtaactctaatccgctgtcgctgtgtttaaaatttataaaaatgaattttaggcaaattttggtcatgaaagaacagaaaccatcacattttcaatgattgtttaaaattagtttgttggattaatttcttgcttctgcttatatcctattttccaaaatttttgggaaggcaaattatttatgtgctatttccaaatttcctttcatttctctcgtcccaaaaagctcaaagtatcaaaatactggtgtttaacctcgtccggtccgctcattcgcaatg

SEQ ID NO: 100172 - DNA, 463 bp, Heterodera glycines
tttgaaagtaaaattttatcttaattagctgacaaatttaaatgctccatttgccattaatttgtgctcccattttatgccacaaatattctttaaaaaattatttttggtatttgaagaattaatttgtgacatatttaataagcttttaactcattttacatcttttgcaggtgccttttactgatcaaaaattgttttattgtcattggtatttatttttggaaattgctttttaattatgcgtagctcattttattctattccgtgctcattttgccttattgtgaataataaatttggatatttgtaagattaatttttgaatatttgataagtgttgcgtttgttagggacaatgaaaggtgctaaaaataaaaaacattgttaagaaaatcctcttcctataaaggatgcgcttcctaaaaaggtaaataatttgttggaatcctattaaaacatg

SEQ ID NO: 100173 - DNA, 85 bp, Heterodera glycines
taagttttctgaaaattttttttaattttgtagacaaatagaaaatattaggcttttgaatgataccaaaaattaaaatataatg

SEQ ID NO: 100174 - DNA, 629 bp, Heterodera glycines
ttgtagtgaaaaaaagaaatgaatgaataaatgcatgcataggttggctttaggatgcatgataccagaaggcgataccgttccctcgggaatcagtgaaaatttgaattggctttgaaaattatcgattgtttgcaaacatctgttaccatgtggcatttcccagagggaaatgcgcattgattcgccgaaaagttatcgattaatgggcggagacagcaactttaaaagcgagactgtacagagaatttttcatttgttccttgcccttaattatattcttaataaaaattttccatttccaattttgctgttaaccagggcggtagctcgacctacagagtaccgtttatcctggcagcaattttgttaatttgttttttagatcttgaggtaatgcttttttgacttgtctaattcccagagttgtttaggtgccctgtcgtcttgtgcttcatgggtggcagtgcgcggctcatcaggccaagatgggtttatttaagtgttaaatttcactcaatttcatcacttttccttccccattttgtatttgttacgagctcggctcatataaatatgcccttcctattgtcgatttatcattttaataaagcattagattaaaaatg

SEQ ID NO: 100175 - DNA, 427 bp, Heterodera glycines
attaatgatattgaatttaatgttgttgatgttggccgggtccttaaatctttaccaaataaaaataatacttcaccggatggtataaatttcaggttaataaaaaattgtttcctttcttttgcaccttatgttaccgaacttttcagaatctcatttgataccggaaaattaccgaccttttggaaaaaatctataataattcctctctttaaaaaaggggataaaagttgtcccaccaactatagaccaattgccctcacatgttcactgtgtaaaatttttaaaaaatttgttgtcagggcaattactagtttccttttaaaacatgactagaggtaaaatccttaattggatttttgattttttggccaatcgctcctttttagttcgtgttgaaaattcgttttcttctgaatacaaaatg

SEQ ID NO: 100176 - DNA, 1003 bp, Heterodera glycines
agtttttttcaatttttggcacatattttgggaatcggtcgttttggcgccgccgttttggcgacgccgttttggcgccgccgttttggcgacagggtcgttttggcgccgccgttttggcgacagggtcgttttggcgccaaaaaatcagagacgcagaaataagcggcagacaagcgcctcttcaatttggtgtagaattacattccgtgaacccgaacaatgataacgatcacaattaccacattaacccaaatcaaaatcatcatatcattttggaatttcttcgtggcgtttcgcgcaattatcatatgaacccatgaattttcttatttgtcttctttttgtttgttattgttagggccccgacttttagtgacgaaaaagtgccaaaaaagtgaattttcactattttaagtgacaaaacgccaaaatagtgatttttagtgacgaaaaatgacgtccaaatgaaaaattttttacgcggaaatgcgttttttgagctcctttcttcaaaacaattgagcaaaaaaaaagttttttcactaaaagtcggggccctagttattgttatttacatttttatgaaaagttgtaatttttaaaaattgaaatcgatcttggattcacaattttttaattttggcttggcgccaaaacggcagcgccaaaacgaccctgtcgccaaaacggcgtcgccaaaacagcggcgccaaaacggcggcgccaaaacggcggcgccaaaacgatacagactcatagaaaacatctagaactatcgaatgatataaggaattaaaaatttgattgattttaagtaaagatatgaaaaaattgctacaattgatggtaccatttgccgggcgttttaccttatccccccacccacaaatcaatcaatcaaataatcaattggatggataatttttacccaactttcatttgtaaaaggttagaaattttctttgtcaaccaaatccaacatttgttggtagcaaaaatg

SEQ ID NO: 100177 - DNA, 362 bp, Heterodera glycines
atcaggatagaagaagtgctacattaagaacttttttaaaaccaaatccaaattattaaaacattattatttaattataaaaatgaatgaattggcaatatctctattgaattacattaatcaatgaagagaaaattttataaagcaaataataatcatgcaaattatggtgagttgccacttctcatcctcatacatttgcattaaattgtaaatttcttatagtttttcatcattattttcttattacacgtgaaagctctgctgcttatatttctttacatattttgtaaaaaaaatcatttaaaattaaaataatattaaaagatttagcaatttcgaattttgtgccctccgggatg

SEQ ID NO: 100178 - DNA, 119 bp, Heterodera glycines
cttatttcttttgttttgactctttatggtatgtattatcattcttccctgcggatttttatttttaaaaatttattacattttgcgtctaggtttgtcgttcatcataatttttaatg

SEQ ID NO: 100179 - DNA, 493 bp, Heterodera glycines
attttttgttttttaaaattttattttcttcctcagattgtgccggtcacgccgataccgctgaaggaggtgtatgccaaactgttgcagaacagtccatgccgtttggccagttggtactacaaacatcacaggtggttgagaatcagcgcatttttgggcaattaaatatttttaaattattaaattaatttgtgaaacttgttggcaaatttgctcctgtgctcagggtccaacgttttgagttgattcgcagagagttccgcacagacacaaaatggacaaagctggaggacaacgaaaccacgcggctttggcttcataagcgaatcatccaaattcaacggtggcggaacaattaattataattaaattaaattataatttaattctaattttttgtgcctcgtggatttaacaatacattttctttcattaaaattgcaattatgccccgttttctttaagtcctttgcccgacttgctcagcatg

SEQ ID NO: 100180 - DNA, 117 bp, Heterodera glycines
tcgaatcgtgcaaaatcggcgcgagaaagccaaatgcggatttctacgaggcaattagcatataattagcaattcttttgttttgataaacttttagtgagtccctttcttcagatg

SEQ ID NO: 100181 - DNA, 569 bp, Heterodera glycines
agtgaatttgtaaaagtagtagttttaaaaaatttaaagttgaactaacaaatagaaaatgttgatgaaaatagacttttcattttgacgtactatttctttgtctctgttcatagaaaaagaaaggtttcacttcagctttataggcttagcatctgtttatgagtcgcacatgtaaatctttttaactgggaggccaaaattgcaaagctgcgcagtagggataataatttaatgttcgacttgacttttcctccgatgtaatttaaataagtatttaaaagaaaggcaagcacaaatttgaaaaaggacaaattcacaaagaaaagatacgtttatcaattaggtcggaggatgtaaattggaaatacaaaaataattaatgatccactttatgcgcgaaggaaggagcgagttgacacaaaataagaaataaaaaacgaatatctggcataagtcaaatttaatccctattcaacacctccctccttaattcgagaagcccagaaaaatattcatttttaatatttcgattatggcatcgaaaaaatatttttttcttcggtatg

SEQ ID NO: 100182 - DNA, 244 bp, Heterodera glycines
attatcataattgaattgaatttcaatttctatttttcagttccctccgcggctccgtcaattttctgatggcactgatttgtctttgtgaattggtccaccaaattgggcacacttttttcctggttgttgtcattcgggcataaattttgtcagtttgctcactgctgacttaattatgacggtaaatttaattttaaatattttttttattttgatttaattttttaatttttagccaatg

SEQ ID NO: 100183 - DNA, 163 bp, Heterodera glycines
tattttatttaattatttattggtataatttttaccaaaaatttttggactatttgtatttagcgcgctaattaggtaattaatgatgaaagagaaaaatgatttaagagtaggcagtcggtcggtcgctgtttttatttgtttgtacgttcattttaaaatg

SEQ ID NO: 100184 - DNA, 137 bp, Heterodera glycines
ccccccccccaagatgactacattgcgatctcctcagaaagagggagggagatcataccagaaccaaaaattttggattttctggctgcattagtcttcaaactacctagaaaatccaaagttttgctttcggtatg

SEQ ID NO: 100185 - DNA, 251 bp, Heterodera glycines
atctcacttactcattgtcagttgtaaggaaaagtcactttgatatcggatacatatgtttatgtctcttacaattagcgttgttttcatcacattatgaattaaaaattcctataataaatattcgatttttgcttatttttcggagtgattcgaagatttgtttttctcttcaatatttttgattccgcgcaaatctttttatcatttcttacaatttatcagtttttgttggttgaattttagaaatg

SEQ ID NO: 100186 - DNA, 1003 bp, Heterodera glycines
gggctggcagatctgaggctttagcctcattttgtggttttttgataggtcaatgaggcttttcaatttttcgcgcttattgtagaaacaatgagaaaaataatatttatgcaaaagtggcaatcttatgatgcaaatgtaaagaaagaatcttccttttttggctgcaaattacgagtgattaagtagcttttcctaccgaatttttgcatttaaaagccaagcgctttcactcttttgccatatcattttaaatttctgccttttttcattcattttttgattcccgaattgcctaaattttgaaaactgaaatatttttagacgatttgtgttaacctgagatcggcgcggtcatttttttcggtctttccgacttttctattcaaattttacccgaaaaaacaatcaaagaattgttggataaaaaatgttgatttttgagaatttttgatttttaatgtgatttttttcatcattaaattagttttttctggtagattttgcaaaaaaataaacttgattttcaaaattgatctaaaattgcgtaaaagccgccccaaaattatgaaaatttagtgtaatttttaactaatttgtccaaattctgcgaatttggccaattttcgaaggaaattttaacgagttaaggtccggctgtgtctataggctccgtctgggaaaaaattggagttttggccacatatgttaacagaatttcttaaaaatttacccctttttacttaatttttttaaacaactcaaatttaatggattgaaaagaatttttaaaaaaaccgaaaacaattttcggcgttttcgaactttttaatgaaaaaccgaccgccaaaaaattttaataatcttttcaaaagcgattttgtagacaattttggctagggcccatttttccaaatttattgccagaccataggattattttttcattaatacataatatttagagtgatcaaattattctatttttatcttccataaaatg

SEQ ID NO: 100187 - DNA, 791 bp, Heterodera glycines
tatttttcgatagccctaaatgttttctattatcctgcaaaatatctaaaaaattctttaagtttaaaaaaagttatcgacctgagaagctcaaaaaaccaagtttttttgaacattattagtcataactttcttgaaacttaaagaaactttttgaaattttgtagtctaatagaaaacacttaggcctatataatgatatcaagaattaaaaatttagttgcttttgagcaaagttatatcaaaaaatattttcatttgatggtttttgacaaacgcccattatgattgttttttgacaaacgtcttagcaccgaatattattgtttttaatacaatgtccccaattaaaattaattatttacaatgagaaaaaaataatttggaataattaatttctgcaggccattaaaactaaaatttttaaaatttattccacccaataaaggggaccatgaaattggtgagcctgtgatttttttttttttgttaattacagttggaaaattaagcaaaaaattgggttggaacaggatttgggaaaaactctctttaatatcaaaattccatacaattaataggcgaccataaaaaaacaaacataatgccatataaattcaaaacataaacaaatgtcaccattgttttccaaccttacatactgtatgtccgtccccatttcaggtggcaaaaaacatcggagtacgtaatgcttttttgtatacaaaattaaaaaaacaaaatttttttgtaaaaatttgaaaatttttcagacacaattccccattatg

SEQ ID NO: 100188 - DNA, 180 bp, Heterodera glycines
ggtgcattcatttccatggggaacaaaaaaaagcggggcaataattatggctttagcaaatccattaatttactttaaaaattttgaaaatgccattggctttcacaccaattttcatgaaacatgggacgacttttatgcaagaagactttgccaattgtttttcagtgccttcgcatg

SEQ ID NO: 100189 - DNA, 602 bp, Heterodera glycines
aatttttgagctaaacggtagcctaaataaaatatctcattcgaaatttaggcattaaatgtgacatttatccaaaaatatccgaaaaatgatttattcttgtgggatcggttcttaagggttattttttgtttttattgcattttggttaataaatttgggaaaacgccaaaattggacaaaaaaataatttttggctgtttaggctcgaaaaattttaaacctagaaaataggctttaataactcgaaaagtagcttaagaaccaccaaaaaaacttgcttttcgtgcgtttaggccacaggaagctgaagtaaaaatagggcaaaaacctaaaaagggtcgttggaattacaaattaatttctttaaaattttaaattaaaaaagaaattagttaattaaatttttaaaagatgccgacaaaatcaaacaatttgaccaaatcaccgagctttataatcaaagcagaacagtggcattaaagcaaagagctttggtaaaggagaggaaagaaacaattttcgttttggcaggtaaaattaaaatatattaattatataattttatttagtttttaattttattttcagattttacaatg

SEQ ID NO: 100190 - DNA, 841 bp, Heterodera glycines
aatttaataaggaaaggtattgaaaattataatgcttaaatatttttaaaaaatttcgaaaattcatttttctcgttcaaaattatacaaattttccgaattttaataaattacatattttttttaatttttttttttgggcaaggacataaagtgcccgtacatttttattggttttaataaaatgaattttaaaacaaaattttatttttgaatccgagtaaataaattttcaaatatcatttttttcgaacccaaccaaataaatcgtaaaataaaattttattttcgaacccgaaaacaaattttaagataaacttttttcgagtaaattttaaaataacatttttattttcgaatcctaccaattggaccattcatttgacgaacattcgacagctgagcaattgttggtcatcgcattggtcaatagatttgctcaaattagtgaacgatccattgagccatacaaagagattgttgtgatacaaacgcttgaggcaaattcaattaataatttaaatttaaattaatacataattggtttcttacggtacaaatactgtattttgaaaaagaacaaaaatggatttaaattttcgaattataaattttcatcaattaatgtagaaaatctttctctcactcaaactctctctctctctctcgctatctctcagtctctttctctctctcttcctctctctctctctttctctctctgttgaatatgaaaatatttaattgtattaattaatcaattttaattacgtattaattgcctaattaaaatataagaattttctaactaaatttttgttttaagcctgtccataaaatg

SEQ ID NO: 100191 - DNA, 1003 bp, Heterodera glycines
tggaatgatcggaatcaatcaatatttggctgatcagaaaactcactaaacggcaatccgcttgaaaccgatcaaattgggaggaagcggctttaatggaattggcaaccgtttaactgtcttgtcactgttacatttgacaatttccgctccgtcattcgtgctggaacgttcaattctcaaacttccaagcttccattttcttcgtttaagatgagtgtccaccactacatcaaatctataggagacaaccgcaaattccaaaccgatttttgcgtgcccacaaaagggcaatgaatccaacaaaatgtcattgcagataaaactgaattttgtttaacgaattatggcattaaaattagaattttatacaaatttatctcacattttctcaaaaattcgtttctcttcacgtggatgatctgacatagaaggatatatgtacagccagtcgatgatcaaattgaaaattgttgcattattaattaataaaatattaattaggtaattagtgtttatttacacacaaaaaattccctaaatgaaagaggatttattttttttaatttaaaataagaagttgattgaagtttcaaatttcaacgtcacatgaaatttctcacaacggtgtcattctttgaggctttgttttttcgttgacgttttattgacgaacaaatacaattcaaccaaaccaaaccaactcaagaaaaaacaaaattttcgtttttttggcgtaacgtcactcgctgataagggccaggagcaattttttttttgtttgatcacattttcattcttttgattttgatcgactgtttggaatacacaatcaaaacctaattgtttgttacgcaattagagtagataagaaatgaatatttaaacttgccaactgatcattactgattaattcaattcaatttcaacaaacaggaaataattaattaattcaatttgtattttctcgcttcttatcaagtgctattagtagaaagaaatg

SEQ ID NO: 100192 - DNA, 376 bp, Heterodera glycines
aatgttctgactaatttacattacagtctttgagggcaatagaaaggatcttctaaactcatttcatttgtatttattccgtggaattttacattgcttaaattttgacggtgtttgttattgtaatgctttcactgttaatgcatcaccactttcatacgttgttattaccttattgcagtttttacacaaataataggtttgagttttctgaaaaagaaaatttgttcttttttgttcaagtttaatgctttgttcttatattgttcgaatttatatatttttcctttccattcactttttttcttaaatatcaattttatattcttttttaatttgttttacagaattccgttgtctttctattgtaaaaatg

SEQ ID NO: 100193 - DNA, 79 bp, Heterodera glycines
ggtaaaatgttttgctattttttaatgaaaattttaaaattttttaggcctccgaggccatcgaactgcccaaaaaatg

SEQ ID NO: 100194 - DNA, 68 bp, Heterodera glycines
cagacatttgccaatacctaacattttgcaagcatttgaaattggtgttaaaaactgctgacaaaatg

SEQ ID NO: 100195 - DNA, 127 bp, Heterodera glycines
tttcccccctccattgtccctcaattttttgctaattacccagggaatttctggccctgggggacagtgcgttttgcccgggggaaagcccttggaaatggccgtgaggagggaatatcggacaatg

SEQ ID NO: 100196 - DNA, 1003 bp, Heterodera glycines
  unsure (1)..(1003): unsure at all n locations
tgcgatcagcggttttgatctactggtgtaaatttgatcactttagaaacaatcaaaaaagatatccaaatttgttgcaaattgcaacacctttttaaattttctttgtttaaaaatttaaattcataaatagggatgcaatttttaggcaaaagcctatttttttcctgagctccccgtggcttgaaacgcacgaaaaacatgtttttttcggctgttgttaagctacttttcgagttattagtgcctattttctaggcttttatttttagcgcctaaaaagcctaaaaatttttgaaagagcctatttttgcctattttggcgttttgcccaaaatttgttaacaaaaatgcaataaaaacgaaaaatacacccctaagaatcaacgtaaaatttttttcaaaaaatatcccctaacaaccgacccgaaaattttcnaaaatacatccctaagaaatgaaatttttttcaaaattcatctccaaaatttatttatttattttattgacaagaatttgtgatttaaaaattatttatctcaatactgatttggcctaatttttttatttttttgaatacattttgtcattttacacccctaaatttgaggatttttagtgcctatttttcattttttagtgcctattttaggggttttttagagcctaaagcctacctatttttgcagtttttagagcctaaaaattgcatccctattcataaaaatttaaattttaaattaattagccaaaacaaaatgacaaaattatcaaatttaaaatgcaaaaactgaaaattataaaaaaaacacaatgatgggattgcatgtgattttgctaattttgcaaactaaaaagcaagaagttaatcaattctccattcttttctgctaaaatttcttaattttatattgaaaacataaataaatacaaaaccatttgctgtgcttttagaacaaattaaatttgataaatttgtgcattatttttgtgatcaaaaatg

SEQ ID NO: 100197 - DNA, 1003 bp, Heterodera glycines
tataattgaataattagttaataataaaagtgtatttggctctgtttcagtttacacgaccataaaaaattactcgaccatgtaataatttgacaaatttaaggcaccgtaacttttttaagaagcatcctaattaaacattcttggtattatttaatagccctagtgtcctttattttcctttaaaatttcagaaaatttggttgagtttcaaaaaaattctggtcaaaaaggttaccaaagcaattttttaaatttacaagccacaacttttttgaagcacaacaaaattttttgaaaccttaaaagcaaatagaggacacttagggctatcaaaagataccaagattgtttaatttagatgcttttacaaaaagttatggcactgatcaaaaattgataatttttatggtgatcaattattcaaccaagtataactttctatgtacaaatcacagaatcaccattccaaaagcaattcggtagcaaattttgtgctttttccagtggcttgcccattttctctagaaaaatttcccagccccctagggattttgaaaatttccttgagtcaagattttttgggggacactgtatttctctcacaaaaatgtttgtttgagaaatatttaaataataaattgaaattataattatggacagcaaatataattaatagattaaaatagttaaataacacaccatcccgaaaaacgagaagtgtaccaataaatagatagtgccagagaaaaacaatatatttttttctctaattttttgactccttttggcgtactatctatattttcattattaggaaaaacaacattcacttcgctatgtttagcttcttttctatatgttagatccacaccaaattttgcaaatcgatagagaaaaaaattctgcatcgatttctatgtttattatcatcgcttaaatgttgtcttaaaaagttataagataaaaaagttaaattattattctttttaaagatttaatg

SEQ ID NO: 100198 - DNA, 82 bp, Heterodera glycines
ggttgaattcatgacaaaaaaaaaaaaatcgaattttcgaaaattttagcgctatcaaaatgacccgacattcgcagaaatg

SEQ ID NO: 100199 - DNA, 194 bp, Heterodera glycines
ttcttagtataagactcaatcttccacttcaactcttttactttgtttattttcttcacctcaatgcggaactttatgtcaccatattccacattaattttcatgccatcagtggatgatggcattatcagcagcataaacattgtcactagcccagctgaaatgccagcggagaacagggcattgccaaaatg

SEQ ID NO: 100200 - DNA, 222 bp, Heterodera glycines
ggtgggaggggggggggatttaaaagtcaaacagaaaatttttgaaaatgtttcccaccttttgaaatttcaaaatttttatatttttgatatctttttgaaatttaattaaaattttattttcccttaatttttggtggataaatccgtggagatattcagctgctgcttctcttccggataaaattgtttatttttgcttctttttattaccacaaaatg

SEQ ID NO: 100201 - DNA, 748 bp, Heterodera glycines
cgccagcatgtttttggctataacttttttctttgtaaaccaaatccaacattgttggtgtcgttcgaaagctaatcaatttagaagctttttctaagctattgctttgcgattagacaattatcaaaaaagttatgcatgaaaattgcgaaaagtcaaaatttttgaagttttttcttaataaaattttttccaggcttgaaaaacttttcgtttttgataaggctaataaagcatgttaagagctttcgaatgataccaacaatcttggatttggatgccaaagaaaaaagctatcgtggaaaaacgatttttcaattgtgtcacaaaaggcaaggcaaaactctgttgttatgttaaaagagagagttgggaaaaatgagagagcaaaaagaacgcaaaaacaattttgaaatagaaataaattcatcacattttttggcaaaaaacagacggagatttgtattattgtttagaaaaggattttgcagggcaattattaattcatttgtgacatcaatcaattggaaaacggcaaagttgcagcaaaaatgaacagagggcgaggaatttaaaaaattacaaatttttcatttgcctatttatcttttcgcatgcatttcagtttgatttgtggcgacgtttgatgtattttttgaatttttttccatgtttcagttggatttgtgcggatgtttggatggacattctgccatcttttgaccatgctcaactcggcctcaaaatg

SEQ ID NO: 100202 - DNA, 315 bp, Heterodera glycines
cctttgcaaattatttaggccgagtttttttagaataaactggagaattttttccaatccgaaattttatgtttaaactaataacaagttttgacaaaattactgatcccatctttgtaaatataggttaaatcaataaatctattttggcactatggcccaagtatttttgcaccgaaatcgtccggctccaagccattcgatcacgcacctgagcaccggacttggcttttttttcataataattctattttggaagtgacagatgtcatttcttacaatccaagaataacccattttaatggatacagaatg

SEQ ID NO: 100203 - DNA, 310 bp, Heterodera glycines
tttttggcacgtttaataacgaagatttatttaaattatttgctggtttattcctccattttcttttccctccctattcttgccacttttcacttaattatggtggaaaagtgtatgcttaatggaggaaaattgtttgttcgagaaaccttcggtgtccggccattttcccctggctgtgcttccatcctctgtctcgaagacagtttaatttcatttttaaatgttttttccttgtaatattcatttttgaccgtaaaatcgttgctttctctcccagtctgtttgacctgtgccgccggtcggaatg

SEQ ID NO: 100204 - DNA, 107 bp, Heterodera glycines
aattttgaaaacggctaaatgtgaaaaaaatgaaacgacggtaaagaattttttaatagcacgcaaatttctcatttattaattttttccacattttcagttggatg

SEQ ID NO: 100205 - DNA, 216 bp, Heterodera glycines
gatttaattattaataaaaaaatatttggtgaagtaattggttattgttgggttattgaatatcaaaaaagaggtctcccacatttgcattttttaataactttacatccaaaagacaaatggcataatagtgaagatattgataaatttatatcagctgaaattcctgatgaaaaaatagatcccgaactttatgaaattataacaaatagtatg

SEQ ID NO: 100206 - DNA, 239 bp, Heterodera glycines
aataagactttattttttactttcaaaaatttttctattaaaaaataataaaaatgaaaaaattatttgcgcctttaatgttcctattttcctttatgtaaaaatttttgaaattgtttttggtcccattttcaatgcttcaccgaatattgtaaaatttatttgaatttattccatccttttccgatattctccaactttgtgccgcgtgtggcattgtgccgggacctccaacaatg

SEQ ID NO: 100207 - DNA, 385 bp, Heterodera glycines
ttcactattttattacattttctaattaattatttctttatcaattcatcatttttcaaaaaaaaaaaaattggccaaaaatcaaactttgtttaaaaatttttcaaaattatttttaattgattttggagtgaacaaaaaacaaattttgcttaaaatcacgcgagcaaatttatggaaataaatagaaaaaataaaatggcgggagagcgcacgcacattagtgcgatgattggcacatggacggacaaatggggagggggcaattaattaattacactaattacccccgctaattattgagcacactaattgccccggctatcacatttgttgaacgacgattaaaaaaaaaataaatgtgcagcattgcatttttgtgatg

SEQ ID NO: 100208 - DNA, 1003 bp, Heterodera glycines
gcaaaaatcgcggcactgtaggcgcgcacgaagaacctctgtaaaaacggcgactaaccaaacatagagaaatgttttttgttttgtttgtgttttagcaaaggcatataggcagactcttgccttcgtgggggggagcagagcgatgacctgttttagtcgttttttcaaaaaaaaatttaaaggataggggcggtgttggtctgttccggtatacgactcgggatcaattgctttatttattacgtgtgccgacatttcgcccaaaattattgagctaatcgccctgaaccaggtctgtagccaaaaaaaatgttttttttatgaatggttgctcttcgaaccaaaatttttttaaaaatttaagttagccatttttttgccaaaaaatagcagaatttttccagttttcattagaagttagctctattttaagttaaataaaatattattggagagatttgtattcggatatttccgttgttctttccgtcctcgattggtgcgcctatttttcaggttaaaaaatctcgcaaaattttttatttctttcattatttacattactttctatagggcatttcttacagaacactgtcctaaagcaatggcaaactttttttgttagtctctaatgtatactttgtcatccttacaaatttttttagtaaggaaagtcaggttcgcgagtttatgggttgttttgagcacacaccatcccaaaaaacgagaagtgtaccaataaatagagagtgccagagaaaaacaatatctttttttctctaattttttgtctccttttggcgtactatctaatatttctattattaggaataacaacattcacttcgctctatagaactttttttccgccttacagaatttcttcatattttgcatatcgatagagaaaaaaatataggatttttcaatcgcttttttaaagaaaacaatcgcttttatttaactttaatttttattttaaggcaaatttaattatatg

SEQ ID NO: 100209 - DNA, 1003 bp, Heterodera glycines
agtgattgttcgtgctaatcccttcgaattcatttgtccgctctggtccgatcagatttgctcccggattttgcagggtcggttctcccccccccccccattatccctccccctcttccgttactaatttgatcaacccaaattttccacccgtaaatgccgaaaagcctttaaattatgccttaagggcatttcaattaagagttcaagcgaccacctgcagcaaaatgttagacgaatttttactttcctatgaaaattagtcaaaattccttctcccctcgcatttgatgagtttcgccgattccgtcgcctctccgccgggagattagcgcggagattaggccaaaagagacgaaacaaaagtcacgccaaatcaaaggcccaaagggaacggaggggagaagggaagggaccagtctctgctgctgcacggaggtcgcgcagaaggcaaaagcaaaccatttttaggttcaaaaaaattacgatggaattccaaaagtggcgattgaccgtccattgagttaaatcactttgaatgcatagccgctcaaaaaaaaataattttaatgaaaattgaaaaagatactaatggcattagtcaattgccaatcggagttggcttggcacttcccaatgccatgctcttttcctcccctcatgaatccccccaattcctttcattttttctgttctttcccttctgatcgatcagctgttttgtccctcagtcgccgatcacttcgcttacgccaatagcaaattttaacgaatctttgagctttttcttcacaaaataacgacattctctcttttattcgcttttctcggataaaatttcagccgaatgaatgaaaattggaaattgatccgattcgatccgtcttccattcattttccttttctcatttctttgaaatatatttttgacattccttttttcaaatttttttaatcattttttaggttttatttttaaggaaaggcattcgacgaacgaatg

SEQ ID NO: 100210 - DNA, 524 bp, Heterodera glycines
ttttttgggattttttggaggagagaaaagggtttatcgattggtcaatttgatgaaaaagatgagggaatgatgaaaaagatgagggaatgaaaaagatgagggaatgaaaaagatgagggaatgaaaaagatgagggaatgaaaaagatgagggaatgaaaaagatgagggaatgaaaaagatgagggaatgaaaaagatgagggaattatttttaatgaaacatttgcaattttcgtcgaaaaaaatgcttacgcaggagcagaactcaaacttcagaataaccaatccaggtccaggtccaggcttttttcaaaatgtcgagctctaggaatgaccatcattaatagtaaaatcgatgagaatagctattgtcttggatgaggctgggttattccatccattcattctttccacttactggttataaagccatttatcatgtcttgtttatacagttattagctggtattgccaatgataaatgagcttaaacaaaaaatttaattttttatataaaatg

SEQ ID NO: 100211 - DNA, 355 bp, Heterodera glycines
tttcaacagagaattctgaaaaaatttaaattaattactttcaacattttgttttataaaatttgtttgtagttcttagggaataaacgagctttggctcagaaattaaatgtttgttttttgattcaataaacaattaatttgtgctaattttaattataatttcattcaagcactttatcgaacactaacttgagtgatgagccggtgagtaaagatggagttcgaattcgtttaaataataattaataatagttacagaattatttctggaatatttcatatttaaaacagattgctaaatatttttttaaagcaaggaaatatgtgttagcatatggaacaaaacgaaatg

SEQ ID NO: 100212 - DNA, 252 bp, Heterodera glycines
atgagatggcaaattcaaaaaaacactctattaaatgtttaaggtacaagatatagacctgaagatgttagagaaatcttttgctccttcctccgaattatctaatcattcctggtgcggtttatataagcaaatttatacaaataacgcgtatttcattaaggaaagtttgcgctaatcgttatcaagactccattagcaaaatgctgcgtttgtattcaagttatctttttcttaggcaattggaagatg

SEQ ID NO: 100213 - DNA, 217 bp, Heterodera glycines
agcaaagagtgcaaatactgtggcgtagtatgggacatgcgtaaaaattgcgataatgggagagaggtttcttttaaaaatttaataaattttaatattggaatagggtcacaatgaccgccaccctcttgttgcattcgttaaatggcttctctacaaacttccaaagcaatacgaaacaattgcctattcccatttcggcggacgtttcgacatg

SEQ ID NO: 100214 - DNA, 133 bp, Heterodera glycines
atatttatggatcattaggagattttggttcccgatctctttttaccgtctgctgatccatttgaaaatcttagtcgacccatcagcccctttaaatgcacccccagccctaaaaaatttctttttcaaaatg

SEQ ID NO: 100215 - DNA, 1003 bp, Heterodera glycines
tattttaaatggcttttatgactgaatgataataaaattattgggattaatgagattggctttgttttaaagggatggaaaataatttgtctttttaattttttaaaaataaataaataaaatttcttttaatagtcctattggcaggttaaaatttacataaaacccacacagccaagccacaattcagatagatgttaattggcttgaaaaagggggagaagaggacctaatcaaaaattcattgaatttttgtggccattgaaaaatgcgcgtaagcgaatggaaagggtttctaatccccgcaaattcaaaagaacaaaaaaaaaaaatttgtccgaataataaaaaaataataataaattgcttttgctaacaacaacaattgtataattagtgaagaattgctttgtcgataaaaattctcttggaataattaagaaattaaaaaagaggcgcttttgtttattatgcaaattttgagaaagacgtcaaaaatagaaaaataaataattttttatgaaaacaaaggatttaaaattgcactttttgaaataataaaattttaaaaaatggtaaatgagtaaaaatgcaattgaacggactaataataattatgtaaaaagccaatctcacataaacattagcatggattagaatgttgttttgattcagaattttggcggggcgcgggcgggcggaagattatgagcaaaatgtcaaaaaggcatttcaaatgggagacgtcagagggggtggggtggggggaggaagcggaagggtgccgactttgcccggtcgggggagggggagggtgccgactttgcccggtcgggggagggggagggtgccgactttgcccggtcggagatgagtcggcgatgtccccgaagacaaaaatatgggtggaccaggggggaggtggcttttttcattgccgtcgtcggcggaggaagcggcggcttcttcgatgcttttcctattcaaaaaagcacaaaaaatg

SEQ ID NO: 100216 - DNA, 986 bp, Heterodera glycines
gctgtaatttgtttctattttttacctcttatctatttgtataatacctcatctttacctatgcatttgtgtccatatttttgtacattttataatgatgagcttgaacatcccctattatttgatagccctaactgttctctatcagtctgcaaaaattcaaaaaatttcatgaagtttcaaaaacgttatgacttgaggaactcaaaaaccttttgaacattttggccatttttgaatgttaacaatgtttctgaaattttgcaggcaaatagagaacatttagggctatcaaatgatagaagaattaaaaatttggttgctataaagtagcaattttttattttgatggtttcttaaataaagcgtattatgatgtttttaaatagcgacgacatagcacccaactaattaagttggtcagtgagtcccatcgggaacatcaaaggaggaaagttacactcaaattgcataaactagctaaacgatgatggccaatcaaaagaaagaatcaatttgtgccactttcctcaaaaattgcattttatcatttcgcccttttactgcttattatttattaattgttttcatcactttagtttccataaagtaattttaaaaattaaattatttttaacaacactatgttttggattattttaaaatttgaacaatgccaagaattaaataagctatcgatcggtataaagcatctaacatatgctattagtaaaaaaattacggctaaatttataaaaaaaattttggggtgtgttaaacatatgaccatgactgtattataattttattctagtaaatttttaaaaaataattagattttttgcttcttttctctgtatgtatgaaatttttattaatttttcagttggcgatctgtagcttttttttggttaaataacattttagcataaatctcaccttctcaattttacattgttctgtatcaatttattgcaaaataaatg

SEQ ID NO: 100217 - DNA, 467 bp, Heterodera glycines
catattttgccaatttgtggattttttgaccccttttatattaaatttcttgtggaaaaatttaaaaattttttttagaaaagggtaccgaaaaaatcgggttttcttttccaaaagtgagatatcaaaaataatttttaaaatactaaaagtgatctctaagcctatttagattattttaatggcaatttgtgcttatttcaccctttaagaggaattttattaaccatttagaaaaatttatttacatattgtagtacatattttgggatttttgtacattttttcttacatattttagcattttttttaacattgtttattttcatatttcgagatttttgtgacataaaattggcatcaataatttttcatgaatttaactacaattgtcagtaattgatatcatccctttgtccgaattcctacacgaagacatccgaccggccgttgacggcgaacggatg

SEQ ID NO: 100218 - DNA, 274 bp, Heterodera glycines
atcagtgattgcaaaacaatgattgatctgatctggacccttttgataatgagaaaaaccatgatattcgttcttatgttttcttttcctttggtggactttcatgtcttcctcatttttatgtagttttatatgttctctgcttttaatatctaattggttttgatggcttttttattccttccatttaattaaatttggtaatttaaacatacttggacaaatgcttatgtgagaaattaaagcgattttccattttttttttgtcataatg

SEQ ID NO: 100219 - DNA, 193 bp, Heterodera glycines
tttgttcttgcaatattctgtcataattttccaattgcttggtttttaattagttgtttaacaacatttcttagtcttcccatggcataacccaaaatttgttggtaaattcgggttctctcttttataaggccaccgaacagggtatctggttatttttaaatggtaacatttttatcaaactggtatcatg

SEQ ID NO: 100220 - DNA, 1003 bp, Heterodera glycines
cttcccaccggtgaacgagtcgggtcaatcccgacggtcgcagtttggagtccactcactcctcctttgagtggtggtgccgtttctttccttccctctttgtcccgccctccctcttctcctttctcggccccccttgggcctcaattcgaaaggggtcgaccaagccgagaacgagggcatagaacccggtgatcacccctccctttgatcaccaggggttttcggacagaaagtgaaatttaattgaaattgagtaaaattcaaaaactaaataacattctccaataagtggaatttatacttttatagcaattaattatttaatttatttatattatgaagccaatgatttcataaatcgaccaataaataaaactaatagcgaaaatttttcatcttggtttcatctagggttgaaggggaggggcccatgtagttgggcaaaaaccgagtccagcaggtattttggctcgatactttagggattctcgaccgcaattagtgctcacatttatcttttccccaaaaattgactggctgtcccgtgtccgtttcaccaccaatcgcagcagcctgcacaaaagtgccgcgaaatttggcacgtcaaattggcattgatttcagcttccggatcagcaatgatcagacggcactgatgacgaaatatttttattcgattaaattttgtaaaaaaattaacatattaaaaagataactaatttttcttaaatgtgtgttgtgttatttatgtttgtcctaaggaaatgaaaatctttgtaatatttaatcataaactgtcctattttacatatttttgtcctgcagatttggtaataaatccaaggcttttaattttttaatacgtaattattagcgttggaaaacatttcctattaatcgaaaaaatattaattctataaaatttatttcgttaaattattaaattagtaatttttttttgtgaatttataattttgtcaagcattatcattgaaatatg

SEQ ID NO: 100221 - DNA, 157 bp, Heterodera glycines
tagagaaattcttaaaaaataaataattgtaaattacattttgaaggctaatattaattaatgacccactaattatagtgattaattatatataaataattaattgttttttgctcacgaaattcgttgagcgttgagatcagctttgacaaatatg

SEQ ID NO: 100222 - DNA, 132 bp, Heterodera glycines
acattggataatgaattgtctacaaattaggtcggaccgggtcagcttagtctggccgttctgtttttttgggtttattttatgccactaattttgggcatggggttttgagggtcgctgatcaccaatatg

SEQ ID NO: 100223 - DNA, 1003 bp, Heterodera glycines
tctctttctcccttcctcttctttcattcttttccgccctcttccctctctccctccgcccctcttcctcctctagggctacggcttgtacataaaaagttatacttgggttgaaaattggacaactcaaaattgatcaaatttttgatcattttcccttgaaatacggtagaaaatactgatttttatcgtcatcaaattcaatccaagtataactttctatctacaagtcgtagacccaccattcaaaaggcaattcggtagagaattttgtgttctttctggtagcccaatcaaaaaatttcagaaaaattttcccagccccctaggaatttttttctaaaattttcccaatttcaagccatttttgactttcctgatcaccatgaaggagtgatctgatcaagttggtgtaaaaggctttttaaatcagtatcaaaagataagctagcatgaattatttcaggtttttaaatgaactctaaggtggtttttcaagtttgagtcaagacttttttccgccctttttttgagtcaagtctgatcaagtgaatcaatctcgggaatgaataagccaaataaattttcttgttgtgtgtggacgagtcatatattgaggtaataattatccaaaaagaaaaataataagtcgactttaaaaagtccatgagaaatttgtaaaactcattattcggcgagtaatgtaaaaaattttgagcctattaaatattttgcccgatttcttctgatacagtggggaaaaaagtcttgacgcaagatgattaaaaattttaacttttttactgaaaattagctgattattttttcttacagtatatttatttatcccaatacatgggattttcatacacccacaaattatttcaatccaaaaatgataattcatgcttgcttttcttttggtcctgatcaaaaaaacaaaaacaaacttacaccaacttaaaaaaaaagcagaaaccggaccgatacaccacaaaatatg

SEQ ID NO: 100224 - DNA, 230 bp, Heterodera glycines
gatacccgggaagaaataatagttagtcctttggttaatttttaaaattttaatcgtcaaatcggcttttggaatttaaatgagtaaatcagtacccgtaaatgaaattctctgcttctcttgtggattcacgggaagaaataatagttatccctttgttgaatttttagaaattctatccgtccaatcggcttttggaattttaatgagtaaatcagtaaccgtaaatg

SEQ ID NO: 100225 - DNA, 1003 bp, Heterodera glycines
caaacctattgcgcgacttttttcttgcaaacccaaacctattgcagggggggtgcgcgacttttttgactgcgcgactttatgcaaattattttaattaaatttatttaattttaaattattttaaatgtcttaaaggtcaaagacgttgaatttaaattcatttaaaattctccaaaaattccccgcaccaagcggatccgaaccccaggggggcggccagactgacgcactaaccactcggccacattggcaatggataataaacattaatttgctctcataaagggaaaatttgacgtcatcagcgggggcagggggggggcgagagcgggcggcgagaaggcgggaggggtcaagtaaaaaaatcaattattgaattcacaattttctcttttaaaagcaaaaagaaatgggggaccgtataataaaatataatttagaaattaaaataattaaaaggttaattaattaattattttcctaaaataaattttttattacttctaaaataatataaatatttttcagtgaattaacaaatacatttaagtttaattattgatttgtctgttaattttttatctccttaaaaataattacagcaccctttcaggtgttgggcgtttgtttatttgaccaataatttttaatttcacatctttactttgccccccctcacacctgctcatttgtgtaatttgacaccgtttcttttatcttttcgttaaaaattaaaaagattgtctggaatttgtcttgcgccacaccgctgtgccattcatttatgtaatttgacaccagtctgataataatttcgccaaaatttatttattatttgtccatttattaagaattattttgcatctatcactccaaattttgttaaaattttttttttattgtcccaatttttaccattttgtgttttttcaacaaaataaatatttgttcaaatttaaagaattaatttttaaaattttagacacaaaaacaaatcatg

SEQ ID NO: 100226 - DNA, 306 bp, Heterodera glycines
aggaaatttttaaccaataaataatttaatattatcaacattaattaataattagggcgttttttattgttaatatatattttaatccaaaaacgttctattttctttcttcgggcccttaattctccaaaaatctccaaattattaaagtcacttaaattttggaaaaatttgaaaacaaaataggtcatttgttgggcaaaatcataattggggcaaaatcattaaaaaaagaatcaaaataaataatatttgtcgtccccttgctttagcaacattggcattggcattgtgccacgatcaatg

SEQ ID NO: 100227 - DNA, 173 bp, Heterodera glycines
atttctttaattcatttttggcttgcttttgttattaattaaatattaaatttaatttagttactaaaaaaatttgcggtttttgaaaaataaaattctgagtgttttttttttgcagatttgccagccctcatttggaagcgtcgtccccaagttccattgtcccatcaatg

SEQ ID NO: 100228 - DNA, 82 bp, Heterodera glycines
agctccaccaaagagaccatcacagagtaccaccaccaggacggcatcgaaaatcaaaaaagagtttcgcccgaaaaaaatg

SEQ ID NO: 100229 - DNA, 83 bp, Heterodera glycines
atttaattgaatcggcaaataaagcaaaaaatctgcaaaatcttaaaaaagatggtggaagagacgcaaaattattaaaaatg

SEQ ID NO: 100230 - DNA, 648 bp, Heterodera glycines
tcagaacagttgagttttgccatcattcgcaggagcagatcgaaatatctgtccagattcaacaaatctctaaaaattcaaaaaaaaatatatatttttttcgactacggatgggccacttttgggacttgtgattttcccccaaaaatcactttagatagcatgaagaggcattcactgtgttcctcgcggacgaggacaaagttggactaattagtgcctttgaacttattgttgtagcatagagaactgctgaccgacaatgagtttatttagtctgtccgttttgtttggttttgttttgtttattgtcattgctcaaatgatgcgccattgtttttctttcattaaataaatttaaataaaaattgttttgcttttttcctatttcaatgtgatttgctttcgctgtaagttcgcgattcaatttgcctttttttacattattttccactaatgtttctttgctttttctgtttgtttcttcctccacaacggccgacggtgagcagcgaaatttattgcctccttttcccattattttaatgcgttttcctatcaatttaaacaatttgttgtgtatttatcatttccatttaattgattttccgtcccttttcagaaatttgtcccccacccattgcgatg

SEQ ID NO: 100231 - DNA, 113 bp, Heterodera glycines
attcttcgagaattctcgttaaataaatttccccccccccaaaaaaaaacatttttaacgagtcgtaaaaattaaatattttcaaggtcgatatcattgtatccgagcccatg

SEQ ID NO: 100232 - DNA, 108 bp, Heterodera glycines
tgtgattccgaggcccaaaaattccctggaaatctgttcttccagggcaggactgtctgtcatccaatgctgatttcttttttccttttccaggaactcaaggacatg

SEQ ID NO: 100233 - DNA, 196 bp, Heterodera glycines
cccttcccgtaacacttcgccgagggttgaaagccatatcattcgctccattcattcatcatcattgcctcggactgtgcaatcaataaataaacatccaaaaaggcccaccgctgacttgcacacattcattcaattcacacaaagttctatctttttctctttgaaatctctgtcaattcacatcatcaccatg

SEQ ID NO: 100234 - DNA, 89 bp, Heterodera glycines
attaataatttaatattatttcatttattttaattagttttataaattatacttaaaatttattcagaacccggaagaaaagaagaatg

SEQ ID NO: 100235 - DNA, 123 bp, Heterodera glycines
ggtgggcgatttgaccttggggttttggctgctttgctttggttttgattcattggttcaaagtccactacgaattgtacttttagcctttctgaagcaaattgcgtggaattagtgaccatg

SEQ ID NO: 100236 - DNA, 493 bp, Heterodera glycines
cggctcccggacttttcgacagcaaagggcatttcgacagtaaaacaaaaaataatggacttttcgacagtaaacataaaaacaaataatttttattaaaataaattatattgcttgtcaattttattgaatttcttttaaattaacatactataatatgtattgctaaatcagaattacaatactagagatacgttttttacctaggaaaatttttagaaaaatacacccttaagcaccggtccttaaaattttcaaaaatacactcctaagaagaatgcaaaaattttctcaaaaattcatctccaaattttttatttattttcttggtaaaggaatttagattttaaaaattatttattcccatactggtttggcttcgttttgttattttggagaaaattttacgcttttacaccattatatttgaaatttaattaccttttctgtcgaaaagtcccctcctcaaatttataatatttctgtcgaaatg

SEQ ID NO: 100237 - DNA, 94 bp, Heterodera glycines
cgcgcatcaggacgtgcaaagtttgatcgcattgatcaactcgtcctgcgaaaatgccgatctgtcgctgagcaaagaggagctcaaatgcatg

SEQ ID NO: 100238 - DNA, 237 bp, Heterodera glycines
aatgccatgtgaaaaggagagtggagtgaagattgaatgcccgaagtgtcgacgttacttttacaattgggagtgttataattatcatcagggacatcagacttgcaaatatggaggcgttgcgttatctgtgacaagacttatcgatttaacccgaagaaggaacatgaatgtggtgagacttattgccagctttgtagtgtgagccatgaccccaagcgggggtgttatattatg

SEQ ID NO: 100239 - DNA, 348 bp, Heterodera glycines
tggtgacatccaaatttttggccctgaatgtttgactgttcagcataaagggaatgaaagaggcaaattctatgaattttattaaatttaattgtatcaaattttgcatttaattcatttaaaagttaattatttagaagttatttatgtatttataaattaggtcaacgaattcgatcggtgctcgcacaatttcccattccgaacagtgacagtggcattttttattacgaaatcaagttcattaatctggaaaggtgcaattctcaattaattcattaattggctaattaattaatccgttatgcttttcgttttgcttcgtttggcctcgccaccaaagcaatg

SEQ ID NO: 100240 - DNA, 162 bp, Heterodera glycines
ggttttgattttaagcgatacaaaaaagactcggctccaaaaattggaaaaataaggggaaaaaatataaataaacttcaatcgtcaatcggtccaccaatggttgatgagaccaaaaataaacgtctgcgtgttgactcattaggaacctattaaaaaatg

SEQ ID NO: 100241 - DNA, 420 bp, Heterodera glycines
  unsure (1)..(420): unsure at all n locations
aaaagtganccaatgattgttttgatattattatttcattatttctttatttttcggcgtcacgcttttgcgtataaatgattgattgattgattgaaattttgattcttaggggtgtattttcccgattttattgcatttttaattgaattttcggaaaaaaacgccaaaaaaggcaccaaaacggcaaaatgccaaaaaaggcatttaaggcacgaatcaacgtagaagtctcaaaccaagtggaaaaagtgttatttatgcttaatatatcggaactagtgcgcagaaaaaaggcatgcctcaaaagtcggtctctctctatttattggcgattagattaattttttatctacatatttattggtttttattatttaaattgcaatccctcctaattattttcaaaatttagacatg

SEQ ID NO: 100242 - DNA, 180 bp, Heterodera glycines
tgtccgcaacggcatcacaaacattagaagctcacaatagaaaaaagaaaaaagaaaaccacaaattaaatttaacggaatttaaacagccgcaaatttatgttgtcacttcttcatcttcatcatccaaaaataggacttccaaaaacggcaaatccaaaagtggcagctccaagaatg

SEQ ID NO: 100243 - DNA, 216 bp, Heterodera glycines
gaaacaaagcaacaaaaacatagttttttgaaaaacaacaacctattgacactttattttaatttcaacaccttatggtttttttcggtttatagcgcatattttcggttttttaatcattttaatagtttttttaagtttttagaacagttcatattttgatttttgcacataaatcgaagttttataaacttaaaattaaattacttaataatg

SEQ ID NO: 100244 - DNA, 626 bp, Heterodera glycines
ttttcaaaattgttgcggcaacgaacgactccaattacatgagatacaattttgaaagtgacgatgtgcaaaagatggtcaacaaaatgacgcaacacaaatcattcaagaagttattgtgaagatttagagggacgagaaagaaatcgttaacatttcacaagacttttatttattttttgctttgtttttcgattttaaatgttcgctatcatttggcataattatgtgttttgaggaagccgaagtgatatttttcgaaaattcagggattttgtaatattgagtgatctttggaatcagtcgtttattagtcaaatcggaaaatttggacttgaattggcggacgcgaaaacgaataatttacctagcaaacactctttagatttgttaagtatgaactagggcccgaacttttaggcacgaaaatgtttcaaataagcacctaaaataggcacgaaaaatatgaaaaaagacataaaaaattacaaaaacgacaaaaaagcacgaaaattgggcagcaaaaatttccaatttctaggagttaattaaaaaaatgcaggataatttaggggcaggcccgtaactagaaaaaaaagaattttaattagtttgacgacaaaatg

SEQ ID NO: 100245 - DNA, 371 bp, Heterodera glycines
ggtgggaatgttcttcatccccacccatccacggggggcatggtccacgggaatcaatgcccgctgagcatgaccccgcccccatctcagaagcaaaaccaccaaaagcagttgttgatcagcagctctctcattttcgcatactatttaactttcctcatcctctgatctgaggattgatcagtgtgaggggatggataactttgcaaaaacaatgaattttcccgatgcaacaggcgttgtgctgtgcgattatgggggtaataccctcctccgacataatgttccccacaaaggcaccgttcaataaacaaaacaaaaaaaaaacgcggggccaatgggccaaggatcgataatgaacaggcgcaatg

SEQ ID NO: 100246 - DNA, 90 bp, Heterodera glycines
tggacggcgtatgtgaatctttaagacaaactaaaaatataagttgttttttggatatctaaaggaatttctttaagagaacagaatatg

SEQ ID NO: 100247 - DNA, 107 bp, Heterodera glycines
aacgtagaaaatataaaatttgggaaacgatactgaaataaatttggacacggtatgatatcatttaataatttaaaaacattcaaattcttttcttttcagaaatg

SEQ ID NO: 100248 - DNA, 504 bp, Heterodera glycines
aatttttatattgtgcggcgacgatttgttctggcgatattttagaaattttttcaccagttctattttaatattttcagcgcctggaaaaacgttgaaatttctttccgttttttgctaaaaaccatctttgattttagggtgggtcaaattaaaaaaaaaaaattgcggtgaatggtggcacggcggtgccgttaggcgccatcgagaaaattttttgtttttagcaacttgatcgggaccagtagaggatcccgggtccggaacgctgggtcctaatttttgactggttcctgccggtagcgggacgttttgaaaaatttaaaaattttaaattttctatgattaatcactttttgaaaatgatttatttaattttgttttgatcctcctgaaaaatgttacatttattttattttacatttcttaaaatatggtcattaggtatatattttttcttcttaaattgataatttttttttatttttagcctcttggaaaatg

SEQ ID NO: 100249 - DNA, 204 bp, Heterodera glycines
tctgaatattattttttgtttttatgaatttcgtttaattaattttaaaatttttaatctatttatataattaaagaaaattaattgtttaattaataggcagaaatttttattgctgttataattaaaattatttcaacttttaataatatagattattattttattgtcattatattttgattattttaaagttttaaaatg

SEQ ID NO: 100250 - DNA, 52 bp, Heterodera glycines
atcactgggacccttctctcctgcgtttcatcacctggactcagtttttatg

SEQ ID NO: 100251 - DNA, 258 bp, Heterodera glycines
tatttatgttatatttaatattttatcaatacaaattgcataatttggtaattagttaacttccaaaaaaaaagatttattaaataattaaaaattttgtgattccatttaaattcccttaattcggcattcttccccttttcgtctttactatattggataaaaattgcttcgttttaactaattgccacaattaataaattaacttttaaatcattgccccaaatggccacttcgttgtttgtcaagcgaatgatg

SEQ ID NO: 100252 - DNA, 1003 bp, Heterodera glycines
cgttggaggaattttttaaattttttttttagaaaattagattcgttggtaaaataaataaaaaagtatttaatggaaattatttgagaatttgttcgatatgcccaccaggggtggcgcgcaaccgcgactagcgatttaaatgggttactgctagagcccggacggggccgggatcccgccgggattttgccgggactcccggtcccggtcccgggttttttgggcaaaccgccgggaccgggagtcccggaaaaacgggagtgccggtgccgggatcccgcccgggtccattttccaagtcccggtcccgatcccggtcccggcaatttcaaaattccgggctctagttactgcagattttttcgcgatccgcggcaattgggattaaattttattcattgagacgattgtctttgaaatattcaaatttatataaaaaaatttctaaaacttggtattctcgaaaaatttcgttcaaaattccgggtttccccgtctacgctgaccaaaaaatttaaaatatggctcaaatcacaaaatagatcattttttggtcaagtcttttagcaaattgcactcaaattataaaatttttctctggcgacgcttattggcacccggattcccacctgctccgcaaagtttatgggtttcatatattcctaaccctagctatgaggaaatcagaacaaaaacaaaaaaatttgcaattttcattttaatcatttgtgttattttttagggtttaaaatatttctgaatttgttgtggtattttgtccaatgtctgtgctaatcaccgagagaaatcagggtaatttttttttttaatttcccaattaaactgacgacataatgctttgttttgggcttccattcatgagacggttgggatttgtttcaatttggactcttttttgagccaaaaaaaaaattgtaaaaatcagggctcggaatttttgattgaaaaatgcggcgccttcattttttcttttcagatg

SEQ ID NO: 100253 - DNA, 323 bp, Heterodera glycines
cccccccgtagtaggggtcagttgcgtctgagccaagcttaatacatcatactttttttcaggctggccaaattttataaattttgtatcattggaaagctctacatgtttagaagctttttaagttatttctaagcgattgaacaacttattaaaaagttgaaacatgaacactgccaaaaagtcagaatttttgcacattttaactggcccgtttcggttccccccccccccccgccgcatttctcacattttattgcccggaatttatttgcttaaaggatgaatcacttccatcacccactttttgattacgggaaatg

SEQ ID NO: 100254 - DNA, 157 bp, Heterodera glycines
aattaatacccgcaggccatttaaattagagagagcgaagagagagaaagcaagaaaaagaaagagagagaaagatgggttagagagagaaaaaatggttgaaacggaaagtaagacaggaaaatagcgagtgagatagagccaaatagagagcatg

SEQ ID NO: 100255 - DNA, 896 bp, Heterodera glycines
tatgtggcgaaatggttttttgtaagatagtaaagggcaaagggtggaggttcgagtccgttgtgcaacatgaatattttaatttatttttgtcaaaaatattaaaaaatgacgatttttgggaattatttttgaagcttttttgcaaccaaattagacaaacttggtatcattcgaaagctcttgataaggagaagatttttctatgcaaatgctaagcaattttacgttatgtaaaaaagttcgaagacttttaaattttcataacggtctcatgcaaaaatgggatagaaaaatcgtaaaatcttatagaacattcgatgcagaatttttttctctatcgacatgcaaaatttggtgtaaattgtatgagtagaaaaaaagttatatgtgccgaagtaaattcagtttttctctattagcagagataaagaaatagtacgccaaaaaaagagatgtttttttctctgcactctctatttattggtacacatctcgttttttgggatggtgtgtcctctttccttttttcgtcctagcacctatttggacagtgagaagtaaaaaggacacaaatggcacaaccgaaaatgccgaggaggacgaacatggaagaaagtgaaacggaagaacgaagcattggagaggaggcgaaggcaggggggggggaagcggggatttggcaccacgttcatttgaaaataaaaagctttttttctataattaattcaaattcaatattttactaaaatatatttaaaagtcatttctaaattagcgccttagttcagctgttacatatttttgtttgtcaaattaagattatgccaatccgtatgaatttagagcggataatttttaaatcatttaatgttagtacacataacgatattatg

SEQ ID NO: 100256 - DNA, 413 bp, Heterodera glycines
catgcacgcgttttgcgctcgagctatttatcatcgggctttcaatccaaagcgaaacaacaaagatgctgttttgaacgaataaagggcataggttattttgaagaagtgtcaaagaacatgcagcaataagcctgcaaaatctaataagtggaaaatacatgagtatagaatttattttcaaaaagtgtcaacagacttttggaaaaatatatttgcaatttatcaacaattttgagaagtgagttagaaatgataaacttcacgattcaaaccagttttcggtgctctaattaaccgcgataaaaacatccgaatcaattaaatagcttctgagataataaggtttatcataaaatttcatttaaaaataaacactcaattattggtatgaacgatactttccaaacatg

SEQ ID NO: 100257 - DNA, 206 bp, Heterodera glycines
aatttattttactaaccacactaggaatattgatttttaattaccctaattaagcaacctgttcaaccacaacaacaacatgcactcattggaatgttttcaagtcactttcgctggtaatttttgggcacattggcggctttcttctgatgtatgtcttcggcatttttgtgatgccaattttaatgcaaaattcactaattatg

SEQ ID NO: 100258 - DNA, 162 bp, Heterodera glycines
tttcattttgtccattcgctttatttttgttcattaataaatttatttttcacaattcgtacatttttgttccgttcaattttaataataaaataataaaaaaaaatttttttagcaaaaaacacaaaaaccccccaaaaaaatacccaaaaaaaaacaatg

SEQ ID NO: 100259 - DNA, 503 bp, Heterodera glycines
ttttatgtttttacatattttttttgcggcttagttatggcgagagaagcccaaaaatagcattatctccgaacaatttttgatttagagcgacttataaaaacataaaaacacatattttggcgttttgtcacataaaatatgttagcactagggatgatatttttaggcaaaagcctatttttttcctgagctccctatggtctgaaatgcacgaaaaacatgtttttttcggcggttgttaagctacttttcaagttattagtgcctattttctaggcttttatttttagcgcctaaaaagcctaaaaaattttgaaagagcctatttttgcctattttggcgttttgcccaaaatttgttaacaaaaatgcaataaaaacgaaaatctttgcatagaataaagaaatctcggaaaataaaatccggaattgtttaattaattttaaaaatttgtttagaattctttagtgattaatattcaattttagtgttaaacatg

SEQ ID NO: 100260 - DNA, 284 bp, Heterodera glycines
tgttctcgcggctctgtctcaattccttggctaaaaatcggacgacgataaatcgacggtggagagaccacggaagaaagtcggaagattggtccaatccaacgcatttcagcggcaaaaataaaatgaatgtgtaatgacttcaggacgaatcaatttttagagcaaagaataaaaaagtctataaatgtttcaacccattttcattttagtttaagagccagggaagtcaagcatcgtattgttttttaaacaatattatttctaattataagctcaaaatg

SEQ ID NO: 100261 - DNA, 92 bp, Heterodera glycines
ttgttaggccgcttcgcggccttggaccgtcgcttagcgcccgttatttaaattttgaggtacaaaagtcgattaaaagaggtacaacaatg

SEQ ID NO: 100262 - DNA, 52 bp, Heterodera glycines
ggtcgttatgccaatcggttttctaatttaatttctattcagcgtttgcatg

SEQ ID NO: 100263 - DNA, 414 bp, Heterodera glycines
  unsure (1)..(414): unsure at all n locations
ttgataaatatgaccaaaccaatctttggaacttccactcttctagggggacgaggggtaccaatccagccgaaagntttcattcgtcgatgaagaggcaattattatgaataaaaattacaatataaattaaaaatagatttaaaaatcaattttaaaataaaatttagagaccttcggcgataaaaaagggatctgtaaacaattttgtcaattttttacaacaaatagttgcggaaagcgatgcaagaattattaagctttctacaaacaaaattttaccccgtaaaagatcaaaagtctatgttgatttagacgcacagctcttaagaacattggatgaatataatgtacaaaactaaagcactaattcataagtgactaaataaaaaaatttaggctacaattgaaatg

SEQ ID NO: 100264 - DNA, 198 bp, Heterodera glycines
cgagtgtctttactacgtccatttgtactgtaaccatgcctatgacattacggtagcgctctactctctgctgttcattgtgccgctgattttcacgcacagcgaattcagaaaacagtttatgtgcgtcgtcgtttgaataaaatgcgattgtaataaatgatctagctgttctgggcggttaaaacgcggaaaatg

SEQ ID NO: 100265 - DNA, 1003 bp, Heterodera glycines
tgtattggtttcaaatgatgctttttattctaattgttgttttttaaaattttttcgctcttttatatgtttgtttcttaattgacccgccaccatataaatttcgatttgacaaaacatcgaccaaaaaaacatgattgagtaataattaaatgcaaccaaataaattatcattaattattgtcttttgcttgtcttccgtgtccgccgcaccgcctaattaccccccgcggcgaatgttttgtgattgagaaataaaacaataaaaaatagaaaaataaaataagtagttccactcaaaaatgtggtttttctgattttattttaattttatgtgctgttctctgtacatttcattgtgtgttcattttcttaattttccgcccattttgtcacttcattagttaattaggtgcactaattgttcattgttccatcattaagaagtgcctcaattagtgctgctgctatttacctcttgacaaagcattctgtccaaaaattaatttgatgccttttctcagcgccagcaattaatcatttcggtaattgaccccgtgttgctctgcccacttatgttcttatgtgtaaccccgtataaatacacatgtccaaaaaagaagtttcacttatctatgctatgaaccattgaatttttctttttttctttttcaaataataacaaaaaaaattttttttacaaattttacaagaaaaatttttatttccaacatataaagttgaaaagctcattttgtttaagatttgccaatctaaaattagtcttaagttttgtatttattttttcattgccattgctagtgtttgtttccttaattaaaatgaaagaatttgacactatatgtaaataaatttgcaataaaaatattattttttattttaaaaattcattgtttttcaaattgccatagtttgtctatttttataactttaaaatataaattatatttatattataatttcagttaaaaagctaaaaatg

SEQ ID NO: 100266 - DNA, 74 bp, Heterodera glycines
gcttaaacacacgaccaaaaaacagttaaagattttaattaatcatatccggacttggtgcaggcattattatg

SEQ ID NO: 100267 - DNA, 481 bp, Heterodera glycines
tttttgaattccaatcctgcaacaggatccgcaaatttgaatttttgtgcaggattatgcgggattttattgattttaaaaaaaatttctaagacacaatgccaaatatacagaaactttgtttttataatatacatatggattaggtatgaggacgcgcttgttcattctattcctgatgtcaatttttcatattaattttcaccagtttttgtctaaaaatatatcggaacacttatttatcgttttggaaattttttaaatttaattgaaattttttcaaaatttccaaaaatccgcaatcctgcgcaggatccggcaaattttaaatgcaggatttgcaggattgcaggatttgcaggattaatccggccggatccggtcctgcaaaaaattttgaattccaatcctgcaacaggatccgcaaatttgaaatttccgggctctaggtacaaccactgttagaagaggtacaagcatg

SEQ ID NO: 100268 - DNA, 239 bp, Heterodera glycines
ggtcacaataataattaattaatcattgacctaattgttctaatgaattaattatcaatttcacaatcattaagtgatcataaccttttagtgctaacgattattaataatcaaccagtttatgctaatgattaattaatatctattttcctaattaatatgaaagattaattaatcagcaatcaatttgtgttaatgattaataaatccgtcaattaattgaagcactcgcctcgatg

SEQ ID NO: 100269 - DNA, 181 bp, Heterodera glycines
tttcaattaaaatagattaattctatagtaataataatccttttttttgaaaattaatagaagaaagtgctaaataaaattctcctgggaatgcgcagaaaattttcgcaacattaatcaatttggaacacatattcacacattcattcatttattcattattagtttcacgctgaaaatg

SEQ ID NO: 100270 - DNA, 63 bp, Heterodera glycines
tgcctaataaatcgattttgttgccacaaaaaaataacatttttagccaccttcctcggaatg

SEQ ID NO: 100271 - DNA, 100 bp, Heterodera glycines
tacagcccagacatcagcccgtgtgactactatctgcttcgatccatggagcacttcttgagagggaaagaatttgctgatcaaaacgaggtcgaaaatg

SEQ ID NO: 100272 - DNA, 158 bp, Heterodera glycines
  unsure (1)..(158): unsure at all n locations
ctgcaaaatttgaaaaaatntcgttaaggttcagaaaagttatgaccagaaaaattcaaaaaaccaaattttccaacctttggccataaatttgttcaaaattgacgcaatttgggaacattttttgaaaaatttttcaggacgaaagcggctcaatg

SEQ ID NO: 100273 - DNA, 1003 bp, Heterodera glycines
ataacattagaggcattgaccgataaatattggcacaaacaaaaaataaaataaaacaattttaaaacactattaaattctaagcgtctgttcatttaacttttttttcatatatgaacatttagtagcaaagtaccgttcacaaacaaattataattagggatgcaatttttacgtttttgcctatttttttcctgagctcccggtggcctgaaattttctcaaaaactcatccacaaaatttatttatttattttcttgacaggaatttgtgattttaaaaattatttgtctcaatactgatttggcttgaataaattttgtcattttacaccccccccctaaatttgaggtttttggtgcctgttttcccgtttttagagcctattttttggggaattttaggggacctaaagcctacctattttggcggttttagaacctgaaaattgcatcctcattagagaccggaaatttcaaatttgcggatcccgctgcgggactggaactcaaaatgacatataagatacaatgccaaacttaaataattcacacttttacgcaataaatcaaaacaggtgttttttatgtaaatttccaaccagatttcctgttttcatatatattttttaaattcgttagatttggttatgtccaattttctatgttatataaaaaataaatatttgatatttttttactggagagattttaattttagccaaaaatggtttgctaatattttcgatgaaaattttactaagcattcattatctgaataatattgtacaaattttcggagtagaagaaagtgatgataaagatttatttgaagaaatttggcaaaaaactttttttaccaacctaaaaaatttagaagaaataaattatgaaaaaaatgatggccaaaagatcaggaaaagtattgtaaaatgtgagcaaaatgaaaatgatgaaaaaattaaagaattttcaactaaaagtttaaagaaaacaaaagatg

SEQ ID NO: 100274 - DNA, 232 bp, Heterodera glycines
cctatttaaatgattctttttttattttgttcttcacgttgtcctcttttatatcttactatcgtttcactttttatttgattgatagatttttctgccttttttcccgaccatgccaaaattgaaaattggcccactaatttttctcgaattttttatggtcaaaaaccaaagctgatataacaaaatcttagtttttctatacaatttagaccagtagaatccgaatatg

SEQ ID NO: 100275 - DNA, 1003 bp, Heterodera glycines
gcttttaattgatccgatgaatgaatgcctcacattttcattccccccccccccccccgtcggttttccgttttgtctttgtcccttccctttccatcgtttggtccgtcgaatcgcagcaaaatgcaaatgcttcgactgctgtaaattcaatgaatggcaggccacactgacagcaaaaaatgaatgaataaatgaatgaattgaaaaaataatgagtggggggggggcttttgggttttatccattgctttgatttggtggtggacgctcaatcactgagagccaaagggaagaagcaacggatttgcaaaaaacaaatgctagcggaattatcacagagaaagataggcaattcgttcgctttgtccgctggcatttgcttttcggtgcctgcagattaataatctgaacaaatcctttaaatttgtgtccaattgtctgtttttgtgaccgcattttctattccgttcagtttattacaaataaatgccgggattatttttctgaaaaatatttttagccaaaaaaaacgaaattttaattttaaattgggatccctccccggcactccttcggtggcaaagatggtgcgaatcggtattttgggtattgaagtccagggtctgatcagggacagtaataggccgagaattggggacccctcccgccggggtaatgagggatttaaattatttccaaaccggcaaattataaatccggcactctacttatcattcattttttccattatattttatttttaaattaatttcgacattaaagttaatctcaattttatttctttaatatgggaattgatcagctaaattttcacctttttccttcaatgttcgtcttcttcgcagttctgaccaccgcatttatgtgattaattaacaaaaatattttatttatttgcaatgaaaaaaaaaataaaaaaataaatgttttaattgctcaaattaattttagttttggcgtcggcggatatgaaccgatg

SEQ ID NO: 100276 - DNA, 378 bp, Heterodera glycines
agggaattgaggaagaagaacttagttgagttaaaaggcataagcatataaatgagtgtgaatttcgtattatctacacaggagatacaatacgatcaaaggcaaatgtgtgtcagagtcagtctgtcgatttgagtgcaaaataacttataatcggtatcaagaaacgtctaggcaggaccatgcagactcggtttcaattcagcactttcctttcatctgacatatttattttatattattaaataaactcttttatttattcggaatttatccccccctttttccaccccgccctctctccgcctttcgccttcccattttttgcccccctttgccgtccgagccaacaagtggtgccgttagcaaacaaagatg

SEQ ID NO: 100277 - DNA, 252 bp, Heterodera glycines
tttgacgcttacatcgcaagtcgggtgggcgcaactgattgggcagacgcatctgatgctctgatcgcggccgtcttactcgggcagacaattgttgtcgtgtcacctgtagatcctgacaatgcccaacgtgcttggagcttttatgacgacaccgttcgacatacaattggagtgtttttcccagacggaaatcatatggtgacaaataatttcaaggcctacctcatattggtttaaaaacagagaatg

SEQ ID NO: 100278 - DNA, 215 bp, Heterodera glycines
aaaaagggaaaaattagaatgccaatcaaagtctaaattatttaaacggcctccctcatatgttatccaccggaaaattaaaaaagtatttttcaaacagaaatctaaatctaggacaatttgaaatgttgtcaagaagaaaaaatttgaaaaaatttctaccaattttttccgaatttccgatgagaattatttgctctccccctcccaagatg

SEQ ID NO: 100279 - DNA, 490 bp, Heterodera glycines
ttttctaccgtttcccgcttccttatcactgtaaatttgccttttttcatttattttttctctctcattgtcagtgtccaaagttgcctggtttttgttccaaaaggatggcaattttacgatgggccattataattttgcggtatgaaatattttattattttaaatattttttgattgagccgttattacaagagataatgataggctccgccgggaaaaattgaaaattcaggcaatttattaacagaatttgttcaaaaattcaagattttttgaaaaaaactcaaaaaatttccgaaaatatccgaaactttttatcaaaaatttcggaaatcggaattctgacatccaatttttttcgggaatcggaattccgtgccaccatttaatttcccaatgcataaaatacagttttactgttggcgagatttgttttaatttgatttctttcaaggaaaaattccaattcggatcacagcccaacatg

SEQ ID NO: 100280 - DNA, 238 bp, Heterodera glycines
  unsure (1)..(238): unsure at all n locations
gatattgtattgattgtgaacgtcgcgtgacacgctggtcccaccgcagggaatgcaaagtcgtctgccgtctgtgtttacgttttggcgcagggtatccatgtaaacaacacacaacnnaacagcaatcccgagcagatgggtcacntggcaatcgtctttgccgtgattgtcaatcgtttttccaaatgacgactgcttcgcctatcatctgagcaatcgggcacctataagcatg

SEQ ID NO: 100281 - DNA, 219 bp, Heterodera glycines
tgatattctgaaaaaataaacaattaaatataaatgcaaaaaaaaaaaacaataaaaatctaagagtttgtaaaataacataaaaaattattggaaataaatgaaaaataaatttaaaaataattatagtagaattttgtatcaatttatcattttattcattattattgaaattaatatttgttttgtttattacaatgttaagaaggatgcaaaatg

SEQ ID NO: 100282 - DNA, 287 bp, Heterodera glycines
ttatccaagcatttgttacttgcctccaggcaagtttcagtatggcatttcataattagtcaatcatcctattaattagctcagttcagacatttaactaattggtcatttaaactttcaaaaataagaaatttatttaaaataagccaaaaatggaaaattttgacttttacttggttttcttcaaagttaatactttatttaacgatttttaagaaaattttgcactcaatttggaattttaattatgtacatatgcaaaaatccaatcaacagaatccggcatg

SEQ ID NO: 100283 - DNA, 202 bp, Heterodera glycines
ttattcaatcctgacaatttttttatccaagatttaaattagtgtctaatttagatcgggtaggattatccaaaattagggctcatcaatcacaaacaactgtactatctaaattcctaatcaatggataattttacaaatgattaattaattccgctaaaattgccaggatctacacatcattgaacgtatgatggccatg

SEQ ID NO: 100284 - DNA, 431 bp, Heterodera glycines
attaggtgtgtatcgtgccagacccaaacggggattatgaaggttaaacggacacggaaacgcgccctgtaagcacaaggaagcaagtcatggccgaaattgcctgtatgttcggcggaagaatagccgaacgaatgttttgcgaccgtagtgtagggcttggccacgatatgagcgaggccagaaaattggcaagaataggttcgcctcattgactttttttggttaggactcaacatggacgtatggcactttttctctctctctctcttcctggggacaaatcgtgggacatgtcggtggacaaatcttggaggatatcggggagatagtccaatgcgcggtacctctgacacttgggacactcgtggctgacggaactgtcgcagttggttgtaaggccttcaaggcttgggaggggcgcgcctatg

SEQ ID NO: 100285 - DNA, 178 bp, Heterodera glycines
cctgtttttggcaaattttgtatgtgtcaatttctttaacgaacatgccagggaacgtaaccaaattgcgttttccgagaaattttagacctgggagttcacagatttccgagtttttttttgtacctcggaattcagacttattgctttcggtgggttacatcccggaacacaaatg

SEQ ID NO: 100286 - DNA, 177 bp, Heterodera glycines
attccttggtcttactgatgacgcgttgagagttttcttttttgaaaatatgacgaaaaaattcaaattttttgtgtttttcaaaaacaacctattgttattatttggaaacgaatcttaattaccccacccccgtcggtacaattaagtccaattaaggtgcactttctcaaaatg

SEQ ID NO: 100287 - DNA, 1003 bp, Heterodera glycines
tgctaggccatattcataccagagatagtaattctttaaaataaaattttgaacataagtgttttaatttaaatttaaaaatttgttttaattttttaactaaatatttatgtaaataaaaaaacagctttatgggcaaaaggtactttaatattatttaatttaatgatacaacaccaaacaatgaaaagcggtaaacgaaaaataacacaaatgacggaataaaacgtagaaatttcaaaggtgtacacataagcccctgtgtttatttaagtaatacgcaaatttggatgagatgggagaaaaagcaaaacaaaaaaacaaactgattgttgaaatgaaataagttaaattagcaggcactaaaaggaacaaacgaaagaattcgggaccacccaaaggagggacgaaaggggacgcaatttggtcgaacgaactaacaaagcattggaataccggaagaatgggatcttcaaacattcacaacattaaaagcaactgaattttatgaattacggcaaaactattcgaatttcgaatggaagggacggcggaggcattttgggatggaaagaaagtgagacaaacaatggtcggacattatcaagttacgcaacacaaagtgaagaattgggaagaacacaacgcaaaagggagggaatgaaatgaattggtcagaggcagacggaaattctcttttttggggtcagtcactcctttccgctgctcaccattttatcacggagttcctttagctcgtcttgaagtgccgccaatttgcgctcctgctcctctttgtactggtcgaactcagcccgactaatgaagttcggctgctcatccggtggcaaatgcggcgattgtttgttgccgaagtgcgtgggggagcaggaggaaagtgaacgctgttggggctgctgctgctgctgctgacggtcgtcggagacggcgcaaagaatgggcgtgggctgaagaagtggcgaggacggacctgtccacaatg

SEQ ID NO: 100288 - DNA, 400 bp, Heterodera glycines
aaaacccatttttctgtatgagatttctacatttattagttattacttttcacatatgcatatgtaatttattatttatgtataatatgaaataaaagtaatccaagcgcataaaatttattccttgcaaattgttaaaaaaagacaatgatttttcctttgacgttaatattcattcgtaaattaatttttatccattttcctttatgcaatattatcatttttatattattttttctttatgtttaaaattttcattcataaatttattttacgcattttattttataattattattgccattattttaatttgaaaaatactttgaatgtaatgaatagtagttatataacctatattaaaaaacacttttttgttaccaatttaaacagaaaaatg

SEQ ID NO: 100289 - DNA, 230 bp, Heterodera glycines
aaatgttgaaatcgcaggaaggaaaacgaaaacaaaaaatgcaaagacagaccaatggaaaaaaggttggcattggcatcatttcctggcaaaaaatttttgaaaaacatttccaatttcaatgaaaataaacgattttggaggaatataaaagccaaaagaaagccatgcgaaaaacataatcgaattattttaatttaattaatttgcttttattatccttcaaaatg

SEQ ID NO: 100290 - DNA, 538 bp, Heterodera glycines
cttacaacagtgaagaatggagtgatggaattcagaggaggaagttacccaaaatatttcttaaatgggaaatttaattcccgaggcccaaaattctcgaaaatcggttaatttccgaggcccaaaattctcgaaaatcggaattccaccacctcaagcaattaattgaagttgtcataatattgtttcatttaccaatgtattcttttcaatgctcttaattatgtcataaaaagccataaaaataattcattgttttatttatttttaatatataaatattctttgtcatgttaaaataaatgcttgaataaaatgaaatatttgcaattattgtttttatatggcttactcatacgtgaacaaggagtatgccgactctcgtgggcgccataacgaagggagaaaaattttaaaaaattttcacggcggcgcctatcggcaccgccggaccccgctaccccctctggttccccataatctttgaaaaaatcatgccgcaaaaaaggtggtttgaatagcaaaaaaaaaaaaaatg

SEQ ID NO: 100291 - DNA, 1003 bp, Heterodera glycines
cgcatcaaaagacgccgacgatttatatccggcaatttccttgaacaaccccggagacgaagtggaggccaattttggaccgaacttcaaatacacacttaattaaatgacatatccctttttccgatttatttatttgtacttgaaaaattatttgttaaacagtggcgaagatttaatggtatttaaaatgttctcattttgaagaaactgaattttaagtattttaattaaaccaaaaggcacgataatggcaaaaaacgtgcaaaaaatgagtaccaattttataaatatggtcatcgtttttagtgcaaattctgctgtaatgactttcaaaagtgtcaattcctagaaacacatacgagatgacagctcccaaaagacacagtaattcttatgaaaggtccaacctacagtagtaggtaattactatcgaataattgatccatatttttgggggtgtatcgcagattgggttcagtcactgtgaaggaatgagtgatctctgctcaattatttactttgctgatcaacaccaaagttccccttgatctttgcagttatgtggtcgcttcccactatttatttggtcatgtctatgcaaaaaacatagccgccggcgctgcgattgattatgtgagttattaacgtctcaaagaaaaaggagatcaacaacggcggatgaccaattcattcattctctagcgaaaacaattctgcgaaaaggccctccctcataagtctaagaattcagtaacaattttataaacaaattagaattttttgttaaaatggtttttttataaaaatgcagtaatttatttattagcatattagtattttcgaattcaaagttaaaatttttgaaatgcccttttgttaattttggtgattatttcgtccgatctgcttattaatcccgaagtatcatactcgtaattttccgcattttataattttgaagcaaatttaccaacttttcttttctctgaattcaataatg

SEQ ID NO: 100292 - DNA, 949 bp, Heterodera glycines
ttttaatccctttagaatgttgtatatgagtggtttaatgactttaatccacatccctcatttcattggaatgggggacaaagcgggggaggggatgaaaagcaatgaaaaagccggaagaggcggaaatgaaaattaaaattggacagaaaccgtagtgcgacatttgcggactgacatttgcggactgacatttgcggaccgtcttttgcgggtcataatttctggatttaattttcaaaaaaatttttttttcttaaattggatgatcatctgaatattattgaattttatatgtgatttttcggagttaagcaagttaatgcgaatgaaaatatgaaaaatttataaagtttttccaaaaagttcttttttcaattcctcttggtgctaaaaatttttatcacttcatatcatccttaagtagtgatctgatcaacttgtgcaatgcattagtttataaattcctgatttacaagaattatgttgtcattgataatgtgagtaattcattttaaaaatatatttttatatcttttatttgttcttgatattaattgttaggtatgcttgatcaaaatctaagctctttagactaaggctagtaggtgaaacacgaaaaattttgcgtgctatatattttgtgatatgatttttgtataaagcattttattaatcaatttagcaagaagcactatttaattatcaccttcagtcattatttcaatttggtaattacgaaaatttatttgaaaattcattttaatttttttttctctttttttttgataatttagtcacaaatgtcggtccgcaaatgttggctaaccacagaaacaacagcagaagaagcaaaagcgagagcagatgaattcacggccaaaaagactgactgataattacgataattattattattgtcatcattatcagggctgtcaaaaatatg

SEQ ID NO: 100293 - DNA, 176 bp, Heterodera glycines
gtgtaattttccctttcccatgctttgggcgcaacagaagcgtcaccttattatccgcaaacaaaatcaataagtaatttcacactttgcagttttgtccttttttagctgatattttctaaattggttgtttgttatttgttagttccatttttgctaaaacaaaacaaagaatg

SEQ ID NO: 100294 - DNA, 1003 bp, Heterodera glycines
acactttttttgctgataaatttactgcaaaactcttcccgaagaaatttttgcaattcattgatatcaattaatgtttaatcgttggccagaaatttgttgcgtgatttttctttgtttaattaacgttaaatacgaaagaattttttttttataatttggtgagaaatacttacttaaactgattttgaaaaaaattaattatttattattaaatttataaaattttatttttattttttttaatttttaaattgatagttcggtttttttgaaggggtcagtcaccccatcccaaaaatcagggaatccccaccattcacttatggaagtaattcattaaaacagtccatgtaaaaatattgataacgaaaatgtgaacttttgcctttaccttctccagcaaagaaatgtttatttaaatttagaaaatttattctcttacaacatttaaatccgcagaaaatgctctcattgatagtcatcgtttgcttctttgggattgtgccgaatttgtcaaaaccgatcaaactcagaaaccattctccaatggatgttttggtaaacaaaatgtaaaataaaaattatttaattaccaggataatattgttttcattcatcccctgagtctcatcatttaggcttctcataatccgggcgcacttaataatccgcaattccacatttttgggaattgcaaaattttgttggattaatctcttgaatcccgtcctagcaaaaattttgaatcccaattacgcagcgcacaattaaaatttttttaatttatcaatccgtctgccaggatttcttgatattcatatatatttgccattctgttgtagtttatggcctggcccgaggcgcgttatccactggaattgccttttcaccgcgtggattgctttagtgagatggagaggcgacacatcgtgccacaagtcatcacttaccggctggaaaatatcaaaaaactccgtaacggggttggttgaacattatg

SEQ ID NO: 100295 - DNA, 505 bp, Heterodera glycines
ttgtagtgcaaaattgctgaaaagccaaaaatctatgtacgacgattgcaattttagaatgttttttaacaaaaaatttaaaatcaaaatacccaaaataccgcgtattttggctttgcgtttaaatcaaatgccgaaattcaaatttgataaagccgatcgcgatctgcaccaaattggggatttatggcacggttcgcgcgaacgaatattaactccaatttggcgccaaaaactaatgccgagaattcaaaattcaaagcctatggcataaaattggacttttaaagccaaagtattatcattttcacgacaattatcggccgccctattggggcacttggcggcgtcggagtgcccaaatcaccggccgtcgaccgtttggccgagaaaaggtggcccacaatttgtgaaatgtttctgcattttattttgacagactttgggaggagccggaagatgcggacgaattcaaatcggacgaagagattgaggtgccgaaatg

SEQ ID NO: 100296 - DNA, 172 bp, Heterodera glycines
atttcgcaacattgtatcaaaattcggataataaatcagaaaatattcaacattcgactttttgaaatgaagataggttaacaaaccattggcagctataaaacaaaaaaatttttacagttttaattcattcataaatttacaaagcaacaaccaattcacattcataatg

SEQ ID NO: 100297 - DNA, 255 bp, Heterodera glycines
aaaaatatgaacgttttataggcataaagcgaacgatccggcactgagccaagtgatcgaaaagtttacattcaatgtcaggtaaagttttcatctcacatggcgataaaattcggcaattttttcggttaagtgctgaacaattcaggaaaaattttgcaaggatcgctgaaaaaatatttaaaatttattgtaaaattttgggcaaaacgccagcaaattcccgaagaaaaattgttaacaaatgacaaaatg

SEQ ID NO: 100298 - DNA, 974 bp, Heterodera glycines
tcctccatcttttcactttcggatttccctcccccttttttcgcttccctctcattaaagtggacaaaataagcgggcgcctgttgcttctcccgcccatcggtctctccgctgcttttcttcgattctcttctcatccatccgtctttaaatcgacggattcgcttgcctttcccttttcccttaagttctttcgaataaaataaacggaggcattggcaaataattgctgcacggaatgaatgccgtggctttttctccccaccaaactcatcccttcttagttagcctttgcctatcatttaaaatataatttggcccattaaaattccctttcgctctctttcttttccgttctctcctctacattcaatcactctctcttttccccttttctttgtgagaatgtctctcttttcacgttttaaagagtcttaaatttcttctcctccgcttaagtttaacgtcccttccttttttcatatacataaatcttttgggatatcttttgtcccaaacacagaggaaatgtaaaatatctttttgaaaagcatcggattgtttaagttttacccatttgcatgctaataattagttttttatgtacctagatccttctactaaattcgtcaaaattaaattttttataaaaaaattttttgtttttattttattaatttttgcgtgaatcccgatcacttcccgcaaaactttgactcctctacaacattttttttaccgtgctctaataattactttttaaaaaccctcagaagcatgctttcaaggctttttaaaagaaaaaaaattttctatcaaaaaaggggggggggtaccatcggtagtattacacttttttttctccggtaattaattataaactttttcttttatttttcatttacactttcctaacactatttttcaaaatgataaatgtgttgttaagcaataattgccctcccctcccgatg

SEQ ID NO: 100299 - DNA, 82 bp, Heterodera glycines
tcttaaaaatgatatctgcacaaaattccaacgatgcaatgactgtggtgtaatatataacattaaatatcattcaactatg

SEQ ID NO: 100300 - DNA, 226 bp, Heterodera glycines
agtgcgggaatggcttctgtggccgcgcgcggatggccgtccgaaagtgttgtactgcaccttttggtacgatataagtgacgaatacaagcaggcaagcggcgggaaagcaaaccaataaaaatgataattaatcgaaaagtaagagaggttgaaagataacagagagagagagagagaatgggagagcaaaagagggaggaacggggagggatataaaaagatg

SEQ ID NO: 100301 - DNA, 262 bp, Heterodera glycines
tttttccaaaaatcgctttaaaaaattcaaaaaaaactttttctcgagatttataaaaagttttcaaagatttttttttgaaaaaatttctcggggggggggggcatagtgcatactaatttgtaagctgcgctgggattttattgagttgaaatctttctgacaatgactttttttctttataatttgttgaaatttgtgtaaataagttaaatacatatatttttttttcttcctttgtcaggttttcttgcacgcaatg

SEQ ID NO: 100302 - DNA, 933 bp, Heterodera glycines
ccaaatatttggtcatttttgaacaacttctgataacaaatctcgctcaaaatttcaacatttgtccggcggcacctatagacaccgccggacccccggccccctcccactgttccaaaaaagttttttgaaaaaacattgccacaaaaacagcgatttaaaagcaaaaaatttaaaagattgtaaatttatttaaaaaaaatacagtgggactcagaaaattccaagaacccccccccctgaaaacaaaatttttaataattttcctcgaactcgtcccccaaaacgtaaatacaaaattttattggtacatttttgaatattggcaattttcgtaacaaagtgcacttaaattttcaatttttttcaaaaaaaaatttcacttgggaaaagtcccggttggtcccggtcccgggttttttcgctgtcccggtcccggtcgaaaaacttggtcccggtcccggtcccgacttttctggtcccggtaagtcccggtcccggtttttgtcaaatttcccggtcccgctcaactctacctgatacctattttattaatcaccatattattagaacggttccagtcttttgtgcgcctaaattgcaacatttgtggacttttgaacaaaaaacccatctcagatttatttaatctaatgttggaagatcatcgttagaatctccgaatcaaaccatcttttaactctttccatcttctaaaaacattaaatacattgatcagtgatcgctgatcacacaataaaaatgcatgaataaaagaaatggaaaatattttgaaagagcgccattataataatgccaataacccatattcctcgagggaattgaaccaagacaaaagctgagtgttaaactgtatacaaattcttaatttattattttagtgaagcaaattgttttttttttcgacaaatg

SEQ ID NO: 100303 - DNA, 398 bp, Heterodera glycines
aattgtttgtttattttttaatgaaaaattatcccaattatggtctcttttaaagatatttctgaattttttcccaaccttcaaagaaatagttttaaacttgattagttattaacggagtttttcattttttttacaagatttttgggtttattttagaagaattattttgtcccattgtataaacattaaaaataaaattaaatttattatttttttaaatcttgaattttttaattcaaattatgtttaatttatacttttcaattagtaataataataatgatcaattttgtattaatatttatatttacacaattagttaaaattacaattattaaatcaattaaaattttgctcagatttccggtggtgcccaaattgacataaagcaaatg

SEQ ID NO: 100304 - DNA, 211 bp, Heterodera glycines
atttttttaaagttcgggcgggcgacaaacttttattatttcaaatttgttcgttatctcgtcaaaactagaaaattttaagaaagtttcaagaaaaaattcaatttttttttggaattcggcaaaatatgtgtttcaataaaatttatataggttttcaaaaaatttttttttaatttatggcgacgtttttcgacgttttgtcctgatg

SEQ ID NO: 100305 - DNA, 922 bp, Heterodera glycines
aattcgaattgaaatacgaagaaatggagggagtgaaagtgattcgcaatttcattatttatttattgccgttgatttcctttttcatcacaaatttttgctccattttcaatttctgttatgaacaaataccagaataaaacttgggaatccttaaactttgcataagttttgtcctgcacattcactggcttcttcagtaaacagctgttcttcattcgtttcccatcgctttgtccgtctgcggacactccgccgccccccaaatgttttccggccgatttccaatcgatcagaatttccaattctcaatttccatccgccgatcgtttgcaattcgattgcacattttcctagtcaagatttctccaaagttttggttttaataaattcttcctcccccattattattaccgcaataattttttgtttatgccgtggaaagtggcacaaatggccaatcaatggcacttttgctggtccgtctgccgtctctctcattgccccactctttctcccctcattagtgtcccttctatttaataatgcccacctttttgcccatttcctttgggcttccgctcgcttctttcatttccgttttggcttttattagcaattaattcttaatttttacaatcgattagtgttaaagtaattagtgagtaagaacaaaagctttaagcctgaaataagaagaatttccataagaattttccccacatgaccatattttaaggcctttaagttaattttaaaaaatatatgaaaaaagcggcgattggcgccgccggggattaatttcctcttctgtttccttttggattttgactatcaaaatcacaaattttcttacttaagattgtcaataatgtttaataatttggctaattaattaatttaaaaacgaacggaattaatg

SEQ ID NO: 100306 - DNA, 315 bp, Heterodera glycines
ttggtttcaaccacatcgaattgcggtgagtgaaaattcctttttaaccatattagtgttcatataatttttttgcatagctaaactaaagtctgtgtatcatattgcttaagaaacggggtcggacgttcattggacagaaaaatgatccattaaaagcataaatctgaaaagaggggatttttacggtcaatgcttaagtattgttggtaccaaacgttaaaggctatagaatttttttaaaccaaaattaattttcttgaatatactcgaaaaagctgcgtttcgtttttctcgttgtagtttttcttaatg

SEQ ID NO: 100307 - DNA, 89 bp, Heterodera glycines
tacacacataataaatatattctttatttattttttaaaatatttatctatttattctttatttataattaataattatatgtaatatg

SEQ ID NO: 100308 - DNA, 1003 bp, Heterodera glycines
tcatatcatgccaaaaactgaaaaattttattccaaaatgccatttaatcccttccagagtcaaaatcccagttgagagcggagacttcggcactctgagagtgttagtcacgtgccccgttttaatgagtggcctcaatgttcgggacggccctcaattagtcattttttgactaattaaattttttatttaatttgtgccattggcggcaatttgttgttgttgtcacgtggcggcacggatttttagttgattaattttttcttcagcagaggataaaacatttaaatttttatttgtccattcgtttttttggagagactcattttatctgactttttttaaatggatttttcggcacaaaatgccattcagatttcgatctaagtctaagtaattttccggataaaaaaattcttgagaatacttcttttaaaaaaaaactccgtttattgttttttcattatttcattttaacagtacagagggacatttttgaatatccctccgctgggagccgaacccaaaccctcttttttctcaaaatggtcgaacccactgagccacagataaaccctcttttagatctttcgaatccgatcaagagaattttgatcatcttattccaagaaaaaagccacctgaattttaatgaaaatggcacacattttcacgcatcaaaaattttttcatgccaaagtgtcggattattaattagaaaattcgacgaaaatgatttttccttataaatgacgtcacgtcatcttactcacatttttattaatggcacattgcttttatcacacaatgccaaatttgtttctctgttttttctttaaattttcatgttttccccgtgccaaattttgtttctctgttttttctttaaattttcatgcattatccaaatgccaaatttgtgtctctaattttatttaaattttccatttttaaatttaaatcaatacactttttttccgccattcagacggttcagacatg

SEQ ID NO: 100309 - DNA, 629 bp, Heterodera glycines
aatgttcattcgaaggactaattaaaagcattagcagaaaaacaacaagcattttcattttagctttagatgtaaaagcatagggatttcaacggaaggacaaaaaatccaaaagaaaccttaatatgacccgaaaattgaaaagtctaaatggagaaaacccaaactgtcgtaaaagtgacaggaaaagaaatttgatcaattttttgaaaatttggaaaagaaagaataaatgaatgagtgggtgagtgacaaacgccactttttttggtccttttaatatctatgacaaatttaataattcattattttttcgctcaaaaacgtgaccggggtagggagtcacggctaaatcccggcggggctccggtccagtccgggctctattgcttatcaatgtttatcggcggcggcgacacgcggggtagcggggaaaggctgacaaattatttggatttcctactttatcactgatttgtgagttgcaaaacgactcggcaaaacgtttcgagggacagaaattaagttgccaggctcaggttccataattctatgaaattgcgtttgatcgaagaaatgatcagtttcttggctctttcttcacaagaactctcgacggatgccaaatg

SEQ ID NO: 100310 - DNA, 410 bp, Heterodera glycines
ctactttagcgcaattatgtttatattccttgtggtctttttgcgctttgtaaccgatgcgctgaagtggtagaaatcgaaggtacctgtcctttttgtcgtgaacaacttgatggagtgtttaaaatttttagctcgtaattatactacgatcgttaaatacccaaacttatgttgctaaattacatgtttataaagtgattatgatttccaatgcatattggattgttaaagcttcaccagaattaacaaactaatcataaaatctcttatgttacggtggcctaatggtttgtcttccagattgtggacaaatgttcggttctccaagaagctggcacatttaaaaattatttaatttaaggagggacaaatggttaagatgaggggaaaaattatcgataaaaatg

SEQ ID NO: 100311 - DNA, 704 bp, Heterodera glycines
  unsure (1)..(704): unsure at all n locations
tattagtcccgaaaaagccgtggatcgccagtcatataggtncgcgcaaaaaatttcgcagtcgcggattcaaattgccgcggttcgaagcgccaaatatggaaaaacgcttgaatcgcgcgtcgttgtcgagtggactaaagcccaaaattgtatatataacgaggccagttttcttcaatcaccctcagtctaatttcgttgcattcacaccgtactacacaatttatttttatttttacatttattcatgaaaaatcgttgcgtaaaattctaatgctttttttttatttctgatcacgaatttgacaacctttcggcaattctgaaccccaatcaattcgaatcaaaagttgaaacttcagatgaaacttaaaattcttgaatttcgcatttttagttcaaaaccggctaaaactcgaacacaaactgaattcaccattatgtattactctaccatcgactcttttttgtaccaaaattagcatttattgataaaatcttattgatactgttagtctaaattgtcttcattctcctcgaatttaaaaatggccccaaaagggaaacgaatttcacgacttattccttttggaaagcaaatatttgtattttttcaattctttatatttaatgaaatctgttctttaatcgggacggaatagttaagttgctaatatttggcttcttcgaattgcgcaatg

SEQ ID NO: 100312 - DNA, 398 bp, Heterodera glycines
ggcaatcccaaaaaagtgctatttttgagtcatttttcgaacacagttcgaacagttcttaaccgatcgaaaccgcactatttttcccttataacccttgaaaaactgcgtcgattgaccccacgctcgacctgtaaaactcgctagaaagtcttaaattagtttttaagcttgaaactggggtatattattcttatatagggaaccagcagtgcaaaaagaaataataatttaaatattaaaacgtaaaaccaagagaaataaaaaattactaattaattttgggtccactgcgtttcggcgccaaaaaaaattataaaaattcaaatacttggttaaaatctacaaacaaaaaacaaaaataaaacttttttagttaatcaatttcatcgaatatg

SEQ ID NO: 100313 - DNA, 198 bp, Heterodera glycines
ttcctgatttttttttttcaaaattccttcccgaaattgatctgaccacgcctgatcagtcgagtccgccggagggaaatgatcggagtttgggattgggttatttttcgggcggtttgcccttttccgttttcgaaggactgtccttaacactcgaaggtattcttacgatgcttgagcggtccgccggaggtaatg

SEQ ID NO: 100314 - DNA, 1003 bp, Heterodera glycines
tgaaaaaattcccttgatggatgactatgaatggaaaatggaaaaataaaaagccaccaatttcttgtgaattttgaaggtcctaaccatccataaccaatatattgccaaaattttagtgcccaattttttttgcggaaatatttttaaaattttccaccaaaaaaggaattaagaggttcagaaaagaatcgggaatccaacctttcaacattcattcggtaacatgccagttaccactgatataagcggtttagagacaagaatgcctaaatcaattctgtgtgttttgttggagattcatgtgtttttaggcattgaacggttcagtccaaagccatgttgccacttcagtcccagggtctgtaactcttcagggagtgtattcttcactttaaccaaattttgaatttcgactttttgcacgaatttgggtccggaattcgaagttagtcaatatgaatgttggattcggtttctccgacccagaaaacccttataaacatgttttcacgactttttgaacaaaaaaattttcttccaaaaaaggggtcaccccatctatagaataccgaattttcgtgtcaatttggcagtgaatgaatacctactaaattggtacataagcgaaattttaattttgcgaattcaatgcgtaaaaggaactcaaatttttttgtgtgggaacgggtcccagcggattacccgctcaaatcgaacattaaattttacagaattccgtgtgggattaagtgaattttgaaatttttcgaaaaactcaattaatagggcataagttaattatatgaattcattaggtaattgaatttatgtgaaaccaatacatacatatttacaaaacggcatataacattgaaatcaacacacatatataaacgcgcatattacatgcatttaaggggggtacatacaataagtagcacattttcgggaaatcaaaccaccagaaacatcggacaatttcaaggaaacagcaaaaatg

SEQ ID NO: 100315 - DNA, 108 bp, Heterodera glycines
actggaaaattatttattttttcatttcgggggggggggggggaactgcaccctttgcccccccctggtcacggacctggggacgcgctaattcacaaagggcgaatg

SEQ ID NO: 100316 - DNA, 287 bp, Heterodera glycines
ggtttgtcaacgggaactaacaattaaggagtttgtttggttttttttttaagcaattttcggtcatggctccccacttgttaggcgtacagcaacggcggcacttgcatccgatgcagctgttcacagggctctctaaacctatatttattttttttctatcttttctctgaatggagttataacatttttcacaacagttttgcatttaacagacacattctaaaatatctaattagtatggtagtccaagcctattattttttttttagacttgtctatgaatg

SEQ ID NO: 100317 - DNA, 101 bp, Heterodera glycines
ggttgggacagctttgacagacatatacatacatgaaaaatagttaatgcatacaaggtacttgctagtttaggcccataaatatatgtacatagaacatg

SEQ ID NO: 100318 - DNA, 270 bp, Heterodera glycines
tcgtcaagcattttcgaaccgggcattggtggagtgcttacggatgcataaaacagcagcaacaaaagccaaatcagctaatgatggtgctttttcataaattaacattgaacctttaaaaaaatttaattttatttcaaaattttgcttgaaagaatgtttggtgcccgctatttactgtatttgtttacagtaccccatcgccattcctcaaacagtaccaattgtgaaaaagttgatcataatggtggaggagacattctccaaatg

SEQ ID NO: 100319 - DNA, 138 bp, Heterodera glycines
attcatccaattattgggctgtattgccatacaaaaaaaaatatttacattcattattacgatgaaaaaaacatgattatgttccatatatgtcctatgctattttttttatatttttaaaattaaaatttctagatg

SEQ ID NO: 100320 - DNA, 95 bp, Heterodera glycines
tcattgattcccctccaaaaatcttttattacggatttgccattttgttaaaatttaattattattattttgataatacattgttatttgagatg

SEQ ID NO: 100321 - DNA, 107 bp, Heterodera glycines
caaattttttgtttaaagcgatcgtggacaattccagggatggcacagtgatcgtttccttcggcacttttgccgatattaactcaatgaaaaggggaatgaaaatg

SEQ ID NO: 100322 - DNA, 361 bp, Heterodera glycines
atttatcaaaaattttttaattacctagcctggttcggaaaaaattctagaaaaattcgaaaaaaaaatttattaaaaaattcaaggaaaaaaaaattatgttttttcgattttttcttagaaatcaacaattttagtttttattaacacttagattttcagaaaagctaaaataatttttaattttcttaaaattttgaaaaatttttaattttttttgctgcgacgtttcggcggcgacgttttggggtgtacccgtgtatgataagaaatggcccccatttcagctccctctcctcctttttaggactacgacctgtgcgaccagtgccgtgccaaaacagaccatccgcacgaaatg

SEQ ID NO: 100323 - DNA, 133 bp, Heterodera glycines
ggtaaattgtgaaatcacagagaaagggggggggggggagaacaaaccccatccccttttatttcttttaaatctaaattttattcaaaaaattttagaaggaatttacagttggatagccataaattatatg

SEQ ID NO: 100324 - DNA, 201 bp, Heterodera glycines
cccctaatgattaggcttttcataataagaaaatgagcttatgaatgagaattttttatggaaaaatattgacattatgccaataaataaagatgaaatattttattcgtttcacacacatattttagttgtagtccttaattttgaacttttttagagtaatggatccggaaatttctgataattttccggctgaaaatg

SEQ ID NO: 100325 - DNA, 151 bp, Heterodera glycines
ggtatttgttactgaacaatttaaaaatgccctcaaactttaagcatcacgatgatcctctgggaccattaccggagggatgggaacggcgtgaagacccaaacaccgggcgtcattactttgtcaaccatcagaataaaactacgcaatg

SEQ ID NO: 100326 - DNA, 71 bp, Heterodera glycines
ggtcggaaaagccgtttctaacactttaaatcaaccgaaaaacaaaacagagaaacggagagcaaacaatg

SEQ ID NO: 100327 - DNA, 269 bp, Heterodera glycines
gcttacattaaatttttggaatcaggtgaatttccggcaggttttgatgagaatgaaaaagagcaaatgaccattttcgcaattaatttatgtttaaattctggtatactgtactttaaacctcatggacataaaccccgaatttacataccaatttctctcagattattagtattcgaatcttttcataattctccactgggaggcggacatatgagcactaacaaaactgttaaaaagtgccggacacggtactttggccaaaaatg

SEQ ID NO: 100328 - DNA, 65 bp, Heterodera glycines
tgcaggtcgaaaacaagaagcaacccaaggaggcgatcaaggagccccgttaagagtcggaaatg

SEQ ID NO: 100329 - DNA, 404 bp, Heterodera glycines
aaaaaaatatcgctagattttcaaaattttatgctaaaattttcatattaaaagattagtatgacttttagaaaatttcgggttgaaaatgattaaaaaaaaaagttttacgatgaattttggcacattaggaacatcaacaacagcagcaacaacaacaacatgacggttatggaaattgtgaggacggtgttacgacatcacaacatttgtacacagcgtcaggtaaacagaggcgcttaagattttttgcggttttccatttttaaaattttaaaaaccaaaaattaggcgtgcaattgtcgtccgccggctgttcaccactgtccacgccgacgtcgctcatccaccaacagcagcatcacttttccgcccaaccgcagcaactgcagcagttgaccatg

SEQ ID NO: 100330 - DNA, 605 bp, Heterodera glycines
aatatacataaattaaggacactgagtaccaaaaattggcggaggaaaaattccatttgaatttcccgggttgggacgcactgttcgccaagagccgctttttcttcatcaattcgctgcccgaaattgattttgctcagtccaaaattttgaagagcgatcaacgggtcaaattcattggcggcttaaattttggccatccgtcggaaattgacgaaaaagcaatggaaaatgtaaaataaaaaaaataatttaaataaaaataatggattaaaagtcatgagatccatgcttaatgagattcattctgttcttgactcaataattcttcaattttcgaacactttccgtctcgagactaattagtgtctttgaaaattggcttcgattacatttgcttgtgccttttaatcgcctgtcagcttctttcattcagcagtgagattaaattctaatccaacaaaaacctaatccgacagacaaattcactgatcagtcggagtttgggcacaaaagagggcgttgttttggtcagttttggcacaaacgatgcttttaccgggcccagcaatgcgcaattcgtcgaagcattggccggcacaatg

SEQ ID NO: 100331 - DNA, 217 bp, Heterodera glycines
cccgtagctgaactgactatagtttctaaaaataccgtaataggacggactaaaccgggacattattcttctttcattactgtaattgcactaaacaaaggtttaagtaataaaatgataattctttgctccattaattaaatagtcataaccaatttcaagtagccaaatcaataacatactgtactattttacagtcctcaattttctgtcgatg

SEQ ID NO: 100332 - DNA, 247 bp, Heterodera glycines
ggttggttgatgatcattttagaaatctaggcgaaaatgaccaatgcattcaaatatgtttaaaaattcagcttaaaagtttgcttaacattgaaaattgacaaatctgtttttacaccaaatcggaaattgggtctccattcccaaaagagaataaaacttttaaaccaatgatagtccgtcctttcattgtgttattaccccctctgcctgtccgtgaatttgctaatcatgaaaacctcagatg

SEQ ID NO: 100333 - DNA, 111 bp, Heterodera glycines
tgcgggattctcctccgcttccgttcagcgacaattcctgtgttggccgacgttcagggcgcctttcatgccatcgaagtcgaacccgaggacaggcgcttttgcaaaatg

SEQ ID NO: 100334 - DNA, 1003 bp, Heterodera glycines
gaccgggactttttgggttgaaaaaccgggaaaaaagccgggaatttcccggtcaaaactggtcaaaaccgggaccttggtactcagttgttctcagttgcccgtgttcaggtcccggtcccgctgcactctactttcatcatatttctccaatttgctttagtggacctcgccggttgtgcggggatgcgcctgccggcaacggataagcagggtcacacaatcatttgcgccggggctggctacccatcgcctaccgcggcatgtccgtccggctatcggtgcacaatgttggcgcacatggggtacggtagtggaatttcaatacgataacgaggagaaaattgaattttgcataagttagtcaagttccaattttgggttgattttaagaattgaatgtttttaaggaaaaaattccacacgtttcgataggcaatagagaaaattttggaattttagagaaatttattttgaaaattttttttgtaccttgccaattcgacagtcttttgaacattttgttcatttttagagtttgctgtcattcagcgacgcaaggtttgttatttccatgtttattctttccacttttctgaatgaaaatacgcaagtcaaatcagggataggcgccgcctggaaaatacgaaatacccaaattaaggtgtagctttaacaaaacaaattaaaaataattaaatctgattattaattgctaaataaatcgaaatacgggtagccctttaaataaaaaatagaaaatttttttataaaaataatcttacaagaaatcgtctcgaaaaataatccaaaagtcaaattacggatcaaaattgcggaaaaatcccaaaaatccgtaatccgcaactccaaaaaccccgcaatttccgtaatccgcaatggcgcccagccctgctaggatcagtacttaatgcatcaattcttgtcttttttctgattagaatgcatcatcaatttatataattaaatttattaaaaaatg

SEQ ID NO: 100335 - DNA, 125 bp, Heterodera glycines
aattaatttaaagcacctcataaaatcactcgaaagataagaaacagaaaagttgatctcggcatttgttgtacgcaattagacagcaaagcggtctggaactcattgaatgtccctgaagaatg

SEQ ID NO: 100336 - DNA, 692 bp, Heterodera glycines
aattccggatgaggacatcgaagacccgctcgatgtgatcaatggcacttttggcctcccaattccattaagggaccaaaatttggcagaagtcccgccatccaatcaatcaccgccagtccgccgttatccgattcgaaatcgccggcctgttaaccgccttcaaatcgaccccagccgatcgtcctatgtgtgactgatcatggcactgatcagttggacttaaaaggggaggtgttagagaggcaaataattcaaatatttgcaattccctctcttgggctctttgaccccatattgattttccccatttattcctgcccttcccttcgtccagcacacattcattctgttatatttccttcttatttggtgctccccaatttgcttcgtccctccgacaaatattttttgtattatttttccatttgtgttaaataaatattttggtgttcgacattcacaaataattgtttgagcaattaaccggctcaacattggcgacgcccgttcttcaggacttcacttcgaacattttctcgtgttgaaattgttcgaattgtggaaattcaaaaatctcgtgttgatttttggatttcgcagaaatcttcaaaaaaccaatcactaatcttgtgtgcggttctgctatgtgcagtttcttcgtctaaagtccatcctccaaatcaacaatg

SEQ ID NO: 100337 - DNA, 194 bp, Heterodera glycines
ctcaccaacatagtttgacataaatccattacctttcccactttgcaacttaattggcttacccatccttaatcggtctcattttgtttttcgctaatgatcaatgatcattttatcactgtctgaccaatcacttaactgatcactcacattttgacattttgttgcatccttcaatttccatttgccaaatg

SEQ ID NO: 100338 - DNA, 1003 bp, Heterodera glycines
atcgaacctagcgcactaaaatcgatataatctctccaaattttgcaggccttctccattgtaaaggactaacttaacctgaaaaaatgccaacgcttgttgtttttaaaatttttcgaaattctgactttttcattaattatttattattttgcaaaattaattcataaatattttttagaacgtgctctgaaacgcaccaaatgttaattaaaagttaaataaggctctctgatgctttcactatcaaaaagggagatgaataaaaaatctaaaaatttttaattgctttttaaatttgcgaaaaattttaggcttaactttttttttataaactgatcagaagcgaaccagattttgcgagggcatcaaaaagacaaggaaaagcactgctatgatgctaactccagtaattctgaatttaaaattttttattaatttttaaagcttcactattttatttttttagcaaaattaattcataaatattttttcacaaactgctctgaaacgcaccaaattttatttacaagttattttaggcactcagatgctttcactatcaaaaagggagatgaataaaaatctaaaaatttttaataattgtttgagtaccccaaacggacacttgaaaaaatcgatttttttgttttcggggcagtccccccgaaccgatgcgcccagatttatggggagaccgaatcctttcggaatagcttccctatagcctgtactttaattctgcgttggatttttgctccccataatgttgagtaccccaaacggacacttgaaaaatcgatttttttggtttcggggcagtccccccgaacgatgcgcccagatttatggggagaccgaatccttcgggaatagcttccctatagcctgtactttaattctgcgttggatttttgctccccataaatgtttgagtaccccaaacggacacttgaaaaaatcgatttttttgtttcataaatatttttttcagaaagtcatg

SEQ ID NO: 100339 - DNA, 111 bp, Heterodera glycines
ctgaagttgacccaaggaaatcggcaaggactcgagaaaccgggcaatttggtccccggaacgtcatgtaccacgaaaacggaggcgcaattcaaccaaagaactgggatg

SEQ ID NO: 100340 - DNA, 169 bp, Heterodera glycines
  unsure (1)..(169): unsure at all n locations
tgaattattataaaaatgttgtcaaattaantgaaataatagattaaatagtggttaatattgattgattgaagaaaaattaagccatgctataaaattaataattacaaaattcattgncgaaaaatatttttataaaaataattcattatatttttacaaaaaaatg

SEQ ID NO: 100341 - DNA, 981 bp, Heterodera glycines
tggttttgaattttgcaatgaaaaatttggacgttagcaaatcttttaaggggaaggcccaactcaaaatcttgcgcgcagccttaaaacagaaaaaatgaaaaaaccaaacgggatttttaacgctttctaaaaatgctaaaactttctctttcgaatggcatttgcaaattatcactcaatttaattgaaacttttttaaatcagcaaacaaaaaaaaaaattctcttttattacagaacttaaacaaccagtagaatatgagaaaaggcacaaaacattttaaaagaaaaagcaaaagactattttattaaatatttattataaacttgccgttatttatgagaatcattaaaatgacgaacaaaaaataatttagcgccataaaaatgtgaaagaaattaaagaaaaacgaaaaaattcataaaaatgagaagctgggcggctttggaaatgcttataaataaaagaagaaatcaatttccagtaatcaatgtgcaattatttgcattgattatttcatcgtaagaaattcagaaaatcattttatgaagaaaaacaaataaattaatattaatgaaattatattgtttttacgaaaaattccaaaaaaatagcaataacaatttagtggagaaagctaaaccaaaaataattttttcaaatattcccaatttattaattgcctgccccactttaaagtcacaagggcaataaaaatgttgcggaattttttaatttaaattcattaatcacaaattaattgcgttccaccccatggacaattcgtccatctgacgaagcgaaggcggacagcgcaaatggtcgacggactcatcaaatcttgtgatgggcaaccttgtagataaactttggtttctgagctccaagaaaaacgaagcgctgttatttaaacagttaacaagtgaacaaaaacacattggcaattccttcgctcggtcgaatcattcgctgagaatg

SEQ ID NO: 100342 - DNA, 74 bp, Heterodera glycines
cccccatttttgtggcggtatttttttacattttaaataatatttattttttaatatttaaaagcattgaaatg

SEQ ID NO: 100343 - DNA, 83 bp, Heterodera glycines
aatgttcagcgcgggacttggtttgtgcagtgcatctgcagagtgtttttaaaagggcgcgtgaggatgacttgctcacgatg

SEQ ID NO: 100344 - DNA, 164 bp, Heterodera glycines
tttcaccattaacgtggaaaaaatgaataaactaattagtttgtttagttgttatattacccgctttatatcgtcatggaccaatataaaagcggtggaaatattcacaaaaaagcactttcgatttattcgactattcaattaaacaatttcaattgaaaatg

SEQ ID NO: 100345 - DNA, 668 bp, Heterodera glycines
ataaaaatattttcttatagaaaaaaaatctcctctattcatccatataaattttattgttaaattttaagggaatcatttaggaaaaaacatgctaaaaagttgacgaaaaagggaaaggcgcgttcatttcacaaaattataagtagggctaaatatatttttttgtacatatttcgctattcttgaggattttttaatgaaattttatgggtacatttttgaatataggcaatttttcgtaacaaagtgcactcaaattttcaaattttttttcaaaaaattttcacttgggaaaattcccggttggtcccagtcccggacgaaaatcgaggtcccggtcccgacttttctgatcccggtaagtcccggtcccggtttttgtcaaaattcccggtcccgtgcaactctaataattaccttttttgctaccttgctatagcctaatatgcacgaaaacgagtttttaacttggcttgaagcttttatcttgaactttttggtgcattttttgcctattttttttgaaaaaacggtaaatttttttaaaattttgcaacttttcctaccatattttattacaatttccaaaaaattttccggcggcgcttatcggcaccgccggaccttcattttaccttaatttttgaaattttaaccacaaaatg

SEQ ID NO: 100346 - DNA, 352 bp, Heterodera glycines
ttaggccgccaattagcggacgtaatgaatgatgatgcgatttgctgttgatgatgggtgaaggtcgagaagattctttgaaattactctctccgtgttgaacttggtccctataaaaagtgaacagggttcccccaaggggatataatcaaattacattggaatgctgaattaatttttaatgctcaagaatgcacattttgccgaatttggcagaaaaaatgcaaagacataaaaatatttattttttaaattaaatttttatttgaatttaaatagaggaccttttatataaacaattttaataaaaatattttacaattttatagcgtgaatttgtctactcaaaatg

SEQ ID NO: 100347 - DNA, 208 bp, Heterodera glycines
cttcgtccattttcctttcctttgcgtcttattctttgttaattttggcattgtgccgagcccaaaatgaatcagctgcccaaggcgatgcgcagcccccgccattcttaacagaggccagccaagagaaaatcaacgaattctaccaatacgtcacgagcctggggcatttaaaagaaacggaaatagcggaaaaagtgaaggaatg

SEQ ID NO: 100348 - DNA, 245 bp, Heterodera glycines
gattgagttcaagggaattgtcaaacagtttggatacgtcctaagcgttgagactatctacttcgacaaagaaaagggaattgatgaattctataacttcctccgtaacaatgtcatgtgtttcttcagtgttgattcataaagtgaattgaaatgttcaattatttagcgtgctgtttactgtacaaatatttcatattttaattttcctcaatcttattttacgatttttattgaaaaaaatg

SEQ ID NO: 100349 - DNA, 399 bp, Heterodera glycines
tcagcagccgactcgtcgtcttgcccaaccagtggcaagacactcggccatcagcagccgactcatttagcctaacccatcaaagggaaggctcattcggccatcgccgccgactcattcgcctgacccatcaaagggaaggcttattcggccatcagcagcctactcatttagccgaacccatcaaagggtaggcacattcggccaccagtcgccgacttctttgtcttgcccaaccagtggcaagacacattcggccatcgccgccgacccaagtctcacccaacaaggggagacacaaccggccaccagcagccgaatcttcgagtcttcaccaacaagggttaaaggactccggccatcagcagccgaacctcccaaagcaggagaatcaacatg

SEQ ID NO: 100350 - DNA, 455 bp, Heterodera glycines
tcggtgttggccgcgaactcacgatctctggccccctcgttctacgaatctatgctggtgcccttcttcttgccctattctctgttgcccttgtcgatggccaatcatctattgccggtctctgccctgctcattcttttgccctttgctcttcacggctgcacaaattttcttgccttggtccgtcgctttttggtccttccgcgtttgattttgtgcaaatcacgaacaaatttgcttcgttggcttactcaccgcttcctggcagcgaacacttcgctgaaagctatgccgaagcagctgactcacccatctctccgctgtgttctgccattctgccatttttgctctctggcctagttcgtatttggccgctatttaagccatggatcgcaagaacgggccaccattcatttccctccgactacctaattctcaacaccttctgtgccatg

SEQ ID NO: 100351 - DNA, 232 bp, Heterodera glycines
gaagttgacggaagaggaggaagaatgttctgctgctgctgttgaccactcgtcgaaaggtgaagccccaaaagcttatgcgacatttgaagagcacactgtgggttctgctgcacgatgccggccaaaaacatgtcgtcgtcgagccgtgagagcacaaaacgctgttgctcttcaatgaacatggagttattgaaatctgctggtactgttgctgctgcggctggagatg

SEQ ID NO: 100352 - DNA, 486 bp, Heterodera glycines
  unsure (1)..(486): unsure at all n locations
aaaaaatggggaacaatttgattttaaaaaaatgaacantgggcgcaaatgtccgaggcgcaaaatgtctggacacgtttggaatgcattaaattaaaaaaaaaattttttccaatttcttttttctcacaaatttttatcaaaaataacaaatatgtgcaaaattccaaataatgtgtgaattgtttcaaattgagaattttgattaaattttttagcagattttcattaaaaatcataattagttgattttcgaaaaaattgataattttcatgtatttatgaaatttttttttggaaaatttggtgaaataatttcgtttttgattgctctattaaaaaaccaaattaaaagattgtcaaacattatgccaatatatcaaaataatcaaaattttaacagatctggcgattttctcctcaaaatttctcaaaaatacacaaaaaagctcaattcactcaaataaatcaaaatttagaaatatg

SEQ ID NO: 100353 - DNA, 699 bp, Heterodera glycines
agcttatcacccataaaattgctttatgttgaaagaatcattttatatctgaactaatcagtatctatctgattagatcctgtacactgattaaccagagttaagagccgaagaatttgtgtttaggttttgcaaattgaagggtccgactatgccgaaggggttataaacattaaaatttttgaaattttctaggctctttgaaaattttatgataaattactaagtttttcataaattttaacaaaaaaaaattgctaatttttttttattagtcttctttataaaaatattttactgtttatttaaaaaaatatattttaaaaatttttaaagaattttcgaagggcggaagttctgctgagaaattttttgaaaaaccgctcatatcccaatgacttccagcaaaccttttttggcatcaaatttttcaacgagtcaaccaccgccggcatcggcccgtccgatcagcgccagttcaatttgaccgccgctttgctcaacgcggcacagtccagcgacgccgaaaacggcaccaccggaagcggtggcggtggcatccttgacgaagtgatgctggacgaaggggcagctaatggacgtgccgaggacggcggcaatttgacgtccggcgcgacaaatttggcactcgtagcgggggacgaccaacaaaattggcaacagcacgtgaccaacatg

SEQ ID NO: 100354 - DNA, 420 bp, Heterodera glycines
ctgtgagagtaaaatatggaaatttcaaatataatataggtatttatttaccatggtattgacatcctctcttacaaattagtttttagcgtattacccttaaaattagagttttagcgttttcctatcttaatttaaaaaataaaattaaaaaaaagtatttatttctttctaaaactatcgagtgatattctgtataaggttttgtttgggatgcgttgggtgatcaaaaaaaaacgaccagtttttttgaatctgactagttttttgaattaacgcgcataaaattacgcaacttggcgttatggatcattttgtctaacaaaggcggaggcgttgacccagccattgtgccgttgctgactttttcagtctttttctaattagaattgcttggtcatcttccaattagttttaatg

SEQ ID NO: 100355 - DNA, 55 bp, Heterodera glycines
ttttaaaggttgtgaatttttggatgattaaagtcgatatttgaattctaaaatg

SEQ ID NO: 100356 - DNA, 60 bp, Heterodera glycines
agtgagtgaattttggaataatgaaagaaccttcattgcattactattgataatcagatg

SEQ ID NO: 100357 - DNA, 287 bp, Heterodera glycines
ccccgattgcgccaaaaaaactttttgcacccgctccaactttaaaaaatgtgtgtccccccccccggctaattgacgtcctcgcctatataaaaggcatgccttcgtatgggtaaccactgagtttcttgcctgatcgcccaaaaagcaatttgaatctcctgcctgatcgcccaaaacaaatttgaatctcctgcctgatcgcccaaaagcaatttgaatctcctgcctgatcgcccaaaacaatttgaatctcctgcctgatcaatctccccccccccccgatg

SEQ ID NO: 100358 - DNA, 670 bp, Heterodera glycines
tctttaaacttttgacaggaacagttaaaattggcaagaaaattgaaggcgaattaagctatagagaggtcaaagagaatgatgaaactgtggtaatgttttttaggctttaaaaaaccccataaaaggtagtaaaaatgggaaaataggtgccaaaaagttttaaatttagggatgtaatcgtaaaattttactcaaaaagcaacagaatttggaacaaaatcagtattgagattcacgttgcaaacaagtaacattttgagttgttcgggagaaagacgagagcgattgtcagtcaaaattcatatttttgggtgtatttttctggaatttttgtgtcaattcttaggggagcatttttcgtttttattgcatttttgttaacaaattttgggcaaaacgccaaaataattgtaaattattttttaaaattattttttagatttttagattctaaaaataaaagactagaaaatagttgctaataattcgaaaactagcttaacaacaaccgaaaaaacatgtttttcatccatttcagtccataggtagtccagaaaaaaataagtaaaacctaaaaattgtagcactaataaccatatatatattttatattaaatataaacttataaatattttaaaatatattttttaaattatcatttagatg

SEQ ID NO: 100359 - DNA, 384 bp, Heterodera glycines
tgcggtcagggtcgttttcgtaccgccgttttcgtaccgccgttttcgtaccgcaattttcgtaccggggacattttcgtacgagttcttgtacaagcgtcagattcgattagaaaaacttaagaactaatagaaccaaaatttatcattttttgtttcccattcataaaattttgtagaaaattcataactttaacaaaaataacaaaatccgggacaataaggtcgcatctcatagtttcgggaaatacacacgaagaaaattgttaaggttttcgggactgacattggcattggcataattatgatcattttgagggacaatattgttaagtccatctttactgaatttgtggaacacatagagtagagtgcaccatcatg

SEQ ID NO: 100360 - DNA, 1003 bp, Heterodera glycines
gcgctaaggcagagacatccgggaataataaataattgtcgtcctgagacaccttacttttctatgtctcaaaatcataaaacatttttggcattttttgtcgaaatttaagtagatttttattggccataattttcaatagagagcatgtacgggccgggcccgtatacggatttttacgggcccgtaacccgtatttttttcggctgatacgggttaagggttttacgggtttttagcccgtaacccgtatcggtgtcaaacccgtaacccttacccttatccgtacaattacgatacgggttattttattgggttgtttaataaatgaatagaaagaggaagagaaagggaagagtttttaagtggtcatattaaaagttagagtttaatgaaaaaattaattgaattccatgccaaaaaatccattgccatcttataaaggtttttggcgcgtagcgccctctagagacagtgtttaatagcgaagctatttcaattttaaaaaataaatttaaatcagttactttcagtgcccgtagggcactggttacaaatattaatttattatctcgttctggtcaaaactattgttaaatgttcgtaataaaatttagaacaaatctatattggtattttagtaaaaaaaaacttgttttttctttataaaaaatattttcaaaaaacccttacccgtatacgggcccgtatttttcctggatacgggtttttacggactacgggttttacgggtttttagcccgtaacccgtattggtgtcaagcccgtaacccttacccttatccgtattttctcaaaatcacgctctctaattttcaaccaaaaaatcatttttggcaaaaaatcgggactaaaaaataattcacatttaaccataaattttcgtatcttacaaattaacggaataattaacaatggaattggtccaacaaatattatgagggaatatgtaaaaaaagacaccgtttagcaagcggaaatg

SEQ ID NO: 100361 - DNA, 1003 bp, Heterodera glycines
aaataaaaactttgtgttcattttttaatcatcgtcatttaatttgttgttttaaaaaattaaaatatttaaataacgattaaataaaaaattaataattgatataattatttattttttaatttacttacatttcgtctacctccacaattttttctttctttttttttttggttgggtcacttccagagcaggaatcataaattatttgcttaaggacctccccgaatttatttaatccaatgaaaatcaaacaccggtgaattttgtttgggagaacaagatttttgacgacaaatgcatatttatataccttatttgctaatttatcgcgaaacaagctgagcgacaaaatgttgctaattaatatttcttcaaaaaccttttttatttatttttgttatattgctgccatgtgtaaggtaattttttaaatgatggtttaataaatttgaaaatcggaataaatagaaaataataattcccgaatgttgcttgactccggcgggccttcccggacaaaagtttaataatacaaaaaataaattaattaaattagaaaataaaaaatttcaaattaatgtttttggaaagtcatttttgaaaattaattaattatcgaataaatattgtttattcaccgggttttggaaattaaataatagaaaaaaaataaattctaaaataaaaattgctaattattcatacgttaaaaagtaaaatttttttagcggtttgcaacttcatcaattttatgcgacaggtctttctataactttttaattaaaaaaaatttttaattaatatttaaaacagaaatttgggaatgacatgctgctgtcatgcaacgtcaaccaaatttcaagagcaaaattcgcatgtcgacgaatttaattcagtccatcagtaaaatttacaaaattccaaaaataataattaaataaatttgttcagtcggtttcaatcaaaattcaatcggtcgccatttatggaatcaaaaatg

SEQ ID NO: 100362 - DNA, 63 bp, Heterodera glycines
ttcttatggaaggttatttgtatattgcaatactaagtccatagaacattattttagaatatg

SEQ ID NO: 100363 - DNA, 77 bp, Heterodera glycines
cctaaaaatgggtaaaatgccaaaataacaaattgaagcattattacgttttcagtggtgccgcggtcgttcagatg

SEQ ID NO: 100364 - DNA, 70 bp, Heterodera glycines
tggtcttttttttgagatttgacgctgtattttgaactttcagaatgtaaaaaatctcaacgagaaaatg

SEQ ID NO: 100365 - DNA, 254 bp, Heterodera glycines
tcgggacctgaaaatttaatacgcttacaattttggtattactcacccgggcaacaaaaaatgtttcggtactcttttgattgttccttttcatcccaaaacttcccccatcaaaaattaaaacaattccaatccccccacagcaaaagcactccgtcggactgatttggtggctgttggctcgtgaagttttgctgttgcgcggcaaaatcagtcgccagacgggctttgtggtggacgacaagctgatcatg

SEQ ID NO: 100366 - DNA, 124 bp, Heterodera glycines
  unsure (1)..(124): unsure at all n locations
aagcatcaccagttggcataaaaatgtatgctgacgatgttaaatatatatgcccatgaaaacgatgancatcaaatcagttgataaagcgatgagctnnnggaaaaatggtcaaaaataaatg

SEQ ID NO: 100367 - DNA, 141 bp, Heterodera glycines
ttggcttcggatgttttatctctttgctgcgtcggaaattggcctcgctgccgatcactcccgccggatttgtggcgaaccgtcgctgcacaccgtcgtattgtccgattcccgtgctgcaattttggctgctccgatatg

SEQ ID NO: 100368 - DNA, 333 bp, Heterodera glycines
  unsure (1)..(333): unsure at all n locations
aaaattctgaaaaaattcatgctaacgtaacttttgatgctgatcaaaaaagtctctgntaccaactgnatcagatcactccttcatggtgatctaaaaacncaaaaatggctgaaaatcgggaaaattttcgaaaaaaatccctagggggttgggaaaaattttctggaaatttttagtatgcccattggaaagagcaccaaatttactaccgatttgcgctttgaatggtggatctatgacttttatccgctgagatatgggcactttcatttcgctgtcttcaaaaactactgtatttcttaagaaaatagtgcattttacagaaaaatg

SEQ ID NO: 100369 - DNA, 576 bp, Heterodera glycines
tttggattgggcgccgtccgcccgccccattgggccaatgctcccaaccctccctcgggcgttggcatcgccgggggggatggcccttcccccgagggccaaccggcgcagtgttacgggcggccctcgcccaactctctgctgccacggcgcactttcgacggtcgccggccttcgccctcctcttcctcacgtctcgttgtggtgcccacacatcgaccaaattgtaccaccgatgcggcaaagcctctcccgcagccattacattcgctcctttcaattggcccaaaaagagtttggcattggcactccgtcgccggaggcaaaacgaaaattagccgacaaaagcctttttttgattgctaacagagaaaactgatttgggaagtgttgtctctttgggtcttcacttctcatccgttcagtctcttttctcacgtcgattcacttcccccccattcccgacgatcttttcaatttaatgtccatttgaccaccgtcgcccttttttccacaataaaaaattccttttcatttatcgcttctttttttaaaggatttattttcaggaaaatg

SEQ ID NO: 100370 - DNA, 1003 bp, Heterodera glycines
tttagcttttcacatttgtccattcgttggtcaatgaatgaatgagtcattaataatgactcattcattatccattctttcgttcgtcgccgtttattcgccaaataatcggaaaatgtttcagtgccgacaatacatcccccaaatttggagaaagcattatcaaaagaattcatcctttgcttcagcagaattcattcattcgttctgtcatcgcttcccatttttatttttatatttcttaaattattttattttttaaatttgttttttatttttagcttttttctcccatgccaatcgcacttttccacgtgctaacatttgctgctggtgttgcgatcggtgccttttttgtggctgtttttgggaagttaatcattcggaagcggcggagagaaaatgcgaaaaatgcacaaattaaagcataatttgattttaaatatttaaaataattatatttttacatttcattattaatatctaattccctttgtgttgtgtaaatttttatttccaaattcttactaataaaacatttcccaatttctctccgcgggagtctcgaaagtgtcgcggcgggcgacgatgactcacccgcccctctctcccgcccattttcccttttcttttctcccctttgtccattgtttatcaaatgcgctctgtttgtccgatcatattttggagcgcaaccccaaataaaatgaaataaatggagaatgaatgaatgaatgatcacgggatcaacgaacttcgcggcccatttcacagactgacgaagaagggaaggaccatcgatttcgtcgtttaagttctcgaagatgtgtaattcgtaataaaaatatttccacaaactgtacttactttgatttacttctgttttatctcaatttttctttcgtttttttaatttgattttattcaaatgtttattattttaggttttaaataattccgctaatatttgttaattcatttttggcctttctctgctcaaatg

SEQ ID NO: 100371 - DNA, 378 bp, Heterodera glycines
aattcagagagttgacaaataaatttaaaattttctgaaaaaattccgaaattttaaatattgtttaagaaatacgaaaatatttggctttacccgaccaatatattgcagttgctccgaattgaattctttccaattttgagcagctggacttaaaaattgggcccacaaatgttggccatttgcctcaatttgaataattcgaaatgggaaaattctaaaatatgaaaaaaaatatctaaagtaaattcataattttttttttaaattgattaagtttttatctaagtcttactaccagcagtttttaatagagagcccggacaggagtatgtataagatttcttcgggtctggtcatgaatattttgtaaaaatg

SEQ ID NO: 100372 - DNA, 499 bp, Heterodera glycines
ttctataagccatattctaaaaatttgaattttggtttgtgtccgaattcgggcccggggctcagaattggtttaaatggacgtaggattcgtgatcactagggctcggatttttaaggacgaaaaagtccaaaataaggccgtaaatttcaaaatgttattatcaaaaattataaaatataatcataaacataattctaaattcgagaatgaattaagtcactattagcgaaaagcaccgccgaaatttttggaatttttatattaaaattttgggggaaatattaatttaaagaggagtaacaattattgatctaatgtatatcttaataaaattttaattataatttaattatttttgtatattttttcctatatatatatattaaataacaggaaaagcatcaatttattgaataaaaatcaatttttcaatgtttataaaatggtttatgacatgttaaaatgcatatttaacaaaaattaaaaattttaaatg

SEQ ID NO: 100373 - DNA, 250 bp, Heterodera glycines
cactcagacacccgcaccagtctaccaattaccacctcctccacccccgccacaactcccaaaaagaaaacagaaggaacgacaacaagcggatgctcccgcatttttttccgcactttcggcagcatcattaggagttgaattggcccaaactaccgtcaatccttcggctcagcaaactcagtcacaagagtcaaattttgcttcttctatttcggcggctacaactgggctcgattttggtcaaatg

SEQ ID NO: 100374 - DNA, 57 bp, Heterodera glycines
ttttttcagattgcattctacggggatgctggctatactgaagcatctgccaaaatg

SEQ ID NO: 100375 - DNA, 1003 bp, Heterodera glycines
tttcgaatttcacatttttggtttaaaaaaagttttaatattttattgaaccaaggatgactttcacttcgtttccgtgtatttacacagcgtccgggaaatgagctcctgtaccagaaaagatttgcatgtgtggctcagtggtttttgtaagatagtaaagggacaaagggtggtggttcgagtccgttgtgcaacatgaatattttcatttatttttgtcaaaatattaaaaaatcacgatatttgggaattatttttgaaggtttttgccaaccaaattggataatcttggtatctttcgaaagctcttgataatgagaagctttttctaagcaaatgctaagcgatttggtgtaccagagaaaagttatgaggctctaaaattttgtttttcttataacttttgaaatagagcattaacaaaaataaattcagcattaatagatgcagaatttttttctctaacgatatgcaaaatttcctatggatctaacatatagaaaagaagctaaacatagcgaagtaaatgttgtttttcctaataataaaaatattagatagtacgccaaaaggagacaaaaaattagagaaaaaaagataatgttttctctggcactctctatttattggtacacatctcgttttttcggacggtgtgtttagactaagtttgaaccaaaaataaaattcaaagatttgaattttcgactttttgttcgagttcgggtccggggttccgaattggtcgaaatggatgccggattcgtgatcagcaccctgacaaccattggaaccatgttttcatgacttttgaaaacaaaaaaaaattggcgctatatgttatcatggttttttatcacaaaaaaattttgcaaaacaaaagggtcccaccccttttgtttcaaaaaggcccactttccatatagcgccaaaaaatttcttcaaaaaaggggggctaccatcggcagtattaccaaattaactttaagagtattaaatg

SEQ ID NO: 100376 - DNA, 445 bp, Heterodera glycines
ttttgagggtggggggcgaagttcggatccgatcggtgtacattatttttatgtgcattttttgattacttttacatgtttaatttcatttaaaattaaataaatattatattattaattttcattttaataaatataaatagttttgattaatccataaaaaataaaattttttaatttaaattaaattatttttttgtgaaaaatgttttaaattaaaataataatttatttacttttattaaagaactcctgtattttttaaattagaatttgtaatattaatttcaatttaaataaatattcaatccctgtacatttcaaactctctttttaattaataaaaggaaatttattttatttttaaaaatttattaattacattcaatttttaatcttactttttaataaacgatttccttaattatttaattttaaaaccatg

SEQ ID NO: 100377 - DNA, 758 bp, Heterodera glycines
tttacgaaagtctaggattggcggctggacgcaagagtcgggcttggttggtcgagagcctagagaaggcggctgtcggttggtgggttgagtggagattagccgagagcccgagagggacggctgacgataagagttgagtggtgaaagccgggagcctaaagggtcggcttaagaggacggctgacgactcaattgagggcttgtcggaagcctaaaggggggctggcgacaaagagttgagtgatgaaagccgggagcctgaaagggcggctggcggcttggagaagagtgatgaatggtcgaaagcctgaaatgggcggctgacgactcggtgagggtttgtcggttgtcgggagcctaaaagggcggctggcgacttgagttgagtgatgagtgccggaggcctaagatggtcggcggacagcgaagggttgagttgccgggagcctaaagggtcggctggcggcagagaggagtgatgaatggtcgaaagcctgaaaggggcggctgacgactcggtgagggtttgtcgggagcctaagagggggcggctggcgacttgagttgagtgccggaggcctaagatggtcggcggacggcgaagggttgagttgccgggagcctaaagggtcggctggcggcagagagaagagtgatggatggtcgaaagtgaattgaatggtgaagggtttgtgttcccgggtcgtggcaccagaaagtttgtcggaaaaggagggggacaaactggggggatg

SEQ ID NO: 100378 - DNA, 98 bp, Heterodera glycines
ggtttgatgagcaaatcaaaggcaattttgaggccgaagagcaatttattgcggaatgctgggaccaatttggaataaaaattgatcgaacaaaaatg

SEQ ID NO: 100379 - DNA, 1003 bp, Heterodera glycines
tgaatatacttaattctgttttaatgcataaaaataataaaatttgttaccaaaatatatatatatatatatattgcattatcgtgcttattattttcattattttaaggaagtaaacgctaatgtattgattcaaaaatggcaagatggcattttaggccagcaattcgaaaagtgccacctaaaaaacagaaaaaatcagctggattagacatgaaaaggaaaattattcaaatagcaaaaaaaaaaagtaaattttaagggaaaggaaatttgacaatttttaaaatttaattgcctttggaaaaaaaagaaataattgccaattgaatttaatgggtggtttttaggggtaatgaacctgtggcttcatctgaaaatgcttgattaattttctctgtatagattttgctaaatctaacaattttgaggatttttttttgtgtgacacctgataatgagtcgaatttggttctatttttggttattgaacttggtttggtttgcggttgttaattaatttgctttccaattaatgggtcattaaaatttgcagcagccaattgaacatttatttgttcatcactttttacagttaactttcagtgatcagaccgaacaaagtcattatcatttgatttcttaattgactgatcttcggttggatcgccgccccttttgggtcggtcggtcgctgctgcgcaatgacaatttctcaccattaattacacttttaattgcactacctttctgcgcaactttaaaagtcatcaaattaatatcaaaaaaatagctgaagtttaatttttgcaaaattaattcatcgatggataaaaaataacaaagcaaacaaaaaaaagtgatggaaatgggaaaaaggcaaaagagggaatgagagaatgactgtttaaaaggcgccaaaaatggacaaattgtcagccaatcacacccaattaccattgcctaattagttaataattgtccatcaattaacccgccgatg

SEQ ID NO: 100380 - DNA, 1003 bp, Heterodera glycines
aatatgtaaaatatcccgaaatatgtaagaaaaacccaaaatatgtaccaaatatgtaaataaaatttttaaaatggttatttttttggaaaaaaaaattcttcggaaagggtgaaataggcacaaaatgccataaaaatgacctaaataggcctataatcacattttagtattttaaaaattagtttggttaagttttatttttcactacaaattttataaatttacaaaaattctcaaaatatgtaataaaaatatgaaaatatatacgaaaaatttgccgaaattttggatttttttttttgagaatttccgaaaatttctctaaaaaagccttaaaatatgtaaaaaaaaatgtatgaaaaagtccgaaaaagtccaaaatatgtaccaaatatgtataaaatttcgaaatatgtaaaatatgtataaaaccccgaaatatgtaaataaaaatcccactttttgtccgcaaacataaaaaagaaagtgtttttcctactatttagagcatggagaagccaggaaaaaaatatgtatttacataaaattgacatccctaattatgccccaattaagtgaattatgtgttccattaaaaggcaaaacacataaatctttcgaacgacgtgaagaaaccaaatgggaaaacgaaaaggacagaaaaatcacgtgaaaatgagaaaattgaacttcttacataaaagtggggaagaaattttttttttttgtaaaagaccatcatggccatgtggttatgagcaaaagctaaatctaaaacctaagctttaggcttaggcctaagcttagacttggttgggcttaggtcaaagattacgctttagtttgtaaaactttttattagagttgaccgggaccgggatcggggcgggaaatcccgggtttttcaggtcccggttccggtcccggtttttggaaaaacagaaatcccggtcccggttttgccagtcccggcgggactaaataagcactggtaaaaatg

SEQ ID NO: 100381 - DNA, 223 bp, Heterodera glycines
ttttcggggaaaaccccgaccccgaaccccgagcttcataccccgacaaccccgaaccccgacccttaaccccgatcggggtcggggttaaatatacacccctaagaatggcattttcgtgggagaaaatgcaaaaaagttagacgaaatttgaatttttttaaccatttgccaaatttttattaaataaagaaaatttgctcaattttggacatttggaatg

SEQ ID NO: 100382 - DNA, 687 bp, Heterodera glycines
atttggatgcagaaaacacggattttgagcgaacagcgcccacgctttgaattgattcattcaccaccataatttaaatctcggcgttgtgataaaaaaaaaagcgccccaataattatctattaataaacaacttaaaaatatataaaattttcataaataaaacttttaaagtaaattttgtgaatttctgatgatctgatgacaattattctgaaattttaaaatttatttgctattgttgtaacttatagaaaatacttaactctatcaaaaaattgtctttttgagtaaattttatgaattttgccgaaataggtcccattttgacggatttacgaaatacgctagcatattattacgcaaacatatttttaaataaaaattatgcattcattttccttgaaaaattggcaaacatttattaatttggtgccatttcccctgtctttgtttatcaaatgacgcagctgaatttattgattttatttatttttttattaataataaattggatttagaaattttattatattttaaacataaaaaaatttatacacctgaaaataatatttaaacatttataacaacaaaataatgatgcgatcttttttattaatacttttgctgataagcttgatccatcaacattgtgaaagcagtgataataaaaatagcatcagcatg

SEQ ID NO: 100383 - DNA, 457 bp, Heterodera glycines
ggtggggaagtaaaaccaatcaattccgaggccttaaaaaagcaaaaaggtgaggggagcgcgacaggagcggaaggcagcagccagtcagacagcagtgatcagtattttcggcaaatcgcccactcagtgcacaaacttgaacgtttctctgtctcacgccacatcaccgaatttgtgctgaatgcccgggtcgaagaaccggatgaggtgttgcgaaatgcattacaaatgttgatggcccgcgcaattcataactcagagcagcaaagtggacgaaaagttgtcaaaattggcatcacgttgcagggcagaggtctaatattgggggagggggtgaacgctttcattatgtatgtagaatgaattctgtacgttctattattgtacaggattacaagagccaatcgtgctgcctcttcgaccgcccgaacagaacaccagtgatacactgatg

SEQ ID NO: 100384 - DNA, 274 bp, Heterodera glycines
tccgttttggcacgggtggcgaaatggatcaaaaacccccccgatgtgtggtgagaaaatttcgctaactgatcgtctgatggttgacagagaaacaagtaattaaaattaaaattaataattttaattgaaaaaaatatttatataaaaatattaaatattataaatatttaaataaaaacatatttatttcattccatttttatcagtccataaaaattgctttgcttgttgcttttgtggggcaaatttaaagcccggtcacgcggccatg

SEQ ID NO: 100385 - DNA, 88 bp, Heterodera glycines
ttattaatttttgaacaaatatacaccaacatttaaacccataatttgattaaattcgaccctataattccatggatcggtaagaatg

SEQ ID NO: 100386 - DNA, 69 bp, Heterodera glycines
  unsure (1)..(69): unsure at all n locations
aatgagcttctgcattattgntgccacggacgacttggacgaaatttgttcgagatttatttcgtgatg

SEQ ID NO: 100387 - DNA, 651 bp, Heterodera glycines
aattttcccgattcaagtgccttttcaaaaaacattcgatggccacgttcttttccctttagttatttaatgttctgttctcatcaaataatccttcattcattcattaattaattttggattaatgaaatcttttacggaggaaatctaatcacttttactaatctcagatacatccataccaaaaaattgatcttttttgttcgagatcccttattaagggggttgtgacttgaaaaaaccggggattaaaaattttttggaatcagaaacaagaaaattgcaaaaaatcgggaaaactttattctaataatataagtaaggcccattaaaaacaatcaatcaatcaatcttaatcactgatcaatcttttacgaatcagactcaaatcacacctaataatacactggattaaaaaaaatcccgcaaaattatggttcaataaatgtcgggtcagcaccatgttccgcgcacccatttccacgtaaagcagcgagacaacaatggcattgcggtaacgaaaaagaaacaaaaatggcaaaaaaaattttaccaattttaattgaatgccaaaaatgaatgaatgaaagttcggtccttttttttggttagggtagcatcagagaaaggggcaaaaacgagccgagaatg

SEQ ID NO: 100388 - DNA, 61 bp, Heterodera glycines
ccaaaaaacctttaatttatttatattactgtattattacagttattccttccttcgaatg

SEQ ID NO: 100389 - DNA, 141 bp, Heterodera glycines
aaaaaaagtcattggtttacatggcccggatatatccgcaaaaatttcggtgaccctcccctttttttcatgtgtgacccactccgtttccttttttttaacaaaaaaaaaaagtgaattcgacaattttcaggtctcatg

SEQ ID NO: 100390 - DNA, 127 bp, Heterodera glycines
  unsure (1)..(127): unsure at all n locations
gcattcagctcaatgatacatgaccgggtgaagagaggtgaagacgcacaatgacaaattgatggaaacacttcgacanccagagagaggaccgagagaaacggcgacggagttttcacgaggcatg

SEQ ID NO: 100391 - DNA, 1003 bp, Heterodera glycines
atttctaacaaaaaaatgctcaaattgatcatggacaatcaaaaatataacatttgaacattttaaacgtgttttgaataaatttgtgaaaatgaggctttttgacccaaaatgaggcttttttgcctgccaaatgaggcttttgaaaattttaatctggcaaccctgattaataataatgtgtaaataatgtatttatttatatgtacatacataaataaatcagtgttttttttcatgaagtattttttgtcgcatggcaaatgaaattttcaaaaccaattcaaaattaattaaaaatcagctctaaattcatattcgttttcacttaaaaaaattacagtattgaaaaaattgtggtgaaattttattttaatatgttacggaaggacctgaataaattaatggatttaaaaatacaaaaaaaataagaaaattattttaaattagcaaaagtataatttactgttaaataatttgtttgaattttggacattatgagaatcaagcaagcccgcgcaccaattagcttcgatctttaaattgtcaaaaatgatgaaatttacgaattgaaaaggtttccattagcagcagaaacaaatttctctttacgctttacgtcactcgctttgttaagctttaatgcttaatattaaaaattgattgttaatagaaataataattacgtaattcgatttgctgcaaaattattttttgcaaattcttctgtttgtttatgattttccattttcaataataatttaatcgcttttttttttgcaaattccatcgttttcaaatgtgccaatgccaatggtcgcgccaatgtgcgtaattcaattgattccatcgattgtatgcatagcaaattttccctcttcctcataaatttatgcgcgtaaaatgttcagacatacatttattccctcataataatatttaattattattaaactatcactaatattttaaattaattctcgctcatttagtgactgaaatg

SEQ ID NO: 100392 - DNA, 672 bp, Heterodera glycines
ggttgtacttgtgatttgtttttgttttacctttccccaaagtgatgccgttgcccattctcttcgccaatccgctgattttgccccgacaaattgtgcaccgccgcgtccaaaaaagaagtctctcctgaagcagtccgctgttgctcctcccaccatcgtcactgcccatcggacggaagtcgctgctgcaaacggaccggacaatggacaaactttggagcaaacgcggccgatagtgggccattgacaagcgataacgaattgataatttatcttacaattagtcagtttcgatgaccaactccaaacggagtgtgacgtttcgggacggcgttaacccaggccatgatggaaccacgcccaattcacagctgtccggacaaaacagtaccaatgcggagtgcgtaattttattaaaatgcaactaattgccctactttgtcattttccgcaggtctgaccgattggttgcaggtccatctctgtaccaatggttggtcagtgggagcgaccgaccgaactcgacagatggccattctcttgttaaaaacccattcattccaatggcggccaatggcacaaatatttcgccaaacgacaacaaaaaagtccgtcatattagtaaaacggagcaatccaatttccatcgaacagttgccacggaaaatg

SEQ ID NO: 100393 - DNA, 537 bp, Heterodera glycines
atggcgagaaatgttcataaaatgcaatggaaaatgaatggatttttttaaatttggacgggttcatttgcacgaaaaagtgttgcctaaaatggatggaacgagggcgagaaaacagcactaaaaatatttaattaaattcaaaattcaaaaaattgacatggagaagagagaagcattggttaatttcacccattttacaataattatagctaattttttgtgggtcccaaaaaccattttcttattaaattccacaagttaacattcttaaaaaaataatcctcttcattcaggcgagcaacacttttaagtgttaatccaacaacattatgatttgctattgtgcatattgactataaaatcggaaagattgcattttttttaattttaaatgtttaaatttcgagtgttttcaataattatttttatttataattttattttgtatgattatataaattccatttgcgttggtttcccgttgaatgtcatttgttgtgccaccaatttttgccattttttcctccccaaatg

SEQ ID NO: 100394 - DNA, 421 bp, Heterodera glycines
tttgaagcttctaggatggatttctatatccatatttttccatatttcgcgatttatgtccatatttccatagttttccatattttggcattttggtccatattttatgtccatattttggcatttttcaaaaaaacctctattagaacggcccccatcagctaaattagcctttttgagcccaaaaaccgaaaatttttcaaaaaatcattttttcgccaaaatttctcgagaatattgaataaatttaaattttcttaaaaattaataaatttatgtcaaaaataagcaaaaaagcgaaaagttcgcttttgttgttgattttgcgctaaaaaaataataaattttagctttcatgttttttttcttctaaaatgattgcacagaattgccgaaaaaattcgagaccaatttccgaatg

SEQ ID NO: 100395 - DNA, 118 bp, Heterodera glycines
tttcttgtcttcattctcatttttcctccgctccttatttttcattttttccattttccattttctttttttcaatttttatttttttttatttttcagtttttcatttgtttagatg

SEQ ID NO: 100396 - DNA, 1003 bp, Heterodera glycines
tgtataaaaatttgtaattcaaaattataaaattaatttaatttaaaatttgcaaaaattacaagcaaaccctaaaatatccgatgaataaatgatctctttataatattttgcacaacatataaattaccaaatggaatataagaaattatggctatgttgcgaagtataaataataaaattaaatttcaaatcaaattaataattagattttaaaaagtttatggtaatttaaaaacgcaatgaagaaacattttatgaaatggcattgtgaaaattaatatactaaaaaaattatttttaattttacaatttaagaaaacaaccaccaaatctggaattcatatacctattaattatttatgcaagcattatttataagacaataagatcaatttcaggtgaagaagcttaagtcatggcttagattataaaaattattataataataattatttaaaaacaaacaaatttttaattattgttgtatcaacattaattacctagcaatcactatatatatatatttgatatttatttttttttgttgcaatattttttagtgatgtcttgatgttaaacaaacaataaatgtactttaaattaatgaaaaaatttaataaaaatacactttaaatttataaaaaaaaggtttttgctactgaaatagggttttacaatacatgtacgtggggaaaattaaggcacgtggtgtgggtaaacatcaaaataaggattactttaaaatttcaaagtttttgattataaaaaataagaatattaaattgctaacaaggcataaaaatcagaaatttttaatgccgatttcgactaaacttcaatagattaaaaaacccgagtttgcatcgacttttccaccggcctcaacaattcgctcgagttgaatagacaccctttgccccggcctgaagacatttacagggccatcagcggctccgtctatttctccaatctcgacctccgagacgcgtatttgcagatg

SEQ ID NO: 100397 - DNA, 327 bp, Heterodera glycines
ttcctgaaggattaaatggttaattagataattcctttatttttgacgaccttcttgcaaccattaattatctaattaaccatttaattccttcaggaatggcacggcccaattaggtaaaattgtcagaatgtttagctgaaaataacccattgttcttagatgcgatcttttatcaaaatgggaaaatgaagcaattgatgatgccacaaaagaatggatccaaaagaacaccgtgccctcgttgcaaagtttcgaaatacaaaaatttgaaatttttagttaatgtagatcgaaattgagattaactatggctgcccccaaatg

SEQ ID NO: 100398 - DNA, 95 bp, Heterodera glycines
ggtgacccaaaaaagaaacaaatttgaattggattttgcttatcccccaatattcccattgatttttatttcagcaaaatgatgacccaaaaatg

SEQ ID NO: 100399 - DNA, 183 bp, Heterodera glycines
attattttaatttgataggtaaatgtttggacttatcgcctaaaaagtgacgaaaaattgggaaaaaactcataccaaaatttgaaaaatgcacaaaaatatttaattgaatcggcaaataaagcaaaaaatctgcaaaatcgtaaaaaagatggtggaagagacgcaaaattattaaaaatg

SEQ ID NO: 100400 - DNA, 844 bp, Heterodera glycines
ttactagagaccgacatttccaaatctgccggaccagaccggactggtattttcaaaaagtaccggattctggatccggtctctcataatccggtcaatccggtaatccggtcaatccctatttttcaaattgccggatccgtaaccggattccggattggtaaaaatttcaatgttaatttagggaaaaaacccgcaaaatgtcatcaattatatgtaaaattcggggcaccagaaaatgtcgccatagtaaagacaacgcgccgaaaaaataaaaataaaatttcaagaaaaaattttaaaaaattttattttaaagttttttatttttgaaaacctatgtttaatggaaaaataataataatgcttttttgcggcgtccttattacaaaaaaaactttgggaatggggccggcggtgccgataggcgccaccgggaaaattttttgaaaatttaaggcaatttgttaacagattttcactaaaatgacaattttttgattttttgggctccggtcaatccctattacaactttttaaggaagctgtgatacaacctaaactattaccaaaataagggagggttgcgcgacaaatttcccattgtatcttcctttcctttattttactccattgtcattgactctccctttttcccactccctccctctcgcacacacacgcacgcgacaacagatacgggattcaaattgtttgagtgaatgcatagtataaaagggagttgtttcagcatttccggccattcctttccaaataatattaatttattcctgcatccgtgccatcatcaaacgtatttggcgcaccaccgcggcgacgcatg

SEQ ID NO: 100401 - DNA, 485 bp, Heterodera glycines
  unsure (1)..(485): unsure at all n locations
caaaagttggacacaattcggcagtatancagcgcgacatcattcgtacaagccgccanaacggcaattgaagtgaatttgtttttttcgaatcgaattagcatttcactcatccgtagtgcgcagatttcaggaattagggaaagactcaaaaccgggaattcggggggtggggtgtccgtatttattagactgtctaataatcgtgggcgggaggnatatgtggtggattagggataagtccttaatagtcagaagaattgaggaggctactgggttaagccttttttaacagattccttttctatatatttttttgaaaatcctctaatgaattttaacattaaaaatttttagtttaaaaaaattttccttgactttggataacagagtaggataaaaggtcgctgaacgattttttggatcataactttttctttctaaaaaattaaatcattcttggaactcttttaaatttcgtcatg

SEQ ID NO: 100402 - DNA, 438 bp, Heterodera glycines
aaatttgcataggtatttcttttaaaaatccttatttaaggaatcaaattggcccacccattccactttattatttcttctgcctttttttctgccttcatcgccttgattaatttgctaatttaatttctaaaccaaaatttgtcaccttttctgtttgtcctttgttactctaaaactgtgaaccttctgaatccgaattcggattctgattgattttcattgactgtttgctgaaattgagcactcacatttctggatttctttccctacattttaaaaagaatttcttgatttcagttttttcgatgataagacacgacatacaaatttaactaatttttattgttttttcattttcgtcataagtatgccattatttgttcagaaaaaataagcccagtccttaatattcatcataacccatccttctaaatg

SEQ ID NO: 100403 - DNA, 54 bp, Heterodera glycines
agttcaccaccccatccttttcgaccttaatattttgggcttttaaaggtgatg

SEQ ID NO: 100404 - DNA, 157 bp, Heterodera glycines
ggtccgaatttgtgaaaaatttttaggagttctgagccatttaaaaacaatttttgaccaccggcttgagggtacaaaaaatatggaaaattccttcactattttcagggtcgtgaacgtcttttgagctgtctgtccgagtgtggtgcggaacatg

SEQ ID NO: 100405 - DNA, 91 bp, Heterodera glycines
tcggaatgggtacaatttaaaccctttaacgagtatctatgagagggcaagtctggtgccagcagccgcggtaattccagctctcaaaatg

SEQ ID NO: 100406 - DNA, 344 bp, Heterodera glycines
agcgttttgtgttttttgactttaagtgtacaacgaactttaagccggacccgcaactgatgcgattcaagcatcaggtaatttttttgagtgggtaattaaatttgaaaaattcaaaggtcaacttctgcttcgcccacgtgacttgcaccaggtgcattgaaaagggcatatgggaccaggaattggagaaggcctgcgcgctttgtggccgattccgaacttatgcctggtccccgttcgaattctggcacacggacgtggaatgccgcaaggtcgtcgaagacccactggcagccttcaccaagtggttgctgaacttcgaaacggaagtcctcggcatg

SEQ ID NO: 100407 - DNA, 114 bp, Heterodera glycines
aatttttgataatcaattttcatttttgattattcttttttgcataataaattataattctcttaaaattaggtttgaaattacattaattgttttcccatttgctaggccatg

SEQ ID NO: 100408 - DNA, 561 bp, Heterodera glycines
atctatattttggcactcccttcccagcagaaaatgttccccccgtcttcccatcagttcattctgttggcagtgcgctttcatatttgtattttgttcttattttcctccgactcttcccccattttattgttgcggttttaaataaagtgatttgtctccgtcttggaaatatttgtggaggagaagcagtgatttagccccgacccaaacagcatttatttagcacgcggcgctcctggcgaagagttagctgtgccggcataatggattttggactgctaaaaaactgatttggagaagcgaccagaacaaaacgcattgctgcggttctgcattcgtcttttgcttctgacagaacaaacgcattgctgcggttctgctttttaacgcattgctgcgaatttcaccgatttcgtcccactgctaacgcattgctgcgagaagtgaggattggtatttaacgcattgttgcgaacgctttgagtttggaatcgccgacttttgtgcgcgtcttcaagaattatgcaaattgttcgaccgccgttgcttagagggatg

SEQ ID NO: 100409 - DNA, 311 bp, Heterodera glycines
aatcaatttacgaaaaaactaacatttccccgtgaaataaatatgaatttatattggggaaattattagacagagacatatgtatttgtagacaatttttaatattttcattctaaaagaataattatttcacgggcatttcatacttcgatgacattctctcctacaattaaatttaaatataatattatatcccagataaaaaaaacgaaaattgaaatctttcgcttttttaaatgttttgaccaaaaattaatcagaggttgccatttggggtcaaatctgccccgtccattattcagaaattaatg

SEQ ID NO: 100410 - DNA, 586 bp, Heterodera glycines
tacaaacaaaaaaagttatggtggtctaaacttagttcagacgcaactggcccgtttcgtgcctggctgaccagctcacccaaacaatgaaaatgccgcaatgaaatttttttggatttcatttctgaatttttcatgcaattagcctttagattttctcacaaaaaataatttcgtttaaggaaatgtttgcgcagaaagaataaatgaattttttaattataaatatatttaaaaagcaatcaactacaaaaaagaaaaacttttttcgtgtaacctgtttttcggctaaaaattatcatttatattttcgttttatgtgggttttcaatttttattcatttcacaatactcaaaaaaattattattcttaaatcaacgtattactaataaattggcatcgctaaaatcaatgtttgtgagatttccataagattttttttaatttttcatacgtcattaatataaattcatggattacgcaaatatttacaatgtttaagcacttatttaataatattattgttcatttttataaaaatataaaaataattctaaaattaattcaattctttcagtgaaaatg

SEQ ID NO: 100411 - DNA, 497 bp, Heterodera glycines
  unsure (1)..(497): unsure at all n locations
gcatatcggtcttttcaaactgtttgttcatggctanaatttcaaagttacattgatgcgacaaaagcaattccatctcatcaacaaattcagaaggttggcaggagtcgagtcagaaaaatacaatttttaatttaaaagaaatttcattgaaaactaaaaaattttttttgctaatttttcaatttttgctagcaaaaaaatcattttaagaaaaaaattaaaaatttatacgaattttatttgatcgaaaaataagcattgaaaaaaatgaaaaatcgctagactacctaaccgaaaaacaaaaaagaccaccaatccgctgggggtacccaaaaggaatccatttattgcactttatccgacttttgattctggcaaacatttcccacttttcttaacagtgtctcgttgacatcggtgacaagccgtcaaattttgttggcagtaaaaaatggattggatcattggaattgagcttttgcttggagacaatg

SEQ ID NO: 100412 - DNA, 618 bp, Heterodera glycines
cccttagtcaaatagacatttaatgcttggctaccgtttcattgtttttcgtcgagggccaaacatttctgcagtattcaacatgctagtattccattttctagatatatacagccaccatttaaaaaagttttaaattcaaagacataatgtgaatatatgctctttaaagggaaatttatagcggattaactaaatttctgaaatttcaatttatgttctattttattactcattttcattgtctttttcagacttttctcggcacaagaaattaaatagttctctatttatttaaatgctaactttgcataaataatttgataaaaacaaaattttaccgaaaattttttctctcagttgaaccaatggcaaaacgaacggtggcattgaaacgcaaccgaaaaagacgacggaaaaaacgtaaaggcatttggcaattttcaaaaggttttccaaattttcagttctgccttttgccctttcgttgtgaatcaggcgcctgttaaggtcgaatgcaaatccgccaaatgtatcgtaatttcgggtgttatttagtctaattgttaactaaaatgggaggaaaacattttatttatttttttctataaggatatg

SEQ ID NO: 100413 - DNA, 188 bp, Heterodera glycines
ttacccgctgtcattcattaatttttttctctctcaattaatgcataatgggattaccaaataatttttttagcaaaataaaacaaaatcttattacaactgaacgacttcgaatgtctacatcagggggctcgtcaaatgagttcccctttggtacatcccaagccttcgggcaggaaacaaaaatg

SEQ ID NO: 100414 - DNA, 1003 bp, Heterodera glycines
aaaggaagaagatattcagccaaagaatgggaataaaattaattcgaaaatagcgaaaaaattggggaaaaatcgtcaataaatttatgaatggattaaagaatttggtcttcaaaaaacccaaaaattaatcattagcacattataaatttgttttcatgtttattttttgtcatcataacaatgggatggatttatttttaaaaattaaataatgctcatggcaaaaggagtaggatttttgtttgcagattaaaaattgattatccataaatccatttaacttgacaaatctgcataaaaatttttcttagattcgcaaagatctttttttaatttgtattagaaaaataaatgaatttttataataataataataattatacatttaatagctctttatatttgttagaaaaatattttaatacaaaaatggatcatatggaagcaactttgacaaagtaaaagcaatattttgaggtttttcacataaataattcaaatcatttatttttttaattcagaataagatgaaccaaagaaaatgccaaagaataaaaggcaaaaatggaaagggcaaaagcaaatcaaccgaatgatcagcaaaaatacttgcgcccatttttttctaatttgagcctaaaaatcacaaaattttccatttgcgatataattattaatgacagaaataattcaaatgtttgcacagttgactttacattttatgtgcaagcattttcctccgccatttaaccaaaaatacatttatgattgacggataattaaaattcgtaaaaacgagtttctcaacgccaaacaaaatagattaagaattactaatgatgtcattaaatgcagcacagattagtcagcccaatgctaagtctccgttcccaaaatatttttcacaaaatttttgctatttaaacggaatccaattttgcaaatttcaatcattgcttacaattaaatccgaaaattatataatttatcttgaatgatg

SEQ ID NO: 100415 - DNA, 205 bp, Heterodera glycines
ctgattgagggggtcccttcgggcggccgcagtcaaccgcctgtggcgctcgtcagactgcttcctccgccctccgtctcgccccactacttgctccgtcttccatgctcccttttgcgaagttcgaaagctgcaagtggtcttaagcgttttttggctcacttaaattggttttttttatcagtaatttttagagtttttgatg

SEQ ID NO: 100416 - DNA, 141 bp, Heterodera glycines
tcagtacattttcatgacaacatatgtcctcttgtttcgtccattttcggacggaatatgcgtcgcgatgaacgcctttctccttcagccctttcttcgtgcgaaagtattaaaaagttacgcgaagcaatcaccgaaatg

SEQ ID NO: 100417 - DNA, 154 bp, Heterodera glycines
ttttgcctgtttttggtctccaaattttcttaaaatttgctaggctgttttccgtgccttgaggggtttggaattaattcgataatccatacataattaaacgcattcaaagaatggcatcatcagtgacgggaaaggccactcgcgacgcatg

SEQ ID NO: 100418 - DNA, 912 bp, Heterodera glycines
ttggatggacattttcccactgttgaccgtcctcaactcggtttaaaattggaactgctttcgcccgtttcgatgttttagtggacaaatattttgatggcaaaaaaagtgattttttagggttttttttaaggattttgtgcgaaaaggggcctccaatttcaaacgaattttgcttaaaagcaaaattcggttttttttgttgtaaaagtgaaccttttttttagggtttttgcttatttgctgattttttatgttagaaaatcacatacatttttaccaactccagctagacagatttattttcctttttcatgtaaaaatagtaactttttttagggttttcgttaatcatatttttgtattttataaaatatttcgttactttttcagcacatgagcaacgacgtttggatggaaattttcctttttttgaccatgctcaactcggcctcaaattggcactgctttcgcccgtttcgatgttttagtggacaaatattttgatgacaaaagcaaaatgactgtgggccacaaatcgaaaggactaacttaaatgcggtaagtatttaaagttttctcggttctaaaaatggcccgaaaaataaaaaaaaattcaaaattcgtaatgtgtgtcaggtttttttagtgtcttattgttacgtatttttggatttaatgatttttaagctggaccttacatttatatttttccattatagtcataaatttctttgtttggcaattacatggcataaaaaatttttttggtaattttgtatgtttttgcatttttaatagaaaaatttttgtttcgtgtaaaattgctcagagtttcggtcaacaaatttttgtccagccctattgcttccctttccgctaaattattaattttcataatttcagttgatg

SEQ ID NO: 100419 - DNA, 115 bp, Heterodera glycines
tgtccaccaccaccacttccaactagaccaccaccagtcgaatcattttttaaattaatatattttaattcgaaattttaagccattaccaccacgagttccatcacgagaaatg

SEQ ID NO: 100420 - DNA, 139 bp, Heterodera glycines
gctcaagtcggcaccattcagggaattggtcaaacatttgttcaacaactaaaagtctcagttggaaacactgaaatttacgacagcggaaatttgtacccatataaggtttacattacgaacactttcgtttccgatg

SEQ ID NO: 100421 - DNA, 408 bp, Heterodera glycines
tctcttctctctcattccttctcgacttattcccgaaaataaattggtgccaaccacacacacattcattaaagaattaaattcctgtttagcgtttttctctttttagttaaaaaaagaatatttgaaaaatttaaaattgaattaagaaaaagcaacccaaaaggtaaaaatatttttgaaaattttcgagagaaatatttttcaaaattcaaaaattttggaatttgttttaaatattaaacagcactcaaacaaaatcatcagctcttgctcgctaacattttgtaatgtcgaaattcgcttccaaaattttagtttactaaaataattattgttaaaagagaaaaatccaattaactcagctcatcaacaagcaatttccacgcctaattacggcacaaaatg

SEQ ID NO: 100422 - DNA, 200 bp, Heterodera glycines
ctttagctttaagttgaaattttattatccttgaactaataaaaattttgttttaagtgatctaaatttaaataaatgtaagattattcaaaaatatttttttttgtttaaatctaaagaatttcgattgatttcgggagcttgtccaaatttaataattaaattttattttttcagttggggcgacaattttacaaatg

SEQ ID NO: 100423 - DNA, 561 bp, Heterodera glycines
atttctgttggagacagagttttactcagaaattattcaggaaaaataggtacttcaaagaaattccacttaccttggaaaggtgtatttagagtcatagacatagaaggggtcagaacaacaatactaagctgtaattcgcctcagtctaatccaagagtagtacatattaaccaacttaaaaaatgcatagaaccccttgggccagcatgcactattcctaagcttgatgatgatgaagaaaaagcattacatgaggcaaatgcaaaggaattaataaatgaaccgggacattcccacaaattaggtcaaaaatcaaattctgaagttgaaaaagaagtagaagaaacggatgaacctgagcaaatcagtccgagatataatcttaggaaaaaaaaatccgagagcaagaaaactcagtttaaataattaattttgctttggcaagtaaaagttcagaaagaggggttaaaaaaaaaatataaataaataaaacagttttaatttaataagaaaataaggaaacaaataaaattattagtgtcgtatccattcagcatg

SEQ ID NO: 100424 - DNA, 1003 bp, Heterodera glycines
tcgacagtgttgacatatgtatttggatgccatttacgtactttgaaccgtgctgagtcgaacaaaaaactcagtgatcgataaaataattaaatttaattattcgattctctaaattcatataattattatattcatcaattattgaagattttttaattttaaaatttaaaaaaatgaataatttatttacttcgaggttattcttggacaagcaaaatcttaattaggttggacttattaatattttttcagaatcattaaaataataaatttattaaaatggcaaatttttatattattccttttttaatttataattaaattataatcgtatacttaaattcattgacaccgatcaatcactgagttttttttggatcgacctagcactttttgaaataggccctaatgcttagaaattttcaaatttgatttatttccaagattgtacttggaatcagcaattttctgaaaaaggacaaaaattataattaaaagtcattgtaacagtaaattataaaactcggagaccgaaatgatttgaatacgttgtaatgtttatttaatttattatttatttttagcacattttttgttttttttttaatttcattatgacttcaaacaaaagaaaaaattttccaatccgaattgggaaaataaataaaccagcgcctgaaggcacataaaaactttcccctctatacctcgagatgttcaagagtcttcttggtcttagtcttgaattattagggattgtttttttctcagtctcagctttgagtcacctttggcgccgaaatggctgtggtgctgaaaattgtctacaccgaatgtgtgattgattctcagccgatgattcatcaaatttcataaaactgatttttccgtaaaataacagaaaaacaaatcgaaaaattccacaaaaatgaatcattttgtaaataaccattaaataaatatttctgttcacttcaaaagatcaaattaatttccaatg

SEQ ID NO: 100425 - DNA, 98 bp, Heterodera glycines
aaaacttgtccttggtagtattttttggttttgacgtgtcgtttgtgcggttatttaaagcggttgaaagttgttgtgatcatcattcgagcaaaatg

SEQ ID NO: 100426 - DNA, 263 bp, Heterodera glycines
  unsure (1)..(263): unsure at all n locations
ggaaattgcatctgctgatgntgagaatgcgggcgctntggtannatgcgaagcagcggaagagcagccaaaggaacagcgaatgtgaggggaaaagagagggggggggggaaaagacacccccctgggccaatggcattttattttccatgggtccaatggcagtggaaacgaaacaaaattaaaaaaacttcattaaattttcaatattttcaaattaataatttaccctttcctttcccattttcagttatttgccaatg

SEQ ID NO: 100427 - DNA, 148 bp, Heterodera glycines
ataaaacattctactgatggaaaaccaacccgtaatataccatgattagggctctaaaaaaaccaaaatttccgtaatctgtcattacgcgtccagctctgttctctgcactctgttttgtaagcatcccctattataaaaacagatg

SEQ ID NO: 100428 - DNA, 128 bp, Heterodera glycines
atgatctccgcaatgtttcatggtccaatccgacgtcacaacgcaacaaaatcaaaacaaatgccgactttcggagaaattcgtcccaactcggcctgatcagaagcgaacttcgcaacgtagaaatg

SEQ ID NO: 100429 - DNA, 64 bp, Heterodera glycines; identical to SEQ ID NO: 99473

SEQ ID NO: 100430 - DNA, 79 bp, Heterodera glycines
cgtagggttttgttggtcgctgaccttcactccatttcgacaggccgacatgaacctgcccaagtgactgctgacaatg

SEQ ID NO: 100431 - DNA, 394 bp, Heterodera glycines
tcgctaatcacggctttaactcttatttaattccatccaattgaaccgcacaaaacacgcgagaaaaatttagcaacgcagattaaatactagaaatagcaattaatattttccgtcacaaagctttcaagtcaaccgccttagaaaatattagtgcatgacatgccactgccctgttgtgctgaatttcctctattagagccacatgggttctatttttcaaccccccccctggaaaagcaaatttattggagggtggctcaaatagagggaatataaaaattgctcttatgatataagaatcacttgttcatttggcttataaactgtcaatacactctcctcatctttttgagcaaccgaataaaatctatcagaaatccacacaaaaatg

SEQ ID NO: 100432 - DNA, 147 bp, Heterodera glycines
ggtgaccaaatggctaaaactgtcctaattacgctaattgctttaatgcctttaagaagcatatcggcagtttgcaccttggtcattacacatcgactgtggttaatctgacaagcactgatcagcaatggctaagctttaacgatg

SEQ ID NO: 100433 - DNA, 642 bp, Heterodera glycines
ttgaaaagcatcaaagatggaagaaacaattaaaaagtgagaaaattcagtatacattcaaaaaaatttatgataaataaaagaaaaattgttgaaaaatattttaaaataaaaaatgcatttatgcaaaatggaaaacattccgcgaagggatggaaagaatttaaagcaaaaattcaaatatttgccgtatgttatttgtaatttgaagaaccaaaaaagctggaaaaaattttgtttaataatggtaacgcaaaatttaattatttttaataaatcgtttttgacaaaaaaaattagatattataatcatatttattattaagaaaatttactcattttactgtcactttcatcaaaacattattattatttaatatgcgaaatttttttattggtattaatcaaattaataaaaataattaaaaaacaaaaatattcacatgaaattgtattcccggacatcctttgcaatgtcatcatcataacattgttcaaatgatagaagccggaaattatggcaaacattaagcctaccatttggcatataaaaaatgccaaaaaatcatggaaaaaacacaaattattatttaattatttattaaatattcatattttaatttttaacaaattaaaaaaatg

SEQ ID NO: 100434 - DNA, 228 bp, Heterodera glycines
ttacaaggttccgcgagctcagttcagttccgttgactagagcttaaccggaaatgatgcaaccaggaagaacacaaatgttcaagccacatcggatagttcagtatccttaaatgcttggctcccagatcaagaagcaggcgctcagcatcatcagcaacatccaaatcaggaaacttacaacaatatcatacaacaaactcagttagcaatcaaattaatggcatg

SEQ ID NO: 100435 - DNA, 507 bp, Heterodera glycines
tttacgataatttttgtctctaaatacaactttataagttgattgagggcgtgttatttggagggaccctttgcctaatgaccaatctgaacattgaaaccgaacttgtacaaaaagttataattcaatttttcgaattttttttttcagaaaatgcctcccaatttttaagtttatcgattggatttagttgaatgacgtcgtcaaacaatctcaatcattctatttttcattttctattttattaattaaattttatggcgttttatttaaaagcaaaatattttcaaaaatcttcatcacatttcttataccaatccaaaattcatctgtttcttctgtttggctttccctttgatttaatgctttatctcaattaatttaatccatttttaaaattgtattttcttttattttgacgttaagacattatttattatccatatatactaacttctttcatttgttatgaaagaaaattccaagtatttgggtccagaaaaaatg

SEQ ID NO: 100436 - DNA, 158 bp, Heterodera glycines
cagtactaaatcgacccttaaaattaatttacccgttagaaattaattcaaatgatgataaagagcaagaaactctctctaatctaataattaatcaaaaacccaattatttcaacagaaaaaggaagatggataatcccttagtccctataaaaatg

SEQ ID NO: 100437 - DNA, 1003 bp, Heterodera glycines
gtttttcgtgaaggacaatgttggagggggcgacaaaaccgttgtcgatgagtttcgaatttacggcatgccaattgcgaagactacgaacatgcaggatttcacacgggtatttttacagcagcgcacttttctagctgtaaaagcaccgatgctttcagttgctttccttcgaaaataattgaattttctttttaaaaaaactagtggggagatccttttggattgtttttttggcattataattcgtgaaaattgtttgcataggttttcagggtcactgatcaagaacttatgacaacaaaaaaaatttgtttctagctggaaaattggaaaaaaattttagaataactaaatcttaaaattgacatttgaatttgacaggtggctggcaaggcgggtgaatcagagcagtgaaatggtctttttttgttacgcaatatggttctgtaattcattttttggtaaagcgtataaaatatatgtatttattggtgctttttccgtttgatattttgcaatattcgtcgttttactttttttgttttgttttttttttgctaatcaaatattgggaaaggtcataataatgagtagtggtgacttaaataacgtggaccgaatgatgagggagcttaatgttgaacagctcgtccaaatccaatcgtcactaaagtggggttttgtttgtttgccgatatggcacttcccaggctcttatgaagtttagcccccacaaatttttcactttacatgcaaaaaccaccaatatatatttccgtggtcgctgatcacgaatccggcactattccgaccaatttcgtttattaaatcattaaaaagttaattctcgactttttgttcgggttagggttcaaaaataggtcgaatgggtgccggattcgtgaccaacgaacccaaaaacctatgtattggtatattttttgattgggaaattaaaaataataatttaaaaaaatacaatcgttgcagaggcgagatg

SEQ ID NO: 100438 - DNA, 190 bp, Heterodera glycines
tcagccggactattcactcactggcggagcatcaactgggcacaacatacacagagctgcacaaattcagcagcctaccgcttctctggcctcgtctcttcctgctcatcatcaacaacaattgctgcaaacccaatcattgctcctcccgcagcaacagcactttcaacatgttcgtctcggaactatg

SEQ ID NO: 100439 - DNA, 399 bp, Heterodera glycines
ataactcgaaaagtaccttaacaaccaccaaaaaacaacaacaacttgtttttcgtgtattgcagaccatagggagctcagcaaataaaaattgaagccctagtgatgaagtgtgaaaacatccaatgggacgtaattacgaaatggcatttgaaattatgatgaaattcatggcttttaattattttaatattatttattaatattttattattaagaaaatctattgatgatcagtttcacttattgatcgcctttttggcaatgcttctccacattcattaaaatgaaataaaaaattattttccgaagaaattagcttaattttaatacaaatatatatattaaaaatattaaaaacttattaattaattatttattatactttttttagtgatg

SEQ ID NO: 100440 - DNA, 1003 bp, Heterodera glycines
gtaaatcgacgagctttttctttttttttgctttccaaacaacttttttcggcactctttttccaaagaaccttttgggtccgatggtggcgataggcgccgccggggaaatctttgaaaatttgagagtgtaatttgtttaacagattttcaccaaaaaatgataaatttttgcgattttgagcaaaattttgaaggaaaattggggaccatatgtgccgataggagccgccgggatttttaagaatttttatgaatttgcttagagaaaattatgggaaattaatctcagagataaataacaccaaatgaacattgaattgattgatcgggggatggattggggaaaaatggcacacaaaaagaaaagccattccaaaatgagagcatttgtgatggaatttgcatttgataagtcactcaatttaatttgtatgtttaaaaagtagaccatttactgctgctgtggtgtgactgacaattcaatcatttcggcttttgatcaaattcaaaagggtggtctggcgatccgaccgttcatccgtcacttccccctaatgaggctgttaaataatgtaaatgcaaaagttggacttgaaggaaggaagtgaagctgacggattaattaatatgcattaggcgaaagatgctataaacggacgttgtcgaatttatgtgaaaatgggaaactgcagctgatcgtgacggctaatgtgtccggtttttctgctccgtccaaaattgcaattagcaaattgccccaggcaaatgcccattaatttgccattagcatcgcatataaatttggttcggttgtcaaaaaataaattattttttcttttatattttaaccgaaaatcttttaattttttttttgtttgtttgtttgtttttcaataaaatgtgaatggatacgaaaaaaattttgaatttggcggccgctctttcggtattttccttcggagccgtgctaattggggttcctttgatgttcgccgacatg

SEQ ID NO: 100441 - DNA, 194 bp, Heterodera glycines
ttcttattgagatgtgtgagccctgactgatggatttcagcacaggacgactacactccacggcgaagaatgatgacagaataacctttttgcgcaattttaaataaatatttttattttctgtgcatcatatggttattttcctcatactttgtgccacatttgcaacactttctgatttgttgtttcagatg

SEQ ID NO: 100442 - DNA, 87 bp, Heterodera glycines
ggtgtgctgcagctagaattgcgtttttgttcaacaaatgcttgtattattacactcatttttgtcaaggaacgccctgcgctgatg

SEQ ID NO: 100443 - DNA, 86 bp, Heterodera glycines
gctgcaaaaaacgaatatgtgacggcatcaacgtttacagtgccgacggcgattcggcacaaccactgcagaaatagcggaaaatg

SEQ ID NO: 100444 - DNA, 347 bp, Heterodera glycines
tttcccaaattttaaatttaaatcatataattggtatcatttaaaaggttactgctctcagtgagaagctttttctaaaaacaattgtcaagcatttgggccaatcagaaaattaaagtgtctttgaaaatatgttttctaatatcttatgttaaaatgataaatggtaaacttaaaaataattttatttcggctattttagatagaagaaaataattttttcattttattttcgttttccaaatcgccaagtgttcgagtcttgtggcaaagttcagtctttcggctttgaacaccatggcaattaatgtaaatccaaacggatatatgtaatgacttaagaaatg

SEQ ID NO: 100445 - DNA, 349 bp, Heterodera glycines
  unsure (1)..(349): unsure at all n locations
ccgaaattttccaaaataatnaggcgataaatactaattcttttcgagagtctcggnctcgattcaggaaaatctcgggttttttggtctcggtctcgaggttttggtctcggggtcaagtctaggtctcgagaaattttcggtctcgaacagcactaataaatactaccgattccgccctctttttaaaaaaaattttcatgtcctaaaaaggtgtctagggcatgttgccaggttcgctactggtcaagaatatcatattcatcccggacaatttcgaaactgaattccacaagaagtcgaaattttgacttttttcggtttcacgttgtggaatttgtccgaaatg

SEQ ID NO: 100446 - DNA, 356 bp, Heterodera glycines
agcaagcaaatctaatgttgtgttgtcagaaatttagtatgaaattttgcaggaaaatatttggcataatgctaccagcctgcaaaatttcaaaaatttccatgcattttttgaaaataaatttctgtaaaattttaaaaatttcgtcggagcaaaaaaaaacctaacaaaattttattgtcgaaatcatgaaaaccaaaataattaaacttatattaattgtcgaaaaatgtcttaaatatatttgtttgatttgatgttttaaataattttttctgaaattttcaaaaaaaaatttttcattcatttgagctgcgagttggcgggcgcgtgcgcagacagtccctgccgcaatg

SEQ ID NO: 100447 - DNA, 1003 bp, Heterodera glycines
aagtgacaaaatatatggatgatcacaggaattaaaaaaagacaaaaatatgtgaaaataaataataaataaattgaggtcaaagtcaaatgaggtcgaaataccaaatcacttagaaatttgttacattctaactttcccggtcttacagattaccctagtgaactttaagttttattttaaatcccccgggcagataaatagagaaggggagattatttttcaacctacttcgaaaggggtagattattggtgacttgcatataattagagaaatacggtagtttgactttattattagggcttacatttttaggtgctaaaaactgccaaaataggtaggttttaggttctaaaaaaccccaaaaataggtgctaaaaatgggaaaataggtgccaaaaagttccgaacttaggggtgtaaaatgacaaaaattttattaaaaagtcaacaaatattaagacaaattgagaaaaataatttttaaaatcaaaaattctcgtaaataggtaaaaatctaaaaatgtaagccctatttattattacgttggtcagttttcaaatttcaaaaaacaaatgcgcgtctaacatttgcaaatgaaagttggataaaaataatccgtcaaattgattttttattgattgatttgggggtaggggctaaaacgcccggcaaatgtcatcattttgcaaaatatattctcctctgttgcgtgcgttccttccattccaaagcactgccattccctttttctgctcgctttttgtcaatgattttcgtctcccattggcatattgtccaacccctcgggcccatttgcaacaatttaaggcaaacaaaattcaaaagttgtttggataaaatgtgattttcgttagaatttttggttttccgcttttctaattatataaaaataaagtttccaacgcaattaattcttctgttatttgtgtgacatcattcggaactcggccaaattgtgctaattgctgccaaaaatg

SEQ ID NO: 100448 - DNA, 572 bp, Heterodera glycines
aagatttggggggccggcggtgccgataggcgccgccgggaaattttttttgagaattagtaattttggtagcatttatatcagcaaaataaatcattaagcacaaaaatttaaaaagtttgtgaaaaaaacgacaatcttaaaaaaaggacacttgggaactctggtcaaactgtttgttatatacctatgtctgtgggtttaattacgttaatcgcaggcccacatggccacgggccagaaatcaaaataaaaattatcaaaaaatggtaaaaaaaaattgacatttttttggtcgaaaacggctaatatttgtccccggcactgaaaaatttgaataaaagcatttacataaaatattttggatttttttctctcttctctgtcccttgaaattaaaaaaaaaattgtggatagctgacgaagtagcgcgccttgaaaaatgggtgtatctttaaattcgactgggccggggaggaacaattgggtgaaaaacccctaaaatatcgctaaaatgccaatttttttttttgtcacgtttaagaagaggcgacgtctcgaggctgacgatg

SEQ ID NO: 100449 - DNA, 410 bp, Heterodera glycines
aacggttgagactaatcacaaagcaaaagcataaacaccgacaagttcaacaacagaacaacaacaacagaagaaggagttactgtttgctgttgaggctcatcagacagtgacgacgacgacgtcgagcagtacaaaccatcaccaaaaaaacaaattgttttcattgttttttgttgttatttgcattttgttagggttcatctacagcatcagcctcacattttcttcgctccatccacccaaacaacaaaaattagggtagcaccaaaagacataaacagagcagccagatttttattcaacgccacctctctctcatcactctcatttttgccttcaattcctcattctcacacacataccaaaaaaagtgatcagcaaagagtgatcaaaaccccccaaaaatg

SEQ ID NO: 100450 - DNA, 478 bp, Heterodera glycines
actctgatcatctattctattatcggcacgactattgtttaatcaattgaatttattgggataaaaatgcactctggtcattagaagagccaagttggctaattaccgcaaaatttgctaaattatcgtcatccctctactaaatttgctagcgccgccgtctctaacgcttaattagctaattatcattgcatcttctatttttatttaaataacactttcgggagcagctcttcccccctggattagtttaccaatgtcgtttccaccgatttttttttaatttcaaagttagaatttcaaaaaaattttcgaaattttttttttaaatttcaagaacaaaatgatttggttcaggtcctccaatttgaaattactgattgatttggttcgggtcttccagtttgatcaattattgattgatgatcattgtcttacgcatcattaatccgctttttcctaggatgagttgaacatg

SEQ ID NO: 100451 - DNA, 56 bp, Heterodera glycines
taagaattccacggttcttcgatatgttcgaccgaagttgaaatgggtatattatg

SEQ ID NO: 100452 - DNA, 1003 bp, Heterodera glycines
gtaatttaatttcaaaattaatccggtgtttaatccaaagaatacaaggaaattataatggaagaagcggtcttaaaatggatttatcaagagattaaggatcatccccgacggattattagattacaattattgtattttgcaacaatgattaattgggcattgaaaagatcttactaaaaaaacccccatcaaaaactgaaatgagggccagattaaaattccccagggggcactaacagttcaattgtgataataatacgaagaagcaatttgtgtgttcagccgagcggagggaggagggcaaagggttgtcatagagaaaggaattaatgaaaaaaatttttttttcaagtgtgtgtgaattgcgccgctgctgtgcggacgtgtatgtgcaatgatggcattttcattcatctcgccaatgtgcgtgatgagtgccgtcgccctttttgtattacacttattttttgatgaagaagccaactaacaatgcggccctgtccggtcggttgcctctctgctgctgctgcgtgagcggtgaatgaatgaatggtatgatgaatgatggatggacggacggacggcacggcacacacgcgcacactcacatacatacaaattttggcaccatgagtgagcatgcgccgagagagaacattcattgtcctcccccgttttcgctctactcttcgcttaaatttcataaaaaatggcacccatccatcatccatccatacataagcaaccataaaacacataggttcttctcggtaacacacccacacagtgtcgaatgtgccgccgtgtcctgtgcgaacccacccccctccaaagagaaagaggacaagacaaatgtgtggggtataaatagctcacatgtacatgtaagacagacagtgcgcaccaatttgggcaaaaatgagggcggtggggaagggtacataaagacggtcatacttttggcacacatgtgcctagaaaaaaaagacagagaaaaatg

SEQ ID NO: 100453 - DNA, 746 bp, Heterodera glycines
aatgttttgaggcactaattgaatgttaaaaatttgcgcgcttttttctacccaagaaaatttcaataaggaacgcgaaaaaggaacggtccggccaaaaattagggtcacagaaacgcgtcctatggacttttaagtgtcccatcaaaattttgcgagtccatgcgattttagctaattgtatgtaagaacatcagatccaatacaatttcctgggttttttttggactgttgtaaattcatttgtcaaaagacagagtctgtaaagagaaaatatcacaaatttttctgcaatttgaaaaaaatgccgacaaatttttcatttttttcgcttaattttttattcaaatgatagtcaaaattattttgttcattgaaacttatgaaatgttatggtccaggaaacccaaaggaatgccaattttattgggttttttcaacaaaattgccatttgagcgaaaacaaaattaaaattgtgaaaaattaattttttttcaatttttaccctccgttttttaaggcgactttcgcttgtgcaccagcttcgcaaggacgacaacggaggctattccaaacacattctcaaggtttcatcaaaaaaaaaaagaaaaagaagcaatttctgtagattttctaacttttgcgggtccaaactgaaaaaatgcccggcctttgtatatgaaaaactgccccccccccctttgaagttggcactgcactcggactatcgtaaggacgtcgcatg

SEQ ID NO: 100454 - DNA, 119 bp, Heterodera glycines
attacatagttttattgcattcacaaattttttgcaaaaatttgcttgaattaagattcttgaactaaaaatcctacctcttaatcagtgaacaaatgaataattaattgtaaatcatg

SEQ ID NO: 100455 - DNA, 181 bp, Heterodera glycines
ttggattattcaaattttataaatccaaaaagtcttaaatttaaattctctacttagtcattatttttattttaggctaattattttttcagaaattaaataatttttaatacagaatacaaaatcttagtttttaagaagttttcccttttcttgatcatataaatgatcaatcagaatg

SEQ ID NO: 100456 - DNA, 774 bp, Heterodera glycines
ctttgcctattttagacttttggtgcttaatgcctattttcctatttttatgcatatttcgccatttttggcgcctttttcagaattttcggaaaaatccttaaccaaaataaataaaaacgaaaaatacacccctaagaatcgaccccaaaaaatttcagaaaatacatccataggattgaaaaaaaattttcacaaataaatttttgctttgcaaaattttttggtttaaaaatttgtccttattcgaaaagaactttaaaatatttaatttaattcatttacaattgaaatataaccagaataactttttaaattaagttttacgtgttttgctacctaaaaaagagtttaaaaaattttacttgcctattttagtgcctatttaatggctattgcgatttttttgccttttaagtgcctatttcgctatttttagtgcctaaaaaacgaatccttattaattgctaattgcatgtgcaggtatttattggctatgtgaagaaaagtgcaacttacgaaggatgcgttgcgataaaaatattcaatcaaaatttttacaatgtttatgagaattcaaaaaattttatgcaaaagattcaaagcattcttccgcctgacgagagaaagcatttgatcacaatggttgacgcgtaagaaatttataaaaaattattttaaaaaatattatttttaaattaatatttggaatttaatatttaaaaaataaatagcggaaaactgaagaaacagaataaaggattagtcataatg

SEQ ID NO: 100457 - DNA, 749 bp, Heterodera glycines
  unsure (1)..(749): unsure at all n locations
ctcacanttttctactacatatgccataattgttttgattttttctattgaataaaaactgataatggaaatcatcaaaaacccttaaaaaaaactccgagaaacaagaccgatacagagaacctcggtttccgagactaaaaacccgagactcgagtcgagactctcgcacagccctaggatttatattccaatacaatacaatatttgtttgctagctttacattttaataaggattctcacccattgttacataataatccatttatcgcgtcatatttttatagatttacaatttatgtaaaaaataaataaaaattattaatgcttattcaacaaaatatattattgcaaataattttagcatttatttaatttttattattttgaaatttaggttagcataattaataaaatattttgtataattattatgtatttgctgtttctttttccatttcttattatgtttattatgggaagggaatgcaacgaaataaaaaatgaaaatggcaaataatatttaatttaaattattattaaattcatttttaagacacaaaaattgaaagcggaaaatatttggttaagacagctccaagagcattttttactgctgataatcatttgattgataagtggttgcaaaaatatgttaatgaatttttgtgcaacgaaaaaaatgaaattgaaaaaaatcattcaaaaattggaaattttatttttttacgaaaaagcagaaaaaatg

SEQ ID NO: 100458 - DNA, 83 bp, Heterodera glycines
ttcaggctggtttcgcgggcgatgacgcgccccgtgcggtgttcccgtcaattgtgggtcgtccccgtcaccagggcgtcatg

SEQ ID NO: 100459 - DNA, 719 bp, Heterodera glycines
tttttttggcaatttgagtgtgatttgtagaaaattttgtctaaacgtgaccaatttttgttttaagtcaatttttaaaaaaaattcaaaatttggattttttgtgcgattttttatgtaacagattttagacaaaaaggccatttttatagaaaaaaagacggagttcatcccttaccgcgataggagccgccttagaaaaaatggaagttttgatatttttttcagactttactgaaaaatgggtatttcagattccaattttgaaatcttaggggaatatttctcggtttccgagactaaaaacccccagatcgggaaccgaggccgggaagcgaaaaacccggaaaatttcccgagtcaggaaccgagactctcgcacatccctagcagccactacccaaaattagaacatttcttagaaataaaaacagatctcacccttttcatctaaatccaacaatcttggtgagaattttttgagttcaattcacgtatttattatacagttttgtttcaatatttggtctttttgtgatttttttagcaaatatttagatggtttttttggcaaatacatagatatgtatatggtatacatattttgttttttagcaaaaataaatctgtgtcctgattatcattttgtcgaataaaaaatagcctttggcgcataattaagtaactttttaattctagtggatttttataagcatatg

SEQ ID NO: 100460 - DNA, 872 bp, Heterodera glycines
cgtttgtggacatgtatgccggtcttgggttggatgactttgacacaaaaacggtgtccattggactccaacgtttcctaaactggatgggctttcttcgtcatcccaatgacctcaacgctggatgatacggacgggtttgagctgatccgacagggcacgtgcacgcttaaagtccaatttgagaagcctataaaagatgacggttacgaaatgttgatcctcggcgagtttgattccgtcctttccattaacgctgaccgtgtgttgagcacagacggaagtgtttaaacaaagagagatagagagagagagagagagagagaaaatgaattctgcacaaattgacacgttgctgagaagattgcgtgcaacaagaggtaagttcatcggtgtctacccgtcaaacaaagtgccgctgattcacgacagacagagacgactgcagcgctatccgcactgcatggttgtcaacacggaccgggaaggcacacggggagaacactgggtggctttttatgtgcctagtgcaactcaaattgagtactttgacagcctaggtgtggcaccaaaccctgatctgtctgcctatctcaacaattttcgccatgttcaagtgaacacgcagcaaattcagttcccctcatcggacgcttgcggccacttttgtgtctatttcttggccagccgttgttccggtgtcccgttttgtgtggtggttgagacgttacgcaaaacgcgcgggatggcggactggttggtcaaatggtatgtacgcatgttagtccatcatgtataaaagggtgactaaaagagagggatgccacacaaatgcccgctcgctataaggcggataggcactagaaaaaatg

SEQ ID NO: 100461 - DNA, 393 bp, Heterodera glycines
attttaccatttatttcttttttggtattataaatgtgcttttgttgtctaaaatttcctcagaatttcactgattcaaatcgcaacaacaaaggccgtttttctggtcgatgtcctcgtgttggaagagagtcggacgatgactgaaagtcaatggttaaatttcttcgacgcacttttatgcactgacgtaacgaggaaaattggtgggatttgtttttgtgccatcgtttatcgcttgtttaaaggggagtaaattcctttcttttcggcatttcctttcaatggcaaatccctttaggctacgactttcgcaatgatatgcgtgtcttgcgcagcactttccctttcatcgcaaagcttttcccgacggtgagaaaggtcgtctgtatg

SEQ ID NO: 100462 - DNA, 440 bp, Heterodera glycines
aaaactaccacaagcaggtggttgcgctatgaattgcgcgtgattaatgggcttattggccggaagataattatttaaaacgttaggtgtttaaaaaattttaaaattacatttttccaaaattgatatattttcaaatttttgtatggtgaagagcggcattattttcggacgaattaatgatcagtgagaggaaggaaaatttcgaattccactgtggaaaagttgaaattaacaaattttaccgggattaatatcgagaatatcactcatatttccaactactaatatttatgatatcatgaattgctgccatttagctgctccgtgagattgagctgcacgagaagcagttcaacgacgtgcataacctgggcgccgttctgatcaaacagggccacccggcgggcgaagtgatcgaggtgtacctgcgcaccatg

SEQ ID NO: 100463 - DNA, 72 bp, Heterodera glycines
tgtgttgaacagcaggcaatttagcgactaaccaattaaacattgttaattaatttgcagccttccgttatg

SEQ ID NO: 100464 - DNA, 191 bp, Heterodera glycines
ccccccccccccccccctcgtccgtattcacatatccttttcccgctgagaggcctttcggcgccacagatttttggagatagttaatgttgtgatctcaaaaattccgttgcgtcgcaggcctcgtccggcggtggacaaaatgccacttttttggacaaatatcaccatacctccttatggacaaaatg

SEQ ID NO: 100465 - DNA, 64 bp, Heterodera glycines
gagtttgcctcgcgacccagcgtgtttcagtcgtgggtgtttgagcgtggacgcgagctggatg

SEQ ID NO: 100466 - DNA, 399 bp, Heterodera glycines
atgagcaataattaagctctagaattactctgattgttgaaaattggtctttttaatttttttttttttaaatgcaaaaaatgtgaacacaattactatcaaatcttccccaggatttaatccgggatggcaccatcggaaaattgtttttttgattttccctcatttttaacagattttcaccaaaataggtaattttggtggattttggaaaatttccgcgtaatattttgggaaatttttggtgaggtagaggtaggtcttggaggtgcaccaatagtaaacagttacaatgaaaaatttcttgtttttttacaaaattaaacaaaattaaatttactacaattagagccatggttaaatattaaaaaaataatttctttttcaattattcagatg

SEQ ID NO: 100467 - DNA, 469 bp, Heterodera glycines
ggtgggaaatgcgacggactgtcctctgacggcaaagggtgtcaacccaaaaaacaaatgagatgattccgcaaattgtagcgtgtgaccttcagaatttcctaggctttctgagttataaagtacgactttgcagcgggacggtcccaggatttggcttgaaggatggtacccggtccttggtgatatcccttttttacactattttttgcatattttttcgccgagtgaaatcccttgtttttttagattttcatctctaaattgctaatttagttgatttttgaaaaaatttagcaaattgattggaaatttaatgagggaggtcttggagggggtaccattaagaattggaaattttcgtcaaaaatactatcccccccttgtcgtcttcttccctccctcaagatatttacattaaaattaattcagctttcgtatatcctaaaccttttaggtcatcaatatg

SEQ ID NO: 100468 - DNA, 254 bp, Heterodera glycines
acggaaaaattggaattcgaaataagaaaaattcacttcacagcgaactgtgatactaatataatttaattagctaatcaatctacaacgtatttccaataaatatatagtcaattatgatgaatagccaacatataaaaatcgatgatcagatttattaatttatttatattttttaataaataaatacaaaaaatatttctctaatttgcccaaaacattttattcattttcgtcaattatatttaaaaatg

SEQ ID NO: 100469 - DNA, 999 bp, Heterodera glycines
agatttagggggaagaccgaatcctttcgggaaaaacttccctaatagcccgtactttaaattctgggttggatttttgctccccataatgttttgagtaccccaaacggacacttgaaaaaatcgatttatttttgttttcggggcagtccccccgaaccgatgcgcccagatttatggggagaccgaatctttcgggaatagcttccctatagcctgtactttaattctgcgttggatttttgctccccataattgtttgagtaccccaaacggacacttgaaaaaatcgatttttttgttttcggggcagtccccccgaaccgatgcgcccagatttatggggagaccgaatccttcgggaatagcttccctatagcctgtactttaattctgcgttggatttttgctccccataattgtttgagtaccccaaacggacacttgaaaaaatcgatttttttgttttcggggcagtccccccgaaccgatgcgcccagatttatggggagaccgaatccttcgggaatagcttccctatagcctgtactttaattctgcgttggatttttgctccccataattgtttgagtaccccaaacggacacttgaaaaaatcgatttttttgttttcggggcagtccccccgaaccgatgcgcccagatttatggggagaccgaatccttccggaatagcttccctatagcctgtactttaattctgcgttggatttttgctccccataattgtttgagtaccccaaacggacacttgaaaaaatcgatttttttgttttcggggcagtccccccgaaccgatgcgcccagatttatggggagaccgaatccttcgggaatagcttccctatagcctgtactttaattctgcgttggatttttgctccccataattgtttgagtaccccaaacggacattgaaaaattttcttgaaaaaatcgatttttttgtttcataaatatttttttcagaaagtcatg

SEQ ID NO: 100470 - DNA, 78 bp, Heterodera glycines
gacaatagccacaataaacatcaaaacgaagtggcaaacaaacaaaaacaaacaacaacaccaacaacaccaataatg

SEQ ID NO: 100471 - DNA, 853 bp, Heterodera glycines
tctaaaaattaaaatataaagaaaaaattaaaaaccccatcaataaataaaaaaaaagaaaaagccaaactacatccacaaaatgtcaataaatattaaaaaaatctgccaacccaaaaaaaatatagaaaaaaaataaaaacaacagaaaaataaaaaaatctaaaaaaaaatcaaaaaaaaaatcttaattttaaatttaaaaaaatgagactttaattaggattacatgttccatcaaaatgatgacaaattgacaaacaatgtggaatatgagcttaaacaggtacagtaaacacatatattgttttggtaagcaattaaatttaaaaattcaattaaaaaaattattatcataattgatttttaaattcaatatattctttttttttaaattgtataattgccaaaaatatatgtatttgaaattaaattttaattaaaaattttttttttatatttttgtaatgttttgaggatttttctatgatttatactatttttattctgtttatttaatatattttataaattcatctattccttaataatgaaaagcaattttttttttaaattttaacagcgttattattgtataatattttgttttacgattattttatatacaatattttattattatatttacataattgattttcgaaaacttcgtccttaataacaaaaattaattattttttaattatttttgtttttttctttttgacagattgagtttaattcgggcaattatggcggcccagcttttgctgtccgggccacagaattgcatcgctacattatggaggtttcaggacgtaaaatgtcgaataaatttttgccaaacaatatg

SEQ ID NO: 100472 - DNA, 183 bp, Heterodera glycines
tttttggccacaaattgaaagaattaaattctttgcgattgttttcagctttttgaagtgcggcaacgaccaaaaaccctttacctttgccgaatgtccgctgggcagcgtttttgtgggcaaacaatgcaagggaaacgcattcattcgctcgtaaataatgaaactttgacaggcaaaatg

SEQ ID NO: 100473 - DNA, 119 bp, Heterodera glycines
atctctttcaatccgcccattcgataattgctaagttctttaatgtgattaattaattgtctattagcataaaaaaaatataattttcttccgccgtttagcccctcccattcgaaatg

SEQ ID NO: 100474 - DNA, 54 bp, Heterodera glycines
aatagaattcttgttcaacacattgccaattttgtttttccccattgtcagatg

SEQ ID NO: 100475 - DNA, 215 bp, Heterodera glycines
  unsure (1)..(215): unsure at all n locations
ttttgcccatcgtatttcaatctcgaccaattagcagaaaatattaaagtgattactaagtctgatgccccgtttccgtaaaagccatttttactttgtttatttggacggccacacancgtctttcatgtcattctantcgaaaataaataaattaaagcttttttagaaggattcacaattattaanaattagcgagtgagagagagaaaatg

SEQ ID NO: 100476 - DNA, 124 bp, Heterodera glycines
gatggttaacagatagtcgttttccttagtcagtggaatctatcaagagagggaggagaaggtgagagaatggggggggacaagcgtacggaaagggggggggggtaagttaaagccaaccatg

SEQ ID NO: 100477 - DNA, 182 bp, Heterodera glycines
  unsure (1)..(182): unsure at all n locations
tatgaggtgtgtttgctttaataaatcacattgaataaatatcatttntaattccattttttccctttaaaggttttttacttagacgacgtggcggccattgagcgcaatggattgccccaccgggtgtcttcgccggtccggaccgcgacgtggtaatcgacgggacggcttatcgaatg

SEQ ID NO: 100478 - DNA, 1003 bp, Heterodera glycines
cgttgaaagggatcgaaatccctttctcttttttgtccattccgcgacaaatttgctttttttaattttaaaacaaaaaatttgggatatattttattcatttcttctcatgggttttttcaattcaggacaactatgaaaaaccaggacacctgtgtgcatttttttacatgttaatatgtttgaacattcgtggcaaaatcaaataaaattaaaaataattatatttaggcatttttgcaattttatttctttatttttaacattataagaaattatagaaaaatgaaatttaaattattattattattcctattaatgatcctactatatacaattaagcagaccgtgcaagtgaaattaaaacaagaaaaaagctttgatgaaatatttgacaaagatgtgacgatggagcagaagaaattctctgccgaattgatcacataattcacggagaaattgctgatcagtaatcaaattcaacaaaatagtcgacaatttgatcaattttttgatgaaattttggaagtaaaaaaaaaagatagtgaagaaatgtccaataattgtgatgaattggaacaattaaaattgggatcaactcaaaagaaaatttatgaattgaaaaaagaatttggattgaccaaaaatagttattcaaaggaggaaaaacgcaaaataataaaacaatttgatcaattatatgacaaaataaaatataaattaaataaaaattgaagggaaaaagaaaaatatgtcaaaaaaataatagcaaaacatttgggcacaaatatcagaagcattttttattggaagaaagaattaaatgttgaaaattcgaaggagaatcaaaaaaatgatgatgcaaaacggaaattgttgaaaaatattttaaaataaaaaatgaatttatgaaaaatgggaaacattcacggaaggaatgggaagaatttagagcagaaattaaacaaatgtttggtgtgggttattggacgattgaaaaatg

SEQ ID NO: 100479 - DNA, 1003 bp, Heterodera glycines
gaaaaaaataataatattattaattcacaaagctaaaaaatatatttatcaaaggatggaatttcggtgctaggtcgtttcgtaaaaattgccaattttaccgatttttcgagaaaaatcacttataacttttcttaattataacataaagaataagaatcatactgtagctcttggcttgcaaaatttcagaaaatttcattgagtttttacaaagttctaaccaaaaatgtttaaaaaaatagacataactttctaaaaacttaataaaatattcggaaaattttcatgataatagagcaagccaagagctatcgtattataccaagattatttttttaggttgtatttaagagaagttatgactgatttttctcgaaaaatctgtaaaattggcagttttatgaaacgatccagcatgtgaaatttcctcacaaaaaatgaaaaaaaaattccactaaaaaattcacccattttttttctttcctttattttattgaaaaatggaacttctctctaaaaaaaaatcgaattttcccacgagttaaaatcaaagtgaatctgtctatcaaatccatgcgttccattttgatgaagaaagaatgggggcgggggaaaatgcccatgggaaaacggcactcacttaaagtgcatttgggcccattcatttaaaacacttggccaaaaccgtaccaaaaaattggtgtatgacctcattaataaaaatatttttaatttaaatatttacatatttcttagtagtaagacattttgaaaaagcctggacctgggctttggttccatgttggacctggacctggatgtcctggacaaaaacccaggaaaattcaggtccaggaaaaccccaggttttgtcaagcctgtggatccatgcccaggtcgaactttataattcatagtattaatttgtggcattcccagagaactcaaaaaaaaaagatttttaaaaattttgtcaagaaatttttaaaaattttagatg

SEQ ID NO: 100480 - DNA, 720 bp, Heterodera glycines
ttatttttagaaaaaaaaataaaaaatttaaattattttctttttattaataataatattaaaataaaaaaagtaaaatgaccttttctccggctaaagattttgatcggtttcgctgaacaaatgaattgggctggtttttatcgacttttggtattttgctatattattcattgtatctgtccttcgatgtgccggcgcgtaaacggtgcaaaaatgcgccaaggtcgtcgattaattgcgctattttcaaataaaaaatgaatatttaaaattaggtattgtttgtgtcgtctctctatccccaaaattttggtcatttcttggggaatccccgtcccaaaagtttgtttcttccccgcactccacgcttttttattctcattaatatattaaattagttcttttttcatataacatgcgagcctttaattacttattatttttaaaaatgacctttggttgaaagctctacgatgtgcctccgttgaggaacgtaagcttacaaattgacgactccaaaacttacattattgtttttgtcaggtcccgtgcaccaaaccagcgtcaacccaacgttgaggtagtggtgcaaatcacttaaagaacaaaaacaaggatttggcaacggggaacaacatcgattgttccgacacttcgctcgcctttaccgcaaagacccgtcaaattctcgtcaacattgtgtttgttcaaaacatg

SEQ ID NO: 100481 - DNA, 174 bp, Heterodera glycines
gctaaatggcattacatttttaggtagatgaatccgccgttgctgctccaattacctcttggcaagtgatttcctggtggactgcctccccgcacaatgtgcagcgtttcattttgcaaccgaagcaaatcatcggactgccaacggctccattcgccgttcccttcgacaatg

SEQ ID NO: 100482 - DNA, 237 bp, Heterodera glycines
cccatcagcatttcaatctctcgatactcaattctcaggctttccaatcgctggaactcaacccaccagcatttcaatctctgggactcaaatctccggcattccatacactgggactcaacctaccaactttcaatgacattccaatctctgggactcaacccaacagcattccaaacaatggactcaaatctccggcattccaaacactgggactcaacccactaacgttcaatg

SEQ ID NO: 100483 - DNA, 125 bp, Heterodera glycines
ttctttgtggcaggcactcctcactggctactcgacctaggcatattctgttaagtgtctaccccatatggaatttttgagagagaaagacagccctaaattgaggctattgggtccaggaaatg

SEQ ID NO: 100484 - DNA, 825 bp, Heterodera glycines
ttcattccatcaatttttctgcccctccggggctgttttgttttagaatttatatttttatgtgtttgtgtgtacacacaaatatttttacccgccgccgccgcattaattctttcttatcgccccgcccagaaaaatttgaaaatgaaattgcatacacacacaaattggacgaacgaacgaacattcatttatttctttcatttttttgcccctcgccaataaattcttcggaatttttgaggggccccaattttgggaattattaatattttagcattcacgagatgctgctgcttgtgctgcctgtgctgacaaaattccgttttaacaaaatgattataattgttttgctctaaaaaactttttgtttgccattttgttttttttttggttagctttgttttttggtaccattaatgctttctgatcagtgatcagaaagatgaatgatcaaaaaatcacaagttttaaaatggaaattaccaaactttgagaatgatttggcattacaaatcaagcagtggccgggaccaaatttatctctgtcattcatcagcggaaaaatcaaagaaattatcagaccgaaaacagcactgattagcggagaccaaatctgatccttcactgattaacttgaaccaaacacttaattatctgtaagtgggaaactattattttttttttgactaagaatggcagactgatcccaacgcttacaaggactatcaaaatacagaactgatcaaagtttatgataccatattccctaaattgagccccccccccctgctaacatttggcatggcatttcccccaaaaatg

SEQ ID NO: 100485 - DNA, 218 bp, Heterodera glycines
  unsure (1)..(218): unsure at all n locations
aaacccccgggtacttggtttncaggaccttactaacaaaaaaaaaaatgtgaccaaaaaaagtgaaaaaaaatttcaaaaaggaccgctttgcaagtagcgccaaaaaacatttaaataccgtatggctcttctgcagttaattctttttattaaaagttaaattattacccacatcttattagtccgtctcaaatcgtcaaaatttgtccaaaatg

SEQ ID NO: 100486 - DNA, 443 bp, Heterodera glycines
atttctatgttcatcagtttttggttttaaaacggcacattcatttattttttgaagaattttttattaatacaatattttttcgaaattcaaaaatcccgcaatcccgcgcgggatcccgcaaattttaaatgcgggatttgcaggattgcgggatttgcgggattaatcccgcgggatcccgtcccgcaaaaaattttgagttccagtcccgcagcgggatccgcaaattgaaaatttccagtctctagataaaattataatatcttcttatgcgattcactaaattcatgtgtaaaatcaataacactcaatattatataatttagcgctgcctcgtaaatgtaaaattaatattcatatgatgaatattttatatattttttgacaagaaaatattggatacctatataattataatattattataatctagaaaaatg

SEQ ID NO: 100487 - DNA, 451 bp, Heterodera glycines
tttttgtatatattttttggcaagccgatgttctggcattcctttctgccgtgtgattgagactttgcgcaagactcgaggcatggcagattacctcgtgaaatggtttgtcagaaacttgatcaacggtctataaaagctcacgtttcctaagcagtaagaaagatgctggttcatttcatgaatgttttttacgcaggtatagtcctcagctgtgtgccgtcacgattgcaatcggagctgataaatgtagattttacggttgacaatcaaaactattttgacagcggcaaatatcgtaccttttcaaaagatgctacagcagcagaacactttggttatagtcggaatacagcgtgccgaatagagaaatgtgagcgtgacagcgaatgggccgtttcgcttcaaaatgtgtacactttgcacagctatcagtgtgtttttcgaaatg

SEQ ID NO: 100488 - DNA, 196 bp, Heterodera glycines
  unsure (1)..(196): unsure at all n locations
aaataaaagaaaaaataaaggaaaaggaagaaaatatcagaaaagaaatgaataaatgaaagaaaaaatagcgaannaattggggacaaatcgaatcaaaatttataaatggattaaagaaattggactttataaatatcacaaatcaaaaactgatgaacaaaaactcgaaattgtgcaaaaattcattgtaatg

SEQ ID NO: 100489 - DNA, 983 bp, Heterodera glycines
tttctccactttttgctccgcattcagcaaagtattcttattttaccagcagacggcaatgtgaatgaggtcaatgaagattaaatttaatggtactcaaaaattaacttagaaaaaagtacccgtaagaaaatgggtgaaatatgcataaaatgctataaaaataagatcacctttatagattttgaaattaatttttggtattttttggtttaaaaaaaataaaatttttcacaagaattttgtgatttagatcgaatttttttttaggaaaaattaatggttttgtttttgtccgctccaacggggaaattagaattatgaaacgaatttttgagaaaaatttgatcgttttaggcgtcgccgcgtgaaaaagtgcaaattttggctctatttattaaataaactagggttgctctccgaccccgagccccccgacccgagaccatacactttgactaattcaacaattcgcgtcaaattttgctgaatatgagcagcgagcagcagtttcatttcattttggccaagttaatttcatgatcaacgacctcgaaacccatatttttatttttaaatttcaaaaatttacgagaaaggggggctatcattggtactcttaccaaaaattagttttagagagcttttaaaataatttttttataataagagacgaatgaacagtaatgaataagaaatgtaaattttgtgtaaatatgtattttttgaaaaataatagaaattcttgtgaaaaattttatttttttaaaccaaaaaataccaaaaattaatttcaaaatctataaaggtgatcttatttttatagcattttatgcatatttcacccattttcttacgggtacttttttctaagttaatttttgagtaccattaaatttaatcttcattgacctcattcacattgccgtctgctggtaaaataagaatactttgctgaatgcggagcaaaaagtggagaaatg

SEQ ID NO: 100490 - DNA, 332 bp, Heterodera glycines
taatgaattttgttaagaaaatggccagctgatttttcataaaaatcggtcgattgtttcagttttttgattatttcggtcggtcggtttcggttaaaaaccgaaaaactcaaaaatgtctcggtcggttttttcggtcaaaaaccgaaagagctgaccggtccgatctctactcaaaatgttgtttgccaaattggcatagtgttggctcgaaagtcacaatttgacccttcgagacaagggcataggctttagcctcccccgtggctaagcctttgcttcaaaagtatcttgaatgatcatcacaattaatttttttggtattgcagatg

SEQ ID NO: 100491 - DNA, 1003 bp, Heterodera glycines
tgttttgtgtgcaaaagcggtcaaatggcagaaataattgacggaagaaaaagcgaaaagaacggcgtgaaggaatgccgaaagaaaaaccacggaagaaatatgccgaacacagcttaaaagaaaaaaaaaatatttttgaattaaaagtttaagcagcgaatttaaaaaaatttaaaattaacaaaattattttgaaattaaattttttatcggtttcaaataaaaaaaaagtttaatttaaataatttttttaattaagtacagttgaaaaaataaaacaattactttaaatgattcgttcagatttatttattttcttcctatttttttgggcagtttttagcattagaaacttctaattttctttcaaaatttttgtcataaactaatggaaaacacatattggttattaattgcaattagcataaccaaaaaaaaaaaaaaccgatttcgttttccttaaattttgtttatttttgtttctttctgtttctgtgatgtgatcgatcctttttgtttacattttccattccgtttcattgtgcttttgacggataacagatgctaatattgctcagcgccgatcgccccgttttgtcatcccttcctttccttaatgatgctaataaatgaaactgatgatcgttgtggcaaaagccgcttcttccgatgggttaagcccgggcaaaagcatgaaacattcattcattccatggtcagaagaagcagctgtttctttctcactacgtatttcattccatttgatttttccgaacttatttgttaactcattcataatcatatttttgatgaatttcatttttattcgaaagcattcttttcatttttcatttaaaattataaatttattttaatattattttcaaattttggagtaaaaattttattagttttatattgaatattaaaccagtaataagaaataaataactttaaacttataatttccttacgcactgtaacacattgagtcaaaatg

SEQ ID NO: 100492 - DNA, 221 bp, Heterodera glycines
gaattgaaattgaaggaccaataaattatgcggtgaattgtttggtcaaaatttcgcaattttattttaattcaattgacgacgacctttattctgaatataaattaaacatacatttcaataattataataattttgaaccaaaattgttgaatgagcaaagattgacttatttaattaattttgaaaatgaattaccaaaagtgccaattaatgaaatg

SEQ ID NO: 100493 - DNA, 468 bp, Heterodera glycines
accaggctgggcttccctgtcaactcgggtccggtcccaaattttcttggcgcccgccgggctcgggctttttccagaatttgtggaagtttatttataaaataaaaaatgtgtaatcgtctattcagaacgagaaataaattctattagaataaaatttaaaattttttatctccgtctaatatatatttttgaatatataaatttaaatgggatcaacaaccaaaaaaccattccgaattttgtttttgatcataatttttcaaaaaaattttctcttcagtggaaggtccggcaccggaaagttttttttaatataaattaggtataatcactagaattgagcagtaccagtaccggcaaaaattgaaaattacctgtacccctcaacttttaatattataaagtatcacgtcgtctttttataaaatgtaaattttggtcaaaaaaataattttcttaatgatg

SEQ ID NO: 100494 - DNA, 363 bp, Heterodera glycines
tagtgcttgttatcagtcagttgcgatttctcttccataccatattaaaatggtaaggacagcagaacattctcacaggcaacccatttcagaatttttgtttgtcaaaaaaattactgacaataattctctggtcgatattcaattaataacaaatcgctcattgtttatttcaacttccattaaaataaaggttatatttcagcgcagcgcaattgatcgagccaaccgggcagaaattaacaaaataagtatttaaagtttcattcttataatgctaaaagaaattaagaataaatctattcgttattgaaatttatttttaattaacctaatttcattaactttgtttaagtgaagatg

SEQ ID NO: 100495 - DNA, 127 bp, Heterodera glycines
gccaaaagcataagagagccagccaattgaatttgaatggcatcaactgattaggaatgccatgatcaaatgattagaatgttcaagccaatctctgccaaattctcttcatcttatatccccaatg

SEQ ID NO: 100496 - DNA, 1003 bp, Heterodera glycines
gttttcgacagcaatttagtcaactgtatttggctgaatatctctcataatgatggattgattgccacaattccatgtgcaaactcttctaaaagagcctcttttttcaacgagtttgtataaaaactcgaaaatgacaaaaattaatttaaataaaatattgcatgagttgcggaaaatgataactaattaacctgaccatatgtcaaatattcgctaatagcaatttctttttttttaataaaagttgcctttatgtaaaatttttaaagtgacatccaatataaatttcttatttcacagagtttatatttatgcaaatttaattttgaatattgtttgtcggctataaaagtcacaatgaaaaatctgtttccatttacaattaaaaacttaatttaaaaaagagcaaatggtaataattgaatatgataaatgacgcagaaatagtattagtttggcaatatgttttaccacgaattattttgtaaaaatggtcatatggtcaaggcaggcatactgtagacagtgaaaatcgctgctacagtaatacaaaaattgatgcatttgtacgctaagggatttcatcaaccaaaatttaaaaaaaattatatgtataaaacgcaaatatgcgaagaccagtgatagatttcaggcaaatttaacaaaaagcaacagattcgaaaaatgggatacggtaatgaacaaaaatgtatactgtaatgagcataacggtaaattgacgagatggggcgaataatataatttgtaatatttaaatggtggaagtgctcaacatatgaaatgggaacataacaaataaataaataaaacagataattagaattaaaacgtaacgcaagtgcatttgatacggtaaatgataatgtatcccctatttatcgtctaaatttaaaaaaaaaaaatttaaagttgagcaccatcacatttaattggtttaatagcaattaaataatacattaaatcaaatcagtgcggaatg

SEQ ID NO: 100497 - DNA, 243 bp, Heterodera glycines
tcagcccgacaaaaacgcgaacaaattgcttttcagttgaaatccggtggaattttgaccaaattgtgatcagttttgctttacgcgaacaaattgcttttcagtcgaaatcctatgctttttttgaccaaattgaaatcagttttgcttttgtcgggttacgagttgcaaaaatttgcttgttttccattgagtcggttactaattttgtttttcatttttaagtgcttcgactattgcatg

SEQ ID NO: 100498 - DNA, 154 bp, Heterodera glycines
  unsure (1)..(154): unsure at all n locations
gcagcaccggcacggctgcacngacgacaagcgatgcggcaggcaacggaccgccggctttgagcagtccacgctgcgacaacgtctgctcatcacgcgcattcagtggtcaaaggatctgaccattgtgtcggcggacgatgaagcggagatg

SEQ ID NO: 100499 - DNA, 523 bp, Heterodera glycines
gactttttgcaaaaatgggcacttcgcgaaacgtgcaaatttaaccgaaagagaccgggcctcatcagtacggtgtctctttgggttaaataatttaaattaattattatgtgtgtttcggccctaaaccgtatacacacaaagccacagcaatcaagcaaagcaaataaattttattaagcaaaataaatatttatattggtttattttattttatttttaactaattattttgaatatcattattcaattttataatttgttagtagtatttttaaatttattttgagcttgcaaggctccaacatttgcattatctgtgtaaaatcagttacacatgtacaagtctaaacgttttccattggctaaacaatatagcaagataaggggaaggttttcttcgtctttgtggatttctctctgcttttgtacttgtcgcgaaatgacatagcaccccgaaaatgggggactgtgaaatttggcatttttattaaattttttaaaaatggggcatcaaaaaatg

SEQ ID NO: 100500 - DNA, 63 bp, Heterodera glycines
gctgcaaaaaatgatttttttaggaataataaagagaaaaaataacttcaaatccaggaaatg

SEQ ID NO: 100501 - DNA, 149 bp, Heterodera glycines
agtcccttttttgcatggtattccttttccaatgccacttcaggtttcttcaattatcgatgttaacgttgtgccggcaagccaccggcgagtgaaactttgtaaatatggcggagacgaccggaagttgggctttttcataagagatg

SEQ ID NO: 100502 - DNA, 1003 bp, Heterodera glycines
caatttttattcgaagccgaagccgaagctcgaagcccaaaaaacccgaagttttcgaagccgaagttttttcaaaattttttttaattctaaaatttttttcatcacataatttcggttaaatatcaaatttaatcaattgacgcagtttctagagcccaaccaacccttttcgataaataaatataatgaatttttttagcaatgtattttgtaaatttttatacttcttagaatattcacagtttttgagtcgatttaaaaaataaaggaaattttggagctccggcggtgccgataggcgccgccggtgaaaattttgaaatttttagtgcattgttaacagatttagtccaaaaatgaaaaaaattttgcgattttaattgttaaattttattaaatttctgtcgaaaaaaatgaatatttttgaaaattagaagaaaagcaactactttgatgggaactgacccaaaggaaacataatgaaaagagccgagagaattaccactcgaccaagcatgcgaaaaagcacaaataagcaaatagtttaaatatatattaattttaagtttaccaaaagtcaatcactagtggtgcattttcacattgaaaactcaatctttagaggtgtatttttcccgaaacttcgggtaaaatagccgaagccgaagcacgaagttcgaagctcaaaaaacccgaagttttcgaagccgaagccgaagtttcgcccagccctgatccgccggatcccgaccaaactcccccctcccgttacgtttcgggtatttcaccatgtaatcatttacccctacggaataaagaacgttatcacattgaacatcttaaataggggaaatgttaggccatcatattcaataatttgccaaataaaaaatgtaacaataaaaaaaaattaacgacagataatgatgtaattaagttttgattaacatcaattgtttacaataaaattgctgattaaggagcagcgtacaatgtgatg

SEQ ID NO: 100503 - DNA, 135 bp, Heterodera glycines
aaacaacatgtttcaacgttttacttcaaaacccgccaaacgaaaattctgaaaaaaaattttaaaaaaatattaacaaaactgataaatgaagcaaagaaagcggaagagcccgggtggaaaatcgagaaaatg

SEQ ID NO: 100504 - DNA, 1003 bp, Heterodera glycines
ttctttcgctgtgcgcttccgctgccgtcgctctcttcggtaatccgtcgcccccccctcctccgcttatttccgtaattattttcaatcctccaatattacccccccccattcgtttttggccattcgtttgacttttctccgtcacttttggccattttcgccactttcgtccatttgcctttcttcgcgtgttctttcctttttcgaattgcgcacttcgctttcattttactaattaattaataagtttgatttccgtctacaaatttggcttttccttttccttctttggcttttgttctccgtgttaaatgttccttcactttttgtatttttacggcatatcttttggccaatcttttggcccttaaactctcaatgatctcaggtttttaataaccgaaattcaatcccgaagtatccccctggtctcgaaattattcaaaaccatttgggttttttgtctaatctaagatcgtttcacactggaagaatatagacattcggtttccaatcagctgaccgtcacaccgacaaagggcgtccgtctgtcactttccccccccccttttttggtaacaaatttggcatttttcttttaaagtttctccgcccccgctgcaattgattctaatcccaaattaaactcctcccattgtccgttgttttgttaatcgttctccgattgccaatttcgccaatttttcattaattcccccccccccgccgccgcttctcattttcattttgctcattcactttttctcggctttacatccgaattggcccttttcctttggctttcctcacagagtgcttttgttttttcctcgtccattttccccaaagaaatgcaaatttgaatttgaatttcaagttttttcccctttatttttcagtttcctcagactgactttttaatttcaaattcacttttctcctctgcttcttctcccccttcgggtttccttttcattttggcattttttttcctccaatg

SEQ ID NO: 100505 - DNA, 245 bp, Heterodera glycines
ttgtgcactatttcgtttcaaattgaatcatttttttttgtcttttgaaataaattgtgaaaaatatacaaaattattttcggttttaattatgctgtacaatgcttttaagccccgccgtgcggcggctccccttttgtgcactattttagtttttaaaattggttccggactttttggctttttgaaataaattgtgaaaaatatacgaaaattattttagcttttaattacgctgtacaatg

SEQ ID NO: 100506 - DNA, 1003 bp, Heterodera glycines
attggttttttgagggccggcgatgccgataggcagcgccgtggcgaattttgaaatttaaggtctatttctaatagtttttcaccaaaaatttattaatttccgtgaaatttttattttattttttatattttgtaaaaaagattttgaaaaatattaactttttatgatttagtcaaggaaaattaaattttttaatttcaacgaaaggaagattggatttaatttgtcaataaattatgccaatgatgaccaatttttatgggatttttgtttaaaaaaccatattacctaatcacaaaaaaataaattaaaataataacgtcaaccggtttcgaactatgacagaaagtatttaagtgtgatgcacttacccactacacttccccggattagtcgtccccgctctttccccggtttgaccggggctccccccccccccccccccgactgcaatcaaatcgataccagagaaaaaagttttcacattgtttgccacaagtatgaatttatttctattcctatcaaaaattctaaaactcaaaaattccaaaaaaaaaccacaagtactcatttgaaaatttagccattttcagacctaaaagggaataaaatgaggctaaagcatatgctaatcctaaccaataaattttatcatctgctcaaaaaatcttaattaattaagcttcaacattggaacaaatctgcgcaaattttccattgtttttggtgactttcacaatggttcattcacgacgctttcgcccgccgttggtactggattttagcaattatatttttagttttttatttgaaaaattaaaaatttttgaatattaattatttgggataaattttgcgtaaaacaaatctttttccccaatttttgatagaaaagaataagaaagtaaatttaaaaaattatatactggattttatcgtggtgcgacatttgctggcgaatatttgtggattaaactgtctaacaaaggaaggtcctatg

SEQ ID NO: 100507 - DNA, 508 bp, Heterodera glycines
ggtgagcccataaaatatttggttggattttgtaaaaagtaaatttgatttctaaatttttttaatttaaataagaaaatcctaagttttatttaatttaatactttttcaaataaaaaattaatttaaaatttaatatttttatgagagtttataattgttccaacattttttatatcaaaatttaaaaaaatgaattttccgattttttatgcttttttcatttaaaactaaatcaaattttatttttaatttttatattcaaaatacgagtcaaaaaaatttactattttgtgaacttttaatatttattagatttgcaatttttttagcattttttaaatttaaaaaattgtcaaaattttgaatttctaattgatgccttaaaaattatggataaattgtgggggacaaaaggacattcattttttgccattaatgataattagtttcataatgcaccgcaggctggcaagtggccgccgatgcgaacacggttggcgacatg

SEQ ID NO: 100508 - DNA, 157 bp, Heterodera glycines
aaatcagaacaccagcgttgcgcgaaaaccagagctaaattttgccagtcaaaatcgctcacaacttccgcaatcacgcaattttctgaaacagaattagttggtggaacagaacgaagtgaaagatgaagatgttttcaaatgcggagccgtcatg

SEQ ID NO: 100509 - DNA, 51 bp, Heterodera glycines
aaaaagccacgccgcgcctttttgtcggattgcgacgaatccaacggaatg

SEQ ID NO: 100510 - DNA, 363 bp, Heterodera glycines
gaaaaatattcaataaattaaaaatatatttctattaaaatagtaaaatggtcaatgaaaaacgttacgctttcgaagcagacgtcgccccgtaagaaatcaaaaattaatatttatgaaaaagtaagacacaatacgtatttgctcaaaaatgctattttttttctttcacgacgttcaaattttgtttttattcgagcaaaaaagtttattttaagagccaaaaaggggccaaaagttaaaaaaatgaataatttttcagcttggtgccctcaatgccaccgtccacacaacaaatttgcaaggcgcgatatccttgacagaatttaagcctttgatgttgcttttactgttgaaaaaatg

SEQ ID NO: 100511 - DNA, 573 bp, Heterodera glycines
  unsure (1)..(573): unsure at all n locations
aattttcaaaattntttccaatttccttgtcacttatttttggtttttctctttttatttgccaaaaaatgctcacaaaggaaggtctggaggtgtccgtggagtttcggaatgaaatttggtgggtgcatagagcacccatgggttcttaagaaaagtggttttattttctgcgaaatgagtacgagtgccgagatatgacgtgccaaacttttttctatcccaataaatcgaataaacatttgcaccgttttgtgttgttcggtggtgcggaggttgtgcgtttggcgtttgtttttgcccccacaggttcgaatccctcttatgcaaattaatttcccccatcttatttttgcttttatgcaattgaatggccaaaaaatcaatcccactcacacccaaaaatttatttttcgtccccgttcctaaataaaatgtccataaatccctaaaatattctcaccctcctcaataaatatttttctaaatataatgaggaaaccccaaccaacgagcatgaaatattcttggccaaaagttttgcagcatcaattgaaaggtgcattaaaaatg

SEQ ID NO: 100512 - DNA, 187 bp, Heterodera glycines
aaaacacaatcatttaacaaaatataatcctgaattattttattatttgaaaacgaatggtaaaaagaagagtttacgttgttaatgaatttgagtttgtattttaaaacaattggcatagaaataattttaaaataaaaaaagaaaataataaattataattagggtctccatttttaggcaaatg

SEQ ID NO: 100513 - DNA, 1003 bp, Heterodera glycines
gcatttgttgcaaaagtcatagtgtgtgtttgtagttgtgttgttgcaaaagttagagttgtgtttgttgttacggttgggcacctaatttttgtaagaatttcgaatctgaaaattatctttcaaatttaatgcttcaaaattttacatattatctaaatatttatatatatttccaagaattaaaaaatgagagtgtcttcattatcaacacctattaattagttaagcggcggaagagccgcttcagcagtccgctctgttttttgcaccaataacgggttgctgaaaattgggaagttttgcgggtaattaaatgaaggaacgaagaagcgacacaatgcttttggtttctgtttcatgaaaaccacaacagctattttattgacacccctcagcatttgtaatgatcttcaaagagtgactgacttaattaaacacacaaaaaacagctgcaattggttacattttatgggccataactactgaaaacaacaaacaaaatctgtcacacgacgacacaataccggtgggtgattgatattaatatttatatccccatattttttcctggactgggagacctgatattaacgaaaaacatatttattagctttatttgaagcatttaggatagaattctttattcgaatttccatatttctccatatttgggtatttaaaaaatcctctatttctacttagggtggaacataatttttgatacccaaattttttccaatttttaaaaattcataactccgttatttctgcgcctatttaaatgattctttttttattttgttcttcatggtgtcctctttttatattactatcgtttcactttttatttgattgatagatttttctgccttttttcccgaccatgccaaaattgaaaattggcccactaattttcgaaatttttatggtcaaaaaccaaagctgatataacaaaatcttggtttttctatacaatttagaccagtagattccgaatatg

SEQ ID NO: 100514 - DNA, 203 bp, Heterodera glycines
tttcggtggcaaaaaggtgaattgttttttagtgtttttaaaggattttgtgccaaaagggtgcctccaatttcaaagaatttttgcctaaaaaccaaattcggttttttggtgtaaaagcactcttttttagtgtttttgcttctttttttgctattttgtattcttatattcttgaaattttcagcaaccgctcaacaatg

SEQ ID NO: 100515 - DNA, 228 bp, Heterodera glycines
acaaatccaacaaaaagtgattttgttgattatgtaatattttattaataattaaagacccgatttaaaaatagacaaatggtaaaaaagcacaaaaattgaagaataatactgaggaatttttaaatagaacaaaataaaaaattagaaatagatttttggtgttttaggccataacggctagacaaataatcagcaaaatgctgcaaaacggtcccaattaaaatg

SEQ ID NO: 100516 - DNA, 607 bp, Heterodera glycines
tagcaattaaattttattgctttgtttgttttttgaatcgaaactttccatcattttgaggaattttttgacacaaaaaagggacaaatattaatcactgaatctttcagcactcattggttaatgcaggttagttttcggctcaattttacattttcaaattttataaaatgccgaaaatgcctgaaattagacgattcgggatcggggctgggggtgaatgtcgggcttgtgagtgagagtttgtgggcagaatgtcagctgggatcaagaaaatcctacaaaacacagggactcgggatcgggatttgcataggttgattgaggatgaatttgtgaggtccgggttcttgaaagcagatattttgtatgtcggaaacctctcaaaggttcacattgtgttctaaatttccaacagggcctgaactgctttggggccgagttggaacaaatatggaaatgtaattgaattgatcaaaccaaacgatcagtatcagagaaaattgatcagttcagtcagaaattacagagaccgaaataagagagatagagagaaacaaagagaaagagagagacagtgagaaaaaacagaaacaaaagagaaatg

SEQ ID NO: 100517 - DNA, 1003 bp, Heterodera glycines
ttccccggcggcgcctgtcggcaccgccggacctctcccctcgcacattcagcaaattttttggaaaaatgtaccgcaagaaaaatttaaaaaatctgagttccaattttccttgagtaaatcatgattagggctgctaattttatgtaaatacatattttttcctggcttctccatagcctaatcagtaggaaaaacactttcttttttgtgtttgcaaacaaaagtttggacttttatttacatattttagtagatattttgcaaatttgaatatctgttagaaataaatttaaaattcgctcctatcggcacgccggcccccccccccaaaaaaaaacctttttttcttaaaaaattacccaaaaatcgctaaatttgattatttttagtcaaaatctgtgcaatttatgtcaaaataaatattatcaaggcgatcaacgaataaaagaatgtggagccaaagaaattattcataaaaaatattttttttgtgggatttttggagctaattcaaagcaaacccccgcccccgcccccgcgggggcggaattatcgtgcccccgccaccgcccccgcgactctgacccccgccaacccccgcccccgcgaaaagccacccccgcccacggggctcgaaccctaattaggaggaagagggacatcgttgaaataaggtaaataattttagtccgtcagtgtttggacttttttgatcagcacaaaaaattgggatagattggaatttataaaattttaggtggaatttgctatcattttatgtttgacaaacactttttccatcacatattttgtcgactcttaattaactcttcgctttcctcacgaacaattgcaaaaatttattgaagaaaatttgtttttaaagtaaaaagtgtgttttgccaaaggtcagtcggttcattcaacagaatattgaaaaagaactgaccaattttggtgcttattcagcagaagacttttgtccaccagcgtaaaaatg

SEQ ID NO: 100518 - DNA, 646 bp, Heterodera glycines
tctgctacaacgacgggagcgagcaacgacaagctgaatgtggacaaactgttcgaaaaaataaactttgaagtgcgcggtcacgacttcacagtcctcaagtcgtattcgctttttgttatggtgagtgaggacaacgtttatggaaaaggctctaatgcactttatgagtccaatcaattgacaatcctgggtttttatacaataactttgttcatgttcgaacaaaccctatctttttggtatcattcgaaagcacaaaatctaacgaagctaaaatatataaaatcgcagcgttcaggcaattaccaaaaaagatttgattaattaagtaattgctgattttcgtttgtaactttcttggaatgttagaattctcggtaatagtttagatggtatgacaccttttttgaaaaatttttcaaaagtcttaaaaacatgtttctaggggtttataggtacgctgagcacgaatctgacatccatttcgaccaattccgaaccctggacccgaattcgaacaaaaagtcgaaaattcatttttcatcaaaattcacattcatgcaactaaagcaatacaaatgcacgaaaagacgcataaagaaaataagacagactattcgcatgggtaaaactcagaaatatg

SEQ ID NO: 100519 - DNA, 782 bp, Heterodera glycines
aaaacgctttgaacgcgccaaaatggtgagttttcgaaatttaaaaaaatacaagaaatttttaaaatttatatgtattcacagacggagcaggacaaaactccgccgccgaaactccgccaaaaaaaaaatttcaaaaatttttctaacctagaaatttctcaagaaaaaaatcatagaaaaattttttcttagaaaactcgaagaaaaaaattataaaaagtttccagcgatgtttttctaacttaatgatgaaaaactaagtttttttcaaaaaaaaattctaaaaaggatcctggaaaatttctttgaaatatatgtcttggaattttttaagaaaaaatttttctaaaaaaattttctagatttttttcttgaaaaatttctaagtttcccggcggagttatgtctcggcggaatttcggcggcggagttttggcgtgtaccgattcacagaccatcatatacccgttttgatttggcacttttcgagattaagattttcttgaaattttttaaaataattatagaattaaatattaaaagaaatacattaaaaatcctttcaattttttatattcaacaattattttatgaaatcttttggtttcccccaaaagaaaaatttttttattgacggattgtagtttacaagaaacttttttcgagttttccaatttttcattttcaaatatttcttaaaatgtaaaaaatacttattcccatgtgtttcggttccatattttccattcttaaaaaaatcggaccaccctacaaatatg

SEQ ID NO: 100520 - DNA, 1003 bp, Heterodera glycines
caactgatcggccaatgtaacggttgggtaaaggtccgatgtttcctcgtcaacatacaaattggtgatgtcttaattaggtaattaggcaattagccagtttatgtaaattgccatcataaacacaaactcaagcgttgtccattcttcgtgaaaaaactacgatcattatttgtgtaatgttactcattaatgggggcggacacaacacaattaattggccgatgagttgggactgcaggccaatgatcaaaaaattcaccagcaggcgaacattttcacagttctacgaaggcatatttgtgctgaaaatgaaaggatttgagaaaagcatttcgccagtgttcagcacagctgccgctaattatagttaattaattaattatcagcccggcacagcgcctaatttgaaggtgtgtcagggggttcttggcttgtcattttagcatgtcaacaacccctgacacgccgatcaaattaggcgctgtgatcgtctgcctgctaattattaacgtcagctgttgctgcacatttgcgagatgtgctgctttcctcaatgttttcaattttcaataatataaagccataattaaacatcgttaaagcaacaactgctgcttgcctttgattactgctgctggtcagcgaccctatttaatgggcctttgagtgcggaaccgctcaatttgggcgccggcaaaatgatgcaaaatcagtgattgcccaaaatcattgcataaccctggggtgggggggtggactcatagtgctgcttgagaccgaagatttcctgagactcgagaccgagacctaaaaaaacccgagacttttctcgagtcgagaccgagactctcgagcagcactagcgactcagttccgtctgattgtgggccaaactttttcgggccataacttttttttagaatcagtcaaatttttacaaaatttgttgttatttgaaagttttaatatttagaatttcgtgtattgtgacaataaaatg

SEQ ID NO: 100521 - DNA, 226 bp, Heterodera glycines
tctagagtcaaaaaaataaatttataaaaattggagtgaccaaattagttttttttctgatttttccgagttggacattacctttaaacagcaatctgatcaacttatgcaatcaacaccgaaagaattcttttatttttaagaagtttagtttccattgataaacatagatgtatttaattgctcgttttaattttggatcaatggttttagaacagcaaatatg

SEQ ID NO: 100522 - DNA, 677 bp, Heterodera glycines
tatcattcgaaagccctcagcatgctgtactaaccagcataatttagaaaaatgttgtaaaggttcaaaaaacattatgtccaacaatatgccaatccccggtttctgatgtactttcggtcagaagttcgttgaaaattaacgaaattttttgaaattttgtaggctagtagaggattcttagggctattgaatgatgtcaagaaagttggatttggttggcaatgaaaaaacttttagttcaaaaactaggctggcgcgaaaacgacctggcccggtgattttgagggtattaatcggctcaaaaattttttttaaaaacctaaaaaaagtttttaatgcgttgattaaaattccctaaagaattctttcacccaataaatattcgtatttacgggtttcccgccgggtctccgtccgaaatttttatattctaataaggttcgctagcatttgatgaatgaaaatcttaaaaattaagggactcacaaaatccgtaactaccaaaatttatccgcttttattcaatcgtttttcaattcgtgcattgtcggataacgttctcgaacaccaaattggttccattttagctatttaaaataaaatcaactatgattatgtgattaataatgttatttgcaaaaaaagtcttaaatgagaagaaattagaaaaaatg

SEQ ID NO: 100523 - DNA, 55 bp, Heterodera glycines
gggtaattgtcgaatccaattacaaaacccccatgggagaagacggaacgccatg

SEQ ID NO: 100524 - DNA, 197 bp, Heterodera glycines
  unsure (1)..(197): unsure at all n locations
cttatgcatatatgtagagacggaaatggacacaatgacgataagtcagattctagncgggaaacacaaagaccagagaacactacttgggatgcttcccttgcgacaaactcccaaacataatcaacaagtacccttcaacattggtggcgaataatgacccatcgaataaggaaggaacgcattggatagcaatg

SEQ ID NO: 100525 - DNA, 72 bp, Heterodera glycines
ggtgactgccacaaatgccaatgcttttccatttttacttttagtgtcactttttcgacattttcggcgatg

SEQ ID NO: 100526 - DNA, 62 bp, Heterodera glycines
tgaatgaaatctgccaacagcagaagcagaacaattgctttgcgaacactgcacaaaatatg

SEQ ID NO: 100527 - DNA, 686 bp, Heterodera glycines
atcaaatgtccttcaatgtcactttcattgttgtgatcggtgcttgtctgctgctcaaagtctaatattttaaattaaattcaatacggaggatttgagggtgactgattctgagaataaaattttgggatttttgctgcaagcaaaaaaacttaacaaatttggcactaaataaccattttacgtggtttaagtcaatatttatttaactaattataaggcgtttgagcgctggtggcgccggtaagcgccgcaggggaattttggtatttaatgcgaatttttacatttttatagtcagtactcagaatcagaactttctgagaagcgaaaaattctaataattcagaacatatggaacccctgctgatattatcgcatatttaacaaaataataaaaataaaaaattgatgaaaaattaattggccaacatttttataatagcatgaaaattgaagtttagttaaataatttataaaataaaaattattttggaattgttactttttttaccacaattttgatggatttttcgcatatgaaagttaagacctaccaattttgaactgagagggttacggtatcaaatcccaggcgatctaccgttatcattaatcatacaccaatcacattgttaattttttttatacatttgttccagtgccaaactcagcagcagacaatg

SEQ ID NO: 100528 - DNA, 195 bp, Heterodera glycines
ttaacttaaaacatattatctctttatttatattaatttttaaataatttttcttaatttttcgaaaaggaagaaaaaagaattgattaaatttttttattgaataattcaattcgtctttaaattcgaataaagaaaaatttatggcaagagagaaaataaaaataaataattaaataaaatttaagatttatg

SEQ ID NO: 100529 - DNA, 161 bp, Heterodera glycines
atctttcgtcgaatgcgagcagcatttcgacaggaacacggagcagcaatcgatcgcaacgcgtatgttggcgatgcggtttgagccattcgtcgaggaattgtcgacatgaaaaaaccgtttgccgaaagtgcaagaagagtggccacttggaaaggatg

SEQ ID NO: 100530 - DNA, 1003 bp, Heterodera glycines
tgatttgctccttttatttcgatgatcatttgattatttgcttattctaaaaataactattaaattctctcatttttatttacgttctttttttacttaattaacaaataaatttttcagtttttttcaagttttaattgtttaaaatgatccaatttccaattcttccgctttgtttctcatttgcacaaactcacgcaatttcttccggcattaaaatgaaaagcggcgaacaacaaacattctctgctgctttttgctttatctgttcgtttatttcattataaattcggcttcctctcaaaatgaatgtcgagaatatttattctctataccaaaacatttactttttttttataaatccgccaaaattatttgcccggagctttttttaggatttgataccgattctatgtgatcggtcgtccaaaaaaatcttaaaattcaaatctcccatttctctatgtttttctttggcactttctccccccccccaatttctaatctctcaactttcgcctctttctcaaattcccaagtggtcggttcatcgtccgtctgctgctgtgcccttatttataagttatccctcctcaacccaaattttttcccgtcaaatttggccggcttaacccatccatccccgggggcatttgatgtgtgctctcggggcaccagtaaattcattttacacattttacaagaataaaaacggaagtttttttttctatatacacactaagaaataaaatttgtgaaaacttcgcaaatttatttatttgaattttcatagaatatttgtttattgaataaatattttatttaacaaaataaaagttgaaaatgccacgttatttcctttaatccctccgatgaattcatatgctctttaaatatgcattactttttcatttttacctgtctctattcctcaaactttgcatattttccaaattcttatcccaaaaaggaaatccaattccgctgaaaatgcataaaaatg

SEQ ID NO: 100531 - DNA, 757 bp, Heterodera glycines
ccaattttatagcgaaaataaaaacattttaaaataaaattaactgatgagaattacgtcaaaaaaaattgggggaaaaaagatagtatgaattataaaattggaattttaatgaaattttgtttttaattttaccaaaaacttgcctcttttacaacaacccaccctcaaccgttgctaaacaacatatgtttttcaaaatccacgcgatcatgactaaattttcaaaaaaacaaacaaaaatggcatataatcaataccaattaaaatagtaaataaaatgaattaactaatgcaattattttaggtatattgcctatcaattggtgatgttgttctcttctgtgctcgggccaggcaccatctttttaatggtccttttaattaacaattttatttatttatttttttgattttttttaaatttaatgttccttttaaaaattgttgtacttagggtgtaacataagtttccgcgcaattttttttgacaaattcaaaaattcataactccgtaatttctgcagttattttaataattctttttttattttgttcgtcagaaagtcttctttcatttcatgccattgtttcattttttatttgcttattcaattttttagtattttttcccgaccatgcaaaaattgaaaattggcccactaatttttctcgattttttatggtcaaaaaagtaacctgatataacaaaaaagaaggttttctgtacaaattagaccagtagaatccgaatatg

SEQ ID NO: 100532 - DNA, 587 bp, Heterodera glycines
gtgaaaaaactttttttttgctcaattgttttgaagaaaggagctcaaaaaacgcatttctgcgttaaatttttttcatttggacgtcatttttcatcactgaaatcactattttggcgtttcgtcacttaaaatagtgaaaattctctttttcggctttttgtcactgttttttcactttttcgacattttttcgtcactattttagttaactatcgggatttttcgtcactaaaagttgcgaccctagtgattaataaaggaacaaaacacaatgaattaataatgaaagtaaacaatgttcactaatcattggctaaaaaaaggggggggggtcgcttcttttttgctttttcaaaccaaaaaatgttgtaatccgatttgttaacaaagattttgagcaaatttttaaggaaaatttggattttgtggtccggcggtgccgataggcgccgccggaaattttcaagcacttttttccacttcgaaatcggcaccggtactgcctttattctactattggcattaagattcgaattggagttgcaattggtcggcaacctttagaattgtcgcgcaaaacaatg

SEQ ID NO: 100533 - DNA, 1003 bp, Heterodera glycines
aattaacgaaattcgaaatttaattaaattttgaaaaaagcaaaaaaaaaaaaaaacgtaacctaaatacccacatagataaaaatgaataaaagtcaatctttttatatagaatttatgacgcataaagttttgtccttgtgataaatttggccatgacacagggtggcatagtcagaattgggcacattgttaaatttcaaaaaggtcccaaaatggcatattttaaacaaaatttgtgccaactccccacacaaataaagtgaaatgtatgatgaaatgccgaaaaaatggacactaatttttgacagaacacatcggctggatgtcggtgccattagtggtggtgatgctaccataaattgaatttaaagacgaataggaagacacaaattttttgtgacatttcctttttcaggcttagttcccggtttatgaagaagaagaaaaaatgctgaaatccgatgcaaattacttttttgttttatttatttaaataaattaaataaatatatatttattttgattttttgccgaattttgtttatctgctccaaaatgcatctgtggaaatgcggagcttttgaaacaactaactgacaaaatgtaaaatatactgtgaaaatgggatactgtaagtttgtttcaatacaaattacgacaaagaattaagaatcatcctattacagtgtcatatttaaaaaatatactgtatcattaaagaatttttcacactatcttattttcagaatacattgaactttccgaaaataaatattagtcgctaattaatagattaaaaatgaaatttatatattttaatttcattattattgtggaaatccttcaaatttacccacgagtgtttttttccacattcgctgtttaaaaggttcaatagaaagaagaatcatcattcagtccacccaatgaagaaaaaaaaaagtgggacaaggacagaatgccaacaaggcaatgaaggatagataattggcacagaatg

SEQ ID NO: 100534 - DNA, 178 bp, Heterodera glycines
  unsure (1)..(178): unsure at all n locations
aaaattcctaaaattgaccctntttggggtagaatcccccactgcttcaattttttgttgattaatattgatcagaagattgcttagataatttttaaattagcaatcattttgatcatttaatatattttttaattagttttctatttttaattgccttttttaaattttcagaatg

SEQ ID NO: 100535 - DNA, 430 bp, Heterodera glycines
tacaagcaaatcgaacgcaacaattttacaaaattctctgctaggagaagggaaatcccaactgccaaaagtgaaaactatagtaagacccaaaatacagtttactgtttcgaatcataccatttcacatactaccaaattaccgaaagtaccaaaaacaaatttcaaatcaactgtaaaaccaacccaaaaaataaaactcaagggggaaatttcaacgcctaaaccaatttcagtaacggaaatgccaaaaataacacttactccaaatgttacagtaacacctactgtaaacattacggtacaattttcggagaaggcaattttttcaaacaaaaattctgaaaatgaggttaagataattacgccaaaaaatataaatgaaaaatttgaaaatgggactaccgaaaacattttgacaacgaaaatg

SEQ ID NO: 100536 - DNA, 442 bp, Heterodera glycines
  unsure (1)..(442): unsure at all n locations
ttcacatacgcccaaacacntttggagaattatgacatttctttaagaaaaaaaaattaatcaaaaaatattcaagaaaaaagtcgaatgggaattattttaaaatgagctttaattaggagggaaaaaatttcaagcctctaaaaaactgcacgtgattaaatcataagcaaaaatattgtattgtaattgcctaattttttcaattaatcaaaatcagtgttatttaattttttccaggcgtggaattccctggtccttttttatcaaaaaaaaaaaaaattcaaaattatgcgaaaatttcctgggagaaaaaaagaattcaaaactttgacttttccttttgacaaaattccaaaaggggcgaaattgacctttgttaccaaaaaatatccttttgagactcgagaatgaatgtctgttttgatagtgcaaaacaatg

SEQ ID NO: 100537 - DNA, 558 bp, Heterodera glycines
tgtgaggcgcgtaataagtgagtgtcaatggccaaaactaatcagaagccagcgccggcgggggcgggggggggcgcccagcggagtgacagcgccagcccagcgacgaaaatggacagaataaagaaaaagcaaatcccgcccccttcccctggggcacggacgtacaaaagcttgctgtgccgccaaacaatggaaatgcgcgaaaaaggatttattaataaattaataatatcggaactggcgattgaaagctaacaaaataaaagggcggagagcggcggaaggaaattattacaaatgtacaatataataataattgtgcatttattgaatttagcatttttgtcatttattgtaaaatttgctctttagaaatgcatgggattgcattgcatttatatatgccatcggaaaattaattaatgggttattaatttccgagtgcaataaatttttgagtgtcacacattccgattatcaattttgacgacttttaatacaaataattccaaaaacgaaattttttttagcctagtttcagtgtttcggagaatg

SEQ ID NO: 100538 - DNA, 159 bp, Heterodera glycines
  unsure (1)..(159): unsure at all n locations
tcgctttcagtaaatgcatttaatcactgcaaaaaaacaaatattnaataggatgcgtgacagccaaaaatactgagccgcccatcgttctattaatcaaggacattcacaaagtttcggaagatctcttccgaccatttgactgcaccagacaaaatg

SEQ ID NO: 100539 - DNA, 96 bp, Heterodera glycines
cctcaaggtttttatatttttcaaaaattggggaggaatttacaaaaaatcgcataaaatttgcaaaatttctacggcttgaactagttaaacatg

SEQ ID NO: 100540 - DNA, 224 bp, Heterodera glycines
gatttattattgtcattagtcgtaatttcaaatgattaaattttctctttttgttgattacttttaacatttttttaaatttaatttttcaaattttagtttctaaattttaaaatttaaaaggaatttatgaaaatatttttcgttcattattcatcgttttctttcagctgtcatcgttttcccttttccatcctttcaattcaattcgatgtcaatcgatg

SEQ ID NO: 100541 - DNA, 426 bp, Heterodera glycines
ttcagttttttttttgaatagcttttgaacacaattcgtctgatatttcgtgcccaaaacatcacaattgtccaatattttcttgatatgtttctcaataacactgaacagaaacaattgggaaaggttaaaaataaatcaaattaaaattattaaataaaaataaacaaattttaaaaatgctaagataatacgcattttggagaagcagagaaaagtgttcgacatgagcagatatgagaagaaaatggaggcgactgaagcggatttggagagtatcactttccaattggagaccaattttaaacaaaatgagttcaattttaattacagtaatttaccaatacttttttccacaggaattcgaaaatgaaatcggctattccttccaagaacatttagacaccattaggaagatcaaaaatg

SEQ ID NO: 100542 - DNA, 852 bp, Heterodera glycines
agcttcggatagcgcgcaacaactgtcactacatggtgttgatgcgcaacccggccggcgcacttcagatccgcaacctcggcgcacaactgtttccgggcggggcgctacgctacttcttggaagcgtacgaggacgcaacggccgaaccgtttggctacctgttggtcgacatgaacccaaccacggagcaacagttgcgcctgaaaacgcatatatacccgggggaaatgtgcgtggtgtacatgccacgagcgcgcgcgaattttaatgcaaacgcttagagcaattagcaaacagcagtcgacaccgaaaaaaaattgaaaggggcggagccaacaacaacaacacattgaagaagaggaccgaagggtctggcgaggaaagacgaccagcagccgcaagctcgccccgtctcgccccccagtgcttagcgaacacgtgaggcgccacattgatttcttccgacaactaaaggcagcacgcggatcgcctccccgttgccaagcgctggtcgccggagccagcagcgagcagcttctctgccttgtggagagtgcactgaacattttacgcgcgcgtgtgcccatccaacggcgtcatctggcccgcctcagacagcgtgcgagcgacgtccgcacactgagcagggtgcgtagcacacgctccgcccgtcgccttctgctcaacgcccacgcaccgtcaacagcgcaaactggtcgtggcataccgcctctggtcgggttgctcgccagcgtgctggtgcccgtgctcgtccaacgcgtattcgagacaaccagcaatagtagctgaaaggcacccacacgcacgcttgcccacgaagaaacaatg

SEQ ID NO: 100543 - DNA, 746 bp, Heterodera glycines
tataataagtatgggatgtcaaaaatatgtacaaaaattggtcaaaatatgtacataaatatgtaaaaaaaaatcccgaaatatgtaagaaaaacccaaaatatgtaccaaatatgtaaataaaattttttaaatggttatttttttggaaaaaaaaattcttcagaaagggtgaaataggcacaaaatgtcataaaataaggtaaataggcgtagaaccagataagttatttgaaaaatcgatttttggttaatttttattttttcacaagaaattttataaattttcaaaaatgtaaaaaaaaaatatggaaatatgtaagaaaaatttgccgaagttttggatttttttgagaatttccaataatttctgcaaaaaatcctcaaaatatgtaaaaaaaaatgtatgaaaaagtccgaaaaagtccaaaatatgtactaaatatgcataaactcacgaaatatgtaaaatatgtataaaaccccgaaatatgtaaacatatgtaaataaaagtcccaacttttgttcgcaaacacaaaaaagaaagtgttgttcttattcctatttagagcatggagaatccaggaaaaaatatatttacataaaattgacatccctaataataagcactacttttgtcacttttgtcctttattctcacatatactaattatactcttaaataaaattgataatgtgcctaattatttgcaaagaaaaattgtgtgcttaatcattcaaaatg

SEQ ID NO: 100544 - DNA, 403 bp, Heterodera glycines
  unsure (1)..(403): unsure at all n locations
aatttttaatccgtgttattattcgatagatctaagtgttctttatgatttatgaggggttatttcataaatattgtccgcctaattcgattattattggcataattttgaattctcacatttttctntgaaaatgatgtttaggttggacaatatttttatgaaatgacctaatattatgcaacaaattaacaattattggcatcattccattttggcatataaagtttcgagttttttagccataaattcatattatagtatttgatgaaattttcttagttaatgagaaaaattattaagaatttaaaaaaatatataattaaacagcctcactaaacgatttattgctattttcataatgtttttaaaattttatttctcataggacccaacatttatg

SEQ ID NO: 100545 - DNA, 346 bp, Heterodera glycines
ttttggataataaaatttaaaaaagatattttatcttttattctatttatttaatattttaattttgttaccaacttttaaatttgtgaatcccaaaaattgataataaagaaaagagttaattgtatatttcataaattaaaacgaaaataattaaattaaaaaattgttatattgattgtggaaatcgattcagattcgtgtaattattatgaagaattgaaaatgttgcttaatttttgcctgaatttgcttttccattatttattactttttttattttgtataatataaaaataataattatattataaaagatttaacaaatttcaaaggttgaacaatg

SEQ ID NO: 100546 - DNA, 161 bp, Heterodera glycines
gatttatagcatatatgtatatctcccgaatgtgaatcagtaaataggataaattatgtcattttcagtactacaaaacctttatatgagtttttttgtgccaaatctctctgacttgttcgttttaataaattttggaatttagaagcaatttaatgatg

SEQ ID NO: 100547 - DNA, 226 bp, Heterodera glycines
atttttacttttgggaaattgaattcattgcataataaatgaatttattaatatttatccgctttttaatatgaatattcaattttgttatttttctcttcaacaaatcttttctaaattgataaatccattaattattagccgaaaaatcaattttttactaaaatttttagaatttttcttaaaataaatgaaataaaattctttaacgaaaatattaaaaatg

SEQ ID NO: 100548 - DNA, 870 bp, Heterodera glycines
atggccttttgaatttaatcccataatcatttaactcatttttcatttgccttttaaatttaactcaataatcatttaactttttttcatttggcttttaattacatacttatatggaaaataaaaaggataataaggagaggtttaaaataacgatttattttattgtacacagactatggtaacaaattaggcgaaatgttaggcttggattttacaaaaatttgaattcgtcatgcatatttaattaggaggaatatttgatcatacaaattaggacagatgttaggaccaatatttgaattcgttgtccaattattgcatatttaattcgtatgaatattaaatcatacgaattaggtcaaattcgcggcttggatttgccaaaatttaaattcagcgaccgatttgtacatatttaattatcaaatgcgtggcttgggttgatctaaatttgaattcgtcgtccgatcggtgcatagataattagggaatttttaattttgcatatacatcaaaattttgtcggtattaagtaaagcaaaaattcaaatttaccgacaacactaaacaattaaaatgggtcaagaattgtgattaattagattttttggatataaaaggcagtacgaaggttttccgttcataaaccaaattcataattcccttcaaatattgtttttatgcaaaaataaaatatattttaaattgactcatttgccccccccccaccctgctcttttcgtttcttaaaatttttcacatttactgtttacattttaccatattgcattattccaataaatttaaaaataaaattttgtttagcatttatccatatacatttatttattccaaattttaaaaatg

SEQ ID NO: 100549 - DNA, 95 bp, Heterodera glycines
tttttttaaagaatctgtaaaagaaatctaattgtatttatatatatatatatatatataaaaaatgccaacgaatttataataaataaaaaatg

SEQ ID NO: 100550 - DNA, 261 bp, Heterodera glycines
ccatcccatcggcggattgtgatgggtgcccgagctgtcattggattagccacataaaactgctggtcaattagagttcgtaaacggagaattccctcatttttgcgggagtgcgattctcggggcacaaaatgccgcggggggaagagaagggaagggaagggaattcgttgcgttggccgcgggggcggcacattttgccaatgcgttttattatgtttttgtttgtttgtttgttgtctctgttcccttttctcaatg

SEQ ID NO: 100551 - DNA, 159 bp, Heterodera glycines
gggatggaaaaaatgcttataaattttatgaggtttgaaaaagctggtttcttatatttacgttttaaaaacacacgaatatttgtttgtaaaaaaaactttaaaaaaatctgctttcaaacttcttgaaatttgtgcatataatggaatttccaaatg

SEQ ID NO: 100552 - DNA, 165 bp, Heterodera glycines
cagaaggaaaattgtaaatagttaataacgtaatgaattctgttcaaataaaaaaatgcgtatttttcaaatgagtaaaaattttaatttaatggttatgtcctaaaataattttactaatttaaacatttatggttttaaattcagaaattaagaaaagaaatg

SEQ ID NO: 100553 - DNA, 574 bp, Heterodera glycines
actgctcgtggacccacctttcgatggacgagtgatgtttttgaggcgaggacgcctctcgagattgttcgggggtgttggagattttaatttaattaagatatttgttttaattttaaattattatggcattttatctctatttattttatgtttgttgacctctttaatttatgtttggtacttttcacttctcattattctcattaatttgttttccaaaatttcctctctaaatttcgttctcaatttgcttcacattggtgatctcctcggacttcaaaaaaaaatattgtgtgtggctttgtcttcgtgtgtttggtctccaccccccaattcaattgaaggaaaacggtttttctttcctattttccgcttacagcagtttttttgatgttggcatttttgcaggtgtatattaacaaaaacaacactcaacaaatccatggactaattacaataaaaattattaccaatttgaacttttggcattaaatattttgaattttttttggacaaacatttaaaaaaatttcattttttcaaaggctcttctgatactgccatcattatg

SEQ ID NO: 100554 - DNA, 116 bp, Heterodera glycines
gatcaaatgattaattcattgaagttaataatgtagagcgaaattcggtgcacatcatttatcaggcgaccataccatctcacaacgaaaatttcgtttattcggccggacaaatg

SEQ ID NO: 100555 - DNA, 244 bp, Heterodera glycines
ccatcgtaaggccaacgacacaacagtagccaatgttcctgcggaagtgccgacctcaaataccagtgccgatggtctctcatctgccgctttaaacacagttcggacagaaatcgcaaaaagcgggggagtgccatctccagtggcgaaacaatcggcaaaagacgcaggggcaaccacgggtaattagggggttattctacaggatttgtaaccgtttttcaccaaaaaataaaatattatg

SEQ ID NO: 100556 - DNA, 791 bp, Heterodera glycines
gcaataaaattacgaaatgcctcccgacctttagttgtttactgttttttgtgatcagcaaaataaaagttgcattttttgccattgttagcacctgttgctgacaaaagtccaaaagcgcgtccctggcctgcaattcgccctcatataaacacaacagctcgagcatttccttgctgctgtaaagcggtggcgactgcaatttctccacagagtgcgccgtatttttcattgtcacagaccaaggaacagcagcaggaaaggacggacgtgaagcaaaaacccgaaaaatttatttttttgactcgaaataaaatgcagatataatgccaaaaattggaaattttcaaattcaaaatttacctcaaacagaggtatgtaaaaacatatggaaaaattaaaaaatataaaataggtaaaaccccaagttcagatccagacttttttaaaatgtcgaactctattaaaatattcccagcggaatctaaacacacaaggcaattaaaacagaaaccaaaagtgcatttatttagcgttcataagaaagattcggaggtggacagaattttaaaattcctcgtaattttttacaagtaatgtgcaaagaacagaagcgttgttgatatgccgattaaagcatacctaattctttcattttttatttatattatcaatatgaaaaaacctttatcgatatgtatatgtcaaaattttttcccttgttcattttagcattgaatttctggtaattattgtagttgaaacacagcgccagtgacgcattgaccatg

SEQ ID NO: 100557 - DNA, 357 bp, Heterodera glycines
  unsure (1)..(357): unsure at all n locations
atagagagagagagagagagaaagatatagagaggaagtatagagtgtgtgagagagagagagcgaaagaaagagagagaggaagtatagagagagagagagaaagagagagagagagaggggagagcggtgagaagttatgcgatacagactgttagaaaccgacgagagattactgacctacctagctaatgagtctctttcataattatgcaacaattaccctntaattccctatgatatgtaannntactttcnccaaaagtgtatccctttaatnntgtaacntnaattaagaatgatggcgttggcacagtgtntaatgacatcgcaccgcagatgatcaatggcaccatg

SEQ ID NO: 100558 - DNA, 1003 bp, Heterodera glycines
aaagaaacaaagttttattttagataggattgccattttttatgcaattttagcacattgactaaccatcgcccattttcgtgcatgttttggcacattgatcaatcatcgtgcatgttgaatgcctgatttactctaacaaataattccttaattcattaatccatttacccttcataaatttatttttcaccccaattcctggctttattttaagaaattggtgtccagttttccggtgtccaattttctggtgtccaattttctggcgtccaatttaccggtccccacaggcggggaatgattaaaccggggatcaccgaaaatgggaattcgtaaaccggagaaacgggaccctctaatggggaattgaatcaaatcttcaaacccatcttaactttatattcctattttgtgatttttacaattaaatccgtgccttgtgtataaataattgaatacctaattcaaatcattgtcttttaattttctcaccaaacaatgttccaaaaaatttcgcttcacattttgcaaaattcttctaattcttctaagaaattggtcccgtgggttcatgtttttttacataatcatgcctaagtaatgaaaaattaagggatcggaaattaatttataatataaatggaaaacggataattaaggttttaaaaagaagcaaattaatagagaaatttggttttttaaaatttttcatcaaaaattattaagaatattgatgcaaaaagaaaatttgaatgagtaatttgtaaataaaattttaaaatcaaaggaaggaaaacgaaaatagcatatacagaccaatggaaaaaaagattggcattggcatcatttccgggcaaaaaattttggaaaaacatttccaatttcaatgaaaataaacgattttggaggaatataaaagccaaaagaaagccaagcgaaaaacatattcgaattattttaatttaattaataatttccttttccaaaaacctttaaaatg

SEQ ID NO: 100559 - DNA, 675 bp, Heterodera glycines
gtaggattcatcgctttaacaaatagggcacattatgcttttataaataggcaaataaattttgttttatttttgtatattgttaaactttgaagaaattttcgctttttttgtataaattaataaaaattaattatttataaaaaaataaaaatgggaagatgcccaaccaattgcaaaaattcaatactatgaaaataatatataaaattttttacgtcacatgtcacgtttcaaatgatgaaaaaaaatgggtgaatggcataaaaattttctctgatgagttaggaagcaataaatcttattgaaaccgaaaaatatacatattacaaggtgagtgttgaaaaaatttaaaaaattcgaaaagcacgcattttcaaggacaattcagggatgtccgtaggtatttctagcggatccattttcaaggattgtccctattttctgaattgctttacttaatataatcaatacgtaaatcgttaatacatatgcacataattttatttgtggaaattgaaaaaaattattttattttaaaataagaaaaaatatacaaattatattacaatgaaaaaatttaaatgaaattaataaaatgaataaatattcaaaaattttagataaaaacactaattactaaaaaatttatttattttttagacaaattaaatg

SEQ ID NO: 100560 - DNA, 547 bp, Heterodera glycines
tcgaaagtttttgggtgggactgtcgcgcgaggagtggcgccgaccgaacacagaaccattgagcagcagcagagaactctctaaaagctaacaattcggagacaaaattggcactctgccaactttttgggttcgtccccaaattggcattttttgttggcctggtcaaatgcgaagtgcgcaccaccgaatcatcgtcagttgtccgaatcagtaccaaacttgggggagaaaagtactaatagagaaagaggacggagggggaggggggctgacaaatgagaaacgggcaggccgaatttggcagccgtttttcaaggacaggtccggccgaggagacgaaaaaatcaaataataatcgaaaagaccaaaaaaaacgtaaaaaattacccaatgctcgcgtaaattgtaaagagcaaagtcaacgggagaatgtaccaaaccatcagattaacggaggacaccaattggagaacattaatgtccgacctttgggtggggaggggggacagatcaaacagttattctaccgaaggattaggcatg

SEQ ID NO: 100561 - DNA, 252 bp, Heterodera glycines
acgacgggtaacggaggaaagggttcgacttccggagatggggcccgagaaaacggccactccgtctaaggacggcagcaggcgcgcaaattcacccactctcaacgcgaggaggtagtgacgagaaataacgagaccgatctcttctcgaggccggtcatcggaacgggtacaatttaaaccctttaacgagtatctatgagagggcaagtctcggtgccagcagccgcggtaattccagctctcaaaatg

SEQ ID NO: 100562 - DNA, 404 bp, Heterodera glycines
tttgtccgtctccgtcccccgcctcccccctccccccgaaagtgtttcggccgagtgcgtttccccctccgccgctctcctccgtttgcgtttcttctccgattcgtcgtccatcgttgtgcgtctccgcggtttgcggtctttcacatttaattactgtcttaattgtttctaagttcaatggagccgttccgcccaattttcttcggtcgatggctttttagaggcggacaatgtccgttcccaatcgtttatcgttgatggccttcccttgggccatgcgttcgcctttcgcgtttccttcgcctcaatttgggggtggggccctccggcaatggcagtgccgacaatgctacgaatctcaagcaagaaaagaacaaaaaaaggattgatgataagcaatg

SEQ ID NO: 100563 - DNA, 55 bp, Heterodera glycines
gcgccggcaaaggcatgaagcggtgatttttgtgttggcactgaacgtgccgatg

SEQ ID NO: 100564 - DNA, 130 bp, Heterodera glycines
tccgatcgcactccgaagggttcagctgttgcagcttatggccaaactcggcgaacaaagtgccgaaacactcaaattggagggggagggggaagcgtcatgccgtcatcgtttgtaccgtaccaacatg

SEQ ID NO: 100565 - DNA, 1003 bp, Heterodera glycines
acaaaattgattatgaattgactgactacttaaagttcaaaaagataatttaatacaggaagttccattaaaatttactttgattaaaatcgttataattatttattaatgatcgaaaaatctattggagaaataataatttaaattaatgaatggattaacacatcaattgataaaatttttaaatgaaattctttcatgtgagacgtattttattaaaaaaaattcaaaagtcacattatttttattttaacctaaacaatttttttaaattatgtttgatgattttaaataacttttacaatactttttttcatattttccaaaatttttatgaaaagtgaaggctttaataaaaatgttctattgatccacacaaatatatcaatcattcaacacgggacaattgctcattcgaacactttagaaatttgatcaacttttatttgtcgcttcgtttaaaaacaaaagtggcttcaaaataatatcgacttttatatatttaagtcttcttttcgtccatcaattatattttgtttgtaattaaagtttgttttttgatataaacgaaacatttaatttatattttacacaaataaatctttttaatgtaattttatgacggaattttttttctctttaagttgattattttgtttttttatgtttgttaaaggcactcacaaattaaattataggattttttgaattggattatagcatcaattgttttgtttaaaaggacaaaaagaagaatataatatttaatccaattacatttctgtgttgaaaaatgaacaataataaatatttgaatttaaattacgaataaataaatttttagaatatatttaaaccagtccacttttttaaattatcataatgttttaacagaaatcagcattataaaatatatttatagaaacaaaacttttttaacttttctgttcgttgtaatttttacaataaagcaaataattttttcccagctctgttgttcatg

SEQ ID NO: 100566 - DNA, 625 bp, Heterodera glycines
tttcagcgtaattaacaaattcgcttataatacgtttatcgggtcccttctccgccaaaatcgttattttttctgccgatttagtgcttatgtaattttcttttaaaaaattattgttgtgtatgtttttgtagaaattccattcgagattgccttctttgtcagtcaaaagagtatactgttttgggccgtcttaaacaacaaagcacaattcatttttataaaattgccctattatatgatctttcaattttaatgctacattataataaacattttaaatcaaatataatcctcaccataagggccaactgcaaaaataattttatactggccactcggataaatgacatatctgctttctcccaccgtaattcattttttgttttctgattttctgaatcgaaatacgaatggattggttaatggtttatttccattgataccgaaattatctccaggatttttcaactgagtcatttcccaaacgcttgatcccttaccatttttggcgattattgttttgagtgtcaccaatactggcgattttattacgaaaattgtgcagttttctcaactccgaagaaagtcactgagttgcctgaaaattgtttctttagaaatg

SEQ ID NO: 100567 - DNA, 337 bp, Heterodera glycines
tccggaaaataccaagtttagaaaatttgatttccactaatttgaaacactcgagaatggaatttttttttgtttcattaaatttgaattactcccgccgggtctaccgttaaaaatttatagcattttttacgggagttccagttccgttcccggaaagtttcggactcccgctcccgtaaatttttttttttaccagtttctagatttcgcttccgctttattttcttctattttaattttgatgcttcgaaaaaatcaatttgccgaattaaatattcgccacagaggaaattccgagcgaacacttgccacagtgcgacgagcagttcgaatg

SEQ ID NO: 100568 - DNA, 527 bp, Heterodera glycines
gcttagtgctatcgaagaaatgaataaaatatttagttcgtctttgagcaaaaattatgggtaatttttcgtcaaaatttttcatattggtggttttttaaaaaacgactctgacccattaaaaataaaaagatgtaggcataattatcatggtgaacacttaaaaacaaaattacttgttaaaattttgtggagaataaatgtcaataattaaaattatgaggtgaaaaattctgccaatctttcggctctaacagccacaagcacgctggaaaaggtgaatcgtgcacccatttaagaggttgcactccttcaaagtacggctgttatcaagccgacgtcctgaagaattttaatttatgcgcaaaataagaatcaaggattatcgaaacaagtttaaaaaattagtttctcttatattggcacaaatcgctaaaattagtacaaattctgttaataaattgccactcggaactctgtttttcgaaattgggcctcttaatgccaaatttttccaggcccctatg

SEQ ID NO: 100569 - DNA, 287 bp, Heterodera glycines
tcggcctcaagaaccgctgtatgaggccatattcgcttaacaaaaatttttacgcatagattttcattacggtatttatttatattgaaatacggtagataaattacggtactcagtgtgtaatattaaagtaaaaatagtaaaagtaaaattctgggaaagaatatttaagccttggccaaatattttgtcatggcaagcacattagctaatccgaattcaggataaaggcatttttaaatgttttaaaattggaaaaataaattggcattttgtctcacaaaatg

SEQ ID NO: 100570 - DNA, 338 bp, Heterodera glycines
aaaatacatcagtggagtatgcggcagtagaaaatgcgtcagtgatgcaaatattttaaaataaaattctatggcattagtattgtaatatagaagtaaacttctataagaaaatcattctcaattgcgaaccccggacccaaactcgaataaaaaatcgaaagtcaaaattttcgaaattagtgtttttcttcaaatcggtttaaaaactgaaatacatcaatcctgcaataggagatcatttatgccgtttttgaacaaaaaaagcttaattcgaaaatttagacttgcaactttttgttcgaattcgcgtccggggttcagaattggccgaaatg

SEQ ID NO: 100571 - DNA, 527 bp, Heterodera glycines
aaaatttaatgcaattaaagaaaagttgagggaaaaaggaaaatatcaacgaaaaaataacaataaaattgagatgaaaattgcaaaattactaggaacaaatcgcgcaaaaatatataaatggaaaaaaggattaaatttaaacaaaatccaaacaatgaaaaagaatttttatgagcagaaaaagcgcgaattcattgaacgaattgatgaatttaaaaatttatatgctcaaggcaaacagaaagaatttgtgaaggaattgggcatttctaaagacacattccgaagatggaaaaacgaattgttgccaaatgaccataaaagtaagataatttttttaagatatattttttattttttatataccttaagcacaaaagaactgtcccatttcgaatcttgcccaaaaaagttgtcatttgtatcttgaccgtatttttttattcccgagtcgagtttggttccaatgattcgagtcccgcggaactagttttgtagattttcggaaaaaaattggtaaaatg

SEQ ID NO: 100572 - DNA, 119 bp, Heterodera glycines
attgaaaataaattttgacctttcctgaagaacgttgactcatttgccaatcacttgggaatgcccgcaaaggaatttgagcacacaatggtaactgagaaggaggaaatgccaaaatg

SEQ ID NO: 100573 - DNA, 569 bp, Heterodera glycines
  unsure (1)..(569): unsure at all n locations
agttattattatgttttttnttgtgttttttacacaccgagtcaattttgagcccctagttcaaaaagtaaatgcatatgtggcgaaatggtttttgtaagatagtaaagggacaaagggtggtggttcgagtccgttgtgcaacacgaatatttttatttatttttgtccaaaatattaaaaaatgacgatatttgggaattatttttgaagctttttcccaaccaaattggacaatcttagtatcattcgaaagctcttgatgaggagaagctttttctaagcaaatgctaagcaatttgatgagttagaaaaaagatatgatgcttcgaaattttattttttgaataactttttagaacaacatttaagctataaaaacaaacagagaaaacgatgcagaatttttttctctgtcgctatgcaaaatttgaagcgcatttaacataggacaaaaaaactaaacatagaaatgtaaattccgtttttctctattaacacagataaagaaatagtacgccaaaaagagagatgtttttttctctgcactctctctttattgacacatg

SEQ ID NO: 100574 - DNA, 418 bp, Heterodera glycines
tctttgttggtggttttaaagggattaaatggggatccccaaaatctcgccgagacaaaacctcgtcccgaaatttgtttttttttaaattttcaaaagatattttttctagcgtttttagagttttataatgaattactaatatgtattttcaaaaaatttttctaaatcgctagaaaatttttaaaatgaaatgtttaagattttttttcttcaagttttatttttttttcatttttaaagaattttgcctttttctaacaaaatgcgttgaatttttcaaaaactaggcaccgctggttccttcctcgctcagaaatttttttttttttttttgaaaaagcaaccaaaaatggttgaaatttttttatgatgctcaactcccctccgcataatttaaaaattctcttttggcatg

SEQ ID NO: 100575 - DNA, 360 bp, Heterodera glycines
aacaaagcatgagaatgaattaattaacaaaagaatggtaattagtagacaaagcatgggataattttaattgtcaaagaatgagtaaataatgtttgcaaatgatatttaaaaatggatttagcatggataactaattaataaaattaacaaaaaatcttttcaactaaaattgctgtaccattaattctgcaatttgttttaatttttctgagaatgggctaatactgacacaatgttccaatttttgatgatttcttttagtttttccaatctttggattcaatttcgtcgattccaaaatacactgaccaaaattttccgatcaaattcgtcaacagcaggaatcagtcgcaaatg

SEQ ID NO: 100576 - DNA, 1003 bp, Heterodera glycines
attttcatataaaaacaccaatttaaaaaattataccccttgatttttttttgcgttttgcccaaaacttatgaataaaaatgtaataaaaacgaaaaataaccccctaagaatcgtccaaaaaaaatttcagaaaatatatcctactaggtcgttgcataaaaacttgccgttttgtcatttttacacgaatattgaaaaatttttggttggagaaaaatctgcttttatgttttttaaatacccctatatgtcctctataaaatgacaccaaaagtttttggccaagctttgttaatgccgagaaaaaaattcttaaaccggtttaatttgaaaagtgccaaaacggtttttccggttttaaagcggtttaacattttgaaactccttggttttatacccccatctaatgcccaagcttatttatttatttcttttcttgacaagaatcttttgttttaaaaattatgttttcaacaattaattaacttaattttgttgctttttggataaattttacgattttacacccctaaatttgaaacttaattattatttattgtcgaaaagtccccacctaaaatttataatatttctgtcgaatggaataaatccatatttggccataatcaatcgttttataccgtatcacaaatattataaagtgcccaactatgatataatttgaaattctctttttgttattaccaaatttttgttcactgcagaatttaattttgggtatttgtgcttttgttatttcagcttttgatgagtaattaaatgattaatgaataaatgattaattaattgtattcctttgtcgttccattttgataattatttcgaaatttgcgttaaacaaaagcaaaaatgttattaaattaacactacaactattcaaataaagcaacacaaaattgttagtcaaaatggaataatggaaacatttcttattaaaagaattgaaaaaatagcttaattccaattcgaattaaaaatg

SEQ ID NO: 100577 - DNA, 201 bp, Heterodera glycines
atctctaactatttccacttttaaaattaaaataacaactttttaggaactttttctttttatttactatttcttacattgaaaatgtgtagaatattgtttttagacgatataaaaaaggtctgagtgataaatataatcaaattttcaaattcacttttcatttcatttcgcttttagaacggtgttgtgccacaaatg

SEQ ID NO: 100578 - DNA, 1003 bp, Heterodera glycines
cccgggaccgggaaccgggaccgggacctcggatgaccgggaatttccggtcccggtcccgtggcactctaatttaaagttttcatttgacgaatggcactgacggagtaaagcttatacagcttcgtgccacaaatgaaacggatgaagcaataaaaaagccctatggcattgaattttggcttgcacatgacgggggaatttgtgacgaaaggtgggagaaaatatttgaactgttattgaattaaaatggcaaataattttttaaattgttaactttttagcgcattgggacatttgttgattatttttggaaaaacaaattaagaaaaaattttctgaaggtttggccttgtaagtacgtctcttcaaattccaaatcgcagagagtgtctttacatgagtttccggagagtttttttttaataatttaagaaaaattcaataatttttttatggtgtaaaaaattgttcggcgaagtcttgtcttgattcattctccattgttgaaaaaccgcaacaatagattaaaattaaaattatttttgtttctatctgaaattaggaagtgcgcaattaatgcggcacacttttccattcattttttcttgaaattgtctgtaaatgtcccaatgcaatttttagattactgatctgttaccaggcattgcttcaacttggcaatcaatcggaaactgtgaaaaactttaaagtgaaaagagcattcacaattagtgacaaaaaagtaatatataaattttaaaatttaattgcgtacaaattaaatattatggaaaggacgacattgccaaggaatgcgtggaaattgattgcttcacacccgtttgaaataaatttaaaataataattaataaatttaaatattttaaatatttatgaaaaaattaaatattaccattaaattatgatattcatttcacgggctaatgaaccgccgttgaacgtcgtcaaatcgttagaaccattagaattggtctgcatg

SEQ ID NO: 100579 - DNA, 177 bp, Heterodera glycines
tcaatttaatttatgctttcttaactatagctactgttaatattcatatttatttaattttgtttaggttcgtttcggttttgttaatggcacaggttaacaattattttaattttactctttcaaattttcggcacttttccccttaagacgctttcccaacgctgcaaaaagatg

SEQ ID NO: 100580 - DNA, 740 bp, Heterodera glycines
  unsure (1)..(740): unsure at all n locations
aaaaatgcaggagtccaaatttgggagcgggattctcgtaaaaatcccgtctattttttatgggagtcncagtgagagcgggagcaatntaataatttattaaataatagaaatgtatttacctaatatttaaattttaattctttctataaaagacaaaataataaaaaattagtcaaaaatacgttaaatttttggtacactcccaaaaaattttagggaaggtgtagtgtcgataggcgtcgccgggtaaaatagagtacctagtttgttaacaggaatatttggcaaattttgtttattagtaccaaaaaccaaattttatttaataaaatgccttttgtagaggaaaaaatagcggtttttattatttaaaaaatttaaataaagttacgatggaaaaaagcaaaggtcctaggttcgagttctacttctatgtactgtgtgtaaactaagaaagacagtaaaaagtagacactaactatatagatcttacattttttacaaggaaaacttcaaattaaatttaataattttggcgttacgattaaaaaattatttttaaatttgaacttgagttcaaaattggctcgctgtgtgtttttatccaaaaatgatcaaacttcgtttttgagccaattttttgaggatttttggaaaaaatagcgatttttttggaaattatgtgagagaggtcttggagagggattataagaacaacgcttttcagatttacaatg

SEQ ID NO: 100581 - DNA, 93 bp, Heterodera glycines
ttagtaggctagagtctcgctcgttatcgaataaaccagacaaatcgctccacgaactaagaacggccatgcaccaccatccaccgaatcatg

SEQ ID NO: 100582 - DNA, 1003 bp, Heterodera glycines
acatgggaacattcaaaagctaattacaggcaattttcttagtaattaataattataaaagaatgccaaattaaaaaaagttcacaaaaattatgaaaaaaacaccaaaaattgtgacttttctgtgagccatttaattgcttagcattagcattttgaaaatttcttttaaacatttcgagtttttgaatgttgccaaaattgttagaggtttgaccaacaaagaaaacttcggctgagtcggagttttagccaacatcgacccgagagaaaaaaaaagtctaaggctttatccctacccctcccaattgcacggagcccccgaggggcagaaaagcgaatgctccctctccccatccaagaagaagccatccatgatgatgatgaggccaaaagcatagactgtgctctccctggggcgcaacgggggcagagaaaagggcacgggagaggcttcatctacccaaatgcatgagccctgctgaggggattagagtaggtcgagagtggcgagaatgatgaagccagaccagccgactgtctgtctgtctgtcactcaatcattgtgtgtctttatccctctgtccctcggcacatggttaccgtctcgcagtcccgaccgacccgcgccgcggcactggccaaaccctcattatttccattcattccgcttcaacgccatccatcactctggcactgtctgtgtgagtgtgtgccatcgatttgtggcacaagtagtgccccgcgtgggcgggattggccgagaagcattggcacaagaatttctcactcgccatacccccgctcccggacacatttccttgatgcttttaacttttgcatgagggacgaaacattcatcattgtttggctggcaaaataatatttttgatatatttttttgtggcatccgtccgtcgagagtctcgacgactacttgtcaaacaaaagacacacttttcacacaattcccccgagggaatgaagaagaacgagaaaaatg

SEQ ID NO: 100583 - DNA, 449 bp, Heterodera glycines
ataaaagcaagcaaataaataaattaattgtctcttatgtatgtcatgggaatttttttttgggggggggggggaaccactttaaactactaccaaattctttagacaatctttcaattatcctaaaccaattggccaacaaaaaaaatcgagaaaaataaatgagtatgtatattatagaaggaatgaattaacaagcatttctgagagaaaataagcacaacaattgagatcgatcatttctcaaatacaataatattcatttccatacacttaatcagacgacatctttgttgcttctatccgcttcttcttttcttccatcactttttcttctgctgctcaccgcactaaaaaaagaaatgcgtatttttgtttaaggtatagtgagtaaacatacgcggctggagcggtccttctggcgttcaacgtaatccgattttgccatg

SEQ ID NO: 100584 - DNA, 286 bp, Heterodera glycines
tgatttttaataccatatttagccatttttgaatggctttactttatattaacaaatttaaagaaatttttgggaaattataccctcaatttgaaaaatttatgtccatatttttgccattttatgtccatatttcgcgattttatatccatattttgacagccctagttatttatggccattatttttggccagcagaccattttaatcttccttttcgcatccctttcaaatatataatgaggtcaaaaagactttttcattcataatacatatcgcaaaaatg

SEQ ID NO: 100585 - DNA, 1003 bp, Heterodera glycines
gcttattctatcaataatatgcttaaatcataaaatatataaaaaaatacaattgtgaataataaaagtgcaatgcattgaatgggtaaaatatattgatggattttttgcctccaaataatatttaaaaataatatatttaaaataattattaattaattaaaatcatttgttccgtactgaaatgacccgcctcttctgatcacccacatcgatacttttgacacttcatcacagcacctttagctttgttgcatttttttaaacaaaggcaataaaaaaatgcatggtttaaaattaaaattaaactatcgtttttgattttgaaaagctcctgctggttaaaggagataatttagcagaagataggtcaacaatttgccttgtgcggtcggggggggcgaatctgtgcaatttcattttgccggtaaaatatttttgaatttctaaatttgccttgggcaaaaaagagtgaaaacgaacgatggcaaatggaaagaaagaaaatggttaaaacaggggcaaataatggagagagaaagggccgaatactagtgatgaatattctcaaacaaattatttcattcaaataaaataatgttaaaataattcattgaaaaataattaaattactttattatttattcatgtggaatttgaaagggtaaacccctaaaattcaactcaatcattacggtcactgttctctcaattaattaatacgagataaatgaattaaacggaaattttagggttcttttgggtttcgctacccacatctgaaatctttttaaattttattcgttgttgatcatgaatcagaaaccataaataaaaattttattatttgtttcagagtaacaaaaccaaaaagtaccatttttcatagagcttccactgctgcttattcgccttgttcccattgtgaacttgtaaattttctccccaattaagcccactcaaaaagaaataaattgataattttagacaatttctaaaaatg

SEQ ID NO: 100586 - DNA, 1003 bp, Heterodera glycines
tgaattgttaagaaatgatcgaccaatttggattatggaattattgacgtgatcataaacattgttttcttttttgtaaattggactgttcatgtttggttatgttatgtcattatgatattttgtggttttctaaaacaaaacatacgcttcaattttcaatattttccccagcaaatgtgttggaatgatcaacttggatttgtgttattatgtcattaggataatttactgattttctgaaataaatgtgaaaatattattttggggtctgaatgttttcatatgaaaagttaggcccgtcaattttttattcacccaaaatggacagtggtgcactttaggcgtccaatgttatgtgaatggatcatttgcagtttaaatttggaaaatgaaagtctgtttcgatgtgctcattaaatgtttattttcaacatggatttatgcctgaattagaaataaatcccaaatttcttttcaaaatttcaggtgaattcgagagttggaccattcccgaatttgcccttcaatcgccccaccctgtcctcaagaatttccatttcagtagcagttccatgtcgttgtcgcagtgatgtcattatgcaaatggaatttgacctaattttaaattaattttttattaccacgactgttttgccaatttcgcaatccaatcacttcaaacaattaattccctttccctcttttcattcagtttaatgttgatgttgtttcatttcatttcgtttgtgtgttttctctcaatttttaaaataaaatccgccgtttcccaatttcacttctctttcaaagtgttgacaaaacaaaaacaccaaatctacacaaaaacgagaactattccatttaaattgaccatttgaacagttttttttctctttcgtttttataaaggaatacaagctaatttttcttaatttttttggttttactaagctaatttcaaatccgtctaaatctctcaattatttacctcatcaaaatg

SEQ ID NO: 100587 - DNA, 236 bp, Heterodera glycines
aagagaacaattagttcaaattctggtctggggttcggatattacatattttattgtattttattaagggattttctgaaaatctggaaaataagcactaaatgtctaaataagacaataataggcattataagaatcttccaaatctatttctccaactatatattttttattctatcttttaattcataattttagcttcccactagtcttttaattacgggttctccaaaatg

SEQ ID NO: 100588 - DNA, 1003 bp, Heterodera glycines
gggattgcctatttttgaacgctttttgcatgtcttaaaatgggtcaaataaaaaattgaatatgcctatcccctccattaaagtcttggctttctagtgatgtataaattgtcagggtccgggtccgggaagtgccctaaaaagggagttcaagcacttttgatcaggattttttcaaaaaaagaaggaaaaggaaaagggaattaaacgggtaggaggcaagcgactcggtggtcaagtggttagtgtgcctgcctttggtcatggggtgttgtgggttcgagtcccattaatttattggattttcccgtcaaatattatatttaaattatttggttttaaatttgtttttaatatttttcctataaaaaattttatgggtttataaaagagaaagacataataacaaaaatttggagcaaagtacttttggataaaaattgattactttcctttctttcctttttttatatgtaatgcacgctcgccagtggtctttaacctcgccttttcaataagcaaaaaatgttcattatcaattgtttccatttacatcatcagttttttactgctcctacttttattcaataaatatttccaactaaattattgctgttttaatagcataaatttttagtttttgcctttggtggtggtgggcgacggctcgggtcccacctattctgggtgttttcatccattattttattacattttttgaatgattttatttttttaaaattaattaagtttattaaaataatttattttaaatattaaaaataataattctttcttcctaatttagcccaaaaatctattgtttgaccttttttgtgcaaaatcatttaaaaaatggagacaaattaataagttacctaaacataaaattataaatattttatgccaaaaaagaaggaaagtgaaaaggaaattaaaaggaggcaagcgatccggtggtcaagtagttagtgtgccttactttggtgctggcttcccatg

SEQ ID NO: 100589 - DNA, 210 bp, Heterodera glycines
cccgcgtcgtttcgtcccgcgtcatttcgtcccgcgtcttttcgtcccgcgtcatttcgtcccgcgtcgtttcgtcccccaagccaaaatgagtcatttcgtccccaaatttctttttatttataaaatatttagtttttaaagtgttaccactaaaaatttttctgggtttagttaaacaaatcataaatttacgaatttagacgtatg

SEQ ID NO: 100590 - DNA, 155 bp, Heterodera glycines
ggtaccaatggacaattaaatccctttaaaatcatctattattttttaattgaaattcaatttctattaatttggttcctaattagatgagtgtgctcgctctctcggcttcgtccgtgccatgttcgaaattgccgcttccgccgcttcccatg

SEQ ID NO: 100591 - DNA, 473 bp, Heterodera glycines
aggtcttcaaaaaaatttttaagatttttccttgggaatttacgttttcgagttaaatttcctcagtattaaaatcggaaaacttccgtcatttccctcgttttggttttttctttttataaatttacaataacaacgacaaatattttttttgactttaaaaattttcccgcgtcggaaaaaataaaaaataattgcaatttgcaacgtttcctaagaaataaaaacaataaaaaatgggaagcggaaggcggaagtgtggcgggggcggggaattcacggctcgtcctgggcgcttccccaaaattataaaatataaaatgttgccaattttgagcaaatacatatgaattttgaatgataatttttattttttcataatataacttataattatttttctctccgttttcgcattttccagcagagtttttgaattttatttgtctttttccattaaaatccccaaaatg

SEQ ID NO: 100592 - DNA, 174 bp, Heterodera glycines
taattaatgattttttcaaaaattaatttactgacttcaaattatcaggcacaatcgctttctatcacatatatatatataaggcttgttcaaccgatcgggaattgaaaaaaacttaattttgaatccgattttggacaaaggcgcaaatgtcgggacacggagaaacccatg

SEQ ID NO: 100593 - DNA, 243 bp, Heterodera glycines
tcctcgtctttttcagttccgaatgaggtaaaaaaagaaaaaatggggccctaaattatggacgattttacttggttttgtgagcaattttttgcgtcttaatccggctcaaattttttttttattacccaaatggttcaaacttcttaatgaaaaaaagcattaaagttttagcatttcgctcaaaaagcctcaaaattttgcaaatctttgtccaaatttgtaataaacggcctaaaaatg

SEQ ID NO: 100594 - DNA, 137 bp, Heterodera glycines
ttttgcgtctgtttctgcccgccgatgtggtgacgacgagagcggcacttgcgaatacgacgcggaggagggtgggcatggaatggcattattgttagtcattgttttcgttttccggcattttcacggtccgaatg

SEQ ID NO: 100595 - DNA, 171 bp, Heterodera glycines
gataatttagcgtcataatgggatgtataagggcgattgtagaggaattggaagcgctaaaatgtttgaggagctttttgagcgtaattacgatttttacttacaccattttttgctaggcttagatcacatgcgattttcggcactctgataattttagcgctcataatg

SEQ ID NO: 100596 - DNA, 166 bp, Heterodera glycines
ggttcaaatattattactattttgacagtgctgatcaaatgactcccaattctttttttaggacaatgaagggaaaaaaggcctcattttcgatagtcacattgacataacgccttatgtgtttttcttggagtctgctttaaaaagtaaccaaaccctgtacatg

SEQ ID NO: 100597 - DNA, 457 bp, Heterodera glycines
  unsure (1)..(457): unsure at all n locations
tttaaaatttttttgaatttttaaaatttcccggttggtncccggttcccggtttttcttgcggtcccggtcccgaaaaaaaaatcgaggtcccggtcccggcttctcaggtcccggcaagtcccggtcccggttttggcaaaaattcccggtcccgtggcactctaataaagaaataaaaaaaaaaatagtaaccattttaagaatgccttttgcaaatgagaaaataaaacaaataaaatcaaatatttctttttttaactcatttttacgcaaaaactccagccatccaaatccaattataaattgcttaaattcaaacattcacttttaataaggatttttgcttcctatgtatctttttttaaatattaaataattatgcatttatattttttaccttttaatttatattaattatgacgatatttttttcctttagctttgtgagaaaatg

SEQ ID NO: 100598 - DNA, 147 bp, Heterodera glycines
tttaatagaaaattgtaaatatttttgcttaaaattctttccattaccctgcaaagtgagcaggttaatgaaattggcctatagttttcgggattatttttgtcaccctttttaaaaagcggaaaaacaattgattctttccagatg

SEQ ID NO: 100599 - DNA, 207 bp, Heterodera glycines
gaaggtgtatttagagacataattaggttagataacgaagcaaaagaattttctttttctgcacataataccatggttgaagcccaaaatataaaaaataaaaaccctgataaacctggtgtaaatttttggcatagcaaattattagatggagttttaaaaattcatgccctatttgacaaaataaaaaaagaagaaaaaaatatg

SEQ ID NO: 100600 - DNA, 209 bp, Heterodera glycines
aatcatccattgcccaacttcatggctttgaacgtatacgtaaagagagccagtcaatgtgttcattgcggagatcagcagaacttggagaaatatctaaaaaaataagttaaaatttgaaatgaaaagaatttaaatttctaatccaaaaaattaattttaaaattatttaatagatattttaaattttagtattaaaaagataaatg

SEQ ID NO: 100601 - DNA, 894 bp, Heterodera glycines
tgcagataaattgggttctaaaattatttgaaaataattccatttcatattttgcggcacaatactctaaatatgctttgtagagattttttttgatattgttgatgaagtggaatatttcgaattaatccaattttatgaaaatttaatagcattttattcgaggaaaatttttttgcgtccagaatttacggacagaactcgtctgtacggtccctttcggcccaactgtagaaacacctaacttaaaaggcgcataacaacacaaacaaacaaaaaatgtaaaacaaatatatttattttcttcgctaaattaataatataaatttattaatggcttgccgaaggcccaactggcaatttaaacataatcagagacactcaattagttttagtttttttatcattctgaattacatataaaatcgtgtagccaatccatgcttgtcggacttagtgttttgctttgtccatcgggcccttaatagctgttttatatttatatttcatgaaaatttttatcgaaaaaatattgtaatttttcatattttaatttaacaaggatctattaaattaattttatttatttaaatatcttaatttagtatttttttgcaggacatattccatattattatgataaatatttattattaaaattttattgtctttttctgagtctaagctattcgcaaaaactcagaatccttaaattaaatatgtaaaaattaaagtgttttttatttgtaattttttttcacatacatttgccggttctgagtcactttgatttaaaacaataattattttgtaaaatttttggaaataatgttataaattcaaatcatatcaatgatgtgttgccatttttcaggtaaaagatcaatcccaatg

SEQ ID NO: 100602 - DNA, 1003 bp, Heterodera glycines
tgatgcgtcagtgagtcacacccaccatttactcattaattaattataattaattcgctcatttccattttttgctaatcaaattttgctgacagcccagtctttgctaataagctgtatgtgacagatgctcttctctctctttgttctttgttgtctgctgctgttccttttccctatcatttccatggcatataatgaattattatttttgcccccccccccccattaatgtgccattcacacgaaacagcgaaaaaacgcgaggttcgcccggtgccgccgattgggcaaaaattcttggccaacaaaatgtttggccacaaaaacttttacggtgccttatttatttgtggggcaaaatttgtgaaagcaaagaacaaaataattttatttaattaaaaaatattttaacttttaagttttttagttttaaatcaattagcaatagaaaagggctgcaacttttagtgattgaattcgacctgtgtatttttttcaaaattgaattcgtctaaaattaaaatttgaattttgtgtaaaaattttccgccattttatgaaaattcttatgaaaaaatcaaatttttactataaaattagtttttccgtctacagtttaagtttactcttttagaattatttagaaaatttcaagttgcagccctaaatacctatattaataaatcatttcaaaacatgtccaggaccaaacgagccccactcgtcgtaagttcttctcatcaggcattttttttctataatgccacacttttttggcatttacattaccacgacgtggtaactccgtctggccaactctgtctcagccagttttaagaatgctgctttacctttttctaagctccattgactcaaattttgccgtactgagttggcccctttccgattgattcgccatttaattttgctttttattttttatatttgcatttattgcgcttccttttggctccccactgaatgcgacttttggtggatg

SEQ ID NO: 100603 - DNA, 257 bp, Heterodera glycines
tgccgaaaaacttcagaatggcccgaccaaaacacaatacgaacatgtatgcatatgcattttaatttgtcaatggctgacgcgccatatgaagaatcgaaatgatttttggcatcatgcatgaaatggtgcaggaaatggcgtaattattaaattttttaaatattcctcatgaaatgtatttcgactaaataagtaacagcccacttgaatcactttattgtagaaagaagctcaataaaatccatttgcagatg

SEQ ID NO: 100604 - DNA, 412 bp, Heterodera glycines
aattttttttcaaaatacgcattatgtcgatttattttggcgtaagatgcatattttctatgaaattaatagctaagcattattttggatcaaaataaatagttgttaaatgaattcaaagctttttcccagaaaaatttacctttggaaaaaaaattcgaaattttttgttcgaattcgggtccggggtttggaattgagaaattcgacttcagtttagtgatcagcacccccgaaaacccccaaatactcattttgagctcaaataaaaaataataattttatatttgggacccccattctttacgattgccgtttatggcattgcccaatttataacaccaattttggtttattaaataggtgggacagacttttggatgaagtgcagcaagtgggcgcttacccgatg

SEQ ID NO: 100605 - DNA, 1003 bp, Heterodera glycines
tcattcaaaagttctacatgtttagaagcttttggtaaggtatttctaagcgattgaacaacttatgtataaaaaagttgcaacaataaaaccaaaaaaagtcagaatttgcatattttaatttataacttttttacatgtcggtaaatctttatgttttttgggaagccgatagagcttgttaagagctttcgaatgataccaactttattggatttggtcaacaaagaaaaaaaagttataattgcgatattagagacgaaaaatttcgaaaaatatgtagttaatcttgaaaatcggcaaattttaaattttcttgcatgagggtcgatttcgagtacataggtaggtgccaataagtactaatccaagctaaacgagtaacattcaatgatttcgttcatttgaacgtgcatcggtgagtacatattactaaatccggaaaaattcggatcagagagtccaactcaatttcatagcactttttgcatgtttttgatttttttctaccacaattttttgggtcggggtcactttggcgcgggacattttggcgccgcaaaataggtctaagtgttctctaatagcctgcaagatgctagaaaaatatattcgttttaacaaaagatatggcgtgctgcgcgaaaatggccagaaaaagtcagttttttaggtttttggccaaacttttttgtatctcaactagattttttgaaattttgcaggctattagcgactatcaagcgcttaaaatcacatcaagattttttaatttgaatgataaataaaaatgttatagcgtttggcgccaaaatggagagtcttgcgccaaaatgaccggttcccaatttttcaatcattctatgttagttgacaataaaataatatagaaaatttgcttattgtttagaaaaggattttgcaggacaattattttgttcatcattttgtgccactaattaattgaaaaagggaaaagtgtgctaattgaaccacaaaaatg

SEQ ID NO: 100606 - DNA, 147 bp, Heterodera glycines
ttctgatggctcaggcgcttctgctcattttgcccaaggccatttggtttttgttcatccaaaaaaatggcattttttgctcaaaatttccgttgctaattaattctttcattaggctttgccgtcagttttttgtttgacaaaatg

SEQ ID NO: 100607 - DNA, 193 bp, Heterodera glycines
taatgtaaaaaatcaaagaatgtcctgcatttacataacgtgtcctaattttgaaaaagccaataaacaggcgaaaaattttctaattaacgtcatcaaatttatatagttaatcattttaataataacattaaacaaattctgccaaattgtgcattttatttttaaaaattagtaatattttaaaataatg

SEQ ID NO: 100608 - DNA, 91 bp, Heterodera glycines; identical to SEQ ID NO: 100405

SEQ ID NO: 100609 - DNA, 1003 bp, Heterodera glycines
aatagagactgggctataattagagcaaatacggtacatgtctgaacatttgtggcggaagcattttggcgattatgacgccgtttttcaacatttttggtcccaagttgctgaattgtacccatgcgaaaattgatctaacatctccatattgtcgattttgggactttgctgtatttgattgtgttgaactttactttattttatatatattacgtgtttaactttgtagaatttatggattgttgcattttattagcagtttatcaatttagagtctaaaaatgagaaatgtgaaaattttgaattttcgacctttgttcgaattcgggttaggggtttgaaattggtcggaatggatgtcagattcgtgatcagcgaccccaaaaacccacggaaaattgttttttatgccttttaacaaaaaaaaatttatggggcctaaactgtatatcctgtaaaaattagtataaaaatggttgctcttcctccaccacttttcattattattttttccatttgccatttgtttattttcgtctctttcttacgttttttaggccattttttaagaaaagtttgaaattttggagcccggcggctaattgaaagtaccaaaatttcgtgtttttgacttttttgatttctttctcattcgtgtcgctacatttgcggactgacatgcttaagaaattttttgttaaaaaaaacttcaaaaaattcgtccgcaaatgtcggcttttctgctgatgatgatgacgcatcgcttaaatgaccccactttattcattttaattcttttaaatttaaattccttcgggcataacatttagtttctaaatgaaaacttaaatcgaaaaatgacagtgaaaaatagcaatgagactataattcttttatgatattttatgaaaatacctattcatttttatatgaatcttgaagaaaataaagcccatttaagtgccgaaaactgtcttaataatttgccaacaacaaaatg

SEQ ID NO: 100610 - DNA, 85 bp, Heterodera glycines
tttctactgatccgttgtccaattgcgcgagacgaaagcaaatggaccaaatgggaagaagaagcgattggctggcaaattgatg

SEQ ID NO: 100611 - DNA, 267 bp, Heterodera glycines
gtgaatcggcaagcgatcactcaccatttaaccaatcgatcgatttttcactttaaaataaaattttaaaaatgtttgaaaataggatcgctctacaaataaaataggaattcacaaaaataggtacaatcatcaaataaaatttgaaatatggaattagaagcatttaaagaatgtgggtgggcgctcgcgctatataaataactgcgcgtgtccccgtcggcccatttcactctgttcaatttttcaatgacgatcagcagcatg

SEQ ID NO: 100612 - DNA, 329 bp, Heterodera glycines
tgcaggtcttcaaaaacaaacttggcattttaaatttttgaattttacctacttgtcttcctcaagaatgggcccagactaatattgcaattgtttagaaaatcggtgggaatttcgtagaaaaatgccatttcggtctcaaatttaaaattccaaccataaaatataaaaatgccaatattcagctaatttgtagaaatttgccgaaaaactcaaatactttctgcataaaataagcttcaaaaaatcgttttggactcgtaaaaactgcaatagagctgcaccctggattttctcattttgaaggcgataactcctcttttaatatg

SEQ ID NO: 100613 - DNA, 96 bp, Heterodera glycines
tatttaggccttatatttttataattgcatccaaaatatttaaattaaaatttattacaatatctttcatttaggcaaattattatttttttaatg

SEQ ID NO: 100614 - DNA, 58 bp, Heterodera glycines
ataccaccagacgaagagggggaatttgaccacatcgcttttgaatcatcgacgaatg

SEQ ID NO: 100615 - DNA, 1003 bp, Heterodera glycines
attcgtgtgttacgcctgacccacagaaccggttcaatccggcaccaaatttttcttgtgccaatatcaagcatgccatgaaaatcaattgcatatcagggaagtgtcggaatccgattcccgaatttagggctatcgaaagataccaagaatatgtatgccttaatatttttcgggactagaaaaggaattgaaaaaaaaattagacgaaaattgtcatcaattctttgattggttttggcgaaaagtgtggccaaaagcgggggtcatcaaaggcaaaatatttatggccaaattgatgagcgaaagtgctataaagattggttgttgtaatagcacaatttcttgcaggaaaagcacataaaatgcaggcacacacgacgcacgcaaacattcattcattcaaataatttgttgtaataaaaatgattattgcaaaaatgatttttgttacaaaattttatggccaaagggtattataatatgtggccgaccaagcaaatgaatgggcagggaaattaattgttatgtggccaaaaccataatccaaaacacaacaatgaagtagggtttcaagggcccgatccgggtattgccgggtccagaaaagccgagtccggggtccaagtttttaaaccgagtccgggtccggaaatcgtcttcaatcagaccctaaaaaattactcattttttcaaaaaaataatgaaatatttcactaaatatttaatttatattttagattaattcaatgagcaaccaaaaatattttaagatttagtaaaatatcaataaaattttcaattttacaaagtggggaacatgaattgtgaagagtattttcgtaaaaattgaaaaaaaaatagaatttatgcacaatgaaatgaccatctgtgattatggagcaatataccgttattaggtgcgcttttttgcaagccaaccgaagaaagaatttgtgccagatggttttggtaaaagtataaaaaaaaaaactaaaaaatg

SEQ ID NO: 100616 - DNA, 507 bp, Heterodera glycines
ttttttctggacccaaatacttggaattttctttcataacaaatgaaagaagttagtatatatggataataaataatgtcttaacgtcaaaataaaagaaaatacaattttaaaaatggattaaattaattgagataaagcattaaatcaaagggaaagccaaacagaagaaacagatgaattttggattggtataagaaatgtgatgaagatttttgaaaatattttgcttttaaataaaacgccataaaatttaattaataaaatagaaaatgaaaaatagaatgattgagattgtttgacgacgtcattcaactaaatccaatcgataaacttaaaaattgggaggcattttctgaaaaaaaaaattcgaaaaattgaattataactttttgtacaagttcggtttcaatgttcagattggtcattaggcaaagggtccctccaaataacacgccctcaatcaacttataaagttgtatttagagacaaaaattatcgtaaatg

SEQ ID NO: 100617 - DNA, 1003 bp, Heterodera glycines
cagcattccaatcactgggactcaatccttcacttttcacggattcttcggcatcgcaatcaccgagactcagttctccgacattccaatcactgggactcaattatccggcattccaatcaccgggactcaatccttcactattccaaacaatgaactcaattttacggattcatcggcatttcaatcacgggacttaattcagacctgttaagcataattttggaattttaaaaacgtatttcaattatgaaatacaatttgcgtagaaaatccttttcattataaatacttgttctctttcattttaataatgcgataaatccatccaattaaaccgtatccagtaaaagaggcataattgacatccgctttaattacaaaaacaaaaaaactccatttcaaagtcaaaacaatttctcaaaccaaaactttttcaatacaataccaaaactaattgtaagatcatttccattgactttgcatatacaaaaacaattctttttctttcttttttacaaaaattaagagcattcatttccatatgcactttgctaatataacaaaatacttttctcttaacaaatgcaatagaaagcaatcatttctattacattattattaatataaaaactattttgtcattaaaaaagaaaaacaaaaaagtagacatttatttaaaattgtgctttttgcaaaaactgacaaaacaaaaatgaaaaaaagcaaaacaaacatttcttttttcaaatcgctgcccgtcaaaatgtcgccgcgtcataatgtcgccgcgtcaaaatgtcgccgcgtcataatgtcgccgcgtcgaaatgtcgccgcgtcataatgtcgccgcgtcgaaatgtcgccgcgtcgaaatgtcgcccaagctaaaaagagtcaaaatgtcgccaagctaaaaattagtgaaaaaactgaaaattatataattatatgccttcatacgatctgcttttaaaatttatgctttagcatcaatatg

SEQ ID NO: 100618 - DNA, 1003 bp, Heterodera glycines
aattgacacttttcggtatttgtcgaaaagtggacaaaaccgtgcgaatgaggcactattttaccagcttgtcgagccgaatataatggtaccgaaaatcaacaaatctgttcagtcttccacaaattcctatagtgtcaattttttttttgaaaaatcagtggtcatcgaaattgacacttacggcatttaaatgaatagatttgtgtattttcggtaccattttggccagaaatgtcaatttcaatattatatgattttatggcttggtaacctatttttactaatttgcagcatctattcgttgccctcttcgtttccaatttggtacatcatggatgtactcagttcgtcatgttcgacggcggtaccgggggggggggggtgacagattatattcaacgaattcactgtcgttcatttttcattgagatagtaatttgctgaaatatttgcttccttctctcggtccttattaggggtgcatcaatcctcgtatctcttgggtttagtttcccactcagtgttggtttttcgaaagtttaattcgtcttgtatgccattctaggaatgatttttaattgattccgacaaaattgcgtcctcgcgatggggtggggtgctgtaatatatttaatattcattaaataaaaaatttgggtcaggacgaggaaaacgtcggtatacagacagtactcggattcggtactcgatacaattgaaaaatatagggatttaaggcgagaaaaacatcgagaactgggattcagaattaggcggctacctagaaatagagttggctaatggtgtctgattttatacgatttctttttaaaatacgaagcttcactatggtctttttcatgtttttattttcatcgttagtattatttttctattgataaataattttatttttgcatctttcaaagttattttcttcatatatttatgatgcattattaaattggcttaatttttcatatatttagtgaatgaaatg

SEQ ID NO: 100619 - DNA, 56 bp, Heterodera glycines
atagccatatgacaatttgcctggggcggtccttccctttgtctcctcccccaatg

SEQ ID NO: 100620 - DNA, 1003 bp, Heterodera glycines
ggtaccccgcccaaagccacgaacagcctaaatccttggaccgtcaatggttttatgcagactaaatgatttcaattagaaaaaaaatggcgaaaagtttccttgaacttgttagcctgtataaattattctatgtttaaagtgttcttttctaattacggtattaacaaaaaagcacaaccaatttcgctgacaaatgaattttttcgttactgcttgacttcactcgcattatgtttaaaggtacaattgtggtatgactgtatgaattacactttattccgcgttctcttcttcctcattccgtgtgctaattggtctcgagaccgtaccaaaatttaaattgaaaaggtcaaactcaagaactcggtcattcggcctctgtgcctttttctattttcgaccttcaccgcggtgccgtccatccctccaccgtttttgccaccatttcctcgaattggtgtgaagcttaatttgccgcttcggtgtaattttgtgcattttttacacttcgccgcctgccaaagcactgattttacgccattcctcctcatttaatgacgtacaaaagggcgtccaatgcaaagccagcgaaagatgagccacaaaaacccctcgggggggggggggggcggtggaggcaaaaaatgtactcattttgttgtggtggtaaggcgttgtcaacccttaacatttaaccaccaccaccaccaccattaccgcactcagtccttttatggcatttataggaaaagaggcggagagggaaggcacaccccggggaaggaggaggagggcatatcactttccatcaaaaaaaaacatttcacaaccaactgcttcctttctcgcacttgagacgccttcttaagtgagtcacagccatttttgcgaagagaataggcaccacggcaccacactccccccccacccaaaatgccaatgaatacggtccatccccacccaaaatgccaatgaatacggtccatccccacccaaaatg

SEQ ID NO: 100621 - DNA, 379 bp, Heterodera glycines
ggcttgtcaatccaaaacgaaacaacaaagatgctgttcttcctcgaataaagggcataggttattttgaagaagtgtcacataacatgcagcaataagcctgcaaaatctaataagtggaaaatacatgagtatagaatttattttcagaaagtgtccacagacttttggaaaaatatatttgcaatttatcaacaattttgagaagtgagttagaaatgataaacttcacgattcaaaccaattttcgttgctctaattaaccgggataaaaacattcgaatcaattaaatagcttctgagataataaggtttatcataaaatttcaattaaaaataaaccctcaattattggtatgaacgatactttccaaacatg

SEQ ID NO: 100622 - DNA, 242 bp, Heterodera glycines
ggtttagatcacttaaacgcgtggccggcgttgccagaagcgcggcccggaaaaattcaaaatttatttttatgaactgttaacattttgaaaattatatatatctctaattggataatttaaaaaatcatttaaattaggcgccccaaaaacgtttcgattggtgggctctgccgaagggaagtgcgccgttggattgtgctcgtctgtttgccaatgacgaagaatacattggcaaaatg

SEQ ID NO: 100623 - DNA, 179 bp, Heterodera glycines
tccaatcgcctttatacatcgcattatgagcggtaaaattagcagagtgcgaaaaatcgcatggatttaagcctagaaaaaatggtctaagtaaaaatcgtaaatacgctcaaaaagcttctcaaacaattttagcgcttccaattccttctacaatcgcctttatacatcccattatg

SEQ ID NO: 100624 - DNA, 1003 bp, Heterodera glycines
tttcgaactttagccctattttccttttcaaagcaaacggccaaaggaaatgaaggccgaaatgtgattaaaaacgactaaaatgacaaaggacaaatccaggggttttgattttttttactactttcaattgcaaattattatcactagggatttgtttttaggcaaatgcctaaaactacgctccaataagcatgaaaaacgcgttttggtatgaggtttctaggacctattttattataatgcctttctttgcctatttcggggggtttttattcttaatgcctagacgcctaatttgttcctaatttcaccattttggcgcttattttgaggcttttctaaaaaagccttaaaaatgcaataaaacgaaaaatatacccttgagaaatgatctgaaaaatttcagaaaatacgccacaaaggatgaaaaatttttcttcaaattggtccccaaaatttaaattttttttcttgataaaaatttttggtacaaaaattgttcttattcgaaaaaaaattctaataaatttgaatataacacttaaataagtttttgattagtttttatttcctttgctacctaaaaagcgttcataaacaattttattcccctattttatgcctattttgcgatttttgtgcttaaaagctaatccctactgataatataaaattctattaattaattatcggacagtgaggacaatcggacagaggtggacaatcggacagtggacaatccgacagtcaaatatacaaatagataagaaaatgccggtcgccgaaagggaccgattttgccatatcaagaaaaaaaaggaaaataggcaaataaattaattattttttgcgaatgacctagaaaatgtaaatgatgtgaaaatgcgatgataaaaatgtttgccaaattacttgcaagtaaaaatgaccattctcgtgcactgcacaaattaacacttccttttccttcgaaaattttcatttattccctcaaaaaatg

SEQ ID NO: 100625 - DNA, 277 bp, Heterodera glycines
aaatattttcttaaaacattaaaaaaaaaatttcggggaccaataacctttaccattgccgtaattttttttatccaaaaccaatgggaggagaactcggtagtaacactgccgtttttgttttcaaaaaccataaaatgttttcggagttgctgatcacgaataatgcatcccactttgatcaatttctaactccgagccagaattggaaccaaaagtcgaaattttaaaattttggtcaaataaaaatatgtaaagtatttttagaacaaaaatg

SEQ ID NO: 100626 - DNA, 486 bp, Heterodera glycines
agcatgaaagagaagaagatgggcttaaactcgaacaggaaaatgtcgctaattgtgcctgtctggggccatttggggtggcaaaaggcaatttgggcgtatttgaggctcatcaaagtgccgaaaaacagcgaaacaagcacaaaagtgccgaggtaaacagtgcgattcacttttgcatgccttaattttgaaattgcattttatatttaatgccaattcttaattcatttaatcaatttattaatgttgcaattcggcaccatttttcaaatgccaattggatgagtctgtccagcccggaaaaataaatggaaattttattttatatcattataaaaagaaaatgcctttccattataaaaagaagaaaatgcctttcccaagggccaacgggagcgaatataaaactaactattcgttctctggatcatcccaattttcaaaatcattgcgcataagtcggtattgcaaagatctgagatg

SEQ ID NO: 100627 - DNA, 72 bp, Heterodera glycines
tcactattttgtttaaattctaaatttataatattcattaaattaaattaatttttatattctagaaaaatg

SEQ ID NO: 100628 - DNA, 452 bp, Heterodera glycines
tagtaaaattgagttaatctcgaccagagaaatcccgctttggttgggtccagttcgaaccagagacgatctcgggagtggaggggagcgggggggggggtaaaattcgtgagaaaacgacgaaaaatccgaataaatggctaaaaaattttttttttttcaagcgggtcgcctctccttaagccccgaaaaatcctaaataccaactaagaccgtcgctgagtgcttcttattaaaattttcagtctcaatttccccattaatcattgctttttagcacagattttgacatccattttgccattcattattattcagcagcgccaactaattttgatatttgatgaatttttctgtgttcacaaaacagatatgccggttcctaatccaaaggtttttttggttttacacaccctaaaaatccaaaaatttatgccatttttagatatatg

SEQ ID NO: 100629 - DNA, 1003 bp, Heterodera glycines
ggaattgaaattaaactactgaaaaaagggatttgtttgataaatgcggaaaaataatgggaacgttgggaagttggaagacgggggggggcaaatttgatgataaaggaattattggaatatggaactcaaaattttgccaaaaaatgtatatatgaaattatttaattatttcgaatgtttggaattataaagataaaagaaatcatttccaaacatttaaaaaaaaataattaaatttcacaaattttttttagaaagattaaatgaattaaaaattgtgcaatttatctcttaaaaaaatttaataacaaattgttgatgagaaatgatttttttaccataatttttcgtcagtaataaattttatgagttttcttaggtgctgaaactatagaaaacccaaaaaaaaaaattgcggcaaagcgttcaaacctgattttgaaccggttctaaacttaaaaaatggagaaatttgtggcacttataacttttttaaaaagcttgaacccagatatatttggtatcattcaaaagctcttgatgagcttatctctgcggatcacgcgcggacttcttccggagcccggagtctcgccccacctactgtagtcgagtgtgcgctggttaatagcgcaatatgcaaattaaacctttaaaaccaagccatttccaatttcttcagattttgaaccggttcagtaattagtttacacgctttgctatagacttttttggtttgttttcctatcattttcagcacctaagaaaacttcagttttgtgtgttttggtctggagactacaataaatattttcaattttgtttgtaatttagtttttagtccttaaataaaaaaaattttctttattattattttttaaattttattataagcctaagcctaggcctattaaataaacaattttggctaatttttttttataaaggtaatcaaatctgcgcaaatgccaaatttcagctgccccaaaatctcacgatg

SEQ ID NO: 100630 - DNA, 414 bp, Heterodera glycines
tgacttgacattattaaatgaatattaaaatttctggaaaatgagtcaaatgttggtccctttcaaaaaatttttctagctttttaaatttcttgaaattttgtataggcctatattttgaccccctctagcgattccaagtttattttatggaacttaagtttttaactcgagatcggctcttcagttcttacaagggaaaatctcggcaaaatttttaaattagtggggttttttggcgttttgaatatatgtaatgagaatatccgaaattcagtttttttcaattatactttggaattattttttgtttatgtctcgagcacaaaaattagttacacaaacattttgcagacagcttttaattgataccacgaattagtttgtattgttttagatttgacaaataaaatg

SEQ ID NO: 100631 - DNA, 201 bp, Heterodera glycines
atcaaccccaagaaagcatcaattttcctttcatccctctttgtaaagaattaccaaaagaggcaaatgtgtattcacatattttttgttgggcaatgattatccttttcggattgtccgtgatcagtctaattatctaccaatttcgctcaattctttggctaaaattcactttgacggaacggtacagtaagaccaatg

SEQ ID NO: 100632 - DNA, 335 bp, Heterodera glycines
  unsure (1)..(335): unsure at all n locations
ttttaaaaaaacctgaaaatttttttaaaaatttttaaatttatttttttttttttaattttgggaggggatttttcccttcccaaaaatttgttaaaaaatcccaaaattttcaattttttgattggctgcataaatatgaaaatcggatttttttattttcgacattgttcaagtcagggttcggggtcggacatagctttccctaatcatcaantatgtaaattaaaaaataattttctttcagtggtggagcattgcattgataaaatcatggcgttcaattcggggctccccattgacaacatttactacagaacacaggcncaaccatg

SEQ ID NO: 100633 - DNA, 1003 bp, Heterodera glycines
aaactttattatttctattttattcattcaaaaatttaccaaatataataaatattttcaaccaagcattaccaattctaacattttggagaagaaataagtatatcaaacaaaaccagacttttatttttcatttttagtgcgttttgaattaattttgttcaccaaagtccaaattttgcgattttgaggacagtttttaagggggaaaaaagtttagaggattcgacgttggggaaatttttttggaaattttggctctatttgttaataaattttcataaataattgaaaaacttgtggaaatattttttgaaaaatattaaaaaataaaattgcgggattttaagtcaatcccatccctggtattaacaaaatttttgtgaaaagtaacaaaaaatcttcgataatttctagcgagatttcatcattagggggtgtatttttaaaaaacgaaagaaaccggtatcccagttttcggtttagatttttggcccaaaaagccggttttcggttcggttaaaggaccgtgacctaccctacaaaaaaggtcatttgcggacaaaatttataaacaaatacaacgaaattttacaaaaaaattttccctggaggcgcctgttgaagcagcggaccatcaaaacctaaaaaattttactcgaaattctaaattaaacatttttgatgaaatctgccaaagaagcaggcaaaatttatagttaaaaatccttaaatggtaaattataaaatattaaaaaagtaataaaaatattattattttaaaaagctctacaaaatcacaaagtctttgtaaattcacgtgaaagcgtattataagaaaagcagcaatttccgcaaaaaaggttttttctatgtttttgtcaataaaagccacgtccattaaggaaatgaaaaatggggtatttaagcgaacagaaaaaacaaaaatgacatcacatatatttttcattcattaattaaattaaatatattttttgccatg

SEQ ID NO: 100634 - DNA, 53 bp, Heterodera glycines
ttctcaccgattgtccaccacttcgttgtgtcgtttacttacacaaaaatatg

SEQ ID NO: 100635 - DNA, 169 bp, Heterodera glycines
gacaaagtgatgcaaacattggagcatttgtcacctttttgttatttgttttactaaagcaatacaaaacggtcccccctttccgtaaatttcaaaaaaattttcaatataatgacgttaaatttaattttacatgaaaaaatttaaggacctacatttaacgaaaatg

SEQ ID NO: 100636 - DNA, 338 bp, Heterodera glycines
ataaaactaaatgaattttggaaattgtttcaacgaaaatgattaaatgaaaagaataaaaaaaaagttgttaagttttactcatccctaaatgaattgcctgcccatttaaaaatgacaattcattaatttgtttttcgtatttcataaagcaaaaagttccatcaaataaaccaatgcccgaagatcaaatcgtacgattttgagtcaaatttcttaaaaacagaaaacactcgaaaagttttggaaattttatgaaatttgttctaaaaaataacaaataaaaaacaaatattttcaatgtagtcaattttcagcctaaaataaacgaacaaatg

SEQ ID NO: 100637 - DNA, 965 bp, Heterodera glycines
cccaaaatacgggagtaaaaaaatccactggtaagaattgaaatttttggcaaaatgaataattttttgatcgaaaaactgttaaatatatacccaaaatttcaaaaaaaatttccggcggcgcctatcggcaccgccggacctttaaaatccttaattttcttaaaaaaattgctcaaaaaattgcaaaaattggtcatttttggacaaaatctgacaatgtattgtattcaaatataattttttcccggcggcgcctaccggcaccgccggcctccctcctcctccctggatcccaaaaagttttttcaaaaaatacggcgcaaaaaattgttaaaattaataaaggattcggaaatacaaagtttaaacctttttgttcgaataaattgattaaaaaaaattatttgaagcaattttgaaaaatttttctgattttcgaccctaaaatctattttttttttatttcgtttctgcatattataatttttctgtattttataaaaggattgtccttcaaatttgtgcattaaaaatttttttgtgggtatttaattaaattttcgaattactcccgctcccgcccgggactcccgttaaaaatggacgggagttttcgggagcgggagttttacgggattcccgctcccgctcccggaaaaatttgaactcccgctcccgtaaattattttttaccggtctctaatttttatacatagtagtcatatattgctcaatttattagtcgattttcacatttatataaacatagtcaccaaataggtctaaaaaattaagaatagggattggaatgacatagaatacaataagagcacacagcaaatagtgggcaacagttaattttagaatttctaggaaaggaaaaacaatccttgagaaaagcataaggggaaataaagaaggaatggaataaatgtcggtcccgggcacattccgtcacaatg

SEQ ID NO: 100638 - DNA, 313 bp, Heterodera glycines
ccctaaaaaactatgaaatcagaaaaattaggaaaaaatattgcgggtctttaagcatggtttgtgctacatatatttcgacaaaaaatgccttataacctctctaaaaaaccttaggttgtaccagtctgaaagtaaattatttcgtcaaattataaaaaaaaaaaaaaaatcaaattttgggattctgcaatgacaaaaattccccccccccccattttccaatgccaattttttggtgttaccattgatggatggccccggtactcctcgggtttgggtcaatttttgcaatcttaatatcatcgcaatg

SEQ ID NO: 100639 - DNA, 1003 bp, Heterodera glycines
aaaagagaaaagagaaaaaaaaacaaaaaaatttaattttaaaatttcggccaaatgtttgaatttgtgttcggggttcggaattggccgaaatggatgccggattcgtgatcagcgaccccgaaaaccattggaaacatgttttcatgacttttgaaaacaaaaaaaaattctccgaaaaatgggggcaaccatccctactattaccggattgtttgttatctttaggtttctgcgaacacaatacatgcttcagaaaaatgataaaactaacattttcatagggcatggcggcggtgggcactgattgttagtgaattaaacgttgtttttagttttgtttagtcaaaaatcggtacaaaatgttaattgatgtattaattagaagcagagacgacaccaattctgaaaatgaatccatgaattttcttttatttgcaggacatctatttcagatatgaaaagttgaaaatctttaggcggaatctcggcgttttaatccaaaaattagaattatgaacgaaaaccctcaaaaaaatattcgcagctaaaaattgacgccttttaggaaccgaaaaaaatgattcagttcatccacccgttttgacttgataattgacgaatcccattttagaagtgaaaaatctggactaaaaagagacaaaatgtgaggcgaagacaattgtgttgtgtttcggtcttttggtgattcaataatgggaagagtagtgacattctcttttcaaatcctaccgtatgacaggttaatgagtttaaatttttaaaaattcaactgtcattttatcaaaccggtcagttcagtcgtgctgggcctttttaaaattttccgaaaattcacaattttttgatgaaaatctgctaaaaatatgacaaagttcacaatttttctaccggcggcgcctaacggcactgccggaccctctgttacaaaaaatgagaccatccgctggcgtccgttagccaattgtgcgttgactacatg

SEQ ID NO: 100640 - DNA, 440 bp, Heterodera glycines
taatgatcagttgtgtgatcagcgcttctcatatcagtttctttttatttggttattttttcctatttttttgatcacaaactgtcaaaatatcgctaaaacgggaaaatttttattaaaaagattacttttttgggttaagaattttgcaccgtagttaacatctcacaaattcatagggccaccatcccaaaacgccatggaattttatattctttcaagggctttatcttttttccaattttttcatcaccctcggaatcttcgaatattttcttctttatatttttattgattaaagttttagtttttggtaaaaaattggttcatgtttcccttataaaatggatcgtgtttgatccgagggtctgaatctttatgaggaatacgactactggactctggagcgggaccgtaaattattggcttatgacccaatg

SEQ ID NO: 100641 - DNA, 66 bp, Heterodera glycines
tgagacggagaacaatggcattgacaccgtttcgtcatcaccaatcaccactaacttgccatgatg

SEQ ID NO: 100642 - DNA, 55 bp, Heterodera glycines
gtatttaaatattcattttcacattatagtatatattaataattgaataaatatg

SEQ ID NO: 100643 - DNA, 416 bp, Heterodera glycines
ccaaaattttgtcccacattttaaaggggaaagtccaagttccttattggacaaaaacgtgtcaataagcacagtcgcctttttccagttgtggaacggaaaaatgggaatatcagacggggtgcgctcttttctaaaaattcctattttcgtctaaccatccctccctttagtgcactatttcttttcaaaattgaatcattttttttgtcttttgaaataaattgagaaaaatatacgaaaattattatcggttttaattatcctgtacaatgcttataaccccctctgtgcggcgcctcccctcttgtgcactattttagtttttaaaattggttccggtctttttggctttttgaaataaattgtgaaaaatatacgaaaattattttagcttttaattatgcagtacaatg

SEQ ID NO: 100644 - DNA, 414 bp, Heterodera glycines
  unsure (1)..(414): unsure at all n locations
tctaattggaggaatatcttttctattctttaagttctcacgagggaagngtannggtgtnnggnggggggtgggggccctaaaattggagaaaaatgaaaaaaaaaagatttgaaaattagagaggaattatttgatttttttgttgatgttttaaatttgaaaaaaaagtgtgtaggaataaaagatgaattaataattttttatgtgtattaaatgttgaaggtttttgagtgtatgtaataattaaataaatatttntgtgatttatttatgtatatgtttagattgaggatgttatagagtaggtgattaatggtggtggaagtgggaaggtgggtgaaggtggtggatattgtgatggtacgaaatgggtgattgagaggtgtgtagttgaagagggtgttaaagatg

SEQ ID NO: 100645 - DNA, 57 bp, Heterodera glycines
tgttgggacgaactcaaagaagccaagagcaagactgaatttaatgttggcctaatg

SEQ ID NO: 100646 - DNA, 484 bp, Heterodera glycines
ttttaatgactttgtcgataataaattaaagttagataacatcttgttcgttattatcagatatttcaacaattttcttctgttcagttattaatattaattattgatagccgtatttttatttatctatgaaaatttttttattttctcagtaattatttgatttagttatcacgcgttcaaaaagtaaaatatttttgctttattttgtcagttcaagtcaaattttttctagctgttgatccattcatttcttacataatttgatcattttttatttcaattatataatcttttggttttttgtcattttgtcatgtatttattcattaaaaaactatttaatttataataattttttcttctcgcattgcttctatttaattattattttcttatttgtagaagctttgatttcataatacttatatctttacagaattgaaccgccaaatcggaagtccatggttgagccgttgcaatg

SEQ ID NO: 100647 - DNA, 914 bp, Heterodera glycines
tccacattaactttaaatacatttgcatgattctcttttttctaattccaactgctcatttccatttttgttgttcatttccttcgtccaaatgatgatatttgcattgttttgcttgtgttgtcgtacttttttgctggacaaacacacactctcttctcttcctgcgcattgccaaagtttccccccccccctctcctcctccctcttctcgagagtgcttcgcccaattctcgagaccggcgatcggacggaggataaatggacaccggcggagagagaagaaacggacggaagggacgacaaaaaggaagagaagagaaaaaggcattgtctcctcctccgtccgccccttttcttggttaaaaatatttcattttatttgttttgttttgtcgtcacatttttcgcgcatttttttcttttgcgattttggcgtattattgaaaaaactttgaattatttgtcatttttgctcaaattttttgttcctctcatcagcaaaatatttagtgggagagcgccggaatttgtttacatttattccattgtttggcttcaatggtttttgtccccgtgccttatattaattagttgcgaggtgtgcaaatcgtaaatgaatctcataatattttcacgtattaacaatgtgttgattttaatcaccattttaattaattaaatgtttgctttatttatttataattattttatttaattcgttttaaaatgcctttcttttccgccgctttttcctttttgcccgtttttctcttttccgcttctcttttggtcagtttatcaactgtttcgcttttgctcattcttcagttccttttcctcagttcgcttttgcttcggcttctgctgcgtcaccgccgcaccaaaagcagccccaattttcgcccgcaatg

SEQ ID NO: 100648 - DNA, 707 bp, Heterodera glycines
  unsure (1)..(707): unsure at all n locations
aagtgcgctaattgactcgggcaatggcattttggtgagttttgcgcctcaccccaaatattttctaaaatttaaaaattttttcgttccgttttttnagtcaaattcggcccttctttctgagcccatttctccncaaaatgttccacaatttcgccatcatcccaattttggctcccgacgatcgcccacccctcccgccgctcataatcaaccaactcatctcagttttattgcgttctctgacacaactgttgtttgatcaattcatttattatttttaaaaaatatatatttttttctatacatactaccattaaataaataaattattgtgttctctgtttaaataaatccttatccaagctaaaactcgatcgcatagaaattttgacggtgtttcagttctctacttcgactgtcccttatgaagggtatgcatatttttgtagatttccctctctttctttctctgcatacaaaaaatgcacaatggaaagagagaaaaagaattaaggaaatagtgtgtggaaaagaaattctctatcgttgtttttcggtgtaaaagtggacagggacagtgaagaagagaaaaaaaaatacgtaatacatagttacctattatttgtccttatttttcgcgaggctcacaattggaaaagtattcaatactgtatgttaacttttattttttatgataaagcatg

SEQ ID NO: 100649 - DNA, 173 bp, Heterodera glycines
tatcggcttttggaattttaatgagtaaatcagtaaccgtaaatgaaattctatgattctcttgttggatacacgggaagaaataatagttagtccttttgttgaatttttagaaattctatccgtcaaatcggcttttggaattttaatgagtaaatcagtaaccataaatg

SEQ ID NO: 100650 - DNA, 154 bp, Heterodera glycines
  unsure (1)..(154): unsure at all n locations
caaacttaatcgggcattttaaacaagcacactaattcccgtaacacacattcaaattgnaaaaaagccaacaaagagcgcgtttaaatattcaaaaacagcgcttcaattgggaggtgtaaaaacaacaatttgggccaaagatcaccaaatg

SEQ ID NO: 100651 - DNA, 281 bp, Heterodera glycines
aaaagaaggcatcaaattcctttttctaaatttcttcaattaggtttcttagatattggaaaaaaattttttttttaagagtagcgatttttaatgcttttttctatgtaaaacattaaaaaaggttgttaagaattttctgttttacgtgtcttttctaaatatttttcatggtctgctcacaaatgatgacgtggcagtcggaaggacagttcaccggcatgttcactataattatataatgtctgattattaatgatgatttggtgaagccgcaaatg

SEQ ID NO: 100652 - DNA, 70 bp, Heterodera glycines
ggtggaaaagggaaaagcggctaacaaaaaaatgcaaaaaatcaaaatttaatcatgtcattagggaatg

SEQ ID NO: 100653 - DNA, 795 bp, Heterodera glycines
tccaaagagtcatgctttttatagtatcgagaaaattcatttaatcaagaaatattttttgtgtgcgtcgaaaatgtggaccgaaaaacaggagttttggttggaaaatcggcaacatggagttggaaagggggaactaatgggcgggaaagtgcttaaaacaattaggcatttggcttttcaaaaaaaacgctgagaaattttttgaaaaactttttattggtttctaaattttttaatttttccgggggggactgatccggggtcgggcatgtgctgctcccgtttgtcgcgatggacacttttttatttaacggattttctttaagttcaatttttttttctatttttcttggattttcttttattttgattccaatctctgaatatttaaattccttttttggtataagtgacagaagttttggtagaatattttttttaataacagggtttcacgggttgagcgcacctcgttttgatttgcgacgtttcggtacagtttttttcagggggatatattttttttgaattctcattcctaatttcttaaaacgaatcttaaaaattaacaacgcccccttgtctggcaaatatttgaaaatttttattttctataaatataaaaaaaaaattatttttacctgaatttgaaatggcattgaaaactgtatcgaaaacggagcaaatcagaagcggggtgaagtcatggggctttcctataggctagcatcatcaaccgtcggcaaaagcaactgcctccgctgagcatggccagtgtcaatagcaataatg

SEQ ID NO: 100654 - DNA, 796 bp, Heterodera glycines
ttattaaaattaatttcattttttaatttcggtcactttccccatttatcaaatttcacactgatttcccacatttaaaggcgctattctttaaacaaatgtgacttttcataaatttttcgctaacaattatttcccatacataaatgaatgaaataatttactgttaattgcttttcccattaagtacaaaatattgaattcagttttcccatcttctgagtttaaccattaaaataaaaggaaaaatttttttttcattttttgggaataaattataattgccaaccctctattttataatttcagattatttaaaacacatgagaattgaagcattaattgaaatgcaatagtctcaggcttaacccctaggcccatcataagcagtgagcgagtggggggagaagtttttggaaaatttgtatttgttaaaagttagtgttaattttggtaacaatttgctcagaatttattgggattactcgccactaccgcgatgacaaaattttttatttctttgaatgtgaaccaaaatctttttttggacacttttaaaaacttatttttgttcccaactacactcgaaacaacagaaatttgttggcattttttgtagtctcggtttcgactctcataggtcgagtctcgaaaagatgacaataattttgcacaaccttgatttaaacagttaaaatttttgtgagtttaatcacattgttactaattgaattgatcaatcggcataaatttttttcttataatttagctttaaacaaatctttaaaataaaatg

SEQ ID NO: 100655 - DNA, 56 bp, Heterodera glycines
  unsure (1)..(56): unsure at all n locations
agcaaaagcatcagttgcacacacaaaaaaacaaaacaaagacacacnaaaatatg

SEQ ID NO: 100656 - DNA, 149 bp, Heterodera glycines
ggtccgtttactggttccactcacaatcaacgcactcaacgaaaaatttatcatttaattcaaaaaatgactgtttaaatgttttactcaatttgaaaagatttttaaaggttttgccatctgtcgctgacattgcgcagcacaaaatg

SEQ ID NO: 100657 - DNA, 1003 bp, Heterodera glycines
taatttttaattatcctctgttagctttccaaagatctccatcataattgcctataattggcggtttagctaaaacgcttttcacaggatttaatattttgaattagggttcggacccagtgggcgggggtggcttttcgcggggcgggggatcgggggtcagagtcgcggggccggtggcggggacacgataattccgcccccgcggggacgggggcgggggtctgatttgaattagctccaaaaaatctcacaaaaaaattaatttttatgaatgatttgttggctccacattcctttagtcgatgcatcgcctcgattcaattccttgtggcataaattacacagattttgtctaaagaatgaccaaatttattgatttatgctaaggaaattttttttatgaattttgttagaaattagccaaaattttcagaaatttcattcttttggatgaaaatacgccctaaaatcagaacagttcttagcaataagaacataaagaaaccctgcattaatcagataaaaataaattcaaatgaaaacgtcaaccggtgtcgaactcctaacaagaaatactgttagtgttgaggcactaaccaccaaaccacaaatacattggaaattaacagcaaaatttactttatttcataaaaatttgtcaaagatggttaaaaattcaaatttgtataaattttttgccttttatcccacgaatatgccattcttaggggtggttttcagccccgtgcccccgcgggggcgaagatcgcgggggcggagattgcgggggtcagagtcgcgggggcgggggtgacgggggcggggtccgaaccctactattttgaattgaattatttttaattttaaatttaattatttaaaatttaaataaatatttaattaaaaattggcattatgtttgtttttttactggaaagggaattttgatttaatactttttatcgctaattttacaaattttctttcgagaaagataatg

SEQ ID NO: 100658 - DNA, 1003 bp, Heterodera glycines
atctatgagagggcaagtctggtgccagcagccgcggtaattccagctctcaaaatgcatagaattattgctgcggttaaaaagctcgtagttggatctgtgctagccgtccggtgcacactttgtgtgttactggtttggttggcttttctgccggtctttccccggcgttggcctttaccggtcggcgtcggtgggctggcgagtttactttgaacaaatcagagtgcttcaaacaggcgtttcgcttgaatgttcgtgcatggaataatagaagaaggatttcggtccgattttattggttttgctgaccgagataatggttaacagagatcatccgggggccattagtaatgctacgtgagaggtgaaattcttggaccgtagcaagcggtactacagcgaaagcattaggcaagaatgtcttcattaatcacgaacgaaagtcagaggttcgaaggcgatctgatatacgccttagttctggccgtaaccgatgccaactagcgatcgctccggcggatctattcgccctggtggggagcttcccggaaacgaaagtcttccggttccgggggaagtatggttgcaaagctgaaacttaaaggaattgatggaagggctgcaccaggagtggagcctgcggcttaatttgactcaacacggggaaactctttcggcccgggcactgtatggattgacagatagatagctttttcatgatccggtggatggtggtgcatggccgttcttagtttgtggagcgatttgtctggtttattccgatctacgaccgtgactctaacttactaaatagttggctcattgcttctgtgggcgctccttcttagagggattttctgtgttcatccactacgaaatagagcaataacagatctgtgatccccttagatgtccggggctgcgagcgcgatacatcggcaaaatgcagcgtattagtccttacccccccccccccccccaccaaaaatcccttgccatg

SEQ ID NO: 100659 - DNA, 234 bp, Heterodera glycines
tttgggcattggcggagtgccgaaagccaaatttggttgccgttttagcagttacatcaaaaggatgatcaagcagaagagttcgctgccccatttggtgctgaagacgcgacttcttttgcagcatttctcattggccaccatttggctaaaccctcgcgtcgaaatgctttacaagtcaaaatgccaaaaagcaatgccaaaacatcggtcataattttaagatgcaaaatg

SEQ ID NO: 100660 - DNA, 226 bp, Heterodera glycines
tgtgaaattcaattcctaaccgcactgcggggtgggggcggtcacttgtccctccccctccctcccccttgtccctccgccgtcgtcccccgggggcaatgaccaaaggcaaaggggcggggccaaaatgcccccactttttgttggcacttcccaataaatggcgaggataaaaacgaagaattaacatttaattgagaattaaaaagttaaaaattcagaaatg

SEQ ID NO: 100661 - DNA, 55 bp, Heterodera glycines
agtgatcagaatgattttttgatttaaaccatggttttgatgagttcaggtgatg

SEQ ID NO: 100662 - DNA, 114 bp, Heterodera glycines
  unsure (1)..(114): unsure at all n locations
tccgccaatttgcggagcaggagggcatccatctccggcccgacaacattgggcacaacccagngtctgcgtcagttggccaaggatttgctgaactcgctatggggcaaaatg

SEQ ID NO: 100663 - DNA, 112 bp, Heterodera glycines
ataataaaaatttgaatttttgaatgtttgtttctttgtttttttcctccaaaggattgagcggcgtccaattggtgcggggactgctcgcccttttcggggaagtcagatg

SEQ ID NO: 100664 - DNA, 99 bp, Heterodera glycines
ttgcaatatacataaggggaatttaaagcggataggatgcttatgcatgaaataggaagaaaactgacctaattttgtaatcttacagataagaaaatg

SEQ ID NO: 100665 - DNA, 605 bp, Heterodera glycines
tgaacatattataagtgggaagtatgaaaaaatcaaagaattttaattattagtgacagttgttaaatcagtttttgggtaatttaattaagaacaaattaatcaaataatcactatctatatgccattgtttttagatgagaaggtgtagtgaagctttgaacatattataagtgggaagtaagaaaaaatcaaataattttaattaatagtaacagttgttaaatcaatttttgggtaatttaattaagagccaattaatcattaaaatgcgggaaaattattaacaaagttttgatcgagatgttttacatttgtattttagcatggggtcgaatccccatgctaaaatactccaaattgctaatagggtatgacatctgcattaattataattataaccaattattctttaatttttacaaactgaatatttctgggggaaagaagggttatgatggaacttaaattatgtgccacatttttgctgtaattcaatgaagcagaatacttgaagctgagacaaaggaaatgatgaacactaaatgagtatgataattgttgacagattaacttagttatggtattgatggctaggaaatatg

SEQ ID NO: 100666 - DNA, 514 bp, Heterodera glycines
tatgctatctgcaaaaaaataggtgaaaacctaaaaatccgttccctgattattatgaatttttatgtatgaagttctattagagaatttatggtcatttattcaaaattgctaaaaaaaccggggtaatgttttcaaaaaagttttcccggattgtctgtcccattcctcttcaaaatttaaaaaaaagcgcgacagaaaataaaaggatacaaatattataataacttttttgaattttattgttaaattttagcgggatcccgcaagtttgaaatgagggattgcagaattaatcccggtgttcctatcctgcaaaatttttagttccaatctcatagcgggatccttcaaattgaaatttccgggctctaattatgagcattcgaaaaatatgtacatgcgctaagcagtgatgatttggaaattggaattcaatgacatccctgatgctgagtataggtgttagagcattttataccattcttaatttatagcattgttaacgagaatg

SEQ ID NO: 100667 - DNA, 1003 bp, Heterodera glycines
agaattcttttttacaaaatcaacatttgtgtggtctcgaattatagaaacagtagtgtatctcaaaacatttctaataattacacataacatgcacactaatgtagttgtcttacacaaaccacactaatgtgattgactgacataaaccacacaccacactattgtctaacaaaaaccacacaacacactaaattttttgcttttgatagggcttgctttagaattttgaaaattttctcggcgccgaaaaagccatttatatagggcgccgaaggggtcggggtcactttggcgcgggtattttggcgcgaggttttggcgcgggccattttggcgcggccgttttggcgccctatataaaatgacttttttggcgccgtaaaagaattttttaaaaattttcaaaatttagaactaagcctgtcagaatcaattttttcctgctgtgcgctacattatcgatgtaattttgcttaaaaaataaaatttttatttgaagtgttttgtaccatcgaatattgggttgtgttacgaattttcgagtccaaatccagtatacatattctaatttgagtccggggttcgtaattagtcaaatctatggtcagattatgatcaaccccctcgaaaacccaccgaatagtaattttggaccaaaatataaaagttaaattaggcaccacaattctgcaccattgctagcaattgtattaacatggttcttttaaagaaaggcccgcgacagattttgtatttttatagtgttgaatagcttaatcaatgtactatcagattcgaaatagagtatttttttgttcgaattcggtcccggtgttcggaattgggtaaatccgagttaagattcgtaatcagcatcattcgaaaaccccttaaaatagggtacgagcccaaaatgaaaaatagtaaagtctaacttagaatttgcattattttagcagaactttatttttatccgttgactattcctcattcgagaatg

SEQ ID NO: 100668 - DNA, 497 bp, Heterodera glycines
atgaattcaatgaattttcaaaagttttcggtccttattctattcgaaaaaaatttattaagaaaatttcaaggaaacaaaaacaaaacaaagatttttcaatgggttttctttttttctgaaatttagtaatttctttagagttaaaattcatgaaaaatgtaattttttgattttttttcccgtcaactttttgtcccgcgacgttttagggtgcacgagttttatcctatatgcttttgcagcacaaatttcttgaaaaatatatcttttggaaaaaattttagacaaaaatgtggcgatttgcacggcgaactggacgccagcctggagaccagtgccatttttcgacgccgattggacgaaaatgtggcacgcatggacacactgtgcacggaattgtaccagagcaggcaacgaaaaatttttttcaaaaagtttatactttaaaatttagggcccaaacgcagcaagcgttggacgacaaaaacatcatg

SEQ ID NO: 100669 - DNA, 300 bp, Heterodera glycines
ttgtgcccatttgctcagtgcattttattccgagggtttgcccgagtcggcgcttcgtgtcattctcagggcgacgctaaacgcactcgaacacctccactcgcgcggggtcattcacaggtcattattcccttcccttcgctttgtttccttttatgcgtttgctcttctctctgaaggagcgtttgtgccgagaacatttggctcgactcggatggtcaaattcgtctgtgagtccaaccaatgccaatcccttctttatcccccctttttttgctttaagtgcgctcactcgccatg

SEQ ID NO: 100670 - DNA, 245 bp, Heterodera glycines
gcaaatgatgtgacgtcgagccgaggaaactgaaagtgaaacattgcgaaaagcgaagcgaaaacgcatatttatggcatgaccaaagccaagtgaggaagccgacacggcacaattcgtacaggtcaatcggcaaattgcactcggatttcgttatgtttcgccgtttgttcttaaggctttttgctcttggcgttttggctacggtttttcttttgctgattatttgtgccaacgttcaaatg

SEQ ID NO: 100671 - DNA, 148 bp, Heterodera glycines
agaagtgtcattagacaaactcccaagcattccgctggagagcttctttgcccgtcggattcgggaggcccaactcatcatcattgatgagatcaccatgcttcacaacacggtgattgaggtcatcgaccgagtgtgcaaagagatg

SEQ ID NO: 100672 - DNA, 204 bp, Heterodera glycines
  unsure (1)..(204): unsure at all n locations
aaaacancggaagtaccaaaaaatgacaaatttttgccattttgtggtaatttttcaaataatttaatttctcgacggtcttcagtttttttcagaattttcaattttttcaagtcagagttatgtcggaaaagcttgtttcaaaaagaatttgtacagaaacaaatacatattttgaaaatatattaacaaatttaagaaatg

SEQ ID NO: 100673 - DNA, 499 bp, Heterodera glycines
atttaaattttactgttttttaaggtaaggggtaaattatttgagaaaatgtttaaaaattcgaaaaaggatttaaattagctcatgtatgtactaattcattattttattatagaaattaatcaaaaatttattatttatttaatttttaaattttgaaaattatgtatttgtttttgggggcagctcacttttaaaaattttccagcgattttttgggaaaattttttgacgaaaaacttagtgtaattcttcgtaaaataaaaaaaaaatcgctgcaaatttttcaaaaattttttcttataattttcttagaaacactttataaaaagtcttactttagaaaattttcaaaaattttcgcgggagggaaacgaaacagttgccctttatttttttacaatttttttacaaaatcaaaaaattgtcaggaaaccgtgccaaatggattgggttcggcacttttctgatcgcatgtgcccacattatcacggcaatg

SEQ ID NO: 100674 - DNA, 367 bp, Heterodera glycines
acccagcacgcagaaaaggcaaaactagcagccatggcattaagaaccatatttttgccgatctatcaaaattgaaaagaaagcgattgcatttttattttttgctatgaattgccattttgcacaaaacaaaatcaatgttattgttttgtaaaaattaaaaacactttaaaaggtgtccactaaaagaacaatggccagaggctttcattgatttcgaccggcgatgggtaagaaaagtaaacgatcgtttgccagtgtacgacaagcgctaccgtaactcggcacaaaattctgaactgtcacggggcacaacggaggtggccaatgaaatgccggaaacggccagcgccacagtgccaacatg

SEQ ID NO: 100675 - DNA, 1003 bp, Heterodera glycines
ttcttttttttttgagcgttgaggaacacactcacaaaggaaggtccccgggtgtccgtgggatttccgatgaaatttagtgggtggatagatcacccatggatccttaagaaaagtgtttttattttttgctgaatgaatacgagtgccgagtatgccgtgccaaagttttaactagagtagaacgggaccgggaattttgggcaaacccgggaccgggaccttttcgggttgaaaaaccgggaatttttggctgggaaaaccgggaaaaaacccgggactggtcccggtcccggtcaaaaccgggacctcggtactcagttgtccgtgttttggtcccggtcccgctctactctagttttaacctttttataattaaagaaagtaacaattgtttctgtactttacaagtgtgtaatggtgccacccaccaaaaagggcaatggtaaagaattgtgtattttgggctcgaaaccaattaccaagtccgagtctagattcgtaatcaacaccctcgaaaacctccggaaacttcttagctaaattttacgatatcacaaaaaaaaatcaaatacgggtcgacgatttgggggattaacttaaaaatttgcgaggatgattcatcattttacgcgttgtaattggacgatggaattgcgttttgggtggtgggcggtgcaacagacgcaccaatccgaaggaaatcccaccggactctcacaaattcatacagtccatcaatagttttgttcaattgtccgtccatttgtggaaagactgtcttggatgaatttcactttgacaggcgatggttggaaaacactgcagaaatattaacaacaacaaccaatgctttttatttgtcaatttgatttttaatagttttttgtttttcttacccaatgttcaaaatttataataaaaagaaaacaacattcagattaatagcaaatttctattgtttgtaaagtgcaattcttctcccttccttttcctaatgatg

SEQ ID NO: 100676 - DNA, 1003 bp, Heterodera glycines
gacaaatccgagaaattgagtcaaattgggacgaattggcgcacaattatcagggttgggtcgaagaaaccaaattaagcgaaatgggtgcactttatgatttcctagaacgtaggattataccgaaggaccccagggaacagcaaagcatttttgataagtgtcataaatattcggtcatcagtgggcttttgtatctgtttgaaagtggaagcaatatgagattgttcgtgcccaaaaagtttcgtgaggaattagtcaaagctcatcacgaaggaaactgtgctggccatatgagtggaaaaaagttgtgtaaacaactttccgaacaatatttctggcccaatatgcttgccgactgcgtcaagaatttgtgcgcacactcgaaatccgcgtgctaatgagccgccattaaatgtcgttaaatcaaccgaaccattggagttgatctgtatggacatcttagatgtggggccaagtcattcaaataaaaaatatatttgtgtaattgtggatcatttcacaaaatatttggtcgcagaaccaattccggataaatctgcaggttcagtggccaaaatttttgtcgaaaagttcatcttggtttatggtacgccaaaaaaggtccattcggacagagggaaagaatttttgaattcaaccatggaagaaatatcaaaaatgttgagcataaaaaggtcatttacggcagggtatgacccgcaggcaaatggtcttgctgaacgtgtcaaccgaattttaattggaattttaaaaaggtcaactgcaagcaattggacgtgggacgaaccattaggcttatgctactttttcatataacatcacaccttcaaataccacaggattttcaccttttgctctcatgtttggaaggattgcgcgctttccccttgatcaaaacgtacctttttccgtaaatcccgcttatacggtggattcggacaaatacattcagctgtttagagaaaaccttctaaatatg

SEQ ID NO: 100677 - DNA, 103 bp, Heterodera glycines
  unsure (1)..(103): unsure at all n locations
tttattttnttgggatttttcttacctttaagtcttactcactanggtttaaanantttgnnantnnanttttnntttatttttatttaggaatcggaagatg

SEQ ID NO: 100678 - DNA, 119 bp, Heterodera glycines
tacgtttcttcgaactgtatgacgaaaataacgaactgcgcggtagcttctacctcgatctgtatgcccgtgaaaacaagcgcggcggggcgtggatggatgactgcgtaggccagatg

SEQ ID NO: 100679 - DNA, 537 bp, Heterodera glycines
gagattgctgtttattaaaatccacaggatttggctttgttgttttgttgctgttcaggagccgttcgttaattgcttcggctaatattttagtataaaaatgtttttttttttttctcctccgctcgcgtccagacatttgcggacaatttcgggaaaaaatatttataaaaatttttgttttaaatgcaatgcaaaatttggtctcatcagaacgtttctcttaattttagatataaaaaaatattttgaagatatgcttaatcatgatcaaaatttactttcactatttcaaattaacagatcgtaacaagtccgttcggttttactcattttaaacttaaagtgccaattttgaccaattgtaacatgggggtcaaaaaatgtgcttttccccactctgtcacctataattaacagcagaagtctttgctaaaaagacaaattcttttttctgaaactaaacacattcgatagaagtacgaaaggtctaaattattgatatcaatcaaaatactacaaatacacggtaagatg

SEQ ID NO: 100680 - DNA, 61 bp, Heterodera glycines
ttttgtcagatggttggagaattgttctgtctccttccattccgttctgttggatgtgatg

SEQ ID NO: 100681 - DNA, 285 bp, Heterodera glycines
aattccgggctttactaactgtgtgtgtaatagttaaccgatctcatataaataataattaggtgcattataaagaaatcgcttggatggccctttgggtggacaaatacagaccacgagacttttctaagctcactttccaccaagagcaagcagaacaacttgtcagtttggttagcaccagtgattttccacatttactcttctgcggaccaagcggagctggaaaacggacgcgaattcattgtttactgaagaaattatacgggaaaggcgtggaaaatg

SEQ ID NO: 100682 - DNA, 934 bp, Heterodera glycines
agatgacaggcgaagtgttgagctgttttcataccttttttgaggttgagggggggggggggggtcggcccccatctttcgtcataaatgctccggaggagggaggcctttgtaatcgggaagaggtcaaagggggaagggtcgacgaaggggggggggagagaaagagtaatacgatattccgggtgcaccccaaaatgtttttccgacggcgcctaaaatccttatttccctaaaaaatgacaaaatcgcaaacattggcctttttggacaaaatctgtaacaaatcccattaaaattacaaaaaaaaaaaaaatcccagcggcacctaccggcactgtcggaccccatatttcccaaaagttttttgaaaaacatgccgcaaaaaaggtggtaagaaaaaaaggccgtttacatggctgacccccttcgcaaagttagccgtcaatcccctcccctttgacccccctccctttttttaacgtatgactgtttttgccagcgattggtgtgacactgtcagtgttattgttggtataatattttgtttatatataatttgacactcaatattataaaccttaataaacaccttcgttgggttcaattgccaaaaactttaaaaaaatttggtatcatttgaaagataagaaattaggtttataattgagattcaatttcttatgcataactagttacctaatttgaactcataagacttgcttttaatgatatcaaagaactgagaagaaaaaatttcttgcaggctatgatcagataatcggtcccaaaaaatccaataaaaataagtgttgcaggaaaattagcacagattttcaaaaaattctccatggggaacaaaaacaggacattggctgataaaacttgaaaagatataacttttgtgttaggcgtgaagtaaatttttgaaatg

SEQ ID NO: 100683 - DNA, 353 bp, Heterodera glycines
  unsure (1)..(353): unsure at all n locations
aagccagagacgccggttcaaagccggcccgccccatagttttccctcaaaggcttcnccgctcgttcatatatttcatagttaaccaattaattattctcttttcatcacaatgagttcattgaaatattatggattaatagagaatatgattggctagccttaagtaaaacaaatttatgatttaaaaagtgcacagaaagtgacggaatttaattaattaatcctctaaaaaattcaatttgcataaataaactattacaaattaattgagctcgacattttgaaaaagcctgggcctggattttctgtggacaaaaacctaggaagccctgattgcggaaaaaagcatg

SEQ ID NO: 100684 - DNA, 712 bp, Heterodera glycines
ttgttacttttttctatatgaaaaataaatgatttgatttttatacatatttagaatataaaaacaaatactccatgacacactggtcgacagggagctgaaccgtttcttaaaaaagggtgcaattaagccggcggatttaagtaaatgtgccgcgtttcacgatttttccattttcgggttttcagaccaacatcaaggagtggtctaatgaaccaggtgtatttttatatgctgctcagctatttcattggtagcactggccaaatgaataggaacaacaatgaaaatgattaaaattaccacagaaatccaaatcattattttttttggaggcttaaaattgatcttcccggcgccatcaaatgatttggataaatgccaaagttcacgggtatccgttttaaacacggctttccagatacttttggcaatgtgcttaagggaaaactttaaaaaaaattaaataaaaatatctgagtttttatgatcagtaggattggaattttaattaatcgcgaaaatgttttatcatattattattttattattgcgaccaataagtagagagagaaattatcaatttttataatttaatgaatatattaaatatgtcaatattttacattaaaatgtagaaattatatgaaaaaaatattaaaaataattttttagaaatatttatataattatttatatcaattcagcaatg

SEQ ID NO: 100685 - DNA, 604 bp, Heterodera glycines
ttttagccaaaatcagaaaagtatttagctaccttcgtttgtttttaaatgaaattatacaataatgaagcattgtggggttaaatgcttcaatctttttcggttttagacgtcctatgggcttttatgtgtttcttacttggtcaatgcttagattcctggtatcaatcaaaaacttaaaaattagtcaattctaggctagaatttctcgtataactgaattctaggctagaatttctaggcttaattaagctaaaagcagcagacaaaaaattacttttgaatgtattcgaattttcgattattttcacaccgagtcaaaaacgagagacgaaccaataaatagagagtgcggagaaaaaaacatctctcttatttttttatctctgataattgtgaaaattaattcacttcactctaagagattattatgaaaatttaagttacaaaaaatgcagacattggccggcttttcccgcggccgcggtaatcacgctaccgccgggctattattatacattcgcatttttattttttatctttttttaatgcaatttttttacaaataggtaaataaggagaagcaactttgattaatccaatg

SEQ ID NO: 100686 - DNA, 55 bp, Heterodera glycines
actgaaaaatatatgaaataaaataaaataattttaattatttaacttaaagatg

SEQ ID NO: 100687 - DNA, 1003 bp, Heterodera glycines
atttttttttttgcgcggcgcgccgctcatttttttgcggcaaaatttttataaagaaatttttttgaagcgattgtcttttttgaatattcaaaattttaatgaaaaagttttgaaacttggattatttttcttaaaaaattcgtttcaaaattccaatttttcctcgtcagagctgacaaaacctttaatttttctttaaaaaaattggctctaaatcacaaaataggtcatttttccccgccctccccccttttttcagtcccgtcgcaaatcttatatgcaccgggatttaattaattttttataataaggaaattttaaaaaagtttaaaaaaatgtatgtttaaaaagttggaaaattttgagtttttaagcgagcgatccgtgaccgcgggatttttctgtgcgtgccccacccctgccgtacagacagtaaaacagcaattgtgatttagaggtatcatgacaacttgcacaaaaggcaactcgtacactgttgtacagaggcaactccaattacttaggttaggccttttaggtttaggcctaggccaaagctttaggctaggcctaggcttaggctttggcctaggtttaggcttaagcttaggctttattttataaaatatttttgtactagttgcttgtgtacgagttgctattgccccggtttggaaggcataaaaccggaaaatccggcattccgacctaaaaaactccaaaacccggtccaacccctcatgtatcgtatacagtttattttatttcacgtggggtagtaaaaatcaaatcctgcataaaattttgctgttttcaactctgcattgattatttaattggtttaaatttaattgtcgcgtttgaacacgtaaaatatgacgatcaaatttttaaattgactcaaaatgatactcgccgggcaaaaaatttggctaaaaatcaaaaagtttaactctaattatttggctgtaaatctaatcttggtctcatttttgaaatg

SEQ ID NO: 100688 - DNA, 120 bp, Heterodera glycines
ttttgtagttaataaaagcttaactgtcaaaacattaaaagtaattaaaaaaaattaacaaattatttgaatgcaattttttccatactcactcgtacgaaaacgtcctggcccgatatg

SEQ ID NO: 100689 - DNA, 1003 bp, Heterodera glycines
taaggtaaaacgcccggcaaatggtcatcattttgcaaaatattctcctctttggtggtcctcctctgttgcgttccctttttcttcctcttccaatcggtcattttatgccaaaatgtttccgccccttccgtttttgtcaatgatttttcgtttcccattggcacattgtccaaccccattgaaggcaaaaaacttcaaaaattgttttaataaaatgtgattttcgtgtttctttcatcaagtacaatccgtaaaaaataggaaaaatctaaaaaaatcagggctctctctattcatatacacggcgattcaattttgcgctccaagtacaattaagttggttttttcgtcttagtggtctgtgcgttagtcaccaaaaggggggtctcaggttcgagtcctccttatgttgtgtgttaatttcaatttcttcttttacagaagaaggcagaaatattttttattaataaaagttttcgtgtcaaaaaaaatcatattcaaaaagcgttggttacgtacaacatcgacaattttatgaaattttcttagcttataacttggtgaatactagagcaaataaaaccattttatgctcattttgaagggaaaattctagagaatattgtaaattttatttgggttggccttaaattgtggacttggctaaaaaagtattaaaattattgaaatttttactagggtcaaaaaaattttcctcgggtcagattttcttgaaattttgtataggcctatattttgacctcctctagcgattccaagtttattttatggaacttaagtttttaactcgagatcggctcttccatttttacaagggaaaatccccggaaaattttaagttttgcaaagttttggcgttctgattactaaataaataataaacttatttgtacttggagcccaaaattattaattcttctgctatttgtgtgacatcattcggaactcggccaaattgtgctaattgctgccaaaaatg

SEQ ID NO: 100690 - DNA, 303 bp, Heterodera glycines
accgtccgaaaaaacgagatgtgtaccaataaatagagagtgccagagaaaaacattatctttttttctctaatttttgtctccttttggcgtactatctaatagtttcattattaggaaaaacaacatttacttcgctacgtttcattatttttctctacgttaaatcaacaccaaattttgcatatcgatagagaaaaaaattctgcatcgatttctatgtttattatcatcgcttaaatgttgtcttaaaaagttataagaaaaaaaagttaaattattattctttttaaagatttaatg

SEQ ID NO: 100691 - DNA, 457 bp, Heterodera glycines
tgaatccttgtgtatcggtgccattttcgaatggcacccatcacaattgctatcaaaacaaataattttgcttataactttgctctaaatcatcaaccatattttaattcaaaagaacattcgatagctctaattattcgctattattctgccaaatttcaaaaaaaaattgttaaccttattcgaaaaaaggctttttgagtttatttggtcataggattttcaaaatttaatgaaatttttgaaattatccacactaataaagaacactttatggctatctaattatataatgaaattaacattttgttgcttttaagcaaagttattataattttcatcaaaaattttcataattggttttttaaattacgacgactccgcaccttttgccagggatgtggacacacatcagcgtgaactgagtgcgcagcaggagaagtgcgtgtggggcatg

SEQ ID NO: 100692 - DNA, 516 bp, Heterodera glycines
taggtattatatttccgtttattttaagtgaggtgggcgatcatcacaaggaaatgcagcgcaaaccaaaaaaataaaacaaattacccatttaattaattcattaatccattaattcatttgcttggtggtagacacgctttaagtttttgtatattaacatgttatatgtaatatatgcatatgtgagtatattcttgcaaacatttataaataaaatatatgtaaaaacaaacaaaaaataatgcatgaaaagccatgaaattattatatatattcatttttattttaataattacctcccccgtaaaattgtcaatgccacaattaattcattaattctgttgaacgcatatgtatacttttatatttttaaattataataatccgtgcaagtgaaaaagcactgaaaatggacagaaaaatggcacgcctttaaaagttggcttcacttgttgagttggtccaagttgagttggtccaaccaaaaaagataagtttataaatgaccaaatg

SEQ ID NO: 100693 - DNA, 723 bp, Heterodera glycines
atgaggagaaatatttaaaagcaaatcgaataaaaattatgttttttattttgagaaagacaaaattaccgtaagagtgtaaattttatcatttaattatttaaataaaaaaaaacattttgccaaaagccacgacgaattgtggtactgacaatgagaatgagtgttctctgccgtcgtgtcgtcgtcgtcgtaagcgcagctgttttggttttgctttcggattagtgcacgtggacgggtgccctctctcatgcccagctaaacaaatttcaaattgaaatgcgtgaaatcattctctaaatttttaatcaaatttttacgtttaattaaataaagttgttaattttggtaattgagcagattaattttatttttttctgacaacaattggatgattattcgttctgtgccaaaatccgcgttttgtcttcgttttttactctttctcagttcccttttggtgtttctttccttcgttcatttcgtcaattgtcagttcgactcgccccacagattttgcttttgcaaagtcggcgaagcgattgacagttgcgcgtgcgactcgaattcaatcgatgtgtttaacaacgcgaagatttacccggctttgcagaacattttgcaaaaggagcctttcaaattctacaaggtccgtcctccaaaagtcccaatttctgaccattttccctcaaattgtcccctcatattcaggtaaatatg

SEQ ID NO: 100694 - DNA, 327 bp, Heterodera glycines
gcgaccgaatcattcattgttaaggacgaactcgcaaggcatagagaaaaataaaaagagagagagtgaagagaggaataaaggaagagagagagaggggagagagcgatagagcaaaaaggaaaagtcagacaacgggaaagagagaaaagcaaacggagaggagagaaaagaaaaacggccattccttctgctgctgctgtcgggacgaaacgggccaaaccaaattcaaagtgccagtgcgacggtttcgttcaatgctaatcagctaatttgctcactaattaccccaaataacaaaactgccccctgcatctcccaacaatg

SEQ ID NO: 100695 - DNA, 192 bp, Heterodera glycines
  unsure (1)..(192): unsure at all n locations
aaaaaaccttttttttagctttatctcgatttgcttaattcagcnaattttgttctaagaaactatttcatcttacatctgatcaatatgattccacaattttggttcgtatttcaaatttataatataatgaactattcaaattaaaattgcaacgatagcccgtttttttaggcaaaatgtgccgctatg

SEQ ID NO: 100696 - DNA, 160 bp, Heterodera glycines
taaaatctgaaattgaaagaataaattaaaatttaattttaaaacaacttttattttttaattttaatgacttcagttcagggctcccaacatttcccctaaaattttcaaaatttgaccttaaaaattgccaattttcagtgaaaatctgttaaagatg

SEQ ID NO: 100697 - DNA, 1003 bp, Heterodera glycines
tactgaagcattttctactgatacattttctactgacgtattttccactgatgcattttctgggcaccgtttagtgtgtgtctaaagatagaattcggatcacttaggaaccctaaaactcattcgaattttggtgattatcctatgtagaagcatttaaactcattttgctattttatgttaatatttgggaaaccctaaattagacccattttccgggtttttatgagtttttttgagtttttgacatttcgtgattttttactcttttgaacattccgtggcttggagacactttttgggggcgccagttcaaaagttatagacagtaaagacaccgttttatatttgaatgcactgcattttgttttttgcgctaacaatttattggcgcttttttttcgttttttacaatccgtgcgcctgcggtttacctcagttcggctctcacggtttggccccagcatgtttttacttattttttctgcggttttaactcgacgagaaatgcacgaaaaacaattttttttgttcgaaaaactttttaacgcccctattcgaccctaggaatccctattttgagtgtttgcccctaaaataattttttttatccctattttggcgtttcgctcctatttagcgattttaaaaattttcatataaaattcacaaattctttaacaaaaatgcaatggaaaaaaaaaattgttttgacgcgatcactttttttgtcaaaaattttcaaaaaattttccactaattttttttgaccaaaatttctgtaatttattttctttcttgtcaaaattttgaagttttatttattttagaaaaatgtattcaaaaatttcgcataaaaataattatttgtaactgtaatcaaatgaataaaatcttagtatttacatagaaaatgaggatgaaaaacaaccccccgcttagtttttgtgccaattttttcaaaaaattgtccttatttaaggctaaattgtatttttaaatg

SEQ ID NO: 100698 - DNA, 665 bp, Heterodera glycines
  unsure (1)..(665): unsure at all n locations
cattatttggttttaacccnggaatccttctggtcaacttcaggtcagaacggtaggctctcaattgtttccgaagaggctaaactattttatggaggcatacaacgatgcaacaagcgaaccgttcagctatttggttataaatatgcatcctaatgcgcccgagtctgaacgtttaacaactaaaattttcccggatgaacagcgtgaggtgtacctaccaattgaatagagaaagagtataaaaggttgagaaaatctgtaattttcactacaaatgtatgaattcagtccatatataagtgaaaacgcagaatttttaaaaaaaatcgcctctacgaaatcggaaaaaaagaaaaacatccttctgcaagacgcaacagccgaacaaatattaggacttgttgaaatttgtgcaaacatattaaaattcaatttcagcctaaacagaaaccagaggaaacggttggccgaatacgcggactattatcgtgcaattgcacgctcgcgtagcgaaaagactgctagaaaaaggctacaacagggaagtggtatagcattaggagcaatattagtgcctattcttggcgcactagctcaacacctggtcgaaaaaattacggcctaacaggcgggagctaccaatgaaatatacaaaaaagatg

SEQ ID NO: 100699 - DNA, 739 bp, Heterodera glycines
atttttttgctatttttccttcaattttattccattcttttgctgaatattttcttcctttttgcttaattttctcttttatcttattgaattttccaattatttctcttcttttctgttcttcgtttcttttttcttcccatttttctccaaatatttcgtcaaatgttttttgttccaattttttattttctgatccgatctgatcagttagggtgatcaaaaatataaataaaaagaataataagcataatttcatattttatttttgcgaaaacaaccttaaaaacaaattaaacaattaatattatttttaaaatgaattttgaaaatagtaaatggttaaatacccacagatatgaattaatattgaaataacgataaaaaataatttgttgatgaaaattacaaaaaaaaaaatgcttttttccttattgactatcattaaatcctaatattttatgtaaaaattcaccccaaaatcaatacaaatgtataaaataaggatatttttaattatttttttttcaaattataatgacaaaatataatctttaattaaaattttggcataattttttaacagaatttgtaatacaaatgttcattttatggatttttaatctaagttttaaaaattctatttttttgcaaaaatcaaatgtttttcacaaagatggaaatttttgaataaaatttttaaaaaaatcgaattttcagtgacgaaaaggaggacatg

SEQ ID NO: 100700 - DNA, 896 bp, Heterodera glycines
ctgtagctcagctccctgacagtcgtttctttatttgaaggtaccattcgaaagagctcttttttctaggcctaatggctaaggtggcgtcatttttgacggaagaataaccggaatacaaattaatattttcaattaatttttggcactatactgctatagtggcttggccttggcttggaatttttttctgtatctcagcttctttttggcacttgatttgaaggtaccattcgaaagagctcttttttctaggcctaatggctaaggtggcgtcatttttgacggaagaataaccggaatattttcaattaatttttggcactatactgctatagtggtttggccttggcttggaatttttttctgtagctcagcttcctgacagtcgttttttgatttgaaggtaccattcgaaagagctcttttttctaggcctacataattccccactcggcggcgggcacatgaacatttaaaagacacttaaaaaatgcaaaaaatactttttggccaaagatgcatagagatatttaaatgtggaccaaaaagttgtgtcacgtgccaattaagacacaaccctatcccagcttatagagctgaaatgcaattagagtaaaggaagggaaatggaagggaagggacctaaagggaaggggatttatccctttcaagagatatccatggaacggataaaggcgggtattgcaaaaaagtgcaaaaattcccttgggagggggggttgctgtaacctaaaaaatgcaaaaaatacttttggccaaagatgcatagagatattttaatgtggaccaaaagttgtgtcacgtgccaattaagacacaaccctatcccagcttatagagctgaaatgcaattagagtaaaggaagggaaatg

SEQ ID NO: 100701 - DNA, 178 bp, Heterodera glycines
tttttctatcctcggtacaaagtcacatttcgtgctcgagccatcttttgaattgaaaacaaaaggccaaatgctcaattggcacccattgtgtaaaatccgtaggtagtggggccattggcataatgttgcattcaaatttccttatttgtgccctctaaatggctcccggacaatg

SEQ ID NO: 100702 - DNA, 59 bp, Heterodera glycines
tttgatctattaatattcctctcggggaagcttcttctctatctcacaacaaattaatg

SEQ ID NO: 100703 - DNA, 183 bp, Heterodera glycines
  unsure (1)..(183): unsure at all n locations
tatcggcgatatgattcatagagtcatatctgggatatgatctgaattganataggccccagtgctcgagaaaaatggtcaattgctttctcccctttgtccatttaatttaatgagttttgtttaagctagttaattgatcattttgagttgccatttcagtgcgatgcactcgcccacatg

SEQ ID NO: 100704 - DNA, 633 bp, Heterodera glycines
aaaaattgatttggataatcctactgatgatcattcactaatggtttataaggcatagcgatttaataatttttataaatgattttaatttaatttatttatcaaatttattttttaagtgatattggaattttttattatttttatatataaataattgttgttaaattaaaaataattttttttttaaattgatactgtaatttttttttgtaaaatataagctttagatagagtttcgaacaaaagttgggatttttatttagattttttttttgctttttcaaaaaatagataaaaaattatttataccaaaatattatgaaactgaaatttctgatcattttagaatcttttcttttttttttcttcttcctaagttacccttttatgttttttgataaataggtataaagtaaaaaggtcactagttaaaacagaaatttaaaactatataaacaggaatttcgaaattctactaaaagcaaacatccattttaataaataaatccatcagtatttaatgcaaataacaattatcttaaaaaagaagggattttaataatgattatttaaggcattttcatttcctttttgtttgacaatttatattttataaagaaaaacataatg

SEQ ID NO: 100705 - DNA, 1003 bp, Heterodera glycines
aggccccaaaaacacgaaaatcggaattcagcccccaaaaatgtcggaaatcggaagtcggaattccgtgccttctgctgcttcccacgcctttcaattgaattgctaattaattgctctcactcattctcattccattatctttttttttcttttatctttcctatcttctaccttttgaagccaaaaaagaaaagactaaaaattactctgttggacgaccatttgaatgaatggaaaggaattgccgagaaatggctattttaagtgtgtggttgggttggccaagcgatcaccgtcaatttaatgggccaaattccattgggcacagctgtccctgcccaatcaaagaatcattcacagaaagaggagaagcatttgaaacaacgcagaatgaaaaattattaatatgagagtgattaatgtgaaaaaatcaaagattaaagaaaatccaacggaataaaatgaattgggacggcgcctgaaattttattaagcatttaaatccctaattaaaccattttaaagctaatttaagcaggttgaaaacaattcctacctaaaaaacagccgcgctttttttcttcaaaaattaaaatgaatatttaatatgctaatttaattaataattaactaataagcgcaatttaaaaaagttttacttaaaaacaaaacaatgaattctgttaattgttgagaaattagcaattagtttaactgacaacgtttggacaaattgctcaagtggtttaactttttatgcttttcgtcttttccttcgtccctggtccgaccgagcaccgatggccaaacaaaaagcgggggacacgggggaggggtcaaagcacaccaatcgccacaccaaatgaatgccgaacaaccacaaaaccaccccatccatcggcagatgattttactccttccttcgcttattattatcgttgggatcaaatttcaacactaaaactcttttgacttttctgagagcgatcggcggagaatg

SEQ ID NO: 100706 - DNA, 546 bp, Heterodera glycines
ttcacacagagacagagagaaaagcagagcaaaaatgaaaatggcaacacagaaggaaacaatcaattaatacccgacagtgaaagacaagctaaaaatgaatttgacaatttaaaagtattaaaaattgaaaaaaattagtgagtgacagagactttgtggccgcaaaattgacagagaaaataaatggaaaataaaaacttatttggaaataaaatttttaattaagtaggaaaagcaaaacaaaatatgaaacagataaagctaaagagaaaaaaatagagaaaggaaagcaaaagtataggtccggtacagctacgttttaaagaagcctaagccaagcctaagcctaagacaattgtttttttgttattgacatgtttggcgttatgttttgcaaatttcaaaattgcaaatttaattttttagtgttgactgataaatccaatcatgctgctttatctataacataatttacgtgtgatatggtgtgctaaataagccaataattgaataaacaagctatcattttttttagagacaatg

SEQ ID NO: 100707 - DNA, 215 bp, Heterodera glycines
ttatgaaaaaaattttcaaaagggaccacttttacagtagcgccaaattttttgttttcaaaagtcacaaaaatatattttaagaagttttcggtaattcgggtcagggttttctgggcttgaaaaagccgtgtatcttggtctgtacctgggctatgcattactatatatgatatattaaaggtaaatccaagtcaggatatcctacgaaaatg

SEQ ID NO: 100708 - DNA, 196 bp, Heterodera glycines
tggatctgggtacgggtatggtggctacggtcgtggtacagctcggtacggttacggtggttattatggcttacgctacggttcttatggtcgcaattacgggcattatggtagaggcgctacttccacttgtggcggttgtggtggtggaggaccttggcaaggctatcgctcatggacctattcgccaagcatg

SEQ ID NO: 100709 - DNA, 96 bp, Heterodera glycines
ttttagcataattataccattaaatttataatggaattgttttatttatttattatttatttattttttgttagatagtacagtattactttcatg

SEQ ID NO: 100710 - DNA, 257 bp, Heterodera glycines
  unsure (1)..(257): unsure at all n locations
tgcaggtcatnntagtaggacnnccgattctgacatacanttctgacaaattttacatcctgaacacgaattcgagcagaaagccataattcacaacatttacgcaacacttctttcaacacaaaatattatttgtcttcctttagttttaagtatttttaacttatttattattaatatttttgtggcatttcatttaaatttattaattaaattttttttattttaataaattttctagattttaacatacaatg

SEQ ID NO: 100711 - DNA, 774 bp, Heterodera glycines
taaacacaccgtttcaaaaaacgagagatgaaccaataaagagagagcgcagagaaaaaaacatctctctttttggcgtactatttctttatctctgttaatagagaaaaacggaatttacatttctatgtttagtttttttgtcctatgttaaatgcgcttcaaattttgcataaagatagagaaaaaaattctgcatcgaatgttctataagattttacgatttttctatcccatttttgcatgagaccgttatgaaaatttgaaactctcactactcttttctgagatgtcaaattgcttagcatttgcttagaaaaagcttctcctcatcaagggctttcgaatgataccaagatggaccaatttggttggcaaaaagcttcaaaaataattcccaaaattcgtcattttttaatattttggacaaaaataaataaaaatattcatgttgcacaacggactcgaaccaccaccctttgtccctttactatcttacaaaaaccactgagccacacatgcaaatctttttggaactgggaggccaaaattgaaacggtgtgtaaagcgattctttttttgtttttaaattttagtccctcaagaacttattcgtaattcgatgcttttaagttttctttaatttatttgcgtttctttttccattttttttaaatttcaggctaaagttttcatttgacttccccacataaatactgacaaaaacaaaacgcccccgcattctttgtctaaccgactcaacgttgagacatg

SEQ ID NO: 100712 - DNA, 249 bp, Heterodera glycines
tgtcgaagttggcgccgttttgttgctgcgcattttgcccaattttcgccggaggcaatgcgcgaaaaaggcgcgcattttccttcagcagcagcaactgctcggcgtaagcggtgtacgtgtcgcaaaactgtgccggatgatcacgctgatggacacagcaaaatgcgatgcgtgccaaaatggccgcgaccaaatgcaacgaagtgctaatgatagggagaaaaaaaagtaaatcgactaattatg

SEQ ID NO: 100713 - DNA, 826 bp, Heterodera glycines
atgccatttcaacgatcgaatctttatttttcggcatcttctttgctggagttcaaattttgcacgaaaaagtgaaaaaaaagtcacgaaaaaagtcaaaaatcccagaaagtagaaaaaagtcaaataaaaagttagaagtttcaaaaaagtgtagaacactcattttaaagccatttcgattcagaaaaaaaatcatttgatacagtcctgttgaaatacttgttaaagataaaacggattaatttaattgttcccgtttacccatttccatttattgtaacttatttttatctcaaaattaatattttcagaagccttttacttcatttcctcagataagtcttgaaagaaggatattttacctttaatgatttaataattttattttaattattttaataattttctattttaaaatttacgaatatcgaaaatttagtgattttttggttggtaaaacgacaccaaaccaaaaatgaaggacaaatccttaaaaatcggaagctcgaactttatacatgctaatgtgtgccgaaatacattttattaattagacaaaataaaaatataattttgaaaatcaatccgatgcaatgcattgagttataatttaaaaaaaacatattcattaattgattgattttatggttgtcatttttaaatagatttccaccattacaaattattgtaaaatttagataaatttatatttccctatataaaaaaataatttaattaacaaaaaattaatttttggggtttttataaaattataaagcataaaattaaggaaaatagtttattttatttttgttttaaaatg

SEQ ID NO: 100714 - DNA, 58 bp, Heterodera glycines
ttgccttttttcactgtttctgaaatttttatgtatattaattaacttttaaggaatg

SEQ ID NO: 100715 - DNA, 169 bp, Heterodera glycines
cgcattcgagttcccttttttcacaacattcttaacccttctttgggcaactttcggcatcaatacttttttttccacctatatacattaaacaatttaaatacttaaatatttttaattacgggtgccaatccaggaattattttcttagtcgccgtagaaaacaatg

SEQ ID NO: 100716 - DNA, 378 bp, Heterodera glycines
tgatataaggacgatctcattttgaagaatttatacttgttgatcaaatgacaaactctttctttgtaattttgccgagcaacacgcctggctttgttggaaataaaacaaacaaattcaaagtgcacttgccaaagaagttggtgttcgatggggtcgggtggatggttggactgtcaggcataatttacccaaacaggtgggcgaaaatcatggctattgggtccgatttttggcttaagttgggcaaagctgggtacatcagaccgacaatatgtgattgttcacctgcacgacggccgaaaataccgtttccgtgtgccaaagggaagttttctctcgccacagcagcttgagaggggcattcatcatggcatg

SEQ ID NO: 100717 - DNA, 65 bp, Heterodera glycines
atagatggataattcaataatttattgccttttttcctgcacagagttcggctagggacatcatg

SEQ ID NO: 100718 - DNA, 167 bp, Heterodera glycines
  unsure (1)..(167): unsure at all n locations
tccatgcggcaaaatttgccaattattatgataatttatgcgctccttcaagaattagcgatagnccacagaagaatggcactttttccgatgtttttccattatttaatgtttcatcggtccttcgggcgaagttcactttggcaagtcgcacattggcacagatg

SEQ ID NO: 100719 - DNA, 653 bp, Heterodera glycines
ttctaattttagaaaaaaatctagaaaaattgtcatacttttaatagctagcttaataagaaaaaaattcaaaaaaaaactttctatcaagaaaattcaaggaaatttttaaaaaaatttcaagttttttggttttttccggaaattcagcaaatttagtttttattaacacttagattttcaaaaagctaaaatacttttaagttttcttgaaatctagaaaatttttaattatttttttttttgcggcgacgttatgtcccggcgacgtttcggtgcgacgttttggggtgtaccctttagggacaccgattttttttttgagttaaatgcctccatttgggatcaattcctttcactttcccccaaaaattagaaatgggaaatttttaattcgatatttctattaagaaaaataaatctaattgtaagatatttttccaaaaagcatttcgcccaaaactttttgcaattttcaaaaaaaaattttttttttttaaagtccaactttcaaaagtcaccaagggttgttttttttttgactatgtttgtcgaactcctcagaaaacggcatgtttcaggacgacgaattcccaactctgtgcggtgcgcgcattgtccgcgtcgctgtccacccaaacttccaaggcatg

SEQ ID NO: 100720 - DNA, 492 bp, Heterodera glycines
ttaagttaggtgaaggattgggtccaaaaattggtgagaaatttaagtgattatgtacggtttgtagcatttattttggttcagttgcgtgagagaaatagaatttttggatggtttacacaaatttaagcaaaaggagaagtaggatgctacttaaaacataaatagttcaaattataaaggataatgggggagattcaatttcggatgtgagggactctagaccgaaacatggatgaattggatttattgttagatgaattaggattaggtcatctaccccacgtcgaagtgcataggtttttgtgaaattccatgaaaaaaccaaaaaaaatatataattttaaaaaccgaagcagacactcctaagaataagaaattcccataattcaatgccagatagggttgagcggtaccggtaccggtaccggtactggccggtaattaccggtttttttggtaccggtaccggtaccggttttttcaaaaatg

SEQ ID NO: 100721 - DNA, 225 bp, Heterodera glycines
tcttgtgccattaatggcatccgtcccgctttttgtgtgccgccccatttccggcacacttttttttgtgtgtccccaaactgccaacaaaaaggcgctttttgaaagaatgccgcatcggcacaccgcggcaaaatattttttcagttttttggtccccaatttttccgcaatttttaccgttctacggaaggtcatgatgctgaggaaagccatggcaaaatg

SEQ ID NO: 100722 - DNA, 238 bp, Heterodera glycines
ttataataatcaaagggatgggatataattaattgatcaccgctttttccaaagggtttggatttcggagaattttcggcatcggaaatacgaaatttgggtgaaaatttaaaatttaattgctgagtcataggctggcacaaatttttcgcattgcccttcaggcacattgccacacaaagtgaaaattgtggtgcccggcaaccacgagctgggctttgaggacggcgaggagatg

SEQ ID NO: 100723 - DNA, 615 bp, Heterodera glycines
attgcatttaattgttttatgcattacataacacaataagcgtattaaatttgttgattgggacaaaaggtcgaagccgtggattaagaagttttatgagtcggtctcttttaaataaacgaatttggcaaaatttgggagaaaaacataatgagaaatgttaattgtcagtcatttcgttgcctatttaagttggcccttttccacattttctgtcactttccgctttttgttacttcataatttgtaaaatttccttaccctctcaattatgctttgtttttttttttgtaattttaacaaacaaagcgatcctctcttaatcatacagaaaccaataatgtcttctcttgaacgccaatcgtcttcgcgctcttttaggccctctgatgacacggattcgcgggggtaaggcaaaaaactcaacggaaaaacaaaaaatttctttccttttattttgcagaagctgttcgtcacttttgatctgcttttcctattgttcttcaatcatatgtttcccttgcgccatttgtctttccatccgggcaattttttcaaatttcacacatttccaatttctaattctccctaatttacaggtcattcagcagtatg

SEQ ID NO: 100724 - DNA, 186 bp, Heterodera glycines
aaaataaaaatttataaaaataagtcaaagaagaaattcttttatcgaaaaggtaatttatcattataaaattaaataaaaatttaactgttttaagatgaagaaaaattactaattattaaaaaattcattaaaataaaagagcaattggcaaatgaatttggagctggtctaattagcaaaatg

SEQ ID NO: 100725 - DNA, 1003 bp, Heterodera glycines
aaatatttttttttgaaataattattagttatttaaacatttttataattattttaataatattatttttattatatagtccctcgcttcattttgtctttaaaaacgtaaattggaaattatttaattgatttgtttatttggcaccttttcaacacccccgcccttcttgccacacgctctcgcccccctccccccgctggtgacgtcaatttttccctttatgagagcaaattaatgtttatcacccattgccaatgtggccgaatggttagtacgtcagtctggctaccccctccgtggttcggatccgctcagtgcggggaatttttgataaattttaatgcatttaaattcaacacgttaagatattttgacctttagatgtttaaattgaatttaaaattaattaaaataatttaaataaagtcgcgcagcaaaaaagtcgcgcagtaagaaaaaagccgcgcacccccttacaataggtttgggtttgcaagaaaagtcgcgcaaaaggttttgcttcagtactgaaaaattttggcgctcaaatggctggcgctcagttggccatgcacccctcccataggtgtggggggggggggggctaccgtaatccggacaaatggtgtgctctaactactaaccattaattgcaaaaataattttaaaaacaaatttctaaatttaataaaatattcttaatgctttatgaaaaatctaaataaaaccaacgatgtaatacaaattttttaaaacaaaacctgggattaaagcttgaaaataaaccaatgcttattatctcgtcgaaatcattttccctcaattttagctaatgtcagttctcttatttataaatattgaattgagtttaaataaattcttcaataaaattatttagtataattataaatttaatttaacttaattttgtcttaaaaaataattgaattatataaataatataaaatactattatttaagtgaaatttttacacctatg

SEQ ID NO: 100726 - DNA, 284 bp, Heterodera glycines
aggacaaatccctcccggcacagtaattaattaatagggaaggggaaggaatgattgaatttctgggaaaagccttttcaatttgaaaaaatgcatttgctattcatttgtcataccgtacacaaaaaataaaaaaataaattttaaaatgaaagaattcatcttcatcaggcccttgaaaatgcgttatgtcacgtttttttatgtgcttttttcgccatttattttggcactttttggtgccaaatttggggtccttaattcgtacttcaacttaaaaaatg

SEQ ID NO: 100727 - DNA, 1003 bp, Heterodera glycines
attggccactccattggctaccggtaaaaataattaaattttatttcaattttttttattttttcaaacattttttagttctcgtttttcttcgtaaaaggattcctctgttggcttgtgtttatgcccaatttttgcctatcgctgcaggcagtaattcatacataaatctgttttggataagcattgaccgatttgtggcattggcattccctgttttgtataaattaataattaattagagtgtaattatgcccttactattattctacattaaaaatatttagtgttattcttttttttacgaacttttttttataaatattttcaattttagaaaatttaattcattttttcttctttttattcttaatcggtggatttaagaaaatctaagaatatttccgaccatgattattattagaatcagaattttactaattaaattttatactttaagagataaaatttatttaaagtgatttaaattaaagaaataattattatttaatttttaataaaaaatatattgctttagaaccttaaaataattgttttgaacatttcttcctcctttgatttaggttctggaccatatatttttctggtttctgtatttttctgtctttttatactgaaaaaacagatacaggtccatatgggaatacagtagtacaggcactctcgaaaacaccgaacatattttttattttcttatgaccagaaaattttttgaaaaatgcattcgcacgctataaaaattaataataaaaaataataaatcgactaatattatattaaaaaattaaaacttttcatctttagtttccgcaacatctcaagattatctggcaaatacgtgataattgctaatgtcttgtctttgtcaattattttttatgttgtttatttgtcgtttatatttgctctacaacatcccgaaatgtaactaattaattaattaactaattgaaaataatattttttatatttaaatagtatg

SEQ ID NO: 100728 - DNA, 95 bp, Heterodera glycines
ttttgtattgttttgttgcattttttaaaatttttaggtgtaggcccaaaacggaaaattactgtaattttctcttgctcaattggcacaaaatg

SEQ ID NO: 100729 - DNA, 342 bp, Heterodera glycines
ttttacaaacgcgcatgagtggcagtttttaacaaacgcgctagcaccttttcgattattgcccaccccaccccaaaaggtgtcataaatctgacaacaaaaaaaaacaattctaggatagttttagcgctaactaagaatctggctgccctagtagagtttgcggttttttggcaaaatgctaatcacgagcataattgaagccggcatgaccgaaaggacaccaaattttatttaaaaggatatttaattgaattcatttctgaacacagaatttatgtgatgttcggtcatttgtagatgcaaataaaattctattaaggaataattgcagtagggatg

SEQ ID NO: 100730 - DNA, 145 bp, Heterodera glycines
tttttgatgatgtttcgcaagactgatttgattgctcgtgaaaaatcggcttaaatacctttgcaaagtgggcgtggcctaattttccgggagtataaaagaccctgcaatttgtcagctatgtctcattcgttctgctacaatg

SEQ ID NO: 100731 - DNA, 802 bp, Heterodera glycines
aaatagtcaaacagcgttttatgattttttaatagtctaattgatttcgaataaattagtcattgattaggggaggagggtaaatttaagaagcagactccataatgatttttctttttgaaaaatttaaaattaaatctttggtcccaaaaaataaacttcatatgattaggtaggtaggtaatttaaaaatagaaaagtttgtcgcggcgcgccaaatttttgcgattcaattagaaacagtcgtcacaacaattagactgaatgattgcgtgccttccttcttttatcacatcaggccagaacagctttgtcccaaaaatatatggtgttcttcttgtgttttatgcttttgtcgacgtgtcgccaaaaatattttgacgcgaacgccaaatcaaaaaaaaaaattttttttttgtcgccgccaaccgctcataatttgcacagcatcaaattacacacacacacacaccgcacatgaagtaaatgggggaattaggaccttagataagcggtctggggttaagcttttttgtggatacaatctgcgcgctgatttcggcggatttgcccctctgatcagacacattaaagcctctctcctctctgatcagcgttcggccgctgaaaaatcgttgttttgggttgggcagaggagagattagttcgacgaaacgcgagaagacgcaacaaattttgtcgaaaagcattgatcgaagcaccaccaccaccacaaattcgagagtggattaagcagcattttttctcgagagtgactctcgacggcaaaataaaaaaaatg

SEQ ID NO: 100732 - DNA, 79 bp, Heterodera glycines
ttctcttttgatacttgaattcctctttcactcttatttccagttttttaggcagaaaagaaagatttacggcaacatg

SEQ ID NO: 100733 - DNA, 155 bp, Heterodera glycines
ggtctgccaaaaaaaaaaaaaaatttggcattttgtacaatgtcatcgttccctcatccccccttcccaaaaaaagttttttttaattttgtctaaatttgaaagtctgccaccaaattgaatggtcttcattgagtgccagggtcaatttgatg

SEQ ID NO: 100734 - DNA, 726 bp, Heterodera glycines
  unsure (1)..(726): unsure at all n locations
aattgtttgagtacnncaaacggacactgaaaaaaatcgattttttgtttncggggcagtccccccgagccngatgcgcccagatttatggggagaccgaatccttccggaatagcttccctatagcctgtactttaattctgcgttggatttttgctccccataattgtttgagtaccccaaacggacacttgaaaaaatcgatttttttgttttcggggcagtccccccgaaccgatgcgcccagatttatggggagaccgaatccttccggaatagcttccctatagcctgtactttaattctgcgttggatttttgctccccataattgtttgagtaccccaaacggacacttgaaaaaatcgatttttttgttttcggggcagtccccccgaaccgatgcgcccagatttatggggagaccgaatccttcgggaatagcttccctatagcctgtactttaattctgcgttggatttttgctccccataaatgtttgagtaccccaaacggacacttgaaaaaatcgatttttttgtttcataaatatttttttcagaaagtgctctaaagcgcaccaaattttatttacaacttaattttagcactctgatgctttagtatcaaaaaggaagatggagaaaaaattttttaaaaaatttttccttatattttggttatatcgttttgcttttggtggggtgcttggaacagtggaatcatg

SEQ ID NO: 100735 - DNA, 346 bp, Heterodera glycines
atgccctgtgccaatggttgcattcgccgcggggggccgggcgccttaagattttgctgtgccaggaaatttggtcattcgctgacaaaattcgggaactaaaaacgggtaattatcttaataaaatatgaatgtctccgctaataaaaaagattgccggctaaattgcaaattaaggcattttgcgacgcctctgcccccgttagtttcatcattcgtttgtctttgagcagttttgctggtatgtggcattttaaaaatttctagtatttaagacccccaaacatttgttgttttctgtgcaggtgaacagtttgaattgcgcaatgatcggaccggggaaatg

SEQ ID NO: 100736 - DNA, 295 bp, Heterodera glycines
tttcccattatccaagcatttgttacttgcctccaggcaagtttcagtatggcatttcataattagtcaatcatcctattaattagctcagttcagacatttaactaattggtcatttaaactttcaaaaaataagaaatttatttcaaataagccaaaatggaaaattttgacttttacttggttttcttcaaagttaatactttatttaacgatttttaagaaaattttgcgccgaatttggaattttaattatgtacatatgcaaaaaatccaatcaacagaatccggcatg

SEQ ID NO: 100737 - DNA, 491 bp, Heterodera glycines
attaaggatttaatttcctaaaagattggcacatctcatttttgatagagaatttgcaaatttttgaaaaataaaaaaatttaaataataaatccaacaaaattttaaacataaaaatattcgattatggcctaattacaaaaaattaaatccaatttttcgaaattttttggccctgtagaactaaatttaaaattattcttgccgaaatcggttgggcttaaccatggaaatgcaacaataaataataatagttttttgcatgttttttatttcaattagaagtgaaattttcaattttttgctctaaatttatcatttttggtcaatattttcttaaattttttggcatgctttttcataaacatttatttaaatagttcagaattttttttttttgtaataattcctcctcatccttttcataaatgagaccagtaccagcaggagggttttaaaattttaagcacaaaagcgccgttggaataatg

SEQ ID NO: 100738 - DNA, 260 bp, Heterodera glycines
  unsure (1)..(260): unsure at all n locations
atttggatgggaagaaatgttcttaccgaattttggagtgactcaccgagactttagggaatacggggacgaaagcgtcgaattaattgtatttgtttgaaagcacggaggaaatcncaagaaatgcgcntatttttcataacaattcattanaatgctacaattcacaattttctatgcataatacattattttcaccatattattcgtctaaaaactccaaaaatttacagccagaaaaattaatcctgcaaaaaatg

SEQ ID NO: 100739 - DNA, 137 bp, Heterodera glycines
aaatggcaacgaatgccaaacatgcgactacgagaaggcggaagccatcaacggaaaattcactgcggcctacggagaatcaatggccacttggatctccgaagatcaccaaaaggcattaactttcgccaaaaatg

SEQ ID NO: 100740 - DNA, 910 bp, Heterodera glycines
  unsure (1)..(910): unsure at all n locations
aaagactcgcgagaaaaatgtaaaaaaaggattaaaatgtgttaccncaaataaataattccggattgacagacaatataaaaacggattaaaaactattgttttatattatgttttcattaaaatatttggggacaacgatagcccttttatatttttaaattgactttggcgaaagcagacaaaaattttggtgaaaaatttttttttatttattttttatttagaaagggattttttttattattatttttaaaaatacaaatgaggggggggggggcatcaaactttgcgtgttccgcgactacgggcggtattttggggacaaacatttggcatgtacatttgtgaagaaaatttatttaactatacgattaatttaatgatgtcaaaaaacgaaattttctcaaaatttctccacatgcggcgcctgaactgctggggtcgcaggaaaactgcaaaatgaaatggaatttttaagcattggcattgtgtgggcgttgctgcaatttattaacggatattttgtataatttatacattttcatctaaaaataatttgaattgtcaacaaattaaaatcaatgcttttttccaattggcaaattttcgcttggaaacgtggccaattttataaaaaatttcaacaaatttggccatttcttaaagaaagcaatttattagtgactttacttccgtccattcttcactcataagggtttttgaaaaaatgaaatattttaatttcttttttaattttctaataattttttccttcatttacggccgattatgtcggtccaacaacagtaagtgcaataaaagctttcaaaaaatggttaacatttttaattccgtttaattagataagcaacgcgaaatccctcctgagacttttgggaaaattatg

SEQ ID NO: 100741 - DNA, 719 bp, Heterodera glycines
  unsure (1)..(719): unsure at all n locations
tccttggtatcaattgagagcttaaagtctcgggaatttacaaatacaagaaaagagcaaatattancaataagaaaaaaattgcaatgaaaaaaacctgaaattcattatttttcgcgtatattcgaaatatttgtctgttgcatttatccaataattttcctaacaaacttctttggactttaagctctagattgataccaagaatgtaagttttaagcaagaaagaaaaaaatgatgcctaagaaaccgaggatagtcattgattggacgctaaaagtcgattggacgcgtaaactgcattagagccgaaaaaaattgtttattcctataaaaaatcgtaagaaaatgttttatgcgggttttggggcttcgctgatcacaaacaaatatggcttttatgtagtttattttttaaatgagttttggtggagtgaattttcgactttttgttcgaattcgggtccgggttcgcaattggtcggatgtcatatttatcagcggctctcaaaaccctcataaaacatgtttcacgactctttagaaaaattttttctacgaagggggagggggacaccagctttactattaccgtgttttgctataataaaaattgtatttgcctatttttatgcctattagaagatttttgtgcctttttaggtgcctatttctcgatttttgtgcctaaaaaaggaagccctactcattgccaaatg

SEQ ID NO: 100742 - DNA, 434 bp, Heterodera glycines
gttttcacatttttaccttaaggatcaatcttgaatttttttcgacatttacagcaagtttttggcatcttttcgacaaccgttggaagtcttcacaaaattaaaccacaggtaaaaaatgacatgcccagaaataaattattaatatttttgctttttaaatttgttgtttatgtgcattaccctcggcttcattagcatcaattccaaaaactctcacataattccataacggctcattaaacagttccatctcaattcgtgggttcaattcccaccacaggctgaccttttacacctccgccatccaccaaattcctacatgaggaacaaataaaattacaataatgagactgaatttttgaaaaaacccggagcctgaaccaggcccaagactatcgggatggtcaaggacagataggtctaaaataatg

SEQ ID NO: 100743 - DNA, 376 bp, Heterodera glycines
ggggatctctagagtcataattaaacttgataaagtaaaatgcttttgttatttaagcaaataacaaaaaactatgtaaagcattgctaatgaacaaatgactgattcttccgttttccaaatttcaaaatccattggacggaatttgtttcttccgagccgatcttaaagctgtagttgcgtacagacaattctaagaaaattaagacactttttcctaatgtttttaaaaacttttgtgttctcccagcagatcgaatttgattgtattgttttttaattgcactgaaataacgtttttttaatttctcaggatatgactcataaatgccaaaaacaaaaaaatagccctcatttttgagtttctcttataatg

SEQ ID NO: 100744 - DNA, 210 bp, Heterodera glycines
aatacggctctattgcactttacacgaccataaaaaagggactataaaatatttacccccaccccaagggtttaaaattaaggcaaaaaccctgcaacgggggaagggccacttacaatttgcatgtttctcttttttgccatttatcatttgttgtcaatttttgttttttttgttgtgttagatgcatgccataaaacaacgaaaatg

SEQ ID NO: 100745 - DNA, 206 bp, Heterodera glycines
acaaaacctatgtccaattttataacagaaaatttttttttatttggctcaaatattgccttttcaaggccattcgctgtgcattttggcaagcctacaacagcatcgtgcaagtgatcgcttattgcgctgggcttgacgagcagttgaagcgctgctactgtggtccgctgttgtcgctgatcctccactttgacgtcgcaatg

SEQ ID NO: 100746 - DNA, 70 bp, Heterodera glycines
ctttccgcagtgcgggaagtgttggatttgcgggacaaaacatttactctccttggaggcgtcgacgatg

SEQ ID NO: 100747 - DNA, 76 bp, Heterodera glycines
ataaagggtgtcgacaaagaattggtctgcgtaattgcaattgtttctgcaacacgaagcaccattcaccaaaatg

SEQ ID NO: 100748 - DNA, 83 bp, Heterodera glycines
ttgattatgccggaccatttttcgggaaagatttcctgattgtcgtcgactcattttcgaaataccccgagtttttcgaaatg

SEQ ID NO: 100749 - DNA, 216 bp, Heterodera glycines
  unsure (1)..(216): unsure at all n locations
tattctaaataaaaaaaattagaatttatntttattttttacaaatttgaacaatttcttccaaatttatacaatattttgtccaagacattgttaattacattggcacgtttttaagaggattttgcggcacaaaaaaaaaaagttttttttttgctggatttttgaaaactcagttcaactttttcagattttaaataattttgcaggaaaatg

SEQ ID NO: 100750 - DNA, 427 bp, Heterodera glycines
caggaggggttaggcgggaaaatttttggaaatttttaccatttaacaggttttcaccaataattgcgatttttgtggatttttggaaacattaagcaaaatttgtggaaaatttgaatgagggaggtcttggagggtggggggtatcaattcccttaaaatttcgacgggaccgtccctggcaccgggggacaataatctcgtcccgggccatgtctaagtcttgagaaattttcggtcttgagcagcaccggctgtggaaaagcctaggctaggccatattttgacaaaacgcgtgctaattatctatccaattaagggtcgcgctcgaaagcgtcgccttggcccttccggctcattagccgaagaagggacggacgattttcgactgttcaaagcgccatgctcatatacgctgaccgaaatg

SEQ ID NO: 100751 - DNA, 1003 bp, Heterodera glycines
atggggtggggcaattcaagatatacctagcggcacaatgtcggctactgtataaattgggcaagaaattcaaccgctcgaattccgaatatatctgctgtgcattttaatgaagtcagtatttgatcaaaatagtagttgacttatttaatttccaagaataatgattttaaaaattttattctatttcctaactatttgacccaaaattttctagattttcccggcaacgcctaacagcaccgccgaataaattttggatctttttttttgttgcaaaatttgatcataaaatggccaaatctggcaaaaaaaaataaaaagctcttcggtgcccctcccgaaatttttctggattcgaaatgcgactttaagtggaattagatccaagcgcgagcattagtttttattggacccattctcgacaccgacgagtgtccacgataatgctgccctttatgatcgagaaattgagaaaaatttaatttattcctaataaaatttgaaaaatttataaataaaacatttgcagaataataattctcttttcaataaaaaatgttaaacaatttttttgatgcataagaaatgataaggaaatagcaaaaacacttaagaattttgatgatgttcaactgaacattaattaatttaaaaaatgaatatgtatatcgtaataatttaatagattatgaaataaaatcttttaaatttagtgtagttaaaattgtttaaaaattcatacccaaaaatttaacaaattagttgaaaagtttttaaatttaatggggccaaatgatatcaaacaaatttaaaaaacaaaaatgaattttcaaacatttaatgaatgtttcatattattcgccaatcaaacacaaaaatttatggaatgttttaccgttttgaatgtagatgtgtgtttgtgtgttgtatgtgcaattttcatcaaaatatgtaatggttgggggcacccaccggtgggcggatgggaggaacaaggatg

SEQ ID NO: 100752 - DNA, 220 bp, Heterodera glycines
gggaagggcaggcgaacgaaattggagaagaggtggcgaaattggggggggggggggagggaagtgccaaagtcagagggatgccgaaacaaaaaagaatgaatgacaagcgaaaagggaagagaaatatttaaaaatgaaaggctcaaattcggtgggccgaagggtccattcgccacggcacgacttcgaagacagcgacaaatacaaagggagaatg

SEQ ID NO: 100753 - DNA, 1003 bp, Heterodera glycines
aaaatagtgattcatagccatttcaatcatttgaaatgattttaggacaataaaggttgatttttatgaaaatctaatcaaacattttgccatacttttttttgcctagaagtaacgtcaaaccaaacccaaactaaaaccttcacaaagaatgtcatccaagagaaagtatcgagaaatggcattacatacctatgtattcttatgatagtcttttttagagtttttatgtggcataaagccactcattgattaatccgttaactaaccttacatattaacggctaaatactcgacattttacccggaccacccctcagctcatctctgattcatcacacttccgttttcacatacaatttcatattcatcccaaaactgctgaaatggacactgcgggtattttttttatacacatgtgctaattttcacaaattaatcacttctctgtttaggacaattcagctaatttttgaagttaatgtctttttaagaaaattgttcaaaatccaaaaaattatatgtcaaagttccttcaaatatgttacttgaataactgaaattaagtgcaacattactgtttagagcaactcagagacaaagtggacgacccgtccacctcaatgcccccctcccttcacaacccagacaatttgcagggcatttacgtttatcaacttccctttcccggttggcatgaaaaaacaataaatggaaagcaaaagtaaatttagggacattgccggaaaaagctcagcgcgagcaacttgctgctgttgtgcggaaatactcgaaaatcgttgaaattcgtatgcattaatccacctgtcttatgtgaaatcaataaatgcttgttagggttcgatgctgttcccaataatccggatgtaacatctgtacaagccggcagaaggtaccaattgccacctctgagccgcagggcactgattgttttccaaaagtataaattaggttaggtaaaaactaacaaatttcgaaaatg

SEQ ID NO: 100754 - DNA, 81 bp, Heterodera glycines
agtatttttttttatgaaaaaagtttataaataaaactatattagtaaaaaaataaaataaattttcaggaaggacaaatg

SEQ ID NO: 100755 - DNA, 192 bp, Heterodera glycines
ctaccttattttttctgtgggtctttaccgtattttcgattgccattattttacgaattcgattgtttagtaatttaaaattgttttgctgccaaatgcttgacaaaatattgctgcattcacaaatatttttgaataattcttatccaatgcttaaattgaatttgagttaagccaaatgctaccgtaatg

SEQ ID NO: 100756 - DNA, 103 bp, Heterodera glycines
ttctcatgggaaaggtggccttggcaaattggccactaccattcccattcaaccaattgaatttggtgccaattgtgattttgggctaacattgattgagatg

SEQ ID NO: 100757 - DNA, 52 bp, Heterodera glycines
atttttacacaaataaatatataatattttttaatttaaggggaataaaatg

SEQ ID NO: 100758 - DNA, 181 bp, Heterodera glycines
tctgtgaacaaataatgagtatgaaaatgaaattggaattgcacacttcctattttcggttcttcgttttttttttgaatttgccattaccattggcacgcgaagttggagcaggttgcgcatgaattggtggtattggcgaagtgtccgtccgtattgtctccaccggtccctgccaatg

SEQ ID NO: 100759 - DNA, 147 bp, Heterodera glycines
gtgctgctcgagagttgaaatgaagagtcgagaccgaaacccaaaaaaatcaaggaaaacaaatcgttctattactccccccccgtctggtcagagtatgaaattgcatctgcaccggtctcgtcctgttcctccttcactgggatg

SEQ ID NO: 100760 - DNA, 121 bp, Heterodera glycines
ttttcattggaaggtgggaatgaatgaatgatatgacgtatttgtgaattagtagccaagaaaaacagcggaaagcaatcaaaaatgaccccaaaagaaagaagacgatgagagaacgatg

SEQ ID NO: 100761 - DNA, 669 bp, Heterodera glycines
agttgattcaaatgcgtcccgatttttgttgttgtttgagttctctatcgcttttcttcaaataaactttttgttgaattcttcatttccttttttggggtcatgtaaatcccttctaaatttcaattttcatgctaggaatagattacctatgtgagtattcaggagtgaattcatatttatattatggatcgtttctgttcttttgcttttgtttcactctgtcggccccatacagctttttgttgtcgtttttccacttctcagcttcggtcaaattttttaaaatgggacttgcacaaccaatcccaccggaaatggatgaaatggttcaacatcgacacttatcttcaacctagaagaaaatttatccgtctaattgctaatcggtgactcgtcagtttcatttaacttttccgttgtctctgtttattttccctggttaatcctgtttagatttcacccggagcgaattttccaaatggggccggattttgcgtgtttggaatggttagttactctataggagttgcttaaatgtttttttgtttaggctgatgaatgcgggttccacttctgttctaatgtcggatggcacattgttaaaaagcaaaaagtatgtttttttatcatataataatgaactttttggcatcatttagagaaatg

SEQ ID NO: 100762 - DNA, 449 bp, Heterodera glycines
ttgttggttatcattaggaaaaaaagctgttttagactgtttggccgtcctgtttcgtccagcaaacgttgggacattccacctgaaacaacggcagaaccaaatttcggacattttccaatgctagaaaagcactggtacgacgagaagctaaataggcggacatatatttccaacatcacacgacgagtgagcagagggatatagccccccccccccgaacatgtcgcggattattcgatttttaagacccgaatgccttcagaatcagataaaagaattgcgcatgaaatgagcatgattttggtaaaaaggtcaacacctaatgcaatgattagaaattttaaatttagatttatgtgttcgatgtattaaaaaagcaaaaatgggcatatgacgcaaatcagcccacctctgattttttgcctaaatccaacaaaacattaatg

SEQ ID NO: 100763 - DNA, 403 bp, Heterodera glycines
aaataaaataaataatgacggcgccaccgaactggggcctattcaaattagcatcgatacgatgcgagcaatttgaataggcccctgctgaccgcaccggaaaacgccgcaccgaagtaactccgaccctggattatctacccccctcccccaaaaataaatcaatattgctatgcatttatgctaactgatttttaaaaggaaaacaaagagattaagcaagaataattttttccccctcttttcgttaaatattggcatttacatcattcgcttttcgtcatcatttgccaccctcctcccccccccctctaagaattggcatttgacagatttaatatcattaataataattattattattctatcaaatttttcatccccttccctccccatcacaatg

SEQ ID NO: 100764 - DNA, 1003 bp, Heterodera glycines
tattggaatagttaaattcgtttgaacaattaataaaatatttttataaaaattattttaatttcataaaacagattaaaatttattattttaagaagtgataacactgacaattggagttaaaatgaaaaggctataactaatctttttataattaaattttaaaattaaaataatcaagaatttgaataaacaaaagatttattgattatcaaataattatttaaatgtaaaaagaaaaaaatatttttcaaaaacaactttaaatcctttttaattcaattttaaatctttattaaaattgttttccgaatgtttttattacaaataatactaatattgaaataagaaaaatcttaattaaaactttgttaattaaatttaaagcacaatttttaactgcttgaatgataataataaaggatgaaactaaatgccacagccacaaaaatgaagagcattgtcttgctagatttaaattaaaaagatttggatttaaataataaattctaagcagctgtactaaaatctgattcccgacatttttgggcatcagatttccgatttccttttttgaaaatttttggggcctcaaatgctttccctgctgatgaaaagtagagcaagacttatgtgtcttgggttcttctccatcccgaacaaaaggaaaagaaaattcagggggcgagtagcaaattccccaacaagatttgtctgtatgtctagagaaatttaaaaaatgtcggtggaaaaatttcacatccccgatcttggggaccaattttacttttttaatcacttaaaataccagtagtgaaattaatttcttagaaatgtaaaaataaaatattaggcctaaaagcccaaaaacaaagttttatttagttttcagtcccattccatattttcagaaatttttaaaaatttctttacgaaatttttttattttttcccgaaattgtccgcaaatgtccgtccgcaagtgtcccactgcgaaaagatg

SEQ ID NO: 100765 - DNA, 92 bp, Heterodera glycines
tttcgacccattccgaacccctgatacgaattcgcacaagaagtcgaaaactcaacttcgaatttcatatttggtctaaaatagttaaaatg

SEQ ID NO: 100766 - DNA, 344 bp, Heterodera glycines
cctattacagacaaaatgtaaattttcgacaaaaaaaaaacaaatgattttcgtttagaagttgtacaaaaaaaagtgcaaaaaaaataaattcgggtacgaaaatatgtcacgaatcagacaaatcaacctcaaccaatcccggtcactcaaaccaaactctaacaaaaggtcgaaaattagtttttttttttcaaatttagggaaaggattcggaaattggttgcaggtcaaaagggtcaccttgctggcttttaataattttcttaatttacgatttcgaaactagcggcaaaatttggaaaattccaaacaatttcagttttcatggaacatgacaaatg

SEQ ID NO: 100767 - DNA, 229 bp, Heterodera glycines
ttttcttgacaaactctttactctcctacgttcatatattacccctcacattgcaatgctcaaacctcttgataattacgtcactacttgtactattaccatcactaatatggtgacaagttttgtgccctaatggacacccaaaggacgatgctccaactcaaacgcccagcaaaggacgaagacggggacggcaccaccgcagacgaatttgacgaaagtgccaatg

SEQ ID NO: 100768 - DNA, 463 bp, Heterodera glycines
aaaggaggtaaaattgaaaaaaatcatcatttgttttccggatgtcagataaacaattgtatatcccaccaattgcggtttatgtttatttttgaaaaaagggatttgaaacttcaaaattggccaattttaaataaagcgccatatttttagagcgttagatttatttatttttgttatattcaagccgaaataggacaaaacagacgacatatttgtggtcagagacctcaaaatgtcctgaatttcttttttgaccaaaaatagtgatggttgtacaaattttgaaaaaccaatttgcactcaaatggccaacaattggatcacacttttgagatggtttattacatttataccaaagccaggaaatatttttatggaaattaattattatttacaaatcatttaattaattagatacaaattaattattgtgcaaatcccaaattccgtgacaaaaatg

SEQ ID NO: 100769 - DNA, 501 bp, Heterodera glycines
tcgtgacactggttttggcgttggttggcgttttgctctgtttgccattctccgccccttttggccctccgatctcttctttctcttctctctctctctctctgccgctgtcgcccaaaaattgcgattataccaaaaaaatggaagacaaaaataaaaatgaaattaaattaatcagtggcagtccgacgccggggagaaagtgtggaaagtgcgcagccggcggaactgtgcgcacattttgacggaattgggggacggcaatcttttaagacattgtgcagttttttttttgcccgacatttgcagccgcagatagaaggggtcacttttttgccaatttaatcagttcagtggcccggggagtcggccgggcaaatcaaatgccccccctggcgaagttgccctatttaaagggacatccaccgaaagtgagcatcagtcagtgagtgatccatccgaccgaaggaagacaaaccaaccaaatcaaccagcagcatg

SEQ ID NO: 100770 - DNA, 77 bp, Heterodera glycines
aagagtaagcataattaaattatgaaaattatttttaaattggagcaattaattaaagttttaataatacccaaatg

SEQ ID NO: 100771 - DNA, 1003 bp, Heterodera glycines
tccgtgtgcaacatgagtatttttatttattttttgtccaaaaaaatttaaaaatgacgctttgtgaaactcgtttttgaaggttttccaatcaaattgggtaattttggtatcattcgaaagctcatggagagctgaagctttttctaagaaatgttaaacagttggacgtgttagaaaaaagataaaggcgttttaaaatttgtcttttgattaacttttgaatttaatcacagataacagatactaactagagattaaggtgtattaaaaaaagaattggagaatattgaactatgagaagcttaaacaatatttcaacttcgacaaaagaccgaaacgccttaagtttttagatattttaaatccttttttctttttatttgattaaaattaatttttgttttgcaattattgtaaaaaattagtccaagattttggtgcctgttggcaaatgaattttaatttgtggacaacatcataaattttcaattgtgctttattatattagttaggtttattttgaatattactggataaatatttcaaaataaaattgttaaaaatgtcgcccatgaatttggtcagtcacatcgcaatttttatagccaaaaaatcattaaaatgtaaaattgtccatctcattttaagccccaatcgtagcttatgctttacctttttctcaacttagataaaaaatcgttcttcactcatttttaagttatcattttgctcaacaaaaaagccaaaaaaggattaatttattcatttgaaagtgaatatttaattgattgataggtcacaaataaatttgcctaattactttttgtctaccaatgccgccttataaaaggcgaacagattcagcgcaaaacagcaaatgttcattcatttatttggcagtgatgaattttattttccaaatttacatttctttttaatatgaatgttaatttataattttctagatagcacaatacactttctttaatttgaaaaaatg

SEQ ID NO: 100772 - DNA, 133 bp, Heterodera glycines
ggtataatattttaatttatcagttacaaatcattatttaatacaaggttttaatctcgattgtccaaattggtctctatgtttatcatgagttccattattgcggaaacgaccgctttttgcctaccaaatg

SEQ ID NO: 100773 - DNA, 1003 bp, Heterodera glycines
ggagtattgaaaatttattgaaaaaagattcttggctattttttttctgcttttcgtcatatatttaaagaagagtctttcaacgagaattatggattttatcttactgatgagctcaatatgagagaaatttttaaaaaatttagataagtaaaatgaaaattatttaaatatttggttttattcttataattagggcttccaattatatggaaatccatatttttttcctggactgtgggaggtctgaaacgcacgaaaaacatgtttttaacttggtttaaagcttctaggatgggtttccatatccatttttcccatatttttccatatttcgcgatttatgtccatatttccatatttttccttattttggcatttttatccatattttatgtccatattctgggatttttccaaaaaacctctattagaaaggcccccatcagctaaattgggattttgaccccaaatcggaaaatttttgcgaaaaagacattttttatcaaaattttgtcgaaaattttgattaatgtatcgtgtttttttcttcaaagatgatttttaatacatatctagccattcttgaaagttttactttgcatttagtgaatttgaagaaattttgagaaattatagcctaaatttggaaaaatttatgtccatattttgcaattttatgtctatattttgatattttggctattttatgtccatatttttggacgccctacttataatatataattgccttatgtgcataaaatgaaattttaaaatgttcttatgctgatatcttaaatattaaaacccaaaatttaaataaaaagtttaaaaagaaaaaatattgcaagaaaaacagctgatgtttttaaaaagaattattttttattatttactaaagttgttgataataattaaaaaatacaagcattattataacatttagtatatctccacaaaatgtgcccacttaaaagtggtcttcatgtcggccactatg

SEQ ID NO: 100774 - DNA, 194 bp, Heterodera glycines
ttttcgtaccgccgttttcgtacgagtggatatgcaaaaaaaattgcattcaaataatttgtttattttttaaattacttttaatgttttgacagttaagcttttattaactacaaaatgaaccagcagcaagtaattaaaacaaaacgaaataatgataaattggtgcatgatggtgcacttcagtaacgatg

SEQ ID NO: 100775 - DNA, 87 bp, Heterodera glycines
gctgtattcgtgatcagcgaccctaaaaaccccctaaaacttattttcattaatttctaaaacaacatttataggcatttgaaaatg

SEQ ID NO: 100776 - DNA, 222 bp, Heterodera glycines
  unsure (1)..(222): unsure at all n locations
ttctgactcggtggctgttgaacaggtgttaattgacattcatttattttataatatgaattttttaagtttgtagaagcctttttttacttagtattgatgcaaatttataacaaaaaattntaattttaattaatgtcaaaaaaataaaaataaatttgacgttttgccggtttttagtcaaaggtggatgccgtcgatgttggagacgcgccgcacatg

SEQ ID NO: 100777 - DNA, 462 bp, Heterodera glycines
tgaggaccgcagacagctacatactcatcacaatttgcgtgacagtgcaaggcgtcgtgagaagtgcaatgcacatgaatgggaaatgacgcgcgataggcgtttttatagcgacgctgatgcatgacgctgctgatgaacaacgcatttaaaacatctcttggcacattcaccaacatgcgaatcaatcaacacttaattcaagggaaaggatgatctgtattctgcgaaaccgagaaatcctatatgattcatctaccggattaagatttaaaaaattggatatttcgtgtctcagcgaaaaaaggggccgcttaaaaaaggcgtcaaaaatttatgcgcaaaattctctccccttataagggggtttctgtgttcactttcgtcattttggtttttgtttcaacttcaactacaacaacaaatgatgccgtcgcgttcatttttcatcaaattcaaatg

SEQ ID NO: 100778 - DNA, 151 bp, Heterodera glycines
attaaaaatttggttgcatttgagcaaagttatttcaaaaaatattttcattgatggtttttgactaacgtcatagcaccgtctggtttaagatactatccaattagtttattaaataaaaagcacaaaaatcatttcacatcgagaaatg

SEQ ID NO: 100779 - DNA, 106 bp, Heterodera glycines
  unsure (1)..(106): unsure at all n locations
tcactccttctacaccccgaccccgancctgtcaaactggaaaaatgccgtcaactggagggctcaatttgatcgcgtcgtcaaggaaattcgctcgatggaaatg

SEQ ID NO: 100780 - DNA, 79 bp, Heterodera glycines
cagacgacggacttttcgtcggagattcgtggcggacgaatgcggcgcgtgggaagagacgtcgtgcggaggagcgatg

SEQ ID NO: 100781 - DNA, 1003 bp, Heterodera glycines
tttattgttaatatcataaaaataaaggtcaagatcgattttcaaagttgcaagtactgttttactctaatttacaagcaaaatctaacaaatattatttcaaataactcttcttaattttttatagtttgatattttcgtcatcttcgtgttttgtctccgttcattttcttctattataaattgagagcgaaattatctttatatttctttattttttatccttaataagtgtgaatatgagttttcaattaatgctctttggaaggctcaattaagtggtgcaatcctatgatatctccatattttatcactttctctaattatacttgttccacaaaaattcccaattaatcactgattaatataagattctgtggcctaaattaatacatttttaaaatttgactataaagtacaattttactttgacgattatgcttttttcgattcaataaaccttacaatacatataagaaattaacaaaaatacacatccgaattattatgtttatattcttcttatttgggaaaagatcggagacgaaggggcaatagagagagaggcgtcttcgtaaggcaaaataattaaacaatttctaagattttttcaaattaaagattaatgttaaattttcgcccattccttttatttcgtgaatttatgaacaaaaattcataaaaaatttactagataaaattttggaaatctaaggttaaaaaatttcctcagagggtgccaaaaaccttcattttcattaaaaaaaatggatcaacatcgcaaaattagatcattttaacgaaaatttttaagaaatcacattaaaatatatgggaaaattttatgaactaagaataaagttgacttcataatctttcgtctccgaccccccccccccttaattatatttactcacaatggccaattgtgtctctaacattattgctttgattttaaacattaatttgtaattcggctgtatctgttatgttgctaaatatg

SEQ ID NO: 100782 - DNA, 223 bp, Heterodera glycines
gtaaacaatttttgccaaatatttcctcaaatacatttggacatttaaatttctaattgtaagggaaataaaaatggtaaaatggatacagatcctgtgtccgtctcgggcctgttttcaatttccgtcatttcactgattgaccgattttggcttttaacagtgtctattttttcaaaatccactaaattggaactttgacattatttgatatccccaaatg

SEQ ID NO: 100783 - DNA, 71 bp, Heterodera glycines
gggggggctcccccgaaaacaaaaaaaaacgattttttcaaaggcccgttggggggtctcaaacatttatg

SEQ ID NO: 100784 - DNA, 120 bp, Heterodera glycines
gcatggggggaaattgggtgggaatgagcagaggtaattggaagttgtggtggcaaattttgtaaatggggcgcataaactgtaataattttgttggtttaatcataagcatgccaaatg

SEQ ID NO: 100785 - DNA, 407 bp, Heterodera glycines
cctgaaaaacgaaaactggtaaaagggcggcacttttgacgttgggaacccccgaaaaaaattccttaatagaggacacttttgtgggaattggaattggatgaaataggtgtcaaattcgagattaacaaccccgaaaaccacgtgtaaacaagttttcactaactatgacagaaaaatttataaaacaaaagggacctctgccccctttgaaattttttcatggacccccatcaaaatgccggtaaaagcaacgcattgatgaaagataacacacaccaatgcgcaagaaatgaagaggtctttggccgacactcggagcaaaatggcttcaatgtcagtgtcggaagcacaggacaaatccataataatattattgcttttgttgtcgctggtatttgcaaatg

SEQ ID NO: 100786 - DNA, 273 bp, Heterodera glycines
ccgaaagggaggggaaacggagcaaaccgagcgaagccttctaatgtgagtttgaaaaggaaaagcaaatcgggattttgtttgaccaatgtcgagaccaacggacggcacagtcccacagggaccgaggggggggggggcaggccaataaatttggaaagatttttgaaaaaatgcaaccaaatttaaatttttggcactcaatataacggaccaagaaattgttattttcaaagcaaaatttccaacatttttttcagatttttaccgatg

SEQ ID NO: 100787 - DNA, 280 bp, Heterodera glycines
ctcaaatttttttttttttaaatttgtcgaggaccaataatctataccattgccgaaatcctcgccctaattatcagagtcattccttacaaattgcccctttccctctcttccctttcatcattcatatttttccctcctcctctctcaattttgtttacctatttattcgtaagagaggcaaacacatatcgattgacttattttaccgctttaacatttcccttttaaattctgcaacacatatacctaaacatttttgcatttgaccataataatg

SEQ ID NO: 100788 - DNA, 178 bp, Heterodera glycines
  unsure (1)..(178): unsure at all n locations
aaaaggagagacatttaaaacgggtgcacttttgacggtctgtttttgattttaaatatgcattattaaaacgaaacncaatcaattcgttattagttatataaaatcacgatgtttacaaaagttaaatttcacaaaagaatgtttttacaaatatgggactcatataaaaaaaatg

SEQ ID NO: 100789 - DNA, 498 bp, Heterodera glycines
tctcattgtttgtgtttgcatatgtatttacgtctatcctgcctttttgattgtttttggtgcacttcataaataaagagaatcagagcctaccattcactttgacgggcaaaacagaatatcgaattttctaaagaaatcacccaaactttgagtattgtcaaggggtagtgtttatcttccgggtatttaactcgacttattcattcagcacatgtacattggtttaccaatcgagtagtgtgtagtaaaattaacgaaggggtagagagaaatgaagtcacatagaaaattttcattccgtcttcaaatccgctcatttatttgttgctcattaacattttcgcgatctcgcagcctaatacacttacaactggatggacaacttgacttcgtataaattcataacgttttacattcctctcccgcactttatcagttatttttttcaattagacattaatatacatcttctaggtagcgctaattgcaggcatg

SEQ ID NO: 100790 - DNA, 51 bp, Heterodera glycines
aagcatatgccattgttcattcaatgccatttgcccgtctttcacatcatg

SEQ ID NO: 100791 - DNA, 347 bp, Heterodera glycines
ttccaaaagcagcgtccgattttcttctgtttcctttcttccgtcatgattcaaatatttttttacgcagttaattctttgattcggcaaataaaggcatcgctgtttcatatcgaactgagagaaaaaataaatgaaaatggaaaaaaaaagaaaaagaaaagagggatcttaaacatttgcataaatcacatcaaattaatacacaatgaacaaaaagaaaaaatatttatacagccaccggtacgaaaaaggatactgaaatttgacacctttatataattctctccaaaataaatatgtatgtatttttaattgaaaataaaaaattaagcttaaataaaatg

SEQ ID NO: 100792 - DNA, 156 bp, Heterodera glycines
ggtgggcaattaattggccaaaaccaataatagcagggtcattaagtgggtggtttcattgattaggccaagtcagtcttttggattggcttttcattttatttattcattttatgcttaatccgtctttttctgttcagttacgtccccgcaatg

SEQ ID NO: 100793 - DNA, 219 bp, Heterodera glycines
  unsure (1)..(219): unsure at all n locations
aaaaaaattttcaatttaacaattttgaaatatttttcaccccattgttttcatttgcaaaaacagtcgcctcnatctgtgcatgttgaggtgggtgttgctaaaaattgaatgcattttaacaaatttgaattaaaatttttttattttaaatcagacgaatctaaaaaaatatattttatggaatcaatttttggaaattttttaaatttagggatg

SEQ ID NO: 100794 - DNA, 191 bp, Heterodera glycines
  unsure (1)..(191): unsure at all n locations
tttgagactctgagtgaggaggcgggctaccaagaggaggacaacgagcaaanctccgacgccctaataacaacagagtgattgctgtcacagcaaattccatctntacggtcaacaaaatattcgaaaacggaggtgtcactgccatcggtgcttcaccgccaaaaaagaaatcaatgcgggaacgaatg

SEQ ID NO: 100795 - DNA, 354 bp, Heterodera glycines
tattgatatttgtgccaaaaaatgaaatgggacaacacttttgatcactatattttgatccaattgtggatatggtaaaataaatcaaataaatggtttagtcaaaatgcaaaatatgggtatcctttgagaagccccataaaaaaatgctatttccattgtatgcttcttttttttttttttgaatggaaaatgacaattttatacgcaattatttttttcaaagcatgatgggacaacacttatgaccatgactgtatttttttttttgtgaattttaatatgccgccttcaactattttgcgagataataaattagaagaaattttagaattttgcttttcgtttataatg

SEQ ID NO: 100796 - DNA, 271 bp, Heterodera glycines
  unsure (1)..(271): unsure at all n locations
taaaaattcgactntaatttttnccggtctattttacaggaatgaaatagttttagttttatttttaaatgatnntaatgagttatttcaataaagcttnntatcgagttggttccaaattttagttactcgccctgcaacaggtataaattttttgcctagtttatatttcgaattaagtctataaaagggaatgttaaagcgttcagaaggtttgaatatttcaaagggattcagatctgttcggccataaattattttatgagccatg

SEQ ID NO: 100797 - DNA, 682 bp, Heterodera glycines
actactaattctataaatgaccaattaattatcttagggaccggaatttgtaaaaaaaaaattcggagcaggaaaagatttaaaaattaaatgtaattagtaattacttacttaaactgatttttacttagcaatttagtcatttcgttgcccaattaagaaacagagcaacacattggcttattttattcaattaatcctctgctgctgatcgcccatttaaaagtgccattttcttccgctttttctctttttcctaatttcctttttccatttcattttcattggcactcccttttttgatttgttaaatttagtgtcccaatttaatttgctttccgttggcatattaatcaaatcattcgcctgtcaatttgtcatttttgacgcactccttcgcccacttccgtcccatttgtcccccgtttgatcaaatttcacctgccctttttttgcccaattggcgaataaattaagtgccaacgcgagaattgccaccaccaccacccatttatctatttaattaattgcttttcagaacgccgccagcgattgttttgcttttgtcactctcattttcattcagtcatttgtccctttccgcgccattcatttgccattcgcggccaaattttacgagcattacgcttttccaaatttgggcattcctgctgctgaaatg

SEQ ID NO: 100798 - DNA, 603 bp, Heterodera glycines
tttctttaaaattaccttttttcgccccccccctcccctctttttacaaaatgccaacctcttttaattttcccttttttagttcattggtccaaacaaaagtccggcaatcatttcgcgatgaggtggcacaaaatcagaagcgctgggccgagcaaatggacatgtctgagggttggcaaattttcttttaatttggcattttgttgaaccaagtttactataaattcccatttctccccccccccccctcgctcgacatattcaaaacaccaccaaaaaaaagtgggttagtagttttgaaaaagtcggttaggataggaaattaggccgggataagattttacgtgatgactcaaatttggcatgaaattttgccgacgatatttagttcgggatcagaatcccggggttggctcttctactaaatgccccacaaattgggccattttgaacacatactgttaaaacagaccaaaatgttattgccccattgctacgattgatgcctccgaattgatccagtccattcatttacaaataaaattcatcgtccccgcaggcgagtccgctctgttcctcaacggcattccgattgcgatg

SEQ ID NO: 100799 - DNA, 1003 bp, Heterodera glycines
aatatttatgggaagaaatttccaataattttttttaaatagtcaaaatgtttttatttcaaattttgaaccagacataaggatatgaagaatatatttaatttcctaaacaatttgcaaaagaatgatttactgacagtagttagtgcacacaaatccgtccgggttacggtagcctcccatacctatgggaggggtgcacggccaactgagcgccagccaggtgagctccgccaagtgagcgcgggccaactgagcgccaaaattttcagtactgaaaccaaaacctattgcgcgacttttttttgaaacccaaagctattgcaggggtgcgcgacttttttttctgcaagcctaaacctattgcaggggtgcgcgactttttttgaaacccaaacctattgcaggggtgcgcgacttttttttgaaacacaaacctattgcaggggtgcgcgactttttttattcgaaaaattacgccgcagactagtggactcgaacttttgctctgccaccaaacctgacacactaccaatctgccacgagaccagttgccagaaaaaggataattgtccactataagctgcaaagatgatgacgtcaccactgcgaggggtactgtagtccagggaaaattgcaataaataagtcgcaggcaaaaggattcgaacttttggtctgccaccaaacctaacacactaccactctcccacgcaaccacttgccagaaaaaggataaatgtctactatatgctacaaggatgatgacgtcaccactgcgaggggtactgtagtccggtgaaaaatttaaaaatacgcaaaatagaacaaaacgccacaatatatacataacgccataatttactgaaacgaaaacctttggcgttaaattcaaattcaaaaaattagcgggaaaagtggcttggcgtcgtttttttgtattatccttaatcctaccctttttcaaaatcattcttatcttctttcattatttattaacatg

SEQ ID NO: 100800 - DNA, 1003 bp, Heterodera glycines
tttcagtcttgtttcatataagttttacaataatatttttattatctgtttcaagatgcaattgtcttagttatcaacccaatccaagagtgtacattagcaaagaatattttaaattttcaattattcaaaaagaaaatataacaattaagaacattattagtgaaattattttttaaatttatttttaattgtcttttaaatgaattataaaaattcatgtgtgcgacttcatgtgccgctgttagtgcagttagtgtacctgttattcttcaaaccaaaatattgattagaataattgatagaataagataaaaaaatttatttatttatttattttcaataatttaatcgttgctaaattatatgattaagtttcaaagtgtatatgtaaagttcctattttaatttttaaatttctttaaataattttatatcaaaagaacttttctttcatcatcaatttttttttaaacaatctgctgtagtaatcaaattatatttgaattgttctcattgttatatgttttaacattgttaacaatattttgattattttacatttaattggtcaaatttaataagataagtgaatgaatgaattaatatttgctttaatttaatcaatttttgatttttattttgttattatttgtgtataaactgttattttttaatttcatggtgtgtttcccactcgaattgaattcatatgtctttgtgtcgaattgtattgataaaattaattatatatttttttatttcattttattttaattaataaacaactcactcaatattttggattttaatttattgtattctttcttatatcttgcattaattaaaaattattattttttataagttttacaatttagaattttaattataaaaaaaaattaatttttactttaaaacgagtttttgtaatctattagataatttaattttattatataaaaaacctaaacattaatttattttatttttaggaaaaatg

SEQ ID NO: 100801 - DNA, 551 bp, Heterodera glycines
ttttcttgctaattattgaagaaataatacataaaactagagttgtacgggaccgggacctggtactgaaaaaaacgtacaactgagtacctaagtcccggttttgaccagttttgaccgggaccgggaaaagccccggttttttcccggttttcccagccaaaaagtcccggtttttcaacccgaaaagtcacggtcccagtttatctcaaaattcccggtcccgtacaactctacccataactcgtcaaaattgttcaaaacaacaacaaacttgaaatgggataaatatgacgttaaaaagattaagctattctgaaaaaggagaagctgtgaattttttttaacttgatacgctcagataagcacgaaaaacacaatttcagcttgatttggattgtctagggatgacttttataatgcctatttttgtggctattttctggattttcggaaaaatccttaataaaaatttaaaaaaaatgaaaagtacacccctaataaatgacccaaaaaaattttcagaaaaagattgattaaaatattcaatg

SEQ ID NO: 100802 - DNA, 1003 bp, Heterodera glycines
tttgcagaataataattgagcatttgaattaataaatggaaaataaattagacatataaacactttaaattgcgcgacctttgctctccaaaaatgaccgaattggcgacaaaacatggcaatgcatcattagcaggcttttcagttgctaatccgtcctttcccatataagccgcccccttttaacagtaattccccgtcccctttttttgcctcccctttgaatgtctgtccattttttgacccttttgctaattgccatttgcttccttgttttgtcactcatttgttgctttgttttgttgttgttccattatttggccaaacaatgctttgttttgttttgcttttctttccgttgctttgcttttgtctcgcattacaccaattgtctcgtcttccgatttatcgccacggctttttctgttgacttttgcgcgttaatctttccctgggttaattccgaagctttttcggtgtttgcggaaaatggaaggcggggaattcggagaggtcgcgagaagctcgagctttttccgtcatttcctcgaccaccgcccctcggcttttcttcttctccgaatgaccgtccaattcgccctttttgtttttggtcctttgcccctcccctcacactttggggcagtgactttttcacctttccccttttagctaattaatctcccgacacaaagtgggcagaatattgagaagggggggggcattaagcacctgagcataaatccgatttgggctctctctccgaccatttaatgaaattaaatgccgccacaataaattgcaatgaaaagggcgcatttgctcattggtcattttattttggcacttttgggcgcattgaccagcagcagacgggcgggagagaaaggctaagattaattagcaaattattcggatgggcacatttcgttgctccctataaattctctccactttttcagccctttccattgccccctccccttaattttgctccaaaatg

SEQ ID NO: 100803 - DNA, 845 bp, Heterodera glycines
  unsure (1)..(845): unsure at all n locations
tttttgagtcatccatttgctggttttttgagtattacatcatagcatctttttgagtatgaattttaaaaatgaaaaagtaaagtccaattggacagttttgttgctcacatcatctcacgtataaatgttttgtatttgtaaagcactatcgtacaaagtgattcacattttttaaatattttatttggatntatttcttaatttccttttcaattccaaaaataaaataataaaactaattatttatttaattgacatcatttaggtataattttcggattaaatttacattaatcaccacaatttccgctctccctaacggtggtcctaaattgcgtccatttccgccattttcccgatgcccaataaagccttcttggccaaccacccaacccccacatttccgatgggaaattgagccaataatgaaagtgcaaactcatcccaaccaacatacattgagaaggaattaatttgaataaaaagcgaaaaattattttaagaaaatccattggcgtgttcaattagcagagaaacaatttttaattaaattacgtttaattggtctaaacattctttataataaaaagattcctataacaaaaagcagaaaaagtattattattttttgttaatttacgcaaaaatcaacgaatacgtgcccagccaaaacttggtaaaattggcaaattagtgacaaaaaggtgaatttttggtattttattttatctgaatcctgcaaaatgagtttatttaaaatttgtcacgctatttaaaaaaaaatgtaaatagattctttacagtatctgttcatcagtgagtgtcaatcgacggtaataatg

SEQ ID NO: 100804 - DNA, 495 bp, Heterodera glycines
tttttttttctttaaatataattcatttttccatttttatattaatttttcaacaaaaaaggctggtttttgggattaataggctcaacaatttgtaaattctgtatttttttaaaataaatttacaatcttttaaattttttgcttttaaatcgctgtttttgtggcaatgttttttcaaaaaacttttttggaacagtgggagggggcggggtccggcggtgccgataggcgcccccgggggggggaaattgaaatttgagtgcgatttgaataccgagctttattaatattaatcctatttacgacaatctttttataaaaagcttagtgaaaaatcgatttaatgctatgaaatacgtgacaattttactgttggcaaagatgtttagagaaaaaagaataataataaaaaaagattaaaaacaaaaagatattaaataaattcatttaatgcattttgattttttattaatattctaactattaagaatg

SEQ ID NO: 100805 - DNA, 193 bp, Heterodera glycines
taatttttttattaaaatctaaaaattttcttttttaattaaaattcttaaaaaaagcatttttattttgaattttttaatttggttagctgcaaaaactgagcacataactacaaattttataaaatcacagaattcttatttcaaatatttactggtaattaaaatatattttaattattttgtcaagatg

SEQ ID NO: 100806 - DNA, 387 bp, Heterodera glycines
agaagtaacgtaggaaatctgagttcatcaaaataaatgtggactgccttttgaggattgtggttcaatggccagtcccttaaaggattgtagttcgcactatgctgatctttcccctactggggaaagattcggcaaaagatgcataatttttatctgcattcttaatgggatgtgtgagcgatcaatttctgcattcaatgacctttgtgcgaaattggacatgtttgattcgcagcggcatcactgtggcaaacaaggaagatgcaccttaatttttcacatttcaatgtttttgataaatatttgattaatgtggtttaatggttgttttcccaaatattttgccgcatgtacacatcattgcttcatttttgttttcagatg

SEQ ID NO: 100807 - DNA, 304 bp, Heterodera glycines
tctctctctctctcttctctctctctctctctttttattttctctatgccttgcgttgcgttcgtccttcacaacgattcggtcgcttttcgtcgtaccccgaggggttttgcgtagaactgtctcgcttttctgcttccacttctaacgtgcacacttttgtctttgcttctctgttctcgctttttctctcctgtggcaacactctctgcgttctctcgcctttccttccgttgtctatctctgcgttctctatctctctcgctctctttcacttctctgtttagaatagggcagagaaatg

SEQ ID NO: 100808 - DNA, 624 bp, Heterodera glycines
ttaatgaaattgaaaaattgagagcattgagagaaggctttcgaagtgctttaagtgttccaaattgaaactcatttcaaaaattaattaaaatagataacaatttaagaaacaaattaaatattttttttattctcattaattaaattttcagaggtgacacggctgaaattgtcgcattttctcttttcccgtcgcctttcccgcgccaactttttgaacaagcgaaaaatgtgcagatggtatttgattttgaattttgtttagacaacaatttataaataaatatttttgaaataatttaaaagaaaagttaaattttaaaaaatatgtgatattaaacaataatttattaaaaaatattttttaataatgaatttaacaaaaaattttttgttaaggattttaatttgttatattttcgcatatcaaatgactacgaatttttggtagaaacctatgtagaactggcaaaaacgaacgaacaaatccgaatgcatttgcaaattttgaagaaaacgcacgaagaaggcatcaaacaaacaaaatccattatgttggcacgttcggtatggcataaaaatgtgaaaaaaattaaaaattaattaatttaaggattatatg

SEQ ID NO: 100809 - DNA, 751 bp, Heterodera glycines
  unsure (1)..(751): unsure at all n locations
tttaatcctcgattatttccaaatcaatnnttcatcaattcttcatcatcttcatcaggttctgtcgatggtgccaaagtcaaacgaccccaaatttcctnttataagcaaaaatttttttgccatttcaccactcagactaaaataaaaaaggctggttttagggattaataggcgcaacaatttgtatggattttcatttaaaaaaaatgataaaaatgtgtcaattaaaataaaactatgagtaaccatattttggtcaaggagactagccactaggcaatccgccccaattgtcgtcgttacttttaaagaatatattaatatatttttaaaattttttccttttaactccaattttcttcactaatttttcactcagacccccattcttaccagtgcttgtttttcccggttgccctaccgggaccgggacctgagcttttcaaaatccgggacctcggaggaccgggaattcccggcccattcccggcccgctcaactctaatttttaaaaaatgcaaactttggccccaatacggaaaaataccaccgaattttatggagagcttaagttttaaattttataataaatttaatttggcgttatgttgttaataatatatttttttgtttgtttttcttatcctccgttccttattttgatgtttttttgtacacctctaccatttgataatcatcattttagggtattcttttaacatcaattttggattccaacaataaaatg

SEQ ID NO: 100810 - DNA, 954 bp, Heterodera glycines
aatatagatattttttcttttccaagtattttatttgctaaaaattattttcaataaataaaattttcaaattcctaaactttcattttaatatttttgttaaacattgcccattcgtatagttgtagttctgaagttgttcaatttttgcataataattttattattttttcttgtttatttcttttttatgaaaatttttgagaatattgacttataaagtttttgtaataattgggtgatttaattattgttataataataaattttaactctatttaaaattattataaattgcttcttatttttcctaatcgtaaaattaaatttatttcagtcaggaaaattccaagatctttgaattacttttgcactttgatgcaaaagcataataatcaagtgtaaaatttatatttaaaattattgtttaaaaatgttttttgtatattgaaaaaaagtccaaaaagcaacttagatgcttccagtttccattaggttaattatttctattgtttcatgatgattttatttatattattgcaaagtaaatgatttagtaatttggtgcgatttattcattttaatcattttgttaattttgacataattactctttgttcaatattttttgcttattaattagactgtagaaaattacttttgagaatgttatttctttgtttcttagatatttttatttttaatttttgtaacccagagtctctatggtcgggacatcaaaacggcaagagcgaacgcccattatctggttttaatgcgtaacccttccggacaattacaagtgaggacactggggtcacaactgttcccaaaaagactgaattatttcatggatgcatatcatgatgcgaccaataatcaatttagttatctcatgattaacatgcacccaaattctgaggaggaatatgaatttaaattaaattaaaaatg

SEQ ID NO: 100811 - DNA, 1003 bp, Heterodera glycines
gtcatttttttgtgcctctggctctgttttttccgccggttttccggcgccaagccttggccatccactgctcggcatgctgcggcttcattatccgccaacaacattcgcgcatctttctcacggcacaaagtcaattaataaatgtgtggcacaaccaacaacaacggcacaccgctcacaccacaagaaaatgatgagagaaatacatcggcggaggtgaaaagaaaaatttaaatggaaaagaaaaaaagaaaagatgtaagtttagcccccgaggggaaatgggtcgagaaattctcggcaagaaattggcgcaatggttatgaattattcaaatattggagcattggcacatcgcgcgcatagaatgtggtggctgatgagcgatgatgtgttgtgccgaaatgcaccatttgtgccagcaatagtgaaaaaaaaaattgcgtgacagcccccggggcggcaaaaatttacaccaccccaggtaatgcccggaaaaaacttttctgtttttatatgcgttcggcacgcgagcaacaaatgttggaccaatgattttggcacggctaacaaattttggaacaaaaaaaccgtgccattttcgtgagcgcaataaaaatgttgccatttctcattcaacaaattttatttaaacaaaggcagacccaaaaatgctgtttccatcaagcattttcattcaattaacagtaaattcctaattaatttattgaatttttgaaatttgaaattttaattctttttgcaatttttatgctaatttgaaaatgatttcagggttttttagaattactattttttgttataatcgaagatttggctaaaaaatgttaattaaagctaagcggcagatgaattttatttctcttaacaaaaaaataataattttatcataaatttcatttattctcttaaaaatttaattgatttaacataaaagcatttagttttttttttggaaaatttttttaataccaaaatg

SEQ ID NO: 100812 - DNA, 133 bp, Heterodera glycines
  unsure (1)..(133): unsure at all n locations
tttcctaatttttgcatatcgatagagaaaaaaattctgaatttttctatactgattttattttggtttatactcccattccaaaattattaaataataattttaaaaaataatatttttnaaagattaaatg

SEQ ID NO: 100813 - DNA, 1003 bp, Heterodera glycines
gagatggggagagagagagataaagagagatggagagagagagagggaaaggagaaaaaagagagagagagagagaagttggagagaaaggaagaaagagatggagagagtgagagagagagagagggaaatgggagagaattgagaaagagagagcgagagatagaagagtgatagagagagaaacgtggagggttgagagaggggcaatgacaggtaatgatagagagagtgagggagaaagggagacagagggagggaaaggagaagagagagagagagaagttggagagaaaggattgaagagatggggagagagaaacagagagtgagagagggaaacgggagagagttgagaaagagacagaagagtgatagcgagagaaaattggaggcttgagagagggcgcatcacagatcatcatcgagagagagtgagggagaactatatacagagagatgcatatacagcaatatggatagcatatcggaaagctttattcaagctatattaacaagcagaatgtcaaaacaaatttatggtcaaaaagttggaaaatttggttttttgaactcttctgatcataacttttttaagccttaataaaatttttcagaattttgcaggctaatagaggacacttagagctttcgaatgatacaaacaaagttgaatttagttgacaaagaaaaaagttatagccaaaaatatgctggggccgaatcgtgccggggcgaactgaggtagaccgtgttttacggctattctctacgtgtcttatttgtttttattaaatcatattcgttatctttttcggtacaataataaaattgaaaaatattaatatttgtcctttagaaatggaacataaaattcgatgtataaattttttatttcttaatgataatcatttctttgtcgctgcctctaccgtcattatattatttttttgttaattatatttactaatttattatttacagccattttctttaattaatg

SEQ ID NO: 100814 - DNA, 107 bp, Heterodera glycines
ggtttcgggtcgtctattctagccaacattataaagtagcacggatttaggcctgtcctttgaagaattttggcacattttgtaagaaaaagcttgacgaggagatg

SEQ ID NO: 100815 - DNA, 165 bp, Heterodera glycines
taatttagacattatttcattgaaaaatgttcggcgctttagctgtggggcgcgcgaatattgtcaaaaatcaggcccgaccaatgcccgaaattggcacaaccgtcgcactgtttttggcaccaaatttggcacccaaaaaattcggacaaacttttacggatg

SEQ ID NO: 100816 - DNA, 274 bp, Heterodera glycines
aaattagttttgaaatttttcaattttattacgatattcagatgggtttactgtaacagtgggctttattcggatgttctgaactccgtccccgcttttgtcgtcctttcactgtgctctttaaattacgcggcaatttttggcctaattttgtggcgcaattttcaaacaaaaagaaagaatcaaacgaattcacaaagtttggcaatttttttaatttcaattttactctcattttgaacatttagctgctgatcagtcagtgcgcaggatg

SEQ ID NO: 100817 - DNA, 223 bp, Heterodera glycines
cctttttagtcagggaaattctgtgaattaatgctctttttttcctaaaaggcttatcgccctatttaattaatggatggaaaattatggactaaaataagttagggtctacaaaattccaaaaattttcttcaccatgcatgcgttttaaaaatttacttatttataatttttccgtttttgctctcctattttataattcctattacagtatatataaatg

SEQ ID NO: 100818 - DNA, 339 bp, Heterodera glycines
ttatggcttgatttaataatcattaaaaaattatggggctattttatatcaaatacattaaataaaacgaaaagattattaatcagtttaaaattgaaaaccattaaattcatatttgaataagagttaaagaaaataaaatttcatttagaaaacttaattgtaattcattaataaaatagataaatttttgtttaatatttatcatttttaaatgtctatattatttatttgctaccaaaatgtataattaatttgtcaatattttaaagcgattaaaaaaattttaatatctatctccacttatttatatatatttttagaattttgacattaatg

SEQ ID NO: 100819 - DNA, 647 bp, Heterodera glycines
acaatcaccgacttcaatccgagtgaaaatgatcacgaattcaacaaagtgtttgccgaacgaaatttcaaacaagttggaaaaatattttttaatttacggacgaattccaaattattattaataaaaaaccaaaagataaataataaaatagatatttaaagcttaagaaaacaaattttgtagtacaaaattttatcggtaaatatttctggacggcaattaaattaatttgtggtaattcttgtaaatttttcgcacttttagcttcggctcaccttcgatttttataaacaaatcgctcaatttgacatcgaaaaaggcatcaagaaagaattcggcgatgccaacaaagcggggtaatggcagaagcagggacgggggggggattaattagccttaattagtatgacaaattgagatgggctggagatgtgaacaattagccttaattagtatagcaaattgatgaactcgttcatcctcattaactgctcaagacacactaaggaaaacaaaattttaatccattaatttaaatccattttctcgaggtttttatttgtggcattttgtcaatttttggcccattaattttaacattaagttatttggcgctcatcaaataccttcgaaaccgccctatg

SEQ ID NO: 100820 - DNA, 381 bp, Heterodera glycines
agtacacgtgaacgtgtgattcagtccattacgttccttgtacatggtagtgagaagtttgtgattacacaacactaaagccttgttcgctcagcatcactaagcagtctgttactaacgtcataagcagaacagttaaacaaattcgtgaattgatcaagcaaactcatctgagcaggagttagttacacgaaaagtgaatgcgtgctttttgaaagaatgaatggtcgaatcactcactacacaccctcaaaatttgtattcaaattttgcgctaaaaaattcgcttcaaaaaatcgtacatagcagcctatttaagtgcagattgtatgcttaagtatacactttaatccttcattaaaactaattttttgaaaaatg

SEQ ID NO: 100821 - DNA, 59 bp, Heterodera glycines
gtgaaaatgaaaatgctaaagttcacagtttttaaacataggatgaacaaaaatcaatg

SEQ ID NO: 100822 - DNA, 675 bp, Heterodera glycines
gaatgccattgtttttcgattgacgtaaaaggtgcacttttatggaaattggaactcacttacctatgtttgtttgttggtcatgagacaatgtgtaaaaagagtacgaataaatgggaaattcaaattaattttatttccttcgacggcaccggcaaaaagcgtttcgtcgcatttggccatttttaccttttttaaaaagtgccaatttaagttgcgtctaaataaatgtttgttcgtctcgtctcgtctctcaatttaataataacaattttttcaaaatttaatcgcatttttatttttctcatttttgaaactttgttatgaaaaaggggtaatgcggtgccaatggtgggaaagtgtgagaaaaggcgacaaaattacacaaatataataataatttgcctggcgggaaacttccccttttggccttataattttggagcaattggccagccgacgagtacaacaattgccatttgtataattgtcatttattataattattattggtataattaccatttctattattatcatttattataattattattggtataattaccatttgtattattatcattttagtattcccttaattatttcattaattgaagtgttaatttagtgactaattaatttctccttttaattttcccattcttcaaaatg

SEQ ID NO: 100823 - DNA, 1003 bp, Heterodera glycines
tttccttgatgaccattgtgcgtggcgtgcacttggcggccaaaaaacagaaatgcaatttgtgaaacttttatatatatataaaaatttttttctttatttttaacaatttttagcaacaaaatttattaaaagctattcgaaacttttgtaaattaaaaattttccggagtttttattttaaaacttaaaacgctaaaaatattttagattttgacaaaaaaataaacaaaaaaattttcataccttttttatattacggaaatctccatattcatcgtgaatttttattatttttacataatatattttataaaacatttatgcgtgagaaataaaataaggcttatatctcattaaaacattgattatcttagtgtatggcatgcgtttcatcttctagaagagattgccaatatttacaatgacttcaccctactattcataaaaatgcatttttaaatattataaaaccataaatattatataatttaaagttaaaataataataataatcatttttattgttttaaattacctatttttaacgttgtaattacttatttttgatgtgtcttcaaccgcattgcctcatttacactattatcttcttcctccaaatagaaatatcaaatgcatatccaggcgaagaaattgctcatggtaaaagattagtttgtggggactgctggatggaaattctcaatatttcaagctcagcttccagatcaatttaatccttcatgcattttttcgctaaattttctaatttatttattttggtcttgctttttttgatgtcaaataagcgagatatctcaggttaatcctatctgctgaaggattaaatgattttttacttaaaaaagctttttctgtcgggaaattctcgactttcccgcgtcatattcctcggcccctttttcttcatgcctctcaggccattaaagtgccgatcccgtcaactttagtaaaaattaccaatttaggatttcattttatg

SEQ ID NO: 100824 - DNA, 873 bp, Heterodera glycines
gtggaagtgcacagtccactttggagcgatcggtgtgaacatgagcaatgcattgtttgtgccgccgttggtcaaaagtgtgtaaacagtagaggtgtgccgtgactgaaaaaacccgtgaaccgtgaccgtaaattggtcccgtaaatcatgaccgtgaccgtgatccaaaaaacccgtgaattcacggtaaccgtgaccgtgaccgtgaattttttgagtttattttttctcggtcggtaaattttttgctttttacaccgtctttttttctggtatgattttacaaaaaaaaaatttaaaaaagggggtccaggggagctgatagacgctgccgcaaaaaattttgaaaattagactctaattgtgcgcaatttttgtccaaaaaatgaccaaattttgcgaatttgagccaattttttatgaaataatatgttttgggggcccggcggtgccgatatgcgccgccgggggtaaaatttaaaatttgagtgcggcacacctctagtaaacagcgtggaaaattataaaattaaataaattatttaattaattgtctaatgagcttttaattggataaatctgacaaggatgagtctattttaaaaaatgtgcgagagtttagcataattttgaaactcaatttaagcatttttggaggaaaatgggcccctttttaagcagtttttttaacctttttagatgtttttttgtgcaaaaacctaaaaaaaaattttctgaaggaattgaatttgttgaaactgtaaaaaaataacaaaaaagaattttaggggttttttctataaaaccctataataaagtgagaaactaaaaaatttcagttttaaaaaaatatttcgggggaaaacaatg

SEQ ID NO: 100825 - DNA, 233 bp, Heterodera glycines
attttgcaaaaaataaataaaaccgaatgactcagatttcggaaaatttttttatctctatctttctctgtctacgctctcactccaataaatgcagagacgcaaaataaatttttatttttttaatgcctattgttatttcattgcttttttcttcttcgcgttttcttattatcctacatttctaattacttattcttttatttaaaataaactttttagcgggagcaatg

SEQ ID NO: 100826 - DNA, 174 bp, Heterodera glycines
tttataatttaaattaaaatgatataatcattcaaggattttcatctaaactttggtcaacacgaggaacaccagcagcccgtgctcggatcaaatttaacacaaaggaagcccaatccggttaagagtgaaatttaaaggaaaataaattttaatttagccaaaaaaccgatg

SEQ ID NO: 100827 - DNA, 553 bp, Heterodera glycines
ttgtgtgtgaattaaacaaaaaaaaaagataggtagataaactaaaaaaataagcgataagctatgcatatgcatacataacagaacagagaaaaaaagatactctaaaatagtacgagttgggtttttaccataacaatcacatattgtgtgttaaatgtaaaaaaaaagaaagcgaaaataattttcctttttgttttagcacataaaaaatgcataaacatctggtctgtacacatttgcttttatcttatcttcaccacgcaaggaattgaattgatttttctttctttttcggctaacattaacgtgtttgggtggacagggaaaaatgttagctcggccaaagggaagtgaaaagaaaacccaacaaaatatgtaggtgcatgtactgagctcattcattattttgaaatgataaatctcaagttgaaacaaattgccttactttaaatgtaattctgcgaggatctaatagcttcaaaaacgagtaatctacataatatttacaaagacaaaacattttgcaagtattcagtaaactaataaaatg

SEQ ID NO: 100828 - DNA, 56 bp, Heterodera glycines
tccgtgaacgtccgattcaaagaaggccactacaccaatctgacacggaagaaatg

SEQ ID NO: 100829 - DNA, 315 bp, Heterodera glycines
aaaaattatcatggttttttatcttaaaaaattttgcatacaaaagggtcctccccccttttgtttcaaaaactgtcactttccatatagtgccatgttttttgtttctgcttattttcaggcgggaaaattttttttaatttgaaagctatttgttaacagatgattaaattttaatgctttttgggcgaatttttgaccaaattaaaaaacagaaagagaggttccggcggcgccgataggcgcctgaaaatatgtgtcaaaaaagcggataattctagccatactgatcagaatccaagctcagatattatg

SEQ ID NO: 100830 - DNA, 102 bp, Heterodera glycines
tttcgaaccttttttcaaatgttaaatgccacctcaaaatcagtggaatggtagcaccgaattaacaaacattttactgcgacaataattaggcaaaaaatg

SEQ ID NO: 100831 - DNA, 145 bp, Heterodera glycines
gcgcatttttctatcctagaaaaaatgcttcttaaatttttaaattaattttacgcagaaaccacaaaactgcaccattgcccggaaatccaatatttattcaaaaaaataatcgttttcaatttgattttaccaattttcaatg

SEQ ID NO: 100832 - DNA, 82 bp, Heterodera glycines
tctagagtccgacttcctgaaactgctccaagcccaagggttcgacgtgtacgagaaatgcgtggagaatccgtccacaatg

SEQ ID NO: 100833 - DNA, 984 bp, Heterodera glycines
taatggactggggagcacaattggaaggggaaaatagggctaaaaaaagaaaacggaaaatgcggaggaattggaaggggataggcaaaagagaagaaatttgtagaaatgaagtgatgcctaaaatttgtctatttatatattgctgaaatcacatttttgatgaagttggtttgatattcaatttgcatttgcatctctcaaaagctataaaaggttgaatattctacagtttccaacattcaaaattggtgaatataagcagcaatcgttggatttgcgaatgaaatttaatgattaaatttttttcggttttcagatgggtttgcaacgacctttggattggaaggacattttcccattttttggtcgtcctcaactcggcctcaaattgttcgacccgtttcaattattttgtccgtgaaatttgtcccattatttgtttaggcatttctgcgtgccaccatttctccttcctctgtcagttacaatattaaattcgttcgtttttcgtcttccaacagtgattggctgtgaagcgatgcccaattggagagacggcggcggcggttcagcggaaacccaaaaattcggcggacgatttgaacaaatgtcatcttttatttgtgtgatgccaataattaattgacttggcggtaatactgccgatggtgccccccttttttgaaaaaaaattttcaaaaatttttcagagataaaattgtctttagggtttttagggccgtagaattcgaatctgacatccgttttgacccatttcgaacctcgaacccggattcgaacaaaaattcgaaaatacaatttcctaataattcacatttattcactaaaatcggttcaattgcattaaaatagttgttttgcattgatttgtgtgttattagcatttaatataatatggctgcgttggaagaccttagaaattttacattgaaaaaactgcacgataattggcgttgaatg

SEQ ID NO: 100834 - DNA, 231 bp, Heterodera glycines
tttgcacatggcagagatgcggtatgtgaaaaacagataacaaaaatatttaaatatttaccgaagtaaataatatttataattaaatattttacgcaaaatgttgagaaattttttaaaataaaactaaaaataaaatttgcttatttaaattttttattcaatatttaaattattcttaaaaatataattataattaaatcatatttttcttttcttttatacagaatg

SEQ ID NO: 100835 - DNA, 82 bp, Heterodera glycines
ggtatttgccttttttcaaaaaaaatatattcaattttaatattaaaaattccaatttttttttcaaggcatcgaatgcatg

SEQ ID NO: 100836 - DNA, 447 bp, Heterodera glycines
tgtttatcgtttactatggaagttatcagcactgggacaagtaatttttttgttgttgtttttatttcattgatcaaagatttacgaaattttactgcgattttgatcattgtacctttacaattttttaataaatggttttaaattgcctaattaagcaaccaattaacaaaaaaaaaacctaaaaactccgcctaccaaatgactttttatattacagtatttcctaaaatacagtctccggcgggcggtttattttccaaccccctcagcagaagggtggctttatttcagagggaaggctctaatttagtgggagattttttttcagcccccctaaaaaggacggttttattttacgggggggggggctctattttaaggatacggtatttaactttttttaattttaacgataaaaatgataatttttattaggccagtatg

SEQ ID NO: 100837 - DNA, 411 bp, Heterodera glycines
agtgcgttttaccaattaatttaaaaaaatacttttaactaattgtagtttccccgcgacctatgaaattaaaaaaaaaaattcattggtattttctttccactctttgctcggaataggccgtttcacctccgagggttttgttttaaatttttcaaaaataaattttcaaaacaaaaatctttgggaatatttttaaataaagaaaaaaaaatttgtgggccacaatgccttaccattgccaaaattgtaaataaaaaagtttgttttttttgaaaatttctgtttgaacgtttttcaaaaaaaaaatttctgggggaaatgaagcgcaccattatttgctaaccctattcctctttccttgattttccagaaaaaaataattgcaccttcctttttcaacaaaaaatg

SEQ ID NO: 100838 - DNA, 394 bp, Heterodera glycines
tttcttttccttttcttttctctcaattttgtcactaaatttcacgtgcctttttccttttcttttcctctctttttacttttctcttgtccttttaaatcctttcacttttgtatgtcgttttttgtcgttacttaaagtctttttttttgccaattttgtggactttgtttttattacatatacctaggtatgtacctacaaaaaaaacgagaagcgatgaaaacgcatctacagtcatctacctatttcggttcatattttaagatttgtctgtatagtaacaagtaaagccaaaattaatttgttctattttagctccagtgatatttattttttggtgtgatttaaaagtttatttgagtaaaaaaaaagtgaaaaataaatgaaaatg

SEQ ID NO: 100839 - DNA, 801 bp, Heterodera glycines
attgttttcggatgttcgatttttcggaagaccctttggtcctctcttttttgtcctctgcgcaaacgaataaaggaacgggttcagttggtatgtctctgtaatgaactttgatctttttttgttgtcttaaattccagggagtggatgttctccatcgtgttcagtgtacgacgaaaccacatcagtttccaagccagtggatgtgttaattacagcagacaataataacgttggcattctgccgggtgaagcggaagaaacggaaggcgggagcaatgaaacgccgtgcacttccacggaacaaaaggtcaatgaaaaaacaggcgctacttgcaaagcggtcctttttgaaattttttttcactttttttggtcacatttttttttttacacataatgatgaatattaagaattaatagcacaattatggtgaataaaaagtatattcacgatttttaaccaaaaaaatttttacaaaacaaaagggtcccccctatggttttttataaaattcaaaatctatcactttataactagtgccaaatttgcttaacaggcccaaataattgtcatattcatgatcagcgacctctaaaacccccgggtacttggtttcaggactttttaaacaaaaaaaaaatgtgaccaaaaaaagtgaaaaaaaattttttgcaagtagcgccaaaaaacatttaaataccgtatggctcttctgcagttaattctttttattaaaagttaaattattacccacatcttattagtccgtctcaaatcgtcaaaatttgtccaaaatg

SEQ ID NO: 100840 - DNA, 86 bp, Heterodera glycines
ggtcgcgctgctgctgaacccgccttttaatttgcaattgttaaggcattctgagcggtgaactgaagcacgggccgctggcgatg

SEQ ID NO: 100841 - DNA, 502 bp, Heterodera glycines
  unsure (1)..(502): unsure at all n locations
taaaatataagcgtattgtatgtgcttatttgagggtggctaataatttcgatgcagagaaatttcgacaaactantagaatgagatggctntatttaaaataaagaattngatgaaattaccgttggtaaaaatgaaatgaaagacaaaagattggcaatatttaaattcgatagaaaatgcagaagtgtcgatttttgaggaaaaaccatacatataaaaggcagagaaaaatgacagaaagtgtctttttttttgcaatcataatttacgactaattaattataagtgtgttcagcgctaattgccacaaaatgaagcgaccttcaaggaaaatgtaaagaatttttaacaaaaaatttcataattacctattttttacgcatttcagctggatttgtcttgacgtttggatggacattcttcggcgcgccaacgattcgtcaactcgacgattcgtcaactcagccaaaatgcgacgattcgtcaactcagccaaatg

SEQ ID NO: 100842 - DNA, 68 bp, Heterodera glycines
aagcgaagagagatgccgaagaaaaggccaaaaaagacgcagaagcaaagaaaaaggaggaagaaatg

SEQ ID NO: 100843 - DNA, 259 bp, Heterodera glycines
  unsure (1)..(259): unsure at all n locations
atcgcgtagcaatttntttgaaaaaaatgaattttcaaccatttataattattttttcaagaaatcagaaagacgaattttccgaaatttaaagntgtttagtacatctgggattgaaaaaatgtaattttgaacccaattttgggcataagcgctaatgtctcagacgcaattgtccccccccccctcccttattttttatgctggtgtttattaattttttaaatttaataatataaataaattttagccaggaatg

SEQ ID NO: 100844 - DNA, 201 bp, Heterodera glycines
gtggtccttctaattaagcctcggcaaaacttttaaaaaattttagtttagctttcaaaaaagttacggccagaagaaattcaaaaaaccaaatttttccaacttttttcggccatcaaattggttcaaaattaacaaaattttttggaattttgcaggctagtagatcatctgaagagctttcgaatgataccaacaatg

SEQ ID NO: 100845 - DNA, 1003 bp, Heterodera glycines
taaattcactgccaccgtttacggaaaaatttttatgacttaattggaacgtacggcggaattcggactgaaaatggcttgcatttaaaggctctaagaccaatgaaaaatcttcatttaaaaaataaaatacaataatttaatattaaaaatatttaaacaatttaaaatgcaacatataatgttgagaccgattgatttccgtcttttggtaccaccgataatggcacaccttgtaatttttaattaaaatatttaaatgtataagcttaagggcccaattgtttaccaaataattcaaccgctgcgcgactcaattaccaatttggaagcaagcacagtatgttttatacaataatattaaaaataaattattttgaattcaagcgtccattaattgcgaacgcagaggcgatcggcaatttgttaacgaattttgtaagaaaattttaatgtaaactttttcttttattatgtattaacagcctcaacatgttagagatgctgtcaatcgagtatttgcgcaaaaagtgcaggaagcaattgcagaaattcaggctgatttgaaaattaaaatttgagatttaaataatttaatttaatgatttaactaattaaatgtaattcagcaagcggtaggcgccagaaacatggaaccccaaatagcggcacaggagcctcagccaataccgaatcagcggattgcaggcaattctaatgactaagaccttggcctgtgataggcattcaaatttaaaaaatatgtggatttttattttctatttaataatttaaattcttttaatcagaaactacatgtatagtgataattaacaaacttaagcacataacgctttttacccatttcaaagttttgagaggcaattacgaccattttcctctgacattagttactcaaactacattttacgaaatcgtggacttttgccaacttttttttttcttttcaaaatttataattaaaatatttctagatgaaatg

SEQ ID NO: 100846 - DNA, 1003 bp, Heterodera glycines
tgagataaagcacattagattgggcttaaaattctctacaaaaaagctcgtagacgattttttgataaaatcaactcctgacgagttattgcgccagaactgaaattgaggcctagcaaccaaaaattttctatttccaaaaaaaattttaaaaatttttctgaaaatgacaccaatcgatagagcatgaaaaacggttgcttgaaagtggtctccgttttccccggaaaaatctgtaaaaaattataaaattcaaaaacggaaaatttttgagggggcctagctcgaaaatttctgaaaatttctgaaatctaaaagcatggttggatagagctcgtcaagctgtacaaaaaagccgcttacaccgacctcctccggtcaaaccccggcgagttattcagccggcgctgaaatggcccaaaaaagtatgcaatttttagccagtttttcggaaaaactgacaagaccttggggttcggtcaagaaacaaaaaaaatccaaaaaagtccaacttaaaatcctatcgaggccgatttttcatttaagcctttaaaaaatttttgaatcccaaaaactgcaaaaactgcttcgaaaaaagtgacttttcggcgcctggcgctcagttggccctcggatcggaaaatctatagttttcctgaatgcgccgtcaaaagttacccccaaggtcgaaatttcgaatccctcccggcaaaccgtaaggagattttgtttttggaaacgaaactccttgtttctttagtagtatataactagggtgaccagttggctttaaagtagaaaaaatacttctggaaccccaatataatcggtattgacataagcgcttcgcgcaaaggacttcgttgctagttcttgcgcggacatgaggccagtttattaaccgtcattagcggttggacaatttttttttgtaaatgtaaactgtccaacccccagggtccaccacgcggaggagcacggtgggaaactggcaaaaaccatg

SEQ ID NO: 100847 - DNA, 543 bp, Heterodera glycines
ggttaaaagaacgtttaaaattttctcaaaaaggtattttcgtggcaagaattttaatttaaaaaattatttttttatgtacctattttgtttttttgcccttaaaattcccagccctactcatttgcaatgcaataagtgaataaaaattatttttacttaatttttgtctgaaaattatgtcactattcgtcactatttcggactttttgtcactatttcttcactattttggcatttttactcactattttagttaactattttgggatttttcgtcactaaaattcacagccctaataatcaatatatttaaacttaacctattttaagaataattccttatattatcattattttagaaattttataaccatttatttaaatattattacatacttcttttgttatgaattaaataaaatttgacagattatgtttaaatatttcaaatataatttttaacgtcatttactatttttgtaatttttgctgtttgaaaacaaattaaattattttttttccagctttgtagtgcaaatg

SEQ ID NO: 100848 - DNA, 400 bp, Heterodera glycines
ttttggcacttttaattactcttccaatgccttttattctcccgaccgatgaaaaatgagaatttaataacaattatattttctatatgttttattttgtaatcaaataataatgcacatttaatgaatgtttcgttcgtttatttgccaatgcaaaccaaaaaatggcctattttgggctacccgaattgccctggcaaatgccccccccccctctcagcaaaggacgatgctttccgccacgcccatcccttctccgtcccctcgggcatcgttgtccgccgatttcttcgcccccagccgaagtgccgttgttttgtcctttcgtttcttttttattcttttctcgtttcccggtgtttgaagacattgggctggcgaactccgttcttcccaaatg

SEQ ID NO: 100849 - DNA, 173 bp, Heterodera glycines
tggcaggagaatgaaattggaatgaggttaataaattttacttttatattcgcaaaagtgtggccacgcctacactatttgaaaagagtcacggttttagacacgcccactaaaagccaaaacattttgcctgccaaaaacccagaatcattttaccaatttttgtcaaaatg

SEQ ID NO: 100850 - DNA, 622 bp, Heterodera glycines
ttttggggtatgaatgtgctaattgaaatgtttgagcttttatagctttgaaataagctccgcctacttaaagccaattaaattcacccgctcaaagctcaaattcattttataaaatgtcatcattatctcccgaaagaattatgtctcaagctccgtcccctagaaaggcaaaagttgacgagcgagctctctggaaaatcttcaagggcaagtaaatgctggcaatttatctctgcgacgatgactggcgaaaactgtacgagaacaaagagaaagtcagacgactagaggacgacgacgacaatgtggcccttagtttccaaatgtgtgaggattgcgcgcgcgtgaattgcaatgcaactgacataatggcaccaccgaagaaacgaaagatcgagaaagcttaaggacttcataatttattgttttttttcatgcttatctcttaaataaatcgttgtaattcttttgcgcaatgattgggtgtgaaagatggtagcggagtgggttgggtttggttgttttggtgtttttgtttcaatctcgactcattcacccatccgcatcccttctcgtccaattttcaccgaagaacaattcaactgctgccatcaacatg

SEQ ID NO: 100851 - DNA, 140 bp, Heterodera glycines
tttcaactgcttttggcatttttgttccattttttttaagaaaaatgaattggacctgaaaattgcttaatttttaagctattaaatacccgaatattggtttgaaacctgttcaatttattttttagcatttaaaaatg

SEQ ID NO: 100852 - DNA, 1003 bp, Heterodera glycines
aaataaataattaaacgagtttttttattatgttgcttattgcgctgtttgttgattaagcattgtcctgttttatcagtttttgtttttttttgcttttgcgcagaatgctgaacgattattcgatcttagcgggggaaggtggaaggtaattagggtaattacggggggtggggaatgatgggacgaagattatggaataattgcaaaaaagacaaatattcggctgatttggagcaatgaacgaatatcaatgatttttgatcagaaaataaacgaaaacttaaaaaaaggcattggaagacacagagattaaaaaacaaaaacgaaaattaatgggtaattaaaaaataaaacgaaaaataaataaataataaataaaatggacgaattaaaaacgaaagaataaaataagcggcgaatgattagtgaatcgaaatgaatgagaatgaatttgccattttgttgatcatttttcatatcacaactcttttttttatctccacgtggtcaatttggacaataataaactcattttgacattaatttgtgaaaataaaccataaaatattattattattaataaatgtaaattaattaattatcagtgatttttaattaaaattactgacacaatgaaagaaaataaattattataaaagagaaaaatatttctcttaaaagaatggtaattataattcaaaaattattttaaaaaatctcccgaaattgcaatgttttgtcctgaagaaaaaaaaagaattatttgtttgaatatatgctaatttattaaatttctcaacaaaaaccaacaaatattaagcaaacatttgaatataaaattgtgggttttattgattccacgcaaaaaaattttattttttaattttttcatttatttattttattttttaatgggcataaatttattaaaaaagaaaaagaaagggattttcgttagaattatttataatttatttttgaaatattaaattcagaaatg

SEQ ID NO: 100853 - DNA, 279 bp, Heterodera glycines
ggtaaataaatttaatactttttttaattatttaaattgattaaattaatttttgtgtgtgtttagatttacgaacattggacaacccaagcatttgcctctgttctgtcagtatttttgcaagaaaagttcgtttctgttatttgtgctctttaaatggaatttaattagtaaatctttaaaaatatattttaaaggcattccaacaaagaccaattagacgtggtgccggacaaattcaacgaatgttattttggcgcacagacagtgccacggatg

SEQ ID NO: 100854 - DNA, 698 bp, Heterodera glycines
atttatttgatatctttcaaatattttatgggattttcttttaatttcgtataaaggtttatttggaaatgattacattgaaataagaaataattgcataacaaatatttgaataaattgtgatataatcaaaaattaatgaatgaataaatgaatattttagtggtttaaaaattatacaaatttgcttctttttccgtgaaccaaaaatgtaggaaaagaatcccactgaatatggggaagaagcaaaattaaaaattgaacaaaaaataattggcaaaaacattggaaattttgtcaaaaaagagacgaaaagtgaaaatattcaggaaaataacaggaaaaagataaaaatggaagaaaaagatgaagaaatgtcgcaaaaatttggtcagccacaaataaaatgggaggaaaaattttttaaataaactgaaatgcaaattaattattattaaataaaatttgaatttttcgttttaaaattaaaatttagagaaagattttggaggcgaaacaaataaaataagaagaataaccaatcgaaatgatggccaaaaaaagcaattagttgagcaatttgaggaaatgagaatgccttttcagcgcgcgggtgcccattcaacgagggaatggatgaaaattgagagagaaattgccgaaaagattggcacttcccttacatcaatttacagatg

SEQ ID NO: 100855 - DNA, 242 bp, Heterodera glycines
actgaaggcattggtcgattttttatacatttattaaaagagagaaagagcaaagatttaaggaattttatttctctgttttcaattttttaatttcccccctttttttactataaaaatgtttgctttttccatttgcctctcattatttaaaaatatttctaacataattattattgtgcccttttgacgtccttcttcgcaattctaatacggcaaattgtgctaattgccacaaaatg

SEQ ID NO: 100856 - DNA, 985 bp, Heterodera glycines
tttgtagaccctacgcttgcgattccggccttcggggaccatacagttggagataccgaaacttggagacccgagagtcgcagatacctatatggctgtactatagtctaccagccacaaaaactcgcctttaaaatggtcaaacccggacaaatttggtttcattcgaaagctcttaacgaattttccgttcaaaaatcaaagaataaagtaaaaaaaggcgccatctaagaactacgacaaatgagtccaagtgaagatagatatttcagtaccaaagaaattattgaaggcaatgttttagccattttttgttttcaatttacaaaataaaatttctatttttttttgtctttttcagtttccataacaacccctccgggcgtttcattgttaatttgtccaacctcatcttatagatttaaaaccaatgtgtgagcactttatggggcctctgtttgtttgtcctacaattttgggcagactctgtgccatctttgtcagtgccatcttttgagaccggacccaatttgccgattttcttcatcattttcgtggctttttcattcttttttttagtagttgggcattattgaagaatctatctttgtggcaaaacaaattgtttgctcacatgctcttaaaaaggggcaagctcaaatttctttttgtaaaaatattctttttttattttaaattgatttttttgttggaagggatggacttgggaataaaatatttttatttatttgaaattaataaaatagtccaaacattggattataatttagttaccgaagcattttaatttttttttcctcatcctgttttgtatttctctaatttattctcatccaacattaaatttttatgtctataattagggctgggatttttatgtttttacatattttttctgccgcttagttatggcgagagaaaatagcatttttttagaaaccggaaaaatttgacgccgaagatg

SEQ ID NO: 100857 - DNA, 75 bp, Heterodera glycines
cctattaatctctttggtttttgaaaaagcattcatttattatacaatatttcttcaatcctgtgttgtcaaatg

SEQ ID NO: 100858 - DNA, 276 bp, Heterodera glycines
ttctcaattactggtgttaatccgagttggataacagccagacgtcaatcgccgaatttggagaatttctacattcaattgttaatccgagacggataacaattgcgaatcactgttaattcgagttgaataacagtgaccgtccatcatcaatttcattgttaatccggttcggataacaattgacaatcactgttaatcccagttggataacagttgaccatccatcatctttaatttgatcctagtttggacaaattataaaacgcaacaatg

SEQ ID NO: 100859 - DNA, 403 bp, Heterodera glycines
atgtatttaaagtgatttattatttatattttataattttttaaaatgtttattttgtttgttttatttttgataaatttttcttcgagttataatagccctattctctaccctgaacgatccagggacaccgaaatgactgacatttattataaaatagcctcctttgaccattcctacttgaataaaatgaatcaatctgaattattctcaatgattgatgaaattgttgaaaagtttcaactttgtaatgttgaagaaacgaggtcattatcgagatgggtatactgtatgcttttggttttgttgtggatagctattgttatgacaggaattttcctctattttaattcattaattagaaatttatgtaagcttatgcatatatgtagagacgaaaatg

SEQ ID NO: 100860 - DNA, 212 bp, Heterodera glycines
tttggtcttggtttaattttaaacattcgtccaaaatttgacacttacattaattaagcaaaagtgaaaccattagatgggattgacaaccgacaaattttatttttacattcttaaattttttaaaaattttattaagccggtcaaagacatgggcagcaccaagttgggaacaatgaacggcacaaatattatgagaagcgcaccgaatg

SEQ ID NO: 100861 - DNA, 79 bp, Heterodera glycines
ggcggcacaattttgtgccttcctgaagaaatgggcgctgaagccgtacaacgacagcatggaggcgtacatcaacatg

SEQ ID NO: 100862 - DNA, 476 bp, Heterodera glycines
tttttggtggttgtaatgatggagatggtgtttgtggttaggattttggatttttggaaaatttctttacaaaaaatagacctataaaaatttacaaaaaaaaaaaaaattgtcgcatgtgaatagaaagaagttttttaaaaaatattcatctcaattaattcttatgtattttcatttaaaaaaaaacttccctcattttcagagaaaaaaaacgaaatttatttcagcttctttgtcattttgactaaaaaaattattccatgaaaaaattctgccgattttcaattttgtgcctttttttttgcctaaaaaatccaatccctataaatacagttattattattcaaaacagaaaatgggaaatggttgcatgaattggtgctgctcactggccaagctgttctcttttatagccacagattttgcttaaaatttacaagcaaatttcatcagatgattatgatgacgtaatg

SEQ ID NO: 100863 - DNA, 1003 bp, Heterodera glycines
aggaaagcagttcgtaaatttttcatacttaaagtaaaccgtaccttctaggacttttagatttataaaatgctttataacggcggcaaatttttaaataagaaaaattatacaattacctttgaattagcaggaagttttgtggtaagttgaaaataatcagttggagcatccatccttaaaatagtttctagccgaagtctttaggagaatcatcgtggcactgtttattccgtgtctttcaatccttttactcactcggaagcgcccatttattttgccactgtagggaaaaatagggtgagcaaattggaatgggaagtaattggttatgcaaattcatacgtaatgagtgttgttttattcaggtgtctgtgtacctttgtccacccgaaaagggctttcaattggtgcggcaattcgaagaccaagacgcggtcggttggactttcttttgttttggagttttgctttgtttcacacattttctcagaaggacgagttttattacacggtcacttgggcttataaccttgaaaaagcacaacatgtgttggtcgtcggcggatttcgcggaatcatccgtgtgattagcccactcaatgggcgacttcattgcgtaattcaaaatttgttgcatatttattaattatgtttgtgtcggctgttaattaggcattaatcggtcacggcgactccatcaacgaattgtgcacttcgcccgtctctccgatgattgtcgcttcagcgagtaaggatctgacagtgcgaatttggttcgtttggttacgagtggtgagcagtaaattgatttgaggaacgtcacttactcgcaatgtttggccatcctcggggggaccaacggacaccgtgaccaagtgatttctctggtagtcgtccatcaatttttcctaatgacttattttgttgcaattcacaaggatttcgattcgtccggcgcttttttggccactgcgagtatggaccacgcggttaaactatg

SEQ ID NO: 100864 - DNA, 846 bp, Heterodera glycines
taaaaatgtatacaaaaataataaaatttaatgtacacattttcgttttgttttttcattgctccctttggcatcatcagccgatcgatcaacagtcaattcgcaattttgctgtttttgttgtcactgatcagcggcagccagcagagtttaatgttgtcgtccttttttatttgctggttaaattggcgcttttggcattttatcgcagcggcgggaaaagtccaatgatggcagcctcagcttcatcagcggaagttgtacaatttggcacaaaatgttgttgaccattcattttggatggcatttgatttggtggatttaaatatggcaaaagtttcaaatttttgccatttttcacatttttccctcttttatagttaaattttgttgtcattttgtccaaaatttggcaaatgttctcactccttttactaattgcacgtgcgttcagcgatcagtcagcctttttcgcccattttcacggaaaaaacagatgaaaacattcgcgcacccaaatttactcaatttcatttattttattgcacatattttgagtaaatatgttcattaaataaagccaaaaaacattgcaattagtaattctttttccttttatttttttcggctttttgacatatgaaaaaattatgaataaaatacctaacaaataagcttctttggcggaaatttatgtaaaaatgacacgaaacaaaaaatattttcatcaaaatattattattattattataaaagctgattttttaatgaatttttgttaatgattattttaattgtttttattcatttaatttcatcatctgttcagttgaatctccaccgatg

SEQ ID NO: 100865 - DNA, 149 bp, Heterodera glycines
aattgattggaattgaattgctaaaataattaaacttaagtattttataaataaattttgaaatggtgcggccaacgaaaggcactattcaaaaacgcaatgccgcggcggcgggacgcgccgttatagaggcgcaaaaggcaaggatg

SEQ ID NO: 100866 - DNA, 967 bp, Heterodera glycines
agacgaaggaatcccgcaaatcgtgatgccaaaactacccatggacttaattttcgactttgattataattaattaatttattttgttaggattgttcttccgactttgacattgcaattttatccattttacttgtaattaaataaatttgcttcctagccaaacacgcaaatatttagtacaatgactcattttttataagtcaacgttctttctgttttcattcttttcttttccatataatctttctgtgcgttctttcatcatttttcgctcccttcacttcctttattttagcattcgttcatttttcttcctccacactttgcgaaagtgcattctattgattgttttttacggaaatcttttaaatttccctttaaattttctgttttaattttatttttaaaaattttccgagcggcgcctgtcggcaccattaggccacaacagcatccttatttttttaaaatcagctcaaaacatctaaacttggccatttttggaaaaattctgttaacaaatttgttaaccattatttccggcagagtttatcggcaccgtcggcccgcccccccatacattggatttagaaaaataccgcataaataatccattcatgatcagcgaaacctcataaagacttttgttatttattccctttctcctccaatgttcagtttgggcatgtgcattattgggttgttattatttttacaacatttgtttatcaattggttgtgtccctgacctttctttccacgcctccccactgctcttcttccccactcatttcgtcctccattcattcacttattcatatcatcttctttcgcccaccccattaccattctttttgtcttcgatttcattctttttgtcttcgatttattttgtgtttattactgattacatttcagtatcgtttaatccacataaatcaattgcgcaaacgaagtccaaatg

SEQ ID NO: 100867 - DNA, 271 bp, Heterodera glycines
ggcccatttcaactacccgaactcggacaaaaagaagaaaatttgaatttttcaggattcgtttttttcaaaaaaattggatcgtaaatggaaatgtgccattttcgaatggaaaagtgccattttgaaatgaaaagtgccattttgaatggaaaagtgccattttgaaatgaaaagtgccattttgaatggaaaagtgccattttgaaatgaaaagtgccattttcgaatgccatcccctctccatttttcagattgttgcctcagaatg

SEQ ID NO: 100868 - DNA, 271 bp, Heterodera glycines
tcattattaatgctaaataaaatgttgaacagttaaaattatattttcaaatttcttaatttttcaaaattgtgtcttccacctactaattatgcattattctacttaaaagttacatcttccaacgtttaattattttcgtactttattttccattcattaattatgcatacgataaaataaaaaggggcggagcttatccatttgagttggaacaccggtataaaagccgctcgaatttcttcattcagacattaaaaaatctgaaatg

SEQ ID NO: 100869 - DNA, 392 bp, Heterodera glycines
ttttccgtgctgagtcgatccacaaaaaactcagtgaataataataattttgtattatattatgcgcttcacaaaattcatgtgtcaaatcaataacactcaatattaaataattttcgctgcctgtaactgcaaaattaatatacatatgaattttatttaaaaaatatatatttataatattattctaacctagaaaaatgtataaaatttttatttttttcttatctctatttgagtattcggttactactaattctggtaatatatcaatgaaatttaatcggaattccaaggaatgttcttttttttgcaaacggaaaaccgatcgaattctgatcatttttaattaattatacgcaaatagtaaaacaacaccgtgcaggcaaatg

SEQ ID NO: 100870 - DNA, 179 bp, Heterodera glycines
acattgtctttttttaaaaaatcaattattcaaataattgtgcatttttctcatatatttttcatgaccaattgtgtttttgatgagtattgctcatataaatactccttttcgctgcatatttatcattaaaataatatttaaaaaatatttatggatttttattagatttaaaaatg

SEQ ID NO: 100871 - DNA, 1003 bp, Heterodera glycines
acaacgaaatttatagttaaaaactttattgaatacctaacaaaaaaaagtttttctcttagttattaggacaactataataccatgagaccagggatggcacggaatttcgatttccgaaaatttttggggcctcggaatgccatccctgccatggacacaaaatgccatgggacgcgtaaagtgttgttgggacgcgtaaaatgtcatgggacgcgtaaaatgtcatgggacgcgtaaaatgtcatgggacgcgtaaaatgtcatgggacgcgtaaaatgtcatgggacgcgtaaaatgtcatgggacgcgtaaaatgtcatgggacgcgtagtgttgttggggctcgtaaaatgtgatgggacgcgtaaaatgttatgggacgcgtaaaaccgactagaaccaattttaattattttttccgtttgacgcacatccgaccaaactgacaaattattgtagaagatactagccgcaagaaataaaaaagttaagaaatttgtccgaattcgggttcgggattcgaaacatggatgttttgcacaaatccgaccaatttcagtcctaaacaggtactcacgcgaaaacgtaccccacgcgaaaacggccacgcgaaaacgtaccccagccacgcgaaaacgtccccacgcgaaaacggccacgcaaaatggccacgcgaaaacgaccccgaccgacaattatttatgaagttcattttacaaaatttctttttttttatttttggcttaatgtcctttcggcgctttaattcaaattaatagttgctaggcgtgccaatgtgtggcctaaaccattttgttgtcttatcatctcaaacagccaaaatgaataagcttattcagaaatacaaatgaataaatacccaatttagcagcagcggcagcagcagtagcaacaaatcacctcccccccccccccttcctattttcaaaataatcccaaaaaggcagcgccataacaattactcaaattcagaaaatg

SEQ ID NO: 100872 - DNA, 175 bp, Heterodera glycines
tttctgttgtcgggcagaccaattcttaagggataaaaaattcatattattttaatgacctaaattaataataattcaaccaactttcttttgcaaattcaactaattgcttttcaacaaccctccaatttcaaagtcgttaatttccaaatttggcaaattttctgggacaatg

SEQ ID NO: 100873 - DNA, 1003 bp, Heterodera glycines
cgtcttttttcgctgcccaacatctccgtcttctgaatttgtctcataatcgactccacaaattcgactatgactccttttctccacttttccaagtaattaaattattcagttattttttaaaattaaatttagttggaatctctcgacctttcctggaataatttcaccgcaactccgccggacatccgccaatttgtggccctgcgaatgctaaatttcagcggaaatcccatcgagaaaattgccgaaggggaattggcccagccaatgcttcaggcaataaaaatacattaaccaattaatccgcttcacttttcgcctaaagacgcttcaaatttgcgactgtcattttctgcgtttggtcgaaaggcgggcgttcgccgcattgccaaatttgcaattcgtccgattggccaacaatccaaagctccaatttgtgtccccgggcgccttctccaacaactcacttctttttgagtcagtcctttcccccgtcctcggaccactgatcagtattgtccaattaccctctaatgccttctctgatcaattctttctctcgatcactgatcagtatgttccaattgctcctacaattccgtctctgatcagtcctttcatccttccctatcactgatcagtctcctctcaataattactctttagggtcgacttctccaacaattcgctgtccaccctctcgcccaaccttctgcttctccccgtccgtcttcatctcagttccaatccctttttctgcgcttgcgtttctgcttggatgccaaatattttccaaaaaataactgaccttaatgaggctatttgcgtgtcatcagctgagggggaaaatcagcggcgaatttcaatggcaaaaattgcggagagacaaaacaccgaccaaagaacgggagagtgtccgcgcgagccgattttgccgatgggcaaagaatttagagcaaaagttggccagtttttttcgttgtattgtgcgccgagaatg

SEQ ID NO: 100874 - DNA, 256 bp, Heterodera glycines
  unsure (1)..(256): unsure at all n locations
agggtttacccccntttcctcacccattttttcgaaaaaataatccctagaaaacattacttttggaagcagaaattttttttcgataaatgaggtgggaaacataaattttactattaccaaaaaatttctaacaaaaaatttaaaatttttttttatataagaaaattacaacggaaaataataaaaatttcagcgactttttgcgttgagtgatgcctctcctaatcagaacattttgatttaggccgcgatg

SEQ ID NO: 100875 - DNA, 214 bp, Heterodera glycines
ttcgtctgacaatgagcaattcactgaaactttgctgctttttccgcttccgaatggcgaccttttcacgctgttcaatttcactgtttttgcacaccaagaacatgaaaattcaggtttttgaattcaagaatttatacattttccgggggacttttttgtttacgtcgaatcaaaatttctagagctcgacattttaaaaagaaacaaaatg

SEQ ID NO: 100876 - DNA, 330 bp, Heterodera glycines
atttacctaaaaatgttattcaaaacttggattttttaaagaaattggtaaaaacaaagtcttttaaaaagagacaacaaatatttaaagaagcgactagtgaacaaattgcattattaattgaaattagttataatatattaaaggggtactttccgctcacgaagagacaaaaatatagacttttaccatacgcaaattttgtgagaaaattaggaagagttagaactgagaaaggtgtaaataaaattattcaacaaaacggaggcggtggtttccttaatttgactcctttattattaccagtacttattgccgcgttaaaatatg

SEQ ID NO: 100877 - DNA, 372 bp, Heterodera glycines
cttcgcggcctcagacgggcgcttcgcgcccgttcttcaatttttgttgaccttgaacgggcgctacgcgcccattttttaaatccgttgaactcatacgggcgcttcgcgcctgttttttagcttgttaggccgctttgtagcctcagtcgggcgcttcgccggtttttcaatttttgttggccttggacgggcgcttcgcgcccgttcttcaatttttgttgaccttgaacgggcgcttcgcgcccattttttaaattcgttgaactcatacgggcgcttcgcgcccgttttttagcttgttaggccgcttcgcggccttggacgggcgcttagcgcccgttatttaaattttgaggtacaaaagtgatg

SEQ ID NO: 100878 - DNA, 96 bp, Heterodera glycines
tatgcaactgcacagatgcagggacagatgttgtggtcctagcgacccaatttacgggcggtgcaatattgggttcccatctccttactcgaaatg

SEQ ID NO: 100879 - DNA, 945 bp, Heterodera glycines
atttgacaattttgaacaaaaatggtcttacatttatgatggaactcaaaaacaacaagctgaccgggtgcgcaaaggtgagatgagaatttgggagagggacaaaaatttagccaaatttttgaaatttgtgaaaatatggggacagaagggaaaatttaacaaaaatcttgaaatttaatgaaaatatgggcatgaaaattagccaaattttttgaaatttgtgaaaaatatgggcacacacccatatacggtaaccacttcaaacgtgcacaggcattacggtagtagtacagtagaaaaacggaaaatttagtaaattaatgctcagaagggggtttaagtttattaattagacaatttttattttttatttttaagatataaaacatcttttctgtttacatagaaatttctatacaaaaaaatatatggcagttctaaagagcaaaaaagcgggattttacaaaaagaaatttttttaaatttttgcataactttttttttgttgtcctataaaatgatttgaaaatatgcattgaaataaaaaaaagatgcccgaagaacaatttatatgtttataaaaaaaacagttccaccaaaaataacgtatgaccctacgtactgtaccttacagaatcgggtttaaaaattagggtgtggaaaaattgaaatttccatgaaaatccatggcatattttaaacacacaaattccacgtttagttggaggccatcctgctgcatttgagggtcgcccagcacaaaattggctgcttcagcataccgatttgagaggagctttgtttattacaaaaaaacagtacaaaaaagaataccgtatgccacccagctgataatacagtatggaatccaaaatacaaatagcactcttaacgtattgattcttctgtgatctttttaagcccccatcaattcgacatatg

SEQ ID NO: 100880 - DNA, 660 bp, Heterodera glycines
aacaaaacatagaagaaagtggaggaaaaagaaagaaattcacaaattgaacatagaatgggaatagttttatttacatattttaaatggtataataaaataacatttttaattgtcttaattggttagtagaatatgtatttgttaataacacaataaataaattaataattttcttttttcaaatttaatattaaattattattaatataattaaagattttctttcaagattaattaacgataaaaaaaagaaaataaattgtcctcacaattgagttttttaaaatgagtgtaatttgaaaattcagccaaatgttcaaaattctcgatttacactgggaaatggtattaaatttgaatggccacaaattcatattgctaacttcaactttaaaaaatggcttaaaaattttaaatttattttaattttgagataaaataacagataatgcgaaaccgatgggaggagaaggaccatcgattgaacacagcacaattattcatctgctttgtgttgagagaatgcatgtgttcgttcatcaaccaatttctctttatctctcaattttcctcttcggcgctttagtcatccattcatatattattttaaaaaactcatatattttatttaaacattaaatttgcctcttaaatatg

SEQ ID NO: 100881 - DNA, 118 bp, Heterodera glycines
ttgcgatttttctcgttttccatcaaccaaataagtgaaagcaaaatcatttcattatttttacggattccaaagcgtaaaaattttccaattttttttattatttgtattaaaaatg

SEQ ID NO: 100882 - DNA, 471 bp, Heterodera glycines
tttgtgttatttttccttcttgttatttaaaaattcctccccatttattttgtgtctttttcccctctgctccaaataaatattgattatttgtttgccatcggccggcataacaattggcgacgcccttacgtattgcactgtgggcttatttattggaaatgtggaagcagttttggatttgttggtttgcttgaagcaaccaacaaactttttccaaactttggactcttaattggagggagaggtcaacagcaatcgaaagtcatcgctgctggactacatttgtttattatctaggcgataataaacaacatttttgttggacctgctaaagttaggtactgttagtagttgaaaatttgcgctgctgattttgtgtcttggcgacacttttcagttcatccacgcgcacccactctgttaacaagctaggcgctgttagcaatagagtggtgaacggcaaaaatg

SEQ ID NO: 100883 - DNA, 127 bp, Heterodera glycines
ggtaattttaatttgttttttggattttgcaaatatctatcttggcaggaaatcgtccacaggatgaaaattgtttgggtttccacaaatatcttgtctgattttttctattttagggcggcagatg

SEQ ID NO: 100884 - DNA, 228 bp, Heterodera glycines
ttttttaggacaattattacttatagtaatttcctttgaaatttaaaattaaatcaattgaaacaaatccctttaaaaacagcaaaatgatgacaaatcagcagaaagagaggtagagaatgtgagagaaacgaggagagagggaaatagagagaaagagaaacaggagagagagagagaggtgagggagagagaaagagagagagggagggagagagagaaaatatg

SEQ ID NO: 100885 - DNA, 117 bp, Heterodera glycines
ttccgtccgccctttctttttatgagtcttaatcattcctcgcttccgcgttgtaaccgcccagcagcttgttccctgcaattatttatttttaatttaatttattaaagggaaatg

SEQ ID NO: 100886 - DNA, 405 bp, Heterodera glycines
aaaaggggaccaaacaatggcatcacttgtcggacattgcctatttttaaggactatttctgatttgaattcggacgactttgatcatttccgcgcgtgttgtttttctaaagtatttcggtttactttaaaacataaggaaaattcagaaaacagaaataataagttaattaatagaaggacaacaagtgtattccctgtccgaaatgtatctcaaaatcagttaatgaaaacgacaattaccgtatttggcgactcattatttatttgtgtgctccaataaataatattcactttaatttagagaccattattttaaaagctaattaaatgataattgcgttttcaatatttatgttttatgagtgtgtttgtaatttgcacattttaagctttgacaaaatg

SEQ ID NO: 100887 - DNA, 454 bp, Heterodera glycines
ggtgggcattcttagcaaaaaattggcatttttatatggggaaatgaatctcattggcatcgggggatggtgggcattcttagcaaaaaattggcatttttatatggggaaatgaaaatggcattttcttttttaaattttattttcaaaccaattaatttgttgcaaatcgtgaaagttaaggaaattgaacttttttatttttattcaaataaaagccttaaattaaaaaaggaaagggaaattgttaggtgaaatctaaatttagcgacctttttgaaattttttgttgttactcatttttctttttgattatgcctaatttaaattctaatttactaaaggaatttggcaaaaacacattttctgttaaggcactttgatgaacaattcggcagcgatgtcctcggcactgttgggtgccgtgaacacgaccagcggcggcaccaaaatg

SEQ ID NO: 100888 - DNA, 90 bp, Heterodera glycines
aagtttttttttttattgcagcattcgccggctgagttcaaaattcaaaaatttccgaatgatgccgatgaaagggtcggcgacagaatg

SEQ ID NO: 100889 - DNA, 127 bp, Heterodera glycines
ttattcatcattcatttaagcaaaaataataataatttttttttttttttgttatttttttagcaaaaaagaaaactgaagtgcaaaagtgccaaaaactgtcttataatttgccctcaacaaaatg

SEQ ID NO: 100890 - DNA, 190 bp, Heterodera glycines
aaaaaagggaaaatatcccaaaaatttggaagcaattaaaaaaaaaaacggaaaccaaaaagggaaaattccaagggaaaaaaaagtttcaaaattgggcttaaaattggaaaattttttggggcaaaccgcggccaaaatatataaaggaaaaaagaattaattttaatataaagcaaataaaataatg

SEQ ID NO: 100891 - DNA, 377 bp, Heterodera glycines
ttggttttttgaacatttgcatatttataaaaaaataacccccataaattaaaagaaatgaaatgttttaaatctaaacatctaaattattttgtttaatttattaagcaattaatctaaaaatcaaaaatgtcttgaattttgcataaagtgtcctggttttgaaataatgaataaacaggcgaaaattttctaattaacgtcatcaaatttatagattaatattatttcaataatatatattcgatattaaacaaattctgccaaactgagtaatttttttttgataaaattattataattcaaaaagaattcatttaattgtataaattttgaaaatattttaaaaccatttagactgtcattgcataaaaatg

SEQ ID NO: 100892 - DNA, 274 bp, Heterodera glycines
agtgcggaaaaacggagaggggggcattttgcatttggtaccaaggtctgcggttgttttttttaggaaaatcactgtcattttagggttccgattcactcgcagaaagggaaggtggttccgctgctccaaccgggactgtgaggcaactgcagcattgagtaaagaaggcggaactaatggtgtgctcggaagaaaagagcacaaccatctgccggacccagcgtgcttccacgcggaggtaaaacgcaacggaattaagacgacaacgatg

SEQ ID NO: 100893 - DNA, 417 bp, Heterodera glycines
tctcactttgggcgtactatctctttatttttaacaatcctcctaagaacttttacttttctccgtctaactttttttctctacgttaaacctacaccaaaatttgcatatcgatagagaaaaaaataaagaatttttcaatcgctttttaaaagaaaataatcgcttttatttcaactaaaattttaatttaacggcgaatttaattagatggcaaaaataaaaattgtgtgtaagcttaacgcaattaaatcggcacaaaagcgggtgataaagcgggatgagagacgcgcgcgaacggccaaagcgacagaagcccgttgggccacgaaattgagtttttacattcatttttcataaaatatgcaattttcccaaatttaagccgctccccagcccaacaccgatgcagaaatg

SEQ ID NO: 100894 - DNA, 227 bp, Heterodera glycines
aaaaagcaattgcgacaataaaaaagaaaaaaaaattttgaaaaaatttgaccccaaaaaggggggtacacacgcaaaagagggaacccccccaaaaggtaagataccacttgcttataaaacatctcttattaaaggttcaatgcaaagtgcccgttttgttgtgttcagcgacaggctatgacgtctctaatcgcgtggaggaccttgcattcgaactgaaaatg

SEQ ID NO: 100895 - DNA, 170 bp, Heterodera glycines
tttaattcttgcaattatataaatttgacctttttaatctatttaaattttaatgttttatctattttttcaaagttttgcttcccttttcaaggtcgaccttctgtccatcaattgtcatgagcgtatgattcgtcgttcggcagcgtttggctcattggtgcggaatg

SEQ ID NO: 100896 - DNA, 244 bp, Heterodera glycines
ggtgggtgaagaaattatcatttttataataaaatttttatgggcctggaataaatttccatagcaaaaattcacaagattttttatttaattcactctgcacattgttttattttcaaaaaataaatactctaattattgtcgcatcagtatactgtaaagggagtgtacggtaaagggcataatcatgctttatgaaaattgatatttttaaatatatttatttaaataagttttaaaaatg

SEQ ID NO: 100897 - DNA, 400 bp, Heterodera glycines
tttgagtcgtcagatgaaaaacctgcaaaatttggggctcccgtaatttacaattatcaaagtgtattttttataacacattcatcataattagggccaggattatatgtgctaaaaacgccaaatacatatttattcaccaaaaaatcaaaaaatgtaatttcgggccctgataataatgctttatgtgtatgtatcttcaaaaaatttgaaaaaacttaggttttttataattacctccgctaatgaaaaatggaaaaaagctaaacaacacgagagagagaagcaaattgtttttaaaagtcttcatttaaaatatttttttttgtaagtataaaaatgctaaaatcgcggtgcatttatatatgcctttttcaggcaaagaagccttgcccgcatg

SEQ ID NO: 100898 - DNA, 153 bp, Heterodera glycines
aataataggtgatggaaactgtgggtggcgtagcatctctctcgctttaactggaagtgaatggaatcactctgatattcgaagagatgttattgaatatttggaagaatctatatatcaacacacgcatataaatcataatgaaaatgaatg

SEQ ID NO: 100899 - DNA, 198 bp, Heterodera glycines
acatttaatttaatttctagtttactaggacctgatcactttttctcgaaatctatttttgacataataataataattttgagattgatacacacgtattacattaaatgattttttacattaaatgattttcaatttcaattctcatttcatttttttgctagtgttgatttggttttcactaattggttgttgatg

SEQ ID NO: 100900 - DNA, 168 bp, Heterodera glycines
ttcattgtaagaactggcccatcttatatcccattttcaacgaatctctgacccgagttctctactcaaatttcagtgcaaccatttgttgtcgattggtcgtcatctgtggccccgtccaccgtcagttcggctggcacaacttccaccggctgagcgtcgacaatg

SEQ ID NO: 100901 - DNA, 262 bp, Heterodera glycines
ctaataaatgatgcaattgagcatttattatcaggcacatgcgaaaaagaagtatattttgaattaaagaaataataataataaaaattacaattaaatttcctaatcactcattttttgggattttccttttttttcatgcaagtactactgacccgttttttcttgagtatataaaattttctgactgtcctgatttgttacgaaaaaagcgaatttttttctttttatatttgactatgcgtttagggaatatatgatg

SEQ ID NO: 100902 - DNA, 356 bp, Heterodera glycines
tgaagaatgatgacgaagtgcgacggatcaatacagtcttagacttcacgttgccaagaagatatgaaatagttcttggccttttgtatttaatgaaaaagaattggaattgtgccaaaattgttgcggcaagaaatgaggagcggaaattatgtgaaaaagttggcaattatttgaacattttgtatgagtatttgttcacagtatacgcaaaaagtagggaattgattttattaattaccattctgttatagtaaataaaaattaatattattatttttttgcttggaatttttctctatatacaattttttttcaattttaaagctgaaaacccgaaattggcaaaagaaatg

SEQ ID NO: 100903 - DNA, 812 bp, Heterodera glycines
aagaagaaaagggatcggcggacggacggaggcggacagaaaattaacccatcgaatgtcccttctgtcccccgccccccgcctcccgctcttcggcttttttcacgaaaatggacagagacacagaaacaccctcttctcttgctgctctcacttttcctcgtttttcttccgatctctctctctctctctctctctcgctctctctctctcgctctctctctctctctctctctctctttctctctctctctctttccctccactcgtcactctcaaaaggaagtgggcgtgtccctccctcccctcccccttccccctctcctcccctcccattcactcccctcccctccctccttccgtctgccccctcccccgagaggtattttaaaaagccgcgcaaaaacagcggcggcacatttctcctcaaacgttacgcaaaaggcaatcgccgccaaacctcaacaagcccggccaacagctcactcaaattatcagcattcacagagaaaagacaaaggaaaggacgaacgacgacaattaattcatttggccaagcgaaagaacaaacgaacggattcaaaaaacgaacggacggacaaaagtgactaatttatcgcaaattcaaaggtgcaattttatatttcttcctattgcagacaatgtttgaccacttcgcttcgtcctcaagctccgtcgacttcgattcgaatttggcactgttccaaccgctcttcccgtgcccctcgtgtcaatgccgtcgactaccgtcgctcgcccgcactctgtcctccctgaacttgctgcccatg

SEQ ID NO: 100904 - DNA, 187 bp, Heterodera glycines
cgtgcagccccggacatctaagggcatcacagacctgttattgctcaatttcgtgcggctgaacaccgaaaatccctctatgaagttgtgcccacagaagcaatgagccaactatttagtaggctagagtctcgctcgttatcggaataaaccagacaaatcgctccacgaactaagaacggccatg

SEQ ID NO: 100905 - DNA, 302 bp, Heterodera glycines
  unsure (1)..(302): unsure at all n locations
attttataattttttaaattcttttttaacacaaactgtatcattaatcaccngctttttaaaaatgcataacggcaaaaacaatagtggccacaaaaatagggcagtcatcagcaaatcactggttcatatcaataacaatccccggcgctgtccaaaatatgccattgttcgtttgaccgaagggaccaatgtgcttcagttttaccaattattggttcgttcgttaaatttttttaaatttttccggaaaaattcagcttgataatggtcaagaagaagtgtcttttgtcaacgaaatg

SEQ ID NO: 100906 - DNA, 76 bp, Heterodera glycines
attattattctaattattcgacatgaagcgaaccaacgcaacaaacatcactccgcctcccgccaaacgttcaatg

SEQ ID NO: 100907 - DNA, 89 bp, Heterodera glycines
ttccgtggtcccgagaagaacatataatattttttcaaaatttaattattaattagcggtgaagcaaaaactgattattatttggcatg

SEQ ID NO: 100908 - DNA, 231 bp, Heterodera glycines
  unsure (1)..(231): unsure at all n locations
ttgtgataatctgggaacggatttatantgtgctaaaaaatgccaaatatgtacatattatgtagcaaaatcccccaaaatatgtaccaaaaaaaattcaaaaaaagagcaaaatacatgccaatatatgccaaaaattgaaacaaaactgcttaaaaatatttgagtttcccaaaaattcaattattttatcagtttcggtagcataattgaaaatcaaaatcataaatg

SEQ ID NO: 100909 - DNA, 639 bp, Heterodera glycines
attaaaaattaatcattgcaattaaagttacggacggctttatttacataaattaatctctttttcagagtctgatcaattacttcgttgcatttttggcccatcgttttggcaagattggccttttccttcccatttacctcaaatttccgcggcttttgctggcatttctgttttttattggttattacgtttttcatgtggagaatttgttgaccgcttttttgctgttaaatcgattaagcgccattcttttcccgttgaaatatgaaaaggtgttaacctattttaaatttgttttaaattcccatttaattaaagttgtggcgtgtcggcttgccctttgttgtcgctttctctttcatctttccgctgcctttcaccgccccaatttttgggttggacatgtacatccatgttcaaaatgacaatgccacctttactctggacgaccataagacggaaaatgtattattttaattaatagttttaattatattttactaaaattgtccttttaggagttgaacagcagcgaaatcgccgcttggtctgccgttctttttggcatcgtttgcctttttctgaatgtggccacacttttggcctacaaattgcgcagcaattaccaacaaaatg

SEQ ID NO: 100910 - DNA, 266 bp, Heterodera glycines
ataaaactgcactcaccaggatcgatctcttgaacctttttttcaaaaggcttggaaaaaataacaaaaacttttgaaggttttggaccaaaaacaagtaaaaatttctttttaaatatttacctaactatgaaaaaaataattcgaaaaatcgaatttgctgtatgaaaaacgttttatccttacttagacctctatatttgaatttttaaccccaagaaaccctcgccctattcattatgcaaaaataatagactttccaaatg

SEQ ID NO: 100911 - DNA, 80 bp, Heterodera glycines
acctgtcaaactgggaaaatgccgtcaacttggaggctcaatttgatcgcgtcgtcaaggaaattcgctcgatggaaatg

SEQ ID NO: 100912 - DNA, 674 bp, Heterodera glycines
aaaaaaacaagaaattttttaatgtaaattcacaaaaaggaccgcatctatactggaatgtaccgcattgtactcttcacggaccagcctgaggagcttccaagaccaatttggaagggtccgatgggacgccgcttctgtgtgtcgctgtttctgtcggatgggcactatcacggcatcaaaaaaattcactgcttcttcaaacttgggataaaatattgcgttgattgcgagtgtttctatggtagagacgctaaacatacgatgtcctgtaagagccgttgtcaccaatgtggaaaaggttactaatttaatccaacaattaatttgatatttcctacagttggaccgcaatatccttgcataagagtgcaaggtgtctgtctacactgtcaacaatgcaaacgatttttcttctctcaaagctgctttgatggtcatcgtccgcagatgtgcaacttgattaaacgttgcgatgaatgtaacagaacttttcaagtggatagaaaaaatccccacaaatgttacagcaactattgtgcgcgatgtaaggtattttttctctatttatttattaataactcctccaaaaaacacaggtataccatgagaaggaaggcgcgtgcttcatcaaacccattgtggtgcctgacgagaaacccaaataccgaatg

SEQ ID NO: 100913 - DNA, 676 bp, Heterodera glycines
ccttgaatgaatttttttgatgtacaagaccatcaatgttttgtcggtgtcagtttgtgattagcgatgaccagaaatgatgaatttgtaatgagtttttttcaattaacaaaaaagagaaaataaatttatttggtatttgggtaaattattattatattttcaattagtgataatattttgtgttgatgaatttgattaatgagaaatttgatgatataatatgttgaggaaaatacaaaattatccaaataattgactaaattcatattttttgcatttatttaatttctgtaattgatcagaacattgatcctagtggcaattggtgtgaactattccacggtacgaatattcttcactagaagcaacattttttgtgaaaatttaaaattaactaatcaaaagcataataaagcataagaaaatgaaaattataaatataataaaaaaataaaagcggcatttctaagcaatatgttctatagacaacagcggttcattttctcacgtttttcggattggaagccttttaattccttaagttcgaagtgtgatctttaacattttgtagcaaattttttactttctttccgtcatgttcgacttcaatgaaaaattttttccaccccctagaaatttttttctaaaaatttcatcgatttcaatcaccatg

SEQ ID NO: 100914 - DNA, 478 bp, Heterodera glycines
ttccggaaaagggaaccgaagacctttattcttcagcccttattttttttctccacttttatttaaaaatttaatcgccataaaaaaaaaaattgtgctttttagtaattttgcgccaaaaatgtcaatgaaattttgggctaaaattaaaaaaaactttttgaagattttaatgtaatatgatatgtaaattgtgcaaaaatttttaaaaaatctgccattatctaattcagtcgctgattccgtagcagggttttgctaagagaaaataaattatcttcgaacaaaagatattttttgaaactgaatattccgtctacaattgaacaaaaaaaaaaatattaaatatttttgcttactaaaaataattatttatttcaattttttaaatctcatccctatttttttattcaaataagatgaataattaaaaaattgttaaaaataaatgcctcaaagatagtcggattatataatg

SEQ ID NO: 100915 - DNA, 386 bp, Heterodera glycines
ttttagctgattggggatgagtgaagcgaattcaaatgagcaaaagaagaagagtgaggaagagaatgaccgtgggcgctatttatgctaagaaaaatggcggctaaattgttgaggcgcgcggagactcctttcgtgccaaaaaaaaaatccatttaaaattggacgccgttttactctctcactcacactctctcacgtccatttttctctgctcccaccggggatttgcattgtctgtcaatgggatgggcgttccctccactttagcgacataaaaggggctcactgtgccccattcgccactttcattagaaagcaaacgaatcgattcaccagctctcttcggcaaaaccttcgcctctccacatttcgacgacaaaatg

SEQ ID NO: 100916 - DNA, 101 bp, Heterodera glycines
aacgaaatttggcacaaaactcaaatatttccgctttaaaatgcatccaaaatcaaatgaataaaggcaattaaatttgaaataattgcacaaataaaatg

SEQ ID NO: 100917 - DNA, 294 bp, Heterodera glycines
tcttggcttagctcaggcaagcagcaaacatatttattaaatgatgatgaaaacgcaataataaattttggaattaaattttattacattttttcctttagtaagttattattttgtcgaaaaaataaaatcttacctttttaaatttttattagatcttctaaaaattatttacatctccctaaaatatcacttaatttaaataaaattttgataaaaattttcataaataaattttccgaaaaacgcgtcgcgtgatcagagtttactgaccaattaattttaaatagaatg

SEQ ID NO: 100918 - DNA, 412 bp, Heterodera glycines
acaaaaatcacatttttgagtgtcgcaattgcccattttaacatttttgacaaaataaattttcggatatttttgatgaattttattggctaacaggaggcatttcataacaaagcccatgaggggccggggcatttaaaaaaggacgtggcggcagacaccgtttactgtgctaatttccatttatccttggtgtcttttttcgttgatttttttctgtccatcgttttccgttatttttctttgttttgcgaacactccacacattcactgctttgactcttatcactccctccccatattttatcagcagaattgactaatcaccgaaaaattttttggggggggggttaccccgccaagattttttttttattttttatttttcagtcccgtcatttgagtccttatg

SEQ ID NO: 100919 - DNA, 62 bp, Heterodera glycines
tttggtgttaaacgattcacacttttcagatagttgtcaaagtttcagcggagtagaaaatg

SEQ ID NO: 100920 - DNA, 52 bp, Heterodera glycines
gggatggtaccaggattttggaggggggtggggtgattagctttccgggatg

SEQ ID NO: 100921 - DNA, 1003 bp, Heterodera glycines
ataataagcaaaaaattattatttaaattatttagtttatgctcaattcctatcgttcatataagttggcagctacctaaaaatttttggaaatttttgattaaattttatgttttttcgaaaaaattcaaaaatctcgcaatctagcgcgggacccgaaaattttaaaagtgtgattgcataaataaccccccgcgggatcccgtcctgcaagagttccaatcccgaagctggatcagcaaatttgaatttttgattcaattagtgaaccaagacataaccgtaccgatgagtcacaagcccgcgaaaagcggtccgcaattttgcggtccgcataagtatcatgccgaaaataaaaaaaatctatggaccgcttaaaaacccatcggataccgtgtcatttgctagagcaaacattggcccccgcgtgtgctccgacaaccgcccatcaatgacaaatcgtgcggtttttcgagctgtttcatcccaccaaaaatgccagaagatcaacatgacaattaagaaaaagatggatgaaatttacaaaaaaaaagagaattttgctagcatattctttgaatcaaattatacaaattgtcatttgttgcatcattaaaatttttaattcattcatttaacaaaatttattctatagaaaaattagacaacaaaaaattcattccatatatgcaatcaaatatttattaaaaaatgcaaaaatatatttaaatttttattacattgcgtaagtatttttttatgtttcactaacttcaaacctttaatttaaaatagtaaattataaacaagaaaaaaacatagaattttatttgttttttataacttacttctttttattaattaccttaaaacattaattaattctatcaaatcaataattgtcgtttattttacttgtatgcgtttttataaacaaatatttttcataaaatttattattttatgattttgtttattaaaaatgcttatccccacaaaaatg

SEQ ID NO: 100922 - DNA, 172 bp, Heterodera glycines
tttgctgccgctctgttccacctctattcgtcctcctcctcctcgtcctcctcttccaactgctggtccctccctcgctcccccccccccactttgtgccaccctttcccctcccctcaggcaatgtcttggcctttccctatcctcccaactcggcattttcgctctgatg

SEQ ID NO: 100923 - DNA, 198 bp, Heterodera glycines
aaaatcaacttggctttaaatgcacaaatgtttcaaattcgcaaaattatggctgttctgcggagggaaatgttttgcgcttttttgtcatcggtgacatcggtggggaggagtatacggtagagggcaaacagcagcagtgtacggtggaaggacacggtaagttgaagagggagaacaaaataacattttaaaatg

SEQ ID NO: 100924 - DNA, 134 bp, Heterodera glycines
cgtaattaagcattgttaattggttgatgattaattggtaattgcattcacagctaatcaattgcccataacggaactgccgccgacatacgcacaagtgatcggacaaaacgcagaacagcagcaaaggaatg

SEQ ID NO: 100925 - DNA, 633 bp, Heterodera glycines
tgataaaaaagacatctttcacatttactaattcagagtataatcaggaaaaaattgtgagcagaagaaaatccgaccgggagattccgattctaaaccttaccaatgttgtatattatctacagtagttttacccaggttatcgtatttaattgttaaataaacacgataataggatttaattctgagtttattataatacaaatttttctaaatataattttattttaataatgtttgattgtttgtttataatatcactcaactatggtcaggaccatacccgctcttagacttaagcctagcttcggcatagttttaatttaaagcctaggccgagtacggtacttccaatttttaaattttgtgtataatcatagatatacccatattaaaaaatgctttctcgtttccaaataaaatccacatataaacgcgattctgctggccaatttgctaacccaaaaaacgtctcagacgttaaggcattcaacggggcaggtgcatttattgtacatgcgcttataatcgacctacagtataaactgtatgaagtgagttttatctctgtaatgctacatgcatacagtctgtattgtaacccttaggcttgcccaaccgtagctaaaaatg

SEQ ID NO: 100926 - DNA, 244 bp, Heterodera glycines
tttgtcggacaaagaaaatttgagggcatattaataaggcaacgctttttcaaatttggcttttcgttgtgatgaactttcgtttagtcctgacaaaattattgttgtgtattttgttgtcacagaaatatcctacagaatttctttttccccttttttgtcattcgtttcatcgtattactttcgttgttttctgtttattcacaattttcctttgataataccttttaaattgtaggaaatg

SEQ ID NO: 100927 - DNA, 73 bp, Heterodera glycines
attgtactattgccatcattgatttgtgtttgcccaaaaccagtaaattgtttacgttttatttttagcaatg

SEQ ID NO: 100928 - DNA, 442 bp, Heterodera glycines
aaaaatttttgaaaaagcgcgcgaaaaaaatggatgggaaaagcaactattaattataataatattcaatcatttaatcccagaaatgattaattgtttgaaataattaaagaaatttgtttgaaaattttcattaatttaatttagcttaacttttggatttttattaaataaaaaacaaaatgaaaatttaattttgtattattttcagttgaaaaacaaattaaaatttgaatttttttttaatttttgatttttttgaatttttaaaaattcccggttggtcccggttcccggtcccgaaaaaaaatcgaggtcccggcccggtcccggcttctcaggtcccggcaagtccccgtccctgttttggcaaaaattcccggtcccgtggcactctagttaatttatcatgatattttaaaatttttaggaaagaaaaatg

SEQ ID NO: 100929 - DNA, 403 bp, Heterodera glycines
ggagttcggcggtgccgataggcgccaccggaaaaaaattaaaattttgagtgagctttgttaacagaatttgtcaaaaaatgacccaatctttggttaatttttgggttttagactgcaaaaaattaaaaaataataattttaagttgaaatattttttattaattaatttcaattaaaataatgtaaagaaattataaaaaagtgttcctttggggaattgaacccaagagagaaaattgaaggtcagagaaagtttagccacacattacatatgcattaagatataaagttatatttagttgtttttgagtaaagttatgggcattttttgttcaaaatattcattttattgttttttatatacaactaagcaaatttggaaaagttttaaataaaaatg

SEQ ID NO: 100930 - DNA, 930 bp, Heterodera glycines
catccagcagactgctgctgcacagccgcacgcgtctgttcactgtatgccctcccacccgccgctgccccgcgtagacagacagtcagacagcgcactactatttgccacctttccctccctctaaccaccacagcacggaaagataaatcttttccctttcaactatttctttcgctttttcttttcctatactatttcttttgccttcttctttttctaaactatttcttttcatctctttttcttttctaatctctcctcacagcaaataacataaatacaaaacgccacattcaaaccatgttacaaacagacaaacactcaactttattatataggattatacataaaaatagattatacaacaagtgaatctttgaatttaataatcttaaataataaaataattattaaaatggtaactaattgatttttttatttgtttaaaaggcaaacaaaatgataaaaatttcattttaatattttttttacaaaaactacaattaattgctaggaatatttgtaggaattttacatttatttgttgctcaaaaatagttatttttaaaaatatagaaaaaatgaaaatgccaaatctctcaaaattattttgtgttttatttgttttttcaacatttattgaaaagacaattggtacccccaaaaaaggaactgcttctccactggaaaagcagagcaaaaaggcgatgaaccaaaactgggaaaagaagacaaaaaattggtgaacaacaaaaaagaattgctaaaaaaagaggtgaattaaaaatatattttaattgaaattgaaatttaattttaatatttttgattgaaaaattgcaaatgcaaatgggccaacagttgaacacaattttggaagaaaaaattcctacttttgtacttgaagtgaattaaattgccgaaatg

SEQ ID NO: 100931 - DNA, 720 bp, Heterodera glycines
ttgagtttttttttggatcgacctagcacccaaaaaggaagcgaaaagtgacggaagagaacacaaaagtgaaagtgatcagagaattttataaatgataaattgaaaagaacgctttaaaagcgaaacagaaacaaaagttcaaagaatggaggagaaattgaaaatttagggatatatttgatttggataaattttaaaataaccgaattttgcaaaatttctgatatttttgacctattttcaaatattcaattttcacgtgaaggttttcagtttttggcacatttatttgtgcctttatatacttcgtggtgaacaaaaattttcgttttcatacttttcgttcataattagtggcttaatgccgggatatttaatgccattaattgacagctgctgaactgcagtgccatgataagcactaaattatgcggttttaattattttttgcataattattttttacccaaaaaatgattcaccaaaattcaaaagaatttaactgttaactgcccagcccaacaaattattctgtgaatcattctgagaaaccacacaaaaattgtcactgctgttaaaccaatccaaatgcttttggttaaccataattttaagccatttaatccaatcattctcattttaactgtggtaaattgtaaaaatatttaattaatttatttatttattttttaatacagcatacactgaaaaaaaatg

SEQ ID NO: 100932 - DNA, 1003 bp, Heterodera glycines
tttatgatgtttaaaaaaatgaggatttttcattccaaatgaggattttttgaggtattttagttgcaaatgaggattttttatggctgaaatgaagattttcaaaattttgagatcgcagctctgggctaacataatttaaaaaaaattattttatttctaataaaattagaaaacaaccaaaaactcgaattcatggtaaagtctgccatgtcaccaaatatgatgaaaaacggagaaaaagacgaagggcaaaaaatcaaaataattttaaatgttatcggacggtttgcttgctttaatgaattgtcaatttgctctttcagtttttaagccaattgctgaaatattgggtgactaattttcctctgtcaataaagctaatagcaacattccaattttttgtcgaaaaagtggtggctgtctgtgttattgtcgaaaattggagagaaaaagtggcggcggccgtctcgtgactcaatgccgactaatggaaaaaggcagtggctgcccataaaaagtatggcaaactttttgactcacgaaagcataaaacctttattttggcaaaaaaacataatttgatacataaaaaatgattggacgcataaactgaagtagagccgaagttttttcaatacatgttactgctcctaataaactaaaagactgagtttttcatttcaattctgtttcggctatcagggcttgaaaaaacaagttggaatccgattttgtgcataggcgcaaatgtccggggcgcaaatgttcggagcgcaaaggcctgctggacatgaataaagtaaagcatttctgaacgctttcgccttaccactcacagtcactgccgctccaatgccgtctcctgcctcctctctctctctcctttggccatctcgccgctctctcattgcttatttcactcgagcccccctcttcccccttctggtcagaggaccgtccctttgtgcgatagtgccataaaataaggtgcgccgaaatg

SEQ ID NO: 100933 - DNA, 453 bp, Heterodera glycines
atttgattcatttgttacaaagtgtttatgttgagaaaatgtgtaagaaaatgccaaaatactggtcatgtttaattgtaatattattccatgttatatgtttttttatgtatgttgtagatcggacttttattgtatatatatacataattttacgcatattcccattttcgaaaatgttaaatatttgttaggaaagcatcgaaattttttggaaaaaaagaaagaaaaaaattaccatagaaccgaatttagcgatgggagcaacggtatttcgagcagttataaaaattccctgaacactttgttaaatttgtaagttaaaatttaatattttattaggaaaattaacagcctttttttgtaaaagaaaaatatttccaattcgctgaaaaaattaaattaaaaaaaaaattatgtatctatttcagttctcgtcatgtctcacaaatg

SEQ ID NO: 100934 - DNA, 366 bp, Heterodera glycines
attttatgatgctaccacaataatgtcacgcttaaaaaaaccaggcacgctttcattctttctcactttcacaaccaatccgcgttggcgtgaaatttctcgtaatttcctccataaaggtcagaaaactgtagatcgacccgatttaatatgtcgtatatatgaggataaacttcgccatttgcattatttgattgacaaaaaaaatattttgggtaaaatgattggacaagaatgtcgtgagttccaaaagaaatacggcggtccacatgcccatcgtgtttatcacacaagtttgcttgccatcccagagaatgttgataatataatatgggcgcatatacctgaagaactcagcgaaaaatg

SEQ ID NO: 100935 - DNA, 313 bp, Heterodera glycines
catacacacaccatcccaaaaaacgagatgtgtaccaataaatagagaatgccagagaaaaacattatctttttttctctaattttttgtctccttttggcgtactatctaatattttcattattaggaaaaacaacattcacttcgtgatgtttaactttttttctggatgttaaatctataccaaattttgcatatcgatagagaaaaaaatttggaacaaaatgtaagggtttttaagagcaaaaaaagggttaactaaaaagttataacggcttttcttttaaaattcttattttttaaattttagatg

SEQ ID NO: 100936 - DNA, 1003 bp, Heterodera glycines
actcaagttttctctgcctctgtatctattttcattttctttaaatcagccttcaaaaatacctaccccgaaaatgagcatttttacttaatcaactctagctcctaattaacttttccatttctattgatcttttgcctgaaaaatggcaactcattattgataataaggggattatttcgaatcatgattgtgttttgttcaattaaaaaaataataaaatctcgaaaataatttcgagggtcaaaacttagttgacaccctaagtaaaaatgacgaaaagtagcaaaaaaaaagagctaaagtgataaactgtttaaatagtgtcaaaaatagttgcaaaacaacaccatttgcgtcattattttggtggtcgataaatccataattataatatacaatgacaattaatggacttaaaataaattccggctaaaaatgtttttttttaggtttttttcatttacttgagatgagtatcgttttttcaaatgactctaaattctaacaacattatttcattttttactcttcctttaggtgaatgtcactctcacagatggaatcagctcgtacattgtcacagtgtttgagtgaaatggcgcgacacgcgaacaatgaaacggaaccacaacgaaatgtcattaaaaggaaaaccagctgttcgtctggtgatctacaacagaatcagccaagctttgcgtcagaacaaatggatgacaatgacacggcctaacacaactttcatggatcatttgatctattgttaattcgttccttctccgttgcgaatttgagcaattcgaatttctaatctaatttgaacaaaaaatcattaatcggaaattcaaatttcttcacttttacactagcgccaaagattttccgatgaatgaccgtattccctccatttccaatttgtttattgtttgtgatttgtttaaacatgcagtcaatatttaaaattaatgcatatttttacagattcatttcattttacatg

SEQ ID NO: 100937 - DNA, 99 bp, Heterodera glycines
tccgcctcagcaacagaaaacgaagaaaggcactctgtcgcgaggcgaaaatgccgacggagacgacgaaaacggaggaggagggggaaggcaccaatg

SEQ ID NO: 100938 - DNA, 568 bp, Heterodera glycines
agaagacttaaaaggggaggtgttcgggtggtaacacctaaggaccaaaaggaagacattttttgttcttttgttattttcttttgatgtctcactctctctctgttccatagtctctaatcgctgtctctgttcttctcgtactctgacctattgattaaatgtccatccttccccatgatgcattcattcatggtctgattatatttgttgttctctcttctccaaatattgtgcttctccgtccaatttaatttatttatttgttatttaattttcttcaaataaatttgtttgttaaattgtttttgcttcggtgtcaagaccgaacattggcgacgcccgtgattaaccaaactgtggactgccgacaattctgatctgtcgatcatacgattttgaaatcagagatattttgcgctgctgtcttagtaccttggcgatactaattcagctcatccacgcgcacccacttgtttagcatcttggcgctgttaaacaataagtggtgaacgacaatttcggcacttcaaaaaccccgaacagtgtggtttgatcattcacaatg

SEQ ID NO: 100939 - DNA, 337 bp, Heterodera glycines
gggaggagagagtttaagagagagtggaggagaggggaagagagggcgccgagccaaatttggaattcattcatccactcatttaacctttgatcaggcgctttgactgggctgcccatcggaggaatacaacaacaacaaaaacaacggtggaggtgatcaaaaaacaataggccaaattaaaagagaattaaaaaggtgctcaacagcagcagcagcagccgaattttggcggaatgggcgcaatgaatggggcgagcggagcggcgcaaagttgacttgacacccacattttttggcatttcaaacaatttaaaaatgagctaaccaaggaatg

SEQ ID NO: 100940 - DNA, 205 bp, Heterodera glycines
ttcaaccttgatttgtgtgaagcctttgtctcagctaacattcctttccacaaattggagaatgaaaaatttaaaatttttttggaaaaatattgtaagcgtgaaatgccccatcgaaccactcttcaaaaaaattacttgcggttaacttgtgaccaggtcactccaaaaacaaaccaataacaaaaattaattttagacaatg

SEQ ID NO: 100941 - DNA, 262 bp, Heterodera glycines
cctgaaaagtgaaaaaacacggaaatagaatgggatttccacgaaataggaaaatgtacaaaaagaaagtttgggaacaattttaggtaaaagcaaaaaaatgaattcttcaaaaatctaaacattccgtaaaatgcattcttacgccaaatgacaagaacagctcccacctcaacaaattcagtaaaggacaaattcgaattgaccccctcgcccctctctttttgagctgaccgtcgtttcgcccattgtggcgaccatg

SEQ ID NO: 100942 - DNA, 568 bp, Heterodera glycines
ttattaagaaaaaacttcaaatttcgacttccttcaattttcatgtataacttttttggtaattgtctaatcccgaagcaataccttacaaaaagcttctaaacgtgttaatatttcgaatgaatgcactaaaatatgctttaaaaattaaccaaaatgtcttttaaccctcaaaaaaatgccaaaattgtgtaaaaatacagaattgactttaaaaacatcaaaacaatggctaaggagcgtttttatataattgcaaaaaattttgattttctaaatttatatatgaaatttcgagtttttaaaacttttataatatgctaaaacaaatttacatttttcttatatcaacaattttttttcaaaagttctaaaaattcaaaatattttccgattttcaagggtatatttttatccaaaaaagtcgatctttgggggtgtatttttcactttttttttgcatttttcttgtgaaaatttaccaaaataggccaaaatatggattaaaaacgcaaaatggcaaaatatttcaaatttttattttaagctcctttcttcatagcatatg

SEQ ID NO: 100943 - DNA, 360 bp, Heterodera glycines
  unsure (1)..(360): unsure at all n locations
aaattcatggcattcatattggttcgatctgtcatgaaaatgaaatgaaaacatgaacttgcttgtatccaagcaaacattnttcttcaattttccacccattttcaacaattttgggtctcaggcctcccttcaaaaaaaaaaaatttttttttacccttgtccctcttcccccaaaaatttgtttcccgtccctcgtccagggcttttggcaaggagtgcgccaagtggaacccgtgctccgccgtcgcatttgagtacgacccggacaacgcgttgcgccacacggtgttggccaagccggaggagtggccccggtccgccttctccgacccggccgagtatgaaggggacaaaatg

SEQ ID NO: 100944 - DNA, 1003 bp, Heterodera glycines
atctatatttttaatctgtttttacagtagtaaagtattgatgataacagtacagaaaacgtgttttctaagcaccttttcggtttgagcgtattttgcagttatttacaatttttacaattttcaatcactatttcccgatttttagcaaataataatctgttcattaatcaccgccgattatttttgcccttttttacaatggtaaataattatttctgtgcaaatctgtttcgcaaccgcgaccggagtttttgaatacttatattttatttgtcgaatatatggttttatccaataaattagttaatattctttaaatttgcggtatatttttaccgtagtacttgatgagaaaaaacacaaaaaaacacattttctaaggactattttcggtttgagcgatttttagcagttattttcggctatttttacaattttttaaccacaatttctcgattttttagcagataataatccgttcattaatcacacagctaattacttttcccttttttaacaatggtacataattatttccatgcgactcccgcgaccagaatgtttaggttttatttgggattaaattactgtaataatatattttcattcggatacgtaattttttatccttaaatcgtattttaaatagaatttcttcggaaattgaaagtattatttaaaatatctttgatcaattattttttttcgtttatgtttataaaattcgttgttcgtccattctttatctacgattagatcgcttcggttggttcgcacatttcttttttcgtgttattttaaaatcgttaatttgagttgtctttcttattcctgcacggctctatcattattttaccagtattaatatttttcataaaattcaaatttaatttaaaaatttgtaccccttgtttatacttagaatatgtattttatttgaccttttaaatttttgacttatttttcatatcgttttttacaaataccttttttacaaatg

SEQ ID NO: 100945 - DNA, 117 bp, Heterodera glycines
ttattcaagttgaaaatttattttagggaattccatttcgaccaattccactacatcaaattcaaaaccacccacctcgtcaccccgatttggcggatgcttttgtggctccaaatg

SEQ ID NO: 100946 - DNA, 92 bp, Heterodera glycines
ctcaaagtttggcttgggtgtacccggtcctggggttcgtttaattgtaagtataaagaatagtcacagtgaaaacaaaacaaaaaaaaatg

SEQ ID NO: 100947 - DNA, 164 bp, Heterodera glycines
ttttttgccatttttattttcagcgttttgtcctgctgaccacaggcgacttttttctttcattctgcggcctttcattcccgaagcccaacggtggctttcgctgttgatgaactgagtcggccaaaaggcgcgaagcagtgcaagcgaagtgagcgaaaatg

SEQ ID NO: 100948 - DNA, 1003 bp, Heterodera glycines
gacaaaaaaagcaattaaaaggcaaaaggaagtgaaatatgccaaaggcgactcggtctttgtacgattcggtgccaattcctaaataaaagcgactgctctttccatgcttatttccctcacatcaaaggaaaggataggaaaagcaaagaatggacaatcatcggctgctcacccaccgaaggcacttacgcacttattagcattgctttttgtccctttactactaaaattcgccctttccctccaatggacgccttttcccccgcgtaattcacaaccaattagcgggcaagggaacctccgatggccgaccaacggatgcgcaaattgcgcaattcccgccccctcccccgcccaattgagtcccctggggcatcgcccgcacagacgcttaaggagcaaattggccaacagctgattgaggaagaaaccaagccaatgccaaggaatagctgtttttagatggagaaacaatgctttaggggagggaatttaatttaaatggaatcaaaatatttgaggaacaaatttaaaatagaaatggtgaaaagttgatgggaaatttctacataaaaatagaaatgtccaaaaaggctaaaatgcattttgagttcttaaaaatttatttaaggaggcgtgagatttgttcacaaccaatttaacgtttttgtattcagtggaatttactaaagaaaaaaaaagaaagcccttttaaaccaaatggccacttttattcggagttttagatttttggtaattgccaagtttaacatcggattggtaaaatatggaattgcaaataatttttattttgataaaatgagaaaaacaattgaaaatttacgaatgcaaaaaaactaaagcccgttttgaacaaattggccactaaagtcgcgcatcacagtcggtcagttcgttgtcagtctaaaagtcaaatcccttttttccattcactctcattctctcccccccccttttttaccccaacgcctccaaaatg

SEQ ID NO: 100949 - DNA, 721 bp, Heterodera glycines
ttcttaacaattacgaaggaccaaagtccaactccaattctcgtaattgtccccaattaattgcccaaaaacttatgttctctaatttcatcatttgtacatctttctaacttatttttgtccatttctttaatttaatgtgtgttggtccccaacattaatttctgcctttcgccaatcggctttccacttggcccggcgatcgccactcctttcatcacttttggctcttttgttcagtactcagcagacggaggcggggaataatgaggccaacaaatgagagagagagagagagagagagagggaacagaaagtgaacgaacgatttgtgagaatttaatgaaaagaaatggtcgaaatgttgtgaactgtgaagtgactgttgggacagggaaaacgggctgaaggggcagtccattttccttttctttcaaactttattcatttttgaacaaagttcattttcattttccacttttctcaaaaatttatattcctcatttttgttcgcatttcggttcagagaacgtaaaaaattcttcaattgtcaatgtccaccacttgggaaattagtcaaaactgtcccatcagctgccctgagtcttaccattgctttgaacccactgagtttaccgcgcctcacctctgcttgccgccaggcgtaactcccaattcgtttcggcactacatttcatttcgtgaggaaaatgccgtgatg

SEQ ID NO: 100950 - DNA, 443 bp, Heterodera glycines
ttttctgatcatacagaactcgcaaatttgggtcagaaagtgacaaactgaaaaaaaaccatagttttttggttccgatcaaatccaacaccacgtaaatgtttggttctgatcattctctgatcaaataaattagccaatcaaattttgttcttattagataataaatttattgcttctgaaaactttctgatcagtgaaatcccaaaattttttttactctgatcactttttgatcagaataaacttccaagctgatccgagaaccattacattcccaatttatagctccaatcattttataattagcaatcctccatcgatcagagaaccccccccccccaattccccactttacttttttaaaattctcatcatttttctgatcactttttcccaaccattttctgatcactgttttgccgcctttccctttgaagatg

SEQ ID NO: 100951 - DNA, 80 bp, Heterodera glycines
acgaagcatattaaagtttatttcaatttatttgtaaactttttttaaatagataaaagacaataattttcagtttaatg

SEQ ID NO: 100952 - DNA, 726 bp, Heterodera glycines
tttcaaattttttgtttaattacccaagtttgaggcttttccccggaataaatttttgcttaatcaattctcggcatttgatttggccggtcctcgtccctgcctgcccctgacccccgcaccgtggaattcatttggcccgaccccagagcaagtcgggacaaattggcgctcctgggtggattgctgtgaaccacggactgaaatcgacgaatcccggtgacaaagggggaaaggaaaaagcaaattagagagcctagacaagaccctccaaggcttgtctagtgttcatagtttcgtgtagttacggtcctccgaggcctaacttcacgagggacatagcagacttagtacttaccctccgaggaagtgcttcgtcttagcaaagggtagaggtgtgaaagtgttagtgcacgtagtacttgcccttcgaggaagtacttcgtgcaaaaagggtgttttcgcgcactaggccattgacaaataaggaaaaaaggcaaactaacagtcctccgaggctttagtttagccataaggcaaaaggcaaactaacagtcctccgaggctttagtttagccataaggcaaaaggcaaacaccttgtcctccgaggcaggtgtttagtcacaaaaggtccaggaccaaggccagactgatcccggaaaaagacacaaaacaacaagtgcaccacaacacacacacacgcacaaccaaactgcacgcaatg

SEQ ID NO: 100953 - DNA, 320 bp, Heterodera glycines
tctaaagaaaataaaaaatgtatttgaagaggagaaaagaaatcatttaaaataaatatataatttcacaaattccttacattaaatatcaaaatttttaaatactttgaaatttttgaaatcaattttaatcgtatttaattttatttacgttggtttgaccttacattttgattaattattatttgatttcacatttcactattttaaaattgattctgattaatggattgtgtttgcactcacttttatctcatgggaaaatcagtttacatatttttattttccaataaaacccataatttgtcaatttaaaaatg

SEQ ID NO: 100954 - DNA, 138 bp, Heterodera glycines
  unsure (1)..(138): unsure at all n locations
atattagtgaatttaatatgaatatttatttttanatattaagatttagaagaaaaaataaataaataagttaatgtgataaaaatttnaaaaataaataaaaatgaaagtatataaaagaaatatgttaagtttatg

SEQ ID NO: 100955 - DNA, 63 bp, Heterodera glycines
  unsure (1)..(63): unsure at all n locations
gcagaatttcatgaatttcggtatttttntggctacttatcacatgatctctaatagataatg

SEQ ID NO: 100956 - DNA, 393 bp, Heterodera glycines
acaattcagtcccgtcgtttcagtcccaggctagtcagtaccggagcaattaaatactattttacaaaaataaataataaaattgatttaaaaataatcaaaattaatttattaaaacccagaggaggtaaaataaaaaatcaaataaaattattaaaaacctgataaaaataaatagcctaatatttttaaaaattgttcacggcaaatgccctcaaaaattgaaataattgaagttgcgcttaacagcgctaaaaattctccacctgaatgaattaacatgaaaataaggtcatcaaccgcttcgcaaaaaattgcgcatgtccacattttgccccggtcatttgaaatttaccaaaaaatttgcctttccaaaaactctatcctaaaatg

SEQ ID NO: 100957 - DNA, 165 bp, Heterodera glycines
tttttggtacaaaccagggattgcaagcactcagtggcacaaaaatttttctgaaaagggaaatcagaattccgagtcctaaaaattttctgaaagtcggaattccggtcacaaaaatgtagcaactcggaattccgtgcgaatccatagtataaacaaggaatg

SEQ ID NO: 100958 - DNA, 550 bp, Heterodera glycines
acaggcggcggaatgtcgcgcagaaagcccattcgtattttaggtgtgccatttttaatttttaagtgccgagggggagagggattagcatagcatagctaattgtaagccatcatttgatgctgctctttattttgatggttcggcagaacgcgatgggatttttttgaggacctgaaaaacaaaaaaaaaccaaatgctatgaaagcatatgaatatttttacaattttttgtcgcaacgagcgaataatctcgaaaaggggaaaacgaagattttttgctcttcgaattcttacagatttttttcaaaattataggcgcaaattttcaaaaaatgcaccgttttccttgagaaataaatgtttcccggatctgggcctacttctctatcaccagacttatctttgcccagaccggcgccgggcaatgctaacaataaattagtgtttttttaaattaaaaatgattttgtgaattttgcttttttcaatttgccatcctttcccccctcccctttttagccgctgttccattgccatcccttcgatg

SEQ ID NO: 100959 - DNA, 595 bp, Heterodera glycines
tgtgacagatatatatcctttttaattataacgtgcacgggcttggacaaagttgtcaataaaggctttgatttttcagatttgaaaatttaatttttacaattttagcaaatattggtaaaataaaaaactttttaagttcattgattttctattcaccatattatagctatattgttacattatgttctttaaattatcactttactttttaaaaagtccctgcaaagtaaaaaatgtctaaaaatgtcaatggcttatcattatatcatagaatgtttattttctaataattattaaaccaatcataatataaaaaattatattctcgttgcataaatgaaataaaaaattaagccttggtgatattttaaatatagcgtaacaattcaatgtaaagtaaattatttttattcgaaattattattttaactattattagttgctgacggaagagaagcacacacactttgaggttaaaattactatgtggcaatttttagatatttttaatcatttaatacaatttcttaaatgacatttggaagcgcagtgcaaccaacaccaaacgtggctgacaaggcaagggaaaatg

SEQ ID NO: 100960 - DNA, 53 bp, Heterodera glycines
aaataaattaatcaaattcaagaaagtgctttactaataaattattcataatg

SEQ ID NO: 100961 - DNA, 920 bp, Heterodera glycines
aaatttgcaccaaattattatattttttcctttcaaccattcaattcaaatgatatgtttttgcccctctcaaaagagagagacgacaaaagaccaacgccggagagcaatgatcaggcaaattttggtgaattgtcctagcctaaagcgctaaggcagggactttagggctgattggttaataagctgaacagaaagtgattaatgagaaaatgtaaacgaataattagtggccagtcacaaggtcacacggttggccaacccaaaaataaaaataaatgcaagctaattaagctaattaagaaacaatgtgatgtgcacaaaataaaaaaggatgattaataaatgtgacaaaaaatgtgattaacaaaaggatgactaaaataaaaggggttcagcttaacctagtcagatcattttcttcgactccaatcgtcagcaaaaatcattctaattaaaaattaataataattataaatcacgttttcgcacaaaatcaaatcaaattaaaataaattaaattaattaagcaaatccaaaaacaaacaaattgcactcagcacttattaaagcactttctacaattgtcgacaaatcaagcagtttcaaacagaagtgggccgaacagaagtgtgccgttgtgtcaaacagaagtgtgccgttgtgtcgaacagcagtggccgttgaaaacgttggtgggcgaagacatttgaataattatcaaaataaatacataaaaattgtcaaaactgagtcactcatcagtccctgaatatttggaaagcaaatttaaaaataaagatcaaagcaaagccgaaagggaaaaaaggacaaaagaaagagggttaaaaaggagagaaaaagagactttggaaagtgaaaaagataaagttcacatcggaagaaaaaaacaaaaaatg

SEQ ID NO: 100962 - DNA, 220 bp, Heterodera glycines
cactgccacactcgaagagcaagaacgccaacgcaccctggtcttcattggcctcccggaaagcaatgccatccgcccatcggagcgtgttcaggaagacagggaagccatcacaaaaatactggaccatcttgaagttgaggcccaaccaacggccgtctttcgactcggacgatacgacccgcagcgaacaacaccacgcccgctcaaggtggtcatg

SEQ ID NO: 100963 - DNA, 189 bp, Heterodera glycines
ttctttagtgaaaataagcacttcccagtcaattttaatgggtggagaattaatagaaagttgacaaagttggaaatgggctctttggccaaaatttcgatttttgaggcctcataactttttgggaccttgctatatgctcgtaatattaaaaattcacactagaagtcgacctttctctatccaatg

SEQ ID NO: 100964 - DNA, 53 bp, Heterodera glycines
tttgaatcttgttatttcgattccccacagtgccttcctacgttctgacaatg

SEQ ID NO: 100965 - DNA, 889 bp, Heterodera glycines
tctcaatttctgaatttaattgccaaaatcaagtttcatcaagcatatcccatcgaacatttgatttagagattaatttaaagtttagcaaaatgatttaagataaaatttttaaaatttaaagaactgctggaaagtgatcgaccgaaccctttcaagaaaaacacatttttatgaccaggaaaaacccgtcccagtttagtttctctctctgttcccccccccccccaccttcccacacagttcaagtgtcctaggcatttaataaaatgaatcaatgtgaaagattaattgtgtcactttttttccgctgatcgtttatcattgggttggtaattaggtaggtataattttattcgcaactccatttcccccccccccccccgcctttttttatttgctcccaccacacattcattcatttctcattatttattgccttttaacattttcttcgttgcacatagacatttaagaaaatggtattacacatcattaatgtaagaaattaattcttttgagtcgatgcatcaacatttcttccattcattctccgcgttcagcaggccgtcatcattttagttcaattataatgtgaatgagaatatacatttgtttcaaaatcatttttatccttaaatgctgctattaaggaaaaatattcagacgaaccaacatattcgtttatttttaactgtttttagattcatataaaaataaaaaaggcaatttcgccttatataattaattttctcccaatcaaattcatttcgtctctatgctacataaataaaaccaacacaaagaccaaacgacaaaataaattagaagaaaaaattgctattgcaattcaaaaggacatatattttacaacgacaaagcaaaaatg

SEQ ID NO: 100966 - DNA, 477 bp, Heterodera glycines
ttacagaaaacgtggttcggaattacagtttacttccccaattattttaacacacaaaaatcggataaatttgcgcccatttttaaccaaaatacgtcagcatcaaaaaatcgcgtcagtgaaacagaatttttttgaatttacaagatacggtatcgtatcgtatagtgtgatggtttgaaattaataaacttgaaagcaataataatccaattcgcaaaaaaaaacatttttaattacaaaattgttaattaataattcaaattcattaaagtttttacatcaatggctacagactttattttagaaatacagtatcactcgacccattttacggtagccgcgggggaaaattgggggaaccataaaaaccccaattttttttttttaatttttctatttttttaactttttaccctacaaaattcgttttttcagtgccttcatggtgtgtcgagaggacagcgcaaaaaaatg

SEQ ID NO: 100967 - DNA, 204 bp, Heterodera glycines
actgaaaataattcggcagatgggcaactcgacagaaaaataaataaaatattgttttttcagaagtaaatttttttaatatattgcaagaaaaatattggcaaaatttttatgagtataaatgtgtatatattaataaaatttaataaattatactaaattttactaataaaattgtcacagaaaatatataccaattaaatg

SEQ ID NO: 100968 - DNA, 1003 bp, Heterodera glycines
aaacactttcttttttgtgtttgcgaacaaaagttgggacttttatttgcatatttcgggatttttgtgcatatttgcatatttagggtttttttgcatatttcatgcatattttgacattttttgtacatattttcagattttttgcatattttggaaaatttgttaaaaaaaattcaataaaacggaaacccctaagaatcggccctaaaattcagaaaaatacacccctaagaatcgaccgaaaatttttaaaaacaccactaagcattggaaattttctcaaaaattcttcccccaaatttttttttcatgagaaaatttttgatttaaaaaatgtcaatatttgctaaagagaattttataaaagaaatgtagcagctcattggcaagtgcactatttcaagtttttttgtgcatatttgatccatatttcacgattttatttgcatatttatgcgcatattttggccatttttcgtgcatattttttgcagccctgccaattatcaattatgtagcttttctcatttttttctcgccaaattattggcattttcattttcaccaccggtactcaaacatacgctaatgttttcatataaaaatataaaactgcccttttttctcctctttctcacaaaaagattatgcacatataattttttggtaatttcaaatttttaatgagaaattgctgttttcaatttaccttctctaaaataagcaaattttttgctctctcattttttctaattgttctctctgttttaagttaacaacaaattttttgccttttgtgacacacaaattaattaattggaaaaagggaaaagcgtgctaattgaaccaccaaaatgaatcgacggtcagcaatttcttttgaaaaattacaaattttcattttccttgctattttttcccatgtttcagttggatttgtggtgacgtgtggatggacattctcccatcttttgaccatgcccaactcggactcaaaatg

SEQ ID NO: 100969 - DNA, 1003 bp, Heterodera glycines
  unsure (1)..(1003): unsure at all n locations
aacatataaccatntacaaataaaatcacaaatcaaattcaaagtcgatctttttcatattacaaagtgaaaacaaattaaaaatcctttgcttcttcaattttttactaaacaaaatcaaaaaaacacgtctctttaactatcaaattcttttctctttaacaataacaaattcttttatagaattaacaaattcaataatgaaaaacgcgggaaaaaacgattaaataatgtagaaaagtaaaagcaaaaactttctcacaaacaaaaacgggaatcagaacgctcgttttcctctttctatttattaaatatttgatataataaaagatgggatacaaataaggaagggatgcgagacaaattttctattatctctcgctttcatttcttttctcttatttcttttacttttccacttactctctctttttcctcactccctccctcttccacacacacgcacgcctccaacagactgctgctgcacaacagcacgcgcctgttcactgtctacccctcccacccgccgctgcccgcatcaacagacagtcagacagtgcactatctccctcctccctctacctaaccacaacagcctgggaagagaaatctttttgctttaactatttcttttgcttttttcttttcctatactatttcttttaccttcttctttttcaaaactatttcttttcatctctttttcttttcaatctctcctcacagcaaatacaaaacgccacattcaaaccatgtcacaaacagacaaacactcaactttattatataggattgtgtattctttaagtttgtttaagcaaatattgaatatttttggaattttagtaaattaatttttgtcagtttttagtccatattttggttaatatttggccatttctgagctttttagtccatataatttcgagccctactgatggcactatttagtcatttttaattttattatttgtgaatggcctgctactaatacaccatg

SEQ ID NO: 100970 - DNA, 644 bp, Heterodera glycines
  unsure (1)..(644): unsure at all n locations
tttcctaacataaantttgaacaaaaaantcggaaaatcctaattttaaatttttgttcgagttcgggattagaaattggtcaaaatagatgtcaaattcgtgatcagcgacctttaaaacccccgggaccaaattttcacggttttctatcacaaaaattttttgcaaaacaaaagggtccccctattgtttttgataaaattcgaaatggacctctttttaaatagcgccgtgatgctcgagacccaaaaaacgacagaaaattaaataaagttcgatttttttttgtcgagcagcactttccccccccccccccccccctcgccgtgtgaatgccatgcgattttcttttattgggtaagaagaaaatgttcattggtgcactcattttgtcaattttggcaaattattacgttggctaatcaaaagaaattcgaaaaccaaatgaaaatttcggttgtactgccgcacacacaaagtaaaaaaatgtgccaatgatggcgtgcgaaataaaaatcgcatttgggcctaaatttcagcggattgatcatcgccgaagggcatgttcgaattgcaaatttatgcgttgggaacgtaaaacatgcgtttttttcttttttaaaattgggtgtgcggcagaatg

SEQ ID NO: 100971 - DNA, 168 bp, Heterodera glycines
ttaagtcttggatttgtcaaataattcaagactcaaattaataatcaaaattctcttaaaattttttgaacccaattcaaaaaaggaaaaaaatttgcagtcaaaaaattattcgaatttctccaattttgtttccataatttccgaaagttattcggtatcataatg

SEQ ID NO: 100972 - DNA, 1003 bp, Heterodera glycines
aaaaaaagatatagaaagaatagaaaaagtccagaaatttttcacgagaaaagcctttaaaaaatgcggacttttacatagatcatattcagaaagacttgaaatttgtcagcttatagaattagccaagcgaagaaatattgctgacttaactaccgcttttaaaattatgaagggttttacgagtcttgatgctagtaaactttttactttttctgatcgaccccattcgtaggccattacttttgagaatgcggcgcacaaccacaaaaagtaagaataatttttttaaccgtatagccaagaattggaacaaattaccaattgttccaattcaggcagataaggcaaatcaattcagggcattgctaaaagctatgtatgagttctaagggatttattgacatttgcattgacattcattccattttattttattttactttacatttcatattgttgtattttttgacattattcattttgattttttttatgcgccacataagagcactaatgtgcctgtggtttgctcaataaatatatatatttaatttcgtattaaatgaatttggcaaaagatggatgaaatgtcgcggatgactgtgtataaaagggacggacattcgcattttcatttttggggagtttggcgtattgatgattccaattcaaatttcattccaatttttttgcctctgttttcggctttgaatttcttcttaaggaaaaggtgaaatctagagatccgcctggacctggatccaggcttggatttttcctggatccaggttcaggtccaagccatttttcggcaacctggatttatcctggacctggatttatgtccaggaaatccatgtccagcaggtccaggttttttccaaaataccgatctctagtgaaatctaataaattaatgccttctcattttattttatccatttgttatttaaaaaaaacaatttttaacttttaatttagacacttaaagcgaaaaatg

SEQ ID NO: 100973 - DNA, 210 bp, Heterodera glycines
attcctttgtgtggttaggcgcactgggtcggatcaaagacgtagcatctacatcgttttttgatctcgcggaagatgttgagctggcgaaagaactcgttgaagtaacttttattggttggtgccttaaatgtttcgcacccacagggactccaaaaacaagaccaagaagtgccggattggcttaagctggtggctgaggggaaaatg

SEQ ID NO: 100974 - DNA, 622 bp, Heterodera glycines
ttctcatttttttaccgcaaaattggtaccaacagttgccttcttttgtctggccctatcaaacaatcttacgatatttgaaacgcaaacaaaaaaaattcttgaccaaaaaatggctatctcttttttctcatttttttaccgcaaacttggtaccaacagttgccttctcttgtctggccctatcaaacaatcttacgatatttgaaacgcaaacaaaaaaaattcttgaccaaaaatggttatctcttttttctcatttttttaccgcaaaatttgtaccaacagttgccttctcttgtctggccctatcaaacaatcttacgatatttgaaacgcaaacaaaaaaaattcttgaccaaaaaatggctatctcttttttctcatttttttaccgcaaacttggtaccaacagttgccttctcttgtctggccctatcaaacaatcttacgatatttgaaacgcaaacaaaaaaaattcttgaccaaaaaatggctatctcttttttctcatttttttaccgcaaaattggtaccaacagttgccttcttttgtctggccctatcaaacaatcttacgatatttgaaacgcaaacaaaaaaaattcttgaccaaaaaatg

SEQ ID NO: 100975 - DNA, 289 bp, Heterodera glycines
  unsure (1)..(289): unsure at all n locations
gggataaaggacctgagagancctctaaaagaagcgcccgtagctcagtggttagagcacggcacggattgctggggtcgtgggttcgagtcccaccgggcgagttaccttttatgttctacatcacatcaattagtcaaaattatactgcatcttgttttttctcataactcgtggagcattttttcttcacattatttatctttttctatcaatttaataatttattctgccgatgctgccaaatttatattcctattaatttaatactttaattttgtcagaaatg

SEQ ID NO: 100976 - DNA, 507 bp, Heterodera glycines
caaaatatcattcaaggtactcctatttaacttcggagaaaaggacttcaaggtgtttagagtgacagaaacaataatttcccctataatccctatccaggtgaatgtcggagatagaattgcccagttgatctgcgagttttacacacggcctaagttcatagaggttgacaatttggaagtgacagaacgtggggcaaacggttttgggtcaacaggcggatttggaaatggaaaatgatcgatgaatgaggggtggggggaggagaatgacaatttaatttcataattatcttattttgaataaatcggtttcataaatcaatccaacaagaaaggaatcgtggtgggcaccttcgctttccttcctctcaaatgcgttctttgtcgcatggcattgccaaagagagtaaacaatttcccatcgaccacaaattgaaatatggcattctccttggcgattactaaatggacagcgtaaaataatcaattttatcttaaaaaatg

SEQ ID NO: 100977 - DNA, 244 bp, Heterodera glycines
ttaagcatttcaacatatatagaaatccgaattataatatttgttctcgaaattttataaatagatgcaacttgagaccaaaagtgataagaaacatcgtggccttggaatcgctttcgctacaaaaattcttccacatacgaattcaataagcttctgtgtgttccatatctttttttgtgttcttaattccatgcttaagaaatcaatgtaaaacgaatacatttataggcatttaaaaatg

SEQ ID NO: 100978 - DNA, 344 bp, Heterodera glycines
tcatggcaagttagtggtgattggtgatgacgaaacggtgccaatgccattgttctccgtctcatgaagcatccattcctcgggcagcccgctgttggacatgggccaagcgctgccagacgccccgacaatttgcccgtactgcaacaaaaatcccaaaggttggcatcgctcacaaaaaaggcaaaataattcacaagaattagttaactatttgcccactgcgtaggtatagtaatttaaaatggtttataatgccgcggtcgcgttcatcttcgcctttgtcatctccaggcgacttaatgccaaacaccgacatcacttcagagttcaatccgaccatg

SEQ ID NO: 100979 - DNA, 292 bp, Heterodera glycines
catgtaattggacgaacggagatcgtaattaaataatgaaaaattcggtaaaattaaaacgttgaaaatatcagatcgaatctaaagaaatctttctccgactgaatgtagtatcgaagttccaattaattaatctttgaaattggtattattggagcccttagatattaaaaactgtttttgatatgattgataaatttaaaaataacctcttttcatttcaattttgtagccaaacagtcaattatttttcgtttgattataattataatttaaattttgtaacccaatg

SEQ ID NO: 100980 - DNA, 167 bp, Heterodera glycines
gctggaggatccagccaaaatcaatggaattgcttcgcttggggacgcaatcccaaaaaacaaagccaattattcatttcaaaaaatactatcgctacgaaaaaatgttaaaattttaatacagattaatgcttaaaatagagcagggttaaagttcagcaccaatg

SEQ ID NO: 100981 - DNA, 634 bp, Heterodera glycines
tttctaaatggccattttcggacatttgcggccacagtcaaaattgttctcccatcgaaaatcctttttctcttcaaatttttgccaaaatttactcaatcgagtaattctttttcaaaattgggcttgttcaaaaactcttcagagcttgaaagcttacatcggccagttgatactgtagagagagtagagatctgagatttcctaatactgttcatacttatttcttcatcatttcgtagcgcaaaacattttgttgctcgatctaacacattttccacagtttttctattgttcagttcgatacttatttgaacccagtttcaaatggacgggatgatttttttcctccccttttaatttttctagaaagtttgaatcggcatattagaagagcataaaaattcatttaaattggatggaaaataatttcttatttagtttgtgtggaaaaggttgggccgcaaaagtcgttttggctgggggacgcaattgtcggaccgctaatgtccgagcgcaaatgtcggtccgcaaatgacgtttttggctggggccgcaaatgtcgggctctctctattttgattggcctatttttgaaaatcattccgttttctcttggccagacccggaaatg

SEQ ID NO: 100982 - DNA, 157 bp, Heterodera glycines
aattccaatgcccgcagcaattgaagcggcagaagaagccattgctgctgctgaagagcgaaaaatttcgacaatgagtggtcgaatgaaaacaattcaggtgacaaattggtgagaattacaataaaaataaaattgatcagcccattagacaatg

SEQ ID NO: 100983 - DNA, 1003 bp, Heterodera glycines
cgggattttttgggattaccggtaatgaagaatttgaagttccatcgcgcagggagcccgcaaattctaattcaaagaaatcagagagaagcgaaacagtggtgcagcagagaaaacatagaaaaggggaaaagggcaatatttcctcactttctcttccacatttttaaccccatcaaacaacttataacacttaatgaattttcatatataagtaaaaagcaatgcaacaaatgttcgcgagctcagtgagaatcgtttggtgtgagattcggtaaaaacccaactcgtactgtttttcgacaaaaaaatggtcataacttttgtcaaagtcgaccaaattaaacattcttggtaccattcaatagcccttaatgttctccatctatctgcaaaatacaagaaaattttattgcttttcaaaaaagttatggccaaaaattgtaaaaaaaaaattttcgtccataacttttttcaaactttatcaaattttttgaaacttggtggttagatagagaacattaagggctatcgaatggtaccaagaatatttaatttggtcgactttgacaaaagttatgaccatttatttgtcaaaaaacagtacgagttggggcagtacgagttgggtgtcgtccgattttgtcgtcccttctttaggtgaaatgttcgaggaattgcgaggcgaccccgagtcgagagtggacaccggtaattaattggccagagggggagggggggggtgtcaagactgccttctgatcaattcaatcactccctcccccgaaaggcactctgtcgctggtgattgcggtgggtgtcgcctgtctgctcacttctctgatcactggtcatccctttttttctctgccttcttttcccctttatctctcctttcccctctttctctgctgattaggctgtgtttgtgcctttcgctgctgtggcaatttgtctcccgccgaagagaaatcgctaagtgcgctaattgactcgggcaatg

SEQ ID NO: 100984 - DNA, 61 bp, Heterodera glycines
ggtttatcagctgacaattttcatttattatgacttatttacaatgtttttaggtaacatg

SEQ ID NO: 100985 - DNA, 152 bp, Heterodera glycines
aacatttataggattttagcattgtcgttttacacaattttgtcgttattttcgatatcaatttgaagttttcaaatgttagaattggcaaagttaaaattttgttcattgtcgaaatcggtcactgtcgtaatcagccactgtcggaaatg

SEQ ID NO: 100986 - DNA, 327 bp, Heterodera glycines
atcagcgacctcggaaacccccggcggatacttgttttctgaactttttaaaccaaaaaaagaatttgaaaaaatgttgaccaaaaatgtggatacaaactcctgtagtaccatttttataattagagaacaaagcggaaaacaatgaaaacaaaatttgagaagctcgaaaaacacagaaaaagggaacgcaacagaagaggagaggaggaccaccaaagagaatattttgcaaaatgatgaccatttgccgggcgttttaccttatccccccacccacaaatcaatcgatcaaataatcaattggacggatagaggaaaaggatg

SEQ ID NO: 100987 - DNA, 88 bp, Heterodera glycines
attgttagtccttttgttgaatttttagaaattctatccgtccaatcggcttttggaattttaatgagtaaatcagtaaccgtaaatg

SEQ ID NO: 100988 - DNA, 69 bp, Heterodera glycines
aatgcgatttcggatgaggcggctcagccttcggtatccaactctcgaaggtccctgaccccgacaatg

SEQ ID NO: 100989 - DNA, 889 bp, Heterodera glycines
tttttgctttgtcgttgtaaaatatatgtccttttgaattgcaatagcaattttttcttctaatttattttgtcgtttggtctttgtgttggttttatttatgtagcatagagacgaaatgaatttgattgggagaaaattaattatataaggcgaaattgccttttttatttttatatgaatctaaaaacagttaaaaataaacgaatatgttggttcgtctgaatatttttccttaatagcagcatttaaggataaaaatgattttgaaacaaatgtatattctcattcacattataattgaactaaaatgatgacggcctgctgaacgcggagaatgaatggaagaaatgttgatgcatcgactcaaaagaattaatttcttacattaatgatgtgtaataccattttcttaaatgtctatgtgcaacgaagaaaatgttaaaaggcaataaataatgagaaatgaatgaatgtgtggtgggagcaaataaaaaaaggcgggggggggggggggaaatggagttgcgaataaaattatacctacctaattaccaacccaatgataaacgatcagcggaaaaaaagtgacacaattaatctttcacattgattcattttattaaatgcctaggacacttgaactgtgtgggaaggtgggggggggggggaacagagagagaaactaaactgggacgggtttttcctggtcataaaaatgtgtttttcttgaaagggttcggtcgatcactttccagcagttctttaaattttaaaaattttatcttaaatcattttgctaaactttaaattaatctctaaatcaaatgttcgatgggatatgcttgatgaaacttgattttggcaattaaattcagaaattgagatg

SEQ ID NO: 100990 - DNA, 284 bp, Heterodera glycines
ggtatggaaagaaaaaatagttatttctgggactttttcagaaatcagaattaattctccaatgtggcccaaattttaggcccccagccacagccctttgcttctcccagttttaagtcttggatttgtcaaataaattcaagacttcaaattaataatcaaaaattctcttaaaatttttttgaacccaattcaaaaaaggaaaaaaatttgcagtcaaaaaattattcgaatttctccaattttgtttccataatttccgaaagttattcggtatcataatg

SEQ ID NO: 100991 - DNA, 512 bp, Heterodera glycines
aaaacaattctgtccttaaaatattgatcacaaaggtcgcagcatttgcattttctaaaatgttttccacaattttgaaagtttctccatttttaattataaaaaatcttttttgaaaatttatattgtctttttacaatttttttcccaaatacatactaaatatatctccgatggttccattaactgaaaatttcataattaaaagcatttataaaatggaaatctttgacgaatttattgttgttgacgaaaaagcgatcagccaattaactgttgcccattttaattccagctccaactgtacttttcgtgatgtgacccaatttgccgcactgtaatttcacttttttaaatttgatttacatggtgccgccggggaaaaaattgaatttttttttgcatttttaataaattttttcgaaaattgtgaaattggttctaaaaggcagaaataggtttctagtgccaaatgcctttttaaatcacttacatattttagtaaatttatg

SEQ ID NO: 100992 - DNA, 376 bp, Heterodera glycines
ttgtcgatattcgattttatagagaatgtttttaattgttcttaattggactatcactagtcttatatattctatatattctatataaattgtctaaaaataattatttcatatttataaaacagtacctaatattattcaagttataccaaagcgaaacattgttattacatttaaaattcaaggatatgcatggttgtgaaaatattcattcgccttaattattcaatgacgaaaagaccctgtcccgaaaccgaatattctccaatttcccaaaaaacggtcttcaccagttaattgactctcaaatgacttttgtcaagactacagtggagcattgaaacaactccaaacctctttcacctctaaccaaatg

SEQ ID NO: 100993 - DNA, 1003 bp, Heterodera glycines
cttacaagaaatcgtctcgaaaaatattctaaaaaagccagttacggatcaaaattacggaaaaatccgtaatccgtaactccaagaaggccgtaatttccataatacgtaatccgtaattacgtccagccctgctgggaaggaaatcctgagcttataaggaggggccccaggagtgtcgggaggggcggttcttccatctgattggctgatcccttgggcgccttacataagtgaccagcgagattgatcaacgtgtaagtgatcgattagactgatcagcgagtgcgtgatcaaagcccgttttacgttaggaacagcggcacggatcttcgtaaagaatgaaatggacggaatgttgcgcttttgctgaaatttatcaattaatggaaaaaagcattgcgtttattttatttcgttcgttatttaaaaagacttttgaatattatttaataaatattctaattgcgataaatgacgtggaaattgctcatagaaatgggagattattttatgttttgaaaagggcggcgacaaacaaaagacaaaaggggggcaattggggggggggggggggacgaaagtcgagcaaaaccgggaaaagaaaaacgaatattatcgggcgggggggcggcattttctccgataagggaaccgagtttaagaacagattgctgaaggacttttttgagcagcgagaaattgagaagcatgaacccgtgcattcatcggtcaaggcgtcggtcgccgagcgggccatccgcaatgtaaaacagcggctgtaccggtattttgcggaaacggagacgctgaactgggtggatgcagcacagaaaattgtggacgggattaaccgctccccgtcacgtgcccacggaatgcgtccgattgatgtgggcttttccaatgctcagagggtgtggaagcgattatatgatgatggacaccgtgcgccccaaaacgacgaccgacacgcttccgcaaagacgattttgtgcgcatg

SEQ ID NO: 100994 - DNA, 55 bp, Heterodera glycines
tgcccattttatttttcaaataatttttatattttatagatatcccagaaaaatg

SEQ ID NO: 100995 - DNA, 55 bp, Heterodera glycines; identical to SEQ ID NO: 99576

SEQ ID NO: 100996 - DNA, 876 bp, Heterodera glycines
gccagcgatgagaacgacgacggtgcacgacctcacccttcacgatcagtcccccctactgcttgctgttgtttgtgtgaagtccgttccccatattttgtacatattccatgtgatcagcgaccttcctaatgtgatcaaaatatgtatgtatgtgtaatatccattaatgtgctgcttcatattcgttatttgtgtgtttgtacagtgtttgtattcattgttcaatgtgtgtaataaacctgataataaatgtgcaaaaattgaatacaggcaaccacaatatagggtcggggtcattttggcgcaggccattttggcgcagacaagtttaaagattcataacttttttttaattcgaccaaataaaataatgttgatattaatcaataggtctaaatgttctttattagcctgcaaaatttcaaaaaattatattaggttttaaaaaagatatggcgcgctgcgccaaaatggccaggaaaatgcaattttttgagttcttttggccataacttttttgtttctcagctaaattttttgaaactttgcaggttaataggcagggaccagagcgtttgggcccccgtttttgggcccccgcgtttgggcccccgtttttgggccccggggtcgtttgggcccccgtttttgggccccggggtcgtttgggccccaacccaaaaatcggaaaatgtgctttttttaaaattaagattctaaaaactaagcctgagggatgcctcgccacttggcataagttaggtttaattaacactcgctcattttttacaattttacttattccaaatcctattattttttaatagttaaccaatttgatgtacattctgatttggacatttttcagaaatg

SEQ ID NO: 100997 - DNA, 130 bp, Heterodera glycines
ggggggggggggtggcaacggcgggtggggggaaaatgaaaggtgcaccatttctaacactgataataattttaattaaaaaatttcaatgattcccattttttttaaaacaggcgctctttcgtcaatg

SEQ ID NO: 100998 - DNA, 85 bp, Heterodera glycines
cctaaagaaaaatcgaaatgaaaaacgcatcccatataagtaagtccttcacaagggttcccgggcaaatgatgacacgaaaatg

SEQ ID NO: 100999 - DNA, 137 bp, Heterodera glycines
aaaaatttccgtaaaattttatatttagattctctggcctttgctcatcggaaggggcggtgtccgttgaaggaggggaaatttttggggtaaaataaaaatttttgaaactctttaaattggttttaagggagatg

SEQ ID NO: 101000 - DNA, 631 bp, Heterodera glycines
atgacggcggatacacacatctaattaagccataattcattgatggaagaaatgtgtcgtcaccaccccgaaatgatgggggattaattaataattgattcggagatgttgcaaaaacgtgactatttcatttcttatcaattaatcaaatccaataaaacaataaggcagcagcttgctatttccatcatatttcaatttaatttcttcgtttttcaaaaaaaaaaaacaatgcaattcaatgtggcaaaaaaccatgtcttcgtgagaacttttggattgccattaatacataatatgtatataaaacttgtttggctaattaataattgggcagcaaaattcaatgtgccttttttatgggtagtgacgaattgtggcggctgattaatcccccccccccgttgacccgcttgctgatcagatattgcaagggcttagccagcaaaagggggggggggggaggcagaaggggcaaaagccctccaaagccaagggtctgttgctggctacgcccttgtcaaattgaatgttttatgcaataattcaaacaaatgaaatgaatggacgacgaagacaaacgaataaaaaaagatggtacatttctttaaattaaaaaaatcaaataatg

SEQ ID NO: 101001 - DNA, 327 bp, Heterodera glycines
cctgcaaaatttggagagattatatcgattttagtgcgctaggttcgatgaaactttttaaaatataagcctaaactttttggcctgtttaaaaaggaattaaaaatttttaaaatatttattcatctcccttttgatagaaaaagcatcagagagccttatttaacttttaattaacatttggtgcgtttcagagcactttctgaaaaaatacttatgaattaattttgcaaaaaataaataagtaatgaaaaagtcagaatttcgaaaaattttaaaaacaacaagcgttggcattttttcaggttaagttagtcctttacaatg

SEQ ID NO: 101002 - DNA, 647 bp, Heterodera glycines
gaatttacatgaattttgttagaactttgccaaatttttcagaaattttcctcttttagaagaaaataaggcattacccacaaatcaaaatatttttagaaataagaacataaagaaaccctgtattaatcaaaaaaaaagttaaaggaaaactttagccgaagtcgaactcatgacaaaagtactgttattgttgaagcactatccaccaatccacaaataaaataaaaaacacaagtaaaatttactttatttcaaaaaaatttctcaaaatggttaaaaaattcaaaattgtataaattttttgccttatatcccacgaatatgccattcttaggggtgtatttcactcccgcgcccccgcgggggtgaaggtcatgggggcgggggttgtggaggtctgagtcgcgggggcgggggtgaggccaaaaacctgtcccgcccccggcgggggcgggaacccaagtttcatccataatagcacttttgaattttgtccatacataacatatttattttaaatatttcttaatgaatttggcttttaatttaaatttcaaaatagaagatttcggtttcgattcgcgtaaattgttcatggatttaaccgaaagaaaagttgaaagcggaggcatggactcaatatg

SEQ ID NO: 101003 - DNA, 174 bp, Heterodera glycines
tcttttctatggtttctctgagaattaagtcaaacggttggcttaagaattgtgtacgtattattttttgtatttggccattccatccgcacaatcacaaaatacttagactggataaaattttaattatttttgattataaattttaaattgttttcttcatttcagaaaatg

SEQ ID NO: 101004 - DNA, 769 bp, Heterodera glycines
tctgaagggaaatatttgatcagggagggcactggagcagggcaaattttgaaatagcaaaacaaaaagcttttggaattgttggccagaaaagtttaaaaaaaatcatcgagtttcccgctttttttctggtgtcgggcctaccatgaatatgcaccgggtttgaacaaactgattctctaaaaatcattttcgaattaaaccaattaaaatgctcattctttttcaaaaatttgtagaattttaacaggacatccattttttaatctcatcgtagttgcttaaaagcatcatttgcaaagaaaagcataacgatgccataagacagaattccgatgcaaaaaattggtcaatttactgttgcatgcatcgcgggtggtcgggcccgtaagtgaggtaaatgctggcatggtttaaggcggtaacgaagaccagcgccgtcgaaagctgatacaaccaattcgaccggacgcgacgcaaatggcagttcaaattgatgcgaaacttttgaaaagcactgagtctgttgtaaatttttgttgcttccgtcattaaaaaaaagataaattggaaaacatttaggctaaaggaaatgatttaactaatttttttaataacgaaaaaaacagattctctggacatagtcaatatttgaattttactcaacacaatgcctcttaaaaactgcaaaataactttttaatattttttaataaaaaatctgtttaagcactttttcttagttttatcattgccgctttattaaatg

SEQ ID NO: 101005 - DNA, 222 bp, Heterodera glycines
ccttaaaaggggggggggagaaaatagaatgccaaaataatgaaaaaggaatgccaaaaaggaatgccaatggaagcgccaaattcaaaaaagataggagtgccaaatggaaaaatgccaaaaaaatcgcatgccaaagtggatttgcaaaatcatatgggaattaatcgttggctaacagaaaaattaaatttaataattgtttaatattttagaaaaatg

SEQ ID NO: 101006 - DNA, 87 bp, Heterodera glycines
gtagtgtaattgtaaatttgacgctaatttagcaaatttgtttttcgcttaggactgatcactccgtggaattacccactaatgatg

SEQ ID NO: 101007 - DNA, 91 bp, Heterodera glycines
agatgaattcaaagaagtggaaaagccaccaatcgctgagattcatgagcaaccaattcaagcagtgcacagcttcatcgcatcggtcatg

SEQ ID NO: 101008 - DNA, 110 bp, Heterodera glycines
accaattacaaaaatgtgtagcaaaattaatgcttatttcttatagaatgccaaaaattttaaactttttttcataaaattgttattttttaagatcatgtgccaaaatg

SEQ ID NO: 101009 - DNA, 109 bp, Heterodera glycines
cctgaaataggtaaaaaccaattgcttattacccatttgatctgtccacggggatcgcggggattcgtcgcaacaaaaattgtcccaattcattggttttgatcacatg

SEQ ID NO: 101010 - DNA, 117 bp, Heterodera glycines
ttcacctatggcattttgttgtccattgcttttttaaattttgcggtgatttgtcccaccaaaattttacacattaacctgaaaagcattctgatcactcaaactggtgctgagatg

SEQ ID NO: 101011 - DNA, 451 bp, Heterodera glycines
attaaaaaatatttttataaatatggattatcacaatccgtcataataatttccacttttttaaattttttatatattatttaaaataagagaatttttaagagaaaatacaaaaattatgagatgtatccattttttaaattaatttccgacttgaaaccctgactgtaatcttttttttcgtttaattctttttaaattaaaattattagttgtagatacttttgcctctgtgggtcttttgtcgtatgtccttttgtccgtggatcctttgtgcatgcaccatttgagccgtaaagccacaaaaataaattttaagttcaatcaaagggcttgcaaacaaaatgtttcaaactatcatttgaaaagaaaataatataatatttttttgtgtggtaaaataatttttatataaaaaataataataattttgttaatttagttcacaatg

SEQ ID NO: 101012 - DNA, 295 bp, Heterodera glycines
  unsure (1)..(295): unsure at all n locations
ttttctttagaccatacccgaaaaacttttgatagagattttggatccaatancaatgattgtcaaagaaaatagtaaaatccaaacatgcactgagggacaatntaaaacaattttactgaacaataagctcataaaaataaaccaattaacaggcaaatatacttttattggagaaccaactatttataacatcaatcaaaaaatatggggtgaggaaaatttacctatttttccggtacaaattttcaaacaattaattttaactaatttaacaaacaaacaaattgacatg

SEQ ID NO: 101013 - DNA, 116 bp, Heterodera glycines
tttttataacagagaagaggcaaagtgacattggccattgatgtcacagtgaaagatgataaaaaggagaaatcgcatttctcgatcccgacaaatccaacggaataatttcgatg

SEQ ID NO: 101014 - DNA, 953 bp, Heterodera glycines
tttctaaaaattgatgggttttcatacccaaaaaaaatccatgtttgttttagaacccagacttttaaaaatgccgggactgggaattaggctgggatataattaccgggattcaaattccaattttttggaagtcttggtctcttggttcatattttagggtcgggatccagtctgggctctagctggtttccgaaaatggtgaattatcgccaccttacacatcggctcttccaatggactggtgcattcgtcctctaaatccaacaaatttgcagattgagacgtgccaccagccgacttcaagtcaacccacccccccccccccctccccctcccatacacacaaacagtgtgcccgggggtggaaaacactaaatgatggtgatggtgatgataatttagcttttcatttgagcatgaacatcgttttgcttgttatagaagggatgaatgaagtcattttttcggcacgcccccggggaggggagggtgtgtgttgtgtaattttaaataaacccattgttgttgcccaatttatattttcattcctcataaaaaacttcttaggaaatttcttattaagaaaatttcaagaaaaacaaattttttaaaaggcttttcagcgattttttcgaaatttcatgatgaactactaagttttttcaaaaattttccaaaaaatcgctgaaatttttttataaaactttttttcttgaaattttctgactaaaaaatttcctaagaatttttttatgaaaaatttctaggtttgaaaattaaaaaaaaaaaatttttcgggggcgggggggaaacgacgggggggggaatgaagtgcacccgtccaatattccggccccctaccatgggttggtgctttctttcagaagttcatcaatttattaactatacaaatattgtttcaaattttcagctacatagatttgtgcatg

SEQ ID NO: 101015 - DNA, 521 bp, Heterodera glycines
aacttggccccactccttttgtaaaattgctgcctcgaaatttgtggtcaaacttttgctgcaatcagcaataaaagatattagcggcccaattttttcgacaccaatcaaaatataaacctcaaaatttttgtccaattcaatataagcgaattttatgttttttttttgataagcggattcaaattacaatactttctcgaatccattttaactggatctaccaagtataaaaactgaaaaaaggaaagtataattgtggagaaatgtcagatcgatcagatcaaaaatctattgtcttgaacaaactcagtttttgaaaacaatactaagttgaaaaagtccggcgtaatttgaagaaaaaaaagtatttttaatgttctattttgattggggtagaaaaaatcgggccgtcaatgctcaaaaatggccttagaaatggccgcaaatgtgaagcaaaagtcggaccgcaaaattagtgacacgataaaattaagggaaccaaaaggcgcgaacgaatg

SEQ ID NO: 101016 - DNA, 209 bp, Heterodera glycines
  unsure (1)..(209): unsure at all n locations
ctagtgggagaattggcactgatcagngaaagtgatcaatggaaggactgaatgatcagattgaggactgatcagggagaggactgatcaacgggggactgattactcgagggacagatcagtgggggaaaactcaggtggtaagagtgatcaggcagagacactttgcagatggctccgaagtgcctgcggtgcntccgtcgggaatg

SEQ ID NO: 101017 - DNA, 78 bp, Heterodera glycines
aattggtttgagatttattgcttgaagaaaattgctgtggtcaatgatgatttggtcaaaagaattcggaacacaatg

SEQ ID NO: 101018 - DNA, 689 bp, Heterodera glycines
ttggacggagagggaaatggcacgcgaaaggccgtcaatttgggaggcaaacgaatcggcaaaccatggcataatcgcaataaaaaaaatttatattagaaattaatttaaataaatttagtaataaaaaaggaaaatccaattttatgatggattgtcctaaaagatattcatatgagaatggagtacaaattgatggaaaagaaaaatttctttggctgataaatcaatgcataaatttcgctgataaaataatgagcaaaaagtcaggtaatctaatctgaataaatggtgataaagtaataatgcaaaattttaatcatatggtaaggagagatccaccaattaaccgaactaaaggaagtcgaatttttgggaaaaacccgaaaagtcgaaaaaccggcctaaccgaacaaggaggactttagtttaaaaacaaacagttaaagtgcgataaataattttgtttgttttttgttttaatgttattacaaacaaaaaaatattttcgccatatgcaaatttcggcgtgttgtccatgtttttctgtgcaattaatacgattatttttgtttttttattattttcggcgcatgttcaatacataattctttcaaagtgtttgtttttatagaaataaaaatagtaataaatttgcttgaaatatattttattttagacaccaaatg

SEQ ID NO: 101019 - DNA, 268 bp, Heterodera glycines
cctacgaataattgcagagtttgtcgaagcataaaaaaagatagagataaaaaacttcgaaaattttgcggtttcatgtgacaaccttttagtgagctgcttaatcacttagaaatagcttagaaataccatctaaacatttaaagttggccagaagaagttgacccctgccgcgttttagagtgtggggtgatcggaagaggcggcgggtcatttcagtacggtatttaattattttaatttattattagctttgatgttcagtatg

SEQ ID NO: 101020 - DNA, 180 bp, Heterodera glycines
tctcagtgtcaataaaatatttaaatttaattattttaaagcaatttttttaattgaatattaaataatattaaaaattttaaaataaaacaataatgtaatttcaaggttcaactttcttcaatatgttttttcttcaaagattctgctaaaaaaaatctttctttcgtaccagggatg

SEQ ID NO: 101021 - DNA, 137 bp, Heterodera glycines
ctcagcaagaagcaattaagaaattccgtgccaacaacagtcagtcccatcacaacggagggaatcacagggccaaattggtgaatttttatttattttttattacattttaaaattggaatgattttcagactatg

SEQ ID NO: 101022 - DNA, 272 bp, Heterodera glycines
agtgagttttttggttcttgttttgccccttgccctaccgtatccgggttccctttcctacctcatacagtagtacatccgcccattttatttacatacaatactgtactattacagctctctccttcattcatcattccgccgctctttcctatcgtagtcttttttcttttgtctgtctgtcccactttcttttcctttcctatagtattcttctctaccatttccctccctacccctacagtaatcattatcccccaccctacagtatg

SEQ ID NO: 101023 - DNA, 345 bp, Heterodera glycines
aaaattcggtgcttatgggttttgccaaccctctagaaatatatttatagaatattttatggtataattttaagcgcggatcacgaacgtcacgtttatttttaaccatgatatgtttccagtgagttaagtgaaattttagtttttttttgatgagattttacgaaatttgttgcctttatgtaaaaaaaattcagaaggggtggcaaaacccataagtaccgaaaactcttctatagttttttggtatgccatttctgtgtctaggcctcgcatagtactctaatcaaataacgcgatattggaattccattgatttatttgaaattttcaggcggcttaatg

SEQ ID NO: 101024 - DNA, 1003 bp, Heterodera glycines
aacgactcgccctatctgttctgatcagtgccctcgcccgatctgttctaaactttgttccaaactggttttctgatttgtaaaagtataaagaaaaatatttattcaaatgtccaattcgaaaaaatatgttaaattgtcaccactgatcacttctgccagctaaccttttttaagaaattctttcaaaagttatttcagattttcatcttttcgtgaagattagccaatgtattgttcaggggtggaatgctagcgcgatcaacaattcgtggcatatttttcgcaactgcgacaatttaaactcgcgatttgagtccgcaatccgcggcttttttggaaccaaattatttataaagaaaatttatctaaatgaaaaaatgggttcaaaatcgcaaattggtaatttttgataaaatctattaataaattgtctcaaatttttaaaaattttccggcggcgcctgtcggactgtcggtcaccttatgaaaatgaaaaaaggcttaaagatataaatgtttgaaaagatggaaaactgagcttttaaggcaatttgaatccgcgaccgctgggtttttctgtccgcgtctcgccactgttatttattggtcgtcatccggacgaattatcactttttgctggacggacgaatcgaccgacacccgacggacgaattgtcatagcacctcgacgaaattataattatttataaatatcattcatattcatttcctttttaatttattgaataataaattttaaattaaaaatattttttataattcaatcaatttaattcaatgctaatacaatataaaattgcatatcatagaaacaccatatttgattgtcgtgtgaaaacgtgcaaaaatgtgactctttcaattgcctttgtcaggagaaatgccacattcgaatgccaacgaaacattacacttttttttttattaatttgtgaattattttcttactattcacatctcattctgctctttcggaatg

SEQ ID NO: 101025 - DNA, 74 bp, Heterodera glycines
ggtaccgtctctttttatgtgtccctcttgcattttccctgttcttctgtaagggcatcgtattcgcgttcatg

SEQ ID NO: 101026 - DNA, 803 bp, Heterodera glycines
  unsure (1)..(803): unsure at all n locations
ggggggggatganaaaaaattagtgtatttatcacaagggaaccacacgaacntgtgtaccaggggtgcgatctgtcctggtttggaggtagcgaccaaaacttgttctgatttttaaaataaactcataattttgaaaaatttatggcagaatggcactattttatcaagaatacataagatttgtgcaagtcctaattttcgaccccaaaatctgattttttgggcccgatgtcctgattttgaaaaattttcgatcgcacccctgactgtaactaactgagtttcggtcggctgaatttcggcggctgagttttgtcctgctccgcatgaccccctccccaaatgatcagaaaaatcggtcaacgtttcaaaaaacgtgagaaaatatttaggttttaaagatttataaaaaaaaattctaaactcatactaaacaccgtactggacaatccgacagtaaactaaaacttaaaaaaatattttcgacatatacggactatttcctaaaaatatattcgagtcaaaacactttcgcaaacttaacaaatttgaaaaattaaaaaacatgttaagaaacaaaaaattagagcttaccaattagcaaaatttaaaaaggataactaccgtattaaaggcccgcatcgatccttaattagccaattccgctttatttaccgattattaagttgttttatcaaaattaaaagcagaagacagatattagaatttgttgtgcaagactttaaatgaatcagcaaaaaattctctatcaaaagtcatagttttaaatgcaaataatg

SEQ ID NO: 101027 - DNA, 76 bp, Heterodera glycines
ggtctgtcgattctgggtacaactgccctcactttgaggacgctgagaggggtaaagttgactgtatttgccaatg

SEQ ID NO: 101028 - DNA, 510 bp, Heterodera glycines
ccaatgcaaaagtccggtccgcgtaatgttttaatttggttttatttacttgctggtggttttggtagttattccatagaacctaaatttgtccaaaccattaaaaaccatattttaacattattaatatgtatgatttaaattgggttgcgtccccgaccgtcggggttgaaaaagtgggggttcgggtggggtcgaccaaatcgttcggggtcgggttttttcaatttttgccttatgccatataatcaaaaaaccttatattatttttgcttaaaattttttataattcataatattaattttgttttttaaatttcataaatatttttgtatagaattaattaaaaacgcataaggcatttagtcgccttttatacacttttttttgccccactaaatttttccattttcgggaattttcattttttgttactaattgtaagtgtctataaaagggaaggcattggaaaatttgctctcattcgttgcgcctgtctggttttaatg

SEQ ID NO: 101029 - DNA, 583 bp, Heterodera glycines
  unsure (1)..(583): unsure at all n locations
aactttataataatgttaaatacntacatgcatacctcacgaaagataactcttgaaaacaaagcgattcagttttgggctcagaagaaaacgaattgaaagttcgtcctttcaaaaaaaagaaaaagcggcgctactgtaaaagttaccgattttgaaacaaaaggggggagggacccttttgttttgcaaaatttttntaagataaaaaaccatgataatttgttatccggggttttaaaggtcgctaatcacgaatctgacatgtatttttactaatttctaatccctaacccgaactcgaataaaaatcgaaattttgaatttttcaaattatgattttttgttcaaatttagattaggaaatcggaattgatcaaaataattgaaagattcgtgatcggggaccccaaaaacataaatgttgtttttcctaataataaaaatattagatagtacgccaaaaggagacaaaaaattagagaaaaaaagataatgtttttctctagcattctctatttattggtacacatctcgttttttcggacggtgtgtacagtagcgccgaaaaagcgccgaaatg

SEQ ID NO: 101030 - DNA, 119 bp, Heterodera glycines
tgcttaaaaaatcatgtataattaattgtacctttattggcatttaaaaatgtatgttaaaagtatcaggtaaactggacaagtaccgtttttattttgtgtaaaaaattgtggcaatg

SEQ ID NO: 101031 - DNA, 103 bp, Heterodera glycines
gcaagagtacaagaatacagaagagagggcaaatatggtttgaaatttgatccttcaatctgggaatattgagcgatcatgctgtgattactttcaaaaaatg

SEQ ID NO: 101032 - DNA, 382 bp, Heterodera glycines
ccaaattaattcggttcattttttaaaattaatttttatattaatgaaatattctaatcttcaataattctattcaattaaatcgtttcttttggtaaatttttgttcgctgttttatctcaaattcaaaataacttcattttccaatgttaatgtaaatcataaatttaatttattgtaactaaatttcaggaaaaaaaactaaatgaggataaataatgtccaaaacaatatttatttttaacataaaagcatgtttttttaggctagccacattcaacacagctgaatttaaaaccttaaaaataaaattcgactgaataaaaaatattgatatgataattatttaaagaaatcattttttatttaaaaataaaaaatg

SEQ ID NO: 101033 - DNA, 599 bp, Heterodera glycines
tatcattaattagcgccaaaaacttcaactttttaaatagataaaaatgtgataatttgtttttttttgtccaaaaatcttgaaaatttttattactttccagattttttaaaaattttcgaagtccattcctgatgagtgcattttgtatagcatttttgataagtttctcaaaaatgccgaaataggaccgaaatgccaaaatagggacgcccctgtttaagaatcagcttcctaatcataagcatacaaattatacccctaattattataaattttaataaagattttgaattagaaatagtggggtttcagtgcttattgctctttatttatgtgaattcttatttaaggaaaataacatcaatattttacctgatatgcaatcacaaatgtgtatatgaatcaattttgtacctgcatagcgtcatcattttatgcatattactctcattgtttatattcatcaatatttcactgatcaataatttactttgtgggtggataaaaccgtgatgcgacacttgcgccgctccatttgcgccgcgacatttgctccgcctagcaaaaatggacatttgcgccgctcagcaaaaatg

SEQ ID NO: 101034 - DNA, 52 bp, Heterodera glycines
ggtgagagtaatgacaattttattagccaattaaattatatttccagaaatg

SEQ ID NO: 101035 - DNA, 141 bp, Heterodera glycines
gtttctttcatcaagtgcaatccgtaaaaataggaaaactctaaaaatccaggctttacccaacgcaattaattattctgttatatatttgtgtgacatcattcggaactcggccaaattgtgctaattgccacaaaaatg

SEQ ID NO: 101036 - DNA, 273 bp, Heterodera glycines
cctgcaaaatctaataagtggaaaatacatgagtatagaatttattttcaaaaagtgtcaacagacttttggaatatatatttgcaatttatcaacaattttgagaagtgagttagaaaacttcacgattcaaaccagttttcgttgctctaattaaccgcgataaaaacattcgaatcaattaaatagcttctgagataataaggtttatcataaaatttcatttaaaaataaaccctcaattattggtatgaacgatactttccaaacatg

SEQ ID NO: 101037 - DNA, 467 bp, Heterodera glycines
caattcaataaaatttaccagagaagaagtatttggtaagaaagtaataaaaaaattagttatactattatctatcgagatataattcaaatgaataaaaaacagaaaaatttgaacaatttgtaaatttccacgccaataataaccaagtcttaaaacttatgacggtatttagttttttggagttaggtatattattctacaacatttataaaagagaaagggaaattaacaatcatttttgaatttaaatcaattattcactcattaaaagttaataattatttaataattttcgcgtaaaaattataagcaacatgttaatataaaaaatcaattactgatgcaattattggtgggggaaaatgaaaaaaatatttttaaaataatttttgtcaaatcataaaattaatatatgcagaaattctaaataatttaattttgaaaatactttgactcaaaaaatg

SEQ ID NO: 101038 - DNA, 1003 bp, Heterodera glycines
tgaaattatcttcaaaattcgattaagatcggcactctcaagtttcaatccaatttgaaatcagacaaatctaaaaagaaaagagttctaatgggacaaattattactcagatgactgtgaaatggctaactttgacggtttaaaaaagattttgggtactttcctgttttgaggccacacccaattttaaaaagtcaacaaaagggcgcgcaaaataaacaagtcgcgcgtaacactagtgaggaggcaaatttcaataattgcagatcaaaatttctcaaattgatcagcttctctgtgtttgcagtcttcacgacagagaaattcacataagaatagaattttgggtgtggcctcaaaacaggaaagtacgagattttgcacacaataagcagattcaggaatttgtaaatttgctttggcgcatttatttatttttattttttgttttttgattatttgtttgtgtttgttgtgcttcacagccgttctcgggatgtatgccgaggacaatcagaaattaatcccgagtccaaaaatcgaaatcggcatcccgcgcatccctggagcggacccatattgatgcttgtgcttattccggcaattgtgtagatttacaaaagccatcatttgtctatgatttatggtttttcatcaagtatcacaaaaattccgattttagagaattaaaaaattaagatttttataaatacctaatcattatcatctcacgtaaattcaaatttagattaaaagaataaggacggaattggaaatttttggaaaacattgaactccgaagtgtgctgtccacatggaccaacaacaagccgctgccgctgctgctgctgctgctgctagcgggatttcctctggttttttgcgcactaaaatttcgctcaaaggcagtcagtctcaactttcgctggtgtctcctttttatggaatgaagcccgaacttccccgtaactttgggataaaaaattataaatttgcattatg

SEQ ID NO: 101039 - DNA, 1003 bp, Heterodera glycines
taaacaatggctttttctcatgtttttttacattttctgttatgtccaactctttgacgagagagacacaagaaaagagcatttccatttcatgcgccccaccataaaacaaagacgggagacatcgcctcgcgggcgtggggagggatggcggctgtttgccatcgccggctggcagagaattggacacaaaataagccgactccatctctttcatactctcattctctcttttttctttctctctctccttccctctcactctctctcttccttttgtgcccggaggcgatgtttggccaaaagcatttttcatttctctgccccatcaacagccatttgtccaacgagacagacaaatggacacaacacaacaaacgccgccgccgctgaagccgccattcccggaccattttactcgcccagccgctcctttctcccacaacggtcgcacctcgtccaagtcgagaatgcagtaaaggacagcaaatctatgatctaccccattaatagcatcattaccctcccgtcacacggatgaaaaagggcccacggcataaaataggaggaaaacgaaaatttcttctgattagggctaagagaaaagcggagtctttcaacccatttacaaattagctaatgtgatggcaaaaagtgagtgaatgtgaggtatttttgcgtataatttgtgcctctctctctcccccgcccaatttctttaaagggcaaaagtgaaagaaagcgctgtcgccgaacagaaacacaataaaagcactaacaataagaagcaggccagcacacatagactttgtggcagcacaaaactttttttaaattgaatttactcactgaaaaagtctctcattttgcaacattaaattaccaaaaaattattaatttaatgttttaaaacatttaaatttaatttttctgtttacgttttatagtgaaatactgtggtacatatattagaattttacggcatatgcaaaccgaacaaatg

SEQ ID NO: 101040 - DNA, 1003 bp, Heterodera glycines
  unsure (1)..(1003): unsure at all n locations
tggtaacgaaatgtttgtccccaaacatgaactgctagggcagccttcatcagctgatagagcatggaaagccagagatgccggctcaaagcggggacgggacaaaatctcgccgccgaaatttcaaaaaaaatttcaaacagaaatttctcaagaaaaaaccttaaaaaatattggcggcctatatgnaaaagtgnccctttttgaaaattttttaaaaaggggggacccttttgttttgcaaaatttttttgtgataaaaaaccatgataatttgttatccggggttttaaaggtcgctaatcacgaatctgacatgtattttgactaatttctaatccctaacccgaactcgaataaaaatcgaaattttgaattttttcaaattatgattttttgttcaaatttagattaggaaatcggaattgatcaaaataattgaagggttcgtgatcggggaccccaaaaaccccagagaataaatttttatgactatcacaaaaaaattttgcaaaacaaaagggtccccccttttaaaaaattttcaaaaagggccactttccatatagcgccgaaaattttttataagaaaatttcagaaagaaaaatattttaaaaatttacagcgattttttttgaacttttgtaataaattactgttttttttaaattttcaaaaaaactcaacaatttttttttcttgaaattttcttataaaaaattttctatgtttttttccttaaaaaatttctaaattttatatatttttttaaatttctgcggcgagatttggtcccggcgagatttcagggtgtaaccctcagagccgcccctcccccttattttccttcaaggcttcccagctctttcatagataattaattaattcctaatattggatcactcgcgcattttggcattgtttttcattatttttttattcgtagatgaatgcatgcatgcccaaatttaccatcccaatttcaatccgcccaaagaaatg

SEQ ID NO: 101041 - DNA, 145 bp, Heterodera glycines
agtatgttggccagtgttctcttaccagtgttgatggacaaatttttgccaaaaaaaactaattgacggggaaataaataaatatataaaagcgaaacagcaggaacactcatatatttgagacatttgaggagagcgcaaaatg

SEQ ID NO: 101042 - DNA, 135 bp, Heterodera glycines
aacgcagtgatttgtgtaagtaatgtgtataaaacattggatgatttgatgtaatacgtaatcggcaaaccacggacgtctttgtttgacataattacgcatttgagtaaatgtttttaaattggaacagtaatg

SEQ ID NO: 101043 - DNA, 185 bp, Heterodera glycines
tttgtcttttatcgcgccacaaattacggtaattgtgttaaaaggccaaagattccattctaatgagtgattatctgtgctgattaaccgaattttctccgtaaaaaagtcctttaaatggcatgccaaaaatggaaattcattccaaataatgtaattttctctggtttccgaattacaaaatg

SEQ ID NO: 101044 - DNA, 106 bp, Heterodera glycines
ttcaccgaaaagagtgggagaagctttaaatggaagaagtcaattgaaacgaaatgttgaagttgtttgtgcttcacagaattcggcggacaatgcgccgacaatg

SEQ ID NO: 101045 - DNA, 852 bp, Heterodera glycines
ttgtgcgaacatgttcaacttaggatcatttatatttaggcagattttgaataattttttagttatcattattttgaaacatactctcttgcgattcttcaacagaagaagtgatagcatttgtttgacttgctgtcaaagtttcttcagaattttttacttgtttgtttgcgcgaacacttatcatatcattctcctcgtgtctttatttcttttttgaaatattgatcaactaaatttttgacaaaataaatgcagataatttatttatttatgttgaaaaagaaaaatgttttaggttttcaatcatatttgtagtctttagcctcattttgcggtttttgagtagccaatgagtcaagtttttgtgctttttggaaaaaaacctctcaaaaaagcgggtattgcgggcccaggaaagccgggcgggtccaagttttacaaccgggtccgggtccaaacggcatgtgagtcagaaaaaataacaaattaaatatatttatttatttatcgaacaaaccacaaggtgctatgcactctaacagtggtgtaaaaagaaaaaaagtgagaataaaaataaaacataaatggcagtcaaaaatcacaaaaataagtgtcaaatcacagaataggtgtcaaattaaaaacaatagacataaatgaaacaaatcacacctctcaatggggaaaatatgcattattgcttaattatttcttttgcaatttctcggaattttttggggtcatttatttccatattcattctccaaaaaaaatattcattctccaaaaaatattcattctccaaaatattcattctccaaaatattcattctccaaaatattcaaatg

SEQ ID NO: 101046 - DNA, 508 bp, Heterodera glycines
tttttttttttttaggaattaacaaattaaaaattttttttattattattttttcataaattacagttcattcggggtccattaatcagatttttaacttttttgcggcccatttccaaaaaacttggtgatgtgcgaggggagaggtccggtgggtcccgattggcgcggcaagcggaaatttttagaactatatgaattttgttagaaattagccaaatttcttagcaatttccctgttttagatgaaaataaggtactacccctaaaccagaacatttcttataataacaacatagaaaaaccctgtattatttggaaaaaaaaaatcaaaagaaaacgtcaaccgatgtcgaactaataacaaaaagtttgttaatgttgaagcactaaccactaaacaaaccacaaatattttaaaaatataaccaaatttactttatttcataaaaatttgtaaaagatggtcaaaactgtataaatttttgcctttaatttcacgaatatg

SEQ ID NO: 101047 - DNA, 126 bp, Heterodera glycines
ggtttgatttcagtttatcatcaagatcaaaaagcaacagaaaattctattaaaactgtttacgaaagtagcatcctaaaaccaagatcaacaaatacagtaattgggcaggggtatggcaaaatg

SEQ ID NO: 101048 - DNA, 215 bp, Heterodera glycines
ttattctgtttaataatgattataattgcctatcaattaacggactaattggtttttaaatgtttagtaactttgaagaagcattcctcggaaaagcacagaaagaagaaggaccaatcggaggaaactgtcaaaggcgtgccgcaatgtgtttgggatgaagaatttgacatttgcgcgatgcaattgtgcagctgtgacaggtggtcacaatg

SEQ ID NO: 101049 - DNA, 235 bp, Heterodera glycines
aatacccccctcatcattgttgtaattttcatgcaccaatcattcattattcatggcaaataaatttctacttgttcctcaagaaatttaccggggtctcaccactgcgacggacacgggcgatttaaacttggatgctgttcgacacgatttgaatcgtgcccgggccgaacgagcacatccctctcgaaaaaatgtcaactacaaccagcagcttaggcgatatttaaaaatg

SEQ ID NO: 101050 - DNA, 525 bp, Heterodera glycines
cccccccccccttttttcgttaaaaatttttttcttctaaaaagtcgtgaaaacacacattttatggggttttaagggtcgctgatcacgaatatgacattcatttcaatcaatttcgaaccgctgacccgaattcgaacgaaaaaaaaaattcaaatttttcaattttccatttttagtctaagaatggtttaaatgaccttttagtgaagcactaatgatattcagtgcgttttcgtgtatttaaacaaagtttgaacaaaaatctgaaaaatcgaaaaattttgaattttcgacttaaaaaaacactgaaaattatacgaaaatttaagagttttcagaaaattttcaaattcttaataaaaacttgctttttgaaaaatatacattattttttagattctcttatgtaaaaaacaaataaatttagaaactaaacatttttaatttttacgtggctcagcccctatttttttttatattcgaatttaaattaaacacatttttaaatcatttttagccatg

SEQ ID NO: 101051 - DNA, 930 bp, Heterodera glycines
aacttagatgagttacaaaaaacatttatccattaacgattcagtcccaaaattttttgaacggcaacatcaagtttgggcaccatatgccatatggaggaatttcaaaaaaataaataaagtatattgatcggtttcatcttttgagcattaaaagagcacacaatgggggtatttctgcagttgaacaatttgtctattttaatcccagacaaagtacgctccttttttttagaacattagtgactctcaaagacctttgcataagagccgacttgcacctgacgtatgacgatgacattaaaaataggcccaatcgcaaaaatttgtcatttttggtgaaaacatttaacaaattgcactcaaattttaaaatttttccattttttgaaaaaaaagctcgtcgtaatatttttcatctggcagccctggcatactgtacataaaaatggccacctttgagaattttttccaaaaatcggcaaacgcatatcaaataaaaaagcagcttttacccccttgaaatcagcaaaatgcttctacctaaatcagcagagttgggagccctgagtttatatatataactattctggatcaaagtcaacagacaaaaaattacacatttatgtatactcagaaaaagctgaatttttctcatttaatttttttttcttaatgtcaatatttgctcttcccttgtaattgtaaatttccgaggcttttaagctttcgtttgataccaaaattgtaggcattgaccaagtaagaaaattataacctaagaaactgagagtggtcattgattggatgcctaaagtaaaataaagccaaaatgagaattacattaatctaatttaatcttttctcgaaatttactatgtttatatatatatttttagtcgttacggatatattctctgatcaacaatg

SEQ ID NO: 101052 - DNA, 723 bp, Heterodera glycines
accgagctacgccgccggtgcctcggcgtcctgctgcagcagttcggcatccctcagttgagagggcggttgcagataagttaggcgtcggtgctgttcgtgcccattttatcccttactttataggcactactcctgctaatgtgcgcaagccggtcattcgccgctcatccaccgtggagcgggcggttgccagcaaaggtttgccgttcatgtctatcccctgtcggatttaatccgaaaaaatacaaaactattaataaaaataaatctaaaataaaataataaaaatttgcctacaaaatgcaaaataatgaataaaataaatataataaaataataaaatctacctagaaaaatctgttctaaattaaataaattttttaaattaaataaagggttttttactataaattttaataaagataaatttaataaaaatgaaattcaacatataataaaatgggaaatgcagaatgagaaaatgagagatggaagaaggaaagcaataacaaataatgagaattgacgatcggcgacaaacaagccaaaaatatcatttgaaaccaattgtgtttggcgaagaaggcccaaaacataattggaacgatgggaaataatgggaaataaataaatattcaaataaaataaaatattaacgaaaagctaaattggaaaaaagataaaattgagaaaattcaaccgaccaaaacggcccaaatg

SEQ ID NO: 101053 - DNA, 139 bp, Heterodera glycines
acaggtctccaggttctgtttctgttttttctaagcccgagactggcaatcgcggcacttgagaacaaaaaagtgccgaaaattccgagagcattaaaagaaaatgagaaaaaaaaatgccaaaagatgtaaaaaaatg

SEQ ID NO: 101054 - DNA, 1003 bp, Heterodera glycines
aaaaaaacgaaaaatacacccctaaagatcaactttttggaaatttttaaaaattacaccccacaaaacacgaaaaatttgagttttcgtcgtcattttggcattttcaataaatattttcgtcatttttttgcgaacatttcttttttttaatgagaattttttcgaaatttggcaaacttggaggtgtttttgatacaacgaacaacaataaaaaatatgcatttttaagttttaaaccccattttttggttgtttattgtacttttaaggtttatttaagcaaatattaaatatgcacacctttttttgggatttttgggggtttacaacatatattttggcattttttatccatattttggtccatatttggccatttttggcctttttagtccatatttcgggcttttttagtccatatttaatgtccatatttcgcgttttttagtccatataatttacaaccctaatcattatatttggaaaaatatttttttaaaaggacaataatattttggggatttacggacatatttaggaatgacttggaggaggaataaaaatttttgacccgatggaattgatttcaatggcgattaatttgcataaaaggcaaatataaaatgaggaaaataaaattacataagagggattcgaacctatgggggcaaaaacaaaagtccggagcacaacctccgcaccaccgaccaacacaaaacatgcaaatgtatatttaatttattgcaataaaaaaaagtttggcacgtcataactcggcactcagactcatttcgcagaaaataaaaacacttttcttaagaacccatgggtgctctatacacccaccaaatttcatttggaaatcccacggacacctggggaccttcctttgtgagttcagtcggattttctgtataaaagtgttgatttcttctctccacctccacaattcctcttcgtaaaatttttttctttttttagttgtttttgttcatatatg

SEQ ID NO: 101055 - DNA, 147 bp, Heterodera glycines
ggaatggcaaagacgatggccagagagagggacggaggaaggcatcggatggcaatttggggacgaattgggccaaaaatgaggacgaaaatgccctgctttttggaggtaaagcattaggaaaagggcacattctctttgacaatg

SEQ ID NO: 101056 - DNA, 61 bp, Heterodera glycines
ggtatataattttctattatatttcttataaagttaaatttcatgttttaaggaggttatg

SEQ ID NO: 101057 - DNA, 456 bp, Heterodera glycines
gtgattgattggtttcttatttaaatgtctccattatttttagttttctgttccaactatttcgcaatatggcccgtaattttgcaacctgtcaagaaaaatgattgatgactttcgaaataaagaatatccagacgatttttttttgcagttttgaataaaatgtgacagttgtctacggaaatgattgattaccctcaaaattaaggcaaccccagacagtcacgtgactagacccctccccctttttgcctatttcgcacacccggcccaaatcgcaaatcattcaactaaatagttggatttcattaaactctcttcacgctctaattttatttctctccgctctatttttatttgcattaattaaatctattactatttacttacgtcttttttcttttaaaatctctctaccctctttaattcttctgctgcaatttcttgtttaaaatg

SEQ ID NO: 101058 - DNA, 81 bp, Heterodera glycines
tggactcttgtgtttctaaagtttggaattgttttccccccctgacaatctatgaatgtacaatgcaatttatgccacatg

SEQ ID NO: 101059 - DNA, 542 bp, Heterodera glycines
tttaagctgggctagaaagaaaaattaataatttactttttttattttaaatttaataccatttgaacaaccaagtgcgtttatcataacaataaataagaaaatttgaagtaaattcattgctaaattatttctttaaattaagataaataaaaaaaattaaaaataatgcatttaattatcacaataagatttttattgaataaaattgattttttttaattttaaatcaaatgatgaaattaatgagagtgaaatataattgagaattaccaatacaactaatcaaacaaatttatgaatgtcatttatgctggattttaataaaatatttaaaaggcagaaaatggctgagtaaataaaatgaattcaaaattttcatattataaaaatttaaaataaaagacaaattatcacaaagtttgatgcaattaaagagaaattgaaggcaattggaaaatatgtttgggaaaacagaagcagaattgagacaaaaattggtaaattattaggcgcaaatcgcaaaaaaaaatatacaaatg

SEQ ID NO: 101060 - DNA, 94 bp, Heterodera glycines
cgttagaccctcccaaaaaaaaaaaattttttttatgcaggtcaaggccataaatttttttccaacaaaatttcccataattttttttcagatg

SEQ ID NO: 101061 - DNA, 626 bp, Heterodera glycines
tcttgatggggggggggagtgcattttggacccccaaataataatgaaattttgtataattttcctacaaaagtagagcccaagcatcaattttaaagcattttgacattgtgacattttccttatgcccaaatgtgcctcaaaaattgttttgtttttttgtcaaaaaatagtcaagtgatgatgatgttgcccataaattctaagtgattggatgattcggattttaaatattgttttttaccatttttgtttgaaatctcataaatgaatgaaattgtaaatttattgtgtctattcttgtatttttcaaattactaaaaaaagacaatttgtgcatttttcgaataattttgagaatgcactcattgctttgtccacgtgcgtccagctcccaattatcggccctttttaaacgtttttccgtcgggaatggcaccgcttcgaccgattgtgccaccaaaaaagggcctgtcgatgtgctgcgtgcacggcttctctaccagagcagaaagcgtgggatacgcgagaacgacattttgatcaggtaaaatttggcaaaatattctttcttcacggcaattttgtgtgtaagtgggtttgctgaggaacacttggtcaaaatg

SEQ ID NO: 101062 - DNA, 92 bp, Heterodera glycines
aaaaaaatggtaggacaattaaaaagggacaaacggagggagaaaatggacagagcggaagagtgaatttgatgaattcaaaccaaaaaatg

SEQ ID NO: 101063 - DNA, 1003 bp, Heterodera glycines
atgaaaaaatagaatataataataaataagagtaaatatcctttttggaaatatcctttttggaaacggaatttaataagttagtaaaaatgaaatattattattattttaaataagtaattcaaataaaaaattaaaaaaaaaacataaattatttatataataatccatagaaaagcttctaaacagataatgaaagtcccaattttgtcccaacgttaaagcaacaactgaaatggctttcactcggttttctgcaggctgaacgatattcataaaaaaatatctatgaaaagaaacattagacttacattatattataaaaaacaatttattaaataattttaaaaaacatttgtacaaacttagtcgagaagaaataattaatgtcaatagattatttcattaaaacaagcaaaagaattaaaattcaaaaaattgaaaggcaataaaatcaaaaaataatataattaaaattaaatttaaagacaaaaaaagacttgtttttttagtatttaagagcacttagaatccaggaaataaaagtatgtatttgccaataatttctagtcctaattataagttatcaataatttaaagatgccaattagtattatgcatacaataaaattataatataggaaaattttttcgtgtttcacacctactagaaatagccaatgaattaatctgatttatcaaagagactataaaattattaagctgaatgcataagtaattttgatcactccttgatgatgaaatcaaaacgaaaatttcaatttttttgaaaaaaagtaaacaatatttcccgaaatgacaaacattaattatattaacaatataaattatgaattcatttaaatataaaaaatagattaagaaaaaataaatcgactaattaataatatatgaaatttatttaaaatattataaagaatattaaaaattccatttaattaataagaaatattaaatttaattaatagaaataaggaaaatg

SEQ ID NO: 101064 - DNA, 88 bp, Heterodera glycines
gttagttcggatgttacgatgtccaattctctccatcattcattatgctgtgactacgttacaccatcttttattgtacgtggaaatg

SEQ ID NO: 101065 - DNA, 803 bp, Heterodera glycines
tattattttatttttttgatttttttaaagaaaaaatattattttatgaattttgttattgcgattaaaggcgtggagaaatgaataaataatatttaataatgtttcgaaaatgaggagatcaaataatgaccgaccgaaaagagaaccatccatcggcagtgacgtgtaattacatacaattaatcatttttttctaatgacaatttaaaggtaaggtcatttttcgtcagatgttatttatttgttccgctatttcggccagcaaaattaacaaaaaagtttatgaaataatttgtgcaaaatttcaagaatggaagcgattttttatttcattagaatttaaaagagaaggatagtgatgagattagtgatgaagacgagaggttaatgcgagaagggggtgccaagggattttgcgggaatcccagtaagtaagccctcattttttgaaaattgcttggtacgggattctcgcgggattttgcggatttttagtccacaatcctgcatttttgaaaattgcaagatgcgggttcccgcgggattttgcgagacgccaggccgcaatcctgctttttttgaaaattgctggtgcgggattaatccctctgggttccgtcccgcaaaatttctgtgtcccaatcccgaacaatcctgcagcaggaaccgcaatggattttttgaacagtggacatatgctaatttctgaataatttataataaatttttaattatccatttttcaacacagaaaatctcttccctatttatgacttttttggggcagtctaattaaaatg

SEQ ID NO: 101066 - DNA, 271 bp, Heterodera glycines
ggttattattagtttaaatttggtaaataaaattattataaaaattaatcaaaataattaaaattgtattcaaaaaaaacaaatattaatttaaattggattcataaatcaaaaaatatattttaaaatatcttttttttaatcaaaatcccccccccccaaaaattaattaaattaaatatttaggcattattttataatcgttaatttaatttttacataaataattaatttttaattatttagtgaaatggacggattattaaaaatg

SEQ ID NO: 101067 - DNA, 617 bp, Heterodera glycines
ttattgccgctaaataaaaggattattatacaagccaattttagacaatgctttggtttcaatgaaaaataaatatgagaaaactaacaacagggatattgagaaaagaaaaagaaaatacaagacaagagaaaatgtagaaaaaaacgagaacgagacgcgctaaaagtcaagaaaagagacgagaattctcttttaacgaacacctaattattaattaatcagaaatttttggttcgtatttttacggaacataatcgggccgggcggaatttgtatttcaaactgccggaataaaacggggcgggaataaaattgtttgccttcaatttagaaaacaaaaatcatctcaaaatttaaccaatcaaccttttttttaaaactatcaaaaattctaaatttaaaattttctaaaactccttaatttgtgagatctactaacaaattttcaattttttttaccgcattacatatttttccaaaattttttggtggaggatggaccgactgtaccgccggaaacttttcccgccggtgccggcggtggcgggtgtttgttcgcctttctgaagccgggtgagtgatttggtgagggaaagggagtcaataaaaggatg

SEQ ID NO: 101068 - DNA, 561 bp, Heterodera glycines
ttctgatctctttttgtgtgtgtattttaaatgtacaatttttgagcaggatatacataatcggaggatgaacaatcaaacatttacattaattttatcggttttgataaataaatacccaagtgcggggggcgaacattatgggaaagaaaccttttctcgtcacttttttcttccattcttttgctggcagctaatttattcatgggcccaactgctccatatttgtatggcccgtggactctcgaaagcggagagtgtccacaaattggagatggagggggggggggcgagtgccgtgccaatttccccctccgcccaatgctttcaattcgatactcccgccgtcttgttttcttctttcctttcttcacgtcacttgcttttcctccctctgtccgttctttcgtcttttcctcattttcgtccttcaaaaaccccattcttcccccaattttcctttgtttttttagtgtttttatgtccttttcctcctcctccgttccgttctttcgtcccctttcgccttcccataattcggacaaaaccaatgccaaaatg

SEQ ID NO: 101069 - DNA, 221 bp, Heterodera glycines
aaaaaaatcgctaaataggcacaaaaatcctcgaataggcactaaaataggcaaaaaaaattttattaatgctttttaggaagcaaaacacgtaaaaattattttttacaattttattttcaaaattacaaaatgcgttagccattttttaaaagtaatttccgaattttgtttttttaagatttgcgatttcaagaatcaaacagaaatatttggaaatg

SEQ ID NO: 101070 - DNA, 1003 bp, Heterodera glycines
attagcgcctccatttttgcgcctttcacatttgcgcccagaatatttagcaatgacgaaatgacactttttaccaaatactcgaaactttttgcaaaaagtttttttacaaattataactaaattttaatcctttcaccgaccggcgggcctattggcaccgccgaaaaccgcgaaagcgttaaaaattgacaaaatttttataaattacgtatattgtaaggattttatctctttttttccccttttaattattgtgtctccgagtgttttttgacaacatattgcctggcgggctaataaattgggttctaagtaatactgggaggtgcaaaagtggacttaccataattaatacaatttatcgaaagtattcaactttgccaacagttttttacagtatattttaaatagtcgacattcaaaaatttattgttgtcatttgataaatttttaggtttatttcctttttttgtaaacatttccaattttccattttttcaaatttatttttttttctattttttcaaataataatttggggttacatttttgtatgattttgagaatttctcagactttttttatattttgtctaaaaatagaacgaataaattgaaaatttattttacattggaatgcaattaaaaggagatgatgaatgaatgaatgacatgcttgttaaatgtattcaatccacacatttttttcatcttaaagacatgcattaaaagaaatttcattgaattaaattcaattaatttattcctgtaatgttcgggcgttaaacacggcgcatttttaaacgttcgttttttcggcgtattgtaacgaataaattttgtacattaattgagctgcttataaaagagtgcccgatgctgtagcttctacagttctcctcatttcatttcatttgaacaaaaatgtattttttatattaaatttaattaataaataatttatttaataaataataataaattttagaaagggtaaaatg

SEQ ID NO: 101071 - DNA, 1003 bp, Heterodera glycines
gatagagggggagcgagagacggcgggaagggggagaaacagaagggagaaaagaaagtcgatagagaaggggagggaaaagggggggggggagagagagagagaacccggagaaagaagagagagagaagggagagagagaggggagaaaagagagagggggaagaggggcagagagagagaaggttgatagagcgaaagggggagagagagagagagcggaggagagaaagcgagagagaagggagagagagagaggggagaaatgagaaaagagcggttggcgcgcgaagcggcgccaaagcgctcgttcagtcggtgctgggcgttagtcaaaaaccatcaaatggaaaatttttgacagaaaattattcataatttcgtctaaaatggatcaaattttataatattgatatttttcgatagccctaagtgttttctagtatcctgcaaaatttctaaaaattctttaagtttaaaaaaaaattatgacctgagaagctcaaaaaaccaagtttttttgaacatttttagtcataactttcttaaaacttaaagaaactttttgaaattttgtaggctaatagaaagcacttaggcctatctaatgatatcaagaattaaaaatttagttgcttttgagcaaagttatatcaaaaaataacatttcgttgctggttattagggctgggatttttatgtgtctaaaaatttcaaaataaaatgacgaattaagaactcaatttggctactttcagcattcggataaaaaaataatttttgtaaattctgtaagaaatgacaagaaagtcgatttttagcggtgttatttttcaattttcttttatttttcttacaaatttttctcaaaagtgccaaaatatgtgtaaaatatgtgccaaccccaaaatatgtgtttttatgttgttataaatcgctctaaaaaagaataattaagtgaaaaagtgccaaaaactgttaataatttaccatcaacaaaatg

SEQ ID NO: 101072 - DNA, 730 bp, Heterodera glycines
atccccctacgccctcctcgattttggcgtcttcagtgcagaatctgatcagaaagaattctttaattgctttgtttaaattttgagcaatttccagtcgcggcgttactttttctaatgacatttaacaaatattacattgccgaaggcatttaattattgtttaatgcacatttgaatgccaatgttgacgtaaacacataataattatgttttcagctgatttaataagtacccaggggaattgtttggtaggaattttgtccaaataaaaataaaatgaacagaattcataaaagacgagacgacaatttttccatttggagttggttggttggcattttgtcactccgatggaactgttgctgtttcgtcatgatgaatttgacaaattgtacggctgtgagggatttaatgccgacaaaatcccacttgagcaacggacaaacattgtgaacggatgcattttaatcacactttttttcatttttgaggtcactttttctagggcagcgttttctagaacaatttaaaataattaaaaaatcgataatatttaagatactgtacgttccgtgtatggtatcaatattcaaaaaaatgtacgacaacccatgctacaaaatgctgtttttcattggcatattggacatggttataaaaaaaatgttttaaaataattaaaatataaaatttacttaattactatgcctagttggccttgctaatg

SEQ ID NO: 101073 - DNA, 584 bp, Heterodera glycines
gaaagcaatacgccatgaatcagaagtgacaaaaattgttctgcgcgagaaaactgtgcatataattagggaacaatattggtttgaaaagcaagtctcttaagtcagccctgagcatcagcttgtcatgctccgatttcatcaacaaaacaattagtgccaatcatgaaattgttttcaagattgcttttactaaattcgctgttggcattgcgataaacgaccacttgccgacgccgtcgagctgcaaccgcgaatatgtgccactaaagtggtggcaaggattgccactcgaaaaaatgacgacacttaaggtcagaagcacattgacgagagagtcccagcactgattatcattatgaacagtcgaaattttaagaaaagctggactttgaccgggattccattttggacctggatctgggtaaaaatcaggtccatgtaaaatacaggctcaccgaggcccaaaagggtctatgaaaattataatatttaataaataaaaatactaagttaatttcaccaattaattgtttaagttggaaggcaaatttttgttgctgaacgatccgccgccagtgatg

SEQ ID NO: 101074 - DNA, 1003 bp, Heterodera glycines
gataaaaataataatttattcattattacatattagcattttattataatgcatttgctgacagaaccgatgaaaacaccaaccgtcgatgctataggagatttgatctaataaaatataaaaatacataaataaatgctaaatcaatgcagcacaaataaaagaagaaattaaaatcagaaaaaatattttttatttaattttaacataaatttccgtactatattttttgcaaagaaatttttttttctacatccaacagaaaataatgtctcaaaatcaagtggaaaagaaaatgtaattaaaataaagcaaagttaggaactattgtaaaaataaactaagaaaaaatttaaaaaaatcaatttttttaacatagtcggatcttgtccaattaatatgtaaatattttaatttcattaaacaaaacaataggcatataatgactgataatttcttctttttttattttctaatgctgcctatgtaatatttctataaattatgaattgcaattacttaattgtcttgtaatgacataacttttgctttccaaatcacattcatcatcattagcatcattcatgaacgcacaaatgagttgtttttttaagaaagttttttttttgtttggaaatcggagcgagtaactgatcggacaaatgtcatttcgcgcacccaaataagcgttaaaaaacggttccacatcgactttttatacacagaaaaacggtttatgctttaatgagagcaaattaaatttaaaaaataaatatatggcaataattagcaaattttttttcatcattttgttccatataaaagcggagtaatcacaacgaaacaccataactctacatattttcctcattaacgtcaataaattttccacaaaatgtacatttcgatttttttattcaaaattgtatccaaccaaaaagcattttaaatttgaaaattttaattctaaattgaaaatccgcaaaatttagcgcttaatatg

SEQ ID NO: 101075 - DNA, 131 bp, Heterodera glycines
  unsure (1)..(131): unsure at all n locations
gtagaaaaagtataccaagncactgtacgtctagaggatgccgctaaccgaagtctaagagtaataatcgcagagctgtacaaaatacagatgccattaaccaagtatctgtaacggttaatgctaacatg

SEQ ID NO: 101076 - DNA, 547 bp, Heterodera glycines
ccccccccaccaaagaaagccattttggcaccttcgaaccgagtcattgcgctgggggcaaaagcaaaaggcagcaacgggagggaaaaggacgaccgcgacgaagaagccgaggaaggtgatcagagaacaaggagttggccagaagggtcctccattcaatttcagccttcgcattgcccccgtcccccgcttctcccacttcccccgccgcttctgctccgtccccgccgcttctgtgcctttcgcgtccctccgcccttttggccgttctttcgctcgtcactttggccatcattcaactcgtccatcttggcacttttttgcataaaaggcacgcaaaaaagtgcataaacgtcagcaaaagtgacaaaacagcagcagacgaagaaaggcatccgacgccaccgaacgcagcggcggagaacgccgaaagaaatttggaaaaggaattccgaaacggtaaagcacagggaaataaagaaatacggtacttacggaaacagcggcggaaggaagtcaaaattggcacaaaatcagcgcaatg

SEQ ID NO: 101077 - DNA, 75 bp, Heterodera glycines
cgcctctaagtcagaatcccgcctaggcaagatagcaatattcttgctccccggtgtcgggaggcactacttatg

SEQ ID NO: 101078 - DNA, 1003 bp, Heterodera glycines
ggaagctgtcaaagttttctgacttgttttattttttattttaaattgttaattaatatccagagaattgcattttggtggagccgaggacagatttgggcataacggtcgaccacttccaatttctgcatttgaacaatttgctgacggaagtgagctctctgatggatcagatcaattcgggttgggattctcttggaatggcattttgtttctacttttatagaccgcactttcttccggaccaaattgccgaatctctcttccgacattcccttggccatttattgtcaatgtcaaaaggtgcttttttgggttagccgacatttgcggaccgacttttgcggaccactatttctcgatagaactgtctaaataaagaaaaaaataataagaaattttaataaattcaatattcccaaattgaaattagtgaaggtaagctgatgcaaagcgatctgtctcaattggagacaagtcttatttgacataacttttttctttcttttttatagaatttctaacttataattaaactgtgaaattggcgaaaaaattagctaaattaaatataaaagtcagttcaagaattttataccaagaaaattttttatcttgtttcacttccacgctttagttaaccgagagcttaattttttccggcatgtcaaaccaattaaattaacaaacaaaaactaaaatagtttatatttttctcaaaaattgtccgtaatttgctgttattaaaactatgggtccaaaattaaaaatgtgcaactacataatatatttatctatggaaactaaacttctttaaaaaatgggttctttcgatgttgattgcaaaaagttgatcgattactcttgaagggcgatgttcaacttggtaaaaatcacaaataaaactacttagtcactcaatttttgaaaaaattatttttttttgtttttttttgacagttcaacccagaaatagtggtccgcaaaagtcggtccgcaaatg

SEQ ID NO: 101079 - DNA, 356 bp, Heterodera glycines
  unsure (1)..(356): unsure at all n locations
cattagcaattcgtttgtgcttactaatgnacgaaaaagaaaaattggcagaaaaatatttgccaaaattcgtattcgcattgaaaatgtgcacaacaaacactgggtaaaaaggcgtgtttcattttttattcattaagaatntaatctaatatataatatatatttatacaaggaaattaaaacaaaaagaaatatttggataaatatttgtaaaatgcacttaattaagttttaccaaattctatttcatcgaatacaaaatcaaaattgcacaacaatctgttaagattaatttaccaaattggaatttgccttataatgtttatatgaaaaatgaaaaggaattaaaaatg

SEQ ID NO: 101080 - DNA, 85 bp, Heterodera glycines
tcatcctcatcaattttgccaatgttcctttattcccggaattaacttactaagtgaccggaatttataccccaattggcaaatg

SEQ ID NO: 101081 - DNA, 184 bp, Heterodera glycines
aaggcccatcttctactctccactttgtgccatttgcactataacatcaattcattggccttttggatgagcagggggaaaaacaaattgcttaattagcacaaatttttaatattttcattttcaaggtgatgaggcgcttcattcggtgtggcgaagactcgaacaatggtggaaatgtatg

SEQ ID NO: 101082 - DNA, 66 bp, Heterodera glycines
tttttagaaaaatgggaatcgggaagtgaaaacgaggcgttattggaacagaaaatttcggaaatg

SEQ ID NO: 101083 - DNA, 497 bp, Heterodera glycines
aaataacttttgagataataaggtttatcataaaattcaattaaaaataaaccctcaaatattggtatgaacgatactttccaaacatgcacgcgtttgcgctcgagctatttatcatcgggctgtcaatccaaagcgaaacaacaaagatgctgttttgaacgaataaagggcataggttattttgaagaagtgtcaaagaacatgcagcaataagcctgcaaaatctaataagtggaaaatacatgagtatagaatttattttcagaaagtgtccacagacttttggaaaaatatatttgcaatttatcaacaattttgagaagtgagttagaaatgataaacttcacgattcaaaccaattttcgttgctctaattaaccgcgataaaaacattcgaatcaattaaatagcttctgagataataaggtttatcataaaatttcatttaaaaataaaccctcaattattggtatgaacgatactttccaaacatg

SEQ ID NO: 101084 - DNA, 104 bp, Heterodera glycines
ttttaaaagaaaacccaaagtaaatcgaattagaatcccccccaggaaagttaaaaagaccattgatttatttaatcacttctagtttaattttattcaaaatg

SEQ ID NO: 101085 - DNA, 172 bp, Heterodera glycines
tttctgattctcatcaatcacagcaaatggatttaatattattatttttaaatgtatattttctttttaatgaagaaaatgcggttataaacgcattgttttttcttttcttaatttaagcattctcaaacacattcctaatctgatcattttttctgcttgccaaaaaatg

SEQ ID NO: 101086 - DNA, 216 bp, Heterodera glycines
gatcgttccaaagatttcgatcaggtcaccaaactagaggaaaaggtacttaagggattgagtgaagcgagaaaactacatttagaatctcgccggtttcacaccaaaattttggagttggaaaacagaattcaatttgtagtgtgggattttattgggcttcacgaataaaagagaatttgagtaccaaaaaaataaaaattaaatcagaaaatg

SEQ ID NO: 101087 - DNA, 1003 bp, Heterodera glycines
agtcaaaaaattatcaaatggaaaatatatgacaaaaaatttttcataacttttacaggctaacataaaatatttagcgctaccgaaggatataaagaatttaaaatttaattgcttttgagcaaagttatagcaaaaaaaaaaaaaatttcatttgatgttttttgattaacgccctttttgatggtttttgactaacaaggggaaccacccgaactgtaagtcggaaaatgcatatgtgttatataccattggatagagcaatgtcgacttctattgtgaatttttaatattacgggtccatagcaagaaataaaaaagttatggggcctcaaaaatcaaaattttggctgtgtttccacttaaaattggtggctcagttggttaaattcgtgtttttgaagctcgggttcaaatcaaacataaaaaaatatatattttaattaatgtattatataacaaaacaacttaaaaaatcattttttagacttaaaaattttatgatagttttctttagtaaaaataagcaaaaaataataataaatgtaaagtttggaattaataaaaagtgaacaaaactgtaaaagtgcccttaggcgtaaatttcgatttttgaggcccaataattaaaaaagatcttaaaaatattaaacattaattatttaaagaaataaaatgcatgccaataggcccgcctagaaaattttgattattgtagtgcaattttaagattttatcaaaaaatttaaatttgaaaatttagcctcattagccaattaaaaccacaacaaaaaaagggttgcaaacaaactcaaatagatactgtgttgtgggaagtttcggggtcacagataaagaatatctctcatccatttctaaaattccaaatccctgactcgattttgaacaaaaaattcgaaaagtcggaattttcatatagttatattatttttagtttattaaataaaattaaaacttcccaaaaagtgtgtctactaaaatg

SEQ ID NO: 101088 - DNA, 778 bp, Heterodera glycines
tgctaaaatttgattaaaaaatatagtaatttttcaaacaaaatattatcttcataattaaatcaataaattcatacaaatatttacaatgattcggtttttaaacatttaacaatcacttagctttcatgtggtgatcagcgtattccaggcggttgattttgatgtgctgtagtacgagttgatttacagctgtgtagcgatgattccataagaaaatgcgcatccaattagtgaccagctaggacggatattatttaaatccaaatacaactaaaaaacaatttaatttaagcaaattccgacaatttaaccgctataaaatttagatttttaaagccaaattgagaagcaaaaaattaaaatttggttgtttatgaacaaagttttaagagtagaacgggactgggacctggtactgaaaaaaatgggacaactgagtacctaagtcccggttttgatcgggaccgggacttccattttttaaaactgatttaaaaatatttaaaatcatataaatttataataaaattgttcatttatttagttgttaaattaacatattattttctatttattggaatatttatgcattaattaatccgttttcgcattgaatcatcacaaaaatgcatcccatcccattctcattttcaatcatttattcagcaaatcataaatatgtccatcaaatgattttatcgtattattccaatgaaaaaaaggaaaaatttttattagttaaaaaataataaatttttgtaattaagcaaaaatg

SEQ ID NO: 101089 - DNA, 1003 bp, Heterodera glycines
ttttatgttttttaaaattttatacaaaaatcgttggggaaaatatgaaattgtatttgaagtattttaagatatttagttttcggcatcaaacaatggcacttcatgcgctgaacgaagcgatgataaagttcgatttgcaattgtgctggcgaaaaagataaagaatgagatttttatgaataaataaatttgatttttccaattttaagcaaatattttattagttattacatgtttcagtttagcacataaaaatcccagctgaattttgataacaaaatgcaataaaaacgaaaaatatacctctataaaattgcataaatttaatataggaaactttgatataataaaatttcttattaaaaacggtagcatcttcgcggtataccaaattttagaaataaatttaaataattaaatttttatttttattgagcaaattaggatataattttttatttgccaattgatattttcttaaatttagatattttaattatttgaaaaactttttcaatacaaaaagggttaaagtttctttaatgttataacggaaatataattttttttaattgcaattttgttagtcattcatttgttttataaaggttaaaattgcctttcataaatgaggtgtccacaaaaattcaaaaatgtcctactaatattttgatgaataagcattatgaaaatggttgctgcttaatgtgacaatctttgctcgacttattacatttgtaatttgttaaattcattcattccgtccatttgcggtgtcgttgttaattcactgtgattagacaaattgaaattgctaaaattaaattaaattatttaatttaaatacatttttaaaggatttaaaaatggattggaaatttaattttcaacttttattacgggctttgttttttctaagtttcacagtcgttttcggattagaagacactttttctgtaaaatcagacagtgcagaaggggaaaattataaaaaaaaatg

SEQ ID NO: 101090 - DNA, 104 bp, Heterodera glycines
tttgtttaaactcggcatcatttatatacctgagaattaggactccgcccactttaagcagattaaatttacccgctcaaacccaaaatcatttttacaaaatg

SEQ ID NO: 101091 - DNA, 491 bp, Heterodera glycines
ggtaggagtcccgttttgacttgccgcaacactccgcaaatgcccaggcaaaggggccggagaaatgattcgctaatagggagacggctccctgttgatcgctgacccgcccgaaaatgccgaacacaaaatgacaaaaatagtttattgaagaagcgctcaaacttgggtaattaaacctcgtgagaggggggggggcaaatgtgacaaacggcaaaaatggggattaacagtgaatgcgtgattgagtggtgtggtgagagattaaggcaaaaagaacaactttttctccctagaggggagtgaggaagaaaagtgaacgaatgaatgatgtgacggacaaattagtgatgaaaaaagggggggggaggggcgattggtaaatattttccccccggggttaggcccagataaatgcaaattggacaaatgagcgaaaatgaacgatgcgataagaaaaaaggggagagtcaaaggccggggagaggatg

SEQ ID NO: 101092 - DNA, 422 bp, Heterodera glycines
atttgaaacagataaaatgttatttaattttcttgcttgttttaatcgtactgtttattaatattcatactttggtagggaaatggcccaaatgccttagtagggaaatggcggtagggaaatggctggtagggaagtggccggtagggaaatggctggtagggaattggcggtagggacatggcggtagggaagtggcggtagggaaatcaccccaacccccctagtgacgtattaagcaagagaaaagtttagaaaaatgtaaaatttactgcaaaagaaaaaaaacagattgataaaatgattagtgacagcgcgctagtttatttttatttctctcttttattttttattatttattcaacataaacatatttcttataaaaagataaaatataagcttgttttatcaaacaaaaatg

SEQ ID NO: 101093 - DNA, 330 bp, Heterodera glycines
tgtttgcgcatctgtctcgcccccacaatgctttagtccagtccgattcatccatcgacaaaccaatcaatccaccgccccctcccattgctcaattcgtcttcctcccccgcccattcattagccgcttcatccctctctttccaaattcaaagttgaattcgtcctcccctccccctcatttgctgctgttctgcacctcttcccctcgggtaaagatgtgatgagttccttcctgctcatctcttccttccgatgaggtcattccccaaccccccccccttccccaatctcttcagcccctcctcagaatcccttctcctatcgatg

SEQ ID NO: 101094 - DNA, 328 bp, Heterodera glycines
  unsure (1)..(328): unsure at all n locations
ttctctaattgcatgctaaaatgtcaatancgcttgtactcttcttaggtgaaatgcataaaccccgcgcgaatttccttttcccgcaataaacaaaaatattttcgtttttggatttattaataattttgtttataaattgtggcacttcgtgtcatttgcctcctccgctttctccgtttgtttaattaacccctaattgattcgcatttcttaatttgggcatgcccttttaaatgtttcattttttgtgaaatcaaagacattcgcaatagcattttttctaatcgctcactaaattcgcaatttttgccattttccgcaaatg

SEQ ID NO: 101095 - DNA, 413 bp, Heterodera glycines
gctgttcgtaagagcgaaagtgcaacgctcggcagcgtaatgtccatacgatgcctgttcgtaagagcaaatggacaacgctcggaagcgtaagtccatacgatgcctgttcctaagagcagcagcgtaatgtctatgcgatgactgctcgtaagagcaaaaggacaacgctcggcactcggcagcgtaagtccatacgatagctgttcgtaagagcgaaagtgcaacgctcggcagcgtaatgtctatgttatgcctgttcgtaagagaaaaaggacaacgctcggaagcgtaagtccatacgatagctgttcgtaagagcgaaagtacaacactcggaatctcaatgtccatacgatgcctgttcgtaagagcaaaaggacaacgctcggcagcgtaatgtctatacgatg

SEQ ID NO: 101096 - DNA, 73 bp, Heterodera glycines
attgcttattcatattatttctttacatttaaaaaatatatttttcactctctaaacaaatccggataaaatg

SEQ ID NO: 101097 - DNA, 341 bp, Heterodera glycines
cgacagaaacaaatggagagacggacacctgctgagaatggacggagaaaggacaaaattatgaaaaaaaacttcataaaaaacgccaatttattaagtaagaaaaatgttttgtactaagaaaccgtggatggtcattaattggacttaacattaattgttggacgcataaaaatcgattagacgcataaattaataatagaattattgatccattccactgttcagagaaaagtaccatctctttttacaaacatttttcggttttttattctcctcatttatagatacataatattcccttttagttaatctaatttaatcctaattggcaacaaatg

SEQ ID NO: 101098 - DNA, 92 bp, Heterodera glycines
agttaagtaagcgatttttttataaatttccccttgaaataggcacttttccggacgcttcgcgtgacccgatcatccaaatcgccaacatg

SEQ ID NO: 101099 - DNA, 1003 bp, Heterodera glycines
ttctatatttatatttcctatacaattaattaataccgaaaaaacatatttccttaagtgactcacggtccatataagaagcgatttttttgaacaaattttcaacgcgaaattcgtcttggcttacaaaaaattctgtatccattacagagaatttgagtgggaaaacgtggcagttatagatgattcataaggcgaaatgtatttctttttaataaaaaataaaaccttcgtttaaaacgtcaaataaatcgtccactattaaaccgactaatgccccagctccgccaattaagtgctcagatttttttaatagccgaacttcacggaagagtcttcccaaatttaaatttggccgtgggatatgaactctagcaatgatttcaacagaaagaaaaataattaaaattagtatggttattagcttcatcttaaagactacatattgtataggcttaaataaacgaactttaaaatgaaaatgaaaaaagatatgattctaataatagtttaagtaaaaatatgtttttatcaaaaattgtttttgcttttatatactctaaacgcggttccgccgaaagataattcgctgatcagctgtcagataaaggaaatgcggttccgccgaaagataattcgctgatcagctgtcagataaaggaaatgcggttccgccgaaagataattcgctgatcagctgtcagataaaggaaatgcggttccgccgaaagataattcgctgatcagctgtcagataaaggaaatgcggttccgccgaaagataattcgctgatcagctgtcagataaaggaaatgcggttccgccgaaagataattcgctgatcagctgtcagataattaatgataagcacaaaaattactataaaaaccaaagataaaagctaattattcaactccctagttcttcttactctcaatcgtcacatttgcacaatgtattcaatttaacggctaaaatattttatctttttttaagataatg

SEQ ID NO: 101100 - DNA, 493 bp, Heterodera glycines
ttgtgtattttatgaaaaataattggcaatgtgacaaaattgtggatgtatttgacgaattttaacgggcagaatgccaaaaatatcgccaatttttagacattttgtacgaatatttgtttagagagtacgttggaattcctacagtgaatccaaaatttgtatttaaaaacaaaattgaaattaatgggccaataatttatgcggtgatttgtctggccaaatttcgcaattttagtttaaaccaaattatagtaaacatattgaatagaaattaaagaaacttttcatttattatttcgaaccaaaattgttaaatgaggagagattgaaatttggaataaaattggaaaatgaacaaatattgccaattaatgaattcattttgcaattggcaattgacacagcgaatgaatgccaaacaaatgaaagtttagagggaataattcgagaaaattgtggagaaaaatttgacaaaaagttagagaaaatg

SEQ ID NO: 101101 - DNA, 67 bp, Heterodera glycines
  unsure (1)..(67): unsure at all n locations
tttaaaaaaaatntttttttgaatataaaagtcacggaatgatttgttgaatgttcgctcacacatg

SEQ ID NO: 101102 - DNA, 1003 bp, Heterodera glycines
cattttttggcgtttcgcatttcgcttttcgcatttcgctttttggcgcgaaaagcgacttttacacccctaagaattggattaaattcccataaaatttttcaaaattttacctataaattggctaattttcagtgaaaaactgtttataaatgatcaaaatttccaatttttttccccagcggcgcctatcggcaccgccgcgcccccaaaactcctatttttcttagaaaatggcccaaaatcgcaaaatttggtaatttgatgaaaaactgttctcagcggcgcgccaaaactcttatttctcattagaaaaatgatacaaaaatcacaaaatttgatgattttttggtgaaaatctgtcaacaaattttaatcaaattttcaaaaattttcccggcggcgcctgccggcgccgcctgccggcgccgcctgccccctcttcccaaaaagtttttttggaaaaagcgcgcctcaaaaaagcgttttattgatttttaaatttttataaaattttaaaaaatgatttttgctttatgattttaactattaaaaatttgtagaaaaaatttcgcttttcgcatttcgcttttcgcattttcgcatattttggcttttcgcatttcgctttttttttcatttcgcatttttcagtttcgcaaatttcgcttttcgcatttcgctttttatttttcaatttggcccatccctggtgcaagcattctctgatctaaaccattcattcattctacatacaaagcaaaattccatggcaacaattattggttcagatcgtgctcatctacatcatttgtgcacttaccctcctctattgcattgtttcggtacgtttgctaattttagacggcactcaaaaaaacactcgttttgatgcactttttgagctactttaaaaagatgatcaaaatttggcaaaaaggtgcaaattttcaaaaacccaaactaaggggggaggcaatgggaaaatgccttttgaaatatg

SEQ ID NO: 101103 - DNA, 332 bp, Heterodera glycines
tgctaaaaatggaacacgtttagcgggaacagttcgtttcctgcccccgcccgtaccccctcccccctgttgatgcctttctactgattgaaaaacagcaattgaacactgttttattaacaaatgacacagtgtttacgtataccggcacattacataatgaatgtatagatttttactactcatctcatagagccattcaagaagctgaaaaagttaagataagaaatctcgaagcctcaggggtaaatatatggtttggacgacttttagaaggggtaagaaaagtacagagcatttcggttaatattaatgaagattatcagaaaatg

SEQ ID NO: 101104 - DNA, 53 bp, Heterodera glycines
ttcatgttctcaactaattcaattttaattattttttagcaaatttaaaaatg

SEQ ID NO: 101105 - DNA, 279 bp, Heterodera glycines
tcctgattttttgtctgtgttcacggcacagcaatcagcgaccaacaggaagaagatcacgaaaaccggtaaccatttttttacattcctatttttcctgaaaatttttcgcggctctgtatagccaacaagtttttggtttttgacccattttttaaaaattccaccaactttgggtgtgttttgttattttcagccaagtttcatcccatttatgagaacttctcgtctccaaatagttactcagtttttgtttgttctttagccctttaattcatg

SEQ ID NO: 101106 - DNA, 76 bp, Heterodera glycines
gtctctcaggaatacatatggggcgcacattccatctttgcctgataaagatgacgacacgcccattgcaaaaatg

SEQ ID NO: 101107 - DNA, 586 bp, Heterodera glycines
tttgaccctttttttaacggggcgttcactacagtttatccaaaaaagctgttgttgacaatttaagtataaaatgaaaaataaaataaattttatttttctctgaaaattaggctcactcagaccataattttttctgtttgtttttcaaattaagcaatgtgaggatttcatcatttggagatttcggctcttgaatttatacaaccggctttaccccattcttcgaaatatgtttgtaatgtaaacaatcagcgaatagaaagtaggcaaatattgacaacagaagaggcttgcttaagttcttttttcctactcatttgcccggaaattttctcgcgacaatgggagttatcgggcagtttttgggtatttattagcgcactaattaatgtatcttttggcgtaataaaaccattttcgcatcattcatttttgagaaactggttttttcaaaaaaaaaaaatggtttgatgcattacttttgcacctgactgtactaaaatacgcactccctaattgttaaaattccaatcataatatttagaaaagaattttatatacataccaccaaaaatgaatgatg

SEQ ID NO: 101108 - DNA, 125 bp, Heterodera glycines
ggtacaaacaacattggcaaattggcggttttggcaaaaaatgatttaggcatttcaaaacttaaacatcaatatctttttttgaatcatttattttaaattttactttcagcagtcacaatatg

SEQ ID NO: 101109 - DNA, 338 bp, Heterodera glycines
  unsure (1)..(338): unsure at all n locations
tttgcaaaaaggacgnagtatattaaggagcataaatgctcaaaacgttatgatantcaatatggtaataaaataaaaatttatgngagaataaataattatttaggaccaccgcacccagcgcggcttaaattactcatacatggaacaaataaacaattcagaaaattgtaaattaatttacaaggatacaggtggaccaaaaaaataaaacatttttaaacataatttttagacagtgtgttttttatacatcccaaaggatcaggtccattaaggaactttttagggtatgaaaacaacccaaaatccttttaatttccaattttagtgaaatg

SEQ ID NO: 101110 - DNA, 67 bp, Heterodera glycines
ccctagcattcaatcggaaaattagttcatgcatatatgattatgtcatttttaggctggtgccatg

SEQ ID NO: 101111 - DNA, 1003 bp, Heterodera glycines
ttatttttttggtacttttcaaagtataagaaaattgcttaaaatttcaaaaaaaatactgaaaatattttacttttttgggtttcggggggggggggggggttagcctcctcaggagggtaggcggtcgacggtcccttggttttcacacctcgtcataccccgttttttcctttttacccgcaaaacccaagggttcgggtctttttttcttgttaaattaaataaaattagataatttggatttggtttaggatctaatgtttaactattcttttcataagtaattttagtaaggcaaaaaatgtttttcaaaattattcaattttaattaataatggctagggaacgtctttttttctgcggctttgtttcgacgagatatgcatgaaaaacacatttttagctaggaaattcttcgttttaacgccactattcatcactaggaatcactattttggagctttgcaactaaaaaaaattatttgaacactaaaatagttttttgcaactattctggcgtttcgccactatttttggcactattttggttttttggaaaatttcccaaaaaatgcaataaaagcgaaaaatacattcctaagaaccaaactaaaaatttcaaaaatacaccccctaagcattggaaaattttctcaaaaattcttccccaaatttttttttctagctcaatattcgctaagaaaatattggaatagaaatgtaccacatttgcactgctaccagttaaaatgcttaattttttgctgaaaattatgtcactattcgttactatttcggactttttcgccactatttttgccactattttggcatttttttgtcactatttagttaattattttgggatttttttgccactaaaaatacgatccctaataatggcatttgtgcccaattgcagcagaatgcttccctcccccaattgaccccagcagacaaaatcaatttctgacggataaagggaggggagggaggaatg

SEQ ID NO: 101112 - DNA, 154 bp, Heterodera glycines
gcaaagacaaaaatgggggaagaatgccgacatttttcaatttttgttacctaattgtgggctttttaattttacttttttttttcccccaccaatatctgggtcagaaatttcttgcccactattttcgctttcaccgcccgacgccaaaatg

SEQ ID NO: 101113 - DNA, 211 bp, Heterodera glycines
  unsure (1)..(211): unsure at all n locations
tataaantccttgttttaatgaaaaaataattaattatagtatgcttcgaaatacaaatggagctctaaaaatacatggttttgatgagaccacaaattgctgtgtcaacattgtaaggacatatatgtcttaaccctttttgtaacttgttttttattttatgatgacatttttcccttggcgcctattgcaaaacgcaaaaagacaatg

SEQ ID NO: 101114 - DNA, 72 bp, Heterodera glycines
atgggttgttttaagataaacaatcctgatgagcgcagctactgtttattttatgccttacaagcaacaatg

SEQ ID NO: 101115 - DNA, 112 bp, Heterodera glycines
catacttttaacaaggaagagaacgactggggattcaaatatttcattacttttacggtgagtggcagaaaagaaattttttcaaatttgctaaatgttttgtcaaaaaatg

SEQ ID NO: 101116 - DNA, 1003 bp, Heterodera glycines
aaccaaaaaatgccgataggcgccgccgccgggaattttcaagcacttttcttttttccacttcgaaatcggcaccggtaccgctcttttcaactattggcattaagattcgaattggagttgcaattgttcggcaacctttcgaattgtcgcgcaaaacaaaggggcggagaattgcacagggaaacgcattgacaatgtgtttgacagcaaatcaaacagctggggattccccactttcattgctttttgggtgagggctgattatatataccgtacttactgaattagaacccccctttcgagggggctgaaaaatagaacccccgggggtattaattcagtaagtacggtattctaatgaaaatattctaatcttctgaacgatatcaaagttcatcgactttaagtaattttgtcattatttttcatttcccctggaaaatttaagaaaggccaataatggcagaattggagaaacggccaaataaattcaaaaaagctaccaatcgattcgtctcggggagttaatttgtaaacacgaaaacatacataggtctccagttgcggaaatgccaaaaaacctgttttgaaccggtttaaaactctaaaattgagcaaatttggcacttccaacttttttttaaaataaatgatcgaattatgacaaattggtatcatcgaatcagccattttcgttttttgaaccaggttcaaaaatttctctcattctctgacggcaggacgtcatccactgatttttagatttagctcgtcaaggttttcgattgataccaaatttgtcttggttcgatcatttagaaaaaaagttgtaagtgccaaatttgctcaattttcgagttttcaggttccgtttttggcatttccgcgactggatacctttgttttcgggctttgcttctcgagatgaatcgattgatatataatttgcgccattttttcaagggctcactatgatatatccaaaattaagcaattgatg

SEQ ID NO: 101117 - DNA, 240 bp, Heterodera glycines
ctgaagttccagacgaaggacagaaagcttgtcaaacttctcccgctggcatggacaacggactcccccgtcacggcaaccctggaatttgatgctaaggcatttgcatacgggcaagttgttctgattaagaagtcgtcggaaaagactgaagaaggcagtgacacattttttgttagtgttaaagttcgccttggacaccatgaaagtgatggtcaaataagcaacttcagaaagatg

SEQ ID NO: 101118 - DNA, 181 bp, Heterodera glycines
tcgttttccccaattaattaagtctgatgatgctggtcctcccgctccttccggttccgtcgatgactttgcgcagcgcaccagccaattcttcgacttcatccgtcagggaaacatcgaccgattgcgtgcactgatcgactcgctgagcgccgatgagctgaacaccttgctgcagatg

SEQ ID NO: 101119 - DNA, 209 bp, Heterodera glycines
gaggaccaaatgtttgctggacgaatgggattattgttgatcgaattatttgattttgtttgatgtcgtgagaagacaattttatgttgacgacttattcattacttctgaatatgcaattgctattttgttttagcaactttatcttcgtattttccatcaaatttttcatctttttaagatattattgtaaagcaaacatcaaaatg

SEQ ID NO: 101120 - DNA, 410 bp, Heterodera glycines
aaattttgcgagacatttcatctaaaaccgatactcttcgtgacatatttctcacaattaaaatcgcgcggagtctgtcgagcgcaaattttaaattgttcaagcaattattgtaagcaataattcttagttcattaaggcaattatcgtgccacattttgtcacgaaataaaatgcgggagaattgtcctgtccaagtttatcccttcagtaaatgcttggcaacactttttattttaacaacattctctttttcttagcaaggtatttcattaaatgtaatatttatttattttaatcttcaattttatcataacgagtaaaattaataattaaatgtactaacttaattataaataaaaaaatgcttttacaaggctttaaaaaatttatcgggattttcaattatg

SEQ ID NO: 101121 - DNA, 138 bp, Heterodera glycines
aaaaatttaataattttgggggggaaaatttttttatttcaaagtttaaagaaagaactggagaaaaaattcagaattttgattcaatcattccattattttttatttttgaaatcttaaaaaagtattttagaaatg

SEQ ID NO: 101122 - DNA, 657 bp, Heterodera glycines
aatttgaaacatgtaagcattaaagaaattgaacatcttttgacattcaaatttgtactcattatttctgatttattcattccctggttttacattaattgtccgttttaatgaattgtcattgccattcctcagaattgtatttgacgtgattatcttaaattacaagaacattgtttaagagacatgattttaaattttgctttttactttgggtatagagcaattgaattaaacaaattgcaaaaaatggtacttttccattgtgctgtacctttccaataaaatttcgcttttcagtaatctttggttctaaaggtcaaagtctaaatctaaaattttctattgtctgtgatgatatgaatctgttccgatcaattaaaatgagtccgtctgccttggcatagaccccgcttagctccaatattggcacggttccattcttcacaaaatttcgccaaatgaaatttctattaaaaatgaaaaactattttaaaaagccgggatttccaggaaatttctttaacaaaatggaaaaatgaaaaacaacctttaaaaataaattttataaaaatttgaaaataacttcacgaagaaaggaaaaatttttaaaattgcaaaatataaaatctcagtttttggattaaaatttcaatg

SEQ ID NO: 101123 - DNA, 119 bp, Heterodera glycines
aaattggaaatgttaaacaaaacctttctttcgaaagacaataaggcattattaaatttgcttaatatatctgcgtgtaatgaataatatatttttttgctccaaacagcttcagaatg

SEQ ID NO: 101124 - DNA, 240 bp, Heterodera glycines
ttttgttgttgtttgttaacttcgttggtattataattttttttgttcaacttcgtttgtattaatatttaattaatttatttaatttaacatatacgaattaaaagcatggaataaaaattccacaatatgcgatactaattcatactgtatcctttttttttgtttttgtttccgtccaaggtcaggcttttcccgttttcttttttgtgcaaacaaaaatgagtgcgtttggagatg

SEQ ID NO: 101125 - DNA, 158 bp, Heterodera glycines
ttcattcggcggcccattccgtcgtcagaacagcgcgtcggctgcttcaaggcaatgggagacagcaaccatctcgaaatatcaccgagacatttgatcaatgtttagaaatgaattgtcgaataaccaccgaacttcactttaccaactccaaaatg

SEQ ID NO: 101126 - DNA, 685 bp, Heterodera glycines
tttgaagaaatggacgggccaccggtggaattgggggactcgatcaaaccccgggagcaatcgcccaaatcggactcaacggacacaaaagccgggactcgcccgaacggacccgacccgggggcctagggggaacggtgactcgaattggggccccctctcgtccctctccctcaaatcgtcgaggtcaaatgggagcgttcgccgaagggagtgcctcctccctacaagaacagtgggcaatggctgataacggatgggaaagcaattcaaattttggcgaaatccgatgggaaccgaaaaggaggaagaaaacaatttgcagaacgataacgccgacgaggggacagagggagaggggggaaagacgaaaaaaggagacaaaacaaacaaagatgagtccaaaagtgcaaaaagacagatgtctccctcctcgtttgcaaacgggggattcgatcaaagggagggggaaaacgacgataaacagcataattttgggcgtcattttcaattgacccgcccctccccccaaggaaagggggcattccaccttcattcatctccgcacagcattcagtggccgcacaattcgccaccatcaattgggagattctcccatcttttctcatccactttttcttctagcacatccccaactgatttgtcttcccaatcttcaggaatg

SEQ ID NO: 101127 - DNA, 59 bp, Heterodera glycines
ttttcaaggccgaaaacaaatttaaattttcatttccatccttcaaaaaaattaaaatg

SEQ ID NO: 101128 - DNA, 433 bp, Heterodera glycines
attgaaagaagagccccttttttgtttttcaatgagaaatttttacgtaataaatttatcattaaattccttaaaaatgcgcgaattatgtagtaatttaaatggtaggcattttggcgttttgttttttacgccagccaattcctttggaaagacattttaatgcatgtgcataacgcacgacaatttcaacacccatcagaagtttcttgttttaatttaaaatttttgtttgttaaaattcgatgaaaaagtgcgaaaaatataggaggaattaaaataagaatttttttattagatgtgtaaagtaaaattaatatgaattggtttatcgtacagcaggtgcggtgccattgtttttattaacacatctaaaagccgattttttcgtccattttcgcataaatgccgcccgatactgaccaaggcaatg

SEQ ID NO: 101129 - DNA, 1003 bp, Heterodera glycines
tagtgatcggctgacgtctacgatacaatttgaaggcagaaaactgactaagagcatcaacatactcaaaatgcagcaattctattagtaagaaacaggggtggagcggacagaaatacccctcggtcgtggaacacgcactcaaattgccgcgtttacggatcgagctccaaccctagtaagaaatttaaaacgaaatgccgagattaatgcagaatgaatgtcttacgaccacctagaaatgcacacataggagataaaagtagcaaagacgaggcacaaatataaatcattttatgatacatatgtaagttaccacaacaaatataggttgacaattgagaaaataaatttattttcacttctgacgaaatcacatgttacccataaaaccgacaagaaacatttatttattcggcgcccgttattttaaatgaatatcaaaaatatctacctaatccacaagaaacccaacttttagagcttcagaaaaaaaattttagctcctcaaaagatcgccaagaaacgtatgtattattctattaatcttcgtccttgttagagtttttcctgactaggtatatataacgacactggaaaattttaaacctaaattatttatcaagaaaaaaaaaattaaattttggcgatctttttttgagaaatttcatcaattcttaggggagtagtttccgatttttatttcatttttaatgggcttttttggaaaaaaacgccaaaaaggcgatgaaaatcccaaaaaaggcataataatgtcaacgtagaagcttcaaaccgatttgattaatatattggaactaatgcgcagaaaaaaggcatatgcctcaaaatacgttctctaatgattaggtataccttttccattccatttaaagttttaagtcaacggttttcgttttgcatttattaaatccctaatagcttgagacatctctaaataaatcgaaaatcttcattcaatttagatttgtaaattcgaatg

SEQ ID NO: 101130 - DNA, 1003 bp, Heterodera glycines
caaaaaagtcgaaattttataaatttcttctcaaatgttttttccaggcttaaaaaccttttcgctttttggtaaggttctaatagaacatgttaagagctttctgataccaagattgatgtatttggataacaaataaaaaagctatattggaaaaacatgctgggccgaaccgtgagggccgaactgagcggcaccgtttggcatataatatatataataaatttaaataaaaaagcatttttcgcaagttttttaatttttttaaattgccaaaaattaaaaacattacttaagtaatttataaaggaattattaaattttaaaatttgttctcaaaatttttaaaaatcggatccaataaagaaaaacgaaatatatatttaagagatgaccaaaatttttaaaaaccaacgctaaaatggaaaatttccacaaaaattcatcgcccctatttacataaaattatttttgagttttcggtttttaatagaaatagtttattacttttttggaaaaaataaacaaattcaaaaaaccgaaaaatcgaaataaaccgaaaatttttcttctgttttttcgggtttttaaccgaaaccgttcggccgagaatgttttgagtttttcggtttttatccgaaaccgttcgaccgaccctcttgtccggtctctactaaaaactcatattgactgtacaacaaacaaatttataaatagaggattttatagcatgtagtttaaataaaaaaatttttctttcttacagcatagagcaatgattttatgcaagcagattatgaatattctaatgcttgcttttaagttttttttttatcaaaaatagtaatagatttataaattatttacttaaaagttttattttaatttaaaataaaaaaaacaaacaacaaaggtatttatccatccttatgttgacggaaatggacgcttggggcgccttgtgatgaactggattctcgttcgcggtgggcttccaaagatg

SEQ ID NO: 101131 - DNA, 188 bp, Heterodera glycines
  unsure (1)..(188): unsure at all n locations
aatgccatcatcgtccaaatggcgtctggaacaatgcganagagtgccgttttgatgtcaaagtgccaatctnntcttaaggtcaatgggttctgtcgggccgtgtccaattgatactttgcaaattaagagttcatcttcgcccaattaatgctgccccttccactgcaatttcgaaaaatgaaatg

SEQ ID NO: 101132 - DNA, 801 bp, Heterodera glycines
tgtaacctttttttgtctattcggataagtaagaaattgaaatattcgtattacttttcctcccttaaagctttataatgaaagcgtcgttgtctattttggatttgccgttgcaattctgtaattccactttggaatccaaaggaatttgattcgcttttacaaaatagacagtgccgaaatttgtagatcggctaaaccttaactgaaacataccatatcagcgagacgccatgctgatttgttgtaatcataataaaaaggcccttattgtttaattcggcctttcctataagcacaatgtgtttgatgggctctacaaaatattgcttctgcaaagcaattattttcttggaggctttaattttctgtagtcatttgatatgcatctgctatttttctagtcacaaacaccaatatttttcggcccgaattttataggcgtgaaaagtactgatttccaacttctttctattcggatacacccaaaatttgaaaagcatctttaatttagcctcttttaaatcttaattttctgaaacccgaatttagaaaatatgaatgtatttctgcgacgccttctatacttaattcatccataatgggccaaaaatcataagttaagaccaaaagagggatgttagtttcagccggaatttctataaaaatgttcgtgtgtaacctatctttgtctattcggataagtaagaaattgaaatattcgtccgagtagccagtccactatttttggccataattgccttccttgccctatttggaagcaacggagcatccgaaatg

SEQ ID NO: 101133 - DNA, 165 bp, Heterodera glycines
ccttaaaaagtcatcagcaagatcagattcattataaatttatgtgccattcgggagagaaattggaaacaaaattttacagaaaaccatggcactaattattggcataaaaattaatcaccggaaacatgcgcatagtctcgcgaaggcaccggtccaagtatg

SEQ ID NO: 101134 - DNA, 1003 bp, Heterodera glycines
cccccccccctcctcatttcccctaaaaaatttttccaccatccctccccctcattcctcagttttctgcaatttttcccctcctgcattttccccaatttttcattgaatttcccctttttttacccccccccccccctcccgcctcagttttccgcactttctccctctccatttcccccactatttacgcctttttcacccattacccccgtttaccctctccccccattttccccgagttttcatttttttccatcatccttgccccacccccagctcagttttccccacatttcccctcctccatttcctcaattttttgttgtattttccaatttttaccccctcccattgcactcattcattcattcattctctcattttgtcagcagtcagttgtccaaccaacagcagcaaccaccgccacactaaaaccatcacgagtagcaaacattcattattttccccgctcattttctccatctcttaactctcatctgctgctgctgctgtttgtgtgtgtgtgtgtacgaaaaagtagtgatatttatttatctttttaatgggcaccttctgctgatgttaggctttttgatataccgcgggcatagccatggccaattaaattgtgtgatatttttgggagttaattaattaattaattaattaaattttaatacaaattttagttgcgaaaaattaccgtcaattaaattttaatatttttgaaaagaattttttttttttaataggcattttcaatttcacaaatatatttttctggcaaattaacattttaaacccatccaaaatacctatttttgttttgttttttcaaattacttttttttcattaatatatgtacaataaatatattttgaaatattttgtttcatttttcgtcattttctaatgtgtacataatcaatcacttctaccgtttttaaaagatcacacaaaatattattattatattattattgtttttaaccggtaatg

SEQ ID NO: 101135 - DNA, 533 bp, Heterodera glycines
ttcaattttgaaggcagaacaggcagaaagagattaattgcaattgattagttttaatgaatagtttattgagtttctgttaaaaaaataaaaaagattaaaaatttggttggaaaaacaatttatacaatttaaatataaaattgtcaaattaagaataaaattttaaaaatatgactattttttgttttaataataaacaatgagaaaaaataattgaattcaaacatttgtccagtaaaatattccaacaaaatttcggtcaggaatttaagtagttaattaaattaatgatggcaaccattggtaattaaacgatgcctaattaccggctaattagtgaatgttgctgttctatatatttttttttgaatgtgcatttgtgcattggaccgtcaacacatattcacacatattgttgtctgtttgtttgcacatccatcggcgggcgaggcgagaaatttggggctcaaatttggatgaaacattttcccgtccgcgcggctaatggatcaaagcggaaaagggacatg

SEQ ID NO: 101136 - DNA, 1003 bp, Heterodera glycines
attcgcgcagagagttcggatggcagacgaagaaactgcagaaaattctgcatcagctgaggacgggcggacaaagaggcgaaggcattttggaggggacactgcacaaattgttcagaaggattttccggaaatgaacaatttccattttcaatcattcattaaataaaggaaaatgattaaataaatattcactcattatattttttgaattcattaattgtcttttcttcaattaattcattttccaatctaaaattgaaaatgttttgcttttctcttaaaaagagttaatttataattttttttacaattaatttcatttattcatttgcttattccctcccgtcttttcattcccttctcctatttgtctttgcgttttttcatttgttttaaaccattgacaaagaataaatgagtcatccgtccgtcccgcaaatttttccaattccttccaatttcgtcatatttcacaaaaatggtcgattttgacaggaaattcccccccccccccccccttattcacaatgacaatgacatgctaatatgtagaatacaagccttttatttttttttatttagtcgatatacataaattagtgtgtgtaaaataacggtaataaattaaatttttaatatttttaatttggcgttatgccataattaattataaaaaaaatttattttatttctctctaatgttttaattgtcacccctttaatcagtagaataatgtggtgatatttctttgaatgaataaaaatttgttattttatttcattctttggcttttctcgcaattaggtaatttttttaaagaaaatattgactatctaagaaatgaaccttcgcctttttattctcattcgcatttcaaccgtttttgtgaaatacttttttttatttaattttttctcttttttattttatttctttaaaaacagacatttttctattttcttttttttcaccctttgacgacaaacagaagcagcaatg

SEQ ID NO: 101137 - DNA, 159 bp, Heterodera glycines
aaacccacaattttttgtttctcatttcctcaaatatttattgaaaaatttaattcgcaattctgttaattggctaagagttcattctgtgatgctattattatacaaaattttttaaaaaacaaaatttacacattttttcaaaacattttggtgatg

SEQ ID NO: 101138 - DNA, 292 bp, Heterodera glycines
acacctatttcaaccaattccaattcccacaaaagtgtcctctattaaggaatttttttcgggggttcccaacgtcaaaagtgccgcccttttaccagttttcgtttttcaggtttcccatcaatggcatcacattttgtctgccaaatcgttttggaaggattgggccgagctgcgcaactatcatcccccatggcgtcaattcttctccacactcagcattcattcaattcgacaagtggctgttcgacgcccatttggacgaaattttgtgcacgacgcatgggacatg

SEQ ID NO: 101139 - DNA, 235 bp, Heterodera glycines
tttgttgtttgttcgttcgtcgtataaaagattatttatacaatttttaattgttaaaagctggacaaataggtatgttatttgaaaaaaaaaatggttacgaataggaatagtaacggtgtgaaccagggatggcacggaattccggtttacgacatttttggagtctgaattccgatttgcgaaaaatttttgagcctcggaattttccgaaattttttggggcctcggaatg

SEQ ID NO: 101140 - DNA, 420 bp, Heterodera glycines
cgcagcaacgatcaggtagaagaagctcatcttggttgatccggagaacaagcgcggtcgaagttgacgtgtgtggaagacgtgtgggttgaaggtgtcgcgcaattatcgtcgttgagattattttattattgggaagtgagcgaaatgcgaatgtccgttccttttatacaatgtcagccacgacaattcttaaacccaacattttgccaaatttcatttgatatataaggggatgcgttttcatccttttcaccttcgctactaccatttacccatttcgaagtgcacccgctgcaacacttttgtgagttttttctttctttttttcgtgttgtttttgtattcattttatatcccctccatttgttcagaaacggcctcgacaaaacaagcaaattcttcaccaacacaccgatg

SEQ ID NO: 101141 - DNA, 1003 bp, Heterodera glycines
tgcttatggtcccaatttgcttttttattaatttttttaaaccggtttccattagaaaataataaataatttggcgttcgttggccgcaaatatttccatcatccgccggccgtaaatgtcattttaccccgaaattcgttcttctttcttcagaaagttatgtgcttaactcaaagcattgaccagcagcagcagataaaaccgctttcagtttgtcaagctcattttttattaaaattattttgtttgttttaaagctgaattcttaaaagagttagcgtcgaatgattcatagccgccactcggcaaaataatttggaaaacatagagcatattgacttccaagtgaatattaagcaataaatgaagctataattggggacgcctagctaagtgaaatcaaaaaaacaaacaaagacaaactcgagattagttgatctaattatccgaaacagcgaaaactaatgaatgtaaataatttaattggtccaatgacaaataattcatcattttaatgctaatgccttttttagcttttcccaaattaacttttaaacaatcattttcagctgttcaaactttttcacatgaatgaatcacatttctcctctataaatatttaaggccaaaatttgttcatccaaaaaaagtcatttccaatttttctattctctctttcgtcactaaattttcattatttcaatttaaaatctataaggcttaaaaatgaaattcataattcttattttattgatgcttatatatcagttatataattccctgcaacaggtataataagttaaggaaaaaattattattttttaatggtttgtattcaaatattctatttttgtataaaatctccaactcaaagatcctttatttttattttatgttttgttttaaaattgaaaacaatttagacataatttgttaacaaatcacacctaaatagttcaaaacataaatggttcttgaaactagaaaatatgatacaatatg

SEQ ID NO: 101142 - DNA, 355 bp, Heterodera glycines
ttttttcttcctgatgctcattatttatttactttctaatccattagttacctaccacttattaaagctaacaaaataaatcataatttttcaatattaattttctcacccgctcgttccaataacaattacttttttacttctataatcaactcacacaaaaatataatatttttgtaactttaaattttaaaaatctccttttcaactctctctcttattattattgaatttttaccatgactatttaaatatttgattgccctcttccttgcacttactcctctgacccgagcattatttaagctccaaattcctctctaacctcttctattctctatcgctttccaaaatg

SEQ ID NO: 101143 - DNA, 976 bp, Heterodera glycines
aaacagatttttttttattgggaggagcgcacttcgtgtgtttaccatgttgtttttgtcgtttgttgtggcgtaaaacaattaaaagagacgatagaaatcgcaattcaatagcaacgcttatatcataaaattaggtaattgcaattttgaatttaaaattaaaaaaatcagagcaacgaaataaaggcgacgggtccaaaatggctttacggcagtttacgcgttcaatcgatgaccatctttagtttcttaggctataacttttttcattactagataaatgcttatatcttatatttttggtatcaaattaaagcatacagctgcggaagtttgtaaatacactgtctttaaccaagacaagaatccaattaggaatataaaaataaaacttattggttgttgttgattgtttataaaaacgcctttacaaaaaattggcattttgtcaacgcgctttggcgcttcagcaatggcgtcagtgtcagtgcgtcagcgcagtgcgtaatgcccaggcgtccttcactccacttcaaaaagaagtgtccaattgacacctactttgtggcggtgcaaaaattgggatccataacctttctttgctgttaacccaatatttaccactcgccgggcgagcttcgctctatctgcattttaaatttattattacaaatagcatctaacttttgtagtttttttcccttttggggccacacacagatttaaaaaagtcaacaaagagcgcgttgaacattcgtatggttcccatattcataaattaacatatttaaatggcggactcattcgatgttactttggcacagataaagggggggggcgggagatcatcgatagtattatccttttaaaatgaatgtgtgaccctcaaacggaaaacacccttttgtaacatttttttaaagaatatttttgttttgctttgcttcctgaagagaatacgcaactgaagatg

SEQ ID NO: 101144 - DNA, 81 bp, Heterodera glycines
tcttggttggacaaaaaaatattaaaaaaaaaatttttccaaaaatttgctaccatttcgtcatcctccgccaacaccatg

SEQ ID NO: 101145 - DNA, 216 bp, Heterodera glycines
aatatccaaaattgaaaatcgtaagttagcgttgataattaagacattgtttctagtttaaaaccattaacagaatataaagtaattcacttattgtgcggattagacaattccaacttttttttttaattttttaatttttgtgtctttttgtttttttattttccaaaaatagggtcaagaggtgtcgttttcaagaactgtccttgaaaaatg

SEQ ID NO: 101146 - DNA, 1003 bp, Heterodera glycines
ttgactcggtaaggcgctttgacaaagacggctttcgttttgcaattagtcggtcaacattcggaaattggtctcgaattttttcggcaattacgtgcaatcattttaaaagaaaaaaaacataaaagctaaaatttattaatttttttagcgcaaaatcaacaacaaaagcgaaattttcgtttttttgcttatttttgacataatttattaatttttaagaaaatttaaatttattcaatattctcgagaaattttggcgaaaaaatgattttttgaaaaatttttcgggttttgggctcaaaaaggctaatatagctgctgggggccgttctaatagaggtttttttgaaaaatgccaaaatatggacataaaatatggaccaaaatgccaaaatatggaaaaatatggaaatatggacataaatcgcgaaatatggaaaaatatggaaaatatggatatagaaatccttcctagaagcttcaaaccaagctaaaaacatgtttttcgtgcgtttcaggcctcccacagtccaggaaaaaaatatggatttccatgtaattctattccctactcataatcaaaaattgtatcttttttggtgaaaatctattaataaatcacactcaaatttttaaaaatttcgcccggcagcgcctatcggcatcgcgtgccaccctgtccccaaaatttttatggaaaaagcgcgccgcaaaaaaaaacagttttgtaaagcaaacaaaaaaattgtttgcattaggtcgttaaaatttgtcaggaaatttgaggatttttgtttttttaaatttattttttgatacaatgtgtgaagaaaactagcattttttgatatttataaatgaattaaataaaaatgaaagaaatttaaaggacatttttaattttcaaactcaaaatctgaattttcaaggacgtccttctttgttagtccaaggacgatggaaaattatagtcagtcataaataatatttcaggtacatg

SEQ ID NO: 101147 - DNA, 84 bp, Heterodera glycines
gcgcattcttctacctagaaaaatgcttcttaaattttttaattaattttatgcagaaaccacaaaactgcaccattgccaatg

SEQ ID NO: 101148 - DNA, 176 bp, Heterodera glycines
aacaacacaaaaatgaaaccatttataaaagcctcattaaaagcatttaatgatgtattaaaaatgttgcttaaagttattcacttgacttaactctattttatttctgtgaatattaaaattattcatttatttcaatttaaagaacaaaatttcatcacaaaaatttcccaatg

SEQ ID NO: 101149 - DNA, 1003 bp, Heterodera glycines
aaaaaattttttcaaaaaattaagcgatttttttttgaaaatattttgaaaattctcagaattcgtcataaatttgaaaaaatcgcctgagaattttcaaaaattttttcttgaaaaatttctaaattttaaaattcaaaacggggttctgaattttttcagaaaaataacaaatttcgagaatttcagaaaataaaattctcccgattttctttatttttaagctttataccattaacattgtccaaccatggagtgagcttgaactttgctttattattgacgcgatgacattttttggagaaatattcaaaataaatttcaaaaattttccactaaataaatcattcgaaaaataatctctctgtctccattaatctgccagtatctaattatctccccctttctaagggtgttgataaataatatacccgggcatataattagagaaaatacggtatgtacataagggatggcattccgccgaggctccaaaaatatgcgaaatgaatgtttttgggttagtaggcgaaatgtcaataggcgatatgtcggtaggcgagatgtcgagtaggcaaaatgtccgtacacacagcggcccaattttgtgctctcagtgcaaataggtttattatttatttagtaatcagaacgccaaaactttgcaaaacttaaaattttttggggattttcccttgtaaaaatagaagagccgatctcgagttaaaaactagacagctaaaacatgaactgtttttacgacacttaaacttgaaaaaaaatttcattatgaaaaattgtaacactccaccttttattcgaattcggaacccggattaaatagttgatccgtagcgattcgatggtcccaaaaactccaagaaacatgttttaacgactattttttccaaaaatgagggggaactatcaacagtagtacagggaaaattttaattctttatttttgtttaaaatttttgttaaaaagatttcattttttatg

SEQ ID NO: 101150 - DNA, 346 bp, Heterodera glycines
ttttttaacgaaaaaaactttggttaaaaccttaggaaaagctataatgacgaaattgaccttcataaagcctcggaaatggaattttttaaacggaaattgaatttgtttttaaaaaatacctatattggttttaatgattttttgacaaatttcagttacacacaaagtctttttagacgcctctaataaattttctatgttttatctctacggaaatttgttaagacgactaccaaattttgcgcaattttccttccatgtctcacattttaaattaggtgcacaaattattcgatgcatcattgaaaattttaattttttagcgaaattttcgccaaaaatg

SEQ ID NO: 101151 - DNA, 228 bp, Heterodera glycines
atcattactaaaataggaggaccatggaactgcgttttttttgcaacctatcgaattgtgtcagaaaagaccgaagcggagaattccattgggacattgtgtgaccgggttatcaacagatcaaccatcggccgtggatttggaaatttcattacttttgcggtgagtaataatttaacatatttacttaattggcatatctaattatggttaattaaggaattgatg

SEQ ID NO: 101152 - DNA, 237 bp, Heterodera glycines
tcttccaaaaaaataatgaatattgtgcatttattgtccgtacatggtggcccccttttttggtgcaaatggaccgttatcttttgtattcctgtttaaaaattttttaatccaaatttgcttacaaaaaatcgccgaccaaaaaacaagtttggaaaaattatcatcacgttaattagaaattctattttttatttatttacttatcacataaataaatttcatcagatatgcatg

SEQ ID NO: 101153 - DNA, 525 bp, Heterodera glycines
  unsure (1)..(525): unsure at all n locations
tgggcctattaaaaaattcggaaggccttttgacaaattttaacagtggaaatcaataactaatcaaaaaaatcttttgaaagactaaaaaatgtttaaaattactaaaatgcattacaaatttctgtaaaacctttaaaaaattagggaaaaatggcaaaaagaaagcgttttttgataaaaatgtaatccaaattttatttttttnttagaaatcggggaccggacgggtcgaaaaatctgtctaatcaaaaaccggaccatttctgattgattcgattcaagcaaataaattttcattggtcaatatctgtttttatgatcagtagaattggaattaaaatttcataaaatggttttatctttctgtataattgaaaagatttgagaatcagtagagagaaattatatatacaaattgatgataatttttgaatgaatgcctcttttgccaaaatctaagcgctttttgagaatatttaaataattattttataatttaacacaataaaattgtcaaaaatg

SEQ ID NO: 101154 - DNA, 974 bp, Heterodera glycines
attttgttgcttcggaattgcaatttcttaacttgctaaaagattttcattttttttcactttttttttctacggctttttaaagaaatagaatttaagcttttgttgttttttgtacttttccattatttgtttttttttatcatttttatatcccctcattttatcaatcattttttaatttattttcatttatccataaaatattcacaactctcatactctttttcaatcccttacaatcgctagcagctaaaaacatttgctggaaaaatgagatgattttatgaatgaattaattgccagcaaaagttaaacaaatctattcttactatattgtattatttttagcatttgatttaacatctgctgtcatttgcacaaataaattccattccaaataaacaaattcagcagcaacttgtcaaccaaaagataataaacattcattattcattgggataaaataataattttcattttccgattgccaaatcggcttccttctttatttatctgatctgactttgttggccgatccgtcagcgaaacgaaaatatccaccattaattaattattcttttcttttgaattttgtttttgcatatcatttccatcatggccttggggtgccccgccccctcccccttttttctcctctgcccattttcccattttcattttgcatttttttttctccaattcgttggggaagacattttgattccgaattccaaattatgaaaatccaccaaaagtttggcttttttaaattaataaattgacacaattaattttgtagagaatgaatgagtgatgcattggcagcaacagttctgcttctgctgatggactgggctctcgcacctccttttgaaaattttacaggcttttcccggcttttccaaagcctcgattcacattttactctaaattgatcatatttgctccactttcatcctggcccaatcatg

SEQ ID NO: 101155 - DNA, 148 bp, Heterodera glycines
tttctatgatttttaagatgatcaatatatttcaaaaggtccaatgttcgaaatgcaatttctcaaaagatttttccaaattttgtcggtgcgtttgccccgaatctcggcttttccgtccgaaaggtcgaacttccgacggagaatg

SEQ ID NO: 101156 - DNA, 1003 bp, Heterodera glycines
taaaaatgtttatcttaaaaaaattctgctctgatctgaaaaattttgatcgaacgccggctaaaataaacaaattaaatattttatcaactcgaatttttcaaaaagcttaattgtataatttaaaattttttatccatcttttaatataattttatttgcgtcaaatttttgttatttttccacaatttctgaaaaaaaaaataattttactcaaatgatgagagtgtatcaccaattaaaatgtgttttcgtgcttatctctgcaataagtgcgcagaattttaggcatttgactaaaaatcgcatccctactaataaatcgaccatttatttagaaatattttatactttatatcacaaatctgatagtatattttaataaataaacgatttttttaaatcattttattttactttatataataattatgcataaatgcttcctaaatatttttgtggtagcgatgattcaatgtgaaagtggataaaattgtccgttttgtccacataaaatgaaaaaaaggcatttgcatcgcttctctcccaaacactgcactgatttgtgaatatggaatggacaaaattccgatcagcagaaagataaagccaataaacgatgagtcaccgtttctattggcttttttggctttttaagcgattgcaaagccagctaaacccactaatttaccaatcattttacccattttcagcaaatttattcctttcccaaaatcaaaatgaatttaatttgcttttcgctcttttttgttgttctggcgacaaatgccatcggtgaagggtaattaaatgaatgcaaatcaattttcaaatgctttctgtttctttagaattgccgaggacaaatggaaaaagtgcgaattgaacggaatgatcagaatgggaaaggacgttaaaaagtaatttgcaaataattttggtgataattaattaattttcccgcattaaaattagtctgctaatttgctacaagagcaaaatg

SEQ ID NO: 101157 - DNA, 823 bp, Heterodera glycines
atattaacgcaatgggctgacaattatttgaatttttccatttaaaatgaattaaagtcctacttcagaactttttgttcacggtatgctacattgactccctcaacaaattttttttgtatcagaaaatttctctggcaaaaaataaagttttttaagaaaaaacaattcctccccccataaaagttatttactagaaaattaaaacattaattttgcaattttacaaaaagtgagggtagtgattgtgagatagggggggggggggtgaattgatacggggtggggagttcgaactgctcccttcttgtcagccttacaattagggtatcattttgctatttcacggtaacgtaatttttgtcaggcttttgaatcaaatgtccttagaagtgccgtgtgaaagcgaccaatcttcaggtgattagtccttcagaccgaaatgcacaaaaaacaacataaaaaatacaaattttcacttatgttctaataacctatttttgggtatgtattttttttgttgccccgttaaaaaacaaacaaaaataccaatggttgaagaaaactataattgtgccttctgtattctgaccaatttcttttacacttttcccttaagatcgctattcttttgtgctggccgccggtttcgcaattgggctgattaatttgggtttgtcctttcaatttcaaggcagttcatttaagtccattctttttaggaaaaggcaaagaaattagtgacactgaaattgccatttcgtcgtctccctcgttgaaagaccgtctgattaaactgctaaagggggctgagcgaaggatg

SEQ ID NO: 101158 - DNA, 1003 bp, Heterodera glycines
gtatttggcgtaattgtccatctgtttaacatggaggagcaaagagttgtcgtatctgtgcaatttggcaaaaaaggattgaattggatggatggccaatcaatacaataccttcgcctctcggcgggtctcctcagcacatcataagcttgttttagctccaaaaaatcgttttttgtagcaccatcacatttcatgtcaggatggagctaaaagatttaaacctttagaaaattaaacaaaataaggaaataattgacagaacgagttcacgagaaaagtttcaagaaagtcggttttagaagccaaactcaatttacagggacaaaaaaaaagggtctaaaaatcaacaacacaaagagaatccccaattaacaaaagatgcgaactcactttgcccaaaataataccgttttgcactttgaaaagtaagcacttttgatgtcgtattgtgaagcatcagatttaactccgagtaaatcgtacaaattcttttccgatttttggacataaaaagagagcaaacttaaaaatggaacggaggaaatttgagacggatgggggggggaactcagaaactcacttaatggcattgcatcggttgggagaacgtgggcacagcaaaaggcacagagagttcacatgatttgaatacaaactggaccaagcagctttatttgcgacaatgagcacattcatacgaagctaattgagatgaataaacaaaaattaatttaataacgaattttatttcagaaattttaagaaaacctaaaaataatttgaaattgcggttaaatttaatttttggcgttgcaaaatattggtaaattaaatttttgattgccaaagtaccgccttctcatcaaaggctttgtttctgttagccatttgctctctgtttattttgttcaatttcatcgtgtaaatttggtcatcctttattcacttttcttccgatcattcactttaatccgtttctgaagctcatattgaggcaatg

SEQ ID NO: 101159 - DNA, 150 bp, Heterodera glycines
attcggcatttagataaaacaataactaacatacatatgtacaattattgtattattcagggggaaaactaaggtgggcggtcaaaaacaaatatatacattatatatatcatatatacgtgaactgtttcattcagatttaaaataatg

SEQ ID NO: 101160 - DNA, 1003 bp, Heterodera glycines
atcggatcgattttcgaaaaaaaacttacaacaaagttttttttttacgttttgcaactttaatagaatatttacaagtttatttctgatgcattaattatggcaattagtgtgccattatttctgctttttatatttacaaacaaaataatcacatcaccctcatttaaatgtctctctgtgatacgatccgatacaaaacggtaccgtactaacaaaatggggcgggggtacagtaattgtcatttttccgtttacggtcgcttttttttgaccaacaaaatcggcagcatctgtcccccttatcggatgctaaaactgaggaaaaagtgcaaaaacaatgtggtgagttaggaaaaaaccaagcagggataaatgcgcgactaataaaagcaaaaaaggcacaaaaatatttaaaaaaatcattggcgacaattgtgggcaattaaattaaattaggcaaaaaaataaagaggttttgttttgtgattagagatgctcgagagtcggaatgaaagttgagcccgagactgacaaggaaaccagccgaatttatgtcgatttgaacacaggacctccaaaaatgcgaatttaacaaacattttctcacttggctaccatcgctgaagggaaaacacagacaaatttttgattttaaaattttgaaaaagcgtgccgcaaaacaggtcaaccttttgtttgtaaaatcttattttttgagcacaaaatcttagttttgctctccggacattgttcgtagaaaagtttagcgtgtctttgtttattgcccaaaattgacataggacgatgggttcgacattgtcaggcttatgcttcaaaacaccgacaaaagggcatcgaaaatccgaaaaatttcccagctcgaaaaccgagaccgatatgtcgaacattatcacgactcattgctttgtgtttatttgcttttacagtttgtctcggctcggaaaatggtcggaatacaatcagcgtggcacgtggcatg

SEQ ID NO: 101161 - DNA, 1003 bp, Heterodera glycines
catccatttccaccggattacggtagccccccatatctatgggaggggtgcaggccaactgagcgccagccatttgagcgccgccaagtgagcgcgggccttttcagtacagaaaccaaaacctattgcatgttttttttgcgaccccgtacctattacaggggtcgcgacttttaagtaaaagaaaatccgaatttttaaagaaaaaccgaaaaatattattataaatacaagtgcttactaaataatgaacatcttgcgaatggacaataaattaaaaggaactttgcataactatcaaaaataaagacgctgtaattaaattggcaatattcttcctatttggtcgaatgcatccattaaaagacggaaattgatgaaccacagagatattaactttgacaaataattttataagatcaataactattaaaaaggcaataaaaataaagataaaagtcattagaacaaaaattgaaacgggaaaaaagcaacaaaagaaaaggaatggacaaatttaaaaaatacacaatgtttatttttgaccccaaatgctgattttattattgtccaattgctgattttgaaattttgcagttcaaaaacaagtgtataagtttcaaatttaatttgtacctaatcgataaatattaaaaacgttgttttccttgctgaaaactttctgaatttggaataaatccacgagagctcaatttgtcaactcccaaccccgaaaattgttatatgtgcaaaaagaatttttgttaaatagtttgaattttcgaacttaaacatcaaatgatagttcggtattttaactaaatttttattaaacattttgaagttatattagggaggaagtgtttaaataatgacatttattttagtgccgtaatcgtgtgcatatatttatatatatcatttcttctatattttttgtaaagtgatacgaatagttatagaattgaattattaaatttttttacatttacttacagtgatg

SEQ ID NO: 101162 - DNA, 175 bp, Heterodera glycines
ccccccccctccccaaccccgttctgttccatcccctctgatcattcattcatttgccttcaattttttacacattttaaataaatattaaattatttatttcccacatttttaagcagttcacttcaacccgatttgttcatcaacagcaaaaagtgcgtcgaccaacaatatg

SEQ ID NO: 101163 - DNA, 119 bp, Heterodera glycines
ggtaagaaaaaatgtttttcaatggatcaaggggatatttgattttgtttttttcattcgaaaaaacacgaatcctgtttaccgtctgaataattattttttagatgatcttagacatg

SEQ ID NO: 101164 - DNA, 532 bp, Heterodera glycines
  unsure (1)..(532): unsure at all n locations
ggtgactcagaaaatttataatgagaaaacacgaaatgcgncaagttcatttatgaaaaatttattgtttcaaggccacaccatcaaatcacaagcgcgtagacaagtgttagaacattgtcaagtgataaaagaaaggatttgattttatggcttcttaatttgtgattttttgtaacgcgttctgttccttatttgtgaatttagcaagttctcctctcgtcccttttctaccagtgttatctgaacgacccccaattcgttttttgcggattcgtttttgtaacgattcgtttttgacccaattcgtttttattatcccgattcgtttttattatcccgattcgttttttgcctgcaattttctaattcataatttcttgattataaaaaaaaacgtaaacaattatatttagtgccataatgaaattatatagcaagcgtattggttctaaaacagttatgacaactgattgctccgaaaatccgaattattgctacaaatggacatctgcaggagtcaaaaaagatg

SEQ ID NO: 101165 - DNA, 354 bp, Heterodera glycines
tcctcattcattgggttgtttttcttcctattttgtgctcccccaatttgctccgtccctccgacaaatatttatttgtttatttattttccatttgtgttaataaatttatttggtgttcgacttccacaaataattgtttgagcaattaaccggctcaacattggcgacgcccgttcttcaggacttcacttcgaacattttcgtgttgaaattgttcgaattgtggaaattcaaaaatctcgtgaaatttttggatttcgcagaaatcttcaaaaaagcaatcactaatcttgtgtgcggttctgctatgtgcagtttcttcgtcaaattccttcctccaaatcatcaatg

SEQ ID NO: 101166 - DNA, 159 bp, Heterodera glycines
tttcgttcccctttggtttatctttaataaaattcaaaaagcgccttcatttcaaatgtcaatccaatccaacattgttcaacataataattgcatttgaaaattttccttttaaatcaggtgagtcaccatttcaattcgcttgcccaacggagaatg

SEQ ID NO: 101167 - DNA, 136 bp, Heterodera glycines
atttttttcaataatattttttcgtattcgagttcaatttttatgttcttgcagaaaaccattgtataattctgaacacactggtggacgacaatattgcaatggctgtgggccaaatttgacatgttttgtcatg

SEQ ID NO: 101168 - DNA, 403 bp, Heterodera glycines
ttttggctaagttcaaatcgttgttgtctgaaacattttccatttgcttctttggctgcactctcaagattcagtacactgtcttcatttcaatgaatgcggggctttttattggctttttaagactcgtaagtatgtatttcacgaacttatttgatcgaaaaataaagcatttctactctttcactctctttttttcttttctctagcattttttcagtaggcaaaaattcgtaggcgaaatgtcagattttggcttagtaggcgaaacgtccgatcttggcttagtaggcgaaatgtccagtaggcgaaatgtcgtcgtgccatattagcgtataataatcatagtcaactctaatacgcattaaggaattttgaatatttaacattcttggtcaaaatg

SEQ ID NO: 101169 - DNA, 90 bp, Heterodera glycines
attcctatcactactcttttttgttatgtatatcaatgatttataaaatattttagtctaaatcaattaatattcttaaaattaaaaatg

SEQ ID NO: 101170 - DNA, 52 bp, Heterodera glycines
tttcgattcacctttattacaactattttatttacagataatttttaaaatg

SEQ ID NO: 101171 - DNA, 1003 bp, Heterodera glycines
attttttcattctctctctcctattcacacacaaatgcatattcaaatttccatccataattctcctttgaccgttgttgtggccgccttttaattttttttttggtgcgcaaatgtgaaggaaggtaaggtgaatgaatgtcccttcaatgctaatttttactcacaccgctggccttttccatttaatatttattatttattcaatttatatacaatcattatttgcaattaataaataccaaacaaaattaaaattaaatgtttcatattttttaaacattttctgtatttgttttttgtcctctcatttcgttactgttacaaaaaacttaactagtctctgaaattttaatagttttgaacaaataaatgctcattcgaaagagcagaattaggactattgaatcatctcccaaatacttcttcggttgattctcgtccgacttataaccatccaaataaggtgctcaaaaaacaaaaagaattaatccttacactttctactaataaagatagacaaattattttttttaaacatatttttaatttataattgtcaaatttcacttataattgatactttttgccaccgttatccaacttatctctgtccatcatcatatttttagctattcttaatgtattagccatccattcatttatggttcacgtgattcatggccactcaatgctctgtggcaggagctaatgctttctcttaaacgagattgttccgccatttcgttgatttcaaactctgcccataatccacagatctccgctcattttttgttcattttcaatatgcttgctcatttatttatattttcgacaattatttatttatttatttttcactttcttttaatttccttttattttcaatatttatttctctttcgcttgtataataaaaataaaatgtagctttaaaatgccaaaaatcaaaaagaataagagttctaaaaaatccatctcggcggccccgtcacgacaaatg

SEQ ID NO: 101172 - DNA, 332 bp, Heterodera glycines
  unsure (1)..(332): unsure at all n locations
tgaacaaaacatcatcatttgaaacattcaagatttcgatttatattcgagttcgggttagggattagaaattagtcaaaatacatgtcagattcgtgattagcgacctttaaaaccccggataaaaaattatcatggttttttatcgtaaaaaaattttgcaaaacaaaagggtccccccttttgtttcaaaaaggcccacttttaaagtagcgccnaagtaatatcacgattttttatttcaaaaaattttgcaaaacaaaagggtttgtatttagatatagattaaaaattcacaaattttcatctatttgacgaaaataagcgcgatg

SEQ ID NO: 101173 - DNA, 412 bp, Heterodera glycines
atccagatgattggcaaacattcatcggaaacatcaaaatgagcatcaaagggcgtgaagtgttcaacgcaaatgcactgatgccctacaaaacctatttttcacatgactctcctactcacaaacagcaaaggactcgcacttgaatgctgcaggctattactgggatacgggcgagacattggagacggggccgggatgcattcaacgcagggatttgtttgccgaaagcaaaacagcccaatttattgccaaaattgataccgacctattcaaccagccgctgtacttgattaacttttgtgaattggatgtcgaaattttgccaaatgacaacgattttgtgctaattgcacccgccatcggcggtgttgttcctcgttaccgtttcgaggtgatgggactcaaaatg

SEQ ID NO: 101174 - DNA, 596 bp, Heterodera glycines
aatatgtgctgaaaattttaaaatatctgttaaaaacaaaaaaaaatgccaaaatatgtgagaaattatgttctcaaaattggaaaaatcaagtgtgtttatgcataaaacccaagaaaaatgtttctttatttttttcgcccgcataatagtgaatgttttggaacgacgaattaatgaaaaatttcgatttagcatctttcattttcgaaaaaaaaatttaagagtattgtaaaaaaaatgatttttttaggggggtatattttttaattttcatgtatttttttataaattttctcaaaaataccaaaatatgtgctaaaaattccaaaatagcccaaacacgtgcgatatgttttttatgtgccaaaaaaccaaaaaccaaaaaaatgaaaccaataaaaactagcccctaacgatattcattagttgttctcttttcaaatgttttgcccgggtggaaattgaaccgaagtctctttttaaacagtggacagctttaccattgaactacaatacattggcacatttgcatccctccttcttcgccctttatcgccctcctactatattaacactgtacagatgtgctcatg

SEQ ID NO: 101175 - DNA, 502 bp, Heterodera glycines
tctgatcatttaccaccactaattcaaaatgattctacatatctgcgccaactatgtcctttgatgaatctatttagcaaaaaaacggacagaggaataactacttaacttataacttctattattacctaaatatacgtattcacgccaacagtcaccttgactcctcattatgccaactctaagaatcctgtctgatttcttaaccagacaagaacaccctcaacgaattatgataattgcgcatagtcttgttgaatcaattgactctcgaatgcacaattacagacaaaatgaattattgcgaatttcaatgatgttggacccccgatttgcataggatctgagtttatttatgagtggtttctggaaatcattgcagaggatttaattgattttgcaaaggaaagtaattttaacaattttaacagaagtttattttattttaagttaatcccgaaatgaaaccaatgagcaaaattttaacgaaacacaacaaatg

SEQ ID NO: 101176 - DNA, 101 bp, Heterodera glycines
atcagcattttaaagcaattaattaaacgattgaaaatttgaataggatgacatgctaattggaaaagtgggccaaattgtgcacattttggtccataatg

SEQ ID NO: 101177 - DNA, 101 bp, Heterodera glycines
ttttgtgcaatggaaaatttgaattgaaaatggacaagagtctccaaaaattgcaaaatgaattctgtaaatcatttgaaaataaaaattttgaaaaaatg

SEQ ID NO: 101178 - DNA, 421 bp, Heterodera glycines
ttctgttccgcgccgccgactcagtacacatccaattttcggtgcgcaggaaatttttcgtcgctaagtttttgacatttcctaaaaaattttctttttggtctgtttcgaaacggtttggtattttttatgttgcaaatttgggttgcatgccaaaaacagaaaataaatttccgaaattctgtctttgcatttgctttacccatttttcccaaagggttccgctcgttcgtctcccatcgatctcttcaccaagcctcgctctgctgccgtcactgctccctcttctgcgggtaatgccatcactggcgccatctcgcgtttcaccgtatcgccgacgcccaacgcggtgccgcctgcggcatttggcaacggcgactccccaaaattctgcagcgaccgcggaaccggcactccaatg

SEQ ID NO: 101179 - DNA, 354 bp, Heterodera glycines
tttcccgtcggaatggtcagcggaaatcggcaaaatttatctccggaaacaaacactgaccttttgatatatgtggttgaaattgattcagttgatagattcatgaaagagggagaccatttttttagctaatttaatttcaggcaagttctctgatgttttggtgagtgtctttctcgttttgcctgatctctctcgcgctctctctcatccccgttctctctctctatctcgctctctctctgtttctcttctgtttcctcctcgctctatcctattcctctgtattcactctcttttgaatttctgtttttcattagggctctttatgtggccgaccctgagttggtgatg

SEQ ID NO: 101180 - DNA, 889 bp, Heterodera glycines
tcgcaaaaaatttcagttttgttatgaagacaataaaatttaaaaaatttaatggcttatgagtccattccattaggaaaaagcgaaacaaaaataaattttctattaaaaaatgaactaatggcaactcagaataattcttctgtccccttctgtttcggcatgttctgctcaattttctgttgcacaatttccctttgtaagttgttttctttgtaaagctcctccgcgtggcgtatttctgccaaatattgcacaactttcctctaaaaaacccattttgtctaactaacccaaaaagtaaattagtaaaacatacacccaattccacttgcttcactctccgattaaattccgactcagtggtgaaaggaagcctacgaccatccacaaaactgaaatccggcccacgctccaatggattgaccacgggactttgataaatactaaataagacattaagaccaatccaaaataataatttaaaacacttacggctttttccaccattgaggtccaatgcggtaactgctgctggtactgttcatacatttggacacgatcaaagaacaagaatttcttatgtttctcataatctaaaaatagaaattcggtgatggagttatacagtgttaacgatacacaatacaatagcagtaattaaaaaaggaagtaaaaaatccgtatgaggttagagttcaaagcaaatttttaaatttctaactaactacatttagccaataatttatttaaaatatttaatgaaaaaatgactggttggtctaagaccagagcaatatatgattagctgattgggcaaatcagcttaacattgtttcgtagtatcgacataaagttgctttttagccatacaatatttgcttagatg

SEQ ID NO: 101181 - DNA, 218 bp, Heterodera glycines
aaaaccgatcgaaatataaaagccaattttttcctggtcaagatgcttaaacagcacgaaaaaatcaaatagatcaagttccaccaccaatatgtaatttcagcggccttctgatcactcagctgagggattgtcctgcgatgggcgtttattttgcttcctatgcttttttgaggcgttcaatggactccgaaaatggagaacaatcgcaaggaatg

SEQ ID NO: 101182 - DNA, 77 bp, Heterodera glycines
ggtcccttttgaaaaccctttaaaattggctttattagtgtttctttatccaattttagctgttttgcttccgcatg

SEQ ID NO: 101183 - DNA, 234 bp, Heterodera glycines
tgaaaatatttattttattattttcataattataaaaacatagctttacgactcgctaccccatctgggcacccaagagtgcatgtgctgaacgaagaggtggaatggtcagcatcggcagacaacccctacgatctctcgcttctgaaagtttgggtcattcccccgcgaaactgtgatgtgccggttctcccagtgagagtgggtgaacggctttgctttccgctttgcatg

SEQ ID NO: 101184 - DNA, 162 bp, Heterodera glycines
ccaattattattttattttggcattaagggcaattaaatttccaatttaaggtcaatccaaaggacattggctttctcgcggttggcaccgaaacattggtcgacaaaagcaaaagtgtgaagtcagtgttaatggatttgtttgccgattcgggcaacatg

SEQ ID NO: 101185 - DNA, 428 bp, Heterodera glycines
ttcgcactgaaatattgttttttcactctaattcactttacctattatctctaattagccccccccccccctatctaaggaggttgaacaataatcatccggggggataattagagatatacggacggtatcagctcaatcaattttgaattaggatacggagaatccaggaaaaaaatatatgcatttacaaaaataaggaagccgtgtaaattatgtatgtattgaacaaaatcagcaaaacacccttccccattactctctctttatatacgcataaattaatgcgttatggccattatttttggccaacaaatcattttaatctccccccatccgttcatccgttttcaaatctctcacttttattttggtagatatataaagaggccgaaaagacatttttgatgcataatagagaaaaaatg

SEQ ID NO: 101186 - DNA, 63 bp, Heterodera glycines
ggttttcatagatgactaagggttgtacatttgttttaaaatttataggtgcaaagtgcgatg

SEQ ID NO: 101187 - DNA, 189 bp, Heterodera glycines
tacacggaattttgttaatgtgtttttcctattactgttttgaagcttttgcctcatttttgcagctccatgaaaaccccaatataccaatttttagctcaaaataactttattagggacatccattctgtaggattgaattttttcgtttcattccttctggttccttttagacaagatgacacaatg

SEQ ID NO: 101188 - DNA, 453 bp, Heterodera glycines
tccattcatttatggttcacgtgattcatggccactcaatgctctgtgggaggagctaatgctttctcttaaacgagattgttctaccatttcgttcatttcaaactctgcccataatccacagatctccgctcatttttgttcatttctattttcgacaattattttttttatttatttttcactttcttttaatttccttttattttcaatatttatttctctttcgcttgtataataaaaataaaatttagctttaaaatgccaaaaatcaaaagaataagagttctaaaaaatccgtctcggcggccccgtcacgacaaatgccactggcacaaaattatgaagacctcacatcatcgcgcgatccgccactgtcgacaaacattcgccattaactccaacaacgaatgtcgtcgttgaccgaattttttttcgggtgatcctgaaatg

SEQ ID NO: 101189 - DNA, 284 bp, Heterodera glycines
gtgttaatgtaggtgctaaaatacaaggttattgccagtcaaaggtttttgatcatatcaatatgtaagtcatatgaaatcgaagaaattcgaaagcgagttgatggtaattggccttcactctggtgaaaaccagcaaattgattgaaagtatgtgagacttaatggaaaatataaaattaaacaaagaatatacaaatatccagcataaagtttttggttatggtaatcagaatagtgtagataaataattgaaacatttttttaggttgttcaacagaatg

SEQ ID NO: 101190 - DNA, 1003 bp, Heterodera glycines
tattaaggcttttagagcatattttcgtcttttttttttaaattttcacaaaaaatgcgaaaaatacacccataagaattgagtcaaaaccgtggtaatagtaaggctggtgcccatccccttttttgaaagaaaattttttttctaaaattcgtaaaatcttgttttaagggtattgagggtcgtgatcacgaatttaaacacatttcgaccaatttctaaccctagattcgaacccgaacaaaaagttgaaaattcataattttaaaatttttacttttgttcctaatagattaaacaagctaaatttgtaaaaaaccactacagcatcaaaaaaggtcaatttgggtccgggtttgaaagtggacaagaggaatgtcagattcatgatcagagaccctggaaatcctccatgtacatattctcacgacttaagaatgttttcttccaaaaaaaggcggtaggggagacaaagcatagtaaatattacccataaatttaaatgcattaacttacaaacaatctttaattcgtccgaattaataatttggccattcatttgcgcaaatttgctagtaaatcgcttctaaataaatgaataattattttaatcatcaaaatgaaaggttaggaatggtgctctatttttatgtagtgatctctggaatccggcatacacgcagtgccgccctgaaaactcatctttctttttacggaattttgcaacaaaaaataaaaaattttgccgtttttaggtcaaaatttcaaaaaattgaaatgctggagggttgagtcccgttgattggaatgttggtggattgagtcccagtgattgaaatgctggtgggttgagtcccagtgattgaaatgctggtgggttgagtcccggtaattgtgagtaatgtagcctttaaagttaggctttttatttattactttactttcacatttttgtttacaaaaacttttgattttgtattactatattagaaaaacgaagatg

SEQ ID NO: 101191 - DNA, 572 bp, Heterodera glycines
tcgtaagtctctgtccccgagaccgaatcggttggggtcgccctttgtaccatgaccattggacaccaaataaagactgctattgttggatattggataaataagttaagatattggcaatattatgtccttgggcaccccgcccccctgccctatccaaatattcacaatgtttcgaatcattcatttaaaagtaaaatatgttatttggctgattagcgtccattagttgaaagataaggaatttaagtatttagtgagcgtaaccaaataataattaacaataattaatcagttcattaaataatttaatgctttcggaaccaaaaactgagtcttcaagtcagcaattgcttttcattaactataatttcagctgagtctgattctttaggtccgatcacttctccggacaacatttctcagctttgcactccgtcaaacccctcaccccctcagggcattttaagccttccggaatttgccaattcgtaaaatcaaacattctctcatcataatacattttctcataagctaccaattggacattatctccgcgttgcgaggcaatg

SEQ ID NO: 101192 - DNA, 218 bp, Heterodera glycines
tgttgtaattatcaagctacaatctttcattattcatggcaaataaatttctatttgttcctcaagaaatttatcggggtctcaccattacgacggacacgggcgatttaaacttggatgctgttcgacacgatttgaaccgtgcccgggccgaacgagcacatccctctcgaaaaaatgtcaactacaaccagcagcttaggcgatatttaaaaatg

SEQ ID NO: 101193 - DNA, 87 bp, Heterodera glycines
ttttccaaggaggacgaggtgcagcgtgaccgtgtgtctgccaagaacgccttggagtcctactgcttcaacatcaagcagacaatg

SEQ ID NO: 101194 - DNA, 497 bp, Heterodera glycines
  unsure (1)..(497): unsure at all n locations
actcgagaccgagactcttcgagcatcactagtaaaacccaggcacaactacagattggtaatgagaaaaaaaagattattaattattgtagaaaaaatatntaatattgaatttaaatataaataattaaaatttttagactttgtatctccgatttattctcaagaaatatattatatgttttaaacacgatcctaagctaaaaattattagttgggtcaggcggtgtcgtgccaacagcaggggaaaatttgaaattttttacgcgatttattacactgcgagataaaataagaaaaactcatatatttaagttatttattccgagtcaatgaaaaaataagaaaattttaaaattttatttagaattttatatataataaatatatttgctttaaattaaataaatactcaaacaaaaaatcgcattaaatataactgatcaaattcatattcaaatcaattttaaaaatttttacaaaatcggtttttaatg

SEQ ID NO: 101195 - DNA, 442 bp, Heterodera glycines
tattgttctatccctattccctctcttatttttccatttttctctgcgcttgccttgcccgccaaatgctcccatttctctaccaaaaaatagtttggcaaacatagagcatttctctctgcctgctccccatcaataaatccccttctttctctctgccgaagagacaacggaaaagggggagagggggcagagacagggaggaaaagacgcttatttttgtggcattattatgtgtgctgcctgcgcctcccttctcccttcctctcccccattcatttcttgcatcattttcatttatatggcgtatgaatatttgttgtgggagcgcgccaaaattttgaaattttgttttataaaaatcaattttttggcttgggcctgcaaaaatttttttttttaatttagcctaattactctacattttctaaaattcccaatg

SEQ ID NO: 101196 - DNA, 1003 bp, Heterodera glycines
tcaaaagcagtaagacactgtacccaatacgattttcattcccttaataaaatgcattttattctgttttctgacttgcatttttataaattctctttgccaaaagcaaagaaatgacccaacagaagaaaagggcatgggaagggacggggtcatttcgctgcccaattagagaagtcattaattctttcataaataaatgaccctaattagtgttctccttcatgactaatcgttaattgaccccacttcgatcagagcataaatcctcccccctcattaaactcatttttctcttcttatttcattcatttttctttgttaaaattatttttcaataatcttggtatcattcgaaagtttaacatgtttatagactatttcgaagataatgcttcgcgattagacaatttctaaaaaagttatacatgaaaattgcgaaaaagtcgaaattttgaagttttttcttaataaaaatattttccagataatattcgatcatttagtccaaaatgattaagtgtttgaaataaatgacctaaatttaatattattaatttggtttaacttttgaatttttaaaaatccccggttgttcccggttccagacgaaaatcgatgtcccagtcccagtcccggcttctcaggtcccggttttggcaaaaattcccggtcccgtggcactctattataaaatgtattaaaactcgaaagaaaataagagcaaaacaaattttggtaaaatatagtgcgcgttatgaattctcttttatatgcaaccacgcgaaaacgaccctgaccgcaaaacttaaaatcaacttgtagatttacgattctaaagatacatacaaacattattcattcatcaattccattttcataactttaaaaatgttttgtttttcgccttgcctctcattattaaaaaacaattctaacgcaattaattattctgctatctgtgtgacagtggcaaaattgtgctcgaattgccacaaaaatg

SEQ ID NO: 101197 - DNA, 142 bp, Heterodera glycines
cccccccccccgcgcacagccccttaaatgcattaaagggaagggtgacagggcaaaacaggtgccggaaatagcgattaggggaaggggcccaaacgaagaaaaaggaaaagcatatggatggagggagcccaacggcatg

SEQ ID NO: 101198 - DNA, 334 bp, Heterodera glycines
  unsure (1)..(334): unsure at all n locations
ccttgaaaatttctctttttttcnttcgcatttttttatattgtgttacgactgtttttgggtgnatatacggaagcaaggtaattaaaaaataaaaatgacgtttctaaaatactgaaaaataatttattaagatntaaaaagcctaacggagcctaaatcatattttatcaatcacttcggatacaactttcaaaaaggtatgaataattaataaatgtagtttataaattaaatcttattgaaagcaaaatgaatttaaggtaaaatttacgaaaaatttcgaaaaaatgaaattgaaaaactaaagcaaaagaaaatgcgaaaagaaatg

SEQ ID NO: 101199 - DNA, 295 bp, Heterodera glycines
agtgcgctaggttcgatgaaactttttaaaatataagcctaaactttttggcctgtttaaaaaggaattaaaaatttttaaaatatttattcatctcccttttgatagaaaaagcatcagagagccttatttaacttttaattaacatttggtgcgtttcagagcactttctgaaaaaatacttatgaattaattttgcaaaaaataaataagtaatgaaaaagtcagaattttgaaaaattttaaaaacaacaagcgttggcattttttcaggttaagttagtcctttacaatg

SEQ ID NO: 101200 - DNA, 285 bp, Heterodera glycines
taaagcaaaaacgaatgaaaaataaaaggtcagaggacattagaaaataatacaatgcaaatggacagaaggaaagtaacggaaacacacaaagaatggagcgggtgaaaatggaaagcgaaacgcaggaaagtcgaacattcgaattctctttaaaaagcatttaaacccaaagtcgattcacaagaaatggctctattgcactttaggcatccactcaatgaccataccctgtttcttaggccatggtgatcaggggttttgaaatgggtcgaaaatgtaatg

SEQ ID NO: 101201 - DNA, 167 bp, Heterodera glycines
tatgacaatttgcctggggcggtccttccctttgtctcctcccccaatgtgcttgtatatgcttttcctttgtccatacacacgtcactccacctggccgttggatccggatcccgaccccctccctccccgctccgaatcgggaaagctcaccattgttaaacatg

SEQ ID NO: 101202 - DNA, 1003 bp, Heterodera glycines
acattttctcatcagatgttctacttgcttctcataataaacgttttgtccaactgattgttcttcattttcgaatttcctttcatcgatcaaaattaaaaaatgctaaatttttgaaaatcctaaagatttccccgtgttttttgaatttgcagtgagtgccgagcaatgcaaagaatcgaattggcaactgataaggccaaaatgggaccatcgaaacaaaaattgacaataaaattaaagcatcagtcagatcaatgaatggtgttcttctctaatttcaatgagaaaataaacgaattcccaataaaaaatgaaattatattttaaaaataagaaaattttttattagtgagaataaattattattttattgaattaattcttccggcaaaacaaaaaaggaacaaaaactttttatcagttttttatcctatgattttgccattttgtttatgacattaaataatttttgcatttcgctgggcggacaaaggccaaatttaagggaaccggccactttggcgcaagactctatatcattttgatttcacagcaacattaaataatcttggtatgattttaagtggcttgatagtgcctattaacctgcaaagtttcaaaaaatttagatgagaaacaaaaaagttatggccaaaaaatctcaaaaaattgcattttcctggccattttggcgcagcgcgccatattttttttaaaacctaatataattttttgaaattttgcaggctaataaagcatatttagacctattgattaatatcaacattattttatttggtcgaattaaaaaaaagttatgaatctttaaacttgtctgcgccaaaatgaccccgaccccaaatttaaggggaaaagagaattcagaaaataaaatattttattttggattaacatttattaataaattatttgaaattgttttgataagaaaacattcccaagaaaatcagtgaaaaataattcgaaacttttaaaaatg

SEQ ID NO: 101203 - DNA, 178 bp, Heterodera glycines
ggtattttcgaggaagaacggagaattttgccataaatgccccaatccgtcttgttttaaataaattcctagctctaagaacattctcttttaggtaacctgaacagtagtctgctgtctacacatgaacggaactcgcgcaaaaggaatttgcaaaatgtggccgattttctaaatg

SEQ ID NO: 101204 - DNA, 665 bp, Heterodera glycines
cggcatgatttgccacataaatatggatttttcaatgcttttttcactgctttcgtcaaagaagcaaaatgacgtcacaacaaatgtagataatatgaatcaaaaaaattttctgacgccaaataggtaataataaattaaattactaattttttattcaattgaaaaaataaaataaaattaaaaaaacttccgacgatgggtctgctgctccagctgctagtactaatattatgcatgattcacacaatgagttgttacccggcatcaatgcgtaatcgttttataacggcaataaataacttaaaaatataataaaatcataaattttaatttacaaaaatgataaaattaaaatgaaactctttagtctattaataaatagaaaaattgtaaaattaaaatgttcaaaataagaaaaattaaaaatatagaagtttttatttcgattaatgcgtttatttccaagcgatcaatgtttttgttctgttttaattgtttggctgtagtttttaaatatcttgcaaatcttgcaaacctctaattagagcctctatggttcaaaataaaaaaacaaaaatatcatttataaaaatattaaatccgctaattctaactcagaatttccatgtcgttcgggcagccaacatttggtcgcactgatg

SEQ ID NO: 101205 - DNA, 228 bp, Heterodera glycines
ttaatccaacaaaaaggtgagaaaggagaggatgaggaggaatggataatgatatcacagagaaggaaatggaggacaaataaagcgaagggaaggcgggggggggaagtacaaaaagaaaccaaaagggcagattcaaaagggagaaaaatgccgaaattgagcatggcattggcacagtccgactcatccccccccccctccgttccagatgattccatccccatg

SEQ ID NO: 101206 - DNA, 1003 bp, Heterodera glycines
attgcacgccgaagaatcaccaaaaaatggggggggggcaattccatggattgttatgagaaaattgggagagggacgaaccgccggcggggaaaagcggtatatatacgacaaaacaaacaaattacaaattattacgatgattaattcccctcccccttcctaaattggttttgtaataaaaaaaataatatatgtataataaattaaaaggaaaagtatggagagaaattgtcagaattcggaaagggagagagcatggaagtgtttaatttgtttgctcgatgccaaatttctgaatttgatgaattaaaaaaaaaaagtttttgcaagaggcctggttcgatgcattctctttaaaattaattttgattaggcccaattagaaaattggacgggctaacattttcataaaatttctaaaaattaagtgtcggattattaatgcaggattgccgaggttggcaatatcaacgatctgtttgaagtcgggaacatggctcagtggttgagctttccccgtactgctggatggtggcgtgggttcgttccctccttgcctcacattttacccgttacatattttagccattatgatgacgtattttttgaggtggacaattgaggcgcgtgcaacagcggcgcggcgcgattttttgtgattgtgtggtggtggagtgcaaacaaagttctgcaacacaaccatcagcgtcatgttcattatgtagaagatgtaaatgaagaaaaaaaatacgcgcaaatgacgcggacggatggattgggtggtggacatttgggggggggcgggggaggaagtggacaatgtgaacgaatttttcactgagggagaattttgtataagggagtgatcagattggaatgaatgtgttaattaggggacaattaggaaaaatgatcggaaaaaatggtcggattggcagcagtatagacggacgtgaaagcaccggaatttgaaagtttgtccacttaaaaagctctaatg

SEQ ID NO: 101207 - DNA, 711 bp, Heterodera glycines
taatataaagacaaatgggatgggcaatcaattttgtttcttcttttttgttgaccactgacatgcccttcagcgcacaaaacaacgaaaaggacgccttaagaaaagaagcggaggagggaaggggggaggcaacgaagaaaaaggaaaatgcattgatttccaaaaaaagaaaatatgtatttggattatatattacaactttaatcaattaatgattaaataattcaaaataatttgaaaatgctactttcaacaatcaaaattcaatcactgaaatttttcaaattttttaaataaaatcacttaaataagctaccaaaaaggatgctcaaattaaattttaacaatttgaagtcgaaaaaaaattattcttaataatccaatataataaataatataacaaacgcctgcttttatgttaaagaaactaaaaaataaaaaagcttgacttgaattgaaagagaagaagaagaggaacggcatttttcatttatatttttacaataaaaagaaaccttttaaattgaaaaggctaaatttacaaaaaattctatttgcagcttagataatgccaacagaactataaattctggagttgatgaatttgtgaattttatgccgcctgtttaatttttcattgttatttttattaatgaaaataaattaaatgctttactttataattatttagaaaaaattaaaataatg

SEQ ID NO: 101208 - DNA, 107 bp, Heterodera glycines
tcaaaagatcatggtaaggaggaaaaggggaaatccattaataataatttgggagtaaaacaaaaaataataaatcaaatttaattattaaacataaatagatgatg

SEQ ID NO: 101209 - DNA, 1003 bp, Heterodera glycines
  unsure (1)..(1003): unsure at all n locations
tacaggaaaaaatatgtgtattctcaaatttcaaaccttcaaaaaaatgggtaacggttttagagaatttaatttttaacaaaagcgctggttgactacagcatgacaaaaatcctgttttgtcaatggaacgccaaaccagattttatgtattgttcaatttcaaatgatcgatgttgacaatttggccagcattaatgttaacatgtgagatatctttaaaaattttcagaattttgcattaaatattttttcagtttttaatttaaaaaaacatctcagtaccagaaacccattccggttcgggctctatgtagtctttatcttctaaaaaaattttctctgtatcaacagaagcgaattcgaatgcgaaactgacgaagcgacgcatttgggggttttgttgcagcattcgaagacacgaaaaggtgaagccaacggcggaaccaatggcgagaaaacgaacgaaaacgacggcatcgacacacaggactaggaacacaacagaagaaatgccaatgacgacaacaacaacaacaacaacaacaacaacaacaataaaggaaaacagggcagaagaagaaatggaactgaatggcacattgaattncaattcagtggaaaatgagagaaaaaggaggccccaatcannatgaatgngcagagagagcgcgcggaagggagagggacggcaaagaaagaggggaagatggaaggaaggaaggcgcgaaagagaggcagacagcgaggggaaagtgcagagaaggggggagggcaatgatgggataccataagagacccctattaaggccattgttcctcctcgtcatcttcagagcagtcggagaaagccgacttgatggaactgtccacaaaacttgaccgatttatcagcggagtgcgccgaagggcaaaactgcccaaggggcacagacggacgacgcggccaaaacaacggaatgggaaccgaaaccgaacaaaatgggacaggagagaaaaaatg

SEQ ID NO: 101210 - DNA, 100 bp, Heterodera glycines
cgttatgacaaaagttttgccgagaaattttctaaacatgaaattattttgtttcataacagcaagggaatgaccaaccccgtgttgagcatgactaatg

SEQ ID NO: 101211 - DNA, 114 bp, Heterodera glycines
ggttgctggtgctgcaccggccgtcgtccaacctcaacacgttcaagacataattccttggtagagcgatttaaattcgctctcgactgctctacaaaagtcaaatgtctgatg

SEQ ID NO: 101212 - DNA, 214 bp, Heterodera glycines
tacgaatccgtttgagtggaagctcgctttgtagtagttttttcctctccacatccgtaatgtctgccgaaagttcactctcctcctgttttacctccttttcaaactgctcttgtttggtgcgtaattcgccaatcttttcccaataatccactggattttcatgaaaaaataggtctgtgacctgccgtttcgtccggctagctccatcatg

SEQ ID NO: 101213 - DNA, 75 bp, Heterodera glycines
cgtgagtgccattggactgctaaatttggacacaaaaaaattgcaaatttttccccttcaaaattttcaggcatg

SEQ ID NO: 101214 - DNA, 179 bp, Heterodera glycines
tgtttgaagcatcaaacgaaggtaaaaacatgttttttcctcccacattccaggggattaccatatcatttatgattttgaataaattttcgaaaatttccctaaatcggaaaattgtccatttgagaggcgaataaaattttatttgttgcccttttcatgctcaggtgtcagaaatg

SEQ ID NO: 101215 - DNA, 141 bp, Heterodera glycines
ccccaagggtttccccactactcccctaccccctccacctacctatttgattttccaaattataaatctccctccccctacgggttgtccccccgtctccgcctccctctcctcccactgcgtcttccgctccccaaaatg

SEQ ID NO: 101216 - DNA, 270 bp, Heterodera glycines
ttaattctgcgttggatttttgctccccataattgtttgagtaccccaaacggacactgaaaaaatcgatttttttgtttcggggcagtccccccgaaccgatgcgcccagatttatggggagaccgaatccttcgggaatagcttccctatagcctgtactttaattctgcgttggatttttgctccccataaatgtttgagtaccccaaacggacacttgaaaaaatcgatttttttgtttaataaatatttttttcagaaagtcatg

SEQ ID NO: 101217 - DNA, 369 bp, Heterodera glycines
ctaaataaaattttatttgttaattataaattaaagtattaattagcagattaactctattagggaaattgacttaagcataaaaaattaaaaatattcctaaacttgtataaaaattattaaaaaataaaacgacacaataatatttaattaatctaaaaaaacgtttaatatattctattttttcattttttttaaatcattaggcattttttttatattttatattttattttataaattttataaattgtctgaatttaaaaagaaaaaaatagttctttttttagaaaacgagttatattaaaaaatgcgctaatttaaaaaataaaaatatgtatacataataaatccaggattaaacggatg

SEQ ID NO: 101218 - DNA, 608 bp, Heterodera glycines
aaaaaggcgaatgatttcattttccatcgcattttgcatttacggccctttcttcgccatttccgccggccatggtcaatggatgacggcacttctcaaacattccgccgctttttctgatgattcctccccccccccctgttctgtgtgatgaattgaattcgaattgcgccctttgtcaaatgccaatttgccctttttgtttcttcatttccgtcatattttgaataaaacggccgatttctcgtcccacccattcattccgttactttgcatttttcaatttttgctttttattagctaattactctccgtgtcgtcccaaatgtcctccggccaatccttatctctgctggtgttctctgttttcctcgccatcctttgctcattttgctcctcttttcccctccaacaaatgccctcccaaagtcggcaaatgtttggaaaaattggcacttcggcacaaattggtcaatcaaaaagttaaatgatttttcatttgttaattgctcaaattcagtggctaatgtgctgcccgaactgcaaatggtcgaaccttttccatttgatcaaatcagtgacaattcgcaacaattgaaaagcgaatg

SEQ ID NO: 101219 - DNA, 625 bp, Heterodera glycines
ccataaaaaaatggaagtttttccggtgccaaatttttgtgaattttctttcgtcccgtcataaacggattgtttggggcaatatgaatacaaattttgtgttattcgaatgcgctagccgatctatacattttcttatgtatcagcccatagtgtctctccccgggtggggggaggggggaattgaaatggaaatggttctgctggtgattcccaccgccccgcctccccaccccgtcccctcccaccatcttcctatgtccatatgtcctctgatgatgagatctaaatcattttatggccaactacgatcgacgatatggaagtggcgcttagtagggcatcagacttaggcaacaatgagtacagagatccctcaaaaaattttcagaaatccttttttgtttatttttaggttggggccaaaggtggacccaaacgaccgggccctttagtaagcttatagaaaatgtcaattcatcggaaaaatccttttttatagccaaactcatatttggacggcacacaccgtctttcatgtcattcttatcgaaaattaataaattaaagcttttttagaaagattcacaattattaaaaattagcgagtgagagagagaaaatg

SEQ ID NO: 101220 - DNA, 1003 bp, Heterodera glycines
ttttctatacaatccccccccccccccccacaattttttactccattttatatatttatttctcaattctaataattttttcttctcaaatttctacaatcccctcccccctcacaattttttttctccaatttttattttttttcaattctttgtaactttgttttctctcaaatttttacaatcccccaccccctccacaaattttttcttcaattttatttgttgttagtcggttgtgttgccgtgttgctttaactagcaacccgatcctgtgccagcacaggattcgaggcaataggtgcattaatttgcaccccgctgactaattatgagtaagattgttagaaaaatttgagtgagggtgtaaaaaactgtcgaaaattttccccaaatttgaaaaatttatgtaattgcttttcggcatttaacctcctttcataatttctcttctgttttatttgttttagtcagctgtgttgttgtgttgctttaactagcaacccggttctgtgctagcacaggatttgaggcaattggtgcattaatttgcaccccgctgactaattatgagtaaaccagttagggagcttttgaaaggggatgaaaaaaaattttatatttgaagcacataaatttattcagataccaactccatcattcattcattctcaatggccccagccaaaaaaaaccctccccccaaaatgttttgtaaacccaaagagggcgtgcaaaaaatgtgaaaggtgccgtgagatgcgccttatggccgaaattaaaaaagaaaaagaaaaggccggcaaatgtcggggagagcatctccctgacattataattaatgcaaaaaaggctcacccatccgattttcaaaaattatataccgatggggatggagtgttggaaaaagttttgcaaggtaccccccccccccccatccatcgtaatatttaaaaaaaattttaaggcccatctgttgtacattgtaatgagtgtaaaaatg

SEQ ID NO: 101221 - DNA, 465 bp, Heterodera glycines
ggtgctaggacgaagtgacaaaaatatcagtgtggcgaagtgacaaaaatatcagtgagagactttcagaggggtggggtcatttcagtacgaataaattaatttaattaattaataacataatttaaaattgaataataagctaataataataaatatatttgttctctatttcagtttatacggccacaaaaaatacacgaccacctaatttcttgataaatttcatgcatcataactttttctaaaaccatcaaaattatacattttggtatcttttggtagccctaagtgttctctattttcctgtaaaatttcaaaaaatttcgttgagtttcaaaaaagttgtggtcacaaaggtttaccaaatcatttatgaaatttacaagccacaacttttttgaaccataaccaaattttttaaaattttaaaggcaaatagaagacacttcgggctatcaaatg

SEQ ID NO: 101222 - DNA, 393 bp, Heterodera glycines
tgtgtgtgggttttttaggcgcttagagttgagggccacaaaatttgaatcgagagtgcgttgagagagggagagagagagaaagaaagaaagaatgaaagaaagaggagagagaggtagagatagagagagagaaagaaagagaaatgaaagaaagaggagagagagagagagaaagaaagaaagaggagatagtgatagagagagggggcgagggtaagaagatacagaagagaatggatacagtaagcacatggtctcactatatcctaatcttgtacatgatgcgcctaaagtgggggcctgagaattttaagaggggtgtggctggctgctaggtacctgaaattcttgaaatttttctccacattttccattttcaagaatggcatg

SEQ ID NO: 101223 - DNA, 190 bp, Heterodera glycines
agtatggacaataaaaattatttttttataaaaatattatttatgtatatttttatttatttgtttttttttttttgtaagattgcccggcttcggccctggatgggctcgtggacggccaatcaacagttgtgatcaccaatttgtggaggagcgcgcttttggcaaaatgttgcagaattgcaaaatg

SEQ ID NO: 101224 - DNA, 333 bp, Heterodera glycines
agttcgttcaatataaaaagagaatattaaaaaattaatttaagcactcattttggtaatactgtgctttgtcccccccccccttctttcgaaaaatttttttatgatttcaaaagtcatgaaaacatgtttaaaagtgttttcggggtcggtgatcacgaatccggcacccatttcgaacaattccgaatcccggacccgaactcggacaaaaagttgaaaattcaaatttttcagattttccgttcaaactttgtttaaatacacggaagtgaactaaaagtcattagtgcttcaataaaagataatataaaccatttttagacaaaaatg

SEQ ID NO: 101225 - DNA, 207 bp, Heterodera glycines
aggtgggttttgaaattttacccaatttaacaattaatctcccccgattccctcctagctcatgtgcttcgccaacaaccctctcattgtcaaattcgggcgcgaataccacgtggaaggcgcgctctacaggacggacctcatcgttggagcaccgcagatgcgacagggccacttgcgcgttcaacacttccactggcgacaatg

SEQ ID NO: 101226 - DNA, 104 bp, Heterodera glycines
tctgtaaaccctgacgactatgagcacacggtgatgaaatttatgtgcgtaattaattaatttaattaataattggatatattttttggatttttcttcagatg

SEQ ID NO: 101227 - DNA, 309 bp, Heterodera glycines
aagtaatagtccccaccagggatggcattcctaggccccaaaaattttcgaaaatcggaattccgtgccgtccctgttccccaccagctttttttttgacccggcacatccatagtcctcatcttaatgatggcttaatgaatttatcagggcctcttttcaacaaccaaaaaaatgccattgaaattttaaagaaaattatgccattaattaaattcgaattttgatattattttctaaagtttttccacaaaattcactaaaattcacagaacctatcgaccaccgcctccgtcttcgtcagcgatg

SEQ ID NO: 101228 - DNA, 895 bp, Heterodera glycines
tttggacccaccggttttcggtttcggtttttgacccaaaaaagccggttttcggtttcggtttttgacccaaaaaagccggttttcggtttcggtgcggttaaacgaccgtgacccaccctagttttagctttaaaattaattttaaattttaaataataatcctttagtatttatcaaactaatattttttaaattttgtttcaaatttatttttaacaaatatattttttgcttttagtttaatgttcccatttttgacatttaaaatattttccgtataatattaaactgatcacacacaacaatctttccctgtggcacccattcatttcattcattcgtttcattgtcttttgtgtgactcattttcattctccaccatttgtcattttctctcgactatccttcggtttctctctccattttgctcccaataaatttaattttaatttaatctttggtccgtttttctcgaataaatttccataatattttaattaaattaagtaagcatataatttttgagtgaattaagcaaggaattcgagttttttattgttcccgcaaataaagaaacatttttatgtccgtttttcaacaacagaggcggagggcagagaatgggcgcgtcatctttcacataaaattgtgaaaaatgtccataggaaatgttttttttggcgttccactgaggccgtaaagaatcaaaataataaaaaaaaaactaaaaattagttaacaatagagtcaaaaaaaatttttttaaaactatttttaagcgaacaggaattttttttaattgggtctcagggttttcggtcggggtccggacaatccgtcggtggacaatccgtcagtggtcaatccgtcagtggacaatccatcagtaatg

SEQ ID NO: 101229 - DNA, 271 bp, Heterodera glycines
ttccgtgtttatggtgttcaccatcactgccctttcgtgcttcggcgtggccctttttgccacaatcatcaaaaaggacttgactaagtgggtttcccgtgagaaagtaggcatttaaaatgtactaaaacaaaactatttttgtaatgcaaattgtaagaattttttgatggggaaaagaccgacttatggcgggggggggcaatacacaccaaaagagcaagtgccttctactgctaattaatccgtgttcatttaatacagcataatg

SEQ ID NO: 101230 - DNA, 54 bp, Heterodera glycines
ggttcgcctccattaaaacgacaaaattacctaattaatcttcccattttaatg

SEQ ID NO: 101231 - DNA, 1003 bp, Heterodera glycines
caaagttacggggaagttcgggcttcattccataaaaaggagacaccagcgaaagttgagactgactgcctttgagcgaaattttagtgcgcaaaaaaccagaggaaatcccgctagcagcagcagcagcagcagcggcagcggcttgttgttggtccatgtggacagcacacttcggagttcaatgttttccaaaaatttccaattccgtccttattcttttaatctaaatttgaatttacgtgagatgataatgattaggtatttataaaaatcttaattttttaattctctaaaatcggaatttttgtgatacttgatgaaaaaccataaatcatagacaaatgatggcttttgtaaatctacacaattgccggaataagcacaagcatcaatatgggtccgctccagggatgcgcgggatgccgatttcgatttttggactcgggattaatttctgattgtcctcggcatacatcccgagaacggctgtgaagcacaacaaacacaaacaaataatcaaaaaacaaaaaataaaaataaataaatgcgccaaagcaaatttacaaattcctgaatctgcttattgtgtgcaaaatctcgtactttcctgttttgaggccacacccaaaattctattcttatgtgaatttctctgtcgtgaagactgcaaacacagagaagctgatcaatttgagaaattttgatctgcaattattgaaatttgcctcctcactagtgttacgcgcgacttgtttattttgcgcgcccttttgttgactttttaaaattgggtgtggcctcaaaacaggaaagtacccaaaatcttttttaaaccgtcaaagttagccatttcacagtcatctgagtaataatttgtcccattagaactcttttctttttagatttgtctgatttcaaattggattgaaacttgagagtgccgatcttaatcgaattttgaagataatttcagaattcccatatattctttcgtaaaatg

SEQ ID NO: 101232 - DNA, 1003 bp, Heterodera glycines
gtaaaccggggaacggtgataaaaaaaacttttgattttattaaagaaagaagaaaatgaaaatttttctttaaataatacatttttatttgtgatttttatggctattttcccgttttctgttaaaatattaatttatagggatgcgatttaagtacctattctgggatttttcttacctaaaaatcgcatccctattaatttattaaaaaacccattaagataaaatgtgaagattttctacattttaaagttgcttttttccatctctctgaccattgacggcctttcccttttttttgcatttttttttttgctttttccaatccataaaatttcacaaaaatatcagcaaaagatcttttgctgcggaatatgtggacgatcttttattgcattttaacaaatgattctctattctcacatttgagaaaatcaaaatatttccaaataaaatgcaaataaattcaaaaatacttttttctaaacttaaaaaataaattattttccgtcgacttttgttcccattcattgatttacaacaattaaaatagaatttcaatattttcccaaataatttttcgctttaaatgggcaattgttgtgcatgagttttcgtcgtttgtactttttttctaagatttttgcttatttccttttaagaatttccaaaaaactggaaaatcaatttaaattgctatcgttcgttttgggaaagtctgacaccaaaatttttccgtaccgcaggcctaaatttcacaaaaaatttcgctattttttccaaaaatccacaaaaattggctcaaaatcgcaaaagtgcgccgaaaaaaaaccttctccaaggcaaaatccttggacagtcccttcctctaatattttctgcacttaacaaattttattttggctcaattaaaaataaaacaattaatttatttttccttaacaaaatgatgaagatttgaactgaccaaaaaaagactcaatttatttcacataattaatg

SEQ ID NO: 101233 - DNA, 1003 bp, Heterodera glycines
atttttttaaatttatataaaaaataactaaaatttttatactgaagtttttaaatatttcaaagaaggtggaagcaattaaaattttaatctttatttaaaaaattaaaaattaacaaagataattctaaaatactatatgttagttttggaaacattttgatatcagaatgaatctttagaaaaaaaagaaatgtgaaagaggtaaaatattatctataatggtgctagggcgtttcttaaaaccaccaactcatatgattatgtatgtatatccgttaaattaaatatacaataatatctattaatttttatttgttgtgcaagtaagtgtcagccggaaatattattagtctagcagtgacagactaaaaatctttattaaattaatttacaattatttacttaatttttatttggttgtaccaataggtgtcagcaggaaatatgaggctggcagttttattacaatttaaatggtataaatagctaaatttctttaacatacatttattataaaaaatattattgccttaattcctttaataaattaatccaatgttaaaacgctgaagtgtcacaatgtttttcaaaattcgacaataaattcctatttataattggtcatgataatcaatatcgaaaattcaaaaaaacaaatgaaagaacggatacgatttatctctaaagaaaagatcaaaaaatcagagaggtcaactttttcttgaagtagccatatattttttattttagagaaaaagaaaattacgcacagaagaatctgcagaaaaattaaaaactaagggacaaatttttgctgaaataataaagaaaaaattaaaaagttctgaagaagaaatatctccaaaaagccaaagcagtaatgaaagccaagaaggtttaattttctaaaaaaattcaaacaaaatgaataaaaaatattataagtaaaaaataatttaaaaataaaaaattatcacaagttaaacatgttgaaaccatg

SEQ ID NO: 101234 - DNA, 112 bp, Heterodera glycines
tttttaagttaatgctgaacagtttgtggtatgttttaggaacgataaaaaaaaaaaaaaaaaaaaaaaaaaaaaaaaaagtaacccaaaatttaggggaaaattcagcatg

SEQ ID NO: 101235 - DNA, 909 bp, Heterodera glycines
tgtacgatttgacacagaaattcactggcaactaatagtcatataagaaaaataataattactaggtcgttgcataaaaaagggcgctttttcaaaatgactttttttaagacttgattaacgtttgttatgtcttttttgtgtgtaattcttttatctgaatgttctcgtcatgtttttgccaaaaattttgattttgtccttttatatctaaagttacagtccaaaaaattgggtaaggtcaacaaaatttggctaccattttacaccaacgtccataacttgagttaaaattgtcaaaacgacttaaaacttggtcagattatgaaatttgatgagcttaacaagaaaaagcctgaaagaaatttttctgaaaaagaaaaaacaaaattttttggccatgtttattttggccaagtttccaaatctattggccaaaccgaaagtcaaaaacaaaatccaaaataattccatcggggttttgaggctttttatgcccttaaataatataaaaaattacagaatcgcacaagtttccaaaattgtgttatgggcgattattcgaatttctgaaaacgaaggccaaggagaaaacacttgtctttggacaaaggatttttcttatattttttgaacacatgcaaaattattccagcatagtttatccgtaggaaatccttgttttaaatccttttttaaaattttaaacaacttccctaaagccttttttggccatttttcaaaaagtgggaaaatttgggattttttggccataacttttttaaaaattgtttgagtgcattaaaattgacgccattcaattcatctcgttattctgcatcagatgatattaaatttattagaatttgttacacttttaataaagttacactcaattttctggttatg

SEQ ID NO: 101236 - DNA, 63 bp, Heterodera glycines
ggtaatcaaagaatgtttcattcattgttaattaatgttattgttttaatttaagaacggatg

SEQ ID NO: 101237 - DNA, 142 bp, Heterodera glycines
cgacttcttcgctgatgggcctaagaactacgggttccagcacgtggacgcgcgcacgggccaggacctgagggcggagcgcaaggtgcgatcctttgagctcacctacgcggcggaccaacagctgcagtacggacggatg

SEQ ID NO: 101238 - DNA, 384 bp, Heterodera glycines
ggagccgaatggtataaaatttctatacaataagatgcatattcttcactttaccaaatccgtaattacttcgtccaaaacgccgtaatttccgtaatccgtaattgcgtgcagccttagtattttattccccttttcaaggacagatataagctaaaacatatttccgtttcaaaatttcacaaaatgacgcatttgtcaaactgaacaaattgagggattaacgaaaaaaaatgaaaatttaatttgcttagctgtgattctgtgatttgaatgggaaatgaaagcacataaaaggagcgaatgaatcagtgaaattattcaactttaatttgactgtgcttccgaattgtcaaaatcattaattaatttatcgcaaaaatg

SEQ ID NO: 101239 - DNA, 376 bp, Heterodera glycines
tttatgaaaattgaaacacctacctatgtaatttttttacattacacattcggacacgaacaggaaacaaaacattacgccaatttatcagaataaaatatcaaattaaaattaaaacaaagggagtcaagattttcacataaaattttcttcgacataacatacctacctacctatgtatggatttatcagtttttacttcaactgaattcaatagaaatatgtatatctgtcattttaatatgtcccaaaaaggggaggggttgttgttatgaacgaatgaaggatgattcttagattcgttgaattcatacaaagaaatccaaattttgtgtgtttttatatttcgtgtcaagttaaaagaattccaaagatg

SEQ ID NO: 101240 - DNA, 140 bp, Heterodera glycines
tgtttggtgcaactattgagagttcagaagaagaaggaatgacgaccgattaccgattctaagggttttgccataacattttggttcttctgttattgttattatttttatgctttaaacaaacgtcgttcgattagatg

SEQ ID NO: 101241 - DNA, 144 bp, Heterodera glycines
atcattcattcattgatttttcgttgaaatgagcaactctttctttgtaattttgccaagcaatacgccgggctttgtcggcaataaaacgaataaattcaaagtgcacttgcaaaagaaattggtgttcgatgggccaggatg

SEQ ID NO: 101242 - DNA, 205 bp, Heterodera glycines
actcacacgatcaatcaataattatgtgttctttcgccgttaacagttttatgtttttttaacaattataatcataaactatttcctaatcgtaatgtccccgagaaaaatcaatgatcaattggtgtttgagaacaaaagtaatctttttttttttttttttgagtttcttataataataattaaatttgaagaattgcatatg

SEQ ID NO: 101243 - DNA, 62 bp, Heterodera glycines
ttttgaaaaaatattcttgagtgtaaaatgtcaaaaatttcagtgaaaatctgttaaaaatg

SEQ ID NO: 101244 - DNA, 1003 bp, Heterodera glycines
ggtgtaagctcatttcgcttccgaatttgggcaattagcacagcaaaatattaaaaaatgaaaatttttacactgactttttctttaaaaaggaattttttaaagtgatgaagaattcgcataaattaaaaaaaaaattttgaaaagaataaatggaagagttggcctcgtaagcaggaatgtttcagacaaaaaaaatgccagaatcaagaccaaataattagaacaaagattatttgtttttttataaaatacaaatttctacttttttgaaattcctatttgattaaaacaatttaatttttttttaattagcatacgatcacaaaattaacaaaacactaaggtgtctaaaaaattttttcaaaaagggaaaaatttaaagttaccaaaccaatccctagttatccaaacaaaccataaattaataaattttataacaaattaaaaaaataatttggttggcaatataagtttaaaaaaaaacacaaagattaaattaaataattaattaatttaaaggtgttcacttccctgataccattggtgaatagtggacatggatttaaaactaattaatcattttattattttaaaggattgaagccaaaaataaaaggatgccatggcgaataatcgagatcagacaattgatatagtaaataaagtcaaaatgaataattaaaatgaaattttttttcaaaatttattaattataaaaacacacaaaaaaataaatgttcgatatttaatataatagaaaataaatgttttaaaatatttaagaatattttgtaaattataattaaaaataacaaattcgtaaaaattttagttttaaaaaacaaaaaagagtttaaaaataatttataagaggaaataatcctaaaaataacaacagaacaaagaatattttaaaggaattgataataaatattttttattatactttaaactgtaactcattttaatataaggtttataaccagggttgtaaaatatg

SEQ ID NO: 101245 - DNA, 144 bp, Heterodera glycines
atccttttcattaaaatccgttttcggatcttccataatccgatcattaatttcttgatttcaaatcactttccatgaaattttcacatgatcgaaattgatccaaaaatgtcttaggtgttggccaggctaagcagcggcatg

SEQ ID NO: 101246 - DNA, 1003 bp, Heterodera glycines
agtagtactgtatcacaaatcttttaatgcgatgcaatataaattaattaatttgatattaattagttctatgtatgcagtcagtattttaacaatttcttactgtagcaagttcaaacgcgtactgtgcctgcgaacaagcatttttgggtaattaaattattatatattttcttttgttgactttcattgtgaaatggcgaatgaaggtaaagtaaaaaaaaaaaatagagaaagtataaattttacaagcaaatctttgagtacttttaggccgatatcttaaaatctaaaacgacagttttgtagcaaatctttttctgatcaaaatgatatataattcattatacaaaatttaggctcctatgtgcacattcaaatttaattaggtgagccaatttgcctgtggttttgagagaaaaaaatgaagaattggcgatatgtttaattaaatgtttaaatgaatattttaaatttatttcatgtgaataaattaattgaattttaaataaggagaaaacaaaatatatttttttatgctcaattcttgttaattttaaaaaaaaaatttcaatctctctttctattttttccttttggtctcgactgttgcgcttgcagtaataccacgttttggataggggaagggctgaatatgccagttgaaaaatttgcattgctaaatgtcggagtgaaaaaggtttaagtgttgctgataagagcatgggttatcattctcgccaaatttgccgcaaaatcgctggtgttcgtctattgaccgtttcagttgtactttggattagccgtattttacgcgctaatttctattttggccgtttttgattgatttttcacattgattccctgttcctttttgtcctcctttttgtgcatttggccactgatgcctttccttgactgatcctgctaacaggattaaatttttcgtaccattttcatttttgggtcatatttacattaaaaaaaccttaattttagtatg

SEQ ID NO: 101247 - DNA, 290 bp, Heterodera glycines
aaattgttttccaattatgcccattataaatttacaaatcgtacctttctcaatctgagcgtttttcgccagttaatctgtgttctctctctctctctctctttcaatggctgggcaattaaatttgtttgtgttttaaaataattagttggcacgaattttggggtattaaaaaaggattcgaattcgtccgttttaaattgaaggattattttcattgtttcgctctctatttaagcccactcttttctttctcccctcccaattcggcccattttctgtcccaaatg

SEQ ID NO: 101248 - DNA, 151 bp, Heterodera glycines
aaattcaaattcatcaagcccaagcccgagtcgaagcagaagtccgtcgcgatttccatgccagttttgtgctgaaaaacacttcgctttagattgtgacaaatttagttcaattgtgaacaggcgaaaacaaatagaagcaaaagcaatg

SEQ ID NO: 101249 - DNA, 685 bp, Heterodera glycines
acaaataattagaataaaccaatcccttaattgggaccaatctccagttatttgtttgcccatttcatctctaacttctttccagtcagagggagaggactcccttcactttggagtcatcaaattcaatcaggtaagtaagtttactaacctggaaaatatttgctgcgaaagaatgagaaataatgtcagacaaattggtaagtgctaagtgatgaaatgcatgagttttgattttaggaatttcaaacaatgaattggattctagtggaagattgttaactttgagaggggtgacggacccagtaatttggtccacttggactagggagccgttgataagaatgggaatgttgcggaactcagagcagggagcagttcgggcctctggagtgacaatcattgaaatggggtttaaaaatgctgattttgggccagaattagtggaaaattggattgggaggagatcaaaacaagtttgaagctcagttgccttaaattggtagctagagctgtttattggtacgcagggccatattttaattgagtcaattgttaattgtttggcaaaaatgtagggatttgagaaaatactttgtgctagagcagttggatttgagaggagggcagaagaggtccaatgtttattttcatcaataaagttacatagctgggtgagggaatg

SEQ ID NO: 101250 - DNA, 211 bp, Heterodera glycines
ttataattttctttgaaaaaaaaatttgtttggcaaaatattttaactaaacaatcaaatttagcggtgctacgccaaaactgccaaaattgtttttggcacagcggacagaaaacgccacgcaaaacacaacaccaaattggaataaataaatcaaagttggcttttgcttcggtcgagcaatggaaaacgaaaaacgctgacaaaaatg

SEQ ID NO: 101251 - DNA, 471 bp, Heterodera glycines
ttaaaaaaatgcaatttttttttgcaaaaggttgcctttttgaattccacaagaaatttaaattttttgtatgtattttaaaataaacatagatcttttttttggcttttttgtttgagaaaatttgtgattccgtccaatttttaagttcggtaaatttttgagaaatcacaaaagttgaatgccctgaaatttttcctaacactaaaaattgtacgagcatttacaaaattggcgtcggctgctcagcgctcattaaattttactcgaaaaccttccaaaaattggccgattttttggtttaaatcccccgggtgccgaacaattggcgatcggaccaatgtttttttaatgtattttttgcattcattgacttgccaggacaatgtgcagctgtacttggcactggtcgacttggcctacagttcgtcccattcgcgggacagtgaaattgtcagtgcatttgacatg

SEQ ID NO: 101252 - DNA, 262 bp, Heterodera glycines
acccaaaccgacggacaacaaaaaaaaacaaacaaaaatatttttgatattaattacgtaattaaaaagcacatgggacggaccatttggatttaattgggggtaaacaaaaagccaaaaaatgggcaaagcaaataaaacgtaaaaaaagcacacagcaaaacaaacaaacaaaaaaggaggcacaatggaatggacaaaaatggaaaaccacgatttttttttttttaaatttattggcatttaacctaaattaataatg

SEQ ID NO: 101253 - DNA, 63 bp, Heterodera glycines
acgggggagggacaaaagcacatccgacggatggaaaaggcccaaatcggagggacaaaaatg

SEQ ID NO: 101254 - DNA, 272 bp, Heterodera glycines
ttctttggggtttaggcaattcgtttataaattcagtgccaagaaacgctgctggaaaaagcaaaagtctaactaatgcatttttattttcgatgatttccgtccccccaaaagacgaaatcttagaaaataaattgatgacagctctaaaaacattgccatttaatgcattaataagggaattgaagttttatttgttagttgaaactcatgccgaccattacgtggtgaattcgtgcgcgtcggacagcagcggccaatgttcggtgatg

SEQ ID NO: 101255 - DNA, 80 bp, Heterodera glycines
ctctcatcgtctacgatgttgcacatggtgcatacttccttgactcgctgcatatgagcagcttgagtgatgagagaatg

SEQ ID NO: 101256 - DNA, 798 bp, Heterodera glycines
tttcttgtacaatttctcttgtgaaaattttaagggttaagtgaatggataccatgcataattagtaggtaattaattaattaattaattgctttttgttgtttttggctgtgtgtggttgaactttttctgctgtgacgacggatttggaaaggaaacacaaaagtgaatatgaaatgaatgtgacaaagatgatacagtatgacaaccatatgatgacaaataaatacgcggtggtgcgcaaagcaaaaataaatttaaatgacgacgacgataatgatgatgatgatgaaattaaaataggatttgtgttgcagggatgggaaagccaatgcgaaaaaaaattcggaaattggaatttctgggcttcaaaaacgagcaaaattgttggtgtgccgactccaaaaatgccggaaattttattggtccctaagaatttgatgggtttccgtgtgaaatttttcaataaattggcaaaatttggaaactttttggaaatttaaacaaacaattttagcacctttttttgaaaatttgcccccaaaaaggcagaaatagtcgtttaaaaaatgtttttgactactgacgacacattggttcaaaaccaaatccatcaagaattatttcaaaaaatataataatccatctccaattatgaataaaaatgaatgctctattttaactgctctctttttgaattgaattaaaatttaaaaaatttttgtctaaaaatccctctctttccacgcatttagccttgctggcccgtccgtggtgcggacccgaaaagccgaaatg

SEQ ID NO: 101257 - DNA, 72 bp, Heterodera glycines
tcattcttggtacaggcactcctggaacattttggcaacgatttttcgtcaagaatcatcgttttgtgtatg

SEQ ID NO: 101258 - DNA, 62 bp, Heterodera glycines
agtgccgaaatcaatttgaaacgaatggaaaatggagcaattaatcctacagatacatcatg

SEQ ID NO: 101259 - DNA, 1003 bp, Heterodera glycines
tcacgattaaaattcaattatttattactcgaaaattttaattggtttaaaatttaaaattctctcaacggctcctttgacatcataaattatcatttgtttaaaaatgcattcaaaaaatattataaaaaccaatttaataattttcaaaaaataattaataattcctctcgtaaaatatttttatttataatttaattaagttttgcttttcgtgaacctaattgaatttttataagaaaatttattcagcattgaaatttaaaaatatatatttgtgtgggaatttaaaaaacttccttactggcgaaaaccccaaaataattcttcttcataaaataaaaatgccattgaactaatgggttaggaattatatgaaaatccatattttattttcatgaaaactgcgggaggcctaaaacgcacgaaaaacatgtttttagcttggtttgcagcttctagctggagttcattatctattttttccatatttcgcaatttatgtctacatttccatatttttccatattttggcactttgtccgtgttttatgtccatattttggttttcccataaacctctattagaatggcccccatcagttaaattgcgcttctgactactcctgatgatcagaaattttccgaaaaatcattttgaaaatttttagtttaaaataaacttacttaaaaataggtaaatttgtttgaaaaatatgcaaaaaaagagaggaaaatttcggctttttgatccttttcagagctttttttccttataaacgacttttatacggtattcagccattttacatgaatttgaaggaattttggaaaatttacctctcaattcggaaaatttatgttcaatttttgcaatattatgtctatatttcgcgatttttggtcctaacccacataattcccaaccctaaatagcatacttaaaaacgcataaaaatacttaatattgatattaaaattaataatttaattttcagcaatg

SEQ ID NO: 101260 - DNA, 62 bp, Heterodera glycines
taaaaattctaattcttttttttaggcttgtataaaatgtcatagaggtgttaaaaataatg

SEQ ID NO: 101261 - DNA, 63 bp, Heterodera glycines
tgtaagttatttattagttttttgcatttaaaatcacaattttaggagcaaattcaaaaaatg

SEQ ID NO: 101262 - DNA, 154 bp, Heterodera glycines
  unsure (1)..(154): unsure at all n locations
aataaaaattttatttttttaattaaaaaattaaattactttaaatcaaaattctaattttttaataaaaaattcanctagatagttgaaattaaaatcaaaattaaaatttcttcaattttaattttttttttcaaagactcttcacgagatg

SEQ ID NO: 101263 - DNA, 182 bp, Heterodera glycines
tttgtgtttgttctatgaatttagtgtgacacaataatgtgtcttatgtttttgataaaacaatagtgtttgttctatgaatttagtgtgacacaataatgtgtcttatgtctttgataaaacattagtggtttgttatgtgtctttagtgtgaggcactaatgtgtcttaccccaaaaatg

SEQ ID NO: 101264 - DNA, 62 bp, Heterodera glycines
ttttgtattatgttaaagcctcggttccataatcattaaaattaaattacagaagtctaatg

SEQ ID NO: 101265 - DNA, 181 bp, Heterodera glycines
ttagtaaaaatttataattttgtaaaggatagagttctcagaatatcattctcagaaataaaaaggaatacggtcctagtgaaaattataaataatactttagcatttttgttattaatatttaattaaaataaatgcacgtaaaaatcatcattaataacacataatcaatttaggaatg

SEQ ID NO: 101266 - DNA, 98 bp, Heterodera glycines
gctaaaaataaaattttcagaaaacaaattaagttagtacgcaacttaaaaacatggattttgaggtttccagctgatgatgttgccttttcgccatg

SEQ ID NO: 101267 - DNA, 63 bp, Heterodera glycines
aagccaacacggcttctggcggaagtgaggcgttcaaccgcggacgagacatatgtggcgatg

SEQ ID NO: 101268 - DNA, 241 bp, Heterodera glycines
gagatttactttaaaattaaaactattttctaaaaataaaggatttccgcaaggatttaattcttttggagtaaaaaattcttaataaaaaactgatgacatttaattgttctgtttagaataaattatcattggtgttctgcaattcacaagaaatgcgcattgttatcgcggaactaaacgacacaccaaatttcactttatttgagcaatgttttgctgcatttcagccaagcgaatg

SEQ ID NO: 101269 - DNA, 99 bp, Heterodera glycines
ggtgagattttttcaataatttttgtataattttgggatttttcagtcatctcactctggactacatcaaaggcccgccttctgctgttgaaagcgatg

SEQ ID NO: 101270 - DNA, 304 bp, Heterodera glycines
tgaacagtcaaatcaaatcgagattatttgtgcccgggaaatatttaattttgcaaattgcaataaggctgtcacacaccgtgtcaagacatttgcgtctatgccaaaatcagattaaaacagtttttttttgaagccctatagcctaaaaggattaaaatttagaaaacacaatcttctataggagcattaattctgcgttttgaatagtttctgaattttcaacaatttattaactatcaaattatcagacacaatcactttctatcacttaaataataaatgtttaggctattagggaatg

SEQ ID NO: 101271 - DNA, 173 bp, Heterodera glycines
ttttctcatcagttcacacatctgcgatttcaccattataataaaccattatttttactgccaatttattcagccaaacatttttatttaaatattcgtacaaaaattaataaaaataaaataaatcctaacttttactttattgtaaatactatttttgaaattctaaaatg

SEQ ID NO: 101272 - DNA, 1003 bp, Heterodera glycines
tcaacccccctccaaagggggcttatattcaagggggagcttccaatcgaggggggggcttttattgttcaacccctttccctatataaattcttaaaattttttgctttctgcataatggtacaatttaaatcttaatctgaaatttttgaattgaaaagatttttcattttttggcccttggaaatttaggcgaatgtttgaaaattcataattcacttctaaatgaatcaattaaagtgcaaaaaagcattaaaaatagagaaaaatctggagcattttatacttttttagaattttctatcttcaaaacgaagaagttattacataaattttggaaaaattcgttttttgagaaaaaaaaaattaatagcgctgttctaaaaaggttttttgaaaaacacgaaattcttcctctataaacttctgtttattctatatttttataagacttttgaaaaaaagtacaaaaataaactgattttggaattcgggatcatagatggaagcaaatggtttttttgtgccatgggttcagatccacttgcctgtaaaaatgttttttagggtttttgggaccactaatcaagaacttggcatccattttgcccaattccaaagccttgatccgaactcgaaaccccaaaaataattttttaaaaatgttgcaggcatgtggatttgaacccatggcccaaaaacccatttttaacaaaacaaaaaatatattggatataatatttctatatttgcttgaaaattttttagtgattttcatcaaaatcttttccagtgaatttattaacagaaattttttctagctattgcttcgctattagacaatttccaaaaaagttatacatgaaaattgcgaaaagtcgaaaattttgaagttttttcgtaataaaattttttccaggcttgaaaatcttttcgcttttggtaaggctaatagagcatgttaagagcttacgagtgataccaacaatgttgtatttggatg

SEQ ID NO: 101273 - DNA, 308 bp, Heterodera glycines
tttccagtaaacaaataaacctaaaaaaattcattaggtgttcttgttaagacgattagctaaactaaaattcgaattttttttaaaccaaactttttttgttggtgttttggtataacaaaaaaattatgagtatccttcgtcttccgtacaatggaagggttttcacgtttttcaaaaaaaccctttttcaaatcaaataataaaaaatcaccaaaaaatgtaaaaattattttcaggaagtccgctgttacattactcactccgctaatatttaaaaggaatggttgttcaacacattaatgatg

SEQ ID NO: 101274 - DNA, 145 bp, Heterodera glycines
catgaaaaacccaggcctggatctagtccagttcgagctcaaatataaatgaaaaaaaccatttccccatatcgagtccacatacccacacacgtacattatttccttcagacttgaaaagtgactgacaactaatttgataatg

SEQ ID NO: 101275 - DNA, 720 bp, Heterodera glycines
tctaaaaaataaaaacaaaaaatggcactaataactagggccgggatttctagtgaaaaaactttttttttgcttaattgttttgaagaaaggagctcaaaaaacgcatttctgcgttaaaatttttcgattctgatgtcattatcagtcactagaaatcactattttggcgttttgtcactatttttattttttggaaaattccttaacaaaaacgcaataaaaccaaaaaatacacccctaagaatcgacctaaaattttttttcaaaaaatacacccctaagaatcgacctaaaattttttttcaaaaaatacacccctaagaatcgacataaaaattttcaaaaatcactcctaagaaatgaaaaatttttcacaaaattcactttctttgcaaaaatttttaattctaaaaattattttttaggtacctattttggattttttgcccttaaaaatcccagtcctactcatttgcaactgcaaatagtgaataaaaattatttttgctcaatttttggctgaaaattatgtcactattcgtcactattttggactttttggcactattttctcactattttggcatttttactcactattttagttaactattttgagatttttagtcactaaaagtcccggccctactaatgggagcactttttaaattaattagcgcatgtttctataagctttatttttcattgcagtggatg

SEQ ID NO: 101276 - DNA, 156 bp, Heterodera glycines
aaaatataaatacagaataataaaacatctaaaagttatttagatttgtcaaatgaagaaattgacgaattaattggaacgataaaaaaggacacacccccacggtaattaatgggattaatttaattataaaaaataatatttatttctataatg

SEQ ID NO: 101277 - DNA, 131 bp, Heterodera glycines
atatttggcactgatgaattttatttcccaatttacatttttttaaagttttgctatttgtaaattttatttaaaaatttttaaaatatttcttagattgcacaatacactttctttaatttgaaaaaatg

SEQ ID NO: 101278 - DNA, 416 bp, Heterodera glycines
acattttcgtcagtgaatgatttcgtcagtgattttcgtcagtggataatttcgtcagtgaacgttttcgtcagtgtactatttttatttatttcactgttttccatttttttcgtcagtgttccaattcggcagtgaatattttcgtcagtggattcataaaattaaaatgtgcttcatttttggttaaactatttaatacagtatttatcgctttttgcgtatggtacttctaagcaaaataaaatgattaattgtgctttaataaatgatttacataaaaagaaattgtactttaaaactgttgaatattattagtaaatttacttctccaacttcttatctcgcgatcgttcccatgcgttctcgagtgcctatttgcatattttcttagtccttatctagtttttgcaatg

SEQ ID NO: 101279 - DNA, 64 bp, Heterodera glycines
  unsure (1)..(64): unsure at all n locations
taaatatttaanagaatatttttgaaaaaatgaaaaacatttttatcatgtgctattttagatg

SEQ ID NO: 101280 - DNA, 143 bp, Heterodera glycines
ccgtttgcgtcattcgtcgacccgtcaattctcaacgaatttccatcgcttcgctttgtcagttcatataccgtcaatctcttcggcgaatttccatgcgatgacagtgccacggcatcggatggacaagcggtgaccaaatg

SEQ ID NO: 101281 - DNA, 377 bp, Heterodera glycines
gaaggaaaaggataaataaatcaatgctaaacggacaaaatgttttggtgagcgatgtccattatccattccctaatgggaatgatgtgatgtatgttgatgaggaagaagaggcggaacatttcgcagaaggcacaagcacgcagcaccaaccaaatttgagaagcgatcaacaacgacgactctcatttattcaaacgactgcactaatcaaaggcaagcgaaatggccaattgtttttaaaagccaattagtaatggcacggacaatggtgaaattttgaatagtttttgccttgtgatttctaagtacgtagtaatgtaaagtgtcgtatgcctttcctttttcgtgagcttattttcggaagttttaagatg

SEQ ID NO: 101282 - DNA, 544 bp, Heterodera glycines
ttggggaacagatcaattatacaaattgatcagctttttcatttgtgctcgactcgtagtcaaatttgggggggggggggggaaacggcatttgatattgcgtattcaaattttattttattaattttttttaattttcggcggaattcatttttgggtgttccttaatcgctttgcacatttttcaaccgcaaaagtcgtattcttttagaaattcacatcaatgatcgcccttaccattgtcgctattgccccaaacgatttacgcaaaaggtcaaaaaacgcaatccgtcccatttcattaattgttgttgcagagccatttggaccagcacgagcgaattcacaccggccttaagccgttcacgtgccaatattgtgggcgtcaatttgtgagtgccatttgacacgcattccttccgccaattaatcgcctttatcccacccaaatcccgttaaaatgtcattttagcggcaacggtctcagcaattggggcacgaggcaacgcatatgaacagggaaaggcattccatgggcagcatg

SEQ ID NO: 101283 - DNA, 223 bp, Heterodera glycines
caccgagaaggacgccgatttttgtgcccatttggtcaaaaatttcgagtccgccggccttccagtcagtgccgagctgctgcacgtggcgctcaaatgcgcctggtacaagacggaacgtgaacagcagctgcaaggccaaccaattgcgggcggtgccgtcggctttggcagcggggcgcgacaacggacggggcttggctatacggcggcgccaacaatg

SEQ ID NO: 101284 - DNA, 347 bp, Heterodera glycines
attgtaaaaatttgttttctcctttttgttgatatttatatttacacgttaaatgattaagaaatcactgctgatttaagaaagggtcgccccgccccaattttatcaatcggcccatcgtccgttatttatactctgtttgtctgttgtccctttctcatttttcgtttcctttgcctttcattcaaacgacgacccctcaaacattcctttgtaatttaaatttcatttttgtttaaaatgtatgtcacatgattaaattaatcacaaatagttatttaaaaattcgtttttcatttgttttttaaattaaactaaaatgttttttttttaagatatttataatg

SEQ ID NO: 101285 - DNA, 811 bp, Heterodera glycines
aaatggtttgaatgtgccgagtgttactatcaaacccctgccaattggataaaccgaagcaagtgctagcgaaaactcgacttattttcttttgcgtgatatggagacatttgtgccacggattaggaacaaacgaatagaattcacgctaaatttgaaaaattggattattcaattttgttggatacgggcgggattaatcgtaaagggtgggcaaagtggtggacccaggcgggaatcgaaccatcgccctctgttggtgtggtgataggctttccacccacaccagtgctcatcccattcgcccttcccttttatgaatcttttgcctccgctttttaagcatttttaactgtccgctggttagatccttgcaaaatataacgcccaaacaatttgttttttaaatttcagttgtattctcggagaatcgatcacagaatgaaaaatttcaaaaaccagtaaagcccccaagggagaaattaaaatgggaaaaatgcctgatttctcaggagcgaaatagcggactattgaatgttgagccgaaaagcatcccaaaagagtggagacaaacccatcggtaaagcgaaggcgtgcaacgcctcgcacactgtccgaattggtggacaacggctgaacgtccaaaaagcgggcgaagcgactgcgccgtgtggcaaaaacggaggggtagccaatgcgatagatggacctggaggcggtgtccacggaaacgacggcgacaattcgcgtgaaatatctgtgacgaaacgggggggagtaaaaatggaaaattaaagagaaaacgaaaatg

SEQ ID NO: 101286 - DNA, 673 bp, Heterodera glycines
caattagattgaaaacatagttttcgtcaagccctttctacccagagccatcaagcccaatttgtacggtgattttcttattgacaagtaatgactgttgtcattatacattggacactctgctgattgatatttatttgggtgatgcgactggaattcgaccaatgtaaacggattgttggaggtaaatgcaaaaaaaataaaaaataatatgtatgggtttgccgtcttttgcgttcatcatgactcaagggcacataggatccccatttataaatgcaattttttttttgcctaattacctcattaattgggatggtggttgattgatgatgattgactttaacttttaatgagtccgcgcaccgattcgccactttgttttcgtggtttgttttgccaaaatttgctcaaaatatgggcaaatttctttccgtacataagtgtaaacaaaaaataattatggatgaatttttctcgtttaattgcaatgaaaaattaatccgttaacaactttattcatttcatttttttaatcgtaaaattaattttaaaaagtttaattatatttttgccgtttttaataaaaagtttaaaaaatttaaaaaaattgcttcaccaatttattaaatttaatgaatttaaaacggcaatattacagaatgagaatatg

SEQ ID NO: 101287 - DNA, 400 bp, Heterodera glycines
tttgtgcaaggttcaatgcctcaatttgcctacgaatccaaccgtcagcagcccaccagcatcaggcaaaagcacttcttcattttcgattattcgccttgggcaatccatttattgacaaagtacattatcagttctcgcagttcaggagtggaattcaatgatgaaaccaaaatgcaaaagtagttgtaaacaaattccggaggaacaaaggcgagagactgcaaacatcgaaggctccgttgaactttttcatcatttcggtagtcattcaacaaatttggcaagcgctggattcttcggaaaaggccgtgtcactgctgcacataaccatccagcaattttaggaaaaaaatggtaaaacagggggggggggtgaatggcaaaacgggggaacatg

SEQ ID NO: 101288 - DNA, 163 bp, Heterodera glycines
cggtcggggtcggtttagtacggccggtttagtacggccgttttagtacgagggtcggtttagtacggcaagctgtttttgtccataactgttacaaatgtttttttgtcaattataaagaaggaaaaacttataatatctatgtttagctacaatacaaatg

SEQ ID NO: 101289 - DNA, 55 bp, Heterodera glycines
acgggcacctaatgctccacatgtaaagaaatggttcgacagtctatcaaatatg

SEQ ID NO: 101290 - DNA, 326 bp, Heterodera glycines
ttttgatcatgtcaatgctttcgttttcatgacatcaattatgttcatgattccgagacaaatgaaacatccagttgtcccacttaaagttccaacgttcgttgaattcttcgagattttgtatacaaaccaacagttccaatttataaaacattttttactggattcacaaatatttgattggactcataaactctgatcggactcaaaaaagtcgattggactcataaagtgcactagagcccccccatttttctacgttcgaccttttgcatattttgtccattgaagacttttttatgctattcagactttaccaaaaaatg

SEQ ID NO: 101291 - DNA, 134 bp, Heterodera glycines
cctgaaaaaaaattaacaataatttttaaaatcttcggtattttaataagaaattttaagaaaaatccagtggttttttggaaaaacttatacttacaattagtagtagttcattaaaaaaattttcagaaatg

SEQ ID NO: 101292 - DNA, 351 bp, Heterodera glycines
tgcatgaaaatcccattcctcctcatcaaattttaaatgaatcaatgagttttctttaaaaaatcaaatcattgtttttcacggttaagaacttgtttttgtatatttcaattttatttgcaaaaaatccaaacaaaatgttagttttaaaacagtaaaattgcttgaactgcccgtggatctttttcgtggaaatgagagcgcaacccctatccgctaatttttcgatctacattgcaatatgaatcctttcatgatttttctcccctgccatgtgccacaataatattacataccgtacagtacgaagattcaacatttcacgcgcatcccctactcccttttttaatg

SEQ ID NO: 101293 - DNA, 222 bp, Heterodera glycines
ggtaattttaaattaaaatattatctttatttaatttgaaaattttgtattcttaattaataatatgaaaaatgctaatagagtttttttgctatgaaaattctttggttgtgattttataatgccgaaaatgacaaaactagtcccaaaaactgtgcgctattgctaattgtttttcttgataattataaattttgtattacataattaggcaattcaatg

SEQ ID NO: 101294 - DNA, 885 bp, Heterodera glycines
tggcgaacaggaaaattttggaggtcaaattgaccatggacagcaacgacggtaccctcagcgaaatcgccgtccgccgcagcgcttctcaccgtaacctcggaaccgcgcttaaggggggaggtgttcggggcattgccgccgatgatttgaatgtccgtgacataatgccaatccaatcgattccccttatttcatgttgtttcctcgcccataaatatgctccctttcccctctcagagtgtcttcccttcattcatttttgcatttatattttgttcccccaaattattgtgactttcttttccttctccaataaataaatatttaattggacttaaacaaatccctcggaccgaacattttgtaaagagtttgatggtttttttctaaatgccttttaattagaatatgtccttttcaaaggttttatttgagtttttatttaattttttaaatttgcattgcattttaataataatctttttttaggcttatattaaaatattgagctccggctgtcatacatccatacataacggaatgcctctcaccactccgattaaccccccccccccccctcaacatttgccattttcatcccctaaattttaaaatagtgcgtttatccctccctctctttacgcttttccgtttgccaatgccctcaaaaactttccctcccaatttgcagaagccgtcgcagagtctgcgcgttccattcaaattcctccccttttggcttttttcgccgcttaatccctccaaatcggtcgcttttccgtgaacacttttcgccaactgccgcttctttgcgcacaatgaaatcagattgaagaagctttgaacagataaaaagggctgtagaaaaggaagaacaaaatg

SEQ ID NO: 101295 - DNA, 400 bp, Heterodera glycines
aagaaataaaatttaaaaaaaaacaccccatggttatttttaagaacatcttgaattcaaggatattttaaaatttttcagaaagagggcccaattttccaggacgtccttgccattcaaggacgaacttgaaccctgattaaaaatttatacaaaagaataatttttaaagattccgattggaactgccgtggttcggcaactcttcgagttttgtcgcaaaatatcggcgcaacgcatttcactggaacatttaatgactttgttattaacaatgaatttagcacctttgaatttccattaaaacccgtaagtaaaatataacatttgaaatttttcttcccccccccccgccacttaattaatcaattattggcaaattaaggaattaattggcatg

SEQ ID NO: 101296 - DNA, 712 bp, Heterodera glycines
ttttattgaaaaaacaaaatctgtatctcaataaaagttaaatatatagagaaaaattcggctcttttgcgttttcaagaatgcataatattttacaacatcaattcaccagttaggtatgtcgagtaagttttttatttataaacagtacgcaaaactttcaaattaaaaaaatgggatttcctttgtaaaaattagagtccggcgggatcgggacttccgcgggattttacgggagtcccgctcccgactcccgcttttttcggtgaacgggatttttaacgggagcgggatttttacgggaatcccgttcgggactcccgtcccggaaaattttgaactcccgctcccgctccctgaaatttttttttaccggactctagtaaaaatgcaagagccgatttaaagttagttaaaaacttgtttcataaaataaacttacaaatcagaatcgatagaaggggtcaatgccgattgtacccccctcctttttttcgaaaaatgaaatttttttcgagaaaagattgtatcccggacccgaactcggacaaaaagtcgaaaattttaaattttttttgctcgaaactttcaaaattttaataaatttctacgatttttcagctaaaatggttttattttgtctattattgagcaagttataagtagcaaattagtttttatttatattttagataggtacattcacaaaatg

SEQ ID NO: 101297 - DNA, 172 bp, Heterodera glycines
ggattcgtgttcagcgacctctaaaacccttgaaaacatgttttcatgacttttgaaaacaacaaattttttttcaaaaaaagtggggggcacttgctttactcttaccattatgccttttgaaagggcaaaatttctctattcgattgcttttcacaattagaaatggatg

SEQ ID NO: 101298 - DNA, 138 bp, Heterodera glycines
attacccacctcatggaaataaaaattccttaaaaacacaaaaaaaaattgcctgaatctgataaggaccgtcgctgcgctggacccctaattcccacaaaaaaaaaaatttgctaatcactcatcatttgtcagatg

SEQ ID NO: 101299 - DNA, 56 bp, Heterodera glycines
ggtctttttgcttttttcataattaatttatgattaggtatttgatttttagaatg

SEQ ID NO: 101300 - DNA, 1003 bp, Heterodera glycines
gaaaaataatttttcactaacaaaattttagtggggtggtaaaaattatttgtaacaaaaattaggatcatatctaggctgtaagaggccgaaaatttcactagattcgagaccgagatcgaaaatcccgagacttttttaattttttaaaaaaattttcgtattcacttttgtataaatttaaatctaatcaactgatttttccacttgccttttttgaggcgcatttttaaagaacttttttttgaggggggggggggggtacggcggtgtctttaggcgccgtcgggaaaaataattgaaattttagcgcactttgttaacagatttaggcaaaaaaatgaaaattttagcgattttaagcctattttttaagaaaaattgggtgttttacgcgttgggggtgaaaagtgttaattttgacctatatattaaaaatatacacttacatcatattttcaaaatgttaatttttggaaattaaaaaaaacaattagtcatagaggaactgatcaaacgcaaaaacaggtaaggaaaccaagagcacaacccactaaaccacgcatgtgacatatttgaaagcaaagaattaataaaataatatcaaaagccaatcattaggggtgtatttttcccgaaacttctggtaaattacccgaagccgaagcgcgaagttcgaagcccaaaaaccgcaaagttttcgaagctcgaagtttcgcccgtctctgcgccggaccccccccccccccctttaccatatttttgaaccaaaatgccaaaaacaattttttggcgaaaaccggcagaaaattttgtaaaatacacccctaacaatcgcaacccttatactggccatgatccgggcaaattggaataggataaccggatttacattcccttaattttttcaaatttttttaatttggtataatatcataacaattttaaataacttaactttgatagatctttcacttatacgtaaaaagcattggaagttatg

SEQ ID NO: 101301 - DNA, 1003 bp, Heterodera glycines
aatataatttttctcacatttcatactctaatataaattagtaaaatatttttttatttattaaattttttctataacattttcaattttatttgactaattaataagacgtgtttatgtttttacaaattagctagttttaccctttattaatttaaattctttctaaaattatattttcaattttattgcctattgataaaagatgtttatgttttgagtagttacccatgcagattttgggggttaattttcagccccgccatttcagtcccaatggaaagggacttttcagtaccaaatttaaactttaaaaaacacctaataataattatatataaatcactgaagggtgaaaaaatacctaaaaaaggaaaaaaatatttctaaaaccaaaacatattaaagtattttgaatttatagaccaaatatcaataataacttttacatattaaattattttgcacacaaccaataccaataataacttttacatattaaattattttgcacacaaccagccaataccaataataacttttacatattaaattattttacatttatagaccaacctataacttttacatattaaattatttttcacacttggcctaacaattttcattggcagtttaccatattcaaacaattttccgtagaataaatgaccaatccactcaaagtaataaattttgaataataaattatttttgcactcgcataactgcaattcaactaagaattatgcatattaaatgacatttttctcactataaaaaccctagcatattcacacaaattctctcttactccattcatttgacaattcaaaatctcgtactgcactcatctttccacttttgaaagaacttcatattgtgttttactgtcacaacattttttccagttctgagctacccctgctcactatttaaattattaaaaataaaattaatacgcaatataaattataaatcaaaaatttccaatcttataatg

SEQ ID NO: 101302 - DNA, 300 bp, Heterodera glycines
cgttagtttccattaggcgttagcgtaaaataaagattaggtttgtgttcagtgacgaaaattaaaaatataaagaacataaaagttgacaagaagggtgggtgagaggcgaggacgtacctcgcagacacacacttctggttgggttccccgcccatcacaggcaagcaatcaattgttagtcgatgattattgtactacataactcaggggtcatccacgggtcaacactgcccaacaaatgtcatcactttttgttaatgtttgtacatttactaatgtttcagaatactaattatg

SEQ ID NO: 101303 - DNA, 225 bp, Heterodera glycines
tctgaaaaattcagaaaaatccattaatgctcgagactctcgacaaagcactagcgactgaccctaaacgtggacgaagtgctcgccgcttccgcgccactgtcgccagtggcgtcgctcgccgcctccaacaccaccggcggcggcggcggtgggtgcggcgactgatgaagcctggtggtgatttcatcgttgccggcgccgacaatttcaggcgcgccaatg

SEQ ID NO: 101304 - DNA, 223 bp, Heterodera glycines
atctgttgatcaacgcttgaggctattattgtccctatgagtgatcaggctcatgaaaacaattgatcatcattggaagagtctgatcacaaaaagaaccaagacagcactattgagcactctgtttcagatcagttttgtgtcacattacgcactttgagcgggcgccgctaagctgattgaaattgcgtgccgcgcccgacggtgggggcgacgggggatg

SEQ ID NO: 101305 - DNA, 88 bp, Heterodera glycines
atagttagtccttttgttgaatttttagaaattctatccgtcaaatcggcttttggaattttaatgagtaaatcagtaaccgtaaatg

SEQ ID NO: 101306 - DNA, 609 bp, Heterodera glycines
ggttaatcactttcttttttttcgtttttctttagcgccaaaaaatgtttcatttttcacgtaaaatgttttcgaaaagcggtgattaatattttatatgattaataaaaaaatgcctttctttaattgctttttcgtttccatagttatgtaaaggaagtaatgaaatcgcaagacatttatcgaatgtgttgcctatggttaaaggaaggaattggtttatcacgaataacaaaacgcttcaaaaattaggaataattgataaaaaaataaataaacattttttgtaaatagctttttcctggattataaataggaagcggataattaagcacccaaatgatcatcaagaattcctgaaataggcataaaattttaaaattaagaatatcttctgtgtcattttttattttatttttataaataacggacaaacaatttgaatttttgaaataaaaaattcgagatgccttaaaccattttccttaacgtaaatggtaggctcattaacgaaaaaagcaatttagtctgtttaaaaatttgtttttgaaaatacagtcaattattttaatttcaattgtttccaggaaatcattacgaaatttgatg

SEQ ID NO: 101307 - DNA, 385 bp, Heterodera glycines
  unsure (1)..(385): unsure at all n locations
tttttcaacaatttgtattcacttaaaaaattaaaaacaaaaaattactattcattttcaattatanaatataattaccatgctgatgganacagtggtcattagtacacagaagccaaatggttttaccaatgagaaaatattaaataaaattaaattttttttgtcctttttaggtccaaccactgcaaaatccaccatcattcatagtaatgaataaaatcatttttataaatttcctttgtatgcagaatttttaatttgttatgtattttttagtttcattcaatacaaccaccaccgaaagagttgggacaaaatcaagtaaagaattttcttaattttattttatgaaaattttcatttacttttaaatctgaaaatg

SEQ ID NO: 101308 - DNA, 430 bp, Heterodera glycines
gaatttgaatttcaattaattgaagatttattaaatcattattttaccaaatgacaattatttttgtcaataggaataaaattattaattaaattttttatttttgcttctttgcaattaagtaagattttctttttttccattaaatcaatagagttgtgcttttctgactgtttttaatcagaaaaaatacaaaatattttactttacggaagtcagaagaaaatttccatgttttatagtttgttttaatatgaaattgtttttttttgtggcattttacttcatgtataaataaatgatcataaataagaaaaagttaataattttgcaatttctttaaaaaattcgatttgagaatattgaagaaaatgaaattttcattttattagttttaattatatttttgatcgtccaaattaatcaaatg

SEQ ID NO: 101309 - DNA, 90 bp, Heterodera glycines
cactgacaatgagcgtggcaatttggccttcccacgaccggccgcaattggacatgcacgtgccaattgggcgccgtttatgttgagatg

SEQ ID NO: 101310 - DNA, 1003 bp, Heterodera glycines
ttttgattggtactaaatttataaaatatgtcgccaaaaagaagtttctctttttaactcggctctgacttaaattaaattattcaaaattcattttttatatgcgcgtctcgaatttatatagtaaataattttttgaaataatcttttttttacccatttaaaatactgaaattttttttaaattgctaaatttaaatttttaaaattccgaatggcagttgtctttttaataatttaacaggtgaaagaatgggcttctcaacttgaaagtggagatgctcaatccaaagaaaatgcattaatgaatttacggaacacaaaagaacagttaatgctacattcaattgccgaaacgcaatttacatccgagcaaagtaacaaagttaaaaaaatgtaaaaaaaaaattaaaggctaattcataaaattacttaaaaatacagctaacggtaatagtttagatggcagcccccctcatttttcgaaaaactgaaagttttttgagaaaaagttaatttatgttgaagggtcggagaatccgaactttcattctttttgatattgttaacacacatttgcgcctgctgttacgacctctaaaattgaaaaaacttaattgaaattcaatttttggcataggcgcaaatgtcttgggcgcaaatgtccgtggcgcaatagtctggacacgttttgatctatgtcgaacaccgaacccggattcaaacaaaaagtggaaaattcaaattttcgcattcgcattcagattcggactctccgacccttaagcccctaaaaaattcatttcttggtcatttcttggaaaactgtttttgacttctcagtaaacggggggccggggtaggctgccacctaaactattattgaggtaacattttgggggccgaataacaaaaatttatttaattatctcatttataagcaaatcatgtctatataattttctgatattaaatttcaattgaatctttttagaacaaaatg

SEQ ID NO: 101311 - DNA, 820 bp, Heterodera glycines
tacttaaggccttgtcctaaaaaaaaagatgcgttgataattaatcgattaacaatttaatggattcctatgaaatgcatttcaattaaacagtgggcaaattccaaatgacatgggaacgtcgtaattaattacatacctatatgtacatacataagcattaattattcattaattaatgaatttgatttaaatgacaaatgtcacaacaaatttatgtgttttgcttttaggctttccaaaatgagtcaaaatcgtaccatttgagttttagtcgaaatatcggagacccacccatgtaatctaacgatacacaataaggtggatactttttaatctatattctttagagggctttgcactggacttcataaattctgaggagtcattttcattagtttgatcgtattaactctctctgttcttttattaatcttaatccctctcctctcctcctttccgtgtgtatgtgcataccatttcgctgttgctgtttattagatctaccgctgccttttattagtcgttggactctaaggaaaagaaaggtgcgaattgcaatacatatttttttgttagttaatgacgaattgcaattctgctatgtgccagttgtcaatgtaattttcatttgtgagtacaacaaatgtatgtaagcgtaagctgtatttttactttaattttttgatccctatttttaatataaaaaaaagtgttaatttgatgcttacacgcaaaagcgtcatttttaattgattttaactacttcagtaatactcacaaacaattctggctttttaaaactgtcttccagcagatg

SEQ ID NO: 101312 - DNA, 84 bp, Heterodera glycines
tgtttgttatttttaattaatagatttaaaagattaattaactgtttttttaatcggttttctcccaatacttaggagcaaatg

SEQ ID NO: 101313 - DNA, 301 bp, Heterodera glycines
tggggggggggggggggggaggcgctcgctcatctccatttttaggcgtccattgggggaggagggccaatgctcctccaagagcccagaggacccttgcccagttgacaggaattgttgtcgtgtgaatttcggacggaccgaaaagtaaaaaaggttaaagcggaggaagcgcaccgcccaattcaacgaccgacaattccctttaattagcatcgaattacgggggctgggaaaaggaggacaaagacaacagccacaattagacttctaaagttgcgttttgtcagcttccgagatg

SEQ ID NO: 101314 - DNA, 541 bp, Heterodera glycines
atctattgttttaaactttaatgtactttttactaataacctaattttgccttaactaattgtactttaatcttttgtgttgttctggacgacccaagccatcccccatccaattccaactcaattctcgctgctttcccaacaaaactcttttacatttgctttgcttttaatttgcatttgatttaattgctttaatctttgctttgctttttatttaattgcttttcgttttaataaacttttcttaaaagtccgtttggaatttgggtggctctagacaagggttgaacccaccggggacacaacacttttctggtgccacgacccgggacagaggtccaacagttctgagtaaagtgatttttggctgaggcttggtgcccacgccgaggctcagtgccgattcggatttagctggtcaaagttgtgtacttccagcggggcttttgtgccagaccctctcctaaagatttaagctggtcaaattgtgtattcccagttttgctgagtgctaatcgagaaaaaaaagggagagatg

SEQ ID NO: 101315 - DNA, 380 bp, Heterodera glycines
atcaacaaatttaaattgatcgaattgctttcgttgccttcgcttgccaatttggaaaataaagccaaagcctaattgttcaaaaagtgtaacttggcgctcctggacgaccaaggtctggctcagtgacattttcattaaacggggataaacgcggtcataaaattgcttgaaaaccgacggttgaagaaatttgaaaaaagccctcgtgttggcgcattttgttgatttgattttgtcctcgtgtgggactgtacaacttctgctcgacaattgtttaaaagtactcgtgttgtactgagcctagatttaaaggcatacaataaactcgtgttgtttgaaacaagttaaatttctctcgtgcttgggaaaaagtgatg

SEQ ID NO: 101316 - DNA, 158 bp, Heterodera glycines
agtgactgcctttgaagtgccaattctccccaatttgccctttttaggcactgattttccttgtactgctcgaatattcgttcgtctcttatttcttctcacgacggtcctttgactgtgctcaccgaattttacgcagcgaaagtgccgggaaaatg

SEQ ID NO: 101317 - DNA, 234 bp, Heterodera glycines
ttccgcgtgttggccgtcaacgaagcgggtccgtccgcaccaccggccctgtcagcatcgcaaatctgcacggcgcgcttcctgaagccgcagatcatcaccgcgcagcgcaagtggaaagtgcgcgcaggcaacacactgacgctgggcatcaattttgttggcacgcctgacccgtccgtgtgctgggtgaaggcaggcgggaccggcactctgccacccgagctgattatg

SEQ ID NO: 101318 - DNA, 964 bp, Heterodera glycines
tgaaagtaatactgtactatctaacaaaaaataaataaataataaataaataaaacaattccattataaatttaatggtataattatgctaaaatgagcccaatttatttggagtatcgaatcaatatgtcaatggcattggtcagcgccccccttctccattagcaaaagatgatgctgttttggttctcaacccctcactttgtgcacaaaatttttctctgactgtctgtctctctactctctcacccaatgtttgtttcttctctctctatctctctctctctctcaccgtttcactctctcacttttgcatacactcttttctctttctccacgcgccgccgttcctcgctgcagcgccgctgaccaccagcaccccccccccttccacacaaataattaatcactctcccaccgccgcaacacattccattggcacaacttttttttaccaaaaaagtttgtgccccccccaatacatcaaaagttttttccatcccccccccgtccttgtcaaaaaagtttccactccaccagcacttcaaaagcgacgccgccttccccccgcccgtgtgccacaggcacacgcgcggtaaaaccgcgcgccgcctcactcgcaccccctcccaccccccgaacccgtgccacaggcacgggttcgcgcggtaaacccgcgcgcggcggcccgagcgcggctatgacaacgcgcagaaccaaagcctgctcgccttacgcttcttccactggtacgccaaggagcatggagtgcaagtgcagacagcccacgcggctggaggagagaagcgcattgggccctactccttggatggatggattgaggcggaaaggcgcgcaattgaagtcaatggtagctgaattttatgcacaattattttaaaatgtgctattttaaggctgcacgtggcacgggtgcaaaaggtgttaccccaacgacaacatg

SEQ ID NO: 101319 - DNA, 227 bp, Heterodera glycines
ttatcacgggttggtcataatcaaaacggattccgtaaaacattttggccacgacggcacagagtccaattgtggcattgaccgggccaccgcaattttattcggcaaagagggagccaaagtgacaattcagggcactgaagaggccgaattgcatgtagaagaagcaaaccccgagttttaattggcaaaacattcagcggacggtggtgcaaatggtcagaatg

SEQ ID NO: 101320 - DNA, 712 bp, Heterodera glycines
ttttgccagtgtgcagcaacagttgctgttaatgaccgttaattaattaattaattagcaaccgggcacagcgcctaatctgtttggcgtgtcacagctatagccctaggaattggacggaaaacaattgccgtgagttatatttggttcctcaccatgccataaacgcaaaaatttaatcattaaggataagaggaaaattaattttaaaaaagtttggcaaaaaataaattaatttaaattgactggaaaactatatggttataaaaagtggtttcgatcacttattactcaaactcatagctaaattttggtacattaaaaagaaaataaaaatattttttaaatcattaaaaaatgaatgagtcaagcatattgtatttataatttatttattttaacttaaaattttaatatgaatattaagtattttgaccaattttaagtaatcaatttttaaaagaatttgttttttaatctttaacaatattccatactgtactttagctggctggccattttcctgtgacttgtcgctaattaattaattaattaaaggtaaacatatccaagggatctgcccttcacttttctctaacattttcagaacaaatttgtaatctttttttttctccggaggtcatttggtctttatatcccactcattaatgagtcattcattaatggtcgaccgttgtacaaattcgacatg

SEQ ID NO: 101321 - DNA, 1003 bp, Heterodera glycines
cttagaaaatttttcgtaaatttacacgatttcaattcatttttcgggttctcagatcaaccaacataaaggagagtaatgaggcgttgcaattttaattctttaatcaatttaagtagtggattttgagaattaaattcgttttttttttaatttatttgttttaattaagaaatcattagctgaacctatgaagttaaatattttatcaaccataaataaaatatataagtgctctcaacaaattgcttaattgtttgatctcccgagcaaaaaaaaaaaaaaaatatagaacaatggagatcggccaaagccacttcagcaagcacaaagctaaggcagctgctccaaaagtccatctgagttttaagcaaataaatttatataaataattttaaaattttaatttaattaatatcaattattttttgatttatattgttccattaagtttgttgttattaggaactgaacaaatgttttcgattgatattatcggataaaacgtcgacgatatcaatgccgagaaaattttaaaaaacctttcaaagctagaattttcaataaaatatctttaaaaaggtcgaaaatatcggtagagataaatacctaatcatgccggtctacatatcttatttccaggatagattacttttagaattccaagaatttaaaatttaataaaatttattagtaataatgtcctttattatttcaaggttgtccttattttatccttatttatgggacaaatctttattttacgggctgaacgtattaaacaaattattttttgacctattttgaatagataaataataaattttgaaaattccaataataataagtttattttaacccattcaaattcaattaagaaagttgtttctatttttttttgaatttttaaatttaatattcaatttattttttatttatatacacattattattaaatattatttcaatttttaagcattattaatttttgtatacaaaaatg

SEQ ID NO: 101322 - DNA, 524 bp, Heterodera glycines
aaaccactcattttttgtattcattcattcattttaacgtaaataaaatggttcatattgtgtttgaccctcgcagtgccgggtacgacgagtatgtgcaatacggtagcggaatagaacacgaacatcacttcattgggtccagtccctttcaacgagggtatgggcagcggggagcaggggttggagacgtgtttcgcggtctttggcgcttttttctcccaatcctccgccgcgttggcaccacggtaggatcggaggcattgagcacgggtcaacgagtgttggagcgagtcgggaacgacggaatgccacttaaggaggcactggtaagcgaaggaaagaaaggaattgataccgtattggagaagggaggcctaccaaaacagtttggcagtggtggaagaatgggtataaaaagaagaagaaaacacgcaccaagtcaccatacaataattggccgaacaatcagtaaaccagcgagaaaacgtgttcgatccgacgcatttggactttactaaatg

SEQ ID NO: 101323 - DNA, 215 bp, Heterodera glycines
aaccttttaattatttaaaactaatgaataataaacatcagcatgaattccacaacgtttgcatggaactatggtaagtaatgcatactgtagtacaaaacgtatttgttcaacagaaatttaaacattaaaccaatgcttttatgcgtaattaaggctcctaaccaagggcaattgtccaatatgccgtgccgaaatttttgtcatcaagaatg

SEQ ID NO: 101324 - DNA, 514 bp, Heterodera glycines
  unsure (1)..(514): unsure at all n locations
atggaggaggagagggcgcagcggaacggcgccaccgatgatgggaagggacggaagcggaaacaccgcggcgacgaggcgcacgcagcacaggccgaaggagtacaaccaccacaagngcaaggcgagaaaatgggacaaaacaaatgccaatcaataacaatggacttgctttttttattacatttcctcatttttttacacatcaccacttttaccaattcaaattattagagatcgcttttggaaaacacttttaaccaaggtccggattttgaccctaaaaatctccgagctacggctgaaattttagaggttttaaaaatagtatttttctatatgatttggcgagtgcaaattatttttaatgagtcttgcgaacaaagaaagggacataaaatattttacaatcagacaaagtgctatcagaaaaatggtaaaaatattaaaaaactgaatactaattattccagaaaagaacaaatggaagagcgcgcgggccaatgtgaacatg

SEQ ID NO: 101325 - DNA, 954 bp, Heterodera glycines
tttttaatcaaaatgctttataaaaatttcaatgaatttcttcgccaaattgttattgtgaatttcagaaaaaggaattttctatttaaaattaaaaaattcagaagcaaattcaagaatttttttatttttaaatgcattttttaccacatgaattatgattaaatacgccaagtacctcaaacttgggtaattaaaccgaagaaagccgtgcaatggggaagaatgacgcctaaaatgaaggaaatattcgatgctgtgcgaacactttgtgtcccctttatgactctcccaatgcagcagttgtccatttttaccactatttttatctcactcatcgtctgctcgcctctcctttttatcagctattttccaaagccaacgcccttttctccctcttttttatgccaaaaatagtcagaaaatagaaaattctcctttttttgctcaattttcttcaaaataaataaatattaaaatttgaaaatttgccctcaatttggaaaaatttatgtgcatatttttcactttttatgcgcatattttgcgattttatgtgcatataattaccatccctactcatcatacgttatggattttaagcaccgccgttaggcagcgcagttccaaaattattccttttaaatttaagatttggtcgattcaatatttatgcattacttttgcaccacaaaaaggttgtttttttttgactcggcaaattttctaatggactaggaaactaaatattatattttattcttgtacttttgctgtactttcttttcccagaatttaattatttacgttattttttcttaaatgttattctttttttatgtacgacactttggtgtttatcctttcccttctcattccttctgacattgtaaaataacaacaaaacaatcgcacggttcatttgtgactgccatattattgggcatgaaaatg

SEQ ID NO: 101326 - DNA, 676 bp, Heterodera glycines
agggccgcattggacgaacatttgggcccccaaaatctcatcgacgtacttcgtgtcatccaggtgattttagaatgggaattcaactttttttaaattgaataatttgaaggggtacatttaggccttctcttccctttctccgttttttcaacccaaaaaattaaaaaaatttttttaatcaaccacctgaacactttgtccccttttagatgctcacttatgaacgcgtcaattttggcgattggaccaacgaattgttgccttttttgacgcggcaaatgtatgaaaattatggggaggactcaaaataaattttacgttttgtttttgttagtttggagtccgattccgtcccttcgtccgccgaactgttgccctattgcatgtgcattttgtgcaatttggtcggccagtccaagcagttcaccacccatttcaaagaaatggtgggtggatgatggaaggggacatttcgcggtttttataacacttacccatttcaactgacaaattttgaggatttttgggtctaattttgttgaaaaaataaagcgaatcaagtcaatgaatggcgaaatgacacttataagcacctccggtgaaaatttcttttttttctagaattttaaaagaaaaatatatttaaagaattcctttcctttttttcaggatg

SEQ ID NO: 101327 - DNA, 161 bp, Heterodera glycines
atcacacagctgatttactctcacaatgttgttgccgataaattgtatgaattcgaaccatttgaatttaacaattaatagcggatttctattgtctgtgtttcattatttattttatgagattattatttaacttaatttcaaatgcttttagaaatatg

SEQ ID NO: 101328 - DNA, 787 bp, Heterodera glycines
gaccgatacaatgatgatgatgatagtgatgatgttcagttgacattgttttttgttttttttttgtaaaaattaggcgaatacaaataaatggaaatgccctattttttcaattatttgatgtactgcttgaacttgacgccgccgcattgggtggtgcaatttacctttcatttgccatgtgtttttgtcgccgcttttcgatctattgtgtgcattggccgtgccgtctgtgcattggcaatatttttttgaaaattattgggcgctcccctcccgatattccaacgtctaacagcgcgcaattttaccgttcgacgccggaaaaccccgagatttcaccgattcataaaaactgcccatcaaaatccacaattttgacgaccagccaaggaaaaacaacgacaatttaccgattacaaccttccgaattcgattatttagtgtccatttaggtttttccgacattttatggtagtaattttttgcaattagcccgataggaagtaaaagacggcggattgttcaaaactaatcggtgaaatggtcgaatttcggcttacgaattttaccaattctttaaaatttgctagactaaaatgatttacttcgtgtacttctcattgtctctgacaatcttccagttttttcatgacgtttttgtgccaaaattttgcatttttacgcctcatcccgtcattaataaatggatttttaggttttttttttcaattaacttcgaatttgtctaaaacattcccaaaacaacaacggcaccgaaaaaatg

SEQ ID NO: 101329 - DNA, 140 bp, Heterodera glycines
atggaagtggagaagcggagcatttgctgggccgaatcagtggactccgaggacaattcgcacaacgaaaggccgagttgggcaggcgcagggagacggtacacactttggaggaactgtactcgcaatgcgaagagatg

SEQ ID NO: 101330 - DNA, 348 bp, Heterodera glycines
acatcagacagttggcacgtgtgcgaagcgagaggggtgcgcgaaaactagtgcagcagtcaggcggatcactttttgcccctttgttggcccccattctgattgaggctgcccgatacctgctttcgcgcagcaataatggccaataaacattctgctgccgtacgagcactacaaggggctggttgcagcgagggagacaaagaatgacgacgatgacaacattgctgagcggacaaacttgggctttgtcaaacgataagtgaccgctgcagtacagaagcggaagggaaacgtcagcgaacggaacgcatgtacaaccagcagctgcgccggtacctaaagatg

SEQ ID NO: 101331 - DNA, 398 bp, Heterodera glycines
ttttttcttaattttaatttaagatttgggttattagaatttaaaaaagtctttagaattcattatcctaaggtaaaaaaatatcttttttaaataaaaagtctgaatatttttaaggaaaggacggttaatttataaggtccgctgattttaaaggttaacatcatctattcttttaagccattgacgaagcttacaacggtacatagactgataaggaaatttaaaaatttagtcagttgaacggttaaatttcatggggccataaaaataatattttttaatgacagttaaattagaaattaattattaaataaatttaaatggagccttaaaatagtatttcttaatgacgcgttcattaatataaattaattttattaaatttttatgacatg

SEQ ID NO: 101332 - DNA, 308 bp, Heterodera glycines
atttatttattcgattatttttggaataatttttttattgttattttattgtatggcacttgagaaagaaattggcagaaaaaaattgtttttgttgcgccaaaattggaagtatttaagggcatggaactgttgttgtggcacattcaaaacattttcaacaacaaattccttcccgaaaattcaaataatccattcaaaaaatggctttatcagcaattaaattgtaaatatccgtcattaattacccaattattaaaaatccctttaggctttcactgtttctgctcgtcctttgtattggcatg

SEQ ID NO: 101333 - DNA, 190 bp, Heterodera glycines
atttgaattttgtaattgttacttttttgtttgattttttgtttggttttggcgcatacatttccatgaacgtcacaatattctcgctgattttgcttatgttttattcattttctattttaatatgtttaaaaattgtatggatttgtctttaaattggtcttttatttaagatttaatttccaaaatg

SEQ ID NO: 101334 - DNA, 1003 bp, Heterodera glycines
atcgagcccgtttcaagatatttattttataaatattagtttttaaacagtgtcttaagtagttagtccacggtacccgtcgccgtcgaagtgtgaaatttcacacctcaacagtggccgggttttcacacctcaacgatccccggttttcaccttttttaccgcaaaaatccaaaggtattggctgttttttcgcgcattattttgggggaggggaaggaggtcgacggtccctggttttcacaccaaacggacccgggttttttttttaccgcaaaaacccaagggtatgggttttttcggcaccgccgggccccctcccctcgctcatttcctaaaagttttttggaaaaatgcgccgtaaaaaattgttaaaaatcaattctgatcccaaatgcattgaaatttatgaattgcttatttcttctccaaaattgtaaattcgataatgggaggtgaaaattatattatttaatacaatataatcgaataaattgtaaaaaaataaatgatttgaagcaatttagcaaaataccctgatttttgaccttaaaatctgattttttgcacatgatagtctgatttttgaagattttcgatcacaccgctattttagatgacttgaaccctttcagtaattttgaaactaacccacccccacccccattcaaacccatcgcaaattttggtatataccgggattttaactaattttttatcaatttattgcgaatgggaaagtctacttattttctcacaatcaggaagatttaaccttgtaaataattaattttttgctagatgttcaattttctaattttacactatattattatttagttttgccttttaattttttttatgttttgataaatgaagagaatttataattttttatttaaaatttaacggaccaaaaaatgtgcaaaaaaagagatagaaaattttaaatttatcggacgaaattggagaaaatcttcggcaagaatttgagcaaaaaatg

SEQ ID NO: 101335 - DNA, 1003 bp, Heterodera glycines
ttttggcgaatttggcacccctccgattaaaaattattatcttttagatattcttcatcaataaattttcctttttaatttccctacaaaatttcgccaaaatttctgacattttcgccaatttctttcttttgaccattcgctgaagaaacgcggcacagtaaaaatggccacgtttctcaaacaaagcagcagaagcagagaatccatgtagtggggagagaaaggtgggaccattctcagaaaacacggcaaaaatggcaaaatgtgaaaaacggcaatggcaaagcttataagtccagcccccgttgatccgatcatttgctgtccattccctcccctctccttcctaagttgatctgatcattcaccccccccccctccccctctctccccttttgccattggttttgtccccatctgatcatttgctttttgtttttccaattatcatatcctcactttaccactcttccctgcagcacaataattgcccttttcccggtgatcgccggtcgtcctcaaatttttctccgaattcctcgcccttttcgcctcccttttttctcccaatttttcctttcccattgccaatttctcttcttcgtccccataattttcttcttcttcatttccctcttcacttcacttctgctcactttcttcacacacaacaaattcatccgccaaaacgccttcgccggacagacaaagcgcaaatagcggcggaagcagcggaggcggcggtggggcgcgactgcgcagtcgcaaccgcctcctccaacagaagcagcaacagcaacaagtgggacatggccaaggggaaaaagaggggaaaggaggagatgaagcggaaggggaggggaagcgaggggggggggggatgaggaacagaaaaagtgatcggaagtgggaaaaggaattaaggaaagcctaagataaatggggaggggaacgaggaatacaaaaactgatcagtgattggaaaagcccaaaaaggatg

SEQ ID NO: 101336 - DNA, 1003 bp, Heterodera glycines
atgaaaattgtatactgtaattggaaatcaggtaggttccttcacaaaccaattaacaattaaaagttttcagaaaattttactatagtaaaactctctttcgatctctcatgcattttcctctaccgtattttctcaccagcagtgagattaaatcaataatgatcactagggagtccaattatatggaaatccatatttttttcctggactgttgagggcctgaaacgcacgaaaaacatgtttttagcttggtttgaagcttgtaggaaggatttatatatccatattttgcatattttggcattttggtccatattgtatgtccatattttggcatttgtcaaaaaaacatctattagaacggccccagcagctaaattagcctttttgagcccacaacccgaaaaatttttcaaaaaaatcattttttcgccaaaatttctcgagaatattgaataaatttaaattttcttaaaaattaataaatttatgtcaaaaataagcaaaaaagcgaaaatttcgcttttgttgttgattttgcgctaaaaaaattaataaattttagcttttatgtttttttttcttttaaaatgattgcacgtaattgccgaaaaaattcgagaccaatttccgaatgttgaccgactaattgcaaaacgaaagccgtctttgtcaaagcgccttaccgagtcaaaaaatttggaaatgtatctcatatgcaatttcaaccaacaaatttgaagaaattttgcactcaattttgaaaaatttatgtccatattttgacatttttgccatttatgtccattttcgcaatttttgccattttatgtccatatttttggccatatttcgcgattttatattcatatttttggactccctaatgatcactatatatatatatatatatatatatatatatatttatttatagaaaaaaattatttttcttttttaaaattgaacagccagtgacaaaaccgtaagtcaacaaatg

SEQ ID NO: 101337 - DNA, 238 bp, Heterodera glycines
tgcatccattccggccacaatgtcccgcacgatgaaccggtcaccagataaatggcctctgccaaaacggtccacgccgaaacgtcctggcccgtcaaaatacggtacattgacctttatttttatttcctatttaaaatttggcgaaatgtttttttctcgttgtgtcctatgatcgaaattgaaaaccaaatttcaggctgattgtaagcttaattgaaacagttttcttactatg

SEQ ID NO: 101338 - DNA, 464 bp, Heterodera glycines
tttccttttttttgattgtttttggtgcacttcataaataaagagaatcagagcctaccattcactttgacgggcaaaacagaatatcgaattttctaaagaaatcatccaaaactttgagtattgtcaaggggtagtgtttatcttccgggtatttaactcgacttattcattcagcacatgtacattggtttaccaatcgagtagtgtgtagtaaaattaacgaagggtagagagaaatgaagtcaaatagaatttttttcattccgtcttcaaatccgctcatttatttgttgctcattaacattttagcgatctcgtagcctaatacacttacaactggatggacaacttgacttcgtataaattcaaaacgttttactttcctctcccgcactttatcttttatttttttcaattagacattaatatacatcttctaggtagcgctaattgcaggcatg

SEQ ID NO: 101339 - DNA, 350 bp, Heterodera glycines
acctctccattttccctcaacattcttgggattaactttctctctgaccttcctcattcacttcaaaaatatattcactcatcaatctctaaatgccttcctttttcctacacaatttaaagtgttgctggtcgtcgttactccaaaaaatcagcaaaatgaaaattttaacaaaaaaaataataaaataataaacaaatgtttaattttttgaatgacgtcatagcgcaccatttagtaatttaaattctttgcaccaacaaaagagagacagacagtaagtgaaaaattttagcgccattttttggaggtatttatgtgaatttatttatttttgatccatgactatg

SEQ ID NO: 101340 - DNA, 334 bp, Heterodera glycines
aaaaaaatgaaattaaatcacaaattaatacataccgtaatcccaataaaatagctttggtccataaaccgtactgctttttgtcggaccggcacctaaacgcttgagaatcggttgagtgcgatggcaatgtgcagcatgtaaagtgcgtagttgaacaagtagatcagaaatgtgccgacgttgtaaaatgccgacggcgaagtgccaaaccatgaggaagtggggccaaaaatgggcagccaatagtacacaacgtcgatgatgtaatggccaatttcctttattaatataaaaaatgtataatatttttaattttagttttaccaaaatg

SEQ ID NO: 101341 - DNA, 114 bp, Heterodera glycines
gccatattttcgtcaatttgtttttgttttaccaatttttgtgtttagacatttcgccgtgccaccacttctgtctgttacaatattcaactttatttttgggtggacacaatg

SEQ ID NO: 101342 - DNA, 582 bp, Heterodera glycines
ttaaaaatttattgtatttaatagatttttgcacaacccttgaaggaatatagattgaactttcgaaaaaatcgtaatcctttttatttttgttaatataaaaattcggctattttttaaaatatattttaggaaaattgatttcattgattcttcatctttattcgattagcattataaaattacatttgcgaaaaggctttcattttacaatagatttaatttttaatatttcctactcattcaattgtaaaattatatattttttcatttgatcatttatagaaattgaaatagatataaaattttaattcgtaatttatataaatcataaattggaaaattattatttgctatctattgaagccatcggaaatgtcttattttaatacttctaaattagaagcatgaaatatttttaaaaaaattatatataattttttaagaactatgtaggcttcagggattgaaaaacttaagttagaacccgattttcgacataggctcaaatgtaagggaaaccatctattcataaattataagaactgtcctacaaaaaggttccctttcaaagaaaagatg

SEQ ID NO: 101343 - DNA, 1003 bp, Heterodera glycines
aggagaagcggatgccgaagggagcggaaggatttgcgaagggcgggaggagagacggacggacggaggagggatcggacgaatatttgtgggggagcaggcgaaaaaggcgagcaaagccaacagaggcaaccgcccgcatttacactctaaaaaccctttctggatcagtaaagttgccggattcaagcaaaaaatttgtcaaaaatattgcggatcaattaataaaaattgaattaattaccaaaatagccgagggaaagagttgggtttgattatcaccgactgactgatcggcgtgtcattgcggacgcggagcgctggaggctcccgggggggggggaaggacgggggaactcagatatgatcgagagtgatcggacagcgatagcagtcagtggctggtagcagagtttttaatgctggtattttgcgtcggggagagctgggttggtggagggcgatcaaaattttgttggtggcgcggcgccgccagccccgctgttgtgtggtgacagacggacgggcgatcagtggcgactggcgctaagcaacggaccgatacccacaaaaaccaccaccaccaccaccagcgtcaacaacacactctgattatgatggtggcggaggtggtggtggtgttggtgggttatcaggaaatgggggggggggaattcggggagaggcggggggcagcggagcgtaagactgatgcaaccgatcacaaccattactataaccaagcaacccaaccaattgcagccagcgcctgcacgatggcgcgactaaattggtggtgtttgtgacggaaaaggtcattttttgatcaagcaccggaccgatcgacgcgcgacaaaaacaacgcaccgatcgggctatttaagcgcaaaagtgcggagcgaaaagcaaccatttaattgtttcgtcgtctactttattttttaaaaatccattcccccgtcctttctaaaagcagaaaataaatattttattttgaaaaatg

SEQ ID NO: 101344 - DNA, 399 bp, Heterodera glycines
ttaattgatatttcgcaaaatttcccataacaaataaaaataaaaattcactcctaaaatgacttaaaattctataatacctaaaaagcaaaattcttaagaatggtttccgaaaatttacaccacaatttgtgatcccaattttttttcgtattttaatatttcattttcgaattaataaattcattttagccaatttaaatagaaataattaaccctttttttatatttacagaaaatttcaatttccaacaattgtttttcatctttttctgattatgccaatttttccaacgaaaacattcaaatttctgataatttttgccaactcaatgatctattttttgcatttgattttattctaattaattatgttttttattacagtactacttcatg

SEQ ID NO: 101345 - DNA, 94 bp, Heterodera glycines
caaaattttgttttgtttctcaaaattctacttgaaatattttctgttaaggaaatggcgggacgaggacaccaaaagattgaacccgctcatg

SEQ ID NO: 101346 - DNA, 541 bp, Heterodera glycines
gagtaaggaggaatgagcaaaatctcgatatttacattcgcacgacagcatggaaaatggcgtaaaatggtgaatgaataataaatatttgggcatggaaaatagtcaaaaaaacataaacaaactatggcctgaagagcagcacaccgccacccatgaagcacaagacgacagggcacctaaacgactcgtgaaattagtcaagtcaagagaacgacctcaagccctaaaaggaaattgctgccaggataaacggagctttgtgtaattaaagctaccgccctggttaacagcaaaaatattaatttaattatacggtccccaaaatccccaattaaataatacggtccccataaagtaaagaaaaatgagtagaggaggagagagaaacagcagatgtgcaaaaaaagataaaatttttaaaatgaatcgggaaaatgaccgggtgtacgttacgcgtacttaggccacgcccacttgcgcaccaaaattattcccaacaagaaatcgaaatcattctttattcaaattttggaaaatg

SEQ ID NO: 101347 - DNA, 167 bp, Heterodera glycines
acttaagccataaaataatagtaataatgttaagtttattgtctttcaattatttttttttaaattttattactagagcccggatttttttatggttttaaaaatttttctgctgcttagtcatgactagggagtccaaaaatatggatataaaatcgcgaaatatg

SEQ ID NO: 101348 - DNA, 506 bp, Heterodera glycines
aaatcagaaatgtatgtggaaaaaagtgatctttgcgtgccaaatctcgttttgtgttgctgcttgaacttctgccacgtcgattcaattgtgttcgtatgctgcccagtgaaaggatccttgaattaatccatttgtagcgcatttcgttgccacagtcacaaaaacgagtggtgtgtagaagcttaagttctctgagccattcttcgaattcttcgtctggtagagccaaaactttgaataaagcatcaagtttaaaatttttaagtgtttccattaatctaaaagcaattgtgacaataaaaaagtaaaaaaaactgaaaaatgtgaaaaaaaaaaagcggacccaaagtccactagtacctaaaaatcaatataccaccgaaataataacaggcgaacgtaatataataaccttctctaattaggtgcgaaacgttcgctgtgtcaaatgtcgcgcgtggggtcatttgaacacggaccgcgaatgcccactgtatggtatg

SEQ ID NO: 101349 - DNA, 703 bp, Heterodera glycines
aattaagtaaaactttttgttttcctcccttttcggttcaatggcattctttggtcccttttgtttcctttctcggtttttaaggcaattcctttttgttgccattttacttcataattatttaattagttaattagttgggtaatttcatttttgccccctatcatttaagcactttatttccttttttgcactcacaagttttttttatttcacccctccttaacttccggtgttcacaccgtttacgctgtgatacaatcagtaggaacactttctcaccacattacggtattaatggatttccgctatttttttctcacaaagcgatttttacattagttccgataaaggaattattgtaacacgggaacgacagccacgcccattatcgggggcctttaatctaagcacttcacattcattcattcattcttccattcatttgatttactgttctccactttagatactcttgcacaatcccactgctacttctcatctcacatttgctctcattatgtttcctttctctggtgggggtccacctaatcaaagcgcggcggcgtcaagcaatgcgcagacagaccctgaggggctctccaaagatttgcctgagttatcagtggttgataaactgatgtttgctggaaagattctaagcacgccagcacgtttgtctgatgagaacaaactccatatg

SEQ ID NO: 101350 - DNA, 65 bp, Heterodera glycines
  unsure (1)..(65): unsure at all n locations
tttcccggaatctgatccagatcccgactttttccancaatgcacnnatctcaaattttccaatg

SEQ ID NO: 101351 - DNA, 311 bp, Heterodera glycines
ggggggggggggggggttggggccaagtgcattaattattgctgaaaggtgaaaaggcgagttgagaagagaaatcgcggatgagtgacgagcgaagtgccgatggttctgcttaattatgagaggagcttgtcatcaccgatttcattctcattttcgttttaatttcctttaatttccatatttgggcatgtcatttgtgccattgactaaatatgccattctttggccaaaagcccttttttaattgttttttaaagttttaaatttagtattcggacatttcacaacagcgaattctccacaaaatg

SEQ ID NO: 101352 - DNA, 77 bp, Heterodera glycines
ggggaaattaataaataaatatataaaagcgaaacaacaggaacactcatatatttgaggagagcgcaaaaaaaatg

SEQ ID NO: 101353 - DNA, 485 bp, Heterodera glycines
caatgacgtggagatcttaatggctgcgttggttgcttttcgtcgagaattcattgggattcaaaggcggcaagagtacgtcgatggggtcgacgaccgggagaaccacgacgagaattgatgtcttacgggagtgcatgaccatcgcaagtgcgtgcatgaaacacttccgcaccaatcacctcccggctgagcacctcgccattgtacctgagcgaggatatgacaacgctcaaaatcagtccctccttgcgcttcgcttcatcaaatggtatgaagaacggcatggcgtccaactccaaactgcgcattctgccggtggagagaggaaagttggcaattactctctcgatgcttgggttgaagctgaacaaagggccattgaagtgaacggtaattttacttttaaacattttaaaatattgtttttaaaaataggttgtgtgtggcacgggtgccaaaagtgctttccggatgataatatg

SEQ ID NO: 101354 - DNA, 205 bp, Heterodera glycines
  unsure (1)..(205): unsure at all n locations
ttttgggctgcgcttttcnggggaaaaattntcggtctaactatccaatttttgggttcattttatgctaaaattcattggttttttttaaattcataaaatttcgagtttttttctttgattatacgacgggttctaaatttttttttcacaaaaaaaaaatggagacttcgcgtttttgcaggtcaaggccagctgggaaatg

SEQ ID NO: 101355 - DNA, 192 bp, Heterodera glycines
agtaattaacgaacaaaaaaaactaacgatatcaatttttgacgaatttttttacaggaaaaattaaattatatttcataattgggcacaaattaatttattttaaaaaagtatttgggggattaattccaaaaaaatgccattcaaataaaagctcggcatggcgctgggcaggacggacagcggacgatg

SEQ ID NO: 101356 - DNA, 558 bp, Heterodera glycines
tattagtttttgattttctactaattttgggcaaaccattggcgacattttttgaaaattcatgccatttgaattaaccttatttaacccagaaatactgcgaactcaaacattagaaataaaagaagtgcaagctccaacatgaaataagataattttgaatattctgggctaaattttaaaattaatgaaaacaatttttaaaaatggaatgagtcttttgatgagtggatatgagccaaatttattttctggtaagaaataaaattcgaatccataataaaatccatgttcgattaaaatccgacaaaaacaatgaggaaaaaagtgaaaaaacgaaatccaaaaaatggcatgtgcactaatttagtttaattaaataactaaaaattgctatcctaatattttatctattaaattaaaaaattaaacaatgcaaaagaatttggcaaatattattgtaaagtcgcaaaatcggacaaaggcccaaggcaggtcaacatttccattctcgtcattggcagcggattaaatgtggcggtgaacaacagcaaaatg

SEQ ID NO: 101357 - DNA, 464 bp, Heterodera glycines
  unsure (1)..(464): unsure at all n locations
ttttttccnttggcctaacaaaagtaanggagaattntggctctgggagaaagacactattaactattagcacttatgttatcgcctctatcaattaattatcctaaatcattttgtaacgtttgcattgttaaaacaaatgtattttattacttatcattgtattgctcgtttattaacacacaaatagcaaagcattcgattgataaaaattgggccatcagataaataaaatttaaattgatttaaaaaaattcattgaaaagttaattggaaagaaaaattacctaaaaatgtttttaaaacggtaataacttctcgacgtttctctattggctcataatttgtacaacattttctattattccactcccaaataagcaattcgttattatgtccaatattcgttcaatttcgacgccaaatgcgcccgcggcgattgggccttacaggttggccaaatg

SEQ ID NO: 101358 - DNA, 1003 bp, Heterodera glycines
catcgtgcactctgagatacagttgccgcaacttgctcagctcggatgattttttgatttggtttgatcggcagaggtgctccgaaatgatcgaggaaaggagggcggcgtaaatgactgggttaccattaaaaattgtttaattggactgataaaaactgatcagaaaatgcaattttgatgcttaatttgactgaaattattagaccattttatactcattacaatgttgtagtcgtctggctaattgccacatttttctaaatccaatttttcatttgcatatttattcgctatttttcgctgtcacaccttagcaatcgcaacaagttaattcctaagatggtaatcggcatggccagttggcaccggcaaactcgcaacattcatttaattatgtgtctgcctgacataattaattacttaattcaaatatttaaccggctcaaatgagtaagggagcagaacccttagctggaagcagaattccataattggcgatagccgaagcaggaggaggggggggggaggtggcagggtgttaagaaatggagaaggaaaaggaaaaatgaacatgaagatagcgatcagtctgacttatcgacgcgcagattcaacttcacaaattctccggcggctaatcggctgactcgcatgaatttgaattcaattacaaatccagctagcttacagcatttgcctagttcattttctaattttgcccggggcatctgacagttttagaggagggtaatgagagaaacggagtgatcgctatcattcttgttactaatgtgcaatttaaggccgacatgtaatcatatgctgactatagacgtgtacaatagggtatttaaggagaggccattcctgactaatttttgatttgctttatgctagattttgaccagaattaatcgtaaacttaaataatttaattccaactatgtattttgaaataatattttttaatttaattacagcgaatcccgactttcaaatg

SEQ ID NO: 101359 - DNA, 503 bp, Heterodera glycines
  unsure (1)..(503): unsure at all n locations
aaaaacccgtgaaattcacggttttcgtgaccatgaccgtgattttttttgaaattttggctaaatttttaactgattnntgtttaaaaatgaccaactaaaatctagataaaattattaacatttgtcacagggtttccatttgttttgatttatcagaaatgttctggtttgaatgtattgattgtcaaaatttggttctgattcgttaaacaactcataattttgaaatatttaaagcctttacataaacctcaaatttagcaagacatttcatttcaaaaccgatacttttcatgacgtatttctcacaattaaaatgtgggattctgccgagcgcaaattttaaattgtctataaatcagtgtagcgttaattcttagttcattaaacgataattacttttcgtgtgtcatgaaaagaaatgcggcagttgtcctgcgcaatttgtcaagaatttttgatttaaaaaattatttagctcaatattgtctttaattatg

SEQ ID NO: 101360 - DNA, 195 bp, Heterodera glycines
  unsure (1)..(195): unsure at all n locations
ttttgaatcaatttcaataggtgtgggactacgctgagtgggacgacacgctattcagtagctacgtcacagctttcgtcggtctcaaagtgcagncgagcggatgnccagagggatgtgaancgaaagagcacngtcagnccttcgtcgcagatttctgcgtacggaaggattcatctggaccgacaaaagatg

SEQ ID NO: 101361 - DNA, 367 bp, Heterodera glycines
ttttttgattttcacagtttaacaatgttattttaattcttaaagctatatttctgcagcacctttttctccgcgacattatttaattgcataatcctataaagagccacaggccggccttgggtggcgtcgtcagactgcttcctccgccctccttctcgccccactacttgctccgtcttcgcatgctccgtttttcgtaattttgcaattaattattattttattcatctattatttctttggtactgaagtgtccattgttcactgggactcagttgtcccacactcagattgcatcgtttcggtttattactctgatttttagaccaagctcattaagagctctcgaatgataccaaatatg

SEQ ID NO: 101362 - DNA, 454 bp, Heterodera glycines
gggaaaaaagggggtttgaaaaggtttattgggggaaaaaaagattttacaaaaattataccccttgggagaaggggagtggggaaacatgatttcaaaatttttcaatattttctagtctaatatactcaaaacggttcagaattcaataaaaataacgttcacggtgcgaaaaatggggtttgacaagtttattgggaaaaaagactttacaaaataatacccctgggagaagggagtgggaaacatgatttcaaaattttcaattttttctagtctaatctactcaaaacggttcagaattcaataaaaataacattcacggtgcgaaaaatggggtttgaaaagtttattttgaaaaaaagactttacaaaataatacccctgggagaagggagtgggagtagttagagactccattttcaccggattacggtagccccccataggtatg

SEQ ID NO: 101363 - DNA, 148 bp, Heterodera glycines
ttgtgccgtccccatttctgtgccgtcccccatttttccccccattttgtgccgttcccccatttcccccttcggtttaattacccaagtttgaggattccaataaagtgtattttgaatcgctttcaaaattcactacgaagcaatg

SEQ ID NO: 101364 - DNA, 73 bp, Heterodera glycines
ttggatatgctgcgcttcaacaaattaggcattggctctgattgggtgtcggagtacggcgacccggacaatg

SEQ ID NO: 101365 - DNA, 114 bp, Heterodera glycines
ttttgggggtgggggtttagtagaatggaggaagaaattttttatctacatatttatatatatatgtgtgtgtgcaaatacagagggacgcaaaaaaccgaagaagggaaaatg

SEQ ID NO: 101366 - DNA, 94 bp, Heterodera glycines
ttttctttcttcacaattcacattattcatattaagccccccaatattaaaggattaaaaaaaattatactgtatttattgataataagggatg

SEQ ID NO: 101367 - DNA, 147 bp, Heterodera glycines
ggttgacatttcttcggagtgcaaaatttggtttattaattgtgtttaattaagataaagcgggcggcgcttaacgagctgattgactacatcacggcaaccaaaggagctgtgtgtgagccgctttacccagaaataatcaaaatg

SEQ ID NO: 101368 - DNA, 1003 bp, Heterodera glycines
tcgagccccgcccccgcccccgtcccgtgacatcagaaaatttaatatattttaaaaatttttacaaaataccgaagaaaaacaaaaatttatcggaaaaatcttaatattttttttggtgaatatctgttaatagagcttagatttcaaaattcgcccgacggcgcctatcggcaaattagcccaaaacccctaaatttggtcatttttagacaaaatctgtgtttttggagctaattcaaatcaaacccccgctccctcgactctttgaccagttttgaccgggaaattcccgtcttttttcacggttttcccagccaaaaaagtcccggtttttcaaccaaaaaagtcccggtcccggtcttgctcaaatttcccggtcccgctgcactctcttttaaagtaaaatattaattgatttttaaaatttttcttgcctccaaagttactcaacagtttacaaagtccacttttaccagtgtatttttggacccggacctaccgggtcggataccgggttttggattttccaaaaacgggtccgggtattgaaaaaaccgggtatccgggtctgcgaccaggacacggcctgccttgattatagtgagaaatttctattcaccaactgttcattaaataatatttataagtgatgttttttctctgcactctctgtgcaggaaaactgaaggactgggaaaagatggaagattcaatctcaaatttcgtaccttaggatttgttcatttagatattatacttttaaattattaaaattatttattagatttccatataaaattaaatatttattcggaattttttaaattaaaataaatttggttgatgaaacgactaattttggcttggaggacgaaatgacagcgcgccgattcgatcggcgccacggcggtaaactttagaattaaggctaaaatcgaattgaaaaaacagaatgacaaaagaaaaaaatggcggcaaattctacatttaaatttatatg

SEQ ID NO: 101369 - DNA, 1003 bp, Heterodera glycines
ttatgtcaaagatattcattttttcatttggttaaggtttttagtctatataaatccatattttgggggtttccgggaataaatccatatttcgtcattgttagttaaaaaatgacaaaattttgcgcaaaacttatttttgttgaaaaatagtatttctgccataaaattttcaaaaccgcacatgcttagcctggggcgactatcatccacgtattttgtttggcatttttcaatttggaatggcaaggcttaggggatgcatttacccatccagaccttcaaatgggcaggggggggggggcttctgattccacatttggcatgatacccttgcccaatttggtatggcatccttaaagaagggaggcatttggcatgccacaggacgacttctaacaaaaaaggcgtaaatttaaaattttcaaagtttatttttgggtcaaaacttttttttaaataatgaattttgtggaggaataagcaaatggtaaatttcagtgcattcgtgatcaaaaaatcagatttttaacaatttttttttgcggcgcattcgtgacatttctgacaaatgataacagtggacatggattaattgagtttaatcctctagctgactcaatcaatgtttgacttttgggaatttaattcattggcttttcagatgaacccgccgaccacttttttgctgttcgcaatttgctttttggcttattattgccacggaatgaaaaagggaggaaacagtttgtcggacaagttgaaaaagtgattatcaaaaaaaggaaaaggcgagaaaaatgccgaaaattcaaattttattgaaaatactcaaaatgccgaaagttcgaatgccgtggaaaaggcaaaaaccaaagaagtgaaattgtatttcgaagaaggtgctccattcacacttaaagcattccatgatgataaacttttatattcgcgtaaaacagaggccgtacaaagtaaagggtggccaaggccaagaactatg

SEQ ID NO: 101370 - DNA, 376 bp, Heterodera glycines
  unsure (1)..(376): unsure at all n locations
aatatgtttgtctaattcaccgcaattatgtacataattaattaatttaaataaatttttaataaattataaatgattataaatagggatgatatttttaggcaaatgcctattttttcctgagctccccgtggcctgaaacgcacgaaaaaatatgtttttttgggctgttgttaagctacttttcgagttattaacgcctatttctagtcttttatcccctatactaatttggtgctgtatgtacgtaagtttttaaaattgttaacaccaaagttcaaaaaccaataatactaatggtatatgattaactttaaaagtgccggatcgatggcagttgtgccaactctcaanaaattagattggtttaaaaatg

SEQ ID NO: 101371 - DNA, 332 bp, Heterodera glycines
tgaacagaatgccacatttaacatgaacaaatccagcgccacaatcattcagcgggaaatgcaaaatggtaaagaattgaggcaaggggggggggggggggaattgagacgcagtaagcattcattaaatatgtgccatcgttttcatggcattttttaaacatatataaaaaaacaattaaaaatccaaaaatggcataataaaatccggcaaaattattcaattattttcaaagtcggcgtcgcggataaaaattgcttattaatagatcttcgtccaaaaatcaactgtctttttcttacatagattttttaatttagcgactgaaatg

SEQ ID NO: 101372 - DNA, 222 bp, Heterodera glycines
ataatttctccacattattaatccgttttttcgctgattcttaacagaatatttgtccaaataattagccaaattgccattagctggactgtagagttctaaaataggctttaaaaggggccttatttctgaataaagatttatttcctttttatttcggcatttaccgaacatttcattaaaatatctttttatgtggtactatttaaaatttgaaaaatg

SEQ ID NO: 101373 - DNA, 315 bp, Heterodera glycines
gaagcagtgcgcttacaccgccgacattttgtacccaccgtcggatggaattatccggttgtggtgcagctgctgaaggaacgatttggggacacgaacgacttgcaaagagcgatccgagctcagcttctacacttgcagccagcaaaggacaacgtgtcgagcttgacggcagtgatcgatgaattcgagagaggagtgtgccagctcgaacaactgggagcgaacgtggacgacgagtcgttcggcccgttgttggaggccaaactcccggtccacatcctcacagaattgaggatccgggagagtacgatg

SEQ ID NO: 101374 - DNA, 187 bp, Heterodera glycines
gctctctgcttatttgttagaatagaaatctaaataaatattaaatataaaataagaatctgatagctcatcaaaaagcaatgttaatcaggtgttttttctatttttaaactaaaatttaaattatttttttaatgaaaaatagtataatattttttacgacggggactccaaaattgataggatg

SEQ ID NO: 101375 - DNA, 144 bp, Heterodera glycines
aatcgttacaagcttttcaagactgagtgcctctcaattgatccgcaacagtgcttataataaaatattttattcgattttaatttgaatatttaaataatattaatctcataacttaagtaatgctttttaacttttagaatg

SEQ ID NO: 101376 - DNA, 343 bp, Heterodera glycines
  unsure (1)..(343): unsure at all n locations
cccccccccccccccccaggtggtcaaagtcgaatcgaacgtaagaccctttcacntgaccaccccctttngtacaggtatggttgggatttaaatttggtggaggttcgaatagcgaaatcgcattttttaaaaaatctaaaaattactaaagtaagacatttgaaacttaaaagggttttacaatgaaattctgagtttctcatttgctaataaaagcacataaacaaaaaagtaaaagcaaaatttccacctttggtttgttagtctctcatggcaattgtctattttccttagtcattgttcgaatggccccccccccttaggccgtttccttcaaatg

SEQ ID NO: 101377 - DNA, 662 bp, Heterodera glycines
aatgtccctatttttcagatttaccctaaaaaatttcataaaataccaattttacccgcaccgggcctgaataatagcatggaaattcataccaattgacgtcttgtcctaactttttttaaattttcaatagagaaattagcaaaattattttttagctttttctagaaaaaaaaaatcattctaattttgtggaaaaaaaattctgacttattaaaaaaacattttacgagctgccggtgattaatacggtatatttcccataaaaaattgtaataattcgatttcaggaatggactgaaaaattgcgttccataccgtgccggaggataccataatcagtagatggtaagggaaggagaggaagatgaaaccaacatgcagcggaaaagcacttcgctcgtcggaaccaatcgtttagaatcctggaggaggagtacctgaagatcgtcaccgatcgtggattgggaaaaagagccatccaggaggagcaactcgcagtacaattaactgcaggacaactcgccacaagccgatcaatcgcgcagcttttttccaaggaatgccgcagaagttccagaggaggaaatccgaccattcaggccagacgacttttacgacgcaaggatgttatggccaggtggctaaacgaagacacgatg

SEQ ID NO: 101378 - DNA, 63 bp, Heterodera glycines
  unsure (1)..(63): unsure at all n locations
aattcatttttatgttcatgtgcgtcaaatgcaaattgtgccattgnnaatggtgacgaaatg

SEQ ID NO: 101379 - DNA, 465 bp, Heterodera glycines
ttcacacggatgacatcattgagacattcaaatcgttgcaactgattaaatattggcgaggtgagaaatgccgacgaatgaatataaaaaacatgcgttttccttttccgttgtcaggtgaccacgtcgtgcgcataagtcaaaaggtcgtctcccagataaaacaattgcatcttttccatccgccaaaattaattctccgcaaatctgcggtccgttggcgtcgcgggtcgacagtctctaacgaagtcggaagaaattggagggaagagcggggccgttcaatctcagcacattgattcattttccaattatcaaataaatatttctgaagctatttcttcctgacaagttacaatatttgttttcgaacaataatttttctttgcaattttttaaatcaaagtttattgtctttcaattagctaacaagcgacagttatattgtgtgactcgcccaaaatg

SEQ ID NO: 101380 - DNA, 115 bp, Heterodera glycines
ggtattgacaaaaaattacattttttggaaaattgatgcatatttttttggacaggttgaacagcggttaaaacagtactttccgcctggtactcagttgctgccttatcgaatg

SEQ ID NO: 101381 - DNA, 130 bp, Heterodera glycines
acaagtaaaagttgcacacatcgaccgccgtccatagacaacaaagtgccaacagccatttgaaagtgatgtgcttgccccgggctttgtacctgcgaacgacacgaaatgccaaaagaaaattaaaatg

SEQ ID NO: 101382 - DNA, 1003 bp, Heterodera glycines
  unsure (1)..(1003): unsure at all n locations
atataaagagtcaatagtaaaaataattcaaaaatgcttaaaagacccagaataataggatgctgtttcagcaggcataaaacattaattcattcatttaatcgacaggattttattagagaatcacgcagaaaatatttaattatttttaaaactcaaaaaataaaatagtccaattgctcctcagatatatgatgttgtctaggatttccacatgagggggtacggcttaagagaaatagcaatcgttacaggacatttatataaagagtcaatagtaaaaataattcaaaaatgcttaaaagacccagaataataggatgctgtttcagctggcataaaacattaattgattcattttaatcgacaggattttattagagaatcatgcagaaaatatttaattatttttaaaactcaaaaaataaaatagtccaattgctcctcagatatatgatgttgtctaggatttccacatgagggggtacggcttaagagaaatagcaatcgttacaggacatttatataaagagtccatagtaaaaataattcaaaaatgcttaaaagacccagaataataggatgctgtttcagctggcataaaacattaattctgaaatgtgatcgatcaattatcgtcgggaaaggggcgacaataagcaaaagggaaattaaatgcgaaatgaaataaatgtagaatgtgaaattcatagggcttcggccggcaaacaagaaaacccggatctaccttacaattatttattttgtaatcagaacgcccaaactttgcaaaacttaaaattttttgggaattttcccctgtaaaaatagaagagccgatctagagttaaaaactagacagctaaaaaataaactatgattcgatagatngggtcaaactatgngcctatgncaaaattgaagaaaatctgacccgatgaaaaatttttttgaccctagtgaaaaatttcaataaatttcaatcatttttcagctaaaaatg

SEQ ID NO: 101383 - DNA, 1003 bp, Heterodera glycines
ccatttgttatcactagggtcgcaacttttagtgaaaaaactttttttttgctcaattgttttgagaaaaggagctcaaaaaacgtatttctgcgttgcgttaaaattttttcatttggacgtcacttttcgtcactagaaatcactattttggcgacttcgtcactaaaatagttaaaaatcactattttggcgacttcgtcactaaaatagttaaaaatcactattttggcgttttgtcactattttttcactatttcgacattttttggaaaattctttaacaaaaatgcaataaaaccaaaaaatacacccctaagaatcgacctaaaaattttttcaaaaagcactcctaagaaatgaaaaaaattttctaaaaaaggtattttcgtggcaagaattttaattttaaaaattatttttttatgtacctattttgtttttttgcccttaaaaatcccagccctactcatttgcaatgcaatcagtgaataaaaattatttttgcttaatttttggctgaaaattatggcactattcgtcactatttcggactttttgacactattttgtcactattttggcatttttactcactattttagttaactatttcgggatttttcgtcactaaaagttgcgaccctactaataattgaaaatgtgtccgatcaaccgataataaacattgaatattaagtattaacagcacaattatggtgaataaaatgtatattcacgatttttatccaaaaaaaaatttacaaaacaaaagggtcccccctatggtttttgataaaattcaaaatctatcactttataactagcgccaaatttgcttaataggcccaaataattgtcatattcgtgatcagcgacctttaaaacacccgggtacttggtttcaggactttttaaacaaaaaaaaaatttgaccaaaaaaaagttgaaaaaattttcaaaaggttactctttgcaactagcgccgaattttgtcaaaatg

SEQ ID NO: 101384 - DNA, 162 bp, Heterodera glycines
aaaatgcgggatttgtgcaaaatttacaaataataaatatacatatcctaaaaaccctcctctaccagtgtttagagtaaaagggaaaagtgcatttgaacatgttggaattgattattttgggcccctctcagtaaaaacattggatggcaataaaaaatg

SEQ ID NO: 101385 - DNA, 304 bp, Heterodera glycines
  unsure (1)..(304): unsure at all n locations
aaatttgaaaggtcgatccttaagggtcatttttttctctaacgtgggccccgctaagannnnaccgaaggnccggcctattccgaggagcaannnacnaacagannncncatcaaaaagggnaannnnggannnagggaannnnnngaatgagcncttaaattttgacccagcggttttatgaaacgacccaatagatacataacttgtttgtttaaccaaggtcattttttccattagtcctaattttgcatcataatatttaatgttaatttcagttttcttttattcaaatttgataatg

SEQ ID NO: 101386 - DNA, 737 bp, Heterodera glycines
agacacctgttggaccccacctttcggtttctgacttctaaaggcagggacgccttttctgattgttgagggatgttgtagaattttaattataatgactcattagtgttaattaaatttggcataatgtcttgtttcgcgttttttctcacttaaaattgtattctttgttttttctttccatctttcattccaattttttatttatctggtaatttttattgttttgcgccgtccaatttcttttgactttaaaattgatattcgtcaaattgtttctcatcgatatttgtcttttgggaattaaagtgtttggatttgacattggcctactctgtgtttggtataattgcgtccctgtcttaagtcagtagcaaaagtacaatttggcgctcccgaggaaacaggtacaaaagccccgatttttaaagagtttgagggtgagatcgggaataaaaaaatttttcggacgggttttaatttggagtgtattaagtatcagtccggaccggacgatatttaagttgtgaagtggaaattgactattccggatcggaaagttaaaaaaagcgacaaaaaactccagcgcaccgaaaaatttattgtttatcagaaaatttgagttcgggccgaacctttttttctgtctacatcgccgtataaactattgacaccgtgtcggtgcttagtttttctccgtcttctcgccgaatttttacatttgacttcgctggatg

SEQ ID NO: 101387 - DNA, 131 bp, Heterodera glycines
ttgaacaagttgtaatcattgccctttgtcagttccatcgaattttccaatatttcctaaatcaaatcatattgtcggacactttcaaatgtcgccgataatttgagagggcagtaaaaagccaaaaaatg

SEQ ID NO: 101388 - DNA, 83 bp, Heterodera glycines
ggttcgatggtcatacaaagaaccaaactgaagctaaacgaaaaatttaaacaaaattcgtatttcagtatgtaacagggatg

SEQ ID NO: 101389 - DNA, 417 bp, Heterodera glycines
ttttacaatagtgcctatttaaaaaaaatttgcgatacgctctctgttataataacataccctcaaaagtttttatttgcgtcgtttataatatttttcattttatcgtgctgaatgaatatttctgtaatcccaataataatattgacaaaaaatataaattaaataattcaaaaaaggacaattttttgtggcactaattcattcattctgttgctcaattgtccgtttgctttacgttttctgtagtgtgtaagcagatgaatttgcagattgcttgactctgcaaattgtttgccacaatgggaacacttaaaaaatgaaaattaaaatggaaattcatcgatttaaaaaaatggaaattcatctattttaaacaattttaacttttttgtatttccagatctacacaccatg

SEQ ID NO: 101390 - DNA, 128 bp, Heterodera glycines
ttaataaatccaagtcatttaatgtaaaccttaacaatcaatggttttttcccccttagaatatttaattttttttatgactattatcaacaatactgtgtccatttagggttacatcgctggcaatg

SEQ ID NO: 101391 - DNA, 363 bp, Heterodera glycines
  unsure (1)..(363): unsure at all n locations
ggggacctctagagtccagccaatagtcaaacaaggtgccagatttattgcagctcattcattgaacgnttgggctaanngnaaccaganaaaaaagttataataaccatgctaatttttttgataattgaaatgtttaatcgcgcgatcgaaactcatttaatcccccgcttcttttctttatttgatttttaaacattcataaatctgtcgcgttttgaataaatgattttgaataatttaaatttcaatgcatttttgcaagttttgttttgaagacaccctattccgtgattacataagcctgtctgaaatcttttgcttttttcagaaaatagaacatcattttataggactgaaatg

SEQ ID NO: 101392 - DNA, 243 bp, Heterodera glycines
ttttgacgggcagcgccgctcctcaacattaatatttttctttattttttatccaattaaaaaaagagctgtttttgaaaagtttttgccaatctacaatacctaatttggatgatcatggtgtcatttaaaaaaattcacttacttttgttaactgagtcatttttttaacattttcaaaaacatggaccggctcagtctattcactatcttcataaatacatatacaattcagcttagatg

SEQ ID NO: 101393 - DNA, 286 bp, Heterodera glycines
ttttgggcctacacctcaaaattttaaaaagtttcacattcaataatttaaacgcaaaaccgaaatggagaggccctttattgctactttaatttatgctatgtggtgaatggtacgcaattgtcacttaagcgctcccttttttgacatttttcaaaattttgaggtgtaagcccaaaacggaaaaatatcaacgaaactgctgattttcacataatttttcatctttgctaagccaattgaaatccgacgaaaactgcctaaatcattccctctcaataaaatg

SEQ ID NO: 101394 - DNA, 561 bp, Heterodera glycines
tcacgctattattgttgtgtaaaaaacgatccgtttttacctcttttcgggaaaaaaaactgcaaaaaattcacaaaaaaaaaaatctcacattgtgcacccttttctatcatttgtggagtaaagaattttcgggaaagacaacaatttgcatcaaatttttttgctgaatttatgcagaaaacagcagcagcagcagcaaatccccatcgatatctcagagcaatatcatttaggacaacagtcaaattcgtgatcagcgagctcaaaaagcttataaactcatttttcgactttttaaatctcaaaaaaaatttttggaaaaggggctacaccggtggtactcttacccagaaataatttttggaaaattttagaccaattaatgctttcataagatgattttattgaaattagccaattaaaaaaaacagtgacgaaatgattggtaaccattttttaaaattccatttaaaaggattattttaattactaaatctatacttgttaataaggggaattaacaaattggtgccacgaccaactaaaaaaaaaaaaatg

SEQ ID NO: 101395 - DNA, 216 bp, Heterodera glycines
acatttacctagctatttgaaaaaagctttaagattcaagactcttgcctcctccgacgaaaaacacgtttaatttatttgttttggcataatgttgttgttttttaactaagtaaaaaaaaatttcgcttttttgttttttggcttattttttttaactaaatttaaatagttaattagatatatgagcttatagcttatatcattcagagaatg

SEQ ID NO: 101396 - DNA, 1003 bp, Heterodera glycines
gagggggaaaattgagaattattgcccgatttaaataaattttgttcaataaaagccaattaattgtttagattttagaaataaatgcttatcataaaaaaaatgtgaaaccacttctattttttaaatttttatgaattgaggataaaaaataattatctatgaaaataatttatttcaattattttttattggtaattttttgcatatttttccattttttgtacatattttcaaattttttgcattatttttccattttttgtacatattttcaaattttttgcattattttgccattttttggacatattttcatatttttttgtatattttgctatttttcgtcaaatatttccgatttgaaatctcttaggaaaaattttgatttgcaattgcaaaaacaaccgataaaatttatgaggaataaaatttttaattaatttgcaccgctaattttcaagtttttttgtgcatatttcacgactttatttgcttatttatgcgcatatttggcaccatttttcgtgcatatttttgacagccctggtgatcgctacttgaattgattttgtgtgtttttaagttttctccaacaaaaacaaatgttatttactcaatttttatttttatgtaatttttttttattttaaatttattataataatatttatgttaatattttatatgtcaatcttcttacgcaaaattccaattcatacataatgaacaaaaaattaataatatcaataatattcatttatgaatgaatatatttgtcaataatattgatatttatgtaatttcattaaatttagtcaaaattataatttttttaaatggcacaatttcttcttaacattgaaaatattattacttttttttctccttttaatctttatatatatatatatttatttaaatattaaattatatcccacaaagaaatcaaatataattatatattttttaaattaagttgtacaactttatttcaaaaatg

SEQ ID NO: 101397 - DNA, 805 bp, Heterodera glycines
atttaatttgagaaatgatcaatctcaatttgatgctctctttttctctccgaaatgcttttgttgattctttcgttcgaataaaacatatgtacacttaatatcttattgaaaaccttactaattaaattaaattaaaaattaagtttccgaacctcggaatttaacaaaaaattcaaaattttcaaaactcacttttatatcgtacgcccaaagagcaaaaaacaaagtatcatcaaatcaatccaattcgtcgtaactcaaaaatgatcggtccttttttttaggaaaacagcgccacaaaaacaacgattaaaagcaaaaaatttaagaaattttaatttattaaaaaatccagaattttgggacccagaaaattccaagattccagatcccccccccccccgaaattggcattgcttttcaatggcaactcgtacaaacaattaccaaaaaagttatacatgaaaaacatgaaaattgcgaaaaggtcgaaattatgaagttttttcttaataaaattttttccaggctagaaaatcatttcattttttgtaaggctaatagagcatatgaagagctttcgaatgataccaacaatcttggatttggatgccaaagaaaaaagttatagcgaaaaacataaaaatttttaaaatctgcccacagataacacacaagtacctttttttgtacgagttgccatgaaaccttttgttttaccaatttttgtgtttagacatttcgccgtgccaccacttctgtctgttacaatattcaactttatttttgggtggacacaatg

SEQ ID NO: 101398 - DNA, 548 bp, Heterodera glycines
ggggaactgacaccaaaaatgtcccttaaaaattctaaaattcttcaaaaaaaacataaaattgactagtattagtaccctgacttccgaattccaatgctcatccagcaaatcccggtttttgttcaaaattccccattccgtgcaactctaatagaatatcttcatcactttttaggcattctcaacaaatgactgctcactcatcattctttgtcttttttattgtcattctttggctttgcttcgattgtttgaatggaaatgagccaaaaaacaatggcaagtcttctcaaaatttacgtaaaataatattttcttataaatttttggtatttctccagcagagagagagtttcacaaacaaattttaacaaattttcaaattcattaaaattttgtggagcgaaacacacacatacttaagtagcaaaatatgaagtagacaaatatattaaatgttttcccatttttaattaaaatttctttgtgcttaagctaatgttggacatctctcaaagtcacaaaatgatcagaaggaaattatg

SEQ ID NO: 101399 - DNA, 102 bp, Heterodera glycines
ttgttggaggcgcgagatgtgactgtctctgaatatgtgccggacaaacgttctctgatcgcttacgtctctcaattcgtttgccttcgcccccaccaaatg

SEQ ID NO: 101400 - DNA, 527 bp, Heterodera glycines
tcacgcctgaggaagtccgacggcgacttatggtggtcagttgtgggatgccaaatggaacaaacaatcaaatcattgcaacttaattgatttgtaggaaaaaaggaacgttcggagggaaaaactgcgggtcaaagggcaacagaacgcggtgcgcagggggcgccaacagaaccaggaactgatcagagagtacgcgggatgggaccaatattgacgacggactcactcatttccatttgttgattattttgtttttttcttaattgctgaatgtcttggaattttatctttttgtcgtggacaaaagtaaacagtgaaatgatggctaatttttgaacgaccattcaaagggaatggaagagaattgtctgctgctaattttatcggaagcattccaaaatttttgcaaatattttgcttcacttttttgccgtaaaaaatgaaatttcgaatgcaaaatattttagattttatttgttctaattaactatattaattgttgctattaaccgtttattctaatg

SEQ ID NO: 101401 - DNA, 84 bp, Heterodera glycines
cttgccttccgacgatagcaacgaatcctcaaagagatctctaagacgagatcacttgaaagttgggtcaccgaatcgctaatg

SEQ ID NO: 101402 - DNA, 229 bp, Heterodera glycines
tctaaatgactgacagggaagtgaatgataaggggcgtggcataggagggcatactgtggatggatttcgaaatcctcccgtctggaggtccctgcgtgctctcagttgagtgggagtggcctattcccacgtgacaccccccgccctctccgtcacgttacatacagtacccccacacttttcccttctcattttcatcttaacacacaaaaatattcctcgaaaatg

SEQ ID NO: 101403 - DNA, 635 bp, Heterodera glycines
taacttttttatttttgaatcattcatttctatttttacatgtaaatatagagcacacatagagctttcaaatgatgctagattggctaaagctaactgacaaataaaaaagttatagcatttcaaaatttgcggcgccgaaatggtccgcgccgaagtgaccccgacccgttttataatgatgccaatattctaggattttgtcgacaatgaaaaaatgtctcattccaaaaaactcgagctggcgcttaactccgatactgaaaagacccattccctgtatacataacccaatataaattgtaaaggaaatgaaatgaaataaatcggatttatataggcaaaaagtggatggttgtaaaccgcgagacgaaaaaaggtttaattgaacaccacacgatggctaaagagagttttttagagaattacaaaaattttggtttttttgtgaagcgcttttcttgtaaaaattacaaaaaatgcccgaaatacatatctctaaaaaagcaaaaatggtaaatatgcatttattctcgaaaatcactacaatatgcgtttataagcataaaaaacctccaccaaatcaaaaaaatttaacgtagaaattcccttttttattgcataaatagtaaatg

SEQ ID NO: 101404 - DNA, 137 bp, Heterodera glycines
ttttatctaggcatccttaaaagaaaatttttctaattacttttggtaaaattacgattttttggtttgaattttgaaatttaaattattcaaacaaactgatcactcgttgaccatttacataaagccagggaatg

SEQ ID NO: 101405 - DNA, 83 bp, Heterodera glycines
atgtccaaaatttgcgcgcgaaatttaattttcatcacattccgacataaaacctcttaaattttaagttgttggacaaaatg

SEQ ID NO: 101406 - DNA, 315 bp, Heterodera glycines
tttaataaaacggttagttttatttcaaattcgaattctttttgaataaaaaaattgacgccaaataaaagtttatttaataataaatacaatattatcattttacttagtgttaataaaaacaaatggtgaacttttgattgtcttgataatttgtgcaaaaaaaaaatcaaacgaattaataatgatatcattaattgataatttaattgatttttttatgggtttttggtctttaaactagtagccaggcgctatttatcatttttatatgaccatttaaatttgttatgcatttagctttatacaaaaatg

SEQ ID NO: 101407 - DNA, 1003 bp, Heterodera glycines
attcacattttattttgtggcctttggccggattttcctcccccatttgtccgcccattgtccactttttcggtttaattacccaagtttgagataaaatttggtgtgaattttcctctgcacttgcccccgtttgacccccggcacatttcccgtcccactttctgcttcctctcctggcaatttcaacgcccgaactcctcgggccttgtcgacaccaccgcggcgacctgcaccgcactcaacgtcaagcgcacacggccaactccaagcagctcaacggagctcaactcaatcaatcaatcaatcaacgggtggtgatcggacaagtggcgaccctggcaggacaaaccctcgacagcaccagcacaactgagcgacttcaagcagtattggaactgcaactggtgggaattttttgaggaaaattccaaaaaaagtatcaagtttgcgctctccgtagccaaacttgaatacatcaaaaaggggggatcaaaagtgggaaattgtggaatactgcttggtctccgtgccagcagtagtttcacaggggaaacagtgacttactattttggtcttcgtgccattagtatttcactttcaaattacttattggtctttgtgccataagtaatcggtaaaattactgatcggtctctgtgccgtcagtaattcaagtactgctcgctcttcgtggtagcagtacccaatccaagccaacaaaagggggatcggtgtgaactgtttgctctccgtggcaacagttgcacattcaacacaaacaaacaagtcaaacggcgggaaccccaaggtgtactgcttgacctctgtgtcagcagtacaaccacgcaagtgcagcaagttcagcaagccaacgaaaagcaaagcggcaaacgaaaagtacatcaagcgacacaacaaaagcagcaaagcaacgacaaacaagcagcagccgcacacgagctgatcaagcagtacagcaacagcaaaccaacaatcaatg

SEQ ID NO: 101408 - DNA, 160 bp, Heterodera glycines
attggcattttgggagagagggagggagagggggaagtggaaggaagccaaatttacgaattggccaaggatttgaaacggagggaggacgacaattcagttatattacttaggttatcagatcaactgtgctgcgcaaagacatttatgtaaaaatatg

SEQ ID NO: 101409 - DNA, 308 bp, Heterodera glycines
tgccctgaagaaaattatattaaaccagataaaattttgagattaattccttaaagcttttctatttttttacttttaaaaatcactccaattgccttgagtattcccgatggataaatgtgattaattttgagactaaatcccagattatttttgaacaaacatttctcaacaattatctgaaattgttaagaaaatcgtttaatttatttggaaagcgttttgaaattcgtcttgttttttattcagctatcccgatatattcattttaagaaataaaataaggcctaataaacggcctaacaatg

SEQ ID NO: 101410 - DNA, 183 bp, Heterodera glycines
caaaataattattactatttttaaatattagttaactttttttttaataatttttccatttttttccaaatggcaggcgtatttgtccccattcaaaatattttttccccaaaattaaatttttaaaaaaacattttttttttgcattttaattcccttctcctcccaaaattgcagctgatg

SEQ ID NO: 101411 - DNA, 1003 bp, Heterodera glycines
caaggtgtcactcaacaattgccctgacagtctacaaaaatattatcatcattaagggtgttttttaaaaaccaaaaaatcaaaagcagtaaaactggtacccccggctttcgggttccggttattggtttaagttcggccgcgaacaaccttacttaaagtctgtgccattctttaaggcgggttaccgactgcacaaccgcatcatcgaccttggcgtcttaattgaagcgcctgccgcgtaataaactttgatgaatgattgcttagcggtgaacttagttaagccatataatcagccgtacccattaattacaggaaggacatttctgaaaacatttgtagcatcgttagaaaaaaggatagaaaccttaatatggatgccgaaaaacaaaacggtgccatgggtgaatcaggcagaaattttccgcaattgttaaaaagacccaacaatccctttcgatattcaaagtatgaatctttcacattatttttttatgtttttaaaataagcgaatttttaaagtttttttttatcatttttgaggttttaaagctatttttttattgagttttggttttttatttggccattattcgtatttttatctatatttcaggggttttaaccttcgtttgaagcatgcattttcatatctttaaaatgagcttaaccctgaaacagatttattttaaaaaatcttaaaaaggacttatcagaagaaaaataattccgcaaatattggaattaagcttttattaataagttaaaaaaatgaaaaactaggaaaatcaaatatttgggagaaatcaatcactgactgattctttggcttaatcaaatgttttggcagaattaggtggaaatcatgagttaaaatcggaagccaatttaatttgccagtaaaacaagtatgggagcgcaactgtataaatactgagacataatttgtaaaaaacaccattcaaatcgatcatttaaaaacccaatttaataaatatg

SEQ ID NO: 101412 - DNA, 96 bp, Heterodera glycines
ataaatgcatttaaaattaaattttcacttttttcgatttttaaaaaatttcatccctaacatttaaaaatttttcagcatcttagataaaatatg

SEQ ID NO: 101413 - DNA, 1003 bp, Heterodera glycines
aacttttttctttgttggccaaacttcacaatcatggtatcattcgaaagccctagatgtttagaagatatttataagctatttctcagtgattaatcagctctcaaaaaagttgtcagtttaaaaccgcaaaaaaaggcagaattttcaaagttttttatttctatctttttttatagttcgaaattttctctaatttttagtaggctaatagagcctgtgaagagctttcgaatgatatcaagattgtttgattcggtcaataatttcaagagttatattgactaatttaattttttttttctccaaaaaattctccttcttcaccattccctactcttttctcacccagacccccattcttaccagtgcaaatttttaccggcggtaccggtactagacaaaccggtaccgatactttgatttttgaaaaaaccggtaccggtaccaaaaaaaccggtaattaccggtcggtaccggtaccgctcaaccctaattattaggctcaatttgtacggattttcatttaaaaaataataaaatatatatatcaattaaaatatttaaagaatatattaatatattttttaaatttttccctttaactctaattttcattctctaatttttcactcagacccctattcttaccagtgcttgtttttcccggttgccctaccgggaccgggacctgagcttttcaaaatccgggaccgggacctcggataaccgggaattcccggcccggtcccgttcaatgcacccggacagaaaaattaacaaagcccatcagaattttcgagtgaagccaaatttacccgaattcgactattttaaaatatatgaggaatacgcctaatcgatccaacgcttgacctttcattaaagttcatatttctcttttttgtcctcttttcaagactgatgctaaccaaaggcattattaactgtcctttgtctattctcaattttgtttttaaccaatctctgaatttaagacatg

SEQ ID NO: 101414 - DNA, 802 bp, Heterodera glycines
atcagagtgctaacattaagttgctaataaaatttggtgcgctatagagctctatctgaacagaatatttatgagacaaaaaaatcgattttttcaagtgtccgtatagggtactcaaacaattatggcgagcaaaaatccaacgcagaattaaagtacaggctatagggaagctattcccgaaggattcggtctctccataaatatgggcgcatcggttcagggggactaccccgaaaacaaaaaaatcgattttttcaagtgtccgtttggggtactcaaacaattatcaggagcataaatccaacgcagaattaaagtacaggctatagggaagctattcccgaaggattcggtctccccataaatctgggcgcatcggttcagggggactgccccgaaaacccaaaaaaaaattttttggataaaaattatttaaatgaactgactagataatatttaaaataggttatttctcttcctttcagtatccctgcaaagtttggtgcgcttctgatttctagtttctgaaaaaaaagttaagcctaaactttttggcctgtttaaaaaggaattaaaaatttttaaaatttttattcatctcccttttgatagaaaaagcatcagagagccttatttaacttgtaaataacattttgtgtgtttcagagcactttctgaaaaaatacttatgaattaattttgcaaaaaataaataagtaatgaaaaagtcagaattttgaaaaattttaaaaacaacaagcgttggcattttttcaggttaagttagtcctttacaatg

SEQ ID NO: 101415 - DNA, 429 bp, Heterodera glycines
attttccatttttgacttatttctgcataaatttccatttttataaaattattttcctattatatttttcgagaaaaaacacctaaaaaatatgatgtaacgacaatgacttggattttgtttttaagactttgattgagtcttaaaattatttacaatattaaaatttttaatactttattattgcgtcatttgaataaaaaaaataccaaataacaaaatacaattttctgtttaaaattaatttttttccggagagatcagatgaatattttttaatattttgtagtttattttatttgaaaaattgtttttatggtaattttacttcatttatgaataaataaatgtataaataaatggccatcaataatcaaaagaaagaattttgtatttttttaaaataattttgagaatttttgataaatg

SEQ ID NO: 101416 - DNA, 276 bp, Heterodera glycines
agtctgttccacaactaactgactaactgatcactggggaaggagaaatgtgaagagaatgggcggagaaacattacaatgagaaaaggaaaaacgtgtgaaaaggataaatgtgattgaattgataatggccaatgggaaataattaaatgaggaaatgcgtcgaataatccttacaatactttaaataatttccataccaagtttttacattaaattaataattttgtttaaattaaacttttcggactttatctttaggctttgaatcaaatg

SEQ ID NO: 101417 - DNA, 417 bp, Heterodera glycines
ttctctgaatgatataagctataagctcatatatctaattaactatttaaatttagttaaaaaaaataagccaaaaaacaaaaaagcgaaatttttttttacttagttaaaaaacaacaacattatgccaaaacaaataaattaaacgtgtttttcgtcggaggaggcaagagtcttgaatcttaaagcttttttcaaatagctaggtaaatgtattcgaccactaaatatttgagaattggcaaccggtctctgttaaaatttgctgtgtgtggcggctgttctccgtctccttcgctcgccgatgttcgatgtctgtcaactcgagacattttcttgcgcgatttgcccgcccgattagccgaattggtgccagaagttccggttcctatctataagccgtcgcttgaagaaatg

SEQ ID NO: 101418 - DNA, 1003 bp, Heterodera glycines
aaaattttagacagttgtgcgtcatatttttatcagtagcagctcttcgatgaagctttttatagtcaaattcagactcgtctttttatacgtcaaaaatcaatttcgatatatccacctctgagtcttgtaaaatttctcataaatgttccttaatattttgtatctttttttgatatatatttttggtctaccaattctataccagggttcggatcgaaaaattttcaaaatcagaacatcgggtccaaaaaatcagattttggggtcgaaaatcagaacattttgcaaaattgcttcaaatcttttatttttacaatttattcgatcaaaaatgtattaaatattatatttttcacctcccatgatcatctttaaaaattttggtgaggaaattaacaaatcgtaaatttcagtgcactcgggatcaaaaaatcagatttttaagaattttttgcggcgcatttttccaaaaaacttttgggaaatgggcgaggggggagggtccggcggtgccgataggcgccgccggtaaattttatgtaatttcgttctgatttgttaacagattttcatcaaaaaaggccaaattgcaattaaaagccaagcaacgacttttccttgcgtttaacaacgcttttttttgccgcacattttttcaaaaaattttgggggatggacgggggggggggggggtccggcggtgccgataggcgccgccgggaaaatttttgcgctttttaaagcgatttgtaatagatttttgtcaaaaaatgaccaaattttgccgcaaatcttatattttcttgataaaatagtgacattatgccacaaaatttcaaaaatatgagtttatttaagaaatcagaacaaatttgggtcactccctccaaatcagaacatttcttataaataagaacagatcgcacccctgtataaaaacgacataccaagataatatttcggaatttatttattttccttttcattaagctgggcaatg

SEQ ID NO: 101419 - DNA, 193 bp, Heterodera glycines
agcaattattgttaattggcatcattagcgtttattactttcaaggaattggcctttgcccgtccaattagccgagataaattatgaaagggacggcggatttttgagttggtcgccctttcgggaatggttcataaaacggcagacgacgcacgcacatttgcgcacgacaatttgccaacaactcacaatg

SEQ ID NO: 101420 - DNA, 299 bp, Heterodera glycines
aattatgaatccaatcaactgaccactctcggtttcttaggccataaattcgatcgaagaatctcttgtaaagcattaaggcaacacaaaaaagaattgtactttttccagacctaagcatctaaattctctagacatttacgcgctcgagtgatatcaagaaagtagactttatacagcaagaataagtcattgccttttttcattcatgatttttagtgcatttccgttaatttatttgctttctgaacaattgaaattgcgaccatatttaagcagtttgatgtagttgaagcatg

SEQ ID NO: 101421 - DNA, 1003 bp, Heterodera glycines
atatatcggacgacgacctaaattttaatttatttaagcataattgcggtttataagccgctttataatttaaattcagtgtgaaaattttgtaaaaatagatattaaaaaaatattgttaatattatcatttaaatgtttgcaataaattgaaagaaaatttaaaaagaattatgcattaactttataccattttgtgtaagttaaaaatattttctgaatttttttttcttcttaaaagtgtggttatttgaaaaggactgtttggccgagttgttagttaattaactaaatatgtaatcatcaaactcctaacatctaattaattgaaataatgaatacttgtcatcaatgacgcattttcataattataatttgatagataaattttttcttcaatttaataaagcataaaaaaaaaaataataaatgagagaaaattttcaaaaatatttcttttatgagttaaaaatggttgatatacttattagagctctgtgtggctttttgccagaatttaaaaaatcactttttttctcaattatatcaaattacggcttaaataaaaaaattaacaactaagtgttagctctgtatgtttcgggtcaattaatttatgacagattgttttttctcttattacgaaaagatcatttaatattaactttttcattagttctttgtatgatgtcaactcattcacctgctatatgactttcctcacaatgtacctatgtacaataataataaagaaaaaaatttttgtttgtcattaatgcacgcgttttccgcttggtttgaggtgtatacgatgacttttataatgcctatttttgcatacacgtttttatcattaaatcaaaactttttatgtgggtcaaactgtataagtaccgaccgatatttgtatgcgtttttttgttgcatcaaaaacatcccccctttccgctcggctttagccattctttttattttacaaaaaaattgtatccgacttaaaatg

SEQ ID NO: 101422 - DNA, 188 bp, Heterodera glycines
tttttgcccaaactagggtggagctgatcagaagataaaagaaaaatgcatatgaaatgaaaagatatattcagacaaatgcttattgttacttatattaaaatatgccacaaatttccattagactaaaaataaaaataaaaattgaattttacttattaagctaaaaaaaccaaagttttcacatg

SEQ ID NO: 101423 - DNA, 1003 bp, Heterodera glycines
tagataatgttgtttctttgttagatcaattataaagaaacattgatgggcttggccagcattttttaaaagattcaaaactaaatccgtacaaaatacagcataactgatcagcgatagtctacaaaacaagagtttatttaaaaatatttttttcagtaaaaaatgacatcaaaagaaagaaaaaaaattaattaataaaataaactaatacattaaataactatatttaaaaaataaataaaattgctaaaaaactattaattaattaattctttttcataattaacttaatttaatttgaatttaagttttttaatttttaaaaattcattagatgtattaacacacagtttttcccatcaaatttatttcgttttattttgcaaaaaaaagtaaaaaatttaattttaaaacttaatgttttatgtccataaactatttattttaaaaaatatattttttaaaactcttctcgtgggttatatctatctgtactttacttcctttcaaaaagttaacatcggcttgtaatttaatttctgcctttcaataaagatgaattaagatgcatatttttattttttcaatgtggctttatttaaaaaagtaacatatttatcatttgtacgaggaagagaagatcatttaatttgttttggcgattttgacattctgtttaaatattttttttaaatcgtttcattttttttgtaccattatttttcttcgatttttgttttttgtgcacacaatttccatctttaaaaatataatttatcgcccttaaaaaataaagttatacaccaaaattgactttgtgttgctatttaaaaaattgtgaccaattatccaaattaatttcctctccatcgccggattccgacccaaatacccgaaaaatcgtacttggcgctcctggccgaaacccggactgcatcaacctttcggttaacagcgattgcaggtcgaactcaacagaaagccacaattagcaacgatg

SEQ ID NO: 101424 - DNA, 1003 bp, Heterodera glycines
  unsure (1)..(1003): unsure at all n locations
aatgttgcgaattcctggacatttctttccgaaatgtgctcggtccatttatcagcagtagaaacacaattgaatataaaggcaaaaaataaaaacagttgcaaagtgtttacagctttacaagccatcatttcttttaaaaatcaataaaattagtgaagccatggagagcaacggaaattcccatttcctaattgttgacttataatntaagcttccgaatttttttattggtatcagattagaccgacttctgacacttttaggtttggaaccacaacctctgaaatttttccacactttttggaccggaatttcagttttctcaattttttggatccagcaattccgagtttcggtccgaaattggttcgggtgtgtcacgatgagaattaaattgctatgaaacgaaaacttaaattttttgagtgttcgcccctaaaataagtttttatccctattttggcgtttcgcccttattttcgcccctatttcgcgatttttgggaaatctattaacaaaaatgcaataaaaacggaaaatgcacccctaagaatcaacccaaaaaatttcggaaaaatacagccctcagaatcgacccttaaatcctaaaaatttctaaatgtacttcatttctaactgtaatcagtaacaaaattgtttgacttaattttaactaatttacatagagaaaacagtaattttaataaattcaccctctacatttgaaattttttcgcccctattttcgtccctatttcgcaaattttttgcccctatttatgcccctattttggactttttcgtacctaaaaatcccatccctagttatggccaagaatgactgaaaacctggtttctgatgtacttttggacataagtttgttcaaaatttacgaaattttttgcaattttgtaggctgatagagcacatttagggctatcgaatgaaatcaacaatgtttgattttgtttataaagaaaaaaatagatcaaaaacatg

SEQ ID NO: 101425 - DNA, 86 bp, Heterodera glycines
aaaacttaggaagtgctaatgatattattaattgtctatccccgcttattaaaaaggtggagagagagagaagcaaaaaagcgatg

SEQ ID NO: 101426 - DNA, 117 bp, Heterodera glycines
tttgtttaatttcataaattgtttcaaaatacctacattttctattttatatatacatataataaaaataagtgtgtgtgtgtttagatcattcttaaattgttcaaacaccaaatg

SEQ ID NO: 101427 - DNA, 128 bp, Heterodera glycines
cgtaaatcgtaaaaactttaaataaataataaatttaatgttatgaattcttcatttgattttcatttcaatacctacaactttttgttttattttaaataattaattttcagttatttattattatg

SEQ ID NO: 101428 - DNA, 792 bp, Heterodera glycines
  unsure (1)..(792): unsure at all n locations
ctttttaggcgctaaaaataaaagcctagaaaataggcactaataactcgaaaagtagcttaacaacaacccaaaaaaacacgtttttcgtgcgtttcagaccacggggagctcagaaaaaaaggttttttgtctaaaaatcncatccctagttatgaatttatgtgttatacattttttgtttttctaccccttggcggttttgagaaaacgcccatttggcggtttttaggaaacgacctagcacccttacaattagcaatgctattgaattttctggactagaatcaccgtgctcagatttacattcaaacccaaaaattccgatttccagttgaatatatttttttgatagagtagaacgagaccgggatctggtactaaaaaacgtacaaatgagtacctaagtcccggttttgaccgtgaccgggaaaagtcctgggtttccttgccaaaaagtcccggccccggctttgctcaaaattcccagtcccgctatactctatttttggataagaaaattttatgggaaacttcggggtttttgtgcttcgaacttcaaacttcgccttcgaataaaaattgggcttcgccttcggctcgtttcaaattgtcattcgtttcaaattgtcattcgtttcaaattgtcattcgtttcaaattgtcattcgtttcaaattgtcattcgtttcaaattgtcattcgtttcaaattgtcattcgtttcaaattgtcatctcccaaaaatcaatcgatggcaaagagaacggcggcgaatttttcccctcccatg

SEQ ID NO: 101429 - DNA, 464 bp, Heterodera glycines
tattaataaagcaaaataataattttgtaatgagaatttaagtgaattgctagctttataaacttttctataatctcttttcttaattttctctcaaatttgtagatcaaaaaccatacattggctatccttaaatctgtgactgaagcatagctgatcagagaccaaaaattaatttttaagtgatttttaattttggtgacgttttgggtcggtgacctttttgagtggtgacgtttttaagtggtgccgtttttgagtggtgccgttttgggttggtgacgttttgggtggtgacgttttgggtggtgacgttctgtccggtgacgttctgggttgtcaccttccgaaggagaagctgaatttattatatctttctataataatttaaaccaatttaaaacaaactaaagcaaaattgctgaacattccgacctagctcttttgaaattttttcaaaaatg

SEQ ID NO: 101430 - DNA, 97 bp, Heterodera glycines
tttgattaggaaaaagcaaacaggcaaacaaaacgcataacgattaagtattgaatgggaattaagatgatcaaaagcattaatcagaaaggttatg

SEQ ID NO: 101431 - DNA, 697 bp, Heterodera glycines
tttttttacaaatttgtttcttaagaggtgggcaaaccatcgttctgaactcgttcaatggcgcaaatgggggcaatgggatgaggagaagcggaaacggagcgaacggaggggcggaaaggggggcgcaacggcaaacgattgcctcgagaagcattcccgtttagagacagcgcaacggcacaagccaattaaggaattaattaacgaattaattaattaattaatgaacaaattagctaattaacgaattaattacgaatatttgttgatcagctcgttttgtttacttattaaatataattttgctcattggcaaatgtccactttatgctttccatctccttttaatttaaacgtaatttaagcggtttcgattcaaagccaaactcataaaatctgaattaaatatttttgaattttcggcacttttttcctaagaccaaataaaagctgcacaaaaaattgatttattttacatatttttgtgataattcctccatttttcgtgcaattcccaccgaaataaacaaaagtgtgaagggaatgaccaaatggacgcaaaaaagaagcggagattcagttattaattaaatatgacaatttattaattgtataatttaaatgaaaattattttacgcctttttccaattatttttgattttacgcattttcttcgattgttcacccaaaatg

SEQ ID NO: 101432 - DNA, 205 bp, Heterodera glycines
actattggctggagaccagccgtgagcgaaagcccgggctcggctaccttcaagaatcccgctggaaggtctgtacagcaaatgacctttaaacacacttcaattctttgcttgttatcaggtaaaggtcagagtgccgaagggtccgcttgccgacctcctcctggagcaactcagcacgccagaacaagtgcaaagaataatg

SEQ ID NO: 101433 - DNA, 591 bp, Heterodera glycines
aaaatattagctgactacagaaagagatttttacaaaaatttggagatgtatttgatttgcaattgtgaaactagaatttaataaaaattggcattttttaaggttaaatcattttttggcagcttttagcgtatttttaagtctgttttagcaaatatgaatataaatacatttttctgaattttttagggtttaaaagtctagcaaaaaacctgaattttggatcatatcttctgaatttcaaggacgtttgtactaacattaataactgattctccgattttccctcttttaatggtcactttttgcactatcgttcattaaaaaagagaaaattggtgaaccaattcaaattctcatgtcatttactttgcccatattctgctgttctcctctctcccactttttgggtcatcattttgccgtacatttatttatttgtgtcgaccctataaatattggcaatcaatcagcagtaagccattcaaaatgcacacccatcatattaatacgcttacataaaaataaaaaaattattacaaataaaatttttataagtttcagcaatttttgaaaaaaataaataaatg

SEQ ID NO: 101434 - DNA, 84 bp, Heterodera glycines
attttttttatttcataaaaattatttgtctctggaaaatttttttgtcgaatttgactacctttataaaaagtgaataccatg

SEQ ID NO: 101435 - DNA, 112 bp, Heterodera glycines
ggtacaaatttagtccattttgcaaaaccatgccattgccccccccccttcgtccattagttcccaagtgatcactttgatttccgccggcactttaattttcgtcgcgatg

SEQ ID NO: 101436 - DNA, 443 bp, Heterodera glycines
attaggtgctgggacaaatgctgcttcttggggacccgcaagtggaagcaatatgatgatgtggactttacaaaattcattcaaaatgaggtaggatggtaatattatgatccatccctagatgggataactaaaaataaatatctggctgacacggcagcaaaaccagatcttgaactaatgagcagatgatgaaaaataattatgaaattcggacagcagtaaaaatggaaacctaaattaaactcttataaaattagaatgagcaatttgtaattaaagcaaaaaatataattgaatgctctaattcttcaaaatcttttttggtccaattttattagccgccccaaaaacgtttcgattggtgggctctgccgaagggaactgctccgttggatagtgctcgtctgtttgccaaagataaaaaatgcattggcaaaatg

SEQ ID NO: 101437 - DNA, 767 bp, Heterodera glycines
attgagggacgaggggcgcggactgtcagcgggcaaacattgtttttacaacacctttttttagtctaccaaatccatcaaaactgagctacagtagactactagatcttacgttatccatattataagggaaaatgaacaagggctggaacagtgtggatcaagtttttaataaaaatcaaatttgggcgaaagtaaaaatgcaacaattttagtatgaaagtcccaaatagtgataaaatgttttgaatttcttacaattttttttaattaaataatttgtttatgcaaatcttttatcattgtaaatttattgacggattgtctattgctgacggattgtccactgacggtttgtcattgtttttggcgatccgcagatcagggtccatatctcgctcaaattgcaggcgagaaggaatatttgtatttgttgagctattttttctttttttaaattgaataatacgattttccatactgacggattgtccactgacggtttgtcttggcatagtagggaaaggaaaataccgtatttcctcgattagaatccccgggacttctattattcaaccccctccaaatgtggcttatatttgaggggcgggcttctaatcgaagtgtggcttagaatcctggaaatatggtattacaagaagtacggtatgtttatccggacacccttagaaggggagaagggaatattcacaaataagtacggtatgttttaattgccagcgcttcttgctgcatatcgcgcgatg

SEQ ID NO: 101438 - DNA, 590 bp, Heterodera glycines
tcactaattggggggtactaattggtcagcggtcaagagggcactaattggtcagccgtagggtgtggggtagcaattaattaattaattggggaaacctaaacctattgaacggtttcaaattgtcttgtactttttttgacagaaaatttgattgatttaaaaagtgacagccgaggggggagggggaatttgattgatttcaaaagtgacagatgagggcgggaaattttttgattaattgtaaaaatgacagatgaggggaaattcaaatttctgatgggggggggggatcggaattttgattgatcaacatatgacagtttttgatattattaaattattcaaatgaagtgaaataatttgttttgcactcggtctttatcaaacttgttatgaatgtgcaaatttgcaatttgttgacgatttcgcgcaatgtttcgaccgaaattaaattgtttgtcacttataaaataggtcaatttgtgaatatttaaggtttccaaaatggaattcattgtaattgctacatttgttccatacttttcttccaaaaattttccaacccattctattgtttacccaaaatg

SEQ ID NO: 101439 - DNA, 128 bp, Heterodera glycines
ttcattaatacataaaatatttattattattatttctgttttcttaaatatttcactaatgtctcaacaatgtaatttaatttaatattttttaattaatcaactaaaaatccgcccgtttagctatg

SEQ ID NO: 101440 - DNA, 938 bp, Heterodera glycines
  unsure (1)..(938): unsure at all n locations
cccccccccctcccgctctcccgatcaaataaaattttgaaaaatcacgcgcaacaaaaccccncagaatgaacgaaatttcgtttcgcttttcattttgttcccttgtcattttttcgttaattttcgtccatgaaaaagtttcttttaattttcggtttttaaaattttatgctcatttcgcttctttttttatttttgtgaaaaaaaaagattttttttttttgtttatttttgttgtcgagtcttttttttatttcgtcatccttggaagcaattagaaaagtttcgaataaactactaatgagttatagaaattggctctactccctccaatgggcgatctatccaattggacaacagtcaactaattagcgagcacaatattcttcagagtgaattaaattcctaaaatatacacaaaatgcacatctcttctcctacttccgaccaaactaattaaccactaattactaaatatggtttaaaagtcgcctaattagtgaatgagtgattgtgtgtcgtggaaagtcaatctctgtgtgacaaaagcagctttgccaacagcacaaaaagctgtgaaatttttcgggcgaagaagcgaatgtgtgaataatgtggtgtgtgtgtggatcggataaaaggatggattataaatttagtttttttttagttttaatacatagtagaaaaatcatttcaaattttcggaattttctatattttcccatagatttttgaaaatttcaaactgaaagtttcaattttttagtgaaaatttgtccttattttttaaaattcatttgtttttgtttttttaagaaccggcttggtcagaaaagcccaggtattcaaaacttataaatttttcaaaatatttaaaaatctaaaaattttgcgccccaattacttttaaaccaaactctgattatgtgatg

SEQ ID NO: 101441 - DNA, 683 bp, Heterodera glycines
  unsure (1)..(683): unsure at all n locations
ttttaatgattgcgtcgcaattatntggaactaataccaacaaatgcgatatgttcacttctcaaatgcataattgtattaagggataatgaaaggaaaaatccattttgccgattcatatgatgagtgaattgagttgtgcgttcattttgagtcaactttcaacaaaattagtcaaatcaaaaatctacgccgcagttggcagaaaacgcaacgccaataaattttcaaaaaaatttacgaatggctaacgtgtgggcgacatgaagtttgggcaccgggaagtttgggcaccaggaagtttgggcaccagaaatttgggcaccgggaagtttgggcaccagagggagggatttcaaaaaaataaaacaatataaatatataaaatgttatataaatcattaaaatttagtaaatttaacaacccttgtgctcaaaaatttctatgttcttgaaaattaaaaaatttttatatggaaacctggcaatcttataatttagtcaattcttatgtactggtttctgtttggacttagacctgaataccgtcttattgttagttgggcccgaaataacaagagacccgtctaatactatttaaatttataaattttaaatcttgaacatactgagccgatttgttggatttggatgataaataaaaaagtttaaccaaaaacatg

SEQ ID NO: 101442 - DNA, 67 bp, Heterodera glycines
tcgagtgtacaaagtgagaaaacggggaacaaagaaatgccaatgccaagagagaaagaaagaaatg

SEQ ID NO: 101443 - DNA, 104 bp, Heterodera glycines
ttcttaaaccaagaattgacatcataacaccattctcccgtgctgctttaggcttcgcaaatacagacactgcctgggctcttggctatttcggactgaacatg

SEQ ID NO: 101444 - DNA, 511 bp, Heterodera glycines
ctggtgcgcttctgatcactactcgaaaaatgagtgattgaattttcactaaaaagttaagcctaaactttttggcctgtataaaaaggaattaaaaatttttaaaaatttattcatctccctttttgatagaaaaagcatcagagtgcctaaactaacatgtaaataaaatttggtgcgtttcagaaccctttctgaaaaaaatatttatgaattaattatgcaaaaaacaaataaataatgaactctcttccttaataattttcctgcaccgaaggtactcactcggccgcttcgcggcctcgtggtgggccttcggtgcaggtcaattgtggaggctgatgcttcacaaggaggaattggtgcaacaatcagccatcaatttcccgacaaaagtgaacgtgtcattgaacacgcatcatgcactttcacggctgcgcaacaaaattacagccaaatcgaaaaagaggctttaggattggtttttgcggtacaaaaattacaccgcatg

SEQ ID NO: 101445 - DNA, 435 bp, Heterodera glycines
aaatgtacaaaacataaatatattcaccacttcaacacgtcatttattagatttttggaccaggatttccaaggtttaggttcaacaggaataaagttgatacgctaacatttgttattaaaaaaattttccggctattcttttatttggcttattgtgtttgctctttcaagaaggagaaatttatactacgacattgtgagtctgatgaaattgaattatggacggaagcatttggaaagaaccggtttgaccctttttaagggttagtaggagtacccgccccattttgttcattttcagataataaaataggtaatttagggatgcgtttttcacgtaaaaacttaatcaaaaaacttaattttgcttatattttaattgttttaaagttttttcggtaaatattggtcatatggcactgaggccaaaatg

SEQ ID NO: 101446 - DNA, 77 bp, Heterodera glycines
aagaaacacattcatcattcggttatctgttgcttttctcccctgctccctctccaatacgctcccgtttcgaaatg

SEQ ID NO: 101447 - DNA, 466 bp, Heterodera glycines
ttttatttttttttaatttgcattcgtttttaagtgttggtgggcatattatttaagaaattttgatcgaagttatgtctttgttcataattgtatgagcataaaaagcttaattatttaaatatgacaaatatttgaaagtaatttttattttactgactctttaataattaaataacaaaaattaataatatattataaaataaatattttgaataaattatttattcaattaactgttattttctcaatgaatcatctcttttcgctgcaatcacttgctccacgaaatcatagagttttagctattagttggttgaatggaaaatttttgcagtcattaagtaatcattttccattttcattcattaaattccattttttaatttgcttaagaaaaatttcttttatttttatttccattttatttcaaattaaattgaaatttttaaattaaacaaaaatg

SEQ ID NO: 101448 - DNA, 426 bp, Heterodera glycines
acacttccgcaatttagcgacaaagtaaaaacatttgaattcatttgaattagccaataaaataaataagaaaatttagcatttaaaagcagaaagcacatctgcagagccaaggcaaaaaacgacaaataaataaatctattattggataattaactctaattaaggcaattattaatttacgatgaaattcgctatcgttaattgccataggtgtgtatataaaattgttaatgatttcttttctaaggtaaagtctgcacagatgctgctgctgataatgatattgttgatcaacttcttgtggattttgaaaaagaaagccgaattttaggccttgttgaagaaatgaaaaattcaaaaacagaaacggaaaaattcatcagcgaaattaatgagaaaactattaaaagttccgaaggaatg

SEQ ID NO: 101449 - DNA, 457 bp, Heterodera glycines
ttttataatttatttatatcaattatattattttttctcatgcgttaatgtgtagtttttttgagtatgttactgtaatcctttttttaaatttaaaataaattgtttaaataacggattttatttgatttatctgaaaataattgctgttattaattattattttataatttgtaatttaagataacattttattttttatcttcataattttagaatttttttaaatacttagcttctttttttattttcttatttaaaattatttcatttgtttttaattaacacatattctttattttatcatttttatcattacaatcactgagacccaattctctggcatacaatcattgtaattctatctaaccacttctgcatcccaatcgccgggactcaattctccggcgttccaattacttagactcaaactcaacaatccttcggcattccaatg

SEQ ID NO: 101450 - DNA, 1003 bp, Heterodera glycines
cattcggacgaatgggtgggagagtaaagggggccgaggaagtggaaggcaattgcttactcttttgaaaaagtcccgaaatggccaaacggagtgtgtgaatcgtttgagttaggatcactcgcaaaaatcgattgattggcgattattttgtcctttggccattcttccgccggctttctcttcgattggcttccatttctctcgtttttcccttcctttctctttgtattcccttgggcaatgaattcgttgaaatggtacagatggattggatgcttttcctcccaattcaatttgtgttcatcggatgaattcctttcgttccttagcttgattaggcttcatcttcttccccctcattttcccttttattttccgatggttttcccacaattcttcgcttttccttcccaaattcccccgcttctcatcgttctcttcgttctgttgcttcacctccataataattccccgcaaattgttggggcggtggcgacgaaacgcgcggccaatgggcgagaagaaattgggcgaggacaccgccgaaagggccgggcggaagagacggagggggagggggagcatttgcgtgagttttcaaaggcatcgccaaatcagtgaaagtgccctttggcattcattgctcaatcattatccattctctcacatcgctttccttccgccgtctactgattaattactttctctctctctcttttttatttttaattagaatttctcaatattttatcgatggaatcgaatgggcaaatgcgccgggggaagggggagtaagcattttattatttgcgcagcagatagacgtgggcaacgacggacagtttatgtacaagacgaaggggggggggggtggggtcgagcagcgattgcttctcccataatccctcacagtctctcctccgcccgcttctgcttttcccttccatttccccctcctccgcccattcttttcatttccccatttaattttctggccatg

SEQ ID NO: 101451 - DNA, 689 bp, Heterodera glycines
atgtgattaagtgataagcggataatgagagaaaaaaggatgggatttggtaattagcaaatgttaattaattggataagcggataatgacagcaaaaaggatgggagacggtaatttgaatgtgattaagtgataagcggataatgagagaaaaaaggatgggatttggtaattagcaaatgttaattaattggataagcggataatgacagcaaaaaggatgggagacggtaatttgaatgtgattaagtgataagcggataaagagagaaaaaaggatgggatttggtaattagcaaatgttaattaattggataagcggataatgacagcaaaaaggatgggagacggtaatttgaatgtgattaagtgataagcggataatgagagaaaaaaggatgggatttggtaattagcaaatgttaattaattggataagcggataatgacagcaaaaaggatgggagacggtaatttgaatgtgattaagtgataagcggataatgagagaaaaaaggatgggatttggtaattagcaaatgttaattaattggataagcggataatgacagcaaaaaggatgggagacggtaatttgaatgtgattaagtgataagcggataaagagagaaaaaaggatgggatttggtaattagcaaatgttaattaattggataagcggataatg

SEQ ID NO: 101452 - DNA, 1003 bp, Heterodera glycines
aatatggatcaaaatatggactaaaaactccaaaaatataagctttaaccctcaaaaactccaaaaaatgtgtatttattcaattttgcttaaacagagataaaaacactaaattattaattaatggatttaaattaaaaaaaagccaaattttctcaaattctatcttcacaacaattgcaaaaaatacatcccaaaattttgggcaataatttcattttgttgtcagcgaaaattttcggaagcgaacaaaatgcctaaaaaatttgccaaaatttctaaaaaaattcatttttttgggggtttacttttaagaaatttccaaaaagtcgatccttaggggtgtattttttcactttttttccattttcatgtgaaaatttgctaaaaatggccgaaatatggacttattcccgaaacccccaaaatatggatttatatggactaaaaaccttcaccaaatcaaaaaattttaacgtaaaaatgatatttttgatcccctttcttcatagcatatgcgcagaaaaaatatgtttattcaatataatttataaccctactacatatttacggaaaaaagcaaaaaaacatatacaaggtgacattttgatggaaaatgcgtcagtgaatcaggatttattcaaaaacgagtactttagtattattacctgaaagcataagcgttgattggtatttaagcaagcttacaacaatccattagagtataatttcatgttattagtgaacctttaaaaacttaattgaaaaaattagaacgaaatttttctacattctgaccttttgtaatacaatacttaatgaaacagtactttattttataaattctgtattactgatgcattttctactgacgctttttacacttacgctttttccgggaaccttttaaatcagttccccgataaaagctgaaaaataatttaatgaaataacctataacaatgagagtataaatttttttaaattctcaaaggttgagatg

SEQ ID NO: 101453 - DNA, 219 bp, Heterodera glycines
cgatgtgttcattcattggtggagcgaatcatacaatcctcccaagcggcagaacaaagaggagggcagaaagggtaaatctttaatttaaaataaataattaacggaccgaaattttgcatactttaaaaaggcgaaaaaattttaacggaccataagcttttacaattttgatcagttacaaattttaaatgaacatatttaattagctgaccaatg

SEQ ID NO: 101454 - DNA, 432 bp, Heterodera glycines
aacaaatgcaaagtccaaccaaccgactatgatttttttgttttgttttctttaaacggatttataaaatatgaaagaaactaaacaaattgctgattcatattttattttaaattgtaatatttcaacaaataatcgttttttatccgtaagtcgtaaataacaaattgtcgtcacaggtatctacaacgatgccaactgaagtggtaaacaacaaatgtgataaacaatttctggagcttttaggggtcgcgtgtcatgagtatacatccattcgggctaattcagagtcccaaactcggggcaaaaagtcgaaatattgtgactgggatttttattttagataaatccgttgtctaaacgtcgaaccatcaaacaaatgattcttaggattggctaatcctaaaaaatctttcagaagtctttgtcatg

SEQ ID NO: 101455 - DNA, 514 bp, Heterodera glycines
aactacgttataacttatactataggcatttttaggagagagtttctatttatacttttaaactataaaataaatgatcattttggcaaattccaatgcaaatggatgtcttttttttttgctcgcgtcgtttccattccctcgagggatgacgacacccttttggcacttccattgtgagacttccatctttttatttcatttgttaatggattttgtttgttatactccttttggcatttaactttaatttgacggaaatccgctgaatgataatatcgctttgatactcgtccatcttttttcattcgttggattatttttagccagtgaagaaaggaggaaagtgctcaaattaaatgccattgcacgctgtccattaacattgattagattcgactttaatccccacttccttcaaatgaatgtccattgcttgagttcttccatatttatggccttgaagcattccattcgcactttcattatcatacgattctgttaaattcagatg

SEQ ID NO: 101456 - DNA, 753 bp, Heterodera glycines
taccggctatagtgaagctattcacggaaggattcgcgtctccccataaatctgggcgcatcggatcagggggactgccccgaaaacccaaaaaaaaatttttaaggataaaaattatttaaatgaactgactatataatatttaaaatagggtatttctcttcctttcagtatccctgcaaagttgggtgcgcttctgatcagattctgaaaaaaaaggtaaggctaaactttttggcctgtttaaaaaggaattaaaaatttttaaaaattttattcatctccctttttgatagaaaaagcatcaaagtgcctaaactaacatgtaaataaaatttggtgcgtgtcataaccctttctgaaaaaatatttaagaattaattttgcaaaaaataaataaaaacgaaagactcatattttcgaaaatttttttgagccagctagctcggcgctcatttcagtgtaagttactcctttaccggggagtatccctgctaagtttggtacgcttctgctcagattaccaaaaaatatgagtgatcgaattttcactacaacagctaaggctacattttttggcatatttaaaaagcaattaaaagatttttacaatttaataattttcctgcaccgaaggtactcactcggactcttcgcggcctcgtgcgcggagccgttccgcgcatagtaagggttgaacagctgcgagactttttgactgctacattgcggaatcatagtggtgcaaaaatg

SEQ ID NO: 101457 - DNA, 551 bp, Heterodera glycines
ggtaggtcgtccgtcaatacaatattttaaataatatttattttaaaattcctatttttgttagtgccatccggcgtgttgaccagtgacgagttggtcggcgtcttcctgacccacgcccacgcggaccgtcgtgccaactccgagttgtaccccaaccaatttcccacccaccatcgcactctgctcagcgcttttttcaacgaaaaattgattagtcgataaagctattttgcaaattgttctgatttttaaccaaaaaattcattaaatttatatcttttctttcttttgtcgctttaagttttgacttttgaaattaacaacaatgaaagatcgaactttttttggcattttttgcgatttaaatttgatttttgacaattttattgcacatcaacattatttaatgtgcaagaaaaatttacgcatttttcccctgaacatttcggcgacgggatcgaaagtttaaaattaactttttttttcagtatatcatacatatactgtacccaaagcaaagtagtttttgaaaatttttcaggcaaatg

SEQ ID NO: 101458 - DNA, 191 bp, Heterodera glycines
  unsure (1)..(191): unsure at all n locations
ccgatcagagcagttgaacaatttntggtcattgggaagcaatcgggataagagacgacccgacagacgacgcggatgcgcaagcagtgatacaattcgaacgatcagtgcgccaactcaacgacgggcgctactccattcgattgccatggtgggagtgccaccccgctttgcccaccaatttcagcatg

SEQ ID NO: 101459 - DNA, 100 bp, Heterodera glycines
tgtcgattaattaggaaagaaaatttgttgttttttgcgatcttatttggacaattaattgccatgtatcataatctaacaaatatttcagtttctcatg

SEQ ID NO: 101460 - DNA, 364 bp, Heterodera glycines
ttctttccttattttttgtggccttttaaatctcattgcccaattctttctctgaatgattttattggcttgtgaagacttatttttagtttttttaatttctattcattatttttatcttttaacattccttcccatttaaaagtgcaatattttttcattttcattaattgtactgtgattgttggaaaatgtgttaatttggagagataattttgttaaattcaattttgtccattcttttcctttaaattaaaataacagaatgccataaaatgcgtatttgtctatcagctaataattttgggtctgattttgcggttctttttgagaaggaaagcgcacttttgacgaattctaaatg

SEQ ID NO: 101461 - DNA, 273 bp, Heterodera glycines
cgctttgtggagaatggaatttttaacaaattatctggggctttaagccgcttcgcggcctctaacgggcgcttcgcgcccgttttttaaatttggtgattcttaggccgtttcgcggcctcgaacgggcgcttcgcgcccgtttctaaaatttgttgagcttggacgggcgcttcgcgcccgttgttaaattttgttgaggccaaacgggcgcttcgcgcccgtatttaaatgttgttgagctcagacgaggtacaaaattgttggaagatg

SEQ ID NO: 101462 - DNA, 191 bp, Heterodera glycines
caatgatgatggaaattgttgaaaagtttcacttttgtaatgtgaagaaacgaggtcattatcgagatgggtatactgtatgctactagttttgctgtggatagcaattgttatgacaggaattttcttctattttaactctttaattagaaatttatgtaagcttatgcatatatgtagagacgaaaatg

SEQ ID NO: 101463 - DNA, 149 bp, Heterodera glycines
tgttgcgccccaacaccgcagtgccagggatcacacatcagctccgtaagaagccttcactttcattgcgcctttgggttttgaacacccaatgacttgcgcatacgctaaactccttggtccgtgtttcaagacgggtcgaacagatg

SEQ ID NO: 101464 - DNA, 148 bp, Heterodera glycines
agctgctcccgttttcacggatttttagaacaacaacaaaaaattatcaagagggtggggggggcggaccatcggcaatattacctaatgcattaattcattattcaattcgttctttgccttctcccgtcagaacaccgccctaatg

SEQ ID NO: 101465 - DNA, 165 bp, Heterodera glycines
agtgccaaaaccaacggcacgccccccgtcccttccttttaccctccgcttcgttcccaaccccacgcgcgagtggacacttctccgctttactcggcacaaaccttcgaatttctgttgcccccgccgccgcccgtgcgccgacgtcaccaaattgagacaatg

SEQ ID NO: 101466 - DNA, 458 bp, Heterodera glycines
taatcaaacacaacatcctcaaattcgtaccaatgcttcttaggcctataacaaaaaatgttttaatgtcaattttttgaatatatttttttaaattttgcctgtattcgcgtaacagccgtttgttacgtaagcctagcactttgccaccttcgccaggaaatgcagttattcctgaaacgtaatttatatatcaaaatagcaaatcctgtatacacaatattcgaatgattaaattcggattttgaattaaatgaatgagaacacaagtgctgcaactcgcctccatgtggtgctgttttgtcgttgggatgaaaacggcgttggtgttctaaaaagttcgaattaggtggctgaatttcgatgtaaaaaaaagaaaatttcaaaattaatccagggcgttttatttcccggtaaaagtcgggaacattggtcccacaaaaaaagtaacaaaaatg

SEQ ID NO: 101467 - DNA, 907 bp, Heterodera glycines
aaatcattcatccgaagaaaacaaacgaaagaaacattgtccattttaaaacagtaaagcatagtgaagaaagaataataaatcgaattaggtaatttttatggttccaaacaatgaaatgaaagtaagcccaaaaaacagtgacaatcaattcaatggtcttggcaattaagcacccttaggctacacttttttctctcttgaaaccatgcatgaatataaaaatgatgattatttcaatgattatttgccgacgattgcccgccctactcagtcaaaatcgctgcccctaaaaatgccgatgcttcggcattaatagccctaaaaatcataatataaatgtagaatttaattgaaattttttaatttctttagtattatacagaatgttttcatcccgttatcccctgtaatctgaactcggaattccgttgcatcctgagaactcagcctattgttcttttgtacatattgtaaaacaaaacaaaatccaaaaataggttttaatgattttctatcatatttttcagtaatatttatttaaaattcttatttttgttcttttctcaatttttaatatttaataataaaattgttaatttacagttaaatcataataaatttctttgtttgtaatgaatttttatgattttaaaatattcatcggattaaattacctttgtttttcatttgaatttgaatattggcattttgttttctacgccaatgattttgtgcgtttcttttttaccgtccgtccgtgaaaaggtaaaagcctcgccgggttagtccggtctctactgggcttgatccataatgcattcaatatttattaagattttctttagaaaaagaatagcttgggaatattcaattttctttataaagcagaaaatcgtgtaaaatg

SEQ ID NO: 101468 - DNA, 56 bp, Heterodera glycines
cgcaacaaagtgtggacttgagttgcatgacgtttgccaatgctggactagaaatg

SEQ ID NO: 101469 - DNA, 329 bp, Heterodera glycines
ttcatttcctctcccgtcgtgtgtcaatctttcgccccaaaggcatttgccgcggcttttcgcctccggcgaaatgcttttgccggattatccctccgacggcttttccctcatttcccttccttcattttctcgcttttccaacacattcgctgctgtcattcatcatcagcagccgacagatgtggccaattaatattttgtgtgctgtcctataaagcaattggctgccaaaattcgctccaaattaaaataaaatgtgaagtgattaaaacaattaattaaatcaggcagaatgaattaagacataatccctttttaacgtgatg

SEQ ID NO: 101470 - DNA, 378 bp, Heterodera glycines
acgacgagtaattaaaggaataattttaatatttctgtatttgttcattcattcataatttttgacagatcattttgttgtttttaattctcactaaaagagcgtatcataatgttctattattcattctcacattgctttaatccattgttttgcattttgacatccgaaataaaaattgtccaagaaatatggtggaagtcaattacttttgtaatattaattaatttattttttatatcttttcaaaattagccaggaaatgtaagaactcaagcatatgttattgtcccttgcaggtcacaaattccataaatggcttttccaaactcaatgataaaacctgtgaatacattaaagagtttaatgaggacaatg

SEQ ID NO: 101471 - DNA, 1003 bp, Heterodera glycines
cccaccatctgtcatcatcaatattcgaaacaccaaaaaaaaaattaaacatttttgcttcaccaaagccttcggacactttcggcgacgaattattgttttatgtgttgcgtaaccgagcgagagaactgatgagactgttcacaatacacaaacacataaatattcctcatttgtttttttttgatattttcaatttgcttttaaacaggtcgaacacctcacttatcacaggttttctttcaaaattcaatcctcagagtttgttcactcggtgctgcctttatggcttcttcatcgacactcatagaccaccgccgtcttctcattgttttaattggttgttatattgtgcatggcgcaccgtttgccgatcggagtgactcgcaaccagcagagaaagcgcggtgagtttttcgggataacacatgtttttcgggttccttttgagtcccttccttaaatgtggtactctgtaagtcttctaatttatggtactgtgaaatttggagtgatgggccccttttgtacggttaccgcacatcaattgtcgatttattactgaaattcgtgcatattgatggtagaatcagccatttgttggtttacggatgggctagaccatgtaatttgcataacttataggataaaaccgctcatttgtcgttgtgtttgttcaatgagtttctattcggcaaacggtgatctgaccactaatcctccctccactttttattttcttttctttttgtccaggcctcgttttctttgtttgttttctctgcgggtaatattgcacttttgaaaagatctcagtttaaagttggaaaaaattcaatttattttgtgaactaaacagttaacgcaataaaattaaaaacaaattcattcgtgtaactatggaaacttttttgtctaagaaagtcgcaacaaatatttttttgtgtctgaatttgcatttttatgtccactttaaggtttctttttatttctaaacattatg

SEQ ID NO: 101472 - DNA, 74 bp, Heterodera glycines
ccgattttcatttttcagatattaaatccatttaattggccttttattttcgttcttgttgtctgctgattatg

SEQ ID NO: 101473 - DNA, 424 bp, Heterodera glycines
tttgagtttaggccagtcattctgaacatgccgccatccttttgtgggacacacgcaattggaaactgatgaacaccttgaaagcccatcaggtttgacacggtcaggcgccacccccccccccccttgaaatgaaaatttacaaatttttcaaaaaaaaattcaaaattttatgaaattttgcatattatcattttgtttttcgtcctggcgctcaaattttgcactaacaaaataggaaaaaattttggccaaaagagcaatacgcttcaaaagtttttttttcaattttttttgtattttttttactttaattttattttttacagttgactgtcacccgtttgtccttttcacacggtcattcattttctttgctcacttttatgtcactctttttgaaaatgtcttattttttcagatg

SEQ ID NO: 101474 - DNA, 872 bp, Heterodera glycines
aagggtgtggaaaggtcattttgaacagccaatttcattttcttcgtacaacattaagcaattttgtcaaagaaatgaaagaaagtaggcattggaatttgattgatcaaaatttcacttataatccacataactacgacattcgtgtgcgaggatgcattcccattttttatttgcctattttggcacaatcagtctccttcggcgacggcattttcttacctttttgtgtaacctactgtcggattgtgcactgtccgatttaaatttgtcaattatgagtactttcgcggtttttgagtcaatttacaaaataaagggaattttagggctccggcgttgccgattttttttaaattatattttttgaataaaaatttttagggctattgaatgatatcaatcatataaaattttgtcggttccaaaaaaagttatgatggtttatcgaacttttttagaaaaaattgaattatttaggcggtccatttgagcgttagacataccaaatagtggacataatatgaaatttaaaacacaccaaagaaaaaatggtgattaaaaaatatttaaaatgtcgtataaaaattttaacaaatttattcatataattcaaaataaacattgctaattgccactggtaaatgttgaacagcgacataattaaaaaagaaattacatcgatgtccaatttatcatttatgtccaatttccacagtgcaaaaaatttgattcaccatccaaattctaatgtttttgccagcagcgagcaaatttacttcggaaactgtaattatctttaaatttttgaaaatttaaatccaagtctttgaaaaattaaacttatgtttaacttcagaagaacagaaatg

SEQ ID NO: 101475 - DNA, 657 bp, Heterodera glycines
tgtaccattagtacatgtgtagttagaagtacttttttaatgagaaaatttttttgtttttacccgccagcgcccgcccgcccgctaatgtctcctcccgccctaattacgtctccccgtcccgctaattccccaaaaattcgtccgtcagtccgctttggtccccctcgcccgcaaatgcgtcgtcgttgtcgtcgtgcagcaacagcaaaaagtaacaggagaaagaagcaggtcacatgagcgcgaccgataatgcaccgctgataaaatgcattgaaaaatccccccaaatattatgaagaaaacatggagacgacgacggacatgtttttctttggcatgtgaacatcatcataattaaccgagcaacagattatgacagcgaataattaacagttggcttatatattagggattaatgctgctcattcatatgccagtctcactcatcacacattgatggatttgttgtccccaaagccaaaaattctgataatccttggtgaacaataccttctctgttccccatatacggtgctttaccgtagtctgtaatatactttattacgacatatttggatctaaatattctgattaaaagcatatttattctttagaaatttgtttgtaaaatttggtctattcaattcaatg

SEQ ID NO: 101476 - DNA, 762 bp, Heterodera glycines
cccaaattttttttacagcttacttaggcccaaataagcttatttccagaaaatctcgcatgaattctcattttaaatttttttatagatttttaaatgtttggatttttttttggcttaacaaaacttcatcgaacctggttctttctatttctctttcaaatcgccccaaatttttttttacagcttaactaggcccaattaagcttatttccagaaaatctcgcatgaattctcatttttaaattttttatagatttttaaatgtttggattttttttggcttaccaaaacttcatcgaacctggttctttctattctctttcaaatcgccccaaattttttttacagcttaactaggcccaattaagcttatttccagaaaatctcgcatgaattctcatttttaaattttttatagatttttaaatgtttggattttttttggcttaacaaaacttcatcgaacctggttctttctattctctttcaaatcgccccaaattttttttacagcttaactaggccctattaagcttatttccagaaaatctcgcatgaattctcatttttaaattttttatagatttttaaatatttggattttttttggcttaccaaaacttcatcgaacctggttctttctattctctttcaaatcgccccaaattttttttacagcttaactaggccctattaagcttatttccagaaaatctcgcatgaattctcatttttaaattttttatagatttttaaatg

SEQ ID NO: 101477 - DNA, 157 bp, Heterodera glycines
tccacagaatctcgaatgggtcaacaacttcaaagaggtgtgtctcgccatattttctataaattgttgttttttccaattttttatttagacatttcgccgtgccaccacttctgtcagttacaatattcaattttatcttcgtgtggaaccaatg

SEQ ID NO: 101478 - DNA, 1003 bp, Heterodera glycines
aatgacgaacaaaaaaattatggccattcccatttgaaattgtacgaactgccttgacaccgaaaatcccggtcccgtggcactctacttaaaatagtgaaaatttactattttggcgttttgtcaatattttttttactatttcgacattttttggaaaattttgcaacacaaatgcaataaaagcgaaaaatacacttttaagaatcgaacaaaaattgagccaaaaatttattatttactaattgcagttgcaaatgagtaggactgagatttttaaggccaaaaatgccatgaaaatgaatttctgggaaaatttttaatttcttaggagtgtattttttttaatttttgggacgatttttaggagggtaatttttctgaaattttttaagtagattcttaggggtgtattttttggttttattgcatttttgttgagaaattttccaaaaaatgtcgaaatagtgaaaaaaatagtgacaaaacgcacgccaaaataatgaattttcactattttagtgacgaagctccaatggtgacatgaagtttgggatgaaatttgggcaccagagtaagggatttcaaaaaaataatacaaaataaatatgtaaaatgctaaataaatcgttaaaatctagtaaattttatgaacccttgtgcttaaaaatttatgttttcttaaaaaacggtaaataaataaaataaataggggagcaaaatagaatttagtgctaatttggattttggtgatgaatggttttggcatctttcatttgtgcttttatatgccatggtttctctgcccatctctgctgttcccattttgtttctcttctctaattgccattaatctgtccatttgattttccttgggttaatttgagtggcttaatgccctcctctgccagtgaatgggaacggacggcattttctttgctcgcacaacggcactttgggaaaagcaacctaatcctcaaccaaaaaatgaaaagcaaaaatg

SEQ ID NO: 101479 - DNA, 59 bp, Heterodera glycines
gggccccccaatttgccgccttttttatcgcgccaaaccgcgacaaagtgctgaaaatg

SEQ ID NO: 101480 - DNA, 351 bp, Heterodera glycines
tttcgccaactcagccaaaaacattcatttcgccaactcaaccaaaaacattcatttcgcctactaagccaaaatctgacattttgccaactgacatttcgccaaatagttaaaaaatagttaaaagaatcaaagaaaaaaaagtaaaaagagtaaaaaaatgctgttttaatatcagatacagccctattccagtttatacgtccaatcagtgaccatcatcatttcttatgtcctaacttttttcatatttgttcattccaaccatttttggatcaatcaaagcttaagaattcctttcacttttttataatttcttttctagcgtaattcagattctagcaagaaatg

SEQ ID NO: 101481 - DNA, 644 bp, Heterodera glycines
  unsure (1)..(644): unsure at all n locations
ttttattaatgacctcaaccgaaaggtcctaatataaaagaatttaaaaaacagcgtaagtctagctttaagccaaaagcttaggcttagtgtaagccattgttcgagttgcctgtgtatgagttgttattatactttatgtttaacaacgaagttttagttaaaaatttgagcctcggaatgaaatccctgccatggacacaaatgtcatgggacgcataaaatgccatgggacgcgtaaagtgtcatgggacgcgtaaaaccgactagaacccaanattttttgaccatttacaaactcgttcttttctaattcgagtccggtgttcaggaattgggtacttatcggttttggtcctataactctaaatttcaaataagtcaactaaagtcgcgtgggaagcaatttagcgcacaccgccgccattttaaggagcacaaatgccacaatttgcatcaaaatttcatcaaatgagttcaaatttcatattttgcagtcctcgcgggaagttacttccactcaacttatgtagaatttttgaaaacttagaggcgtagaatcaaaaccgaaattaccccaaattgtgaaagccatccaccccaaaattgcaaaaataaacattgtatggcggcggtggaggatg

SEQ ID NO: 101482 - DNA, 141 bp, Heterodera glycines
atgattagatactatttaaaaaaaacattttttgcaaaccaaagggtccaaattgcaaaagtgacacttggcaaatggcgcccaaaatgccattttcgacattcattaattaattcattggccttaagtcactgcaacatg

SEQ ID NO: 101483 - DNA, 102 bp, Heterodera glycines
ggtaagatgactttaaacatactttttttttgagaaaaccattgaatttaaatatattaaaatattaaattaccagcgcttcaatgttatttggccattatg

SEQ ID NO: 101484 - DNA, 365 bp, Heterodera glycines
aaagataggtcagatttaaggccatattcggattctactggtctaatttgtacagaaaaccttcttttttgttatatcaggttacttttttgaccataaaaaattcgagaaaaattagtgggccaattttcaatttttgcatggtcgggaaaaaatactaaaaaaattgaataagcaaataaaaaatgaaacaatggcatgaaatgaaagaagactttctgacgaacaaaataaaaaaaagaattattaaaataactgcagaaattacggagttatgaatttttgaatttgtcaaaaaaaatagagttgagcgggaacttatgttacatcctaagtaatttacagaaaccccaaaaattggcatg

SEQ ID NO: 101485 - DNA, 67 bp, Heterodera glycines
tagtcattctcgattggtgttgacgatccagcattcagtgtacaattgttttaaacctctcaacatg

SEQ ID NO: 101486 - DNA, 117 bp, Heterodera glycines
tttgttcagctacgactgcgtttgatccttccgcaacggttcaatgccttttttggccaggcgccgcacacgcagacggagaacaacgcgcacattgagcagattcaggagcaaatg

SEQ ID NO: 101487 - DNA, 253 bp, Heterodera glycines
gtcgctttctcacgcgttctgtcgcggttgtatccgcgggcaggcgcaggcggcgaccgacgaaattccgctggcggatgggggcgtgggactgaagtgtatgatgccgggctgcaaaaacccaattctttactgtgggtgtaacatttggttatttcacatgttttctgttttagctgacatcagaattctgctgaagcgcgaagtacggagaaaattggacgaacgcattgttgaggaaaacattgggatg

SEQ ID NO: 101488 - DNA, 262 bp, Heterodera glycines
  unsure (1)..(262): unsure at all n locations
agagaatgtggaatgtgaaatgaataattatggtgattgcctnttctgtgtcccagtgtcagcagaagaagcagataaaatcattttattaagccaaatatagcagaaaataaaaataggaataaaataaataaataaattgttattattatgccatttttgtagccaattttttaaaatctgatttctagttttttccacattaaagtctaactttacctttttttaagcatttgtaaattttagcattgtgctaaaaatg

SEQ ID NO: 101489 - DNA, 901 bp, Heterodera glycines
ttagtcatgggattacacacatgcacatgtggtgtagtcgttaaactttctacctttcataatttttcgcctgggttcaattccccacttggatagaatattcctcacattttctttaccattattttaattaaaattttaattttaaaaaatattccaacttttttctttcatgttaagcatcctaaaaacccaaaacttaatcaattggtcattttttttacaaattctgttaacaaatcgcattaaaaattacaaaatttttcccggcggcgcctatcggcaccgccggccctccttgtcccccaaaagtcttggaaaaaacgtgccgcgtaaaaagcggtgttgaaagcaaaaaaaggtcattgatttacattaatttacatggccggagaccccttcgcaaaattggaaaattggctgctgatcccttgttttgcaataatctgaattttgaggtctatatctgaattttagtgttctatgtcctgaatttgaaaaaaaaacttggtcaacctgaatatacatatacttctgaacaattctaatgctaaaaaacaggcactcgcgcgaaaactgaataaaaattttgtatttggaaaattttgtccaaaaatttttatgttctaaaattaccggtttttaccggtaccggtaccggtaccggttgaaaaagttggtaccggtaccggtaccggtttttgcagtaccggtcagtaccggtaccggtttttttgcaattaccgattaccgctcaactctacaaaaaaccattaaatgttgacactttaaaaaaatacatacctatttgttttttcaaatttactttaaaagtaaatttactttataaagtaaataaaaccacaagatacaccaagaaaaactaaaattttcagaaatg

SEQ ID NO: 101490 - DNA, 261 bp, Heterodera glycines
tgacggtaaaatttagaatttttttaaataattttcaaaattgcggtaaatcttaaaacttttccctttttttcattttcttttcatggaactgtttattggtttgattgttcctccatggcaatactattaaaaaacttttggtgggttcagcgtgttttaattggaagggtccctgtgcccttctgagttcttagtttgtatggtgtgtcaatgtttgtcgtcttttgcaccatttctaatatttatagggcacaaatg

SEQ ID NO: 101491 - DNA, 654 bp, Heterodera glycines
gcaattgacagattttgcagttcgaattcgacgttccatcccttataacggctcattggacggtaaattccttagtcttttcgtcttttccctctgtatgggcagctataggaaagctgttttgaaatggattgttcatttgtctgtggattttgtgtccagacatttgcgcctctgtcaaaaatctgggaaaacttacagtttttcattcttagaagtcttaaacagcattaatttaaaaacaaatctccgaggcgcaaatgtggggtaaccgtggattttgacctcatgctcagaaacaattcttcgaagtttaagactttgtcaaattgacaaaaggggctgatttaattttaattgcattaccccaacaaaatttcggccaattggtccttttgtcatcgtttcgcttcccgtgccattccctccccacccccactttttttgttgccttttctcgctgtgtttggtgtttcgacttttgcctctctttctgtccaattgattcggtcccctttttctgttcattttgctttttgtgaatgtttcgttcgcttttggtaatggtggaaataaactgaaaacaacaagtggttaattaattaattaattaattaattaattaggcttttgtccgcgttgcttcaaagaatg

SEQ ID NO: 101492 - DNA, 76 bp, Heterodera glycines
aatagaccaccttttcacaaatttgtatattatcagttttacttttcacggaacaataaactgcatattaaaaatg

SEQ ID NO: 101493 - DNA, 500 bp, Heterodera glycines
tattcggattctactggtctaaattgtatagaaaaactaagattttgttatatcagctttggtttttgaccataaaaaattcgagaaaaattagtgggccaattttcaattttggcatggtcgggaaaaaaggcagaaaaatctatcaatcaaataaaaagtgaaacgatagtaagagatataaaagaggacaccatgaagaacaaaataaaaaaagaatcatttaaataggcgcagaaataacggagttatgaatttttaaaaattggaaaaaatttgggtatcaaaaattatgttccaccctaagtaacccaaaagaaaatgtttttcctatatccgactacgtagaatccaggaaaaaaatatgcatttgcatattttggacggacagccctgataataaatataaagctatttttcttaggtatgacaattcaaatttttttgaaaataagaaactgaagtttgagtcaaatgttgcattccaattacgaaaaatg

SEQ ID NO: 101494 - DNA, 224 bp, Heterodera glycines
tatattctagagttgagcgggaccgggacctgaacacggacaactgagtaccgaagtcccggttttgaccgggaccgggactagccccggtttttcccggttttcccaaccaaattcccggtttttcaacccgaaaaggtcccggtcccgggtttgcccaaaattcccggtcccgctcaactctagtatattccataatttatctatttatttttaaggaaatg

SEQ ID NO: 101495 - DNA, 485 bp, Heterodera glycines
attttgggaataattatttttttttgggataaataacatcccaaaaacaaaaggtaattttgggaattgtatttttatttgaaaaataatacccataaaatttaatttctattttaaatatttaatacctattttcgacctaataaaacaggctgacagataatttaaactttatgaaaaataaataaatttattacacgaaaaaacgtaaataaaaaactttttttatgaatcgttttcgaaatttataccatgcaaaaatattgaaaaaaaatttatttattaaaatcagtttaatcaaataattttttaatttgattagtaaatttggtttaaaattttattacggaatatttttgttcgccaggactgcgtttggcgacccgaaagcggtctttctgttcgtggccagcaaaacgagtcgcaatcggtttggccaacggcaaattgagtaccttctcgagaaaatatcaaattacaaaatg

SEQ ID NO: 101496 - DNA, 206 bp, Heterodera glycines
attaagagattcattacggctaccaaggtgtttggctaacggaattaggccaatttggcaaaccacgatcactgccatttatgtacggcattcgatgcgcattaatccattttaaatgacaatttagcaaaaaagtgcggctggacaacgtggtcacgcgtcacagtttacgccaaattcaaacggtggtcgaccatttggagatg

SEQ ID NO: 101497 - DNA, 704 bp, Heterodera glycines
aaaaaaagagagatacccatttttcggggatagagtataaatttaaaaattccctcaaaaataaaaggtttgttgcgcgccgccctccctatcatgctcgagaccatttggtagggtgtataaaatttctcaaaaaaagagatacccatttttctgggatagagtataaatttaaaaattccctcaaaaataaaaggtctattgcgccccgccctccctatcatgctcgagacctttggtatggtgtataaattttatcaaaaaaggagatacccttttttggggaataacctaaaaatataaaattcctctgagaaataaaatggtgttcgcgcccaccctccgttccattctgcaagccctttggaggggtataaaatttatcaaaaaaagagatagccatttttctgggataacctctaaatataaaaatcctctgtgaaataaaatggcgattgtgcacagccctccgtctcatacgcaagcgcttttgtgaggtataaaatttctcaaaaaaagagatagccatttttctgggatagagtataaatttaaaaattccctcaaaaataaaaggtctattgcgcaccgccctccctatcatgctcgagagcatttgtatgtgtataaaatttatcaaaaaaagagatagccatttttctgggataacctctaaatataaaaatcctctgtgaaataaaatg

SEQ ID NO: 101498 - DNA, 194 bp, Heterodera glycines
ggttttgttatttctgttaccgattgatcatttgggttttttgaatgtcacaggaaaaaaaattgttgttgtttgtcaacacacggttctcgagcagtacaccactgctcaagttgtgatttgtccacacatttttttcatttaaattcgttcttttttttacagaaagtgttgaatttgcatttgattcaatg

SEQ ID NO: 101499 - DNA, 105 bp, Heterodera glycines
ttttcagggttagatttttgtacgactaggaaaattctgcaaaaaaaaaaaacaggtttaaatggtcattttatataaattttcagctcctcggtgtttgcaatg

SEQ ID NO: 101500 - DNA, 261 bp, Heterodera glycines
agtactatctcgtcgtttctctttttctttgtaatttgtctcactttggcgtactatctcttcattttaattatgtaaaaaacaacattcacttcgtgatgtttaactttttttctgcatgttaaatccacaccaaattttgcatatcgatagagaaaaaaattctgcatcgaacgtatcaaatatttttttaggttatacatcccattttttcaataaaattcattttatagcttttaatatattcttttttgttctatg

SEQ ID NO: 101501 - DNA, 168 bp, Heterodera glycines
  unsure (1)..(168): unsure at all n locations
aaaaatgaaaccatttataaaagcntcatannaagcattnaatgatgtattaaaaatgtgcnttaaagttattcacttgacttaactctattttatttctgtgaatattaaaattattcatttatttcaatttaaagaacaaaatttcatcacaaaaatttcccaatg

SEQ ID NO: 101502 - DNA, 523 bp, Heterodera glycines
aggttggtttgttaggccggccaaccgccgatttcaaataaataaaataaataaataaaatttgatgggatccaattttttcaaaattaaacataggctttaaaatgggcataaaatgaggatcaaaatcctatttttatcaatttatttatctacaatcattttgatgttttaaaaaaaggattgtataagatggttgccggacgaaacgacgtcggtacttaacgtcgccgcaaaaaaaaataattaaatacttgaagaaaaattttaaaaaatggttttaaaattttttgataacctaaattctacagaaaaaaaaaatttgctgaatatccacaaaaataaacaaaaacttgaaaatttattttatttcctggaatatttctaaaaaaattttagaattaggccaagttactaaaatttttaataatatttttttctaaaataaaaaattttaaaaattgacaaaaaatgaattaagcctgacactgatctgtacgaccgtgtagcctatttggacatg

SEQ ID NO: 101503 - DNA, 830 bp, Heterodera glycines
actaattacaaccgaaatgggacaatttgggaaaataaatttagaaaaaatgaatgaacgcaaagattgtgggcttcaaaagtacggctcttccaaattcaaaataaattataaacaatgaaaagagttcttcgtctattcctccctctctcatacacacaaaacaaaacaaaaaaggaagaaacaatccaacaattaaaatataaataaaatccaaagaaaatattttttacaatttttaaaaatattagttttgaattattaatactaatgataaatcagttttatttaaaatttggaagaggcccactttccgttcatttttcaaatatttcatatgggattgtccgcaaatgtctgtaagctaattagtacaatatgactcattcgcccctttcaattggtgacactttccgtttcaattgcccttggcttgtcttaaattcccctcccttctgaactgattatgctttttcttttcttttttcttattttacctccaaaaaagaacacaaagtcccaaaaagcgttggcgcccccgccgaaattgccctgctgctgttgcgaaagagcgtccgttttttcgccggcggaattcgacggaccaaccacaatttgcctcacatcttttggaaagtgaaaaggtcgaagaattaaaagcggaactgatcaaaatctgctgttcaactcattgtcagttaccagaaggattgaccggcggcagaagcggcggcgcactttcattggccattttttgctgcaattccaacagtttctggcactttcccttcgcttaccgccttttcggttggcatttcgtcgtgcggatg

SEQ ID NO: 101504 - DNA, 393 bp, Heterodera glycines
aaaaatttttaattaataaggataatatatttgtcaaaaaatatatttctaccgcaaaaaagtccaataattcgaagtcaatttattaaacatggccgtttgtataaataatggagcctgattaaggattttcaaaattttgtttttcataaaaagggagttcttgtttttgttaaaacttaaaatgtgagtgatgttgtaatcactcgccgggtacgtgatcagaaggaagcatcggatgagcgctgacctcagcttccgtcggtcgaattcgcgctgccgcttcggtgttgggtgaatgcttgtgcagtgtgagcttaggcagattcataagagtgcggggaggagcagaaggtaatatatagcagtaagttcgagtgcttagaacaaatg

SEQ ID NO: 101505 - DNA, 248 bp, Heterodera glycines
aattccgccaaatccgttgccaaagaaagtcgtcggattcgaagccatttcaataaggtgaagcgaatgatttgttgttttctgtttgtaaaacgattcaatccattttcagtttcatcgatcaaaatgtcattgcttttctcggccattttcgtccgcttttcgactcattctgtccaattaaattgtccatccaaacgaacaatgaccgcattttggagttcattttgcacaacatttggccaatg

SEQ ID NO: 101506 - DNA, 173 bp, Heterodera glycines
cccccccccccccccgtttgggcgttatttacgagcgtctgctgttgccgctgcaggacggatgggtaggaaaaccaaatacgaaagaggaggaggaggaggaggaggagacggaagcaaacattggcggaagaggaggcgaaggcgaaaaggaggggaaatggacgtggatg

SEQ ID NO: 101507 - DNA, 153 bp, Heterodera glycines
ttgctcaaatcaatgaccaaattcgaaagttcggagatgagactccaatttaataatcaataaccgaactgtgaccgaacaatttaaaaatttggaactgaaactccaatttaatcaataaccaaaagactctgattttaccaagtgcggatg

SEQ ID NO: 101508 - DNA, 185 bp, Heterodera glycines
tcagaacccaactgatttcagctaagtttgacctggaccagtttcttgacaacaattttgtatgtcaaaagcacataaatgaattgctgatcaaatgggccgactcgcaaacccacttccggacattaaccgaagcgaccggaacctattattactgtgcctttccaattactgtcaaagggatg

SEQ ID NO: 101509 - DNA, 162 bp, Heterodera glycines
tgtttcatgcgcccaatttgctaattttgtgctggacattgaaaacgatgaccgcgagctgaacggagtcaaatacgtcagcctttgtggcaaacattcaagccgatcacagcaccaacggagcagaaatttccgattcaatgtttgtttcgtcaaactatg

SEQ ID NO: 101510 - DNA, 1003 bp, Heterodera glycines
aatttattaaatttttacagacttggatttgtaaattttcaaacctatagatattttttatgaaatttgttcaaataaattcatgaaatatttaaaaatcgcaagtttgctcatttttctggtgtaaatctgttaactattgcaatcaaatttcgctgaacagtagtgatcactagggctgtgaattttagtgacaaaaaatccctaactaaaatagtgagtaaaaatgttaaaatagtgacaaaatagtggcaaaaagtccgaaatagtgacgaatagtgacaaattttcagccaaaaattgagcaaaaataatttttattcactgattgcagttgcaaatgagtaggactgggatttttaagaccaaaaaacccaaaatagttacctaaaaaaatttttaaaattaaaaatttttgccaagaaatttttgatttcataggagtatattttgaaaaattttagctcgattcttaggggtgtattttttggttttattgcatttttgttaaggaattttccaaaaaatgtcgaaatagtgaaaaaatagtgacaaaacgccaaaatagtgatttttaactattttagtgacgaagtcgccaaaatagtgatttctagtgaccgatagtgacatcagaatcgaaaatttttaatgcagaaatgcgttttttgagctcctttcttcaaatcaatcgagcaaaaaatttagttaaaacctaaaattcacagccctagttattactagggatcggattcttagttttttaactatttgctcatttttctggtgtaaatctgttaacgattgcaatcaaatttcgctgaacagtagtgatcacgaatattgcgctatttgaaacccagcaggacccgaattcgaacaaacagtcaaaaatacgaattttcaaagttcaatgttttaccaaactgtatgcatttttctgtgtattgtaatactgtattttagcccgaaaaaactctaaaaagcattctcaaacataatg

SEQ ID NO: 101511 - DNA, 117 bp, Heterodera glycines
  unsure (1)..(117): unsure at all n locations
aaaaataaatttatcataaaagattgttgtgatattttcncttgtgaattttttcattttctcatcaaatttgttttaaattattaataattttaggtatgacaacgggtttcaatg

SEQ ID NO: 101512 - DNA, 137 bp, Heterodera glycines
ttcagcggaaaatcattgagcagcaaatggaaaagagtgccgtggggggggggcggagattggccgaccaaatcactgagacggattcagccaaagtgcgcaaaacgcgaattgaactgacggaagacgaagagatg

SEQ ID NO: 101513 - DNA, 73 bp, Heterodera glycines
ggaaattgatgcccaaggccgcgccaaagtgctgaatattgtagctactaatatgctcaagttacagtaaatg

SEQ ID NO: 101514 - DNA, 548 bp, Heterodera glycines
tttttgccttccgaatttaaattataattatttaaaaaaataaaaataaattttagaaggaaaaatggaattaacaatttttcttttgaaatatttagaatttgaacaaaattttatattttttaacatctttttatttccgtatttttaacatttctttatttttatcaatatttcaacattttcacaaaaaaaaatatatgaaaaaacaccccactaaaggtcaaaaatttcagttactctcttagagatggaaaattctgaaaaagaattcgaaattgtcgaaaattttcttgttaaaatataaacaaattttatttgaaaattacttttttttagtttctaaaaattaatggtttaattttttcaataattgaaattttttttgtccatatttctgaaatttttcggaaattttaaattaatttttgtttttgtccattaccggtgtctccattaatttctaaagaatttttaaaaaattggctcggatcagatgttacaaaatccctcccccccccccccctcgcagtgccatcctgaacatg

SEQ ID NO: 101515 - DNA, 1003 bp, Heterodera glycines
aaaaataaagtcccctggggctctattccagtaaatacggtataataaataaatataaattccggcattggtataaatttttgttgcgaatactcagcagaatttggaggaaaggagttgatgaaataaatgccaaggacaaaccattaaaaatttacacaaataaaattttttaaaactagaaaatggtgaaaaaatggcaaaaaaaataataatattggccgaaatgccaataatatttagaaaaattcgatttttaccaattttaattttctaaatttaattttcagatttaaaaactttgttcaagcatgaaaatgtgctgttatagctgctctagtaaatggatgtgctggtgcggctttcacgtgacaactgtgggccaaatattaattaattaataattaattaattaatgccaattaatgaatcattaacatttgattatattatttgtcatggctcattgcctaattgattaattaattaattttaattaattaattaagaaaatttgattaaattatttgtcatagttcactcgcctaattaattaaatcaaattaaaaaatgaatgaatgaattaattaatagctaattaatgactcattaaatttgcgtaagctctttgccagtgctgaccgcacgatttatttaattaattaatgcctacttaatgaatcactaaaatattgatttaattgtttgtcaagggctcacttgtcgtcgcgtggattaatgtgttggccggcatttatggctttctatctgccataaatttatttggttataacgttaacatattccacattattaatttgatttcggtaattcttattattttttttactaattttcttcaaataagaaaatctttaaaaaatttaatccctaaaaataaattaattaattaaatttgttttttcaaatatttcatttatccctttcttttaagagtattttgcttttgtgcggaagtgtgccgataattgttggcgaaatg

SEQ ID NO: 101516 - DNA, 201 bp, Heterodera glycines
tgatttgttcacactagataaaatttgtaatttaattaattaattcattaataaagtaaaaagtaaaattaaaaatttaagcaaattaaaataattttaataaaaaataatttattttcataaatttattaggttaacagaaaaatatagtgattttttgattactttcgagaaaattatgacgattttttgccaaaaatg

SEQ ID NO: 101517 - DNA, 336 bp, Heterodera glycines
aaggaattcaggggtttactaaaagcaatgagttctgagtaggaaattttctgtgccacatatacactatattttaatcacctgtgaattttaacatttgatttattttattcatttttattacggtattcattttgtattttttatttgatcatttttatttgtttgtttttggcaccatataagagcactaatgtgcctttggtttgctcgataaaattaaattaagtttaacttaataaatccgtcgtccttcgcctttatcctttatctcattgttctttcttttaagacattttgcgaaacaccttcaaagcccaaagaaagccgtcaatg

SEQ ID NO: 101518 - DNA, 678 bp, Heterodera glycines
gagcacggcacggattgctgaggtcgtgggttcgagtcccaccgggcgagttaccttttatgttctacactttcctttttgtgtttgcgaacaaaaatcggacttatttacatatttcgaggttttttcatatttgttatatattttggacttttttcttacatattcattttttttttacatattttttggattttttacgaaagtttttgaaagtcgaaaaaaatccaaaatttcggcattatccgtacattttgagaatttttgaaattttatagtgaaaaatattttatttattttattttttttgaaatgtactccataaaatactaaatgtgattctctgcctatttaggtcatttttatgacaatttatgccaatttcatcctttatgaagaatttttaaaaaaccatttacaaaattctatttcatattttcgtacaaagtttggattttgtacatgtttcctacatatttcgggatttttttttaatatatttatttacatattatgatcactttttgtacactatttttttttgttttttgatttataaaatttgttttccttttatgtcgtttgccaatccctgcgatttaaaattgttaattttttaaaataatttccaacaaaaattgagtgccaaattggagttgtatggcaagcgcagaaatg

SEQ ID NO: 101519 - DNA, 95 bp, Heterodera glycines
cttatacttttctagatcgctgttgacattgctttgtttttttccccagacaattaggaaaggttacatcaattggaagtaaagtggtccacatg

SEQ ID NO: 101520 - DNA, 676 bp, Heterodera glycines
agcgctcaccaatcactcattttcaattgataatgatcgtttggaaatattatgcaataaaatagaagcaatacttacaattagcctattttattcatatcatttttaattttataaaatttgttttttgtgtttgggtgatttatagtgctgctcgagaccgaaaaccttaaatttataaaaatagaagttaaccaaaagccagtcattaggggtgtaaaaaagtcacggtctcgaaaatcctgaccgagacttaataacccgagattcgataccaaaaaaacccgagacttttctcgagtcgagaccgagactctcgagcagtactagtatatagaaattaatttattggaattccgatttaaattatgaaaaacgactatgctttcatccggctcacacgcattagtccaattagtcaattctctcctgatcaattaaaattaactcgcactcattagcccaattaaccgatcccctcccaatcaattaacaatttcaacgtcaagcacataacaagaccgacgctttttaaaccttatagcaattggccaagttggccaaactgcgtgcccaactgtccaccgcgcttggtgacaatggcattttgttgttgcccccgtggcccaccgttgcgccgttccatcgtcagaacatgttcaccccgatgaacatg

SEQ ID NO: 101521 - DNA, 658 bp, Heterodera glycines
atagaaaacaaataaatcaattaaaataatattaatttattaattttatatttaactaaaagcttaattttgttccaaaaataaagcaaatgccaaaagcaaaacaaaaattgtcaaaaaaataaaataataatttttctaatggagtttaattagtttttcggtattttcgttgcttcaatttttgcttcattttttaaaatttaactcatttctcagtccatttaaaatcccgagccttttcactaattggtgctgactttggacaaataaagggattttcttttttgaagctactttacctggatgtggaactttcattttgaaaatcatttactattgcatttttatgtaaaacctctcacttggagccattctttttaggtcaccattttgctcattattaataaaaaaagtaacaataatctagaaatgacaaaaaatgaatgggtaaatgagtcaactatgccattttttgctcttctccaatttttgagtatcattttgccgtaaatatattgagtgaccccaataaataccgtaaatccgctatttgaaggcccgggccttctattgttcaacccctccaaaaaggggcctttaattggagggggccttctaccagagaggggccttcaaatagcggatttacggtatg

SEQ ID NO: 101522 - DNA, 266 bp, Heterodera glycines
gctgtacaaatttaaaaataatttatgttaattttaaaaatttgtaaattattttaattattgaaataatttatttttttttaaactaaatattgctatttattaaaactaatttcaaacaacaaaaataattaataaaaaaggtaaaatataatgaatattaatttaagtaaataaaattcttaacgaataaaattgttttattttattaatttaaaaattattaaaaaatttatttaataaaatatttttttacagataaaatg

SEQ ID NO: 101523 - DNA, 102 bp, Heterodera glycines
cgtggatttggaaattcagtccttgactgaagctgggtttgaggtgcctcaaaagaataccatgggttttcattccctttgtagcaagtgccaacgaaaatg

SEQ ID NO: 101524 - DNA, 285 bp, Heterodera glycines
cccgacatttgcccctgtgtccaaaaatgggttcagaatttaaaattgcccccgcttttggacatatgcgcaaatttggggtaacccactacgccccccccccccgtatcaatgcccccctccctgaaaatttttatttttctaaatttcttagaaagaaatgattatacttttatgcagcacatccgtccgctgttccaaatgcaagtgccgctttcacgggaaatgcgttaagatccgtccgcaggaggcaaaacgcattccgtactggcaatgtccaaaatg

SEQ ID NO: 101525 - DNA, 536 bp, Heterodera glycines
ttctgaagtaatatgaacaactcttggggttttgattttgtgataattccctcgctattcaatcggcttttataatgatagcacacgcacgccaaagcgcatagcagcatttcgccagattaatgcgcatttttatgaatattccctcatatattaatcaatgtttcaccagattaatgcacatttatgatggcaagcacgcacgcctaagcatttgccagcaacgcaatgtgtatgcttaatattttttacacatcaataatttacttttatgcatatgtcagtctctgtgttgtatattatgtgttatgcttttctagcccatctctgaattttataatttattaatataattttcttttcatatgcacgcataccgtttcatgcatatgcgtttttatgaatatatcatttgaatacacacacgtttatgcacatgcccctcatatcactcctttttatgcatagcgtaaatgtgaatattttatgaatagagcaaatgaatgcactttttaggcatatgcctctcatatatg

SEQ ID NO: 101526 - DNA, 115 bp, Heterodera glycines
cctttaaatatgatgatgtacgatttgatcaacgacgtgagcggaactctgcgggccacggaggagaagcggaacatcagctgcatttcctatgcggggtccatgtgtctgaatg

SEQ ID NO: 101527 - DNA, 728 bp, Heterodera glycines
tggcgctcgccgtgaccgggccttttcatagtcgaacccattattgaggtttttaggacctaatcctcgcttagccagctctaacacctaaagatagccgtagctcgtagcgctttttgccgcgactatccgacccattactcaaacacatattattgttattataccattacagacaaaaaaagaaatgcctgcaccccccccccccctagatacgcccttgcgtggtcaaacgaatttttggattatgagcttttgattcttattctgtaatagtccgaatcttattaaaaatataccaatcaaaatgaaaactaaaaaaaaaatgaattgaaaaaacccaaacgcactttatacggcaatgaattggcaccgccgacaattgaccattcaaagccggacggcccacgtcgcatttgcatgttttttcgcaccatttttattgaagcctttgggggaaaaatggggtaaaattatgaggtatttattattgcagcatttttcctggaaattatgaaaatctatgaaatttgtgaaaatttggtaccaaacttggcaattttggaagattttttgggccaaatatcgaaaaaatttaaaaaaagaataaaatttaaataaactccgtgcccttttccatctaacggtaagcaatttgatgggtttaggcatttaaaacaaaaaatatttttgtgcacacttttctgccaattccatcggcaccaatg

SEQ ID NO: 101528 - DNA, 122 bp, Heterodera glycines
  unsure (1)..(122): unsure at all n locations
gtgacttaatgattattttaaatcgctgtgtaaactttntaatattcctagggatgtgactcatatcctttggaaaataaagaaaattctcaaatatttcagtcgcttcattacgccaaatg

SEQ ID NO: 101529 - DNA, 543 bp, Heterodera glycines
tattattctctgaataagagaatttaattttttaaccttttttataatctcttttcgaagtttaacagagggcggacttttgggtttttaattgtctgatactcacattatccatcattttagacaagtaatttaaaacgatgaaaattaattatgcatacggcaatttgttaattattttatttctgttcctcaatcattttatattgagttgcaactgcagaggtttaaacaatgaaaataatttaatgaattaatatattattaatagcgatcgatgtcttaacaaaggagcgcaaatctaacggaagaagccaaaagaaaggaaaaagccaaatcggtaaagcaaattttaggataaaactatttaaatttttgttttttttctagagcaagttaaaattttaaatcttttttagcgaaataaaaaaaaatttttcagaaaaaataaatttatataatttaattttatttttaaataaagttaaaattagatatacggaatattttcagaaagtaaaattttcagacggaacaaaaatg

SEQ ID NO: 101530 - DNA, 104 bp, Heterodera glycines
ttaaatttaaaaaatatattttatattttttaaataaatatttatattttaataaaaaaaaacaatttcagaaaattgataataaataaacaaataaataaatg

SEQ ID NO: 101531 - DNA, 1003 bp, Heterodera glycines
gtgaaattgacaggtcttccgacaccaaaaattatttaatttggcattaaatccaacagaagatttataatattatgggtgaattgtttgttggcaaatcacattaaaagtaatttcctctgcttttaaagcagggttcgatctcaaaattttgaaatccccatttcagccataaaaaatcctcatttgccactaaaatacctcaaaaaacctcatttggaattaagttctcattttttaaaacctcataaaattgcgaacaaaatcagtcaactgtcatatttttcgtttgaaacaatcacggcgcctatcagcgccgccggacctatttttttttttaaaaattggcccaagaatcgcaaaatttgtaagttttggtaaaaatttataacaatctcatttaaaacgaccaaacaaataaaaaattcgatttttattgttttaataaattgacaattctcttaaattttttgcttttaattgcttttttgtgcgtggtttttccaaaaaaaaactttttgggaacgttgggagggcattgccgataggcgttgccggaaaaaatttgagattttgagtgcgatttgttaacagattttgtcaaaaaatgatttgactgagggtttttcgaaaaaatttttaagatttgaagaaaagttcgaacattttgccaaatatacctaatttttcaaaaaatcatgcgtttttgtcactttttttttatcaaaaaaccacaaaaatccgcaaatcctcattttaaaagcatttttcagatgcaaataacagaagtttaatggaatttcacattggcacaaatcggtctctgaatgtcacatttcccgacgtaaaaaatggaaaaatattaatataaaatacataatatttatttttttattttaaacattattttaaaatataattatttttaataatattttaattaaaaaaggtgtcgccttatgaccaaaatttcgcaacattgccaaatggaagtttcacaatg

SEQ ID NO: 101532 - DNA, 348 bp, Heterodera glycines
ttcttccgatgggctcagctgttaccaaggcttggccaatctcagcgcgccggtgagcggttcggccactcaatgcgttggcgtttcgttggcatgcgtcaaaacggtggacttcaacagtggccaagtgacacgttcatgcttggctacaaattgcaccgtacaagccactcagggacaggtgagaaaaagtgatcggaaaggaagtgatggcaatatcaaatggaaagtgatctgctgatagtcgtagtcatgccaatttgaaataatttgaaaaacggaatcttatgacaaactctaaagaaaacattcgatttgatcaaagattccccccccctcccaaagatg

SEQ ID NO: 101533 - DNA, 737 bp, Heterodera glycines
ttcctattttttggcgtattttaaaaagcatttttttcgtttgaataattatttttaaggtcatctggaacttggcacttttgcttttgctccttttcgccttggtaaaatgtttgggctgttttgaaagtagaaatttccaatactccaccagaccgtggcatgaaattaactacgcgctacgagaccgaaaccaaaaaacccacgaatttatggaccccgaaacagagactttattcttagaataaaaatattatttttacagcaatttttaaggcttagatttttaggaaaccagcctgttttttacggaaatgaaatacaaatatgtgacttttgcttttttaaatgcctaaaaatttagtaatattttaaaactgaaaaaatttatcattttcccgttttaaccgaaaactcaagcttcatagtttgtttgtaaaaaatcttagtcgagaccaaatgcttgagaaagttttccgagtctcaaaaaccaaaaatttcttgatttgaggatagtgaacagctctaggaaaattaatgccatgaaattttgccctaaaatctcaatgcccttattttggattccgaaatggataccatacagtacattttaatatggtaccttttttaatatcgaattgtttgtgtcaccggcacggttttgtgttcaattggatctgaccgttcaaacattgctacacggcaaccagcagggcagcaagcacgcttcactgatg

SEQ ID NO: 101534 - DNA, 368 bp, Heterodera glycines
cggccttcatttgttatcggaaatttttacatgcccttgaaaaataaacgggatttcagcttcgagtacccgaggaaaatattaaaaaatttccattataacgggtgccattctgcaaatcagtaactaactttttaaacggcaccttaaaatggtttcgttttggtaaacatttgaccccctccaccctcctctcagcggtggttttagtctctgctcggagggcaaagtgcgcaaaagtgggcgtcataatcattcactcattcatttgccctttcatttcgccctccacccaaaacagcgacaaattcttcgccaaattcctcccaaaattacaaaatttatgccaaaaattcaattcaaaaatg

SEQ ID NO: 101535 - DNA, 481 bp, Heterodera glycines
tttggggattttaataaaacaaaaaatataaaaaaatttaatttttgtccaaaactagacaaatttagtctgctttagtcagagttaattccattgcattgcaagaaaaacaaaataatattttttaaaataactctgtttccggactgagatttgctttgcaagtgagtcaaaaaaaaataatttgttaaaaaatgaatttaaagcaccgcacaaagtcacgcgaaagataagaaacagaaaagatagtctcggcattaaacagcaaagccatctgaaatgtccttgacgagtgtctgttaccattggcccttgggaaaggcgttttaaaaaaaatttgtccaattttggacataaaattaaattttttaatattttttgttttattaaaatccccaaatgtcgggttccctaagtgtcggatccccaaatgacgttcgatccgcaaatgtcgggtccctaaaagtcgggtccccaaatg

SEQ ID NO: 101536 - DNA, 229 bp, Heterodera glycines
tctccaccacacttacgagttgtattatcgttgcatttgcaattcctcctagcgtttcctgtcccgggatgaattttcgcaacacattcagcaaaacttgttcaatttggtaattttttcatgcgccgagaaaaactatcaaatcgccgattcttatacctaaaaaaaaaaaatttttatcaaaaaatcagccatcaatggcacaggcatttgccaaaaccggaaaatg

SEQ ID NO: 101537 - DNA, 242 bp, Heterodera glycines
aaaagtttccaaaaagaaatgcgaaatttttcaaaaaaataggctcagatttcgctcttaccaatgagagttcggacaggactgtatgtgaatttccagggtcccagtctgggttctgttcttgtgtttttctgaaaactgtaactgaacccggagacctgttaaaattttgttgttgttttttgtgccaggccaacggtttcctcggtgcgcacggactgtccgggcacatccccgccatg

SEQ ID NO: 101538 - DNA, 213 bp, Heterodera glycines
ttttacgcccttaataaaattaagtggtgattctttccacaaatcagcccttgggcaggtggcgtttatgaacgccttgtccaattgtgcaaaaattgcttcaaaaggactttggggagaaaagtcctcagttatgatcaactcataacttttgtggctgaagttgaagccacattaaaccatcgccctattacttctgtgtcagaagggatg

SEQ ID NO: 101539 - DNA, 342 bp, Heterodera glycines
taataggccccaaatgtcggagggagggatcggataatttgcccaaatctcgggggtggggtcggataataggcccaaaaatcgggggtatgttcggatgggtcggataataggcccaaaaatttcgggtggctcgggatcgggaggtaaccttaaataatttatgcttcatttatctcgaaacttccaataggctccacctcttctggcggtggatgttgctgcgactgttgctgttgcggtggtaacaacaacaacaataacaataatagcgatgccgcaactttggctgcacttgccgccctttcctcgtcgtcatcgtccggcgcgccaagcacaatg

SEQ ID NO: 101540 - DNA, 258 bp, Heterodera glycines
ctttgatttgtaacttttcatcataataaagtctaatctatcacatattcatgattaggagcatattcatgatcaggagaccccccgaaaatgtaaaatttctccaaaaaatacaagtcaaacgagtcatttctatgttatttcctcgtcccacctaaactgaaaaatgcttcctactctgtttttcgtctaatattacaaaatttttaataattttttgctttgtttagggctcgagtgtttgtgggcaacataatg

SEQ ID NO: 101541 - DNA, 128 bp, Heterodera glycines
tgtaattcattttttgaaattaaattataagaaaatatttaaaacgcaaccaaattttaattgcataattagtcaacatgattttttcaatgtaaatcacatatgtacttatttttagtgaatttatg

SEQ ID NO: 101542 - DNA, 1003 bp, Heterodera glycines
gtaaaattttctgagggcaccaactcggcattaaacacaaattgcggacgaattccatccacaatttgacgggagaaagtgttcaacaacggcgacaccagcaatggtcattcattttttatataatttttatttttaaatttacataatttactcacattgaaataactaaaaaattttaatattgttcaaataattactgcatcatatgcttcaagtgactaagaaattgcctgaagtgataaacggcaacaatttgagtttaaaattgagatgaattcgtaattttaaaaaaatttatttgatgaagattttcggccaattaaatcgattttttagatgattataattttcctccttttttccatttttcaaatgtttttaaatttgctaaaaattttttttatatttattttcaacgggtgaagacttacttttattatttaaaaatttgattttttaaaattaagtttctcaaatattacattttgttgctgttacaggctttctcttcgtgttcgctcaacacatatataaaatttaacggcttggcacacaaaatagagagtgctatttccaagattcccggtctaaattcaaaaaattcctcggttaatggtacttaatctcaatttctgtacaaattctcgagtctcgtgaaacattttttttggcaaataattagtttacttaaaccttttttaaaaaaaataaccggttaatgtatcttttaatttattaatttttccattagttctgttttcacttttatctgttaaatgatattttatatatttttatgaatccttattcttatcattcttttctgtgcaacaaaactgactttccaaataaattttttgcttttttaatttatgttaatattcaatttcctaaaggattgcatttaaatttaactttaacttgcaaataaatatttgcatttctaatattaaagcaaacttatttaaccctccccttcagattgttttccctttgaatg

SEQ ID NO: 101543 - DNA, 161 bp, Heterodera glycines
  unsure (1)..(161): unsure at all n locations
tttatgaganataatgttgggctgtgaaaaatttaattaaaaaatataaatttccgagaaattaatcttttttttttaaaaaattcatccttttctgttaagcttactaatatgatcagctaaatgggaaaacaatcttttaaacattaattttcagtatg

SEQ ID NO: 101544 - DNA, 185 bp, Heterodera glycines
catttttttcccgtgaacagggactcgggcccaattttttcggatctcgaatttcgggaaaattttcggtatggaccgcattaaataatatttggccgagctcataaaatattaaaaaacaaaaataaacaaataaatttaatttgctttcatttaaaattatttctagacaaatactaaacatg

SEQ ID NO: 101545 - DNA, 69 bp, Heterodera glycines
ttttacttttttttatgtaattttctttttatttatagtttttttttttattttcacagattttaaatg

SEQ ID NO: 101546 - DNA, 425 bp, Heterodera glycines
ttttcttgcataaaaaatgccaaatacttgctatactttgctggcttttgcattaattaatgtccatagaatatttggcgattttgccgaccaaatccgtcatggaaagcgatagagccgaatcatttgctgatgaatgcgcacgagatgatggacttgttgcggggcgagtttaaaaaaatgggaaacagacaaaagcaaaagacatttgtggcacggattaaaaaatgccaacaaaattaaaagaaaaaacgcggcgatttaattcatttgttataaaaaatatactttttcaaaaatcaaaaatattaattagttttttaaatatagaaatcggacaaaaattctttctccttcatttattgggcacttatatgataagcaaagtgtgcagttacgacactttattagcaggtgccgtaatg

SEQ ID NO: 101547 - DNA, 321 bp, Heterodera glycines
agcgcttgatgccgaaacgattccgacccatttttgttaggttttcgtgtggcaaaattagccaaaaaaaatttttccacatttggcgttgcgcttttgcctctgtttaggtgtcattcaaaaacatttaattgcattttttatttgattaaaacaaaacttttttatgtatgtataaacttgaacaattgctaaaacttaatcattcactgtaaattaattaattatccaatttgttaaattgtttatctatgtaaattcttccatttttttttacaaattgatttaaaatttagcattttccattaaaaaaataaaatg

SEQ ID NO: 101548 - DNA, 95 bp, Heterodera glycines
agtgttgaaaaattctgtcgttgctactcttctcggtcctctcatctactctcgtcgcattaataatcattgtaaaaatacttcccaaataaatg

SEQ ID NO: 101549 - DNA, 155 bp, Heterodera glycines
gctaaatcaattcccttttatacaacgcattcattcaacattttgaaatttctcgaaatttatacaatttattgctgtagaattgtctataaaagagaaggaattatcacacacaacgcattttattttacaacattcaccaaaaaacgaaaatg

SEQ ID NO: 101550 - DNA, 474 bp, Heterodera glycines
  unsure (1)..(474): unsure at all n locations
tttcagagcancgttctaaaaaatatttatgaattaattttgctaaataataaataagtaatgaaaaagtcagaatttcgaaaaattttaaaaacaacaagcgttggcattttttcaggttaagttagtcctttacaatggagaaggcctgcaaaatttggagagattatatcgattttagtgcgctaggttcgatgaaactttttaaaatataagcctaaactttttggcctgtttaaaaaggaattaaaaatttttaaaatatttattcatctcccttttgatagaaaaagcatcagagagccttatttaacttttaattaacatttggtgcgtttcagagcactttctgaaaaaatacttatgaattaattttgcaaaaaataaataagtaatgaaaaagtcagaatttcgaaaaattttaaaaacaacaagcgttggcattttttcaggttaagttagtcctttacaatg

SEQ ID NO: 101551 - DNA, 374 bp, Heterodera glycines
caaattcaaaataaaacaattaatttaatcaattaaatcggattacaaatttaatttatcaataataatctgtgataatgcaaaggatgtgatgacatgatgtacaatttatcaaaattgcattgaatttaattcgcgaattttggctaattaaaaatgttccaactcattattttctgttaaggtgtaatcagacattaattatattaaattgttttaaattttaatgatttttcatgctttaagcagtgttatgtccaaaccaatccttaaaaatgttcttaccaacaaaaaaacaacacaaaaggtgatttttatatgagataattaataaaatagctaattattcattatattttcacagcaaaagcatg

SEQ ID NO: 101552 - DNA, 119 bp, Heterodera glycines
  unsure (1)..(119): unsure at all n locations
accgaacgaaccagtcatnttctgaagtcaagcaaaattcaaatttnaacccttaggcattgcgtgccctcgaggaagtgccacaaacggagataacgcncaaaatatgtttcacaatg

SEQ ID NO: 101553 - DNA, 294 bp, Heterodera glycines
  unsure (1)..(294): unsure at all n locations
aaatgaaggtataaaaaccgaacattacagaataatgagcaaatacntgtagaatttcacccttataaagctttttttttggtggaagattctatagacaaatgtcgtaatgcaccaatctcaaatgagtatataagataaaaaaaaatagacaaaaacagcattattatacataataatactccaatccaaacgagctattacgtcctgaattttaatgttgttgattttctgtgttccatttttaattaaaagctattaatattaagcatataattcgttttgtaaattatg

SEQ ID NO: 101554 - DNA, 73 bp, Heterodera glycines
agcattgctggcacttctctctgcacgcccaactaaccactggcgatggcacttccgccgaggcttggcaatg

SEQ ID NO: 101555 - DNA, 69 bp, Heterodera glycines
ggtttaaaaaatggattaaaaaaaaaattttttttttttaaacagtaaattgaaattcgattaggcatg

SEQ ID NO: 101556 - DNA, 825 bp, Heterodera glycines
agttggaaaaactggcgcatcacaatggcagcgaacccatgagctgacaaccgtcgcagcagatgccgtcgaggctttggccgaacatcttcgcgactacaatgttgccgtgtccattctcctggtcacaattgccgccggacttgccgagatgaacaatcactacaagggaaacttcaaagggaacagaaagtgaattctcggccgccggagtgtcgctaatttcatccttagcgacgaaaatttaaaattttatgattcatctgtttaaaataattttacgccaaattcataacctttgtgattttaagcctttttattagtcagcattgtttacatttaaatttctgtcagcccgcctatgtaaaattgccgtatttaaaccattgcaaaatcaacatttcttatcgttcaaatcgttcattaataaatatatttgttcgatcaaaattcactaataaagtgtgaaatataattgaagtattgggaaatccaataaaattaatttaatttaaataaaataaatatttaaattaattcttattgactatctgaaaagagagtcaataaaaataatcaaaatttaaaataaaaaatattttttcttcaaaacataaaattgctaacattttttcctcggcatccgccggaaatgcaattttgtttccagccaaatagtgaagaagccaaatgtttactttcatttaatgaaatatttaatatataaagacaatcattttgtatattgaaaattattataatttttttaattgaaaaataaattacgtttttttttaaatttgttgctttttgagctgtataatg

SEQ ID NO: 101557 - DNA, 496 bp, Heterodera glycines
tctgaaattacgaagatataacattggatttggttttcaggttatatacaaaactatattttttgtcccaggcccgtaaacttaaaaaaatttcgggaggagcagttggaacttttttttctctttcggtcaaaaattgtttgtcaaatgtaagtttcctgaatttttgtctaccgtgggaaaaacgggaaattttagtcatttttgcaaaaatttgaaaattttgaggctaattgtaagccttggcaaaaaataaaaggaaatttggatccggcgtagggaaaatttggggtcatatggtcaaatttgtttttgtataaaagagcactgttttcaaaaaaataaaacctggaaaaactggtgttgataagcggcatagaatgccgccgcgctttggttgttaaacatttgctgttgctgctgggtgtggtgattgaatgtcggagcgcgtgccatgcccgccgcagctgccgcatttgagccgggatgaagcatg

SEQ ID NO: 101558 - DNA, 804 bp, Heterodera glycines
tgttaggggtttttcgggcgcttcgcgcccgttttttaaattttgttgggcttggacgggcgcttcgcgcccgtttctaatttttaaaaaattgacagtgattaaaagaggtacaaaagtaatcagaagaggtacaactgtgattttaagagctacaacagtgatcagaagaggtactacagagattagaagaggtacaaaagcgattagaaaaggtacaacagtgattaaaagagagaggtacaacaattcgcggccttagtcgggcgcttcgcgcccgtttttcaattttattggccttggacgggcgcttagcgcccgttttttaaattttgttggttcagatgggcgcttcgctccctttttaaatttgttaaactcatacgggcgcttcgcgcccgttttttagcttgttatgccgttcgcggcctcagtcgggcgcttcgcgcccgtttttcaatttagttgggccttttcgcccgcttcgcagcctcagacgggcgcttcgcgcccgttttttaaacttgttgagatcgcacgtgcgcttcgcgcccgtttttcatattttgttttgctttgacgggcgcttcgcgcccgttttttaaatttgttaagctcagacgggcgcttcgcgcccgtttttaaatttagttgggccttttcggccgctttgcggcctcagacgggcgcttcgcgcccgttttttaaatttgttgagatcggacgggcgcctcgcgcccgttacaacggtgttagaagaggttcaatagtgatcagaagaggtacaacagtgatcagaagatg

SEQ ID NO: 101559 - DNA, 564 bp, Heterodera glycines
acattactcacatagtatatacataggtagattaaaatattaaacttcgtgagtatcttttgtttttttttatattttatgttcatgtgaagttattttttggagaatgtaaagcgagagtcaatttatgaaattattgtgcagaattttgtgctggtaataataataaagataattaccgaaatttctcattttaattcaatttttaaataaaatggggatatgaaaagttataaaatcagttacaaaaatattttactactaatgagcatcagagcagcaaaacaattaaaaaaaattcaaatgaaagatgaaaattggagatttaaagtttatttacattgaatgaatatgtatgtaaaaaaaaatgaaaataataaataaatgccttttgaaacacttcgcccggggggggggaatcaaatgggaaaaagggaagtgcaaaacattgaccaaaagacccccggggcccgtaccaaagaacgaggtaaagttaccgggtaaacctacccgtgtaacacctggtaaacctacccgcagctgcgggttaacccatactaaatg

SEQ ID NO: 101560 - DNA, 1003 bp, Heterodera glycines
tcattgctgaagtttttgttcggcataaaggacattttaagtcgaacggaggaaagggctggcgaagagcacaattcgaattctgacagcaccagtaccaagttgtaacatctttaattcaatcacagttacctatctacgctttgaattcaatttcgcttgaactacccgtgactctgtccgtgtcacaccatgaacacttcttcaatgtcgaagtgttggtctgtgcacagcttggacatgtccaattcacagacttgggttgaggatgctcgcacaaaacaacgggagcatggtaaaagtgtacattttgttcactttttggtacgattgaatttgcaacaaaatcaatggcattgtcaatcttttccaatgccgagttgagggaaatatgtggtactaaaaaactttttaaagctttactcttagctaacaataaaaataaacaaacatttaattttgtgaagaaattttgatcgcccatttactgaaggacattcgaattggcacgctctacactttaagtcgttaattctattaataagagtacatcgctggcaactccaattcctaactccatccattctcgaaaaaggctgtgaaaataaactgtgaaattaattgaaattcacatatcattgcaaaaacaaaagcttttacaattagtgtctgcgtcggcggagattaaaagaaactttttggcgtgactttttcttttgcttggataattcattgcaacgattgttttcctttttctctatttcttacatttctacggcttttcctcttcttctttttcgtatctcttaattttccttccgcattgacattggcattattcgcgtcgcgccttttattcgttttggtcgcgtgccgtgccttaatgttacttttcgttccttaattaattaattttgttatttttatttcctcctttttgtgctttcggttttgtcactttagtttattttctatttaggtacaatatacctaattcagtatg

SEQ ID NO: 101561 - DNA, 376 bp, Heterodera glycines
tttttaggttcgcaaaatttttttttgtatattccctcaaaatacgagaaattttccagttttttcggtggatccctcgcaaataagaaaatttctcaagaaattttgtactttatcaaaatgacacttcaaatttatggcagtaattttttggttttgcattttgatggaatttcaatttttttccttcgaattctgaaaaaaaaaattcgtcactggattaaaaaaaattttccgtttctctgcaggtcgaacagtgaggaggaggcgatcgatttttgtcgtcgctacggggagtgcggtgtgctgtttcggacgtcaggtggcagaggatttttcaaaaattaaaaaaaaattattattttttgtagacatg

SEQ ID NO: 101562 - DNA, 242 bp, Heterodera glycines
agtgggtaggaaaaattgaaaaatgcgaaagaattaaaaatttgctaatttttaactattttgtcggtttacattttccagttaaataaaatacataataaactgtttagagtggtttttttgaatgattaaactcaatctcgtgaatttttccgtcttgaatttcgctattatttgcatttttttgcaaatattttcctacactaaaatttttacaaaaattttttcgtttatttagaatg

SEQ ID NO: 101563 - DNA, 498 bp, Heterodera glycines
tttttcattaaatgaaaaaatcatttaatttataaaaaaagggatggtgggcccgccggtgccgatatgcgccgccttgggaaaaatagaaattttattaatgtttaaacagaatgttcgtgcttattcgctaaacgatagccgctgaataaattaagaaattataaaaaataaaaattaacgactcattcataacagtgataaattaggcattaaatttatatgtttcatttaattgaacaaaattttcccataaaataaaataaaattgtttggtttttctccaaaaaacttaaattatgttttcttcaaaattattcacctgctaaaagatttttttaaatttttttgataactcttatccaatccgaaccaataagacttcatccaatcacagataaataatttgataatgcaaatgcaacagctacaacaacagtatcaagcaacaaatgatcaaatgattcaatataatttgttacaacagtatacccaatg

SEQ ID NO: 101564 - DNA, 133 bp, Heterodera glycines
agatcctcttccaatctttgtaactcctctatcaaacaatttataaacgcactttgaacatgcgctatgtgtatttgctacgaataacggatatataataataaacatttaaaattttacagtctttcaaatg

SEQ ID NO: 101565 - DNA, 285 bp, Heterodera glycines
ctaaaaatgggcaaaatttactcatttatcaacaaaatatgtcttttccaatcgctttccaaaattgttccaccggcggcactccccatgttccacaaaatttttgaaaaaagtgtttcaatctcccattgtattggcctgcgagacatcccttgaatatgtttggattttttttttgtctaagaaataccagttttgaaggtctaagggaattgaagggacccctcttggggaacaccaaaaattaccgttacaattttccattttttttgctggtgggtaatg

SEQ ID NO: 101566 - DNA, 52 bp, Heterodera glycines
gtgtgccttctgcgcaattctgatggccgtcttttggacctgtgaagtgatg

SEQ ID NO: 101567 - DNA, 130 bp, Heterodera glycines
aaaatttttcattcattttctttaccatgtttttaaaattaagtttagaatgtgtattttttaaatgaaaaaaaaaataattttggccatatttttgaataattttaattaaattcaattcaccaaaatg

SEQ ID NO: 101568 - DNA, 680 bp, Heterodera glycines
ttttaaaatctaataaaaatccataaattttttaaaaaatattattataatgataaatatgcagtgaaaaggagtatttatatgagcaatactcatcaaaaatacaattggtcatgaaaaatatatgagaaaaatacacaattatttgaataattgattaaaaaaaaagacaatatcaacccatcttgacctgatgagcagcgcactgccacccatgaagcacaagacgacagggcacctaaacggctcaggaaattagatatgtcaaaagcatgacctcaaggtctaaaagacaaattaacaaaattttgctgccaggataaacggagctctgtaggtcgaactaccgccctggttaacagcaaaattgaaaataaaaattatttaaaacctagataagagaataaggaacaaatgaaaaattctatgtctttacgcgcttttaaagctgttgtctccgcccatcaatcgataattttcggcgaaacaatgcgcatttccctcgggaattgcatatggtgacagatgtttgtaatcaatcgataattttcgacaccttttcaaaatttccttaatggtgtagggcattgccttccaatatcatccctttctccgtctagaaccaatccctaatagcattcattcgttcactttcatttcctatacattaaaaaaaaatg

SEQ ID NO: 101569 - DNA, 213 bp, Heterodera glycines
tttcttccgtcagttaccaaattcatttttctgttcctgcgccgtcaatgccaatggtgccatttgaattggtgaacgaatggacaaaggaaaagctgacattggccaaaacaaatgaatgggacatcgattggataatgaaacgatgcaaatttggggagacggcggcggtttattgggaagacggaaattgggacaacaattgtaacaatg

SEQ ID NO: 101570 - DNA, 376 bp, Heterodera glycines
ttatccttcttaattgcgtcaaatttcttacagttagttattccatgtacgtcgttaaaataagcaattacattttatggcaaacaaaaattattataaaaaaatattatccaaaaatctaaaaaatatgcaaacagcataaatagtcaataaatttatcaatcaaaaatggtgaatatatttttaatgtttcaatattttattatacccatgaaaaattcatccactaaaatttgcaatttttttcctatttttgctctacaattaggcttttttacgattagaacatatatgtacatatttaaattatttataaatttattattttttcttttaataagaattttggagtttttttcatacagttacaggaatg

SEQ ID NO: 101571 - DNA, 608 bp, Heterodera glycines
  unsure (1)..(608): unsure at all n locations
aagcggtggttttgttcaccaccaccaccgcccncaaagaatgaaagaacgcctcaaaaatgcgttcgttttgtcgtcgtccgtttttgttcgccaaagtgacacaaggaaatacaaaaatgtgcaaaaaaaaaaggaaaagatttttaattaaatattattattattattgttagtgatttgattttggggaagggaagtggcgtaaaatttggaaaaaattgggtgggtagaggagtgagttaaaaaaaattaaaataagggttactaaaatgagagtatatatttttttaaatttgattgctaatggtatgggatttttaggaaaaaagaggcaatagggaattttgagaaatttaaagcgagatgctaaaagatcgtaattgttaagcattaatgatccaggatttgagacaaagactcttgagtattaagacaatgtgactaatgagtgaaaaatccaaaatcgaggaccctcattattatgaaaatgaaatttcatcgggacggggtaaaaaaaaaatcaaaaatttacaattggaggctgtttgtaatataaatttagcaaaaaataacgaaaatatttttaaaaatttatttttaagatg

SEQ ID NO: 101572 - DNA, 399 bp, Heterodera glycines
tcgatttttcacaaaaattgggtgttgattatgcagttgtagtcatatattttatttgcaaaaactggtctgttactattatgtgaaaaataattttttaaggttaaggaaccttaatcattttgtacttcactgtgttccatggcctggggacatccaaaaaaatcgtgaaaatatttcgggatttattgatgacgtgttagaactttatgccatcaaaaattgccgaatttattatgtaactgatgaaggcagcaatttatctcatttgggtgatcgagaaagtcatcatttttgccttgcgcatatcatttctacaatttgtcggcggatcactgaaccttatgtcaatgcgaatttaacaaacgaaaaaaagcagattgttaacttgtggaaatg

SEQ ID NO: 101573 - DNA, 1003 bp, Heterodera glycines
cgaacagcatttgttgtgttcaatgaactgcaacacaacatgctatgcactttaccactataattcgtcaatcactgagtatggagaagaacaattacgttgggcctgcgaacaaataatcaaaaattttggagacaaatttagtcaatcatctaatttttggctaacaattggcttaattgtccttttccttttggcaatattagtctgcataaaaatcctcagatgttgttgctgtattgcaagtgtgaccgctccgttttcaccatcgtacaccctacagtttttggctacaaaatttgaaatggaaaattgatttcctaattttggtaaatttttccgttggatttaaggattggattttcacatttcaattccaattttttatttttcaaattctctctccgctccaccgctcgctgagggaacactttgttgaattaatggctgatgggtgcctctttcaggtccggcccatccgcgcattcaaagaaaaagcaattaaatgttgcccttttcgctcttcccaccggtttttccctctctctcatcgctgatgcacaaattgtcgctttttgaacaccacaacacaattttcaatttttgttccctctttccttcccattcccactcaaataatttaactcaaaaagctagcgacggccttgtgaatcatcaacggtcacatcttcgctccttagacggagcaaacgcccatcgcctgtcatcttatttttgccgccgacattacacattttacattttcctccgactggcaaataggccactcctccgatccaatcacatataaaccttacaacatacatattttctcgtttcttattcagttcaccattttctgtatccctttccccacttttttacatttcacaaatccttccttcaactaattctttttatattttagctataacaaatcctaattccttttcccaaaaatgtccttcgaaaaagcctgcgggcaaatactgaaaatgaaatg

SEQ ID NO: 101574 - DNA, 53 bp, Heterodera glycines
ccccttttcagatgacccaaatcatgtttgagacgttcaacacgccggccatg

SEQ ID NO: 101575 - DNA, 105 bp, Heterodera glycines
ggttggcaagaagggaaataaaacctatttttaaaatcatttagagaagaaattaatgcattggaaaactcaattgggcaggacgaggaagaaatagtgcagatg

SEQ ID NO: 101576 - DNA, 563 bp, Heterodera glycines
atgagaaaaaagaatgcatttgttaataaatttttattgattgatcgttttatgtaaagggtttgagaaaattccctgattcctaaaaatttaagtgacagaattaagttttagcaaaatgttaaacgacacagaaattaatcagaaagaaaataacgaaaaaataattggattggctttgattttagtcatttattcgttttcgtttttgtgtttctgtgccgttatcgttagagaatgccaccgtgtcttttttagctaacaatgccactgccccctgagctattgtttgaaataattgaagccttcccctcctcaaaattgtctacagtcttcttgagcaatcatctcctgtcgtcgtgggctcaaaagcgtctcagagggactttcaattcgctgatgtcacagaaacaagaatggaaaaatctgttaaaaatatctcgtttggtttttgaaagtcacaacggattaaatgtgtaataattggtttttagtttttagtggttttatgctattttattgttaattcttaacgcgtttttaattagttttcagcaaaaatg

SEQ ID NO: 101577 - DNA, 82 bp, Heterodera glycines
tgaaaaattaagaggctattaaaagaataatattttacttttttggcttatttatattttttaggtgtttttctgtaaaatg

SEQ ID NO: 101578 - DNA, 1003 bp, Heterodera glycines
ttaaaattaaattttgaacaaaagaaaattaatttacggcccctgtcgtgcagataaaggtgtaatgaataattctgttttttatgattcatattagaaatactattttttaaataattttacactcataactaatggtttttgcaattttttaagcaaataagtctttgcagtagccgactctcttcgccaacaaaatctgcataatttttgtgcggttgccttttcacttttttgcgttttttaattcaattgctgttgaacatctgcagttgtttgtcgctttgttgcaatgctctctgaattgttctgcataaaaccggcacaaaactgaactttgacttgaaaacatttatacaattaaccactaatttcaattaattttataaagaaagatttttgtaaattttttaaatatttttatactcacaataaaaaatatttgaacttttttttactctaacaataagcagaaatttgatttgcatttacgatgtgaggaaaatgtaaattcaactagcaacattaacgcaaaaatgaaatgtgaatcgaacgatcctttggttcacacataaattattgcggccacagagattttgtcgctgttaggcaaagatatttgagcaatatttatttttctttcaaatataattaaatattaaaaaatatgatataattaatttccatttttgaatatttttagcctgtttttttgtataaatttcgccgtttttcaagaatcaaaaattggcaataaagattttcaattagcgcactaaattgataaattaattaatttaaaggagattatccaaaaaattatgattttttttcttgtaacttttttgaaatttactggctaaaaagaataattaattttattgcttttaaacatacttgtgccaatttttggtcaaaaagggtgaaatggcaccttataaaattcgctggtaccctacccgttttaatttaaaaattatttccttattttagaaaaaaaatg

SEQ ID NO: 101579 - DNA, 1003 bp, Heterodera glycines
ggtcaccaattgagggagtgccggtcaaagcaagtatgccgagtgtgaaaagagcggcatcattctgcaatctgccctagtgtcaaaggaacatcttctgctcgttcaaagcaacagaagccctcgcccaggaacaaacagactttcggaaacgagcgcaactcaaggccattggtgtcatccgcggttgccaatgaggctgactcaatccctgagccgaaaactgttaacacaatcatggcaattgtctccccatccgttcctcatctcgtcatgctcatggccctccgagcaatttattaccaaatgtttatttttaattgtttaatattattttcaattaagtaaatattattttttaataaaatacttaatcagtttaattaactaagaaaacccattttcgatatatccgattgttaaaggtttgtagaatttcaaacaaattttttttttcaaaatatcgttgggctttaatttaaatcctcacttttattcctttctagaattcggaagtctttaatgcacagtccgttcttttacattcccaaatacagaatcatagtcaaaattatttttattcttattatttttcttttaattatgctccataagaatttaccaatttgtcattataattaattttctaatagtatttcattttgtgtccattttaacatattcgaaatttaaaatgcttttttttttgtctttttatccttttaaaattgattaaataattactaaaaatattgtaaattatatttatttcattataataaatgatcgatttgagttcataattattattttaaaggttattcgttatgcattcagttttttattaatgtttatttttgtatttattcatggctccaaattatttatttgattttaatttcggtgtaaaataaatgaaaacgtctttgattaaagtaactttgactaataacaatagaaactttttttacaaaaagaggaaggaaaaggggaacagcaaatg

SEQ ID NO: 101580 - DNA, 563 bp, Heterodera glycines
aaaaaaaaaaacgaaatgcaaaaaataaatggcattccgtcggaaaggcatctttggcacatatgttagcaaaaaataacgcctcccttcttccgttccactgcctgccccgccctcccgttctgcgcattctgatgattgattacaatactcttgaatacaatgaatttggcacttttttgtcgaaacgcggcatagtttaaagcgaacaaaaatgaatttttggattaaaaggttaattcaatatgatgattgattattatttaatgcttaaaaaatatttctttttatcataccgactttttaaaaatattttacaacttaaaataaaaattattcaaatgattgattattttttcgttttgcaaaaaaaatcctttaaagttgccgccaattttaaaaatttacaacttaaattaaaatgattgattatcgtatactataattatcctttgaactttccgacacaaattcttgcaattatttatcggaccaaaatacaaagtgtgaattttcattagattaggattccaacacgaaatggctgctcataacggaaaatg

SEQ ID NO: 101581 - DNA, 682 bp, Heterodera glycines
attttaatcactttgatattttttgaaaccttcacattttaacacatcgccagaaaatgttgcagtctgtcaaaaacggaaaaaaatttgtccgtgtcatttctcattgttcaaaaaagcacggagcacttgtgcacaatcttaatgaaagaagaaaccaataagaaccggaaaaggcctaataaataacaatcattttttgttataaaaattcgtgaaaacatttttgtggggttttcagggtcgcagatccaatttcgaatcccggaccagaattcgaacaagtcaattcaaaattttcactttcgttcctaatttgtaagtcacattttttcgctcttccttttcgtctgctcttcaatatacaaactttttccctttctctaatttatgtgtttggcaaattagttgtttcttctgtttttcattcatacgcaacaattgcttttttggttgtggcttttctgggtctctgatcacgactcggacattcactttggttttttcagagtccctgacagaagtcgaaaaaattgaaaattcaaaactttcaaaattctcatttaaatgtattttaatctgtacggaatgactatcttttgaccaattgttttttattttttgttcgttgactcaatgtttaattcccttctcgaaaattaagaaattattcaacaaaatg

SEQ ID NO: 101582 - DNA, 56 bp, Heterodera glycines
tgaattgagcaagagaagtgccttagtccttcccttcaaaagttggaatgaaaatg

SEQ ID NO: 101583 - DNA, 145 bp, Heterodera glycines
tttttcgattttttaacgaaaaccgttcgaccgaccctcttgtctggtctctaatcatcacttttcaacaagatttccatccgtagtctttctcaaactttcccctcccctcccctccgactctcgccgatttcttcatttgatg

SEQ ID NO: 101584 - DNA, 104 bp, Heterodera glycines
actgaacaaatgataattttaaagaaaatactgttccccaccgcgatgtcttctcgagaaatgcttcgccatgagtgaacaaaggcatgccatcctcggaaatg

SEQ ID NO: 101585 - DNA, 463 bp, Heterodera glycines
ttttttttttccccaattttccatgggttaaaaaaaagggcccttagttaatttggcgcttttttttcccaacggaaggcccaactcgcgcttttgatgtcacgcggaaaagttgagcgtgggaggatagtgccaatttagacccgggaatgttagaacccctcaaaaaggggtaacaaacctaaaaaattatttaaaaattgttacataacaaataaaattaattgaattttaacccacccagcccatgtgcccatcggtctttgaccgtaccattgaaattcccttaagacgaaaaatgccgggcacgcccagcaacaattggcacagcgtttgcacctcactcaaacactgttcagactaaagaagcttaaaggaaattactttgaaaaatgattgaattatcaaaattccactaacaattcgcaattctcaccacaattttcattttctcgagccaatg

SEQ ID NO: 101586 - DNA, 99 bp, Heterodera glycines
tttctgataaaaatatttggcaaacaaataaaaaggaatgaagagaaggcaaccagcggtcattcttatgattactcccttcattttcctaataaaatg

SEQ ID NO: 101587 - DNA, 124 bp, Heterodera glycines
tgattcaaatcaatcatttaaatagtcacatatttctaaaaaagggcattcattttcttttcttttttcttaaatttaatttgcattaaaatttaattttttttaattaataaaaaggtcaatg

SEQ ID NO: 101588 - DNA, 434 bp, Heterodera glycines
agttttgaagacttatttcttttagaaaagttctgttatatttttggctttttataaaaatttgctcccttatgaggtggttgctccccgacatttttttaatttctcagccatccccgacaaatttgtcgtgaattttcttcctgatctacgggttcggacaaacctcagtttaaatgagtttatttgaatcatgagaaataattttagttataaatttcataaaaattatttttgctttttaaatattatggaattaatttaaaattagttaaaaacataaaatttgaaaaaaaactcattatatttatttaaattaatgaattttttaaaatcatttaatataagtaacatcaatatattgatttttaaaaggtcttttaaaattacttaaaaaattattgatataaaagtttcagaccagccaaagtatg

SEQ ID NO: 101589 - DNA, 1003 bp, Heterodera glycines
taacttaatacaaacaaaaattatttaagataacattatcaaaaaaagcataaaacacggtcacgtcaaaatcacttaccgatgccatacgactggtcattaaaaaaaaaattggcaaaatacagaatttaatattttgaaaaacagaataatctaatcgaaaaaagaataaaaaatagagaaaattgaactaaaattaacaaaatcatgaatttttgattaaaacacgaaaataaaaattgcaaaaattaaaatttattactgaaaaattctaaatttctgaatcagtaacaaaatttaatcactcaaaaaaattttcggaatcattttgtttgctatgccttcttatagaaaactaatgaaaaaagataaaataatttttagaatgctaataaattttcaatataaaacaatatagataaacaaaaatacttattggaaattttcaaacaaaaacatttcattatatttgaattaactcatcatcattattaatctcatcaccattattattattattattattattaattaaaaatctaaatatactatgtgactgcgtcattctttaaaaaagagattcaaattaacgcataaaaacattatgccaaagaatagtgagctgccttaattagagagtggccaatgttttcgtaacattttgttgttgtttattgattctctcttttgcatttttttgttgtttattgattctttcttttgaaacgtatgttcaaatatttatcactttgtatggccattgttttatttatttatttatctaaatagttcttttataattcgacggaattctttcatttctaaattgctaaaaaatttatattccagttttttactagattataaatttgtatgttgttttttaatttagtattcaaacctaaggtttttttaattcttactcttttttcattgttttaacatttcattttaaattttttgttgtaacataattagtttttttttgcgttcagataaaatg

SEQ ID NO: 101590 - DNA, 57 bp, Heterodera glycines
  unsure (1)..(57): unsure at all n locations
aaaacaaaattntcattagaatttgttgcgttcaaaattcgtaattgttgcgccatg

SEQ ID NO: 101591 - DNA, 610 bp, Heterodera glycines
tttttagcacacttcttaaaactgtgaaaatgtttgcctgcttaattttctgatcattgacccgtcccaattcatcggccaattaattgtgttgtgtcccccgccattaatgagtcacttacaccaataatgatcgtagtttgcccaattaaaaaagtggcacactcaatcgacacattttccttttccaatgttttctttccccaaaaatgcgagctaatataaacattattaactttttgtttattttcactctttaaaattattaatggccatccaaatgaaatagtaaacacaaaaatttctaattgtttaaaatgacaaaatcattttgcatcagacatttggattgggattaaagaaggaatcccgaactctgaaaatggccgattcctctcctaacattttttgttcctgaaaattttacggttttcttaattaatttcattaaaaactgcaaaaacggtgttccacaggaaacacccgcgggcctttgccaatagtttttttttccattaattagctttaaaatgagaggtttttggtgaaatttagcttgattttgaaaataatttccaaattgctttgcctaattgccaaaatcgacatg

SEQ ID NO: 101592 - DNA, 1003 bp, Heterodera glycines
ttttcagcatttttccggtttttcagttttttttttcgttttagcccctccctcctatgcaaattctatatatttatatttattttcatatttattatgtatgtgttctcttttggcttattctataaaattattaaaaatcccaaattttcgtattttcacattttctttccgccaatggtttgacacctagcaaaaaaattttaatggcttaaaaattttcataaaccaaaagagcatagcgttttcttatcatatatcatatacctaagtgataacagaagtataaatggaatgataatattaaaaaatagaaaatttcgaaaatttaatttaaatttttctctcctttttatgcctctgttttctgttcaaacaattagtggtggaaaaacaattcttgagaatatttctcatttaaatttcatcaaaaaacgctgtttaccaaataaagaaaaaacaataaattgtgcgcaatttaaaatttccttttgaaattaagtttttgttataatgaaaatttgaatttgaaataaaacaaaatcaaaaattcatatttttaatttctaaaaatattttttaaatttatttacaataattaattttctaaaaagcattttcaaaacgatcagctgtgcacaaactgaattccatcgtcaaatcggcggagtgcactcgccgacggacatttgccgtaattaaaatttaatttaaaataaaaaatagaacttttttaaattaatgaacttcaattaaaaaaacgaaccaaattttgctgttttttgtaaatatttctttttttcatttcactattcaaatcttttagcaagttcagccaagtgtttaataaatttctcaaaaatcatacaaatttctgtgattggcaaataaaaggtcaacaaaaaaatgtgtccacaaaatttgaattaaatgttttttttgaattttcaaataaatttattttttcatttttccaggcaatttttgttgcgattttctgatg

SEQ ID NO: 101593 - DNA, 94 bp, Heterodera glycines; identical to SEQ ID NO: 97954

SEQ ID NO: 101594 - DNA, 64 bp, Heterodera glycines
aacactcaaaaaatgtattaaaaaattgttccgaaaaagtaaataaattaaattaatagaaatg

SEQ ID NO: 101595 - DNA, 461 bp, Heterodera glycines
cctatttttaatacaataagtttgttgctcagttcaatgactttcatcatttatctgcttcttggaattgcagtacatataaaagcttcaggtaacctcaagaatgatggaattaggggtggtaaaaaatttacaaatatttttaataactttattcctacaaaaacaaaaaaaaagtcactaccataattcgaaaagaatttccattattaataattagtcctttttagtgactacgcactttattaattctcataaaaattgtttctaaattcataaaacgtttctctggaaaatggtcaaaaaattgatgttccatcctcaaaaaatttccggcattttttgtctcaatgcttaaattctttgtgggtattacaaaaccaaaacatattggtagcataatattcattaatccgttggcaaattttgaatatatttttgtattgtatcggtcctgaatg

SEQ ID NO: 101596 - DNA, 136 bp, Heterodera glycines
atttttaattttaataatataataataaataataattagggattggcctttgccgttacaattggccagaattaattacacaaagaaaggcgaatttctgagttggtcattggggcgcgaatggttcgacaaaatg

SEQ ID NO: 101597 - DNA, 872 bp, Heterodera glycines
  unsure (1)..(872): unsure at all n locations
atgctatttttaagcccctttcttcatagcatatcgcttcttcaaaatatgnnaatccatataatttacaaccctattaatttattttgatggctgattttaaaaatggatatgggcgaaatgtccccaatcgtctatgggaaataaatttttgtgtcgtcattgactttttgccgctttttcctttgctgaattggtccttcccctccattttgatttcaaaataaaattcgggtaattaataaaaaagtttctaagctatttttcgatttttgaaaaaataaaattaatgaattcatcaaaaagtataaaaatcagtagggatgcgatttttaggtaagaaaaatcccagaataggtacttaaataggtaaaaaaaatctcaaaataggtattaaataggtacaaaaattccaaaataggtaccaaaataggtaaataaaaatttttattaacgattttttagcggaaaaaagcaaacaaagaggtaaaattttggttctacatatctctttgtaaacgaaaatttaaatatattaatattttcttagataatattgacattttaaattaaaaattttgtcaatagaaaaaataaataaattttgggataaatttttgagaaatttttccaattcttagggtgcatttttgaaaaattttttggtcgattcttatgggtatattttttgattttattgcatttttgttaagaattttttgaaaatccttaaaataggtaaccaaaatgccgaaataggtataaaaataggtacctaggtaataggtagaaaaatcccaaaataggtaaaaataggtattataaaagtgggtgtagaagctccaaaccaagttaaaaactcgttttttatg

SEQ ID NO: 101598 - DNA, 100 bp, Heterodera glycines
tcttaaatttcaaaaaataaataaaattaaatttggcattaaaattttttaattttcccactttggcgttgtgtacatttgggcgccggcatttcaaatg

SEQ ID NO: 101599 - DNA, 63 bp, Heterodera glycines
cgtaagaaaaaatttttaaattttgaaatttatttgcctttctcaggtggccattgccctatg

SEQ ID NO: 101600 - DNA, 68 bp, Heterodera glycines
tatttttaatagacattttgtccacccaaatccacgtcatcggccttctttggctgttgaatacgatg

SEQ ID NO: 101601 - DNA, 194 bp, Heterodera glycines
ctgccaagcatccttcattttaccatctgcttaaacatttaaagaaaaaataataaaataaaattttgtgttaatatagcaataacttatttggaaaattttggctttatccaattatccatcatgaatcgcaataacaaaagcacgacttgaacgggtttaaacagcttttattgcgcttttaccgcagaatg

SEQ ID NO: 101602 - DNA, 306 bp, Heterodera glycines
attaggcaggaatgaaacagtttaattcatcagctaatctttgattgattggttagatggatcagaggataattacagattctaagaaaatgtttttttttattattattattatttgaacatttttttttgttgattgtttatgaaaaaaatgtttgcctttcagccaaaaaaaatttatttttcaaaaaagttgaataaataaaagcgaaaaattttattctaattaaggaaagacgtcaattttcatttcttttgtggtcaacgcgtttaatccagccaacatttgcttttgtttatcacatg

SEQ ID NO: 101603 - DNA, 695 bp, Heterodera glycines
atcaatgagggaacgggtcaaaatgcgggtgttcgatcatttctggagcaattttatcaggatggcactacaacaaatgattttttggtcttcgattggcaaattggatcttacatcacgtaaaccctttcattactgtctgagtaaaaagaatttttttttagtggactaacccttaagctgcttgaatttaattttgcggaaagaattccttttcgcaatggcacatccgcgcacggcataaaccttttgttggaaaatgagcaacatttgcgtgttcatatttgtgctagagaggccagggctacccttttatcaaacactctcttggttggaggcacttaccggttcatgcatttgaatgtgagaccgaagcgcgattttggacaatctgtgaactacactttatctttcgcatttggaagttcagttcacttgattcgggttatcctgttttatttatttgtcattttgaatttgatgagtttaagggaccgacagtagcatttaatccattaactcttcgaagtccgagcgaccgggttcctcaatttgtttgtccaaaaactaaataaaattaaatagtcgatggtcaaaaaaattccctaccccctcaacatcagcagcacagtggaacgatttcgcacaatgatcgtccatataatcaggaaccaatgcaaggtagatacacaatg

SEQ ID NO: 101604 - DNA, 564 bp, Heterodera glycines
  unsure (1)..(564): unsure at all n locations
tgccaatccaatagccatcgtaagtgtacgagtcacaacaccacggtacattgtccttttggcattgggcgtacgattttcgaacaagttctaagtacagaaaaaaaaaaaattaaatctgaagttggggtaggatttttgcccgatatgtcgggtgaggggcaaggcatagggattcgggattggatgtcagaaattaaatttacttgtcttaaattcagacaatatttttggactcatctgctgttaaggtcaggtcggaccgacgccatcttgtgcagacatttgtgccccggacaattgtcctatgtccaaaatcgggttaaaacaagttttttccagtccctgatagcctaaacaacattaaaattaagaaaaccacaggtcttctagtttattaggggcattaattctgttgtttgaataatgatgatttttcaaaaatttgctgtctatcaaatgatcatacccaattaattcaatcacctntatttaatgctgtttaggttattagggattgaaaaaacttaagttagaacccaattttggacataggcgcaaatg

SEQ ID NO: 101605 - DNA, 541 bp, Heterodera glycines
atattcccgaagtttccccatttttcatttcctttcaggtgtgttttagaattttccctccctgtccaaatcccatatataaacccgaatatttttccctttagaatatctctcgaaaaatcattattccatcctttgattgtgcgctattccgacaaataaactacttcttgtctaagaagttttttgttccgaaggtgttcctttttctctacggtttcgacattccctgaactcagagttccgtgtttgcatttgtctaagctcgattgtcccgaagtccaccaggacagtccaactaagtctaaaggggctgtccatcccacaagtccattccaagagtgaaaaccccgtcccattcgctaagttcaataacattgtcgcggagcgtgtgcaaaccgacagccgaagcgcaaccgaccagtccagcaaacccgcacctcacccgcctcctcgacaagtggcgctcctgggaacgcgataactggcgctcctgtaaaacgaccacacaacaagtggacctcccgaaaagaccatcatg

SEQ ID NO: 101606 - DNA, 116 bp, Heterodera glycines
ggtgcgcgcatttttgaatttgcttttactgacattgtgtttattccttctgcaacgcaggcacgaaacgattcgacgcctctgacacgggggaccgagacattcagcggacgatg

SEQ ID NO: 101607 - DNA, 294 bp, Heterodera glycines
  unsure (1)..(294): unsure at all n locations
aaaaataaatttcagcacagtgcaaattatttcgcanccacgcggaatttgctngtaaattggnaaatgggcagcaatggcctttacgacngtgatggcgaaacatcgcttgcccngagctctgcnncaagatacattgagacctgttggaatgatctgactcagtttctcaatgacggttttgctgccacatatttagcatatttggctagcatttcacaacgaaaagtggtcgttgttgacccaatggtatggagaaatggcttggacagagtcatgccttacaaaaatatg

SEQ ID NO: 101608 - DNA, 396 bp, Heterodera glycines
agtattctatcgaaaatatttattgaatttaagtaattaaatttcaaaaagtttctaattttactaaatttcaaaatctgatagaaaaattttcagttttttcttgccgtcgcttttcgacacagccgtacaaattaaaaaaaaaatgttgttctaattaaatcagacgacaatttttattcaatttatctattttggttaaaaaaaacttctgatttttaataaatttcaaaatctaaaactaaattctcattattttttttggcgtcgtttttggaacagccaaatttttatttaaaaaaaattttttgaataataaaattaaatttccaaaaggctgttgtcattacggatcgacaaacgcagaaaagtcgcggttatggctttgtgacgatg

SEQ ID NO: 101609 - DNA, 174 bp, Heterodera glycines
tttcgaacttcagtgtccaaatcacttttacaatttgggcacggtcaaataatataagtgcaaaaggatgcgtattgtaagtgggaaataccttgaaaagcaaccaaatttcaacatcggtcgggcgaattcgaaccaatgacaaatgtaataaaatttaaacgattaaatatg

SEQ ID NO: 101610 - DNA, 140 bp, Heterodera glycines
gatgcgtttgggcaaacggacgaccgtttttctggcggaaaattcgttgatcagtgaatgaaaattttcatataagtaaaattacttacacaattttgattgttgagggaaactttacaaaaacaaactgtcggtggatg

SEQ ID NO: 101611 - DNA, 1003 bp, Heterodera glycines
tatggtggaaaaagctcaaacgataggaacaacgaacagaaagaaaagatttgatccagaggttggactcgtctactcttcgcagttatcggctgaactcaccgctttaagcttaaggcttacccaaaatacccggcgtatttttgaagagactgtccgtaaaatatgtacaaatatgcaaattctgtcagatcaaattcttactttatcagtggctaatcctactctgttggcgagatattttctgggaaatccctttttggtgggacgattagtaacggaaaataagttggaggtgaagccctgtttagctattttcacgcagttgcattttaattggcaaaagggtgtttgtttttctgaaatcccggttactttcaaacttgatgggaaaataaagaatggttttatcgacccagtgacacgcataattcaccccttttctagggaggttgactgtggaaattataattttctgtacttaaatgaaggagacaaactcttagagtataatcaaaaaaccggagacattgagcaaattccaatggaatcagtgcgccaattaacaagacacggaagaattgatttcccggaaataagcgttcctatatttaaaaataaagtcctaacaaattttacggaactatactcgcctgaaaatttcaaagagactataaagagtgcaaagataatgcaagaaattgtacgcatgtctcaacccaatgtgtgggaaactttttccgaacatcaaaatgaattggctggaggaattgtcgctaatggtttattttcatttttgcgtggaggaattataagtgctaatcagttatgggtttttctatgttgttgttatgtaacgattacagtaatagtaaatttgttctgcccatttgctatggttcagctgtggcgacttttaaatgttagccgaatagtttcgagagtgtatgctctaactcaaagaaaaataattagggaaaatacagaaaaggtcgagaaaatg

SEQ ID NO: 101612 - DNA, 632 bp, Heterodera glycines
agtcatttaacggatattaagaattttcttttattactaaaaaaggttggacttaaattaaaattggaaaaatgccattggggaatgtccgagatacggtaccttggctttttgctaagtgaaaaaggtgttagaattgacccaaagcaggtcgaagcggtacaaaattttaaggcaccaaaaagcctaacagaattaaagtcattgttaggagcactaacatattttcggcgctttatacacaattttgcgcatattgctcgaccattacagacattgactcaagataaatttgaagggaaaattgaagaaaattgggcccaaagcaggaacatgcatttcaaactctaaaacaaatgctcacgacagtaccagtattacagtccccatgattcgggagagcattcacaattgagtgtgatgcttcgaaaaaggctattggagcagttctccttcaggaaaatggtcctgttgcttacatttcaagagcattaaatcggcacgaaacaaattacccttcaattgaaagggaggcgttggcattagtttatgcagttaaggaattctcgccatatatcgttgggtctggggttacaaaagtaataacggattgtagtgccttaacaggcatg

SEQ ID NO: 101613 - DNA, 283 bp, Heterodera glycines
  unsure (1)..(283): unsure at all n locations
aattaactatccgttactttntgagttattataagttccttctttgcgctaaaattttccccgagggcgatatcgacattagtggtaattatcaaaaacacccattaaagctcataattgatcattaaattttggccttcggcgtgtggtaatcctaaattgattaaaatgccgactgatcaaatcccgttcaatcactttacatattccatgccatttgcgaaatgctttttttactgctaaccagagaaatcacccataaaccattccagccagcctaatg

SEQ ID NO: 101614 - DNA, 170 bp, Heterodera glycines
tattggccttgttgtccttgttgcagtcgttggtggtgttggaagcacaactttgggccgcaacctttgccatttcagcaccgtaccgtccggtccaactcggcgcccgtccggccatgtcctggtccgcaacggccaaccaccgcgcggctcatagtagccgccggatg

SEQ ID NO: 101615 - DNA, 1003 bp, Heterodera glycines
tttttttttttttttatattttgttaaaaaagaaaaaaacccggcccccgggaagatatcccttttccctccccaaaaattccccccccccccccccgggggaaaaaaaaggggggggggggggggggggggcggggcaattttttttttcaccacccccacccaaaaaaaaaaaaataaaatttttttttttttttttttttgttttttttttttttttttttttttttttttttttttaaaaaaaaaaaaaaaaaaataaaaaaaaaaaaaaaaaaaaaaaaaaaatttcaattaaacactcaaaattttcacgaatcaatttttaaaaaaagggtttattttgggaaaaaaaaaaaattattttgcttgttttttggaagaaaaatgaattttctcttaaaaaaaaaataaaatttttttatgtaacaacgcaactccttttctttaaggtgaccaaaaattcatttttggacaaacaaatttaattatcccacataaatgtggcccatgtaaatataaacagaaaattatttataagttcattttttaatgctgaaaaaggaaaagtttgtttcaattgttggcgatggaaattgtttttatcgtacactttctttattactgagtggtgatgacaattataatacggctaaagaaatacacctagatttaatggaatttatctggggactcttgcggctattgcaattatttcggcaattgttctaactccaataatacttggttcggttgcaaccggcattgtaattggttatactttaaaagatggaagtggtcgtgaatgtatgaatataaatttaaatttaaaaataataaataaaatgataattaaaatattaattaataatttaattataaatgtggaggtaaaacagaaaattaattgttgattggtgattaaaaatgagagtttaggaattaatctcatgatcaagcagtgaaaatggtgaaaaatcattgctaagaatgctctaaaatg

SEQ ID NO: 101616 - DNA, 84 bp, Heterodera glycines
atttttgtttttggataattttgtctcatgtttataacatttaatattttaaattaatcaaacttgtttcctatttttagaatg

SEQ ID NO: 101617 - DNA, 1003 bp, Heterodera glycines
gcatttgattcgcaattgtgaagctagaatttaataaaaatcggcattttttaagtgttaaacccattttttggctgtttttagtgtatttttaagtctgttttaacaaatattaaatatacatacgttttttcgtatttttgagggtttacaacacatattttggcatttttaaatcaatattttggtccatatttggccatttttgaggtttttagtccatatttcgggcttttttagtccatattttatgtccatatttggcattttttagtccatataatttataaccctagtgagaagcgtcaaagtctgattttttaatgacgcatagtgacttcagaatcgaaaatttcaatgcagaaatgcttttttgagctcctttctttaaaataaaagcaaaaaaaaaaatttttttatgaatttttaaatgtatgcatatttttagcgtcctttttggcaatattaagaattggtgtccgacgaaaaaaatgttaaaaatttgtcgggtattttttctaggcttaaaaataagctgatcacgaatctgagctcagattttgaaaatcattgatttttatctaatattttttgtcaactacttgatttttttcggttttaaattatttttttaaaaagtttagcaatttttggcattttgccgttttggtgccttttttgtgttttgttccgaaaaattccattaaaaatgcaataaaaccgggaaaatacacccctaagaaatgaccagaaaaatttcagaaaatacacccctaagaacttaaaaattttctcaaaaaatatttttctccctaaaaatccttaataaaacaattttaaatgccttttttcatgcctttttcgggattttcgtgccttttcatgccttttttttcaattttttggtcctattatagtgcctttttcgcgatttttggtgcctttttttgcgaaccctatttataagttttatataaatttttaaagccttttatgttgaatg

SEQ ID NO: 101618 - DNA, 116 bp, Heterodera glycines
ataacgatgaaataaaattgtgtttgctttttcagatttcattttttggctggattggcaaaaacagaaaccccctcaactatggcgctttgtccaatttttccttcctactgatg

SEQ ID NO: 101619 - DNA, 1003 bp, Heterodera glycines
taaaatagcacgtcattcatttttttgctaataaactattttttaaatttttttttaactttgaaatattcttcagaattttcccttcaaaatgagcacaaaatggccaaaacttttcaaaacttaaaatttattggggattttcccttgtaaaaatggaagagtcgatctcgagttaaaaacttaagttccataaaataaacttggaatcgctagaggaggtcaaaatattggcctatacaaaatttcaagaaaatctgacccgaggaaaatttttttgaccctagtgaaaatttcaataaattttttagccaagtgcgcaatgcctgtggtttgctcaataaatatataaagtaaaaatggaagagtcgatctcgagttaaaaacttaagttccataaaataaacttggaatcgctagaggaggtcaaaatattggcctatacaaaatttcaagaaaatctgacccgaggaaaatttttttgaccctagtgaaaatttcaataaattttttagccaagtgcgcaatttaaagccaaatcaaataaaacttacaatattctccagaattttctctttaaaatgaatataaaattattatatttggcctattattgcccgagttatgtctggaaaatttcataaaattatcgatgatgtacctaaccaacgctttttgaatatgattttttattgacacgaaaactttattaatggaaaataattcttcctttattctttaaacgaagaaattgaaattaacacacaacatgaggaggatttgaacctgagaccacccttttggtgactaactcacagaccactaagacgaaaaaactaacttaattgcacttggagcccaaaattgactcgccgtgtataagaaagagccttcgtttttattaaaccgatcgttttgactttattaaatcgtcttttttcgttatcatagcgattcacattccgtattcaatcgatatacctttcaatttgcctttactatg

SEQ ID NO: 101620 - DNA, 268 bp, Heterodera glycines
tatgacgaagcaaatcgacgaagggaagactttgcccgcccccctccctcggctttgcctcccttcaaataccaagcgccgaagggaaatttggcaatttttcgtaaagccaacccaacccatccttcccaaccatcaaattgtataatactgtccaattttgtgctgccacattgccaacccaatggacataatccctttttactatgaaaacggccaattggaagctctttcctcggcccaccaatggcttaagcaaagcgaaatg

SEQ ID NO: 101621 - DNA, 526 bp, Heterodera glycines
aaaccactcattttttgtattcattcattcattgaacgtaaaaaataaaatggttcatattgtgtttgaccctcgcagtgccgggtacgacgagtatgtgcaatacggtagcggaatagaacacgaacatcacttcattgggtccagtccctttcaacgagggtatgggcagcggggagcaggggttggagacgtgtttcgcggtctttggcgcttttttctcccaatcctccgccgcgttggcaccacggtaggatcggaggctctgagcacgggtcagcgagtgttggagcgagtcgggaacgacggaatgccacttaaggaggcactggtaagcgaaggaaagaaaggaattgataccgtactggagaagggaggcctaccaaaacagtttggcagtggtggaagaatgggtataaaaagaagaagaaaacacgcaccaagtcaccatacaataattggccgaacaatcagtaaaccagcaagaaaacgtgttcgatccgacgcatttggactttactaaatg

SEQ ID NO: 101622 - DNA, 653 bp, Heterodera glycines
cgccaaagcagtgcttccaccccaaaataaacgaatttttctgttgcttttgactttctcccgctattttgtgcttgtccctattccctcgatttataacaaattttcatccaaaaaattgacattttggaaaatttcgcgtaaatatattatttttttcatggaggagtagtcttggggtatgtacaccgcgaacccctccccctccctgagatagtccctgatgtccaatttaggattgtttattgttcaccaatatccacctgcggtggcgatggcacatcacaattagttgacggtggcgcgcgacacattagttgttgttgaggttgtatatgtcctcctcggattgggaattggagcagcaataaatatctatttgcttccgtgtaattttggttaaattttattattgtcagtaggcgaaatgtcccattttgggtttgtaggcgaaatgcccgattttggctttgtaggcgaaatgtaggcgtgcccattttagcaatttgtatgaaatacgcttatctaaaagggcgagggaaactcgaaggatccgaaaataggccaaaagactcattcaaaaaaacaatagtgactttgtatgttttttgtccgcaagtgtcgtaatattaagattcatgtcaaagcatatg

SEQ ID NO: 101623 - DNA, 669 bp, Heterodera glycines
tttgattttcacatcactttttttcggagcgctttttcaaaaacttttgggaaagaaggggtccgacggtgccgataggcgccgccggaggaaattttgaaaatttgagtgtgatttgttaacaaatttcaacaaaaaaaggttggtttttgcgattattaagcttaattggtaggattttcatttaaaaaatgataaaatatgtatcaatttaaaaaaaactatgagtaaacatattttctttataggaaacccacgagtatacaaaaaaaaattgaaaataatctagtttctgtagagggattgaaccaggggaaagaagaagggaaagtcaaggagactagccattaggccatttgcacacttggcagtgttacttttaaagaatatattaattattattttttatttttccctttgactccaattttcttcactaatttttcactcagacccccattcttaccagtgcttgtttttcccggttcccggttgccctaccgggaccgggaccgggacctgagcttttcaaaacccgggaccgggacctcggatgaccgggaattcccggcccggtcccagtcccggtcccgtggcactctatttataaccattacaacaaaatgtgtttttttaattaattgcattcgattttttaagttgagaatg

SEQ ID NO: 101624 - DNA, 300 bp, Heterodera glycines
tgtaaatgggacaaaaccttgtacaagtgcgcaaccaattaatatcagcagagaaaatgattttgaaatattgaaaattgtcatttctttaataaatttaaattacattattaaagacataaaaattgcattttcttatttctttaatttaatatgtaaatattttgatttattaaataatgtattttaatttaaaaaataaacaataaatgaattaattgtgaatttttggcctattatatttggccaaatgcggaggcgaacggggaaacaacctgtgcttatgtaatcaccgtaatg

SEQ ID NO: 101625 - DNA, 374 bp, Heterodera glycines
tttgttgttgtagttgaagttgaaacaaaaacaaaaatgacgaaagtgaacacagaaacccccttataaggggagagaattttgcgcataaatttttgacgccttttttaagcggccccttttttcgctgacccacgaaaatccaatttttttaatcttaacccgatagatgaatcctataagatttttcgggaacgttgaatacaaataatccattccgttgaattaaattttgattgattttatttattttttaaatttcccaacaaattttttaaatacttcgtttttaagtgacattttccatcagcgtcactataaaagtggctttaccgcctcatttccaattcatttgccttacaattgccacgatg

SEQ ID NO: 101626 - DNA, 70 bp, Heterodera glycines
tctaaaaatattttaaaattttgaataacatttaagctgattgtaaattttcttgcctcccatcacaatg

SEQ ID NO: 101627 - DNA, 651 bp, Heterodera glycines
tcaattaacgggtggataccattttttgggaaatggagaatattcggtttcggggcagggtctttttgtcattgaatatttaaggcgaatgaatattttaggcgaatgaatatttaaggcgaatgaatatttaaggcgaatgaatatttaaggcgaatgaatatttaaggcgaatgaatatttaaggcgaatgaatatttaaggcgaatgaatatttaaggcgaatgaatatttaaggcgaatgaatatttaaggcgaatgacaaacaacattgtaagccgttgccaaaactgaaagcgccctctcaaacacaagattataatcgttgtaaatttgcattctacagtacactctgtatacaacaacaattaattaggaaaagtaattttgtcaatgagataaattttggcaatgttaaaatgcccgctcatttgcaccaattcttgttttcttcattaataaaagttaatttttaataattaattataaaacattgctgttttattttgttccaacgcaatcattttgttacattagcaattcataagaccatccgagggtactcatggagtttgtatccccctttttttgggtcgaattttttcaaatttttttttcttttttattgtcgcaattgcttttagattaatg

SEQ ID NO: 101628 - DNA, 633 bp, Heterodera glycines
  unsure (1)..(633): unsure at all n locations
aatggtagacctntggaggaaatcgaaccctcctctccccacccaccctccgatcggcttctcactcaaaccgtggtgagtcaatgtgacaaaagtatcaatgttcgtaataattaaatttaattattattttaattttatttgctaaataataaacaataaagcataacttagcttaggcgagtcgttctgctgttcctcgggccgatgccgtcccaaacacagtctttctcatcccggggacaaattaattcgcattcatcggctggcaacaataatgaaaataaatattaaataaaaatattatgattaaattaatccattgtcactattctccttttttacattttcttcattttgattattttgcctttcctttcttcagcaaactcgttggctttttttagcaatataattgcaatttccatatttattgtaaagtaataaatttaggagctatgaaattcgatattttcttcctgcaattgccaaagtgaagccaaatcaacccgaattaaatgaccaaaattcgttagtttgttcaaaataaaaactatttgagtgtttagattatgattttggaccaattttgtgcaggaaaatggcattggggacggtcaaattggacaaatg

SEQ ID NO: 101629 - DNA, 166 bp, Heterodera glycines
atgaagtgactaaaatttgagcactctaagtggacttgaaacaatataaattttttcgattttcattacattaactgcttaactccgaaaaatcacataaaaaactactttggagcatcaaattctcgaaaaaattattttcagacagttcattatagaaataatg

SEQ ID NO: 101630 - DNA, 564 bp, Heterodera glycines
  unsure (1)..(564): unsure at all n locations
tttgcgcctatgtccaaaattgggttctaacttaagttttttcaatccctaataacctaaacagcattaaatanaggtgattgaattaattgggtatgatcatttgatagacagcaaatttttgaaaaatcatcattattcaaacaacagaattaatgcccctaataaactagaagacctgtggttttcttaattttaatgttgtttaggctatcagggactggaaaaaacttgttttaacccgattttggacataggacaattgtccggggcacaaatgtctgcacaagatggcgtcggtccgacctgaccttaacagcagatgagtccaaaaatattgtctgaatttaagacaagtaaatttaatttctgacatccaatcccgaatccctatgccttgcccctcacccgacatatcgggcaaaaatcctaccccaacttcagatttaattttttttttttctgtacttagaacttgttcgaaaatcgtacgcccaatgccaaaaggacaatgtaccgtggtgttgtgactcgtacacttacgatggctattggattggcatg

SEQ ID NO: 101631 - DNA, 567 bp, Heterodera glycines
gaattgtctcatcagctgagttgtcatcagctgcctagtgcagaagccaagaaaaagctaaatcggaaagtaattgtaaaaaaataatgatatgttttcatattacctacctactgtatatatgatgtatactaatttaaaaattaatttttttctttttaaaattctttattttatttcagtgacaaaacgttcggtcaccccagaggaagcaagccaaaaaacagcaccataaagaaaataaagaatcaggaatctgaccaatttaatatagtttaaatgagtttgcttttcaataaaattttaattatccaaatttaaaatttattttttcatacatattaaaaaaattccttgtttttataaatttcccccatttgttattatttatttgttcaattctgttgaaatgaaaaatcgggattttaatcttaatccgtgctaaactaggggtttcaatcacagtatactattacggcctgataccgatgccggatcctaattccgggctctaagaccaacagaacatttaatttttttaaatttataatttaaggtgacagaatg

SEQ ID NO: 101632 - DNA, 735 bp, Heterodera glycines
  unsure (1)..(735): unsure at all n locations
ttaaattttagagtttctcaattaaaaaaaaagccctggaccganatatggagcgggatttcatattgaagctggtggatctggattttcaatctgactaaaacagtatgcttaattatccataaattctttgttgcaattgcaattatacagtatactgagcntnngttcaaaatacagtatatggaattatagagaatattaatccaattttttctaataattggactcaatctgacaaacacatatgcttaattattcgtaacccttttttgtttcattttttttattgcaacaaaattatacagtatgctgatcctattttcaacatacagtatatgatatcatgtgaacgtattctcacataggcaggggtctgggacccctgcccctacaacctatcacatgggacccctgcccctgtaatctatcacatgggcagcggtctgggacccctgcccctacaacctatcgcaagggatctggggacccctgccctgtaacttaaagcatttctgcatataatcaacggacagggtcgttcagacccctaccacttgttctattaagtaccctcagacccatgtcccttgtcatattaagggtccagacccctgccccatgtcctattaaaggatccagacccccgcccctagcgtcactatataagcagctcgttttaagaaatgtacagttaatagagattattgtacccattacctctaaacattcatg

SEQ ID NO: 101633 - DNA, 56 bp, Heterodera glycines
taaatttgtaaatcattcgcatttgcaatttttttcaatcgtttcagttggggatg

SEQ ID NO: 101634 - DNA, 1003 bp, Heterodera glycines
ttatttggcacgacctccttattttgtgcttattcttggatttgaaaataaaattacaaaaacgaataactgttttgaattatatatgtatcattttttatggaagcaaatatttgaattaattcgattttgaaaaaaaaattgcgtttttatttcgttttcttgagtgtaaaatgctctaaatttcagtgaaaattttgttaaaaatggtcaacatttctatttttcctccggcggcgtctatcggcaccgccgggccttccaaaacttattttttcataaaaattgaccaaaaattgtcatattttgaataaaatttttcaaaatgctgattttttgtcggcaaatgctgattttgaaaattttcagttggcagccctggtttttccgctaataaaatattgttttaagtcgatttttcatgtttttattgcgtttccttcacgctactattagttttagaaaaatcttatttttggggtccgaattttagtttttgagccattttgtcttattttgaaaaaaaacatggaaactctgttttatttacctgctgaattttccctctaaccctccccctgcggtctaaatttttttgttgtgtatcgattatttttaatgctttcgatgtgaactgtctgacttctcgctgtctccactcctacacaaacacaaaaacaaaacgaaaacaatattcataaaacaaatattgctaataatttcgcaacttttaaaaaaatcattgttttgtttttcatttttttgaccggcaccaccggggaaaaaactcataaaaatagagggaaaaattggcatagatccataaatttggcaaatacctttttaaacaatatggaagtttcagcaaatttttggccaacgatttttcaaaatttgaaaaggctttcaaaaaatatcaaaaattatggtaaaactaaaattcgttttttttaaatttttatttttatcccttttataaatgcgcctcatttcagagctaatg

SEQ ID NO: 101635 - DNA, 982 bp, Heterodera glycines
atggaaaaagtgatcggagagagagagagagattggatttacaataaattgatattcgtgagtgatcatcataaacctaataataagcgcttgaagtatttgaaatattaagcttacaataaatttgctgaataaatttatgaagcaaatccatttttctcggataaggatggtcagctgatggaaccacgaatttaaaaagaaaaacttttttttttcaaaagaagacttggcatttcgtatgaatgcctgtttagcatttaaattgggtggatgtgcgtcgaatggaaaaaatatacaaatgtctacgtcaaatttataaatttgaaaaaaacaaaaggctgcttagcatagtttatggaaatcccagcgagaaaattgaaatgttttcgtgactcacattggcattggcataattatcatcattttggagttcgaagctcaaaaaacccaaagttttcgaagccgaagtttcgccagccttggtagcgatacttcttgagggcggattctttcatcacacattgatttgtttttggttaccaagatataacgtggcaaattgtaccgaccatcagcaaaccaattttcttttaatttgtttccctgacttttttatggtctagtaaattggtatcattcgatttcgcgtgagattttgtacataatttttgggtttgactgaatgaaacggggaaaattttcattattttcacatccattgccttccctttctttttcgtccctcgtctaaatggtgtgggactttgtccgtaaattgtgaataaaatctgtgctgaatgttcagtacacaagaaaatggattcaaaatggactacaaatgtgccaaaatggaaataaaaagtgccaattgcttacgtaaatcccccaataaaaaatccgtttgtctggcaatttcgtataaattcagtgtccccatcccaaagaaatcactctttaaaactttccaaatttcgaaatg

SEQ ID NO: 101636 - DNA, 59 bp, Heterodera glycines
ggtaatgaattagtgtttcaatttttgactcaattttatccctcaggtctggcaacatg

SEQ ID NO: 101637 - DNA, 520 bp, Heterodera glycines
attattttgatcaattccgatttcctaatctaaattttaacaaaaaatcataattttaaaaattcaaaatttcgatttttattcgagttcgtgttagggattagaaattagtcaaaatacatgtcagattcgtgattagcgacctttaaaaccccggataaaaaattatcatggttttttatcttaaaaaaattttgcaaaacaaaagggtccccccttttgtttcaaaaactcactttccatatagtgccggttgcgctttgtcaagccttttgcttatgattttttaccatacgtttcatttgaaaatgacaatgagtcactgaagtgggtgggggtagggggacgtttcactgagcgtcggtccggtcgccatcacataacaaacattgtgaccttgccatttccttttaattttctccttttttattattcaactgttagctattttcagcttataaatacatatttatactgaatttcaaaattggatctcctagcattagcaaatcagtaaatg

SEQ ID NO: 101638 - DNA, 408 bp, Heterodera glycines
tgaaaattacaaagatttctcaaatttctttgaatttttttaaaacttttctaaatgttcattttcaaggacgtccttggcatccaaggacattttttattttcaagaaagagggcccaatttcaaggacgtccttgcatttcaaggacggatgggaaccctgcaataaatatttgcaaaacatcaatgaccaaaaagacaaacattgaaaactcgtttctgaaaagctaaaacatcaaagaaatttgcaaaaagtcaaacattgcaaaacaagtttttgaaaagctaaaacatcaaagaatgtttccaataaaaacaccaaataatacaatatcgtttccgaaaagaacattaaatgatgtttccaaaaaacaaaacattatgtttctgaaaaagcaaacatcaatg

SEQ ID NO: 101639 - DNA, 329 bp, Heterodera glycines
ttactgtatttatttcataaaaacgatcattgatctttttaaatgaactgccataggaaacggcatttacgttaatctcattaagtaaaatgatgttacggtatcagggtaattaattttaagattttattgcgtttaaactgttcaaaaactgaataaatcgcttctgattagctgtcactacccttaaaaagctacagaacacaaagctacagtatcctattcagtaattaggggttaatttggctttaagattagatttttgagaattcgcttagttttaactcaaaaaatgccaaaaatttctgcaggtcccttgtcgtcggatg

SEQ ID NO: 101640 - DNA, 436 bp, Heterodera glycines
tttttttggtgtatttcctgatccaatatgatcggataatctgatcaccccccccccgaaggaatggccaacagcgctcacttgggatccaatcagtggtcaactctttgtgcttgattcgtcctccgtcatttttcgcattgacttccaactgagcattgtgactgttgttgccggcgctcagacgggctgcccagcggcagatggaagcgccgaatcaataccagtgatcgaagccatcagtttcagcgcagaagacggaaaactcttttggacagagaccgaccaaaaaggaatcaattcggtgagtgatctaacgaacaaatgccaataaaatcactgatcagaaagatgtttttgatcggaaaaagatattcactcacagatcaaatgtttgctggcggcacgcaattaccctccgggcgaagtgagcatg

SEQ ID NO: 101641 - DNA, 440 bp, Heterodera glycines
ttatcaattaaaataaataatttaaaaatatttaatcaaattctttttttttcttttaaagaaatttaatctaaaagtatttcaatgactttctatgtattatttacttcgacgaagagcatcagctgtttttcacattttgagccctgaattttttaaaaagattttaaatctcccattttgaaacttaccaacaacaatttatcgatttaaataaattattaaacgaaaaacaatgtcattttaaattttaaaattttatttaaaatttatttatttttattaatattttctattaaataattataattatttgttaaaactaattcaaaattatattatttagacaaaatatagaaaaaaaaaattatcaacggaaaaattatttaattttatatattttttaatttttcaatttttatttatttatttttttgatg

SEQ ID NO: 101642 - DNA, 170 bp, Heterodera glycines
tctagagtcaaaataaaaataaataaataaaatttttgttgttttggctttgccctaattaacgcccactaaaaacaattaatattattttttatagccccagaggggtggggcaaataggttttttcccggaaggcaaaatattttttataaatttgtagagagagatg

SEQ ID NO: 101643 - DNA, 120 bp, Heterodera glycines
agtgagaaaattgggggcaaaaaaaaagaaaattaagcgggggaacgataaattttatggacagaaaaaaaacaaacattttcgtttttcagggaattcattgaaacagaaagggccatg

SEQ ID NO: 101644 - DNA, 443 bp, Heterodera glycines
ctcatggacgtcatcaactgactccgcccccttattatgatgacgcaatcaactgactccgccccctttagcatgacgtaatcaactgactccgccccttattatgatgacgcaatcaactgactccgccccctttagcatgacgtaatcaactgactccgccccctttatcatgatgcaatcaactgactccgccccctttatcatgatgcaatcaactgactccgcccccttagcataacgcagtcaactgacccccccccctttatgatgacgcaatcaactgactccgccccctgtaaggtgaattatttttttgagaccgttcgttgatttgataataattttttcaggattttcttggctctctatatcgactcccctcgggatggtactgtctataaaattggctcacctcgcgcttctaaaaactttaaattatg

SEQ ID NO: 101645 - DNA, 213 bp, Heterodera glycines
aaggttttattttgtaaataagataaaaatggattttccttcctaaacaattaaattaatttattttacaatttgcttaaaataaatttaaaaacttatattaaaattaacatgaatttaaaatatttcagcagaatatataatttaaaatttgtctaaaaatactttttaatgcattaggaggctcaatggtgtgccaacattgaacgaatg

SEQ ID NO: 101646 - DNA, 52 bp, Heterodera glycines
tttttggagtgatttggggaaggggcgaacgaacggcgaagggggaggaatg

SEQ ID NO: 101647 - DNA, 167 bp, Heterodera glycines
ggtggcagcactcggaaatcctggtcaggttcatgcgattcaaaatcggccccaaaagctgaatgatggcaattccaaaagattttttccaaagaaaaatcgggattttccgaaaaagggtccaactcaaattttaatgataaacgacaggaacaaagacagaaatg

SEQ ID NO: 101648 - DNA, 519 bp, Heterodera glycines
tctattattgtggatttttgtacatacattcaacaaatgaatgggcaggaaaggagaaagtttctctcctcccgattcgcttttgctcgtccccccgggcgacgacgaattgctttttgaccataaataaatttgtttggtagcagcgatcactgatcaaacagaggacccaaaaatgatgattaatctattctgtaatcatcgtccttggctttatttgtacaaaaacatgctaatatacctaagtaattgaaacaataatgactaaatataaagcatgaatgaatgagaatgatcgagccgatcgggccaaaacaatgtgttgaaaatttgacaatggcccattatgtgggtgggctttgggacaggaggtgttttgtgtataggtatttaatcgcgccgatcactcaacagagcatcacacaattaattactcaaaaattaattactcaattaaaaatcattaaaaaaaataatattttaaatttgatttctaaaacaaaaaattaaataaaaatg

SEQ ID NO: 101649 - DNA, 386 bp, Heterodera glycines
tgcttcttggccttagaatggccaaaggatcggatggaattcaatgagggccaaatcacttaatgccattaaatcatttaaaaattttcacgaaacttgaaatttttgtaaaattcccactgctgttgtgccgtcattctctgatgcccggccgtccgtgtcgatccatttaaaaactataccgtttcgaaattcgcatttttaaatgccaaaaattaatatgccaaaaactggcaaaccttttttcaatgaataaatttgtgcatacatatatatatatatatccctctcccctctcttttgttgtgatttttcggagcgattgccccaaaatttggcacattcgcccaatttgaatttgcatttttttcattgttcataaaatg

SEQ ID NO: 101650 - DNA, 448 bp, Heterodera glycines
ttctcgtggacacgcagctcgcagcaaaggcaacggtggttcgaaggagttgaacatctcgtcagagggaaccgagtgggacaggcgccgaagcgattatcgtgaacagcgacggctcccgtttctcatcgccatcgcccacagaacagttgccggaaaatcgtcgtcgggttcaacagcatcaacattcggtcgacatttcttcaacactcccaattttaatttaaattgttccccattttacaggtatttcgacactcgaagtgatcaatttcctcggcaccgaattcgccgcctcttctccacggacgtctctctcgcagttcgactttcggctcgacgcaaactcgtggttggaaagcgatggcacgtcacatttggcccctcgctcgaagaaacggactcatcatggctggtcaacgtaaagcggctgcacctcaccaggatg

SEQ ID NO: 101651 - DNA, 126 bp, Heterodera glycines
aattcattttggatggtttttaaaatatcgcacataatgatgatgtttatatataacatgacatcgttgtaaagattcaatatatatttatataagatcataatttctaggaagatttggtaaatg

SEQ ID NO: 101652 - DNA, 185 bp, Heterodera glycines
aaaatcccgattccattccggtttagacaatttttcttcagaaactttaaattcaaacattttgccaaatttcttaaatttaattcagaggtttcatttttttagtttttcgacttatgaagatgtgtttgattattttgactcggattttttcaggttttatcaattttttttagcaaaaaatg

SEQ ID NO: 101653 - DNA, 260 bp, Heterodera glycines
cattgccaatcgtcgactaatttttttctgaaaaagatatttcggtcttttgattacaatcaaaacaatttaactgaaaaaatgtttatctctctctatccattatttatatcgcatttaaaccatttaattatcctctctttcttcagaaaacttaaaaatacttccgatttaattttctgaaactttttaaaattacatttaatatttcaattgacccataaaacacctttactctcaaatttaagaatgccgaaatg

SEQ ID NO: 101654 - DNA, 1003 bp, Heterodera glycines
aattttttaaaaattattaatacattttttaattatattttttcataaaccatttccttatttgtttaattttgaaatcatgattttaccctgttaaccatggttgtaccatttcacaatttttgtactttttctaatcacttttgtacctcttctaattactcttataacttttccaatcactgttgtaccttttataatcattgttgtacattttataatcactggtgtttttatttctgtttataattctgaagccgcaaatttttttttgctgagacaagtatctattaaattcatcaatgcctttgtttttttcttttgcaaaaaatgtttttatttaaaaatatccataatcattttttggctttcgtaatttttttttttaacatttcagcattgtatgtaatgaaattttgaatggacattttcccattttgcccatcccaactcggcctcaacttttgttcaatgaaaatttattttgccaccaaaaaatttcgaaatcaagtgcattatcgataaaaacgggggtcgtcccgggactcgcaatttttacagaatttggattcagttaattaaattagtcatttttgcagagtttggcattcaattcacacaccgagtcaaaaaacgagacatgtgtcaataaagagagagtgcagagaaaaaaacatctctcattttggcgtactatttttttatctctgttaatagagaaaaaccgaatttacttctctccatataactttttttctactcatacaatatgtactaaattttgcatagcgatagagaaaaatattatgaatatttttaacgctcgagttttatttttttacgctccgatctaaaattattcaaaaaacaaaatttcaaacgcttatatcttttttcggtaatagtaccgatggtatcacaccttttttgaaatttttttaaaaaatttcaaaagttaaaaatatttattataaggttttcggggtcgctgagcacgaatatg

SEQ ID NO: 101655 - DNA, 477 bp, Heterodera glycines
tttcaaaaaaacgggagaggagagccgagccattcgtaaaaaaaattttaaattttgtaaaactcaaaaataagtcacgatacttttccattttgtgcctacacctcaaaatttaaaaaaggcgtgcaaaaacgaacgcttctctttttggaggccaaaaacgcacaattgacgccaaaattttaacatgggttaacattgcgtctcttccagtccttgcggtcaaatgtattcgcgcacaatgagagtcgagcatctttattgcctttttaaaattttgaagtgtaggacaaaacggagaaatatctaaatccccacgaataagtgccttaatgtggtggaattttttaaatatttcgctcagattgtagcgaaaagagtgccgttccgtcggttgcctcggcgacttcctccgcctattcgttacgaatttgtgcaaaatgtaaaaagttgttggacaggcgagaacgagccatg

SEQ ID NO: 101656 - DNA, 242 bp, Heterodera glycines
ctgcacttatatttgaagaaaggctcaatctctttttactactttatttttttgatttggatttatttatttcgtttttttatagttttagagaattttagttatggttctaattagtctttaccgttggcagggccctcgttttttattattatttttttcagatggatccaaaaaatgtttagacaattgactatttttaagttaaaattgactaaaaaaatatcccttttttagcaatg

SEQ ID NO: 101657 - DNA, 52 bp, Heterodera glycines
attgaccatcaaccagagactgggccaaggtcagcaagcgtacttgcaaatg

SEQ ID NO: 101658 - DNA, 63 bp, Heterodera glycines
ggtttgatgatcaaacttattgttagtttataacccccaatatttcagtacttttggataatg

SEQ ID NO: 101659 - DNA, 328 bp, Heterodera glycines
ttcaaattttacaaaaagtagagtttcaaataagtaaaactaatttttttttaaggggggaaaatttatcttttattattattgcccgggtccgggtacccgaccgggtcccagaccttgatacccggttttttcaataccccggacccgattttttgaaaatccaatactcgctatccgacccagtcaggtctgggtacaacctggtccaaaagtatactggtaagaatggggtattgttcgatttgttgatcaaagtcgcggaaagaaaaaaaaatacaaaaaaaaaattaatgtttattgaaaatatcataatttatcaaacatg

SEQ ID NO: 101660 - DNA, 859 bp, Heterodera glycines
cctgaactatctataaatggtagatatagagtaatgcttgcgaaccaaatgagaaaaagggcggtggatcagcaattctaactaaaacaaatattccttatcagacactattctctgggacaaaattccaaagcgaaattttacacattaaattactttttaaaaaaccaatccaaatcataaatatatattgtccaccgaattgtacagttcagaatactaaaaagctactcaaatttatttcggaccagagtaattctgaaaatatcatatattgtggggattttaacatcccaaatattttatgggatgaaaataaggtaaaacatataaatgatcctacgtcaaatatgctgattgagttaatggaccaaaaacaattgaaacagcatgttaaagaaccgaccagagaaaatacgattttagacttagtaatgactagtgaatcagaattaattaatgaattaattgtattggaacatttttcaacttccgatcataaaatggtcggatttaaaataaaagaaaaattccggcgtaataatcccagtgtttatagaagagattttaaaaatattaatttttcgaaattaagtcgggcgatacttgaaaatcgaattgatttatcaataaactcagtgcacaccgttgatcaaaaatataaagaattcttaaataaagtactgaattatatgatacttttataccaaatagacctctaaaatcgataataaaactatcgtatcctcaaaaaataagagatttattttcagagaaattacggttacataagcttgtaagaaaatttcctgaaaaaagtgaaatcattttaaattacaaagttatttctagtgaaatg

SEQ ID NO: 101661 - DNA, 173 bp, Heterodera glycines
aaatcttaaatttcaacgaaactccgaaaaattacaacaccactttactgaattctgttcgcatttcattctgtaaaattattccacctttttcatcatcttttgtcgattcatttattgaaaatgtgtcgcatttgcccgaaaaaaccgaattcattatagaaaaccaaatg

SEQ ID NO: 101662 - DNA, 79 bp, Heterodera glycines
ggtgacaccctcctcaattctctgcataacccatttttgtgtgtatttgttttttaggtatcgcaattttcagacgatg

SEQ ID NO: 101663 - DNA, 1003 bp, Heterodera glycines
aaaaagtactcttatatttaaattaatttatgtatatttttcaaaattttgaagaaaaaaaaacttctacatttcattttttcgatataagtcgtttttgtaaattactttaatagaaaaaaatacaaaataatttaaaaatttcctttcccccaattgattttatttttctttttgaatatacgtaaatggtaaattgattttttcaaagcattattgaaacatacataaacgaaactgatttattatttttacaaatatttccatttttcatttttactttttttctaatattgggtgatagataatataaatttggcaccatattttttaatgttttatttctttaacaaaaaaaaaccaactaacaaataagcaccaagggatgttgcaagtttcgctttcgccttttcgctttttattttggttttttcgctttttatttttctctttgcaacatccctgctaagcaccaaagaaaatttccgcttttatcagatttaaggccatgtttggattctacagaatgaatttggccataaatataatttttggcatgatttaatttgttaatttttgcaataaaaaaatcgtgaaaaattatttgtttatctttaatatatattctttattagatggaaattccaaaaacatttcattactgcaaattaaaattggtaattaatttggtcccgctttagggcatatattcccattttcagttataaaacactaaaggaatttcagagaatcgttaagccaatgtcttttttgttattgttttctattatttatctacatagcccagcaattattattggtagagttttaaaatgcaatacgaatttgataaaaattaatataatttatcaaaattctatttttttattttacgagtaaaaagcatcataaaagattcattttcgagattataggtggtaaaaacaaagatcatttcgctgaaaaagagaaatgttttgctattttcaaaatcaaacaaatg

SEQ ID NO: 101664 - DNA, 695 bp, Heterodera glycines
gtataaattataactaaatttgagatttttatgtgccaattgctctgaaatatgtaatataaaatatgcaaaaaatgctgaaatatgtgctaaaaccaaaaaaatgcaaataaatgtgctaaaatatgattgaaaactagaaaaaatagccaaaatatttacgatatgtttcggagaaaatgatatttttggcttctctcgatctctttttttccctttactccgctcaaaatttttccatcctatttgttaaataaaaattctatttttatcttattatagacttgacagatttagtcatattttgacatttttctttttttttagtccgtactgtaatttttttttaaattgagcccccggggctctatttttgaaccccatcccccaccttaagggaggaaggctttaatggagggggtctattttaggggaaggagctatgttttcgtaaattaggtattaaattttttgcgtttttaaatacacgcaaattgacgcacaaagaattcaaattgcacatattttaacatttttggtgaatgagcacatattttggtgacattttttggcccgtaataattctaacgccaattatgccactccaaaacacttttggcaccctaattacccgcttccccagaccttaattagtgcaactgtttctctaatcacagactgccgatgataatatg

SEQ ID NO: 101665 - DNA, 79 bp, Heterodera glycines
ttggtgtatcagaaagacccttttctgaatttaggcggcgtcgggtgcgtttcgacttggctctgagtggcgcagaatg

SEQ ID NO: 101666 - DNA, 818 bp, Heterodera glycines
atcggcaatttttaataaatgaaatttatcttgtgaaataatattttaattattatataaacgttatcaatgtaatcagcccattttatttaattaaactttattttacaacttttatattttaaactatttttataataacgatttttatttcttttcttgaaaaggttttctaagtgcattatgatatttatgttgtttaatttaatgttttataatttctttatcgagcaaaaatgagaaaagcttcagaaatgatcttaaacatggatgttttttcttgtcattgctatcttgtttcaatgaaaaataaagattataaaatttaattttgttaattaaatttttgttaaaatttaattgaatttttttttcttttcttgctttggtacaaataaaaaaagatttttaattgctttttatcatatttttgaaactttgtgtttaatagaattaaaattgtttcaactattccagatgaggctatcgaaaataatcctcttctttgtttagtaaacatgaagtaataataaataaaagatgaatctaatcaatgaatatgttcactattttagatcaaatattattttaatatataaaatttattgatcctttgtccttgggtccttttgtttgtggaatcttattagaattaaaaattcacggcactgagctagctataatacattaaaagcattaaaaacccgtctcggaaaaaaagacgggaaacttaccgtggttttccttaggaatccgttctcgcatacaaatttaaaaaagttaagaaatataaaaaataaataaatacaataaaaatg

SEQ ID NO: 101667 - DNA, 1003 bp, Heterodera glycines
ttaaagggaaaacgatatggccaagaaaaactcgtctattaaatttagctggacgttgtgcgttttttgctctctaacggtgcgcgtgtcgacgaaaggaataaatacggtaaagcgagcaaaagggacgattaaaaaggcactcaatcagactcacccgcaaattgttgcattcagaatcagctttttagtgctaatttaaaatattttcggtttttttgaataggcttttgatccattctcagttctgttttcatcttagcctcaacatatataagtaatacgtttaattgttaatgtttttatgtccaataattaaggcaaaactgcgctggattttgcttttaaatacggacactcagaaattgttcactttttacaagccgaacaaaagaaaattgcaaggcaaataagaactaattatgattatattataataattcattaagacaatacttttgattagatggctttttagacacagcgatttgtgagagggaattgccattcaaaatctggtggatctctgcagattataaaatgatttatcatcatttaaaatatttattgtaccatttacacttatttggttcgcatttatgggtcagaaataaaatttacttgaaaataaactgaagtgtgtcaattcgaatacgctgtagtcactaagtaaggaaagttatcccaaaaagaaatttttaaattcaaatgcgggttaatcccgcgggatcccgtctcctgagagaattttgaatttcaattatgtagtgggatctgcaaatttaaaaattgccgggcccctcctcctccccctcccccgttcacttctcacatcctctaattttccttcattcattttcatttggatattccctcttaatgtgcaaaattgcttattcctccttttattgatctcccccttcttatcaaattaacatgccaccattttttagttttctaatccaatttaatttacaaattacataacaaatatttccaaatg

SEQ ID NO: 101668 - DNA, 161 bp, Heterodera glycines
tttgcaaattgttattggaagcatatttaagtgagtccaattaatccatgacattcaattaattcacccagtgggggggggggggggtgattaattaattaaatggtgtgtacccatgcattttggcttcaatttgatgcatttattaaatttcaaaaatg

SEQ ID NO: 101669 - DNA, 174 bp, Heterodera glycines
tcagcatcaacaaaccccttttacaaatttttcagtcgtttgcaggaatggggattgcaagtcaaattcgagaagtgtaaatttctctgcaccgaactgaagttcctgggtcacatcatctcagcggaaagcattcgaccggaccccgaccgatcgcggacgatcaacgagatg

SEQ ID NO: 101670 - DNA, 425 bp, Heterodera glycines
ttttcaatcaaatctgaaaaatttgacgaaaaatggcaaaatatgcaaaaaaaatctgaaaatatgtatagaaaatggtaaaatatgcattaaatataaagaaaaactcaaaatatgcaaataagtcccgatttttatacgcaaacacaaaaaagaaagtgtttttcctactatttagagcttggagaagccaagaaaaaaatatgcatttgcatattttttgcagccctgctaatgatagcccatttccggtcctcaaatgaaatatctaaccggaaaaatggtagttttagtcccattggtcccatccatcgtcaagttccagtccgtttgtttcaaaatccggtctctatatacaaaattcgaggtgtccatattctccaatcttttagctaatatttgtttcaatatcaattcaaacaatg

SEQ ID NO: 101671 - DNA, 316 bp, Heterodera glycines
ttttgagctttttcgtccatatttcgggcttttttagtccataaaatttataacctaataataataaaatgtcacgtaaaatcaaaatgttaattaaatcaaatatgcaaagcatacatttcaactagagtagaacgggaccgggacttttcgggttaaaaccgggactttttggctgggaaaccgggattttcccggtcccggtcaaaacaggccaaaacctggacttaggtactcattttgatggctataatataaatttatttaaataatttttttttattaaattattttttagagtgttcgtattaatatg

SEQ ID NO: 101672 - DNA, 720 bp, Heterodera glycines
aacatcctgtagaaattataaaataaaattttttattttcatttttgctaaatgcaccggagtctttcataaaaccagtgcaaactatcactaaaatatggactaaaaacagttttctttcacggaaagtttacctttaagtgggattttttttaactgtcactcatttgaatgaagttgcattttcaattgaccaaaaattaataaatgttgataagttagtttgtcatccactccattctataatagcttaaaccaattgcaacaacaccaaaaaattgcgccaaaatttcgagcggcgcggcatatggccaatcaaaccaaagggatgcgacggcgagtggccaaggcagcagaagcaaaaagggggcggagtgtggaggaccgttaattgctaatcttttgatgctcggcttctagccaagggaatttagccagataatcgttttggcgagtgaatggaggaggcggtgggtgaatcagttctcaaattgtcgaataaaaaaacacttcattaaaaatcatttttaaagatacattaaaaatcatttttaaagatatacaataatatttatttatttaatcccaaattataatggttttatttttatgtattttgatgctaaaaatacattaaaatattttttagcaataaattttatcgtgcgcaaatgtgccaataccaaatgccaatgttcttgcaatggtattgccccaatg

SEQ ID NO: 101673 - DNA, 64 bp, Heterodera glycines
gttccaacgcgtagtcgccgtactgctctgcagcctgttgaacgtatacgtgtaaggcgaaatg

SEQ ID NO: 101674 - DNA, 589 bp, Heterodera glycines
ttttctattaaatcaaattatacggatgaatggactgttgaggcaatcattttgaaattaaaatacctctttggtagtagtaatttacgaataaaaaaaggtgtaatgagaaatgggctgaaaaaacaacggaacgaacgaattgaacgaaatattggaacaaaaagagagagcaaaggcaaagggagaacagaaacagggagcgaaaaaagcacgtgcgatcggcgcgtggaggaaaggcaaacaaaaagtgaacatgacgagacacaacaacgaaattcgatccgtcgcgttttgtgcggcgtacgccgacaaaaaacaggtaattcgtaatttgtgcaatttggcactcgcactttggcttttcgtttccaaattgtgcattgctttcttttccttttcccctccaaaattccaaatgctttttgttttcgtttcttcttttataaagagttgttttggccgtttaaacgtgaataggtaataaatacctaattgttgacctcgatttcccgattagttcgtgaatttaattgcttttcctattttttccgcccttttaatttattttcctcacattttcagtatg

SEQ ID NO: 101675 - DNA, 87 bp, Heterodera glycines
  unsure (1)..(87): unsure at all n locations
gtctgacaaanttgtgccaccacaggacaacaactccaacagcagcaaaatagacaacaaaatagtgcgggaaatgaagaagaaatg

SEQ ID NO: 101676 - DNA, 154 bp, Heterodera glycines
agtaattttcatttaattttttgatggaaaattgtatattataatttctataattttgaggtctgtattttttgggcaattttgctcaatgtaccagcgcgcttgcgccgcatcgagcgccttcgtccgcgtcgtccgcctgtttacaacaatg

SEQ ID NO: 101677 - DNA, 112 bp, Heterodera glycines
acaccttgaacgcgaaagtctataaataggtaaagaattttgcaaaatcatacatttaggaactcatcatcatcatatagcagtactaaatattccttattgattaatcatg

SEQ ID NO: 101678 - DNA, 59 bp, Heterodera glycines
tgcgccactgcgtgtgagttgcgtcgtgttggatggacacgcgcgtgccggtcagaatg

SEQ ID NO: 101679 - DNA, 860 bp, Heterodera glycines
actgcgcgacatttttgtggaacaccgacaaaaattgggtggccatttcgcactgattgacccatttgagaagcaaaaagagcggcgacgactgatcgacgcttattcggcactgaaaggcatcgacgcctttccctcttcgaatgcgcttttgcaacttggcgaatattttccgaagcaacaaccggggacggcacagccccaatttgggatgagtaagtattttaagagccttttgtttaacttattcttggctcatccccccagtcacaatactgaagtccatttctccccttttagctcagttcggtcagccctctgttggtggtggcctttttagtgcctcaaaagcgcccgccttcagtttcgccccctccgctcaacagtcctccaccaatctcttcggcacaccaaaaccaacgccttttggtatgccaaccacaactgccaccgcgccaagtcctttcggtgctgcggcagcagtcattccaacttcggctggcggtgggttttcacgggttggcgttttgtttgcccccccccccctcattcggtgcaaatatttgcgtatatacccacccatgggttttttggcgaaaaacggcgaaaaattttgtaaaatagaccccataattcgggatttcaaaaaaccaaaaatacacccctaaaaatcgacttaaaaaagaaaaatacacccctaaaaatagaatttttgacttcagcccccccccccaaagccaagggtctggctacgcccttgaatggttataatactttaatctttcgaaaaacctgatttaattcactaattcctcctttgagagttttttctaacaaaacaaacttaatattaaaaaatg

SEQ ID NO: 101680 - DNA, 594 bp, Heterodera glycines
aaaatattgaaaaatataattgtttaagatgggaattgataactaggctgggaatttaagtcgtgagcttggaagtttgaaaagcagattttcttattcaatttaagttgttaaatgacttgaaattttgcagataaatactttaatataagggccaggatgacattccgaggccccaaaaattttcggaaatcggaattccgagggtcaaaaatttttaccgattttgagcaaatttctcaagaaaaataaagatttttagggtccggcggtgccgaaaggcgccgccgagaaagttttgaaaattcagtgcaatttattaacagaaatgtacaaaaattgataattttttgaaaaaaaaattcaaaagctttttatcaaaaatttcggaaatcggaattccgtaccatccctaattttttgtaagaaaatctgcttttttaaatgcagtttcagaattttaccaaaaatacattaataaatgggtaactcggatggaaatgaaccctcgctaaagtccgaggctcagattttatataacaagatctaagcaacagttccatcacttcacaggacgatcaaatcttttcgatg

SEQ ID NO: 101681 - DNA, 497 bp, Heterodera glycines
catatttttaatataaaagcaataattaaatagcttatagtgtaatttattacatatttggttttataatcattagcgttgtgcgtttgtatgcttaaaaaatgccaaaattataaaaaatatgccccaaaaatttaaaaaatggatttaaacaaaaaaactgcagctgtataaattcaaaattgacctgaataaaaaaatcacaaaaatttttttattttataaattaacgtatgaaaagtttgaatgtttttaaatttgtatttaattatctggcaaatgcaattatattgccaaattgagaaagactttcttccgttaaataattttacgagttttttggagcagatttttgaaaattccataacccgaacgaatggaggggcaccgtatccaaaccgaatcgagaaatttcaagttttccattttaaagtttcggtttaccgaccccttgaccggtctatattattaatgacactaattaattataggaaatg

SEQ ID NO: 101682 - DNA, 875 bp, Heterodera glycines
  unsure (1)..(875): unsure at all n locations
tttagaattattcattantgcatttttggtaaaatatttacaatgattctttgaatagagaaatattataatatttttgaaacttcttctttaaccttaaatttgaaaaatataattatagttataaattaattgcttattcatttttttatttaagaatgtttttatttcaataattaatccatccctctttaaatctgctatgcaaaagtgttatttcacttttaaaaaatacattgagttaaaaaatatatttttgaatgttgataagcactaataaacagggctgcaaaaaatatgcaaatgcatattctcacgttattgtgacgaatagggtttgagcttcaattttcatttgacagctttaagtgacagcaggcccgtatccagaaaaaaatttcgggggggggggggcacccgaagagctttttttttttgctcttcgggctatatatttttttaccagtgttgtttttcaaaaaatttcagcgccggagccacaaaaaacagaatttgtgtcaaatgctaaaaaaatattggtaaacttgagtccggcggtgccgataggcgccgccgggaaaaatttttggactttttaatcaattatgttaagaaaaaagtgcaaaatttttttcaaaaatattgaccatttttgcttcaagcatggcagagtgaatacatactctgtatacgaacaagaaataataataaatataaatcagaaatttacataaaaatgcatgtataatgaatgataagtcttaatagtacttaaaacatttaaaaaaacaatcttgaaaaagaagccaaacatttttaagaaaattttaatttcatattcacgcgatttttggccaaatatttgcagactaatg

SEQ ID NO: 101683 - DNA, 252 bp, Heterodera glycines
tgtttctccgagatttttttttagatttagggatttgtcattttcaaagcaaaacgaaaagcaatgaattttgattgtatggtgaattaaatcaatttccctctccaaatatgaacactcattttattgcctgatgcgattcatttgttttgataaatttatcaaaaaaagtattgtttatgttttctttgtcttgttttcaactacttttaatttgtacattgttcaactctactgtttaattgggtcatg

SEQ ID NO: 101684 - DNA, 142 bp, Heterodera glycines
taagccagtacaacaatatcaaatagtttaatccattagccctggtctggcaagcggttaggctttgccggacttgacaaccatttaatgatgtgatgacccccggggggagcttttttttattagttgtcaaccgaccatg

SEQ ID NO: 101685 - DNA, 750 bp, Heterodera glycines
agttggcgagaggcgagaggacgagaggcgagagtttttcaatttttttctgtagccttattttttaatttaaaaaacttcaaaatcgtatattaaattaggggtacgggcctgggtatttgggcaaataccgggtcagggtattgccgggtacagaaagccgggtcagagttctagtttttaaaccgagtccaagtcatgaaaaatccaaacaaaaatctttaaaaatttttcatgaaaattaaaaaatattttcatgaaatatatttattttagaaacaaaatttattatttgtccattttttccacctttttttgcggtgcgttttttaaaacttcggggacagttggggtcgggcggtgccggtaggcgccgccgaaaaaattttgaaaattgtcttcggatttgttaacagattttattcaaaaaatgaccaaaacttgttttttaaattttttgtttttaagtcgctttttttgtggcgctgttttttcaaaaaaacttttttggaacattgggtgcggggtccggcggtgccgaatcggcaccgccaataggcgccgccggaaaaattctaaaattttgagtgtaatatattaacagaagttgtcaaaaaatgatcaaagttttggttaaatttgcagttttaggctgtgtaaaaaagaaaaaataataatttttaattgaaaaattttttattaattaaaatttcgattgaaaaataatttatagaaattatttaaaaaatg

SEQ ID NO: 101686 - DNA, 459 bp, Heterodera glycines
taatatctgtggcatggaataaattttggaactgcgctgcctaacggcggtgcttaaagtgcgctaaaaatgatcaaatgattatcaatttttatttttcttaattccaaaatgaattgaaacgcaaaaatttaatcataattcatgtggtaaaaaatgcatttaaaaataaaaaaattcttgaatttgcttctgaattttttaattttaaatagaaaattactttttcgaaaattttgcacaaataagaggcggagaaattcaacgaaatttttattaggattttgatttaaaatgttgagaggtttaacaaatttgtacactgaatgttggatcgtcaacaccaatgagaaatgactaacagaaaagagggagaaaagggcgttggcttaggaaaatagcttataataaaggagagacgagcagacgatgagtgagagaaaaatagtggtaaaaatg

SEQ ID NO: 101687 - DNA, 542 bp, Heterodera glycines
acttaattcaagccctgaattttgtcgggaccctgccctaatttctcaaatttacaagctccttttcgaaattatggctttataatttgtttataaatagcaatttttggcgctatattgaaagttaccctttttgaaaattttttcaaaaggggggacccttttgttttgcaaaattttttttgtgatagtcataaaaatttattctctggggtttttggggtccccgatcacgaatccttcaattattttgatcaattccgatttcctaatctaaatttgaacaaaaaatcataattatgaaaaattcaaaatttcgatttttattccagttcgggttagggattagaaattattcaaaatacatgacagatgcgtgattaacgaccttaaaaacccagaagaaacaatatatgcactcgtgtgtgttaatctgaccgtgactgagcactgcccaaggctctgattgttaagccaaggaaacttgattaagcgcgggtaagcggcggcagtaactatgactctcttaagggagccaaatg

SEQ ID NO: 101688 - DNA, 51 bp, Heterodera glycines; identical to SEQ ID NO: 99312

SEQ ID NO: 101689 - DNA, 1003 bp, Heterodera glycines
tcatgggaattatgtatgcctgaagggtaaagacaatcacataatataaaataaaattatacaatttttaagtgtcacattagtaaaataattaatttttttgctcatttctcaataatcagaagtgatcagaacaacagcaacaattcgtcccaatcccaaattctaatcacacgtcgtattttcaagtcgttaataatttagtgtttttaaacagtttgtgaaaagcgtttgattgacatcaccgaataaatgaaatggtacggatcaaaatcgccaattttggcataaattttgtcctggacaagaatgtttgttatgagcaaccacgtcccgctggtggaccatatcggacgggtgcgcatgattccactgttccaagcaccccaccgaaagttgaacgaaataaccaaaatataaggaaaaattttttaaaaatttttattcttcacctgttagagaaggaagtaattattgattaggtgtatgaccccacgccacttcgccatcttccccctcccattcccctcattcagttggttattgtgcccaccaattttgacctcccaatttatttctctgcatttttattattttattttcttcggcaaataaacttatttaatttgttatcttcggacataacaaattttggcgcagtcagcaactcaacgacagcgtttattttccaagctttatctcgtgctgatattgcttgtggtgattcatcataaaccgatctttgccatattttacggcacggtttatcaacaatctgtgcaactaaaccgcatctttgccatatcttacggcacggtttatcaacaatttgtgcgacataaaccgaatctttgccgtatctcaaggcacggtttcatcttcgacaagaaccgatttttgccaaatctcgaggcacggttatcgtctatttcaagccaattttacggcacatcatttctccgatttcggcaaattaaagggatttataagccattggaccatg

SEQ ID NO: 101690 - DNA, 152 bp, Heterodera glycines
aaatttccatgtttgagttggtgggcccttgccaaatcgttatttgttatgtttttttcaacaatatttcattcgggtatgcccttaggtatcaccacaaaaattctcaaaatcgtttttatttgacggaaatggagttttcaaccgaaatg

SEQ ID NO: 101691 - DNA, 193 bp, Heterodera glycines
tttctctataaatttaaaaattttagaaactaaaaaagttagatttttgatatttttaacgggattttatacgtttaaaatttcttatttttaatgtttccggtttcgtccagcccgacattttcattaaatcgggattttatacatttaaaaaaaacaaaaattttggcaaacgatacaccttaaacacatg

SEQ ID NO: 101692 - DNA, 298 bp, Heterodera glycines
  unsure (1)..(298): unsure at all n locations
ttaatacnncgcggccaccacaaatcatttcgtaagttcaataataattatagaaactagaatggtccaaattttttctgttaaaaattttaattgcaattcatttctgtattcaataaattaaaaaaacaagaattaaatacgaatgtaaaaaatttctgaagagaaaaaatttaaaagattttttaagcaataacttcatacgggcttcatcatcagagaatctatcttatgtatgttttgtttgtttatacgtattgtaaaaaattgtatttaaattatttttaggataatgatg

SEQ ID NO: 101693 - DNA, 263 bp, Heterodera glycines
  unsure (1)..(263): unsure at all n locations
aaatttataaatattttaggtgcnngagaaattaagcaaaatgcagaaaatgaaataaaggaaanaattttcgtaaaaattcattctccaacacaactcaaatttggtgaggaaacattcaccaatgagcaaatcagaaaaaaatttgatgttttatttgaaagtaaacacaaaattttctttgccaatgaaagcgacgaaaataaatttttggtaaaaataataatgtttcaataaaaatataatatataaattttaaaatg

SEQ ID NO: 101694 - DNA, 118 bp, Heterodera glycines
aatttatatttcaataattaatttttgtttttttaatcaaattattgagtggttttgtaattttaaaactattgcgaaaaattaaaattgaaggttaattttaattggtttgaagatg

SEQ ID NO: 101695 - DNA, 221 bp, Heterodera glycines
  unsure (1)..(221): unsure at all n locations
aatgtggcccaaattttagccccccagccacagccccttggttctcccagttttagttctggatttgtcaaataaattcaagacttccaattaatatcaaaatttctcttaaaattttttgaacncnaatcaaaaaaggaaaaaaatttgcagtcaaaaaattattcgaatttctccaattttgtttccataatttccgaaagttattcggtatcataatg

SEQ ID NO: 101696 - DNA, 477 bp, Heterodera glycines
cagaattttgaaaattttttataaaaactgatgacaagctaatgtgataaaacaggttaattcttttcctttcagtatccctgcaaagtttggggcgcttctgataagtttctgaaaaaaaagttaagcctacattttttggcatatttaaaaagcaattaaaaaatttttaaaatttaataattttcctgcaccgaaggtactcactcggcctcttcgcggcctcgtggggggcctttttcccggccgtgacactaagttatgaaaattttaagggatcagtgagctacgaaaaattaaccatcttattataatgagaactttttgacatctgtatgcatgttcggatctcactttatccattttataaaccctcaactttttcgaaaaaatgaattttcgtttttcaggaaataaataaaaatgtacaaattttggcttacatatactttttttcagcaagtggtggaggacatg

SEQ ID NO: 101697 - DNA, 68 bp, Heterodera glycines
cttttcctgctccaccacctcctcctgcgcaatttgaacatggagaggcaactcgagttgaaaaaatg

SEQ ID NO: 101698 - DNA, 354 bp, Heterodera glycines
aaatttgattaaaatttgttgacagattttcactaaaaaatgatcaaattttgtgatttttatataatttttctaaggagaaataagagttttggcgcgccgttgagaacagtttttcatcaaattaccaaattttgcgattttgggccattttctaagaaaaaataggagttttgggggcgcggcggtgccgataggcgccgccggggaaaaaaattggaaattttgatcatttataaacagtttttcactgaaaattagccaatttataggtaaaattttgaaaaattttatgggaattttatccaattcttaggggtgtaaaagtcgcttttcgcgccaaaaagcgaaatg

SEQ ID NO: 101699 - DNA, 733 bp, Heterodera glycines
gctataatatgagaaaactaggaaaattatagtaataacctaaaaaaaaaagaattttattaccagggcttctttttttatgtaaatacatcttttttcctggattctctatagcctaattagtaggaaaaacactttattttttgtgtttgcgaacaaaaaccaggacttttatttacatattttgcgatttttctacatatttttatacatattttggactttttcgcatttttcgtacatattttgcaatttttaaggaattttttattaaatgcccaaaaaaaaatctaaaagtacacaatttttttcaaaaattttgagaatttatagaaatttcttgcgaaaatttaaaattttttcttgaaaatgttcccaaaaaaatatttttcaaaattctgataccaaaaattaatttttaaaataataaatgttgatttctaagcctatttattaggtcatttttatggcattttatgcgtatttactctttacgaagaattttttttcaaaaaaataacctttaaaagattttatttacatattacatatttggggatttttgtacatatttaatacatattttagcatttcttatacatattttatttacatatttcgcgatttttcttacataaaaaagaagccatgtttattactaacttttgaggataattttttttttttttttgtataaattttgtttgattgcagctgcgcagacagctttatg

SEQ ID NO: 101700 - DNA, 242 bp, Heterodera glycines
cgaaaaagcggaaaattttaaaactccttaagtttctgaatgttaaattgcattaggtttgtggttcactttatattcctgctaaattcagaagaaaaaaataagtaaatttcctaggggattgtgcttatttttaagaacggaattccacgttttgtcggccttaaacttgacaaaatgggaattgaataatttttattttttggcgtattgtttatttttagaaatttaattctgaaatg

SEQ ID NO: 101701 - DNA, 149 bp, Heterodera glycines
agcagcggcatcagtcatgagcagcgaatgttttgtattttgtatatttttctcgcctacgcatcaatgaagttttgtagacatttttttgtgtttttattggttttaaatgaaatgaatgatattagtgatggtaatgagtaattatg

SEQ ID NO: 101702 - DNA, 124 bp, Heterodera glycines
tgctttgatagacagacttattagtgcgggaggaagcatatgagtacttttttaaatacataatatctaatacatactacgtacaaattttaaaaattttaggcttttggcccgttataaaatg

SEQ ID NO: 101703 - DNA, 319 bp, Heterodera glycines
  unsure (1)..(319): unsure at all n locations
ttggtacggtaacccgcgttgattaaattacagtattcaaattggatgccatttttttttttttgaaaattttggcaatttataacagggcattttttaggaaattcatcgattaaaaatcaaaattttttgtacaaatttaaggcgaatcaaccgatcgcgaaaagaacaacaatctgtggacagaatggacggaatggacacagtaaaaaaatgcaataaaattataattanaaacaaataanaatcaaaattanaatgtgtttgatttgtcattttttgccagttgttcccgcagttgtggtggaggagacagatg

SEQ ID NO: 101704 - DNA, 166 bp, Heterodera glycines
ggtgagcttccgccaggcgcggtttattcatcataaaaaaaccaagatacccaggtggttgcggtttccgccaggtgcggtttactcaacaaagacaaggaaattcaccgaaaattgatcaacaaaaattgcgcaaaatccgacaatcgatcagctagtgaaaatg

SEQ ID NO: 101705 - DNA, 312 bp, Heterodera glycines
  unsure (1)..(312): unsure at all n locations
tcattgggacgctaaagcaanaggagactgggaaatcacaaactatgaatctacaaaccggaccgggaatcaaggcaaaatcccgacagtgccacaaacatacatttcagatcttttgctgtgtaaagacattttttttttaattttgaattggcataaaaaaaaattttgaatttgaatttaaatttgcttaacggtgtgagagttcggcggaactgtaactgctgattttgcttaccaaattacctactctttgattttgtcaaattttaattttcttaagttatacatataattaggttatttaaaatg

SEQ ID NO: 101706 - DNA, 96 bp, Heterodera glycines
tattccaaaaggggtcgaaggagacgaactttttggtctaaaaaacaaattgcgaaattttgtgacgattggccgaacatttgacagaatcaaatg

SEQ ID NO: 101707 - DNA, 802 bp, Heterodera glycines
cccccattctttaggaatgtcctaaattgggtatttttatgcaatatttaagacgagattaataaaagcatccaaattaattgttaattaagatctattgaaagccgttcatccgaattttcgtcagaatttcgttgaggtaaaaaataatatttaattatggaatttatacaaaattctaaattcactgaatttttcaaattcgccgccaaaaaattgttgggatgccaacgcttgtgacaatcagctcagaatcattgatgacaaatgtttgactgtcagttggtggtcagaggaagaaggtgaattatcttttataattagggatgtgaattttatgtaagaaaatttgcaaaatagtaaaaatatatatattaaaacagagagaaatatgtaagtaatatttagaaaaacccaaaatatgtaaataaaatatgcgaataaaattttcacctattttttagaaatatattttccaaagtaatttattttatttttcacaagaattttttttataaattctctaaatatgtataatatatatatatatatatatttaaatttgtacaaaattttttattaattaattaattattttgtcaaaaaggatgctcatctgtcttcgcaaaacacccattcccgacctgttcttccggcattttttattatgaaaccaaaatcttaaggatgttagggtataatgtttcttaaaaaggaaattacattttgcaattaaattatttaatttgtgtgccattattagaaataccatttttccattggaatcgcctccaaagcgatg

SEQ ID NO: 101708 - DNA, 451 bp, Heterodera glycines
tcccctcgatgttttaagtgataaaatttaggtataactccaccccgagaaatttgaatggacttaaaaaattgtaggaaaaaaatttattgtttatagataagccaacaattaaaattaatgaaaattttcgatgacaagagttataaaaacttgtcttcaaaaatttaagacacaatttctatggactcaaaaatttagtaagaaaaaaaaaataataatttttgcttcgattttgaaagccgacgatttatctgaaataaaatttttgattttatacatattttctattggaattttgaacaaattgctcatattttttaccattaaatacaaatttggatatgaaaaaaaaaaatttttttttgtttgtaagtttttactttattttgtctaaaattttcaaaaattcaatttctaatttttaattatttggattatattcatcatg

SEQ ID NO: 101709 - DNA, 209 bp, Heterodera glycines
  unsure (1)..(209): unsure at all n locations
ataattgtcatatgacatcatctaatctatgattttttcatcaaagtgngncatgggnaaaagnanagggagaaaaaacgctttatggggggaanggggnngngaaaaagaaagagaggaaagaagnggaggaagaagaaaagggagaagaagaactaaaatagaaagnggagattttaangaatttagaatttttagtgttaaaaatg

SEQ ID NO: 101710 - DNA, 1003 bp, Heterodera glycines
ccgctcgctagcggccatcgtgacaaaagcaataatatgtatatatgtttcgaataaatgctaaatgtaaaatatgatctaaaaacagcaaatctctcataatgctagcaaaaaatcgattgatcaaagcatttttgatcaatcgataaaaggggagagaaagagatgaagcgttggcaagaggaaatgaatgatcaatttgaacagctgaatttttattttaccggaatatcataattgataaatttatgattattattggaaccccctcatccacttcatgcccctcacccatccccattagtccccactcactccctccccctcctgcctccctcatcccatccctcccacctccccttctcccggtctccctcattccctccctttccctatcccacatttcctccgttcatcctctcctctcgcctcttctctctcccctttttcttcctcctccttccatactttccctttatcaatatcatccactcttattgttagctttatttcccattcccgcttcttctcctcatcccttccgccgtcgtcttctcccttgggatttagagatttccccttccctcgcttttccgcttttcactccttccaatttgctcatcccaaattcggacaatttttccatctgtcctattcattattactttgtacgaatgctttcacttctgttcattcaggctactaaatcaaaacaaaccaaagtattgagaaaaaggtgtgtaatccttcggggcatttctcaaattccctctcaaatgtcctccgctactctctttttttttatcaatttcattgcttattctttttcccattggttttcgcttttcaatttcccttccctttcagtaaaaagttttcttcctcctcttcttcctcctgtttctctttctcttcctcctcttcctatttttcttcctcttccgtttgccttcctcctccttcttctcttcattcttcttcttcttcttcttctcttccaatg

SEQ ID NO: 101711 - DNA, 1003 bp, Heterodera glycines
ttttatcggtgaaaattaatgaaaaataatcaaacaactgtttcgttattttcttatacatatagtaaagtaattgaaaaagtgaatgattaaatagacacatgatcaaacacacacaaatattcaaactacaattcaaaaattttcttttcattcagcggaattaacgaaaaattagtcaatttgttctcttcttataaaacaaatttcaaactataaattcagaaaagaatttttgaatcgacttattttaattctacagaactctgaaaccggaatttaaattaaaaaacgtcaaaattaaattttattttggtgggtctttttttaattgaatgaaatttcaataaattttcttaactggttttgtaccaacaaaatgacaagccgctactcggaacctgtcagagtgctgccgcaaaatgcgtcagtgataaaaattttgtagcattaagcaatacaaaaagctcataattgcataagaaaatcgttctgaattcgtcaatcatttccttagagtttgaaaaaccgacttttctcgactacattgacaaaatatttcaaaataaaacatttaaaaaatctccttatttcaaaattttcaacgtaaagctggatatttcttttccttttcttttttagcttttaattttgtgcccaatatattttcatcaataaacatcgattttgaataactaaagaaaaatgctatcattacacataactaaatttatacaaatgctcattaccagccaattttaaaagtaataatttaaattaaatatttcttttctttatggtaaaaatggaagaaaaaaatagtttcaaatacattttcaagcagtgattattcttggcccgatcccgtcactacttaaaaatctgcggccattgacttcagcttttaaaactgagatcaggatcggacaggtgctgaataaccgagcattgctggaccagtactggtcggtgttctgctgctgatcccgctttacacaagatg

SEQ ID NO: 101712 - DNA, 118 bp, Heterodera glycines
cctcaaaagaaattgagcatttgccgaagcgttaacaaaattcaaaaataaacctcctctaacacaattaaattcctttgtttttctcccctcggtttctgtgttcaactaacccatg

SEQ ID NO: 101713 - DNA, 434 bp, Heterodera glycines
atcaattaccaccacccagcgctctacactatcctgctgcgttaatagtgaaccgagaccctcacaacaaagaaggctcccattggtgtgccatttacgccaagggtttggatgtgccagttatttattttgatagcctatttcatcgtcttttttaattaaatttccaaacgggacaaaaaagaatgctcatccttatcaatcacctctgacctctacatgtgcccaccactgcattgtgtttctataccacatgtcgattggagatacatttgatcaatatttacgcattcttgactctaacgcatcaccagatttatttgtgactgtaatgatgaataaaattgtcggaaattacaaattgtaggcggagcttgggtgaccgagtataaaagccttcccgttcatcagatgatttcattctgtcaaaaatg

SEQ ID NO: 101714 - DNA, 669 bp, Heterodera glycines
aaatatatatatatatatatatatatacatatatatatatatatataaataaataatttatatttgatttaattttaatcatttgacggggcggagtcgttatttaaaaaacatcacaaagggcgttatttaaaaaaccatcattatgaaaatttttgtcgaaaaattatttataattttgctccaaagcagccaatttttaattcttgatatcattcgatagccctaagtgttctctatcagtctgcaaaatttcaaaaaatttcttaaagtttcaaaaaagttatagctcgaggaactcaaaaaaccgtggttttcgaacatttttggccataacttattttaaagttaatagattttttttgaaattttgcaagctcataaagaacacttagttctatcgaatgatatcaaggattaaaaatttggttgttttagagcaaagttatacgcaaaaatttttattttgatggttttttaaataacgcgcataatgatggtttttaaataatgacatagcaccatttgcacagtcaatttgctcatttcgttgtcgctggcattcaattcgaaaagtccgtcactttgttcatctctccgctcatttttttgctgttcatcaaagacgaatcgtcacaagaacaatggcgaaatgttttccttggaatg

SEQ ID NO: 101715 - DNA, 104 bp, Heterodera glycines
tgagagtgtgtgtggcataattgcctaattggcgcgctaattggcaccattttaaggctgaaaatgtccagcccagtgattctgattttgtttggcataaaatg

SEQ ID NO: 101716 - DNA, 611 bp, Heterodera glycines
acagtatctcttcttttatttactgtatcatttaaataatacaacaaaaataaataataataataaaaatcaaaataataaataacaaaataaataaaaataacaataataaaaataaaacgaagtgtaaagtacaacaatttcttttctcataatcctgtgttttctccgacattctctaatggtgtaacattggtgaccgatgacttttgtaactgtgtacactaatgcttactgtaatcagcggtcctttcccacgctaatgcatttcggatcgcaattgcttatgttattaacgcaaagctttctcaaacattaaacacactctcgaatattcttgtcacactttctcattcataagccgagtccatccaatcaaaggcatcattcatcatttaatttgtcaatagcctttcatctccttcattgactattgtgtcttcaattcaatgctcattgtttaattagtctttcactttcacaaattaatataatgtactcattcatcttctatttattctttatcatcattcagctattccaaatcccaaatcattcccaaatccattccaattgtcttttcctctcattgtttgttgcccacacctatg

SEQ ID NO: 101717 - DNA, 1003 bp, Heterodera glycines
gtattttaaccggttttgaaaaaaatattctttatataacaatgatcagacattttctttatcaatatatcattttattttcttctaaaaatgggaattattttctatgatatttttttttattcaaaaatttttgttaaaaataataccaaaaaaaaccaaattatttattatgataattaataatttgtcgacaaacacactatttttgataaagtataaactttttatataaattaaaaaaaaatattattgaaaagtcacataattatacctcagcagcagaaaaatcatttgtgaaaacacacattataagaaagttcagaaaattttttgcacaataatattaatgaatataaataatatttaattaaattttgattcatttaattttctcatggcaatcatttcaattaataaaattattaataattgtaaatttttttacattttccttccgctgttttcttcataaaaaagacccaaatattttggcagttagtttagcataaataactaaaattataataaaattaatcataaaattttataaataatgaaattttatgttatatttcttcttttattattcataatgaatttactaataagtgaaaagaatgaaggaaaaataaggccaacctttgaagaaatatttggccaagaatgggaaaatgacaaaacaattgaaagcgaaattaatcaaaacttaaataatcaaaatgatttgaatttggctgattcaattcgtaatatcagaatgatgaattcagagatcaacaaaaatgcaaaattattcacaaatttcatgcaataaaagaaggaattaagaaacggggaaaatattcggcaaaattttagggttaaaaccgagcaaaaaattgcgaaaaaattgggaattaatcgaccaaaaatttacgaatggaaaaaagaatttgaaatttattattataaaaagaaaaaacaggaatttattgaacgaattgatgaatttaaaagaatg

SEQ ID NO: 101718 - DNA, 809 bp, Heterodera glycines
taagaaaagagacagagaaggagagagagagagatagaaatttatacaattttattaaaatatttttcgtttcggacaattttatatattgattaatgaagcccgaaagaaatgatgggatttcctttccttatttacgtaaaaaaaatattaaaaccacaaaaaactatattttgtatgcaaaattaatttaaaaataaaaataaataattctcgctactcattcatttccttaaaaaaataaaacccaaaataatatttattatttttgtattacaaaattcatttgcttttgttgaagaaaatgaaattttatcatttaatttctgtgctattattatgcacaatcaatttaaatgacaaaacgttgactgttaatattttgtgtgaaaagaatgggaaaattcggccaaattttgatgaaatatttggcaaagaatgggaaaatgaaaattcggaaaattcaaattggcaaagggaacaaaatgcaaattattatcaaaataatcaaaatgaattaaattattcaattgccagtgatttgaatgaccacaaaaaacacgaaattgtccacaaatttcacgctataaaagaaggtattaataaaagaggaaaatattcggaaaaaaacagaaataaaattgaacaaaaaattggcgtaaaattgggaatttctcgaaagaatatttacatatggaaaaaagaatttggaatttatgaaaagaattttaatgaaaagaattattacgaaaagaaaaagcaggaatttattgaaagaattgatgaatttaaaagaatgtccaaaaatg

SEQ ID NO: 101719 - DNA, 51 bp, Heterodera glycines
aggtaaatgagaaattttttttcaaacgactaattttcagctacacacatg

SEQ ID NO: 101720 - DNA, 670 bp, Heterodera glycines
aatttaatcttttttcatttttaaattaaaaaaataaatatccctctaggttttcgtgaaattttttataatttgtgaaaattatcgcggtactaattactaatctccataatctttatcataaacatggccatcagctatacatttagaaatgcaatttccgattttaggcattttgaatttaatttcacagtttacgatttcggtgggcgtcaatggcatctcctaattgtgccctatgcattaaaaagtgccataactttttcacggttattcaatttgccattctcttaaattaaatgaaaattcattttgattgacattatcgtgagaaagacaaatttttgtcggttttgcgtttcttgccttgggaaattttcggtctcgagcagaatgtattattcatttttgggccttccgtttcagcggcaccattttttttttctaaattatgggaaaattttcttttttaattcattttcaatgcgatttctcagaaattctcatgctattttaaaaagctcttttccattcattcatttgacgaaatggcaaaatttgcaatcaagctttacgtttcataagcacaaagaatttaaaatgaaatttagagaaaataataattcattttaaaagcaccaaatatttctcttggatttaaaagataatg

SEQ ID NO: 101721 - DNA, 1003 bp, Heterodera glycines
tccgggtccgggcttatgattgaccgggccgcctagtaaaaaggcccatttgaccgcgcggggggaattttgggcaccgggaagtttgggcaccaaattgagaaattagaaaaataaaaatattttaattgtctataaattgcaaccatctaattaaaagcatagtaaattttaatcaagttaggaatcgaaagtttttgaatgaataatccgctcaattagccattcttaatttgctactcattaccattcattctatatcaatataataaatatgtattgtggtgtatcataacaaggctcggtctgttcaaaacttagttttatgagtttaaactagggttcggaccccgcccccgcccccgggggcgggacaggtttttggggctcacccccgtccccgcccccgtgactctgacccccgcatcccccgcccccgcgaccttcgcccccgcgggggcacgggggtgaaaaacacacccctaagaatggcatattcgtggaattaaaggcaaaaatttatacaatttagaattttttaaccatcttttacaaatttttatgaaataaagtaaatttgcttatattttttaaaatatttgtggtttagtggttagtgcttcaacattaacaaactttttgctaagaaatgttctggttttggggtagtaccttattttcatctaaaaaagggaaatttctaaaaaatttggctaatttctaacaaaattcatatagacttaaaaaattttccgcttgcggcgccaatcggcaccaccggacctctcccctcgcacattcaccaagtttttttgaagcgttccaaattttttttttttttttttttgacacgtagttgtccaataagtttgagatcaaaatggattcaatttcccgccgcagaccctccgtcattacccccccccccccaattaactccaaaaaacagcgaattgtgcagcaattggacaatgccgcctcagctatcgaacaattccacatg

SEQ ID NO: 101722 - DNA, 88 bp, Heterodera glycines
ttcagtgtcatcaatgctttccccgcttttcaccatttcatcggtggaaaatgttgcgctcagcgacaaaaaattggtgagaacaatg

SEQ ID NO: 101723 - DNA, 89 bp, Heterodera glycines
tgttaaagcaacagttttgatgggttttttaagataaacaatcctgatgagcgcagctattgttattttatgccttacaagcaacaatg

SEQ ID NO: 101724 - DNA, 71 bp, Heterodera glycines
ggtcatttcaaaagtgtagagaaccagcgaagcttgtgtgttcagatttgatggtgcgcattgaggaaatg

SEQ ID NO: 101725 - DNA, 74 bp, Heterodera glycines
ctgcgccgacatcccagcgtgatttctcgctattacattttagcaaattgtaattaacaatttgtacaaggatg

SEQ ID NO: 101726 - DNA, 224 bp, Heterodera glycines
aaaactcaattttaattataggaaatattctgaaaaaattactgcttgctaacttttgatgctgatcaaaaaagaaagagcactgaattgtctaccgaattgatttttgaatgttcggtctacgacttatacccgctgaggatgggcacttcaatttcggtgtctacaaaaagtactgtatttcttaaggaaatagtgcattttacagataaatgatcagcatg

SEQ ID NO: 101727 - DNA, 371 bp, Heterodera glycines
ggtaattgtctaattgccaagcaatagtttagaaacagcttctaaacatgtaaaaaaaatgcatttcaattatatcttcttttaccccatatatttgaaattttcaattattaaactacatattaaaccaaaaatatgtgctgcttctatcccattagtgtactttgggccgttcaaaatatcaacaaattacgttttgttttcgatttcttccaaatattctgccgctacacaaatatttttcttcataatacaataaaaacaaaaaacaaatattttatgcaaaatttatttttgattcaatttaatttaaaattagggtcatgaattgattttatatctttattggcaaaaaaataatattgaaaatg

SEQ ID NO: 101728 - DNA, 479 bp, Heterodera glycines
gcttaatttgcaaataaaaataattgccaagcaatttattggttttacacaaaaatatattttatattccattagatattgaataagacataaatggggctctcaaaaataatgcacaaaatatgtaccaaatttataacaatatgtaaaaatcacaaaatatgtaaataaaagtgccgatttttgttagtaaatacaaaaaagaaaatgattttcctattatttagagcataaagaagccatgaaaaattgtatttacattaaattgatagccccagcataactttaagatggcattttagcttatttttccgtaattctcttcacatttttgatcagtcacgagaccgtctcggccccacccattctcacattacggtattattgtatggtatcattgtattgccataatcagcaacagatcactcactactcacctgtaatgcgtcttcaaatgtctcaaattgggcataaaaatg

SEQ ID NO: 101729 - DNA, 97 bp, Heterodera glycines
agtaagacaacactcaaatttggtttgcgttatgtcgaaaatgtttttttagtctccttactcctcttcaccgccaccagttccgccatccatcatg

SEQ ID NO: 101730 - DNA, 422 bp, Heterodera glycines
ttgggagtgcattttgacacaatttcaaggcccaaaacagaaaatattgaaattcgagaggaaaacaaattggtaagaattatttgactatatttcacggtgatttgtgttctgtgacatgggtttgagttgtcacttttgctttagcaaatgaatcggagttcgctgtcccctcgtcaacagagtgctccgattgcaattccctccaattcgcattccatcgcgatggacccgatcgagtcccttggttcaaatcagttcagcacccccgacgacactttcggcagtttgggctcaacttgcgggggtcgttttgtaaatgtgaaacaggcaatttcatttttccctcatttttattggctttttcatttattaagtttctccagccaaattcatccaaaattgttagacccaaaacaatg

SEQ ID NO: 101731 - DNA, 144 bp, Heterodera glycines
acttttagaaatcataaaagaaatacggaggaatttaaggtttaaaattaaattaatttatgattagggcgtgaatttatatggacaacaaatcgcgaaatatggacataaaattgcgaaaatctcaaatatggacataaaatg

SEQ ID NO: 101732 - DNA, 400 bp, Heterodera glycines
gtttattcctctttttatcagtcagcaatgcttttcttctacatattaaacgattataaattaatttgggtaattacttaaatcaatcaaatgccaaagaaacaacaaatcaacttataaattattgcattattattagagctgggtttttatgttgttacactttttttacgcggcttagttatgtcaagagaagcccaaaaatagttttgacctaacaatttttgatttagtgcacttataaaaacataaaatacatattttggagtttggcacatattttggcattttgagaaaaactgtaagaaacacacaaaaaattgaaaaatacacccctaaaaatcaaaatttcttaccatttcttatagaattttcaaaatttcttaatttgtttcgaatg

SEQ ID NO: 101733 - DNA, 159 bp, Heterodera glycines
ggtgggtcggtgacgccaaatgcgttttgccatgggactaacccttccagcaggaatgactttttgggggtttaaagccttaattcccctcttatttcctaatacccccttttgttgttgtgattggccttcttcctcttcagcatttgcatgggcatg

SEQ ID NO: 101734 - DNA, 54 bp, Heterodera glycines
tttatgaagatattccggacaaaatttttgaaggagaggcacattccgattatg

SEQ ID NO: 101735 - DNA, 368 bp, Heterodera glycines
caacacttaaaataaaaatattaattaaatgataaaagaacacacaaatttaggcgttttgttgcaaattggtgcaccgccaataaagtgcacaagctattcatgaacgaacataacatgaatgaagtcgcacacacataatagtgatgattttttatggaaaacaattgatttttaatttattttgtctagtgataaatgtgcaaagaattttttaattagcaaagtataaataatatgtacaggtacgatcgatcagcgggccgtgttttaaaaaaatttttgttaatcataaaattattgcatttttttgttcgataaattttgaacttttaaaaccaacatattttaagaggtttataattatg

SEQ ID NO: 101736 - DNA, 760 bp, Heterodera glycines
atgacattttctggtttttaatgagtttgtgactaattttagcttgttttaatcaatttaggaacaaaactgagaattttgaaaaatttgaattttcgactttttgttcgaattcgggtccgggattcaaaattgagcgaaatggataccagaatcttgatcaacgacaacccggaaacccctagaaacgtgtcttgaatgactttaaattttaaaaatttccaccaaaaaataggggcaaccatcttaactattaccaaaatctctaccgaagtgaatgtgcaaaaattaagtaacataataatattctattttcgccggtagagaattttgtgctctttctgataggcttactaatttttcaaagaaaacttttcgcaccctttatggttttttgaaatttttaaaatttaattgataaaattggcattatgtatataatattgttttgcttgtttttgcatgtcgctgacctcatctcactgttttgtgtttgaacttgcgaaaataatagaagtgttttgtgtttgttgtttgttagagttagtttcgctggaaaaggacaaaattataaatctgctgactttcataaaagcattaagtaatttgaaaaagctaaagttaaaaagtggcaaaaaataaattgtaggtttaataaaattggaaaacagtaaaagccaagtcgttcaacaattacatcttgagttctgcctgctgattctccacacttttgctaattgattcctttcgaatgatgatg

SEQ ID NO: 101737 - DNA, 685 bp, Heterodera glycines
ggtcggatccctccgacctcatttgtccggtctctagtaaacagtattattttttttaaaataaatatattcattttttgttcatgtgattatttattatttttcgcttttattattttttataaaatattttaaagagcaaaagttaatgaaaacatttgtttatatatggtgagcattctttttttatcagtagcgaaatgagaaaatgagaataggctctctcaaatgcagcagaaaggaatttaacattatttaatttatataaattaaatgaataaaaaatgaggagaaaacaaaacaaaaaaagcaaaagcaggaaaaataaacgagtgataaattcaaatgatatcttaattagctggataagtaatatatatccgctgtccgattccgattcgctgatcatttcctccaatatttcatccttggcatgggtgttgaaatagtgacaatctcacacacagaccaatgagacaaatatgcaacatcagacagtttttgtatcaataagataaataacgaaaaaagttcgaaaaaatccttcccatcatgacatggctcaaaaatgccgtaattcccgtgccgaattccgatctcttccgcccctttcgcacattgaaattttctggcatttctgattaataatagtttttttttacttttcccattaacagcagtaatg

SEQ ID NO: 101738 - DNA, 942 bp, Heterodera glycines
ttgtccaaaaaaaaaagaaaccaaaaagggcattcgatacaaaaacgaaatacgaaagaaaaagaaaaatttgaaaaccgaaaactaaacaaaaaaaactttcgtggacgaaaatgaaacacgaaaacgaaattaacatgggccgaaaatgaaggccaaaacgaaaacgaaatgaaagggtccgagtctaggaaccacaaacattgttgacaagcataccatctccacactaccgtaaaatacatatataaataaatactgtataattgattaattatttggccttttgatctcgtcatcccaacttatttcatattttcttaaagattctctcgaaattacacaaaagacgctgtttttcaaataaaataaataacaataatttttcgatttcggtacaacaaaatgaattgacaatttttggcagttttttcggtgactttttcaccaaaaaaaataataaattcttctttaatatgagcattttctgattttttggttaaaattataggcatttttatccaaaaaagttttttttatttgtttttaattttgttaaatataggtttaccttttttctctttatttcatttcgttcttttcaatttacaatttattttaatttctttttttttacttataattttcgtatagtacaaaattatttttatgattaaataaatttattccattctgtttgtttggttgatgatttggctttcataaatgggatagcgatggcttttcacatttactgataatccgatagaaccatttaaaatggaattcgaatgaatcataatgggaatggagagaacaaattgggacagaattcgctcattattaaaattgacgatcaactacaattttaatcatttagcttcaattttgaaaattaaaataatctttccctaaattttgccaggaattgccctgaacatg

SEQ ID NO: 101739 - DNA, 833 bp, Heterodera glycines
ccactatgtccttgcaaatcggcatacccgtccttggaaacggagcatggacgatgggagccctgcgatataccaatgtgcacttttgaacaaatacaaaagtaaattgttttaaaaaataaaaggccggatttaaaagcaattaaagacaattatctgctttcttttaagcaatagcgatcttttagcacataaaaaatttctggcttttgattcataaaaaatgcttggagttttggcagttttttttgcagatatttgcttttttaaaaataattcttttttccaaaataatagctttttggcactaaattcatgacaaattagcataaatgatcaaatttctctcaggctcctttgagcattgtagcatattattattaaaaataaatgtgtatgtgagtcagtccttatacttaattattattcttactattttccgacaaaagaaaatagttttaaccaaaaagcagcaaagttatttttgttagcaaattgtgttagcaaatttatttgaataattgttaattggatattatgtaaatattaaacagcgtttttttcatttttgaaacataatttagcttataatcgtttatcaaatttttattaaaaaattttttttttcgtgtaaattgattttcaattaaaatattttttttgttacctgtttttttcctacattcttaaaaatatttataaaaatataaaaccgaaacattaaatctattaaaaaatcagattgcgcgaaaccaatggccgttgtgcaaaatgcggcgacccgcactcttatttttgcgtaatttgctgtggctttttttcattcaacaatg

SEQ ID NO: 101740 - DNA, 133 bp, Heterodera glycines
aaatacataatatttatttttttattttaaacattattttaaaatataattatttttaataatattttaattaaaaaaggtgtcgccttatgaccaaaatttcgcaacattgccaaatggaagtttcacaatg

SEQ ID NO: 101741 - DNA, 338 bp, Heterodera glycines
aaaaaaattctaacatttaaaattttgggactgggattttaaatttttataaaaataaaattgaaaaattttgcagttatgtaaaatcaaatttaatttttcaaatatttgaatgaattcaattaaaaatatgagtaaattcttataataggtaaatgtttgagtcaatgtttaatagatagcaaattgttttgcagtaagtgtaaaaagtttgttcaaatgtttgtaaattgtaagataaaatgtttggcacaaatgttttgcagtaattgtaaaatgtttgtctaatgttggcttgtaaattgtaagataaaatgttttgcagtaattgtaaaatg

SEQ ID NO: 101742 - DNA, 76 bp, Heterodera glycines
agagcgaagagcagaagagtgaatacattgaggagtgctgggggaattgcaaattaaactcgacaaagaaaagatg

SEQ ID NO: 101743 - DNA, 191 bp, Heterodera glycines
tttcttagggtttctgaaaaaattgatttttaaaattagaaatttatgataataacctaaaatgggaaaatataatctacttcaaatttttcagagctggtttgttaaacatgttaaaaaaattccaaaaaatgtcgtccaattaattcatattttaatcattttaattccccttcgtatctgaagccatg

SEQ ID NO: 101744 - DNA, 818 bp, Heterodera glycines
tgttcgggtggaacccgagagacatttatttaatttgattattgtcatttatgtttatttgttgtgtctgaccttttacagacagacacattccttattgatattgtgaccatttgccctcccctcttttcattcattcagtttatgatatttgtgttcacattttccaattgtctcctccgccgtcctccgacatatttatttgttattttaatttgtcttcaataaatatttatttgttcgtccattcgacatttcggggaccgaacactccatttgctttgttttttttcttcagcttattatacccattgctggcaacgttttacttgcttaaaaaatcctattaattcttagtggattagtcagtatatgtaaaatgttttcgttttattagattttttcatgtattctttagataaataaaataacatttttttaccgtgtcaatttattgtattatttttttaataattaaaattttcataaaatcaaattattgattatttttgttatatcatttaaatagttgcactgagagtgtaatttttattatcgtccagatcttaattaagtcattcaattaaagaattatataagaatatttgttttcaacttatcccattaacggtgtgaagaaaatttaggaagaagtaaaaaatgtttgacatgacaaaaactaaaattttaattaaaaaaaggatcaaagaaaccaatgtatttaaattttttacattttttatataaatgaatgcaaatgcaatgaactacttagaaacaatctgttgtgactgaggcatagacaatttggccaaatg

SEQ ID NO: 101745 - DNA, 94 bp, Heterodera glycines
aattggatgaggactacgacggcgcgccggtgaatcgcgaaatggcggctcgtaaggaacccattcatggcgctgccgccggtaatgagcaatg

SEQ ID NO: 101746 - DNA, 524 bp, Heterodera glycines
aaaaaaaaaattttttttttgataagcgccggctgcaaaaaagtattgtgaccaataaaaccccccaattttatgaattgttttaacgaaaattccaagaatccagcaatcctgcatgggtcccgcaaattttaaatgcctattaatgctactgggtctcgtcccgcaaaaacattttggtactttcctgttttgaagggaaaaacaattttcaaaatatgtggactcctatttatgtgtttgttttgcgcgaggattgtaagcgaggtaacgtcgatgcatttgaggaaatttttggataaattgttgcttttatcttatataataaagttgagtgtttgtatctgacattgtttgaaagtgcctcaaaaaagtctattccgggttttgttcttttctttttttataatattttggcgttatgttttttcaaaaggaagtttacaaaaggatgagaatttaattattcttcccggttatttttagtaatccaatttttaaaattgtataagctttttaagatg

SEQ ID NO: 101747 - DNA, 513 bp, Heterodera glycines
atcttgttgttaccaaaattttgattgaattctccaaaaaaaacttcatcaaaaaatgctataaaaacggaaaaataaattaagaatcgatataaaaatatttaaatttagcccatttcacctcacatttctattggtttctttctcaacagtggagaaaaattatttttgttacttcaaattacattaaaaataacttaaataaatagaatttattaattaagatgaacttaataacaaatggacgaacaaaaacaaaaacattgccgatagcgagaacaacagcaacgttaattaataaaatgatggcaaatttgattcatatcaacaagcacaaccaattaaattatggctaattggttgagtgaaataaatgttttaatattatttgtctaatttaataaaaatgaataaaacttttttttggtactatacgagaaaaatttttggcgcccctacaaagtgtccaagcctcgaaatgtccaagcctcgaaatgtacaagccacgaaatg

SEQ ID NO: 101748 - DNA, 574 bp, Heterodera glycines
  unsure (1)..(574): unsure at all n locations
ttttgggacggaagggtccgaaatgcggattgctgattctttcaagcgccgcaatggggattgcgcgtaatcagaactcggttggtgcncagccctggtccgatccctaatgacaattactgtggatgagcttcacacattcaaaaagctaatattgcttaaattcatataaaaataaaaaagctaatatttcttaaaattcgtaaaaagcccattttctgcttacttatgcaaaatcgatgcttctctagatattctttgttttccatttaatagcgttgacagcaatggcaaaagatgtggtgatgtatttgaaacaaagaaatgaattttgcaaaaaataaaaagggcactcactaatgcccatgtttgggcatgacaataaaaatgtcatttaatatttggcatcatgcgaatgccacacgtaaccgagcgaatgtgggagggggggggggaggcgttgnccgtttgagcgtgtctctttaagcgaagaattagccaccaatccatcgaagacattcagaatttttcaatagcttcattattgcaaataaagctaaagaaaatcggaatg

SEQ ID NO: 101749 - DNA, 1003 bp, Heterodera glycines
aaatagtagttaatttcttaaaaaatctctttttatccatttcgctagcacaatgctaatcaaaagtatttcaatgttttttggatacatttttttctcgctctctaagattgacatatttttcggaattttcttcatttcacaaaaaaaaaattcaatttttgcctttaaatgagaaaaaaatcatctaaaaggtcaaaaaaattaataaaataagaaaattgaaattacattttgccaaattccaaattttttgcataatgtaaattttcctattttctccccatctaattctaaaccctctattaaaataaaggtaattcgtaatgcttaaagcattaaatccggggacccatttcaagccattttgaggttttcagatcaccccgaaggagtgatctgatcacggtagaacaaaggacttttttgatcagcatgaaaagttaggcttaaatgaattttttagattttttcttaccctatagaaaaattacatgtcttcaagttttgagtttataattttggaacggaacataattgcactgactcatcaaaaatgctctgagattttttgatccaaacttatatccatttttaatttacaaatttttttcaatgatttccttacaataaatcctttcattaaaataatggtaatttgaaaggcttaaagccttaaactcggggacacaacaacaatcctgtttaaaattacatatacatttgctaattataagcaagtccagtgttatgataactaaaagcttgacaaattccttactgtagttgcgctttattttgttagatggttccaatcgcgcattgacctgcgaatgttgcggcgaagaaatggctgctctgtgtgcaaaattaagtgttccaattattaattattattacaattgtttttatttaataatgtaaaaattaatgtttaattaaaagaaaaaaaataaattaacgatttaaaaagtcttttctttagaaagagaccatggaaatg

SEQ ID NO: 101750 - DNA, 355 bp, Heterodera glycines
caacaaagatgctgttttgaacgaataaagatcataggttattttgaagaagtgtcaaagaacatgcagcaataagcctgcagaatctaataagtggaaaatacatgagtatagaatttattttcagaaagtgtcaacagacttttggaatatatatttgcaatttatcaacaattttgagaagtgagttagaaatgataatcttcacgattcaaaccaattttcgttgctctaattaaccgcgataaagacattcgaatcaattaaatagcttctgagataataaggtttatcataaaatttcatttaaaaataaaccctcaattattggtatgaacgatactttccaaacatg

SEQ ID NO: 101751 - DNA, 249 bp, Heterodera glycines
attattatatttactaatatatgttatgcatgtaaaattactaagggtgttcttaagaatttgaaaaaagtccttgaaaatttttaaattttatttaaatttacgacattagtcagctgatttaaaaaagttaaaactcttaattttgggttcacaaaaaacatttctatcccatctgaacagggctggacataattcatcatattattaagacccccgtaattatggctgattcgtttgaaaataatg

SEQ ID NO: 101752 - DNA, 1003 bp, Heterodera glycines
tgttgtttttttttctttattcagtgtgaggctttttcaacatctgttgttgttaatttaataaatatgatttatgacaaaaatgacgcaaaaaaacaaaatgttgttcaattgcaaattcaaagtacaataaaagccttttatttaatataagtttgtttatatacatttacgtcaactttggaattcagcaagaaagaatttaaataaaatattgtgcttatttctgcaatttctaagaaaatagaggtcaattaattaattggtttctattacactttatgagcccaatcaactatcaactatgatttattgaaccaaaacttttctcatattcgaactcaccgtactttttggagtttgaaatcgcaaagtctaacaaagttaaaatatataaaatcacagtgtttaggcaactgattaaaaatttgccctaatttaaaaaaatacaaattctaaaaaagcatagaaatttggcgctagttaaaaagtgacttttttgaattttattaaaagtcgaagaagggtcgcgagtacgggaatgtcagggtcagggaaaatcaacaattaatttttatacccaaaaaataattaaatgtaaaaatgatccatctcatttttcgttaatgaatattttaagcaccaatcagagtatttattagctttacttttttttctcagcttggattaaaaatctttcactcatatcattttgctcaataacttaagccaaaaatggattaattatttatttgaaagagactatttaattgattgataggtcaaataattttgcctaattactttttgtctactaatgccaccaatataaaaggcgaacattttcagctcaaaacagcaaatattcattcatttatatgcaacctgaccaatttaatttgctttaaatttgcatatttttaatataaataaatcaatttcataaatttttttttaatatatattcgatagcagaatacattttctttaatttgaataaatg

SEQ ID NO: 101753 - DNA, 1003 bp, Heterodera glycines
attaacgagttttccgagcaaatattttcattttttttcttcaaattcaataaaatttttctattttatttttaaaatgcattaaatttttgaggaatttccaaaattttgaactttttgctattattttcaggaatttaaattaaaaaaaaatgaccttttaatgatgaatttcacctattgaagcattgagtttaaaaagtttcaattcatccattttgagaatttaaaatttaaaagattggtctgttatttcttttttcagctaattttctttttatgatttttttttgcccaaataaattaaaactaattaatgaacttcacgaactaagaaaataattgtatatttttaaattttactaatttttaaattttgtctcaattttatattttctattttgtgtttaaagatggcgaaataattgtgtgttttttcattccatctccctcataaaatcaaaataaattggtctctctctctctttggcggcagcaataaaaacaagaaatgatcaaaataaagtgattcaatttccccattaatgggacgatataaaagagtccccattttggaccgtaatgttgttcttcattttattttttcatgcaaaaaactatattaatcaaaacaaaatctttttcttttattaataaaaataaaattattttaatttataaatcattttaataatattttaattaaattttttagtcctaattttttcaaataaacattaaattaccatatttcctataatatagcctcctcccctgaaataaagcccccgttttgaggaggggggttgaaaaatagaccccgacccccaaggggctctatttcaacccttggggctctatttcaagaaactcagtacatttatctttattgtctgaaaatattatacattttttggaaatttaattcttttaaatttcattaattttcaagttcaaaatattttattaaaaaaataattgttcagccaaaagccctaaaatg

SEQ ID NO: 101754 - DNA, 858 bp, Heterodera glycines
ataaaattgtaacacaatgttctatcgaaggaggcattttttcgtcagatcatttagcccaattttttatattaactgttccggaattaattcctaaatcaaaaacataaatattaggcgatttactccatcaaatgtgtcacttttcaatgtagttattgcctcaaggcttagagctttatcatgtggaataatcagagtaaatgaaaaatatgtatcttataacaatgcatagatatattgttatgagcagtgtattggaaaaattcagcaataattttattatttactgtatttaccgtaattattttgacaattatttcaattttatatttaaagttttcaccaatcggaagaggatacaaattaataagccgaaatttaattacaattattatttcttttttattaattaatgacaaaattttctcggcgagagggtcacataaatgtgacaaaaattcatatgaaatttctgatcagcaaacgccaaaatttaatgaatcacaaaatattattgttcataaaatcacaaataaaatgactaagatttttgcaaggaacattttgcaaataaaaattaaagatcagaatttaaaaaattattcaaggcttattagggcacattttaaatcatatgaactgactaaattatgtcgacatttgaacaagaaatgcttacggcacaagaaatgtgttcaaataaacaaaatgagaaataaattaaagaatatgaaacaaagatcaagaatatttatgtataaaagcaaaaataaaataaaatttaaacacattaaaaacaaaataattttaaaattaattttaaattcactattttcaattaagcttttcaaaatg

SEQ ID NO: 101755 - DNA, 96 bp, Heterodera glycines
atcagtgcttttcaggttttttctagatttattcaaaatttgattctgaattaagtgtcgtaccacagcaatttttgtgtcaattttttagaaatg

SEQ ID NO: 101756 - DNA, 557 bp, Heterodera glycines
actagaataaaatatactagagttgtccacccaccttaactttgtactacatattattaaattattagcacacttaaactggtacaaattgaaaattttgaacaatgcaattattatttttatggatttcctttttcttcaatgatgagaagcgtccatttataaagcagtgaatcccccgccaaaacagaggagaaaaggacggggcgggggtaccaatgggacggggacgacggcgaatgggacacattttgcagcagatttgggaccccggtttctgctgcttttggtgcagatggcgccgccaccgccattgccgggggcgatggaagtgtgtgtgccgaaaatgcggctaagcatgtgcccgccgccggaggggaagaaaatgctttttggggtgggcgctttgcggatgggcgaggggcattggaggggtgtggcgattggtagcgctctgttgcccccgcgggggttcaaaagagaacggtgacggggccggggagggcgggggggggggcggagggggggggggtggactggatggcgaagaagacatg

SEQ ID NO: 101757 - DNA, 193 bp, Heterodera glycines
  unsure (1)..(193): unsure at all n locations
cctaaaatgacaaaatttgccatttggcgttaaccgccacaaattcctattttttcgctttggcgctgaaattgaaaaaatacactgggcatggacctgctcccatcctttttatgtttcttttttntcattttatttgttnaatattaatataagtgattaacacacatctccttcccgtttgttcagaatg

SEQ ID NO: 101758 - DNA, 643 bp, Heterodera glycines
ttccttaatattctagagcattttaatttcttcaaatttttgcccaaatccatttatgaataatttaatgcaataaaatattttaattgattctttttatcattttatttgttttttatgtggcaaatccaataaactttttttttattaaagccattttccaatttaaattaaaaaaaagaaattaaatgagaatgaaagcatataaaagcttggagaattgtgaatgtgttcatattttataaatttgaaaccgaaaatgaatggttattattgttttcacattttcacgttttttgcgcttattttctccactcaaatggtaattcaaaattaattaatatataaacacaattattattttaaacatttggaggtcaatgctcagcagaaagaaaacggtttgaaaataaataattaataatcatatacataggaattaaaaaactattatcattaaaaacgaagtaaaatttataattttaacaaaaaacaatttaaaaagcgaaaaattcatttttttctatttaaatttaccagttttttaaaagggtaaaccgaaaatatcgataattttccattttttccgaaaattttctcgatctaaaatattcatttttagtttctcaacccgtgacagatg

SEQ ID NO: 101759 - DNA, 111 bp, Heterodera glycines
gccatattttcgtcaattcgtttttattttaccaattttgtttagacatttctccgtgccaccacttctgtctgttacaatattcaactttttttttgtgtggacacaatg

SEQ ID NO: 101760 - DNA, 1003 bp, Heterodera glycines
tagtccaaaatgattaattgtttgaaataactgaagtaaattcgtttaaaaatttcattaatttaatttagctttaacttttagattttataaaataaatagcaaaataaaaattaattttgtgttattttcacttgaaataaattaaaatttgattttttttttgaatttaaaaattcccggaaaaccaaggtcccgtcccggcttctcaggtcccggtcccggttttgcccaacattcccggtccgctcaactctacggtagtaccataaaaataaagtttccaacgcaattaattctctgcaatttgtgttatgtgccaaaaaacccccaaaatatgtgctaaaacccaaaaaaaaggccaaaatatgtgccaaaaattgaaaaaaactgctcaaaaaataagttaatttctcaaaaaagtctcattttttatcaatttcgctagcttaatgtaatgctttttggcgtaaattttttttcgctctcaaagatttactcatttttcggaatttcttcgctaaaaatcaaattttgctttaaaagtgaaaaagtcatgaaaagggtcaaaaaaatacaaaaaaaagaaaattttgaaaaattattgggcatttatttgaccacgaatttgagtgccaaaaaagacatttttgtaaaaaaaacctaatttttccaaaaaatcgccaaaatatgtgtcaaaaactgccgaaaccccaaaatatgtttttattcctaaaaagtccaaaatatgttttttatatgtgctaaaaactcgctctgattgaaaggaaaacaggtaaaaatgctatttttgagattttcatgcgatagcatatgcgcaaaaaaaaagtaaaaacatataaatccgttccctgataatatacgtcaagaaataggaaaaccctaaaaatccaagctttacccaactcaattaattcttctgctatatattgtgtgacatcattcagaatttggccaaattgtgctaattgcctcaaaaatg

SEQ ID NO: 101761 - DNA, 77 bp, Heterodera glycines
aaaaaaatactcatgaaattcaaaaaattaaattatacgaatttgtactaaattggatatttttttttgaaaaaatg

SEQ ID NO: 101762 - DNA, 86 bp, Heterodera glycines
  unsure (1)..(86): unsure at all n locations
aggtagatggggtcganctcgttgaagtggttgaactactcggagttgatgaggttgaagttgacgctgtcgaacttgtagaaatg

SEQ ID NO: 101763 - DNA, 51 bp, Heterodera glycines
taaacgtgtcaatttccggtgtcgaatctatgatttctggtatttactatg

SEQ ID NO: 101764 - DNA, 161 bp, Heterodera glycines
  unsure (1)..(161): unsure at all n locations
tttttgcactggattagttccctattctgttaaggacatcanaattagtcttatattaaaacgcttaaaattttagtttaaacgattaacttcaacaaaatcctctcatctaaatttagcattttttccaacgctgatcgatttgaagtgaaaaccgaatg

SEQ ID NO: 101765 - DNA, 1003 bp, Heterodera glycines
tgccgcggtcgtggatcgcggtcgcgctccactcctgacctctactaaccacctctaggccattataacaacaaaagaaatgctttttcctaaatttaagctcattgtcagaccaagtcttagaaatgtgtgttattttcaatctatagttcccattcggatttaaaagtcaagatcgagattggagttttgaaaaccggtgtcgaaatcgagatctgcttccgaaaaagtcgggattccgaccaaaaatcagtcgggatctcaatgccgtgcaactccactaaaaatcaaccgtaaaaaataacagcataactgtttgagtgaaaaaaattattttaaaaaataagataatgttcccgggttattttaattttttttccaatttgctattaaaaaaataattattttgctgctcgtggctgtgcaaagaaagaactgggaaaacactaataagcccaaccttatcaccagacaatgaaaggaagaaataatttaattcacattttaatttaaattgtattttataatataattttaattttataatattattcgcttatttccttcataaccattctacgattaacaatttaaaaatctttgttaattaattgtattcccttttaattttcgtttgttttttagctcccttactaaataatttttcttaaaaacatggcaattaattgtgctcctctcacccgttttccctatgacataatgatgtttttcataagacatttaataaatcataactaattggactaaagaacaagtttaatttgtgtcaaatcattccatataaatgcattatttgtcgtcattattttattctgcacattttattcttttgaatgtcgctatttaaataatccatttcaatttaaactttaatagctaattaatttatttttaatgtttcagttaaaatgagcaacatcccttttttataaaaaaaaataataaattcaataaattaacaaattttagtgccccgaaaatg

SEQ ID NO: 101766 - DNA, 497 bp, Heterodera glycines
tttggcattctatgtgcctgcaaatttgaataatttgcgcaatttcgtttcgcctacaattctcactgatctcccgcagctgaactcgatcagttccttcgtctgttccccgctccaattgcttttgatggtaggaatgcaactgctggcgaggctttatccaaatggttgcacacgccgaccaccgatggacagccgaagcatttgcgttgccgattttcaagcacttatgcatcaaagggcaaagaattggtcaacaagttcaaggaggtcgtcaaatcatttttaatttcgggggaggaaggggaaggagttcgaccgcgattttcgacatttttttccgcgtttcacgaccgcggcaatttgaatccgcaaacgcgggattcatcgatattttaatttcaaatttttatatgtattaggcattccatcgtgcctccaccaccacttcggcctgctacaatattgaaattttgttggacgcggcctcgtcaatg

SEQ ID NO: 101767 - DNA, 361 bp, Heterodera glycines
tgatattaccaaaacagtaccattcattggatgacaaatttggcacatataattgtgactaaaatgattatttgttcataaatatgtataacattttttgccatttacaataaaaacgaattatttcgaattatttgacatgaataaatatggataacttaaaaggtttttttatttattgataaaaatggaatgatgtcaaacacaacttggaacttttcgtaggttcgagttgttcggatatctgtattagtgttggggcggccaaaagaaaatttcggtggaattcgggactataaaaattgttcggtttcgggttaggacggccaaaaaattcaattaggattcgggacaaaaaatg

SEQ ID NO: 101768 - DNA, 87 bp, Heterodera glycines
ctctcgaacatgaaacgaagtgcggtgcgccatggccattttatttttcaaataatttttatatttaatagatattccagaaaaatg

SEQ ID NO: 101769 - DNA, 70 bp, Heterodera glycines
cattccaattacttggactcaacccaccaccattctaatcactgggactcaattcatcagcattgcaatg

SEQ ID NO: 101770 - DNA, 227 bp, Heterodera glycines
atggtcattattcggcggtaggcccttcgccttgatcatttccacacagcgtgccctcctcctcttctgccgtgtgcggtgccggtggtgaactccaacaacaacttttaatttccgccgcacctccccttccttcggcgtccaaaacgctctcagccgagtcgctgtcttccccaacaaaacgcggtggtcgttcgagggcggttgggtcgacaaggacaaaaatg

SEQ ID NO: 101771 - DNA, 936 bp, Heterodera glycines
tttgggcagcacgacaaattgttttgggtctgattggtgctgagctaaaaaagccataaaagggcgctataaaaaaaagctagagtgtagcgggaccgggacctggacagtagttacccccccagattttgggggtgacaattcagtcccgtcgtttcagtcccaggcaattcagtcccgtagttttagtcccaggcaagtcagtgccagaccaattaagtccgacccatgcctattagagttttttttctgttttgcatgactgagctagtagtacatcaaaatgttacgcttgactgatttcataacaattagctcctgcctattattaaatttacacatgtgtatttgtagtaattatctctcgtacattatgcatgaccaattttatgaaaattattcaaaatgttatgcttcggtgatttcatagtaattatttatgttacaattgctctcaaattccattttttacagtgacctattttgctctggttaccgtcatcaaaataattattgctgccctctattgagagtataaatagacgacattcccaaccaaaagtccatttctcccattcattcaaaaaaaaaaattttcaatcccactccactttacattattctctgaaaacaaaaataaatttgagtatttaaatacaaaataattccattacttttacaattctatcattaaaaataaataaatataaataaaaatgaaacgaacttctgacgaccaagttccttcattccctaaaaagacccaatcaaataaatgcattagaaaaattgacaattttacatcaaagagccgaaaacaccaacttttccgctccaaatctaaatttgtcgtcgaggaaattgagacatgtgctgaccctacggcggaactccgttcttgtatacaccattcaattgaagaagcagtcttagatg

SEQ ID NO: 101772 - DNA, 145 bp, Heterodera glycines
gttataagcattaggaatctgtgaattcttgataatttataattgtttgcttttatagggattggagcgcaagcccaacaattcatgggggaacacaatggaggtcagggttttccggataagctcattttgtttacttaacatg

SEQ ID NO: 101773 - DNA, 952 bp, Heterodera glycines
gaaccggaataaaggccctaaaatgcttcagaatacggttagccaaattttggattttatttttaaaattttcaatgatctcctcattagaatgcctatgatttcaatcagtttttattatcccaatttacatagagcggataagcggcggtcttttcatcgtgtgtcatcttaatgaaattcattaatcaaatttcctaattaaaaaaaaattacttcctgggcccacagaaactcatggtctgcagcgtaacatttgtggactttagttccattggcggaaacaggtgaaaacaggtgaaaataggtgaaatttcacctaaaaatatataggggcgtgtatttaatggggcatattagagaatgtctcaactagtatcaataaaaagtgccaaaggaaaattttgtgatggttatcgctattacaaacataaaacgaccaagttcaaactttggtggaaatgtgaacttaattcacatgggtgccagggctggggttttgaaaaggaagggttttttacaatgacgcgccgacacaatcatcatcctgacactatattgattgaaatcgaagaggacataaaatatcataatttttctgcgggggcaaaatgttttttgggtgacaacaagaattagttgatgatgctaagaaaaatgcgagactccaaactgaatttggagatgaatttattgtttgtaaactataaataggatcaagaaaaaaaataccaattaaataaaaatgaattctgaaaaatcagaaaaagctaattccatattattggaagctgcaaaaaaagagacagaaagagcatgacgggatgtagctgcgctaacggatgaagtaagcgattttgccaaatcttctcgcgaaacacttaatcgtgcaataaaatctagagaaaaggctccttacgctaatagtattcgagaattatatcttaaaatg

SEQ ID NO: 101774 - DNA, 252 bp, Heterodera glycines
tttagagttcaataatattttcacgtttcataaaagaaatagttataaagtgcgggcggacggcaataacaagagaaatgggcggctggcaataacaagagaggcggacggctggcaataacaagagaggcggacggctggcaaaaagaggaaaatagcgggaaatgaaaagaaaaacaccgtttttatgtagaatttttacgattttatttgaatattttttaccaacccacttataaatattatagaatg

SEQ ID NO: 101775 - DNA, 108 bp, Heterodera glycines
ggtcaaccccaaaattttgcttattgatacagacatttttaggcgccagatgtctgttggaacgcgcccttcaaagaagcgattcggaagctgtacaacgattggatg

SEQ ID NO: 101776 - DNA, 385 bp, Heterodera glycines
tgtattattttccctcacttttctccgccactattttaatgttaataaataaaaattaagaataatttactttatttaaaataaattttaagaaatatattcgattaaaggtaagattgatttagtcagtgataatatgatattttatacaaaattaattttaattattttataaattaaatgataaaatcaccggaaactgattcaaaattgactccaaataataaaatatttgaaaatagcacgccacaaaaaaaagaactatgaagagcaaaaaaattctggatatattttttaaataaattttcaaagtaaaaaatatttattaaaattatatttttttttgcctaagttctaagaatttaggtcttttttgaggaaaatg

SEQ ID NO: 101777 - DNA, 828 bp, Heterodera glycines
ttttttcaataaatcctctattaaacggccccctctattaaagcggccatttgggctctaatgaccgaaaatttttcaaaaaaaatcacatttttgggtatattttctggtaaaaaagtaactttttaaaaaattggaactttatgccaaaaatagtcagaaaaatagaaaattctccattttttgcgcaattttcttcaaaataaataaatattacttttttggttccaaaataatcattcatactatttttagctattttcgggatttttatgcttacatttaacaaacttgaagaaatttgaaaatttgccctcaatttggaaaaatttatgtgcatatttttctttttatgtgcatatttcgcgatttttggtgcatattttatgcgcatattttgcgattttatgtacatatttttggactccctattcattattattaaaataaatttaaaaaaaaaattcgagcaaaaaaaagtgcaaaaaaaaaaaattcaaaaaggccctctttttaaatagcgccaaaaattttactcctgcaaaattatatcaaaaaatacaactttctgacgctcaatttcaagaatggttaacttctctgcatctccttcatgcaaagcgaacttgtgtctgtggctcagaaatgcggtggcataaactttggaaggcgaataattaaaaaaaaaaaatttgggagcgtataaactggaagcttcggggtgtataaactggaaaagtgccctaaatcctaccttttggcagtttttagctcctaaaaaaactaaccctactcatcgctcacttttgttttgattcgctaacaatg

SEQ ID NO: 101778 - DNA, 1003 bp, Heterodera glycines
ttgaaaaattatgtaaaagatcaaaaaaattatggccagaacaactcaaaaaaaaacagattttccaacttttatggccataaatttgttcaaaattgacgaatttttttggaaatttgcaggctaatatgtagagcatctgaagggatttcgaatgataccaaaatgtttgatttggatgacaaagaaaaaagttatagtccaaaaacatgctggggcccaactgacgtagaccgtctccgagacaaagacgagtccttcggaattttgcaaaaccttaataatttcgtatgaaaatagttagcaaagcacattttcacgaataattttcaattttaagcgacaattacataaaatttctctgagatttttaagcatccataattcagctttttaaactttaatttcaattaattcaattttattttattttattcatattttaataaaacaaatgccatgaaaagttcttacactttttaccttattcatctgttgctcaattttccactaattcactgattttttgtttccatacaatttaattaacgcattaattgcccattaatactaatggcaatttcattgatcagagacgcggctttacccatgcgattagccaatttgcgcaactcttttgctgatcactcaatttgttttcatgttccattggttttccgctgctgaagcgaaagggatgatttgatctgccgctgtttctgctgggctttttcatccccaattgtttttctcgtctctccgtcattctcgaccactccaaaaagtaattaatgcccaccattaataaattaataattgtgctcttgtttttggctgaaggaattgccaaactttggaatgggtggcactttttgcaggacccacgcgggcattgctcatttgatcacgaagttggcattatcagccgaaactgaaaattggtgccctcaaatgtctttagacacggaaaattcgctgcaaaagagtcggcttccccatgatg

SEQ ID NO: 101779 - DNA, 138 bp, Heterodera glycines
ccccccctcataacgaaatttctatgtctaacgttgttttctaattcaatttttatccaaacatttagtgccaatcaccttccaattttgcttctcattcttttcaaatcttccggttctaaatactgacaataaatg

SEQ ID NO: 101780 - DNA, 1003 bp, Heterodera glycines
cccatgactatcagtgcaacggcacgccgccacaaatttggcggactgagcaaacaaaagaaaccgagggaataatgagaagaagcgagcagcaaatcttagcctcaaaagtcagacctactcaaaactctgaacgtaaaatttttttgcatttgtctaataatttttgaaaaaaatctttaataattatgttttaaaatgttttctttaatattaatttcatgattctttctcaattttaaagttctcttcatttgcgcagactaataggcttaattgtcccccgccggagatcggcactgaaagaagcgaatttgagtaaccgttcaattattatccttcgctttttgccgtttctcggctcggcttctccaccgataatccgtccctccgtctgctaatgtttgtctgtccctcaaatgctttatcccctcccctttcacgccttcgcttttccgttatagcgcagtgaatgaattcttaacacttttaagtgcattttattttattttttctaaatttgctatgcttttatccttgtataattttctattcgttttgcccccgtccccaatgattttgggccataaaatttgagttagggccaaaagtagtggcccattattacccatcgttttttgggttttttcttccattttgttatataaataaaatattttttaatttaatattacttaaaaaataattcatgcacatatttcaggacctttttgctgcactcacttaattcattttgatttttttctaaaaagcaaaaaatgattggcgtgatcggtgctgatgttgtggttattgttgtgtggttgtgtgatttaatgacgtccgccaatcgggattaggacggaagtttcaatttgttctcgaattgtccctcccaaaatatgcaaaacatttaattccaaaaaatggcagcacataaataaattccgcaaacttttgaaggttcatttggaaatataaataaataaaaaagcactctatg

SEQ ID NO: 101781 - DNA, 144 bp, Heterodera glycines
ctgctgacaaagtgtcccctccttccgctaacactttgtcttcttcgtccgtcccttctcttctgaattgccaattttgcggtgctcagttggcggatgtccaagctctccaagtcagtcgatcaatgattaaatttccaaatg

SEQ ID NO: 101782 - DNA, 1003 bp, Heterodera glycines
caaaattcaaacgaattctcatctgaaatattaataaatcacatttaactgtttaataaacatttgtaccattgtggcaaaattgcagtgtcgtttgttgcgtaaaaattcaaaaaatcgattaatgaccgcaataccagttggtggccgtttgcttcctaatttttcaataaaaatttaaaagtcagaattcgagaacctggtttgcatgaaatgccgccaaacaaatgcatcattggtacaaaatcgatcatttcccaaattaactctgtcggcagttgtttatgcaatttggctttttttgccagtgaaatgttgttgttgccttggcttctcttgcctgccattttggcaaatcagtattatttgggaatcgcaaaatgaaatgagtacagctcatgttagggtatcgcatggatgctgtagtgcaagcacccggcgacctccatacgatttggcactaattgagtttcaattgggcgtggtctaagccatttcgatggcctttcgtgcagccggtcattcattttaaaaatttgcttcgctcattctcgctcatctgcccctcctccctccttccattgtcccttaatttgaataatcggggtcataaaatcttgaataaagctagggatcatctcattaaaaggcttttttcggggacaatcttattcgaatttatttctaatgttaaccagggcggttgatgtcaaagctccgtttatcctgtcaacaaacttttagctcttcaatggtcgttgaaaattcttttaataattttatgagtagtttagttgccctgtcgtcttgtgcttcatgggtggcagtgcgctgctcgtcaggccaagattggtttaaaacatcagtttttttaaattattctcattctattcttactcattgctcacaattttgattttttatcacaatttttgaaagctcagatttatttgaaatttaaataacatttattcattgatttaattcattagatttaaaaatg

SEQ ID NO: 101783 - DNA, 423 bp, Heterodera glycines
aaactgaaaactcagaaatgccattttttggcattatacctttaaacaagcgtaggctttagaatggcatttcctgcaaatttaaggggggggggggcatttgcctgctcaattgccttattttgttggcaaattgattgcccaaattggctcgtaatcttatattttccaaacctcatttttcataggcatttaataaaaaataaaatatattattgtcctatcacagagagagagagtcattttaaaaaagaatttctgatttttttgcttataaatttaatgataggaaattttgatttccttacatgtaaaaactcttgaatgaattttattcatgcgtttttcactaagtcaaaaaagtgaacagtattcgatttcaaaaccctataaaatattcctcaaaaattgtttacagatatg

SEQ ID NO: 101784 - DNA, 269 bp, Heterodera glycines
  unsure (1)..(269): unsure at all n locations
atcaggtgcaggggctgcactttaccccctccnccccccccccccgagagattattttaaaatctatcaaacttaaaatttcatagaaaatttgttaaattttttcaatatttaagccaaaagccctaattttttaaacatttaaaaaccaaaatttcgaaaattttagagttttcttgctttttaataattctacgaaattttctgcgtttttttaaatttttattttggtataattcacggcatgaacgacctgctccaaagtgatg

SEQ ID NO: 101785 - DNA, 147 bp, Heterodera glycines
caaagggaagggattaagcaaaaacaattaattaatcgattaaccatcaaaagacgtttatttgaacattgcttttaattgtgtttatttatccttttcagatcagcatcaatgcccccggggttggcccgcggcgggtgatcaatg

SEQ ID NO: 101786 - DNA, 99 bp, Heterodera glycines
ttcattaattctttttctctcaattaatgcgtaatgggattaccaattttttagcaaaataaaatcaaaatcttattacgaaccgaacgactacgaatg

SEQ ID NO: 101787 - DNA, 248 bp, Heterodera glycines
taaatttcctcaaaacaaagggaaacacatcgctagaaaaagcgcatgtgcatatcaacataattagcactagcacggtatgtatttgattaattaacaaatgggtggagattccgcaccacatccgaaatgaaattccttaggaaatgggttatttttaaatttaactaagtcccagtcccggttgtgcccaaaatttccggtcccgacctaccctaattttaacgcattttaatttaagaaaaatg

SEQ ID NO: 101788 - DNA, 66 bp, Heterodera glycines
ggtgccatatgcagaaattcctccgttttggcaccaaaaaagaacaaactcatcaaaaacgccatg

SEQ ID NO: 101789 - DNA, 487 bp, Heterodera glycines
ttttcggccaaaatccgcgagtcgcaaatgtccatcctacgacccctctctggactttgttcgtatcgaaaagggtcgacccgattttctactgtttatctattatccttcgtcttacacttgatttactaatggcgggggtggggggggggacaaccggtacatataaaacgagcgaggaatggaaattgaatgaaatttgaataattttcaacaaatttttagtttattttcataaatttggcatcagtggtctcaaaactgtgtgctaattttttctttaaaatgaataaaaccttgcaatttatggtgtttaagacaaattctgttggcatatttacattattaaatttcgcgtttcattatgcagcatcgccagaaaaaactccactcccaccccattttaggcctggaggctacgcataaaaaaaattaaaaaatttatttttttacgcttttcttttcagttgtgcaatttttgtccatg

SEQ ID NO: 101790 - DNA, 804 bp, Heterodera glycines
  unsure (1)..(804): unsure at all n locations
ttttcgtcaaaatcattnaatttattgnaatgtatcatntaatgtaagtagcacagttaatccgaggctagacaatgagtgtttttaataaagaagttctaggaaatcacacattttgatacctattgaattcaacaaactaatgacattttttcatctatttgttaaagaaagtaatatttaattatgttttaaatntaataaaattctagccaccatgatatatgaacatattgaaaaaagtcaatttattacgtacaccgcctaacaatttttttttattaattagttttatggccgcacaaatttaatttcttcgaaaagacaccaatttattaatgttaaatgtttgaaagaaatattgtttatttaattgatctttaaataaatacggtaaatcattttctttgttattatgataaacatgaatttgattaaataaaatatcataaaaccaaattataagagtaagaaagttcatattgttaaaaaattaatcttgtttgaccaaccaacataaaaataaaatttaattagttgagattttgggtataaaaaagatgggaaattcatttaaaatttaatttgactgctctatcctaaagcattaatttttaaaaacttttttaagaaaataacgaatgaaatttgatgcgattttatcccatattaaaacaaaaatcgcaaaaaattaattgatcccaagtgattttttctcacaaatgattataagcaattaggaattttcttttttaattttcgcttaatttatatttttttcaatttcaaaaattttcaagcatg

SEQ ID NO: 101791 - DNA, 172 bp, Heterodera glycines
  unsure (1)..(172): unsure at all n locations
tttttattgacacanaatttgaatttttttcattattntaattaataattaattaatggtccccgattttatcgccttctttaaaaaagtccagtcataataatatccattttaattaattaattcatgcattaattaattatccctgattttagcgcactcattaaaaatg

SEQ ID NO: 101792 - DNA, 1003 bp, Heterodera glycines
ttcttctatttaattcaataaaaatttcgaattaaaaaggaaaaaattttttgcattaatcaggtaggaatttatatttgtaagaaatccactgttgtagaattttaattataatgactcattagtgttaattaaatttggcataatgtcttttttcgcgtttttctcacttaaaattgtattctttgtttttttccatctttcattccaatttttattatctggtaatttttattgttttgtgccgtccaattcttctgactttaaaattgatatttgtcaaattgtttctcatcggtatttgtcttttggaattaaagtgtttggatttgacagtggcctactctgtgtttggtataattgcgtccctgtcttaagtcagtagcaaaagtacaatttggcgctcccgaggaaacaggtacaaaagcggcgatttttaaagagtttgagggtgagatcgggaataaaaaaatttttcggacgggttttaatttggagtgtattaagtatcagtccggaccggacgatatttaagttgtgaagtggaaattgactattccggatcggaaagttaaaaaaagcgaaaaaaaaactccagcgcaccgaaaaatttattgtttatcataaaatttgagttcgggccgaaccttttttttctgtctacatcgccgtataaactattgacaccgggtcggtgcttagtttttctccgtcttctcgccgaatttttacatttgacttcgctggatggtcatcacacgcagtccgattttgacactggtaactgagcgattgaattctagagattgccgttgacagaaatggacatcagattaatgtcggtggaaatcagcagaactcgctgcaacgccaaaatcacagtgctggagaaagttttccccaaaatcagcaaattgaaaactcgccaatctcacccactgaactcgcgggctttaatggggaaaatggtgatgacagttctcttgttttagaaccaaatatg

SEQ ID NO: 101793 - DNA, 655 bp, Heterodera glycines
tttagaaaaataatttgtaatttagtagcctaaaataatgaaattttgaaaaaattaaaacaaaaattgggcgtaaagaataaatgaatcgcaaaattccattttttctgtcaattatgtattatgatgatttagaattttcggatggaaaggaagtgctctctgttttcatttatttatccaattagaacccccgggggttctattgttcaaccttattttttcacaaacgcaaaaaaatggcgatttttttaaacttttcgtcaaaaaattgtaaattcatctgtcttttagtcattactccttatttttaatcttttacgaatgacggacgagcggaacttattagcatcgttaaagtttaaagaaagtaggaaacaattcaaattttactcaaaatcatttaaaattttaggatggaaattttctgtttttgcatactgaaggccattggtcgattttaatacatttataaagagagagaaagagtaaagatttaagcatttgcttctacgttttcattttcgtttttcgtgactataaaaatgtttgttttttcgattggtttctcattgtgtaaaaatatttctaacataattattattgtgccccctttgtgacgtccttcgtaattgtgctaatttccaacaaaatg

SEQ ID NO: 101794 - DNA, 228 bp, Heterodera glycines
aggtcaatgggcccggctaatcaattaatgccatttttccaaagaaaaaattccctttctgtcgtgggaggatcccttttagccggcacgcgcgtcatcatcccaccgctgcttcgacaaagagtgctgacaacacttcactttgctcatcctggcattgtgagaatgaaagagttggcccgtcgacatgtattttggcctggtcttgacaaggacattgagaacatg

SEQ ID NO: 101795 - DNA, 114 bp, Heterodera glycines
  unsure (1)..(114): unsure at all n locations
tgggacgacgcnnttccttcgttatgtttcttatacaccactccatctgaagtcactgggtactcaccctttcacctgatgttcgggaaatttgccgatttcncaggagaaatg

SEQ ID NO: 101796 - DNA, 104 bp, Heterodera glycines
acctccggatttgccgggttaaatttcagcagcaagtcgagcaccagcgcgtcaagtttgttgtgggcatgctcagagaagtgggtggtgttgggatggacatg

SEQ ID NO: 101797 - DNA, 216 bp, Heterodera glycines
agaattacattgggccataatcagaagaatcccttctattttaaccaccacaacgtgagtgccaaatggtaactgtttatgaatcagattattcaggtgcgcgacattgagcttacggcctctggcaggacatatccccagtacccgtacaacctggactacaagaacaacaggtatgcaagggcttatcacgatgcccaagagcacctcggcatg

SEQ ID NO: 101798 - DNA, 560 bp, Heterodera glycines
ggatttgcataacaacaaaaaaaagttatcgcccaaaaacttgggctggcgccaaaaagtcggcgccaaaacgatacggaccccatacaaacactcaattttaatatataggattttttaatacataaatacatttatatttagtaattttgatttataactttaaagttaacttatgaaatattttaaaatttctgtaaaatttttcaaaaattccgagttccgaccttttttgggtcggagttccgacttccgaaaatttttggggcctcggaattccgagttccgacttccgaaaatttttggggcctcggaattccgagttccgacttccgaaaatttttggggcctcggaattccgagttccgacttccgaaaatttttagtgcctcggaactccatccctgatgtacacattttgccaattttcttaaataaaattgccagccctaataattacatttttgctaaagggttttccattaaaatttagtatacttttttttttctaatttggcgtttattttgtaggcccattcgacttgaaattcaaggaaatg

SEQ ID NO: 101799 - DNA, 533 bp, Heterodera glycines
tgttcgcaaaataaggtcactgttaatgcgatcgcggatcaattttgttcctggaggctgtctaaattgtggaattcgtcccgctctgcgttctataatatagtcgagagcttgggcgacactactgtccgttattgggtttcctgcattatttaaaacggtgtcaccgtgaacaccgtacttgacggggttacgattaaacacgaactgaagccgtcttctcttttgctcattggtaagttgcgaatttggaatggtgaaaaggtgctgatcctccgcaaactgatgacgctgctcttcggaaagtacttcgccgaccgggttcttttgtctttttggctgatttttggtaacatttggtgaagacaatctttttcgagtgccaattcttgttctttttctttcgttgtcttcttcaactttgttgcttttccgctttttcgttttactaggcaacggaggtcccggtggatggacctgagccgaggtccccgattgttgtgagagttcaaagtcatcatcaaccggtaatg

SEQ ID NO: 101800 - DNA, 237 bp, Heterodera glycines
aacgcactccaaacgaagaagcgagaaaccatttacgaaaaggcatgacattttactatttttgtttactttaatgaaaagaaaagaggtgagggtaatactattgatggtacccctcattttcgaaaaaatatcgggaagaacggtttccagcttttcaaaatcctggttccgactaatatgcaatataaaattctgtgaataggtccagcaagacctctaactttgtctgacatg

SEQ ID NO: 101801 - DNA, 142 bp, Heterodera glycines
  unsure (1)..(142): unsure at all n locations
ccgcatttaaatgctggaatgtgacaacagtcacatgtccctttaagggntcnccgaancatgactcngganctccngaccttaaaaagaagncgaagcnncagtcgaggactgccaggcctcaatacaccattcaccgatg

SEQ ID NO: 101802 - DNA, 476 bp, Heterodera glycines
  unsure (1)..(476): unsure at all n locations
cgatgttattgcatatgcgaaattgggaaattttcattaatataaatgtagatttatgcgtaaattgtttcatntaaattatgaaaggagtgcagaaaatattttcattttccaatttttgtcaaaaaagttaatttttttattttcaaagaaaaaataataattattattaaaaatgtgccactgcttcttcatttttgcaatcggagcagctcttttgacgaaagttcgtttttctattaaataattttaggaatcgcagccctttttcattttattttttggacatttagtagtaaatttaattgatagcattcatttgtcggtaatacgttttgtttgttatttcggctaagatccccagggttttcggaaatctttggcgcttcgtcggaactgagtcgggcattgtttttcatccgcttttaacttcacttggcattggcacatttcagtgccaagctcagcaaacaatg

SEQ ID NO: 101803 - DNA, 111 bp, Heterodera glycines
tttttttgaccaaatctgttcaaaagacgaacaaatttttcaaaattttgccggaggcgcctatcttccccgccagacccctcggtttcagaatttttttaaaaaataatg

SEQ ID NO: 101804 - DNA, 154 bp, Heterodera glycines
ttgtaataaatatcataatgtaggatgggatcagcattctgggagtttactgtcgggaattaacggcccaaaaagtctgggatttggagatagaggaaaggcgtgggattagtgatatcgtggaccaattccaagtgttggcatgttggggatg

SEQ ID NO: 101805 - DNA, 93 bp, Heterodera glycines
tttttcagtttaacttctatatcattacaaatgttgaccttgtcaattgcgtgcatacagtccaattggattacattttgtctacctaaaatg

SEQ ID NO: 101806 - DNA, 236 bp, Heterodera glycines
ttctaaaaatttgaattttcgaactttttttccaattcaggtccgggattcgaaattggtcgaaatagatgccgggttcgtgatcagcgacaccgaaaaccataggaaacatgctttcatgtcttttgtaaagtgcattagtaccggaatttcttcggtaaaatacatggtttttaaaatttttagcaacaaattacacttcctttcctttttattcttttcaaaatcaaataatg

SEQ ID NO: 101807 - DNA, 1003 bp, Heterodera glycines
agcttttttttattttggcattttttccagaaaaacgattgtttggcttttaaatcccgacaacgaacagtcccataaatccataaatattttcaaaatattactcatcaattattcacataataaatttccttcttccgctgcttaagacaatttggtcttgtgccagcaaacccttcgtttttctgcgcctaatcggcgtaattgtgccgccttgggttattctgtggatcagtgccgaacgtttcatggccgttttgacaccaaaaatttattgtcggcacatttttaaacggtaagtaaaaaatgattaaaaatgccttttttttttgttttggattttcacgatttgtgatgccaatcattcttacatatgcctttttctcgctgctttttgtttattccatcgcttggacaaaacgaaacgaaccggtggaagcgtattgcggacggagggttcgaaattttgaaaaattcaaaaataaatatttatttattttattttaaagaaagttttcaccaaatactactcaatttacacttttatggtggacatattttcttattcaattgcgtaagtgttcagcaggaaatgggaattattagtctcataaattgaatttggggcgcaattattattataatacggacgcgcatttgtatttaaaattagattagcatttatcactttgaaaaacggatttgcgattaagaagcctccataatatttatcgtatggagcccatgcttctcataattttgaattcttggaaaaggtgaaaaattagacaaggggagggaatcgccagtaattttgaactttatgtcattttaatttaattagattaatttatctcttcttttcataacatttttcaaatttatgtccattttgccaagtttggccattaattgtgccaccgccctccgtttggcgcgccttcggtcgcacctcaaaagtcgcgggcacattcagcggcagctgaaccgcgtgcattacatg

SEQ ID NO: 101808 - DNA, 155 bp, Heterodera glycines
aaattttttatgtgatttttcattaaaataaaaatgacaataattgtattaattttggattttttttttgaatcaggcaacaccgcaactggacgacaattgcccgggggaccaccggcacccatcacagaccctgttggagcagcagaacaatg

SEQ ID NO: 101809 - DNA, 981 bp, Heterodera glycines
cactttttactttgtccctttctctttctctctctctcacatgtctctctcccctctccctctttcttcactctcttctctttccctctctttttctctctcattgtctctccatttctctgtccctctctctctttctctctccaccctaaatatctctccatttctctgtctcttcccaaatgcttttgctggtgccctgagggcacaacagttcgagcagcggcagcttttgctcggccctttcgttttgccaaaattttgcttttcttcttccttcccttaattttatttagcacaaaaaatatttatttttggcattgtaaaaaatcataaatcaaattaaattcgatttaaaaaaaaacaatttatgtcaatatttttttgatatatttaaaaaatttgaataaaattaattctaaaaatatttccttgctaaaaataatgaatttttttttggaaactattggactattttatatttttaaatattaattaaaatgcaaattttattttttaattaaatcattaaatttaataattattttttcgcattgattgctttgcgcaatttttagattttcttttaattactttcgcgaattcatatgaacacaatgaattgacgacatccaacgagcactactgaatttctattcttatattgtaattgcttttgggcttttcaaaaatctcaaataaatttttaaattaattaatataattttaaataaaaaattttttacaaaaattaattccaaaaatgaatttatattaaaaaataattaaaacaagagcaaattaaaataaaaaaataaattaatggttaaacacaaacgttaaaataattaattttatattaaataatattttctgtttcaatttttaaattttgcattttatttatttttaataaataaataaatattttttttaaataattaatctaatcaatttataatcaaattcccagaaaatatg

SEQ ID NO: 101810 - DNA, 1003 bp, Heterodera glycines
attcacaatgctttttttttttttgcggtgcgctattcaaacagttttgaggaatgcgatttgttaacggattttgccgaaaaataaccaaatttggcacttttttactttagacaccccgaaaaatactgaaaattttattaaagtgctcataattttgtgattttaagccaatttcttaagagaaattttatagatttttacatacattttaatcaattttatcaaaaattgctatttatgcgaaatttttatttaggtggatttgtgatctttttaatgcaaatttttaaaaaatcccgaagttctaacttcaaaattttgagctaaagacatttcgccaaataattattagatttttcaaaatttgtggcagtttcactggtgaaatttaaacccgttttagcccggtcaaaaaaggtccattttaccgggcggcccggtcccggtggtttgtcaaaaaaaacgggaccgggacaaggccgcccggtaaaagcccgccggacacccggacccgttcggactctagttaatataatcttcaaattatgttcggtgtaaattttgaagtgagtaccgaaatttttcaaaattccaggttcttgatttttgacgaaattattagtttttttttgtggtttcgcttaaaatatgattcaaataaagtgagcagaaaattattatatattatcattattatttttgataataatttctattaatattattaaggtccgctggatttcgcaaaatgatttctatggtaagcaatcaatactgttcggcaaaacattttcaaaccccctttaattaaagttaatcaggcccaaaaattatttttttccaaatttatgttgaatattacatacagtatgcgacattccggattttggtcatattcggaagtctttaagtttaataaaatattgaaaataaaaaataatagtcttaagtagtaattaaattaattttttttttattaggtgttgggtttgacagtatg

SEQ ID NO: 101811 - DNA, 68 bp, Heterodera glycines
gtcaaaaaattattcgaatttctccaatttgtttcccatatttccgaaagttattcggtatcataatg

SEQ ID NO: 101812 - DNA, 305 bp, Heterodera glycines
ttgtattattttcacttgatataaattaaaatttgaatttttttttaaatttttaaaatttttttgaatttttaaaatttcccggttggtcccggttcccggtttttcttgcggtcccggtcccgaaaaaaaatcgaggtcccggtcccggtcccggcttatcaggtcccggcaagtcccggtcccggttttggcaaaaattcccggtcccgtggcactctagttttaagtgcttgattatattcgaactatggcataatgtcaatttctaaatataatatttatttgtttagtgccaaaggatg

SEQ ID NO: 101813 - DNA, 114 bp, Heterodera glycines
attataaaagtaacggcggaataaattaattgtttttaagtgatgactgatgactcatcctaatttattttccattttctttcccttttttaagaagcgcgtgctttttcaatg

SEQ ID NO: 101814 - DNA, 580 bp, Heterodera glycines
aaaggtgcctgacaagctttattattctcaaaaaattcaaaatttttcaatggatacaaaaaaaatcggccaaaaattaaaaaaaattaatcccatcttattaataagtaataaaatatttattatcgctcaacaatttgtttgtggaaactgaatatcaaccaaccggaaacattggcatgagaaaatgttttaaccatatttggtgccaaatattttgattaaatttattttggcatattaaagagagagagagtgccttaggcaaagaaatgaattcaaagaattagcccgaggcacatcaaaccaaattctttaaactctcacgcacagccaacgcttttcttcacaatgaaactcaaacaaaatgccaaacaaaaattttctaattttggattttgtgccggaaatgtttatgtgaacaattttacaaaaaaaaacaatgagaaatattccaaaaataataggcattttcatgaaattacaaatgtaaaatttagagattttcgaaattttaaaagccaatatttttgatcaattgattaatcagtcaatgaacaacactatgaatgccacaatg

SEQ ID NO: 101815 - DNA, 1003 bp, Heterodera glycines
ttcatcaaagatatgaaaaaatgattaagaatgcaaactaacaaaaaactgaaaaaaagaattttctgtagaaaccccaattatttttttgcttcgataattaattttctcaataagttattttcatcgattttaatttaatttcattgaaaaaacgcactgattttcaaattttcgctcctattttaccatttttcgcattatttcgcaatttttatgcccttatttatttacctattttttttcgcttaaaatccgccgcttaatgatcaggcaatacgaaggcttgttatcgcatatggtcccaatgaaaaccaaaatgatcaagatttgatcaatcattacgtgcacttcaatatggaattgacatgaaaggcttcgaaaaaggaattaataatgaatatctatcaattcttattctataaagcacataaatttattttaatcagagcgcaaatgtcttttttcgctgtacggcgcaaatgtcgcggcgcaaatggcacggcgcaaatgtccgcggcgcaagagtcttttttgctgagcggcgcaagtgtcgcggcgcaaaagtcggctaaccatttataatgcattttcttttggtattttgtttatcataaaatagaaaaacttttttttgaaattttatgagggcaaatttacaaaagggtcaccccatcgaatatatattccatgtcaattcataaaagccgtcattaggccaattcggtgacacgttgtgtgtctataaccaattaaccaatgttggaaggcattgaagaaaaatttatttaatttattttatggcacaatttcgcaacacagaataatggcacttggataattggatttttaaaaattaaacaaattctgggatagaaaaaaatgtgataaaagataagaaaatgatcagcattaaattgctcatgatcagagaaacaattaagaaaggactgatcaaaaattgtacgcaattttcctgatcaaaattgcttatgggacaatg

SEQ ID NO: 101816 - DNA, 315 bp, Heterodera glycines
tgtaagcaataaataaaggctatttgtcgaaatatgtatagaaaaatcaataagtggtagcttaatattataacttgccatgtatttgaatttctttgcaattcctatataatttttatgttgaaaaattttgttttaaaaattttggtttaaaaaatataaaaaattttgtgtacgagttgagttgcctattttactaattttaagacatcaaatttcatacctttattgtctgcacctcacataaaaccgagtaaacaaagtgattggcacatacagtatgaacaatttacaattatacatacagtacatatg

SEQ ID NO: 101817 - DNA, 532 bp, Heterodera glycines
accccgtgccaaggaaaaagtttaataaataccaatggaaaattctaataatccggatcaaaaattatcgaaccgaatttcaggttatatgtttttgggggataaactcaaatagagcctgcatacaacattttataatagcaaattgcagaggcaccaaaggcccttttaattctgcaaattattgggctccacaacgccttgtccttccgatgaacaaagggaggggggttaaccaaaatttttgctaaaatctctggaaagagggggtcgacaggggattatcttccttaagcatcctcggcggtcacttctgctcggctctttggacaattttggcaacgatgattcggaagtgcaaagggtgaaccccccctcctcgtcgccctttttcacgaacaatcacaattttgacggacgagcgaatggaaagaaacgaggcggggcacgcgcttttattggggaaaagggtgcttcgataaatgctctgaatttggagaagcgaggcggtggacggaattttaacgaaatg

SEQ ID NO: 101818 - DNA, 392 bp, Heterodera glycines
atttttatgtgtacgaataaaaggcacttgtacataattaacgtaattaagtgatcgaagttgaaaggcacaaaaataatgaaaataaagtatttgcaatgcaaaacaacttttgtaaattgaactgcaatttaattcggtcattcttttaaattattaccgtatcacttggaagaaagggaaagagagagggatatttgttctgtttttaaatattaaaattattgacattatattttttgccaatttctccccctcccccgattttatttcttgcgttcatttcaccaatttgaaagaagacaaaattcatgttggccaattttcgcaactgtccgggcaccacccgggcggaatggaacaaatggggcgaattggcatttgacgagatg

SEQ ID NO: 101819 - DNA, 543 bp, Heterodera glycines
tgttttttacattttcacaaaaattgtttaatccacaaaattggcaaagacttatttattaaaatttcgcccatttaaaacatttattttatgtttattttccccataaatatttatttgtccacttttttcatcccatttttgtcaatgttacttcttcaccttttcttgtcattctcgagaaggaatcgagaaatcaattttattccctcagttttgttaatttatttttttattttccttttaaaattattattattttcattctattttccccattttgattttatttttttatatgtatgtattgtttaacaatttttcgacccgtttttataccatttattgtccaattatgtattttgtcctaaatattttcccgttttttctcccctttttttccccatttaaaatcattcggaaaaaaacgttaaaatttaaacccaaccttttcaaacaacagcaagtggaatggatcaatgttgctgatttgcgacgtgagaagccatttttgaagttgcagaaacggcacgccaaggaatg

SEQ ID NO: 101820 - DNA, 90 bp, Heterodera glycines
taaaacatttcgccaaaataattattaaattttttcaaatttgggcttgtttcactggtgaaatttagtcctgtttttacggtccaaatg

SEQ ID NO: 101821 - DNA, 207 bp, Heterodera glycines
aatggattctcttttccctttcaatccattcacatatctttttgaacatttcgcctaagcaaaaattaatgtacttgcacgttcgcgggcgggcaaaaattgattttccccctctcatagttttttaataaaaagttaattaataattataattaaaattttctagatttaaaaaaatattaatttattagcaaaatttcgccaatg

SEQ ID NO: 101822 - DNA, 172 bp, Heterodera glycines
gctctaatttaagcaaatcatattattgcaaaataaaatgatcaaatcaggaataaattaaaaataaaacgccagaaaatgcaaaaatttttatctttcgatatgcaaaatttggtgcaaattgtattttagttatttgttcaaaaataaaacaaaatacaggtacaacatg

SEQ ID NO: 101823 - DNA, 139 bp, Heterodera glycines
atacgaaaaatttttggggaatgaattggaagaaaaatgcatttgctatttgaatgttgcggtttttgtcagaacaatttactcgaaattgaaatggatcagaaggaattgcaaaaacgaagagaacgaaaaaataatg

SEQ ID NO: 101824 - DNA, 144 bp, Heterodera glycines
tttcatcggccgaagagttttcgccaaaaaatgcgcaaaactttgaggaggacaaagtgccaaacacagaaaggcattacatttttactcggtttttggtttataaaaacaatttaaattgtttttaaaattattgcccaaatg

SEQ ID NO: 101825 - DNA, 1003 bp, Heterodera glycines
  unsure (1)..(1003): unsure at all n locations
aaatatatttttttttgttttactcatccgaaattaaaagacgaaaaatggaaacaattcatttaattgcgcaccaccaaaacacatcacacgaacgaaattgttgcacaaaaaagtatgaacagaaatgaagtggaaaattcgtcaattctccagaaagcacgttaaaatcttagtgtatttataggaaatgtgatgttgaattttccacaaagtcaccgaaaaaagtgcaaaatgtaaatttgtaataggacaacacttttgctcgcttaattagtgggcaaaaataattttgaaaaaagcaaaagaaaaagaaaagagagaaaaacagcgaaaaggagaaaggagagaataattggccttatttttgttgcttttggtccacagcagcacagaaacaaatggacaaaaaaatgacgacgaaacaaatgtnggagaagaagaagaagaagacggtggtggtgacggatctgaacaaaatggcaaatttatgttaccaaaaaagggataaaaaaagagattcgaatccaaacccgggctgacccggcactcaaatctatccggttaattcaatgttttcttctcccaaattttgcctattgtcgtaatcttacaactagcacaaatttcgaatttctaaaaatatttaagtcattctcgagaaatttttatgttcgagggcctcctgggcgacctgtgcgatattccctgccggaaaaatgcatctcatcataaaactcatcccgcataacaaatcgtgcctgggcttgagcatggggatgggtgtgtcggggcataccaaacggcaaaaaactttaaaaatatactttttctaaatttttaacaataagcttttctgtcgcgagagggggggggggaggggagtgggctgttcccgggtggcacagcattggcacatttgtggcaaatttaaattgatttgaattgaattcttcacattgccagtagtcattagcacggcttctcaaacgatgccacaatg

SEQ ID NO: 101826 - DNA, 354 bp, Heterodera glycines
ttttctggtatggaaatgtcccatatatgttcgtgaggtagcggtggtaatgacacggttggtaaggcaacggttggtaaggaaacgtttggtaaggaaacggtggtaaggaaacggtggtaaggaaacggtggtaaggaaacaacaccaacccctttttgaaaaaaaacagaatgtcaaaaatagaattttttatttctctaagatgtaatgccaaatgcttttttcaaaattttcaaagaaagagaaagaaaaccggaaataagggactgtccccttgaaaaaatacactaccgaaatgacttttcaggtgcatttacatactctaatattattgcaagttttatggaaatg

SEQ ID NO: 101827 - DNA, 154 bp, Heterodera glycines
taatttatggattaacctagatgatcaataactgaaagattgtttacccaaactatgtttttgatggcggtgaatttacatcaaaacaatttcttttgccattctttcttatttttcccaaatcaatttccccaaaaaattaaaattattaatg

SEQ ID NO: 101828 - DNA, 1003 bp, Heterodera glycines
gtaaatgtgataaattcatcacaatttaatatgtacgggaacctcttttggcattggaatttgctaattagggcctaattagggagtgggtgttcatttcctttttttccatttccatttcattttgcctttgcgaatggccaaagttttgcaaaggatgggaatgggaaaggtgccaagaaagggagcgcccaactgactactgtcccttccatttttgtccttgacaaaagcgggggggggggggggacgaggaatgtcgcattatgtgaacaaattatttcatcacgaggacagtttttgcaaaacggcaaaaattgggggggggggagacaatgcaaaatggggataaaagaaagaataacacaggaaagatagacggagaacgataaagataaagataaagcgagagagagaaagagagagaggaaaaagggggggggggagagacaatgcaaaatggggataaaagaaagaataacacaggaaagatagacggagaacgataaagataaagataaagcgagagagagaaagagagagagagagagagagaggaaaaggggggggggaatttgtggcatttggccaaaacaattagaaggaaggcgtaatatgattggttctaacatttccactgatttatttgtgccaaatttttcggaaattcagtctcaattttcaatgtcccgttgctttggggtattttttattttggtgtttaaagcccagggaaaaattgaaaaataaacgcggaaaatgggattaaaaacggaaaaggtgatcaaggcgaaagcatagggtaaagggccaaaactggggtcattttgggcaatgccatccttcattcattcgttggcaaagtgtcgggggaatgacccaaaaatgggacgcgaaataatcggcgggggaaggggagcgattggggtttgggcggaggggtcctcaccgcaccatcgccgtcgtcatatccgctgacccctcctccctcccagcccaaatg

SEQ ID NO: 101829 - DNA, 408 bp, Heterodera glycines
cctctgatcaatcgatcagaaactcattcccctcaaaagacggccgaggggggggggggggcgccgaagagatcggagagacgggcaaaaggcgtctcaaagcaaaacaaaggcaaaattcgccttcagttttacggagcgaaatatcagctcaggaggaggaggaagaggagaatatttcattgtcatctgctatctgtttcatcacttcttctcccttttaatttaaagcaaaaataaaaaaatgccattgtgcaatggcacaatggcattttactatgtataatggatttttcatatttttaattggtcatagccttggcatttttgataatgccgaagaggaaagttcgaccaataaataattttaggcaagaatctccccgtttattttgtcacgacaaaatg

SEQ ID NO: 101830 - DNA, 210 bp, Heterodera glycines
actttttttttgtttccttgaattttctcaataatttttttttattagacttattttttcgaattaggctaggtaagtaaattttgtgaataccttttctttgatttttttatgtaaattgaattttctcttcgttttatggccgtgcttttggtcgccacttcgttggccattttggcggtcgatttcacgctgttcccgcgccgtatg

SEQ ID NO: 101831 - DNA, 56 bp, Heterodera glycines
ttcatttttatgattgccaaaatatttttccttatttacgtattcattgacagatg

SEQ ID NO: 101832 - DNA, 79 bp, Heterodera glycines
  unsure (1)..(79): unsure at all n locations
ttttaaatcgtgtcnnggttcttctggcaatcagtccaaacttgtttttcacttnaaaaatgagttcccgagaaaaatg

SEQ ID NO: 101833 - DNA, 123 bp, Heterodera glycines
catggcaattcactgaattcggacaaagaggaggagcagggaattgggtcgggaccgaacagcggcggtgaacagtcggcgaccgccgtcgccaccgccccaaaaagcgcttcgctttcaatg

SEQ ID NO: 101834 - DNA, 601 bp, Heterodera glycines
aacatttttggtcgattcttaggggtgtatttttctgtattttttaggacctatttttaggggtgtattttccgtttatattgcatttttgttaacaaattttccaaaaaatggcaaaatatgcataaaaattcagaaaaacccaaaatatgcataaaagcccaaaatatgcaaataaaagtcccgatttttatacgcaaacacaaaaaagaaagtgtttttcctactatttagagcatggagaagccaggaaaaaatatgcatttgcatacttttggcagccctactaataacttgaaaagtagcttaacaaccacaaaaaaacatgcttttcgtttgttttagactatagggagctcaggaaaaacaggtaaaaacctaaaatcgtatctctagtaatcagcacattttttaccctggtaaagacaaaaataaaatttttaatttattttctgtcgggccgccattctgcagtattacctaatgtactattctcatgtgttcgttttatatgaatacgaactgtttaaccttgtgttatgttaagcatctccacttaaaaaaaatagtcgaatagtttaaacaacaaaattgtcaaatg

SEQ ID NO: 101835 - DNA, 902 bp, Heterodera glycines
ttttgggcacattttaagatttttggatttctaggtatatctgagctaattttagagcgtaattaaaacgcatatgtactcgttttgatagtgtacaagaaaattcacttttttttgacaagtatgataaaaaagacatctttcacatttactaattcagcgtaaaaatcaggaaaaaattgtgagcaaaagaaaatccgaccgggagattccgattctaaaccttaccaatgttgtatattatctacaatagttttacccaggttatcgtatttaattgttaaataaacacgataataggatttaattctgagtttattataatacaaatttttctaaatataattttattttaataatgtttgattgtttgtttataatatcactcaactatggtcaggaccatacgcgctcttagacttaaacctagcttcggcatagttttaatttaaagcctaggccgagtacggtacttccaatttttaaattttgtgtataatcatagatatacccatattaaaaaatggctttctcgtttccaaataaaatccacatataaacgcgattctgctggccaatttgctaacccaaaaaacgtctcagacgttaaggcattcaacggggcaggtgcatttattgtacatgcgcttataatcgacctacagtataaactgtatgaagtgagttttatctctgtaatgctacatgcatacattctgtattgtaaaccttaggcttgcccaaccgtagctaaaaatgggctattatgcaaccgtaagctgtccgaacagagactttgttcgagttgcggttttgctaccaaaaatccaacagatgctgttatccttcgacttgaacttcaagatctaatggataaagaatgccgccaaaatacaacaatg

SEQ ID NO: 101836 - DNA, 179 bp, Heterodera glycines
tccgcaaatcaattaatatgggcgggcaattaattgcatcactaattcatttatttcatttaacaataatacataaattaataattatgccgtttagtagttttctcattaattagaaaatattacatttattcataattatttaatgattccatttaaaaaagaattactcaaaaatg

SEQ ID NO: 101837 - DNA, 241 bp, Heterodera glycines
tccctattgtattcaaaactcttaaaaatattattaaatatttttaaagaaaaaattaaaacttagaccatcaatcggaaactttggctcacaatagaagacgaagaaaaaaccgcttcaacagcctccacaaaatttgcaacctgctgatttagaacagcgaaaattcaaattttgcacctttcttttcattgccactctcttcacactaaccccagtaatttacttcattaacaaaatg

SEQ ID NO: 101838 - DNA, 629 bp, Heterodera glycines
  unsure (1)..(629): unsure at all n locations
ggtaaaagataaatttaatttaaaaatancttaagnaaattaacttattttttaaaactatggttggaaataattttacatnaagtgaaaattctataatttccctttatatttgccatttctcagctctatccactaatattaaaaattagctggaggaaacatggagaaattaattttattttcttttattgcattaattatttttacaaatgatgggcaattaaatttttgattttgttgcccaaaagggaaagaataattattttattgtgaagtcactaaacttgcgcaagtgattcactttcaccagcagcaagtttgaagaacaccttcgattaattgtacgacaaaattaaatttaataaacaaatatgtttcaccactgatttttgtgcgccgatttgccaattagcgctgattagtctccctaattaatttgtttgtcaaactgaaaaaaaatttactaaagaggaaagaaaaaaaaggaagaaaaactggcacaaaccgaagatcagtagcacattagcagaagaaggccacactataaaagagggtccccaaaactcacacagacataattgacttaattaccttttaataccctcgcactaattactctcaagatg

SEQ ID NO: 101839 - DNA, 188 bp, Heterodera glycines
tttctaccagaaaacaaaaacacaatcagatccagaaataacaaacagaattaacggttcggaagttccgagaaattgcaataataacaaatgacatatttagtcattcgcgccatcgtatttatttacgataatcgctgataaaggatttaaacaataaattggtgacagaaatatatttaggtatg

SEQ ID NO: 101840 - DNA, 422 bp, Heterodera glycines
tgttagccatgtttaagccctttgtttattcccattttggggataggggcccaacagttggcgaaaaaacatccgcccggaaataaagggctttctttacctgcaaaattttggtttaaacaaaatttgggtgaatttttcccaattttttagccaagttatcatttatttttaaaaaatgatataataaaaagggaaaattcggttccaataatttttaatttgttttttatttttatttccattttaatcttatatttatttattttttgaattcttaacttattttgattgagtttcatttgcttttcaacaaatttaacaattttggtaatatttttagctgaacgcttaattatatctatttagcttttatttaattattttcctttttaattcagctttatcattaaaataaaatg

SEQ ID NO: 101841 - DNA, 958 bp, Heterodera glycines
  unsure (1)..(958): unsure at all n locations
ccggaatagcttcactatagcctgtactttaattctgcgttggatttttgctccccataattgtttgagtaccccaaacggacacttgaaaaaatcgatttatttttgttttcggggcagtccccccgaaccgatgcgcccagatttatggggagaccgaatccttcgggaatagcttccctatagcctgtactttaattctgcgttggatttttgctccccataattgtttgagtaccccaaacggacacttgaaaaaatcgatttttttgttttcggggcagtccccccgaaccgatgcgcccagatttatggggagaccgaatccttcgggaatagcttccctatagcctgtactttaattctgcgttggatttttactccccataattgtttgagtaccccaaacggacacttgaaaaaatcgatttttttgttttcggggcagtccccccgagccgatgcgcccagatttatggggagaccgaatccttccggaatagcttccctatagcctgtactttaattctgcgttggatttttgctccacataattgtttgagtaccccaaacggacacttgaaaaaatcgatttttttgttttcggggcagtccccccgaaccgatgcgcccagatttatggggagaccgaatccttccggaatagcttccctatagcctgtactttaattctgcgttggatttttgctccccataattgtttgagtaccccaaacggacacttgaaaaaatcgatttttttgttttcggggcagtccccccgaaccgatgcgcccagatttatggggagaccgaatccttcgggaatagcttccctatagcctgtactttaattctgcngtggatttttgctccccataaatgtttgagtaccccaaacggacacttgaaaaatcgatttttttggtttcataaatatttttttcagaaagtcatg

SEQ ID NO: 101842 - DNA, 210 bp, Heterodera glycines
tttttcggtaaccgtcttggttcaattcaaatccaacaatgtctgcaatttcaacaaattcgcttctcagtctttgagcaaatcactcaaatggcgaagttatcctcagtctttgagcaacttcgacaaattctcgactaaattttcttttatttgcagcctcagtctttgagctccgtcgtcggcgttattcccggtctttaagcaatg

SEQ ID NO: 101843 - DNA, 140 bp, Heterodera glycines
ctattttaagggcgttaaatttgaatttgaaaaatgtttgttatgaaaataaaataaatttgaataaaacgaatttgcttattggcatgggcatttggcatatgcttgttattttttttcttctttagatttataatatg

SEQ ID NO: 101844 - DNA, 404 bp, Heterodera glycines
tttcttttttgtgtttgcgtacaaaagttggaacttttatttacatattttggaatttttctacatattacatatgtacatatttttatacatattatggaatttttagtacatgtttcgcaattttttcgtacatatttatttttacatattttgggaatttttgagaatttataaaaaatttcttaagaaaaatttaaaaaatttttttttgaaaatgtacccctaaaaatgggctttttccaaaaatcagattcaaaaattaatttttaaaatactaaaaagtgattctaagcctattttagtcctttttatggcattttctgattagttcactttttacgaagaattttttctagaaaaatgaccatttaaaaattatttacatattttagtacaatatg

SEQ ID NO: 101845 - DNA, 684 bp, Heterodera glycines
  unsure (1)..(684): unsure at all n locations
aaaaaaaaaaaaaattcccccccgaaaaaaataatgaaaaaattaagcatcgctcgggaaaaattcgcaaaattttgtcattgcccacgcaaaaggcaanttgtatggcatttttgattaaatttccaattttttgatttctataaaactatacttcttaaatttttttatataaaaaattcttttattcgaactccagaaaaaaattgaaatttttttatattttttgtaaaaatagaaatttaaaagtttgattctacaaaaagactatttttattttgattctctttatttattcttttttgctgcacaattggtggaataattttttttcaaaatttcattttttttatttttcaaagtcgaggcctcttaatgtatggacacagtagagtaaaaaaattttttattttttaagaaaattggttgaggccatgtgttcagctctgtgatggtggtgctgagtaccaaaattgaggcgtgaaattcccagagcagataattagggattgaattttgcggggaaaaaaattcgcatcgaaattcggtggcattttgggaaaagaaaatagacctctaatggcagcacaatgtagagtaaaaaaaaaaaatttttttttcattttttttgttttttgaggaattggctggcgcaaatggattcagctctatgatgtggtgatg

SEQ ID NO: 101846 - DNA, 159 bp, Heterodera glycines
attccatccacggcaattacggttgtgaagaaaattgaggacgaaaaagtaagagatgtgtcggaaaagacagtaaagaataaaaagagtgaggaagaatacagtcaggaagttgaagctaaggtcattgagagcttagctaatgatggcaatgaaatg

SEQ ID NO: 101847 - DNA, 688 bp, Heterodera glycines
  unsure (1)..(688): unsure at all n locations
aaattatgagatttacatatcaaaaatagttctcgatattttcaatgaaaatcggggnaattctgtaaatttctcattagctttttggattttcccattttttgaattgtcacattggactttttttgtttttggttttctctgttggctttcggcattcgtttgttttttgtttcgttgtggtgaaattttgtaaaaaaataatcttctttacctgattaattttttttaattaaattaaaatataccaacaatcataaacacgaaaaaatatttttttaatggattttaacttttgagcttttctttatataaatctgagttgtgttgtgttgtgtttgttctttaatttaattggaaaattcttttaaagaaatttaatattcccttttttcaaatgaaaaaatgagtccattttatttttagagaaaaattatttatttatttattttcaattggcccaaaaagctttttcttaactgttttaaagccaaaagatgcaaaaaatcttttttgtttgatttgtaatttgagttgaatgagtgggcgaattttgtacaacaaaaagtcacaaaaccatcgcaattgtttcaacaatttgggcaattttcttttgccatttgtccaatttttgtcggtataaattaatttttaattctaatttaatcttcagacagtcataaaaatg

SEQ ID NO: 101848 - DNA, 1003 bp, Heterodera glycines
atgaaaaggtgatgaattgaatgtacggattttcataattttttcaattactatgccaattagcacaggcttatcgatgggtagggttgttgatggttacaaaattttccccctttctacgggtcacaattgggacgagactgagttgtccgcccgatcagtgatcgtttcgctttgggtgggggttaagtgatcgcagcaccgatcggagagtgtcacacgacgtatgatcaaacggtcaatcgcgcggctgcaatgatcgggggtctccattcacccctccccctttcccccgcccgcctccgccggcgactgcgaccggcgctgacccgaaagtccgccgtggaattttgcgccgatggcggatcgagaaaagagtcgagaactgatcagcataattgggtcactgcgcccgccatctcttcgcttcaaaatgctctttcattcgcccgcattccccccccccccccataattcattcgctaccatatttatttgtgcggtgattgtgaattaattgaacagtgccacgccgccgaggcgacccttattttgatcaagtgaaaatgagggcagaaatttcacctgaaattgcttctactattttgatgagctaaaaaaggaagagactcaaagtgatcggaccaatccttcccactgatcagtccattcgtgcggttttggctaaagaatttttgctctggaatttccatctgctctttgttttcccccaattaactgatcataaatcttgagtaccagtttttgaataatgatgctcgaggccgattcaagatactcgaaactgagatctgactacgataaaaccagacaaatacacaattttaacgaaaaatccaaattttctcgaaattggaaagaacccgagattttttcttggtcgagaatcgagaccgtgaatctcgagcatccctattggagagagtgacttaatctttgctttgtgccattcccagcccattcattccttttttgggcgatg

SEQ ID NO: 101849 - DNA, 67 bp, Heterodera glycines
catagccatttgatttttcaggccattcaatatctcgtgagtgcgctcaaacattcccccaacaatg

SEQ ID NO: 101850 - DNA, 398 bp, Heterodera glycines
agctaatcaccatcaatcgtccgcaatgacgttaaactagcctaagccatcaacaactgtccgaaacgctaatcacccggctgccacgagtccggaatgacgttaaactagcaaagcatcggccaacccacataacaatcgtccgcaatgacattaaactaaagaaccaacctaacaacaaatgtccgcaaagacattaaactagaaaagcaaacaacacatgtccgcaatgacgttaaactagagaaacaaaccacccaaagtccgcaatgacgttaaactagcaaagcatcaattgtccgcaatgacgttaaactagcaaagcaccggccaccaagcaaccattgtccgaaaatacgctaaactagcaatccatccgacggtcagggtccgaaatg

SEQ ID NO: 101851 - DNA, 504 bp, Heterodera glycines
atatactaaaaacagtttgaaatcaccttttacatggtttttaatttttaaatgcgggatttgcgggattaatcccgcgggatcccgtcccgcaaaaaattttgagttccagtcccgcagcgggttccgcaaatttgaaatttccggtctctactaaagacaatacaaattaaatataatttacttagctcaagggcaactgaattttaacattattggtattgcgaaagccttgagttttctcaattaaaccgcaaatttaaaaatgatctaaaagaatcaaccaagttaaatctgtttgcttttaagtaaataaaaaaaagtgattttacggaaaactgctaaaataccaattttagaaacgcaccaacacagcatattgtacattttgttgttctttttttaaattaatttatgctaatttaagaaaatggaccggtgccaaaataaacaaaattttactcagtaaaaatattaaacatttcataaaatttacaggaaatg

SEQ ID NO: 101852 - DNA, 328 bp, Heterodera glycines
agaagatgatttaacagatgattgagtgaaaataaagttttataaatttgaaactcattacatccattcttaaatacaaaaactcatcaatttaatcagttaatataaaataagaattaacaattaaaaaaattttttttattaattttcttaattatgattcgaattcgattagataatataaaaaaatgttctactaaaaaataagcagcggatttttgaatttttggaagataggtcaccaatatgttatatttttttgtaattttgccactgttatgtactgtactatactgtacttgttgtttagttccaactaccgtacatg

SEQ ID NO: 101853 - DNA, 302 bp, Heterodera glycines
ggggtgaccggactagtaatcgtttttttttaaattttctattatctttaggctcgattcggtattcccgaagcagtttggggactgggcgaccggacactccgccgcttgatctcgctttcaaaggctatggctcgggcacggcaacctttgaaacaaactttggaagagatgaggaggaagaggatgacgatcacactgagtcttcgcgcattttgtctccggcgactcgttttgctcccacccatgggattggcccatacactaaaaaagcatcgcctgtggaaaatttcaaaaagatg

SEQ ID NO: 101854 - DNA, 109 bp, Heterodera glycines
ttctttattccaatttcacatgcaaatccatcggtgagtttttacttgtcgaccaaatgttagggtatttaattaattggtctattttaattagatggacgacaatatg

SEQ ID NO: 101855 - DNA, 388 bp, Heterodera glycines
tttttgctgaatatttaaatttaaggaaaattttttttttgagtgagagacaaaaacttattaaaaaaagactaatatttgcaaaatgcgtattaatttatgtaagcaatgcgcgttttccattttaaggacatcgtatgtgcatttatcaattatataattgattataactgctttttgatgttggattttgtctttaccatgggcataaacaatattaaaaaaattcattaaatcgtctcctctgaatccatttacctatctataataataattctccaaagctctaattattttttatatgacgcttaaaaatggaatatttttttattcgtgattactgatctgtagggctaggaattatatggatataaaatcgcaaaatatg

SEQ ID NO: 101856 - DNA, 359 bp, Heterodera glycines
aaattcttttggtttattttttgtctttattaataatgagtttttttgtcttattacccgacctctctggagaagtgcgcaataaattggcacagattggcaaatgattttttaaaatataaagtgatgggcaatatatttaatgaatatttaaggaaataattattctagccaattttttgtttcttttaaaaagaggccgaaaagtggttctcaaattggaaaattgtgggatggccccgaaccctattcctgatattttttatttaagtcagtagaaataatgatctgatccagtttttccatttatttaggtttgccctaaatttcaggtcatttttcaggatagtttcacaatg

SEQ ID NO: 101857 - DNA, 1003 bp, Heterodera glycines
tcccccaaatatgccctaaaaacccgaaaaatacccaaatatgccttaaaaattatccaaaatggcttttaaaccctcaaaaaaatgccaaaattgtgtaaaaatacagaattgactttaaaaactacaaaacaatggccaaggagcttttttagacaattgcaaaaaattttgaatttcaaaattttatgcaatttcgaattttttaaatttttatcatatgataaaacaaaattacatttttcttatatcaacaatttttttttcaaaagttcttacaaaaaattcaaaatttttcgatttttaagggtatattttttaaattcccaaaaagatcgatccttaggggtgtatttttcatttttattgcatttttcttattaaaatttgccaaaaatgaccgaaatatgctctaaaaattcaaaaatggtaaaatatgcatttattctcgaaaacccccaaaatatgcttttatatgcactaaaaaccttcaccaaatcgaaaacgcagaaatgcaatttttgagcccctttcttaatagcatatgcgcagaaaaaatatgcaaaatcatacaatttataaccctaatgataattaatatagggctgccaaaaatatgtacataaatatgtaaaaaaaaatcccgaaatatgtacaaaacaatccaaatatgtactaaatatgtaaataaaattttaaaatggttttttttaattccccgtaaaggatgaaatatgcagaaaatgccataaaaatgactttaaataggcttataatcaccttttagtttttaaaaattactttttggtattttacaacggtgtgtacattttataaattattttttcactaaattctccaaatatattaaaaatgaaaatatgtacaaaaaattttccgaaatattggattttttgaggatttccaaaaatttccgtaaaaaatcctcaaaatatgtaaaaaaaaataaaataaaatatataagaaaaaagtccaaaatatg

SEQ ID NO: 101858 - DNA, 812 bp, Heterodera glycines
  unsure (1)..(812): unsure at all n locations
taatttaaattacaaaagaaaccaaaacaaatattatgttaacaatgtntaataaatttaaattaagtgatntaattgataatttaccgtttatatatggttaagaactttttttntaatcgcattttgcagcattttccttgtcataatcgcaatggcacatttgcggacaatttcgggaaaaataaaaaagtttcttaaaaaaattatgattttttttccgaataaatgaattgagactgtaaaaaagcagcttaatattttactgaattaactccccgaaaagattttggagaattgcgaatgtcgaaactattgccgtcataatatgctgattacggctgtagtatctttgaattttgcacttaattgttaaagaatattgtgaaaattcgaaaattaaaaaattctaaatgttttatagatacctatatttaatttgtttctttacaatgttaaatcaatctttttcaggctcattaataaacattttttattgccaattttatattatggatttccttttttaaaacatatttttttatttattaaatatttattcactgatttaatttccttgtcatcttttgtgtttacgtgtctttagaaagaaggttagcattttgcctgatttgctcagctttgccaaacggtccttggcaaaaattggagcgaaaggatcgtctttttattttgctcataatatctttggttgttcaaagacgcaaaaaacaaatttttaataaattattatattattcttttcaaaactatttgtttatttaaaaaaaaatttagaataaacgacaatg

SEQ ID NO: 101859 - DNA, 110 bp, Heterodera glycines
agaaattttctatgcaacaaacgctctcgaacatgaaacgaagtgcggtgcgccgtggccattttatttttcaaataatttttaaatttaatacatattccagaaaaatg

SEQ ID NO: 101860 - DNA, 157 bp, Heterodera glycines
aaaagaggcgagttttgaagaatgaataattttattctatataattttaattaattttattttatgtattttattttttttctacattagttcctttaagcttgtgccagcacataaactcattttgaagcacgcgtccgaagtatttgaggcaatg

SEQ ID NO: 101861 - DNA, 281 bp, Heterodera glycines
tttatttattattttttaattatatttaaataaaatcctttaaataattattttaattaattccatttttattttaaattatttcattttaaatttccattattttatttaggcttagtcatttgccggcccgcgactattcagacattttcagcgaaatcagcaaattgctgcacgaaccgttcagtttccgtttgatggaggcaattaaatttttaatttttaccaatttaattaattatttaaatttttttccccatttttcagattaatagcaaatg

SEQ ID NO: 101862 - DNA, 339 bp, Heterodera glycines
catcaattccctgggggacatcccccccccctttttttttcctttcgggtcaatacaaaagattacacccccagaaaaatgggggcccctttctaagaaaaaacattgaaggccttggtaattttccatgggtcgtcgatagtcgctgagtgctgggacgtcatggcatagttatccctttcacggtaggttgtcacggcacgagtagcctttccagggcgggatttgtatcagcgtctcaggccttccggaaaggattcaactagctgaactaccgacgctgcatactccagctccccaatttgctcaatcgtataggatcattgtcgcctcaatatg

SEQ ID NO: 101863 - DNA, 883 bp, Heterodera glycines
attaaataattaagcaaattgaaaaacaaatgggaaaagggatttaataggccaccactgaaattgacaacagcgaaaagccaaaagagaataagcgaaacgacggcaacaacagaacaaagagagagcaccgacacaacgcaaaggacgacgaaacgaagtcatttattatttgattggaatggatttgtttgggaaattcatttttcatttctaatgcctccaaagattgtccaaatccgccggtgtgcctcagaaattgcggcattttcatcgacgaagacgggtgccaaagttgccaatgtctgtggatttcgaagggtaatgatgttgttaatgaatgccagtgcaaatatgtaaaattgaaatgccattgttgcttttgttagcctgtgataccgatttggactgtgcctttacggagggccaattttgtgatttgggccgttgcgaatgcgcggaggggtgggagcaggacattgccatgtcgggcatttgtcgcttcaaagaaagtgcaaaactcagaggtacgccgccaacagttttcaaattgaaatttaaattgccgaaaaaggggtgccaaatgtgcccggccctgatcagtccgcccaactgagtactgctacctctgcttcttctgatcagctcgctttttccctctccacttatccgactactttgtttttcgattccgacattttctcaccgtccattctcggcacatttaatggccaattgaaagtagcattaaactgattaataatatgcaattaaattggaaattattaaaataacgtatttcttattcccatttccgttgccttttcaccatcgattgtttgtgccgaatttggggccaaaactgagaaaaaagcggcaaatg

SEQ ID NO: 101864 - DNA, 353 bp, Heterodera glycines
tccttcaattattaaatggctaattggctatttccagacaatttgcgctaaattattgaaacaataacaaaaaataaatttttttaatgtgaaaagataattaactaacgatttttcgacattcgaaaaaatcctggacctggatacaggaaaaagctagctacaaaactgcattcttaaaatgcctgtttctcgttttcagcaaaaaatatttttaatttacaacagaacgccaaataataatttaaaaatattttctataacttggtcaaacttctgctgctaattcaatttgcttgcagcttttgttttaaacctttcttcaattttagcactgtgtttttgtaacaatg

SEQ ID NO: 101865 - DNA, 145 bp, Heterodera glycines
tgtgaaatttgaagaaaaaaataggacaaacaaattgctgaatacggaaattaaacaatgattagggctcgaaattatatggaataaaaaacataaaatatggactaagaaagaccgaaatacggacataaaaagcgcaaaaatg

SEQ ID NO: 101866 - DNA, 540 bp, Heterodera glycines
tatatatatatatatatatatatatatatatttcttcatttatttagatattttgtcccaacatattacacattttgattagcataggaatttctgttttttgtttcacattaactaaaagtggtggctgatttttatttatttttgcattcactgcttttggtttattaaatataaatcacaaaaatttccgtgcaattttcatttttaatcgaaagcacagaaagtgatgatgatttcatctttaatttttaaaaattaattaaaaaaaaagcgattttatgtttatacatattttgggatttacatatttttttttacattttttcgtacaaattttgcagtttttctttttatttatttttttttgggatttttaatgaaatttttcttaaatgcataaaaatagaaaatttcataattttttcgtaagttttgagatcttaaggaaagttcaaaagaatttaaaaaataaaatttttattttctttaaattttctcttaatatgaattggatgttaatttagaactaattatatg

SEQ ID NO: 101867 - DNA, 350 bp, Heterodera glycines
gggagagagagaggagagaaaaagagggacagatagacgagagagagggcggaagaatgcgagagagaaagaaatgaaagaagagaaaactaaatgagaaaagtgattaatagagaccggacgggcccggcgagcttttaccgggcggcccggggcgcctggtaaaacgggctttttttgaacgggcgtcccggaccactgtaaatgtactttttgtaccttgtggttgctcgataaataaatatattcaaactcactttgcttttcccattttccttttctctcctcaggtggcactcgcctttcagctgaccctctcccagtcgggcgtcaacattttcgccaaaatg

SEQ ID NO: 101868 - DNA, 1003 bp, Heterodera glycines
gcccaaaaaaatttttttgcgatgactcatagcttagggttacaaattttcaattttgtgtgcatgacatgacatgacgacaatattatctgaaatcaatttgccctgggataatcaatcacagcaccagcaaagaaatactaatagaggcacaatcagcgccacgtcagcgttggattaccctcctccttcggctgctgacaaataaatgatttgattgtgagtttctgcgattgcttttcccactgttttcattccttccaccaattttccctcccttcccttcacttaatgcttattcttccaacacgtcagctctacacatacacataattttcattcattcccctccctcctcccattttgtggtggtttctttctattcgtgtgcatacgttgcactatttcgtcaaatggtcgtctctccctcccgttttcatccatttcatcgctacccatcgaataaaaaacatatacataaaattaaagacggaaattaatttatgtatttatttgtttttgtgtgtttcccggtcattgaaaacggggctggttctgttcaacaacagccagtcagtcagccaaccagagcaaccacctgttcaagctgtccattcaatcaatcttttgttgttcatgtcatggctcccccccccccacctttccgtccgtccgcattctttgctgttcaaggtcatcaatactttaggagaggggtggagaaatttttttttgtttgttttttccgtcccaaaatacagggtacaaaaatagggaggagaaccgaccaaccgtggcggaaggaaggaaagaagagaggggaggctgacggactgtcaaactgtcagccactgattactgtcagtgtcagtttttattaaaccgaccgctgaccaaaaagtgtcgcatttccctgccccccgcccccattcatttgtgtttaaaaatgatcaaaaaactgatcaacaccccgggcaattaatactttaatacacccaaaatg

SEQ ID NO: 101869 - DNA, 1003 bp, Heterodera glycines
atgccaaaaacaaacaatgaacgggtccatccatccgtgacctttcttgaaggatttatgggcattaatttaaatattcaagaatgaatggatggcatggcttattttaggtagaagaagagagcatattttcatgatgaatagaaaaaaagaatgatattaaggacaaaagaaatcagagacataaaagaatttatgtacaaaagtggcttaatttttctcgtagagaaatttaaaatacggtatatatataatgtgttagattacggtataaaaaatatttacgcttactaatattccgattctagtctcataaaaataaccatttttatcttcataattcttaagagcgattctatcctcggcgggagggcataatgccaaacataaataaaaaaaattcgaattttgagtattttgttgcatttctgtctcccttcaattgctatggatccccggtaattgccccctaatttataattaattcgtccccatcatctcattataatttcctcccattgcccatttgaagggcgacccatcggcggcgggggatggacaacaaatatttaaatgcaaattaagcttggcgcttggaattggcgttgcgtcctattcatttttattggaaatgaaaattcaatgggccgattatatttgaaaattgtttcattgaaggaaatagaaacctcaccacatctcattgtgtaataattgttaaaatgattaaaatttaaacttagcatttaaattattattttttattattatttaaataaatttatttaccaaaattatttattgttggtaattccttaaattgataattaatggggaccgtatttttaatcagaaaaatgataattaagcataaaaaaatccctaaattaaacactgaaaagcataaaaatatggcaaatcgatgattaggcataaaattgccatgattttggtttattaaaaaaaaaaaattagaattacagaaaaaaatatgaaaaaaatg

SEQ ID NO: 101870 - DNA, 109 bp, Heterodera glycines
tgcatttttgaaaaatatacaatactcggactagggcatcgggaaaatggaaaccgatcaacccgcaacctttaaccaagaattttgttttcagacacccgaggagatg

SEQ ID NO: 101871 - DNA, 110 bp, Heterodera glycines; identical to SEQ ID NO: 98226

SEQ ID NO: 101872 - DNA, 117 bp, Heterodera glycines
cacagctacagcaatttcatttgttcagatgaagtgccgccgcaatccatacgcactcgcccatttggatggagctgttgtgccggtgacgtgggatcacccgacagctcagtgatg

SEQ ID NO: 101873 - DNA, 160 bp, Heterodera glycines
tacaccaacggtttccgaggggcattccctcctcttcccttcccccccttttttcccttccccccgtgccgacaacagccgccgacaactgcgccgcccgcccgttcgtgccgtcgactcttggccctgtccgttcgtgcgccgactgttctgtgccatg

SEQ ID NO: 101874 - DNA, 431 bp, Heterodera glycines
tttcgggttggcacttaaagaatcaatcgatacgattaacttaaaggcctaaaagcaaattgaattttggaaattaatttccgaagcgattgccttccccctcttttgattattgaaaattgagcgaaatgtgtggacgaaaaggaatggaaagtggtgaaagagtcgcagcacaaaactgcgctgacacaggaggaagtggcggccagaagaaagttggacgattgtgtggccacgttgggccatgaggtgccgggcaaagcgttggcctctgagaatcacccccaacccccccccccccgcaggcgatcgttgccgccgattcactgagccttcggccgacttttctccgttggcccctcctctcccacgacttatcctccgccgtcccggcaaatccattctcaaacattccctctaccagcacaatg

SEQ ID NO: 101875 - DNA, 1003 bp, Heterodera glycines
atacgaacatgaaacacgaaacgatcaacaccactggtttagaccagggatggaatccgaggcatcaaaaaattttcggaagttggaagtaggaataccgaccccaaaatgtcggaaatctcggaattccgtgccatccttggtttagacgttgatatcactaataaaaaaaatttaaaacatgtgattggcctaacaagaaatcattgtcttatttaaatatttatttttaagcttaaaatatattttattaacatcacagcatttggtatccgccgaaaattttcaacaaattattaatttatctgttaaaattaattttaaaaataaacaaaacatttagatttattctcatttaatattttttcttccgctaaatttaggtgaaattttatggaataatcattttagccgagaaaattttcattttaacgtaaaattgcataataaaaaacaatctatgcattaaaacattttttcaagttttaaatcaatattttgatatttttggggcttttgggaaaaaaacagaaaaacgaaaactattaatcaacatttttaaatattttaacatttttctctccatttcacaaccattaatataattgaaaactttattttattaaaaattggacagaattgaatttaaaaaaagaattctcgattttattttgagatggtatcttttattttatcataatttaacggatgcttcttgttgagttacctaatttatttttttaatttctagaaattaagtgaaatttatgataccttgttccttatctgaatttcaaatttttcttgagatatttgttggtccactttcacgtttttgcctctcaaatttttgcccaattttttttttgtaaaatttttcggtttctgttgaaattttcgggtcaagatgaaatatgagactctcgcacctctctaattgagtaatatgatgaaaaatttaaaaaatttacataaaaatattcagaaaagagaaaaatgaatg

SEQ ID NO: 101876 - DNA, 932 bp, Heterodera glycines
  unsure (1)..(932): unsure at all n locations
ataaaaagtagaataatttaanttggaaagtaaaatttcatgctttttatagaaaacaaaatccaagccccacatcgcatggcttttttcgcgaccgatgggatttaaataccgaagccgacaaccaaacttataatccttatttcgtcattattttcgccacttggattttgagaaatttcttaacaaaatgtggtggaaacaaagtttaaattttctgtaaaaacagatataggtgtgagcgaaagtgcaaattggaaaagcagcagcgccgatttgcggggtcgacattttgatggatgttctgctgtttgactttttatcatggccaattatcattagggctgggaatttaagtcaaatgactttttttgatgactctaaatggccttaaaatgacttaaaaagtgttctaaactttgtttgaagcttctaacatgcatttttatgacttttttacactttttgggatttttataacttttttgagttttttttttgcgaattttccgtgattttttttaactttagcctaattttttaggacttttttgcattttatacgtgcttttttggggttttttttattttactttttggctattttttcaggacttttttcaatttttcatgccttttttatgcctttttggcgattttttatgacttttttagtcgactttttaagctttttcgtgccttttttccccagctctttagatgaaatgcaaaaaagaaagggaagcataaaacggtgaaggaaataaaaggacgcacaaatgcacacgtcacaacacactctctgctcactgtccgaggatggcactgacagtgggggagagacactcgtaaaaaggcaaccaaaaacaaactcaaccaaaccaccaaacgcaacagactgaggaggtcaaatcaatgccaagggacaaatg

SEQ ID NO: 101877 - DNA, 1003 bp, Heterodera glycines
tttttttgtctcacttcttctctctctctctctcttttttttttgcttcacaatcgttcaagtatttttataaattagtccttattcatttgctaccaggactttttcttggttatttttggcttccttcactctcttttcctattctctctctctcctacaaataattgtcaaattttgtcaattttcgatgcagtaagcccctttagcatttggactagcccggggcaaatttcgttcttcttttttctgcatttttaaaatccctttagcttttcgctagcccggacaaatgttctcacctcttttctcttcgttttaatgtccctttagttttcgactagcccggacagaaatttaaaatgtcagacttctttacttgcgtgtacacgtctttgtttctagccctcaggccagggagatctcccacaaacttctgccggcttacccaattctcagcttcgtcgtcaatgatgtgtcgttgtttcccaaaatgggaaccatccggtgctaccagtgagggatgcgcactgtgcccccagaccaactatgcaccgtttatcccggatggagtttgggagggaatggggaaaagccaaggcgtctttgaccaagccccgaacccccaaacgactaattgactgttaaagatgtgtttattcattcgatgttggatttaaacgaagcgagaaatcggaataataattgaagtctgttccatcactactactgactaactgatcactggggaaagagaaatgcgaagagaatgggcggagaaacattacaatgagaaaaggaaaaacgtgtgaaaaggataaatgtgattgaattgataatggccaatgggaaataattaaatgagggaaatgcgtcgaataatccttacattattatattttttaccgattccgaaccatgaaataaagataatctttacggccaaacgatactcatcaatgaaattctgtccagaaaatgcgatgtaaacaaatagaaaatg

SEQ ID NO: 101878 - DNA, 54 bp, Heterodera glycines
tggagcggccatatttgaagagaggcttaggcaagatccaattttgtattcatg

SEQ ID NO: 101879 - DNA, 556 bp, Heterodera glycines
ttcttaagggtgtatttattttcgtctttttcgtccaattttgctctgacgaaaacgaaacacgaaacgaaaaacaaaatttaaaaaccgaaaacgaaacacgaaacgaaaaacaaaattttgaaaaccgaaaacgaaacgaaaaaactttggtagacgaaaacgaaacacgaaaacgaaacacaaaaagtgccgaaaatgtaggacgaaacgaaatttcgtccatccctggttggcacataaaatgattatgggtcgcataaaatgattatgggacacgcataatatttcatgggacgcataaaaccgaccagaaccaaaaaactgtatagtacactttttgcatcaaaattcctaaaattttagcatttttaaaatacttggtgctatgtggaaaattaatttttacaaaatttgatttttgtacttcgaagaaaaaaaataataaaaatatatttaatattaaataaaacttttgggaagttgaatttgaattttattcaacctaaatcaatattattccattttggttatctcagggttgccatcgtccatg

SEQ ID NO: 101880 - DNA, 148 bp, Heterodera glycines
agtcagtgcaattgcccgcgggggggggggggggggttgagaagagtggacttgggcatgggcagggaacggactttggcacgggaaaggaaagagttaaaccaggggccatggggacacagccaccttcaggatcatctcccaaatg

SEQ ID NO: 101881 - DNA, 240 bp, Heterodera glycines
ttttcaacccccctcaaaagaagggctttattttttgggaggtggctataatttagaaggcttcatttcagggcgggactctaatttagggggggggggggggggagggtgctttattttttaaaatacttaattttacaaattcataaaaaaattttcaataggtagtctacgataacccattgtttgaacaaactcgagaccacaaattgtggcaaacggaagagtacccacaaaatg

SEQ ID NO: 101882 - DNA, 470 bp, Heterodera glycines
ttataataataattgcagagaaatacaattgttgaatgattacagagagaatgaaaatgagtgttcattccgtctctatttataaaggcgtaaagacaaaaaatgggtaattaatcggcggcactaattgaaaattgcctgtttaattaatgcgttgggctgatcatttaagccttaaatgggagttaattaaggcgggtggtttgacgtttaacttaatgctatatcttgttaattttccggctaacactaattgacacgaatcgctttttttgttcaaaaaaaatgtcaaatacaaatttcagggaaaatttttttgtataaaaatggaaaattttatgcgttttcttcacttcaacaattccctattcttcacaacaattatttgttcgtctccaagtctcgtcaaacgtctgcatttattgttcatcaatccttcatcggttgccacccgcgcgcacttcaaaatg

SEQ ID NO: 101883 - DNA, 661 bp, Heterodera glycines
aataaaacatacaaaaaagagattgggaggggtccagggacggtcccaggatttcggctgcttggagggcgtacctccgggcgacgaccttctttttcttttttttgcttttcacaccacttttttttgcggcagtttttccaaaaacttttggggaacaggggtccgcggcggtgccgataggcgccgccgggaaaatgtttgcattttataatgcgatttgttaacgaattttgtccgaaaaaaattttgtgattttgagtagagtgccacgggaccgggaattttgggcaaacccgggaccgggaccctttcgggttgaaaaaccgggaatttttggctgggaaaaccgggaaaaaaccgggactagtcccggtcccggtcaaaaccgggacctcggtattcaaatatgtaagttatgacatgaggaactcaaaaaaacaagtttttttgaacatttttcgacattactttcttgaagcttaacgaaattttttgaaattttgcaggcatagaaaattcctaagggctattgaatgatatcaagaattttaatttttgttatagtgggcaaaaaagctaaagaatgattaattaaagcttttaaaatctataaaataacatataataattagttttttttaaatatgatttagtgatg

SEQ ID NO: 101884 - DNA, 80 bp, Heterodera glycines
gggtgctccattgggataattttaaaaaatcaatttgaatggggaagaacgaaaaatggcttttaaccgaagcaaaaatg

SEQ ID NO: 101885 - DNA, 1003 bp, Heterodera glycines
atcgcctaaaatcttatatttcattttgtggtttttcgataggtcaatgaggctaaatttacaaaatgaggctttgaggttttttgaggcttttgaggaaaatcgtcgtaatctgttaaatttatgattaatcgataaattggcataatgtatgagaatcatttaataatttgcggaaccctcagttcggccccacggttcggcaccacctcgtttttccacgatagcttttttatttggcatccaaatcaaacaatcttggtatcattcgaaagttcgtatcatgctctattagcctaacaaaaaataaaattcaagcctggaaaaaaaattattgagaaaaaacttgaatttttgacttttttgcagtttcatgttataactaatttggtaattgtctaatcgctaagcaatagcttagataaagcctctaaacatattaagctttcgaaagataccaacaacattggatttggttgacaaataaaaaagttatagaaagttatattggaaaaacatgctggggccgaaccgtgggggccgaactgacgtagaccgataatttgggtttttaatagagcatcaaaacgaaaatcacattcaaattttccaaaaaaaattgtttttcataaaaaccagaaaatagtcaatttttcccgaaaattctcaaaattaagaatattttcaatgaaaatatgctaatggtcaaaattcttaattttcgcaccctaaaaatgctcaaaatcgcaaaattttgccatttttttggacaactctgttaacgaatcgtattaaaaattacaaaaaatttttccggtgcgtgcctatcggcaccgccagccccctttccccctaaagttttttggaaaaagcgccgcaatcatgcttagatttcataaaaatcttatttttatataacaaatacattgaaaaagatataacatttgaaaattttaatgtgttttgaaaaatttataaaaattaggctttttgatccaaaatg

SEQ ID NO: 101886 - DNA, 171 bp, Heterodera glycines
ggtattttactggcttttccttttcttttgggtcagtttgatacaaattaatacggaatttgtgaattataatacttattttatttgttgccacagaagtagattcattgtattcctatgttttctttcggattccctaaatcccgaattaatgcttaaaatacaataatg

SEQ ID NO: 101887 - DNA, 63 bp, Heterodera glycines
cctttaaaaaaaattaaataaatatagttttttaattaattaagttgtttaattttagtgatg

SEQ ID NO: 101888 - DNA, 246 bp, Heterodera glycines
tgaaattgaactatcgatttaatttactaatattttttgttttttaaaaagtttggaggtattcggccggtctccgtccctctaattgccgtgttaattaattattaattaattaattaatcacttcaattgtttctcttcctttgcaatgtgtttgattttatttgctcatttctttcttccttttgctccgtcattcttctttcattcatttcgaattattatttattttttgttgtgctaatg

SEQ ID NO: 101889 - DNA, 353 bp, Heterodera glycines
ttgttacaaaaacacagtgctaaaattgaagaaaggtttaaaacaaaagctgcaagcaaattgaattagcagcagaagtttgaccaagttatagaaaatatttttaaattattatttggcgttctgttgtaaattaaaaatattttttgctgaaaacgagaaacaggcattttaagaatgcagttttgtagctagctttttcctgtatccaggtccaggattttttcgaatgtcgaaaaatcgttagttaattatcttttcacattaaaaaaatttattttttgttattgtttcaataatttagcgcaaattgtctggaaatagccaattagccatttaataattgaaggatg

SEQ ID NO: 101890 - DNA, 961 bp, Heterodera glycines
tgcttgggaagcacttgatggaaaaaaccagggttgcgaccccgacgtcggggtaggaaaagtcggggttcggagttgtcggggttggaagcgtcggggttcggggttgggatgaccaaatcgttcggggtaggggttcggggttttttttttaccttatgccatatagtcaaaatttttttattattttttctgaaaaaatatttattaatttccatataaataattttatttgtttattttttatatttttttatcatgaagatttttgtataaaattatatttttcttgaaattttaaaattttttttttcggcgacgtttgtctttttggcggcgactttttgctgcatcgaatttctgcataatagatgaaattattataaaatgttatgatgacaaaaaaggcaatttcgagaaattatatttaaaaaaatgaatttatttaaaaaatgagcaaaaatttctgattacttttttgtttttcaaaacatgtttttttcgcggcgcgctttttctaaagaattttagggaaacgccgccggtattctaacatttttcaatttaaataaattttgtttttcttcgatattttgtcaaaatattattaaattttcatgatttgagttatgtaaaattgaatttttaatttcaactaaggatttagaaaattaagggttaatttgttaacaaattaagccaagaatggtcgatttttatgaatatttttgtttaaaaatcatattagtgaataaaaaaataaattaaaaaataccaaccggtatcgaactcatgacagaaagtaatgtcagtgtgaagaactaaccattacaccacattccgaataaacaaacaaacaaacaaacaagtaaaatagcaaatttacttgattaataaaaatttcgcaaaatggtttaaagaaattcaaaagcgtcggggtcggggttaaccccgaaaaatg

SEQ ID NO: 101891 - DNA, 799 bp, Heterodera glycines
acccattcattcttaggcacgtattgaggctcggcaacacaaactaacgggtaattggaatgcaacttggaacctgaaatacgccgaactcaaaaggccgactcgagtgggctcaaatgggaaatttggttggcaattaaacataagaatgtccaaatgattccatttttaggcattaagctcaggctgaagaaggagaaaagggggtttttgtttttctcttccaaagatgccaatgtcaaaagcaaaattgtgcaattcggtgctgaacacgtcgcgcaacgagtgtttgagcacattcttcgcgcctggaaatacggtgtcgcggattaacgttattttgcgaatgaatcccactctctttctctcccttctttcgccttttttgcttttcaattctaatcaatgcttttgaactttgttctcttttttgatcacgggtttatgccttttgctttacattcttctcgctttttgcagaactttcatggactatatattcataaaacacattacgtatttatttattcatgaataaaaaaaaagttatcagaagggcaaaaccacttactctgacgactgttcagataatatgtcgtagagtaagtgataaatatatggatgaccaaaaataaaatcaaaatatattaataaaatgaggtcaaagtcaattgagatcgacagtataaatgccaaatcacttaaaaattaattctgtttttgcttttccgtttaggtaaataattaatacccttaaagaaatcgaatcatttattcattgagaagcttgtaaaaaatg

SEQ ID NO: 101892 - DNA, 263 bp, Heterodera glycines
aaaagccaattttcatctttgtaattcattttgggtttttggaattaagatttgaaaagattgcatttttagtccaaaaataaggtaaatatgaaaatgagaaggaaaatgtgtaattaattacacagctgattattttgcataaaatgggaaaaattttgcttttcccgcgcccttttgttgttttttttcattttgagatgtaggaacaaaacagaaattacctataatttaaccaccttccatctttatgcagatgaatg

SEQ ID NO: 101893 - DNA, 96 bp, Heterodera glycines
ttaaattattttaattcattttaaattataattatttcttattaattcaactattttttactgtgaataatattttattatttcagttccaaaatg

SEQ ID NO: 101894 - DNA, 220 bp, Heterodera glycines
tttttggtgtcacctaaaaatcatttaaatgaaatcgaattttaggatgcattttgtgcgtttatcgacgcgacatgtaaaaacctataattgcataaaaacatatattaattatatataaattaaactaaatttaattttaattatacgaaaattttattacttttgaaatttattaattatatttatatatatatatttttttatgttaaaatcaatg

SEQ ID NO: 101895 - DNA, 319 bp, Heterodera glycines
  unsure (1)..(319): unsure at all n locations
caaacggtgtaacagagcgcgttaatcagaccatactaggaatgctacgaaggtcgacttattcagctgggaatgggacgaaagactgccttttgtagtgtttgcctataattcgacaccatcagaagtcaccggcatttccccccaccatntaatgtttggcaaaccaataaacttcccattggaacatgaattgaaattcagcgtaaatccgctttacacaatagaccaaaattcgtatattcaactttttcgtgagtcactaatgcaattagtggacgaagcgcggaaaaattcccaaataagtcgtgcaaaaatg

SEQ ID NO: 101896 - DNA, 598 bp, Heterodera glycines
tttgtccttaaaaacgatgttttctttctgcttgattttgtttgtccttttttagctgacatattcgtatataaacaaaattttagattaattttgatcatttcttattttctaatttgctcgtagattttcaaatttcccattttttgacattttgtacgtacctattttggtttttataatccgggctccaaaaaactatttggcttaattaggcaaaatccttggtcaaaattccataaatttcattttgttttttgcatttaagatgtacataatatattaaaatcgtccgtggtttttacggttggcttctccgttccttggattggattaaccggcaaattttacaccgactctctctgctcataatcgcgtaaattaattaactgattttttgttcattttaattttctgcatttaggaggacatgataatcgaaaagtttccagcagatcgtcaccctggactgctccagcgtttgaacgaattgaaacggagcgaaaccgtttacaacggcggagtgttcatcttgttcacaattccttatcggtagggcaaaaatgtgaatgttgatcattaattctattacccaatg

SEQ ID NO: 101897 - DNA, 168 bp, Heterodera glycines
gttaaacaaataataaattgtataaaaacgagaaatcatgatcattttattcaacatttataattattttaataacattttaaactattcagacgatgatgagaagaagttaagaaatggacgccggagcaagtggttgaatgggaccagcgttgctatggaaaaatg

SEQ ID NO: 101898 - DNA, 144 bp, Heterodera glycines
ttttgaccgctgcccacgcctttctccgcttcgatacgattgctttcgacaaatgtaagttagtgagtcggcccctttcagttttatgccatcttttcgcagtgtttacggttatcgcaacttcgagacgattcggcacggatg

SEQ ID NO: 101899 - DNA, 524 bp, Heterodera glycines
tttcgaattattagggcctattttctaggtttttatttttagtcttaaaaacctcaaaaaaaattttattaacctattttgatcttttttggcgttttgttcaaaatttattaacaaaaatgcaataaaacgaaaagaaaacatcccctaagaatcggccctaaaatttccagaaaaaatacaccccttaagaaatgaaaatttttccaattctcgaaaatttatttttattttgacaaaattttttatgtatcgcaagcttaattttgttcgctttttaaataaaattttgtcattttctaatcccctaaatttgagaatttttaaagcctattttctttttttaagtgcctattttttattttagagcctaaaacctaattattttggcaatttttagagcctaaaatataagccctaaacataataaattttttacaatttgtgccagtttttttaaatttagcaatttttttcatttttggtggctgttattgctcaacatcaatatcaatatcatcatg

SEQ ID NO: 101900 - DNA, 151 bp, Heterodera glycines
  unsure (1)..(151): unsure at all n locations
ggtggtttctgcttntcgcattgtgaccagcgcataatttgccgttttctttcaggtaaaggtggcagactttggcctcgcattcaaaggaccgtcgaagccggtggaaacgggcaagccggtgccgatcagatggctgtcgccggagatg

SEQ ID NO: 101901 - DNA, 663 bp, Heterodera glycines
gaaaatttgggtgcaatttgttaacagattttcaacaaaaaaggttggtttttgcgattattaagctcaattggtaggattttcatttaaaaaaggataaaatatgtatcaatttaaaaaaactatgagtaatcatattttctttataggaaacccacgagtatacaagaaaaaaaattgaaaataatctaatttctgtagagggattgaaccaggggaaagaagaagggacagtcaaggagactagccattaggccatttgcacacttgggcagtgttacttttaaagaattttagtaaggctaatagagcatatgaagagctttcgaatgataccaacaatcttggatttggatgccaaagaaaaaagttatagcgaaaaacataaaaatttttgaaaatctgcttgtttgtaatacattgtaaattgaaaaaatccgcttattgtaatacctggcatttaaaaaaacgcattagtatatttgaaagatggatacatcgattattgtaattacaactcgccttttgtccccttctccccttgctgcttttggtgtttttgttgtcccttcaattcaccgattcaatcaaaattgccttttcagtaataacttaaattggaacaaatcctattaatatttgacagtaattataataataatg

SEQ ID NO: 101902 - DNA, 543 bp, Heterodera glycines
tttttgtgaaatttaattgtatatggaagcagaaaagcctgtgagaagcattgcgttgtcattttcagctaattgagtctcagccgtgggagtggggagggatgaaaatataattataattaaatttttttaaagtaaatgccaaattaaagtgatcactcaattgcaaattcaataattcactataactctgccaaatgaaagtgatcactcaattgccaattcaataattcactataactctgccaaatgaaagggatcacacaattggcaattcaataattcactataattatgcacaattaaagtgatcacgcaatttccaattaaataattcactataactctgccaaatgaagtgatcactcaattgccaattcaataattcactataattatgccaaattaaagtagtcaataagtaggattctccccataaaagggctgccttgatagtggtgaagtaatatattcaccacattcattcattcctaattgcacccttccattattttcaattgccagccaatttatcgcaaaatg

SEQ ID NO: 101903 - DNA, 1003 bp, Heterodera glycines
taggaattgcatatataaatttttaaaataaaatgatgttttacaattgtctaaaaagcttcctagccatattgttttgatgtttttaaagtcaattctgaatttttagataattattgcattttttgagagtaaaagccattttttgctgctctaaaggcatattttagtgcatatttggccattttttccccaatcagcatgaataatttttcgcaacaattttgtattccatcacaaccaccgtttcatcgacgaatatacctgatcttcaacaggaaatatttgatcaaaaaactggtgttcattttaaaaatttattttaaaattaaagaaaattattaaatacgcaacggaaaatgaaaaaaaaaattctgtttaataattaatgtatattatatttattttccaataaagttttcctcaaaacctaatacctaggcgttttgagcttttccaccggagttataaaattttttttactggattaatgtacggaggctgaaaacagcttatcatttttcgttccgacaaaaaaaatattttaaaaactttaaatcttttaatttacttaaaacattaagtttgagaatgaatcctttatgctacaagagttttctcttatttataaatcaacaagaaaaaaagattttaaaaattttataagtatttgttttatatattttctaacaaagtacccgcaaatgttatttaaaatttttttaaacatataaaactgggaaccctgctgagcaccaccactttcccaatgaatcacactcacagggtgctgtatgaacgaaaataatcactgacgaaagcattagccacgatcagcacacagtccatcaaatcatcattttttcatttcccaaaatccaataaaattaatttttgggtgcgttgattttcaaatgaattcatttttatttaggtttttttgctcaaataaagccaaaacttttgaccgacagataatcaaaaaacgaaaactcacaaaatg

SEQ ID NO: 101904 - DNA, 75 bp, Heterodera glycines
ggtatttgcacggagcaaattattaaataaacattttaaatacatttaaattcaggggcaattgttccgacgatg

SEQ ID NO: 101905 - DNA, 82 bp, Heterodera glycines
gaccaagcgtgacccggattttcatagcacatgcaacaaaaatgacactttcattggcgggactgaaaacattgaaaaaatg

SEQ ID NO: 101906 - DNA, 157 bp, Heterodera glycines
  unsure (1)..(157): unsure at all n locations
acaaattatgtatatttatatatacaataggcatggatttntgatgcaaaaaaataaaaaataaataattnntaaacagcaaaatatttttatatattgncgcatagttactgtttttccacgcccaagtacaaatgaacgtttcaatttaaatatg

SEQ ID NO: 101907 - DNA, 1003 bp, Heterodera glycines
aaatttgcggatcccgctgcgggactggaactcaaaattttttgcgggacgggatcccgcggaattaatcccgcaaatcccgcatttaaaatttgcgggatcccgtgcgggattgcgagattttggaaaattcgaaaaaatttcaaaacatgaaaaatgttttggaaaaaatataaaaaatttcatggagggggagaaagccttagtgaaccctaacgacgcgacgcgttcaatggttgatgaagtgcgatcaaagggtttgatcacaaatttacctgaacttaccataggagcgaacagagcgccaatacgtgcctaaattttgggaatttttttaatggatttttgaaaatttaaatagaaaatgactgaccaccaacgagcacgaaccgactgaggaagctctgaaagaagggaaggagaagcaaaaggatgtttttgaaaatttttcaaagattttcaacagatttttgaatttaattttggtaaaatcacctgagcggagtaggcacagattcaactgaactaaatgcaaaaaatacaaataaatttgataagattgcttggcaattttttgtataacatattttctaaaagagagtcgccggttaaattaatttaataaaaaatcatcaagttgaggttccagacaggataatcagttacgctgatcgagagtcgtggtctcgagtcaatcaatgctcgaaaaaaggtcttggctttttgcggtattagtctcgggcctcgggaaatttggctctattgcacagtttacacgaccataaaaagataataaaatatttgacaacattaatgtaccttattttttgtagatttattatcaaaaatgttcagaaaaacccaaattttttcataactttttgctaataataaataaaaaatgaaaatttattatttcaatagtcgtcgaaaataaatttttttgaaaaataattttaatgagcacaattaaataataaaaaaataaaaatctaaggtaatg

SEQ ID NO: 101908 - DNA, 519 bp, Heterodera glycines
aaaatacgctgacccacaaaatgtccagcccacgaaatgtccaagtctcgaatttgagttttttattattcagatgggcctaaggttaggcaaggggtaatataaagggtatattcgtattcagcgaccccgaaaaccctaaaaatcctaaattagactcattttgtttttataaattttgaaaaattttggacatttcgtgggtttttactcttttggacattccgtggcttggacactttgtgggggtgccataaaataaaataaaaaggtacatgcctcaaaatccggtcccttgttatgctgatcatcaaaataagtaaacaacacaaacaattttgaattagcgcgtctgaaatgcctttggcgttatgtttttatcttcagtggtttttgtaagatagtaaaggtaaaggggaaaaggcggagttcgagtccgttgcacaatattatattatttattattttttcggtctattaaaggcataaccgataaccctgtaaatgtcttcctatatg

SEQ ID NO: 101909 - DNA, 1003 bp, Heterodera glycines
agctggtcgcatttggggataaagacgaatgaatgggggggggggggggaattgtgacagcttttgcccgtccgtctcattattgtcaccaccaccccgtccgacttcatcatcatttgcgccgtccttttgctgttcgttcggacatcacacatttgtgcccattacccccccccccccgcctttcgccctcaaaacccattcaattgaaaatgacaacaaacaaacaaacagaaacggggggggggcatttgcgctttttcttttgctgctttttcgcctttggtccgacagatggccacggcaatgacaaaacgtttttattttgcgtcgttttttcaaatgatcggatcaatgaatatctttggatttgatcacttttccttcttggcaaattcccttcctattattaattcgttcgttcgttcatttttggtggtgaaacttcattcattaggccacaattaataattttaaatagggtaaaatttaaaaggaaaactaaaaaattaaattaaatgcttaattagcaacggttcattgtttgtgtttcgtttctcaattgtccaattagaagcaattagcattttcatggacagctgttcttcccctgctgctgctgatttatttacctccaaacaacaaaaaataaaatatgtcgcgataattgtcccattataattgtgcaaaatacggccaattttggcaaggaatttcgacggacgaagccgagagtcgccctaaggccccttcccttcccggggctttaattgttcatttgggcaccgttcagcgcattacgcaacggtgccggagggggggggggaaattaagtggcataacgcaatttgctggtgatggacgggaagcaatgaatgaacgaaaaatgaaaaaatttggcacgaaaataatatttcaaattattcgaagaaatgtaatattaagaaatttggaacaaacaattagaaattatcaaaaatgacatatttttgttttcagaatg

SEQ ID NO: 101910 - DNA, 1003 bp, Heterodera glycines
  unsure (1)..(1003): unsure at all n locations
cgataaaattctatcatcaaaaataaaaatgcggcaattttttaactggtttaaaaaatttcaataatatatcaaaattttagaaagttttatatgggtataaagattcgaaactaatgctttactgtgcagcagggatggtacggaattccgatttccggtttccgacatgtttggggccggaattccgatttccgaaaaaatttagggagtcagaattacgatttccaacattttggataaaaagtcggaaattttcggaaattttttttttgagtttttttncaaaatttaacaatttttgtacaattttacaaaagtgggcaactgatcattggacattacgacagtgaatgaatgtcaaaacctttttcgaaactgttaagataaatttttatttttggtcgcaatgtccactgtacatnttgtctactggacattttgtccatatctgtccaaattactcaatttacacatatctgttacaattttctttggtatctggccttgcttaaagcattcaagcatttacatattttaattggttactttttcactaattgttctattgtttttagctaaatttatttatttttatcctgtttatcctttcttttgcttttttttgataaatcttttactgggagtaaactctttaatgggttgtcgctcgaaaaggagaaatgtgattgagttttattataattaatttttattttttgagaaaattttttttaaagggataatttttaaaataagtggcggattattcccaaaatgagcaatttcgacgtcatgaggtcgcgcagaaaccaccttcattgaacagggagtgttctcagtcatcatcaagtctcactataaattgatctctcaatgatctttgagtaatttgtttagtataaaagggacaatcactcacctttcggaaccgaaataaaagtgcaatcaattaattaattgagtcaagactctcgagccaagggtgtaacactacaaaatg

SEQ ID NO: 101911 - DNA, 193 bp, Heterodera glycines
tggggttgtttatcagtgaatttatctctattatatttactactttggatcatttttgaactgaaaaaccctaattacttaaaaccgaaaaatcaaacatgggtgaggcgcaaacaactcctattaatctctttggtttttgaaaagcattcatttattatacaatatttcttcaatcctgtgttgtcaaatg

SEQ ID NO: 101912 - DNA, 68 bp, Heterodera glycines
ggttgattcgaatgaatactgtatcaagaatttaattttgcttttttttacagaatgccaagaccatg

SEQ ID NO: 101913 - DNA, 57 bp, Heterodera glycines
tcttacggcgttgaagacccgggctacgcggttgttcagttggcacagacgacgatg

SEQ ID NO: 101914 - DNA, 659 bp, Heterodera glycines
ggtgggataaatggcaaaaaaaaagaaactgaaaaatggtggggccaaaataagcaatagaaaacttagtaaaggcatggaaatttttaggaatgcttacgatgaatgaatccatccaaaaaaactcattttccgctacaacggctctctgaccacaccggactgcaatcaaattaatggtataattatgattgatcaattagaaatcactattttgctgttttgtcacataaaatagtgaaaattcacttttttggcgttttgtcactatttttcactttttatgtcaatttgaaaatccatgcaaaattcccgaaatccgtccgggtgtacttcccgggcctctactgcagtttaagcgtccaattgttcacataaatacgagtccaacatttttttaattggggtgaccttcaaaacaggaaagtaccaggaagcacaactcctcgcttagtttttgtgcaaattttttcaaatatttcctaattttagactaaattattgtttttttcaatagaaccatccgctgaaaaaaagaaaaagcattcctccgccgaccatcggcccatttattctgagcaattggtgaaaatcagcagcaatcgttggtttcagttgtgacatcacttggacaaagtgttcgcgtggccaccaaaatg

SEQ ID NO: 101915 - DNA, 374 bp, Heterodera glycines
ttttcgtggaggaatcatccaaaactttgagtattgtcaaggggtagtgtttatcttccgggtatttaactcgacttatcattcagcacatgtacattggtttaccaatcgagtagagtgtagtaaaattaacgaaggggtagagagaaatgaagtcacatagaaattttttcattccgtcttcaaatccgctcatttatttgttgctcattaacattttcgcgatctcgcagcctaatacacttacaactggatggacaacttgacttcgtataaattcataacgttttacattcctctcccgcactttatcatttatttttttcaattagacattaatatacatcttctaggtagcgctaattgcaggcatg

SEQ ID NO: 101916 - DNA, 682 bp, Heterodera glycines
gcgtaatttgttaaaatatttcttaaaaatgaaaaatccttagttttatttcttctatttagggtgggcatctagggatacggtaaaatgaatctacggtaaagagaacgcgagagaggaagagagggagcgaccgaagtgatcagaccacttcttcatgatgatcgagattgatcaagatttttatgttcccattgccttaattttattacagagcatatgtatattaaaaagttttttggcatttttgatttttatcttttttaatattttgctaattgtaattaatttttatttattatttcctttcttagccctcgggcgatcgattggcccaattttgcggtgcacccattttcactcaacagttccaattcaatttaattgtgatttattgatgtctgcgcaacccatttttaaatttcttattttctcagaagttgaaaaaaataattttttcattcatttattcaatggatttacttaattattttatttttatgtttatttaattaacgcaaattcattaagacattgacgtcaatggggcggggggaagaatggcataattaaattagaaggtcaaatgatccaattaaatttgcccgaaatggacactgatttccttcctcctaatttgtccttccattccatttcaaattttttcgatttttaaacgatg

SEQ ID NO: 101917 - DNA, 660 bp, Heterodera glycines
tccggtggctggtaatttcgacactgggtaaattcgacactgagtattttcgacactaagtaatttcgacactacgttttcgacatagagaaatttcgacactgaactatttcaaaaactctcactgttttccagcattttcgacactggaccatttcgacagtgagtaaattcgacactattgagaatttttaaaaattaataagaaattttggtgttagtattaggtattatgataaattttcctatttcattttctaattcgtactttttaaaaggttaggttggtataactagagttggtcgggaccgggaaatttgacaaaaaccgggaccgggacttaccgggaccagaaaagtcgggaccgggaccaacttttttgaccgggaccgggatcgggaccttgagaaaagccgggaccaaccgggaattttttcaagagaaaattttttttgaaaaattttgaaaatttgagtgcactttgttacgaaaattgccaatattcaaaaatgttcccataaatattgtagtttcgttttgggggacgaattcgaagaaaatttttaaaaattttcatttcgggggggggggaatcttggattttctgagtcccaaaattctggatttttataaattaattaaaaaattttgcgaaaatg

SEQ ID NO: 101918 - DNA, 266 bp, Heterodera glycines
tttctaaaggcacgcgggccttgacttatgaggtggatacagtagggccttaccatatctcatctttaatgattactaaaaacactagattaaatctttatctcgcgagaaatgtccgtgcgattatgttgtaaagtccaaaggcaaaaaaaaaaggattttaatattccggcggaaaattttccgtttatccgttacgacaaattgctcatttccattttattttttatcaataaaatgtttaaatattttaataatttagaatg

SEQ ID NO: 101919 - DNA, 169 bp, Heterodera glycines
ccacatattggtcgatgcttcaatcgaatcgtccccatacccaaaaaattcattttgcattgatcagacctgacataaatattattacaaagggactgacagtcattaatagcggctcgcctgcgcgtgccagaaacaaataaaagcggcagagggcaacccaaccatg

SEQ ID NO: 101920 - DNA, 63 bp, Heterodera glycines
tttatattttcatagggaacatgtttcgcgcattggggcatagccagaaattatcaaaaaatg

SEQ ID NO: 101921 - DNA, 381 bp, Heterodera glycines
gcgctgtgctattggtcgctgtcggcacttgtttggcaccgactgcgctccattcctacgcaatttccgtggtgccgtacgacgcctcgtgggaatccattgactatgtaaaacaaagccaataatggcccaatcaaattgaaaagaatgttttcaaaaaaaattgccaaaagacaaacggatcactcccgacccactgattcttggccaaaaaccttggttgaagacattgatacacttatcaaccgatcggttagcaaatctctgactaaaaattaagtcgcttggcataaaatgtaaaccgagagagggagcgatctaaaaagttaaaagcgctattaataaaccatctctaaaattgatcattttcagctgttgatg

SEQ ID NO: 101922 - DNA, 393 bp, Heterodera glycines
aataaataaaaatataaaagaaatccgacaaaaaataaataaaataaaatgaataaaacagttttcttaatactttttggtttggcaatcggccaagcaaatgctaattgttgttgtctatctaatgaagaaaaacagcaattgaatgctgcgagaaaaaccattgaaaaagcatttcgggatacgctcagattaaatactgaagcccgagatttcgcggctgcatctcatagggcaattacggaggcagaaaaaattaaagttcgtcatcccgaggcaccgggcatgaaaacatggttcggtaggttattggaaggggtgagaaaagtacaaggaatttctgaaaaaataaatgaagaaaggcagaaaatagaccatattagaaaagaaatg

SEQ ID NO: 101923 - DNA, 1003 bp, Heterodera glycines
ctttatttaaaattaaattaatataatttcatgaaataagacactaaatgtatagagaatgaattaacgtggtcgattggaataaatggaaaaaaaagcaaagtcaaaacacaaaaccttaaagcactagccgattgaaataaatggaaaaaaaagcaaagtcaaagacaaaaccttaaagcactagccgattgaaataaatggaaaaaaaagcaaagtcaaagacaaaaccttaaagcactagccgattgaaataaatggaaaaaaaagcaaagtcaaagacaaaaccttaaagcactagccgattgaaataaatggaaaaaaaagcaaagtcaaagacaaaataggaactttatacaaatttaaaaaagtaatattttgtatattgtatatgcatttaatcaaatttctactttctttataaatgttagctaattagtcagcgtctatttattttctgtaaaaatttgcctctttatttaaaattaaattaatataatttcatgaaataagacactaaatgtatagagaatgaattaacgtggtcgattggaataaatggaaaaaaaagcaaagtcaaagacaaaaccttaaagcactagccgattgaaataaatggaaaaaaaagcaaagtcaaaacacaaaaccttaaagcactagccgattgaaataaatggaaaaaaaagcaaagtcaaaacacaaaaccctaaagcactagccgattgaaataaatggaaaaaaaagcaaagtcaagaacttattctacctaatttcatggtgactgacgaggcatttgactcccttaagagagccttcccttctcatgtacttgtacctaaaatgttgttggcacaaaaagtaaagggggaaaaagaagacaaatcatccgatcaagggctaagtctcaacagatcgcagtgtaaaagctgctctactgctaacaaccccctgaccagtagtcaagtcgtatacaagtgattttgcgccccgacgttccaccatg

SEQ ID NO: 101924 - DNA, 51 bp, Heterodera glycines
agtgggggataaacgcctgaataatgtccatgccatgcactgctatagatg

SEQ ID NO: 101925 - DNA, 57 bp, Heterodera glycines
ataaaaagcaaaaaaccattatacccgaccattctctgatcatttttaagcgtcatg

SEQ ID NO: 101926 - DNA, 73 bp, Heterodera glycines
ttaagaggaattgccgcaacttcctgtcactggtgttgtgttgccttttaacagcggagtgaaaccgaacatg

SEQ ID NO: 101927 - DNA, 155 bp, Heterodera glycines
ttgataatatttttggggtcgttgaattttgcgccgccgcaaatgtccttttgactgggcgccgcaagtgtcggcgccgcaagtgtcggcgccgcaagtgtcggcgccgcaagtgtcggcgccgcaagtgtcgctttgactgggcgccgcaaatg

SEQ ID NO: 101928 - DNA, 622 bp, Heterodera glycines
ttctctgctagtgtcaatttggcgagcacaataaaaaaggaaggctaaaaataaaaaaagaataaaatacattaaagcttattatatgtaatccaacaaatttgattaagctaaaaatgagattttttttacaaaatatgtaaaaagcagcaggagaactcctcttgcgacagtcctctattgttgtaatcgataaaaaataatcgctctaatgacaattttcgttaatttttttcaaaataatcatgaaatttatgaaaaattttggcacccccacaaagtgtccaagccacgaaatgtccaaaagagtaaaaacccacgaaatgtccaaaatgtttcaaaatttataaaaacaaaatgagtctaatttaggatttttagggttttcggggtcgctgaatacgaatataccctttatattaccccttgcctaaccttaggcccatctgaataataaaaaactcaaattcgagacttggacatttcgtgggctggacattttgtgggtcagcgaaaattttatttgttacaacgtttctacttttacatctgaatctataagtactacttccctattttaaaataataattattaagtgaattttcgacttatctataaatg

SEQ ID NO: 101929 - DNA, 91 bp, Heterodera glycines
ataaaaaacaacaagcaaacattggacaattgattaaagaaaattgtgattggctttgtgccttggccaggactaaatccgcaaaaaaatg

SEQ ID NO: 101930 - DNA, 412 bp, Heterodera glycines
tctgaaactattttctatttttaatccatcagcacgctttaacatccccttttatagatttaacacaaaatacaaactgggcaaaaaattcattccatttgctgggagggtaacaaaattgtggaatcaactcgataaagaactaataaaaacaaattctctaaatcaatttaaaataaaacttaaagttcactagggtaatatgtaagaccgggaaagcaagaatgtaacaaatttctaagtgatttggtatttcgacctcatttgactttgacctcaatttatttattatttattttcacatatttttgtctttttttaattcctgtgatcatccatatattttgtcacttactctacgacacatttaccggaatagtcgtcagagtaagtggttttcgcccttctgatg

SEQ ID NO: 101931 - DNA, 739 bp, Heterodera glycines
ccaacaacaaaggacggcaagccgaagaaggagtcggccaaagcgcgcagggcacgcgaggcggccgagaaagcggcgctggaacaacagcgacaacagcacgaggcggctatggccgcgggtgcgaactctcaaataaaaaatcttaggaattcttaaagaaaaattcaatttcgaattttttaaataaattttcggggggtgaaacgtagtttggggcacggcagcaactcaccaagtgattggtgcatcgattatcgaaaacttttaagacctctctaaatttttcggcgaaaacccaaaaaatttattggtaaatgtcggaagattttgcgaaattaaacaaaaaaatcaaaatattataccaaaaagcgagaaatttttgtaaaaaaattctggcccctgatggggcgagggaggtggggggggggggctaacacttcaaatttttggggtatcgctaattttcagggctaactcacttaaattttatgggacaaaaattcataaatttgtcattatattttgggacctcgcaaattttgagattttgcgcccgactcgttttttagactttataaatttatttggtgtctaaatttaattgtgcgccgtctcactattttttgttttgtttgggggttcccggctttgatcccccggcacgctttccaaaccccaatttttggcatactcatttttgaatttttccgcattttcagcagctgctgccggcatg

SEQ ID NO: 101932 - DNA, 580 bp, Heterodera glycines
tttcgttcacctataaatcgtgctttttacactttttggattaaataatggttaaatgaatttaagggaataaaaaaggtcaaaatcgaaagccatttcctttttcttgactaaaaaatttttaatttcctaattttttttttgcccaatttccatcggttaaaaaagggcctacgtaatttggcgcatcttttgccaacggaaggccaactcgcgctctgatgtcacgcggaaagttgagcgtgggaggatagtgccaatttagaaccggaatgttagacccttcaaaaagggttaacaaacctaaaaattatttaaaattgttacataacaaattaaataattgaatttgaacccaccagccatgtgcccatcggtctttgaccgtaccattgaaattcccttaagacgaaaaatgccgggcacgcccagcaacaattggcacagcgtttgcacctcactcaaacattgttcagactaaagaagcttaaaggaaattactttgaaaaatgattgaattatcaaaattccactaacaattcgcaattctcaccacaattttcattttctcgagccaatg

SEQ ID NO: 101933 - DNA, 341 bp, Heterodera glycines
tatttttccatatttcgccatgtttgaaacttataggacaacttttttttgtccatattttccatataatccatatttttccatatttcactttttatttatatttttcccatatttcgctatgtttgaaacttctaggacaacttttttttgtccatattttccatataatccatatttccatatttcgccatgtttgaaacttctaggacaacttttttttgtccatattttccatataatccatatttttccatatttcactttttcgtccatatttgttccatattcgcaatttttagggaaacaaaatttatccaaatatttttagcaatataatg

SEQ ID NO: 101934 - DNA, 330 bp, Heterodera glycines
ccttcaattcactcatattttgtcgtgatttgtgtgctatctgtattatatatatattatatatatataaataaatgcattataattaaacatttttcacctttcggtaaattttcgtttacaaattttttaagttccatttagaagaaacgactaaaagtgatagagtacttttgatcgcgtccagacatttgcggacaatttcgggaaaaataaaaaaaatttataaaaaaaattttttttaaatgcaatgcaaaatttggactcatcacagaacgtttcttctaattttagatataaaaaaatattttgaagatatgcttaatcatg

SEQ ID NO: 101935 - DNA, 422 bp, Heterodera glycines
atccgaatgagaagccattgattggaaagatgagaaccgcttctcgtgtcacaagtgtggagaacaaggacacattgcgaagaattgccggcaatgagaaagagtaagtccgtggaaatgaatggttaagaatgagtatgaggcccggggacggtccctaaggggtattggaggagaatgaccataaagagtgctttaaaaaaatcttttgcagtgggctatggcccaatacgtattttgaggtcacctgcgttgtctttcttttctcaaaatcttatttttgtccactattgtacctaactgtcttcttccgctttattttctattgtaaaataatacatttaacttttcttaatatgaaataatgactagtgagctacggcccaaaagtattaaaaatgacgtcaaatatttcagcaatg

SEQ ID NO: 101936 - DNA, 389 bp, Heterodera glycines
cccgaaatttttcaaaaatataccccttagaaatgaattttttttcaaaaattcatctccaaaatttatttatttactttcttgacaagaatttttaattttaaaaattatttaggtatctcaatattaatttgccataattctgtagcttttttgaataaattttgtcattttacacgctaaattgaaagtttttagcaactatttccccatttttagcaactattttgggggtttattttggcgctttttagcaactataaatcgaatccctaattatcacaagaaatttgtaaaccaagagagtagtcccttttggttttaaaaaacattcaaaatgatcatttgttaagtagcaccgcttttcttattaagcggagaaaataatg

SEQ ID NO: 101937 - DNA, 51 bp, Heterodera glycines
gcgtcagtgaatgcattttgcgatgtttttccaactgtcagaccaaaaatg

SEQ ID NO: 101938 - DNA, 122 bp, Heterodera glycines
  unsure (1)..(122): unsure at all n locations
actgaaataaataaaaaagtaattgattggatttattaacaagcataaaagacttaaccgtataatattttagtttacagcaaatatttttttaatttaanagttatnaataattatttatg

SEQ ID NO: 101939 - DNA, 169 bp, Heterodera glycines
aaaatccaggttgctgaaaaatgtcctggacatgtcctggatccaggataaatccaggcctgcatccaggtccaggtcgatctctagttataagtcataagaaaaatgcatgggttcgggtcggggatgataaaacttttcggatcgggcattcgggcagacaatcatg

SEQ ID NO: 101940 - DNA, 63 bp, Heterodera glycines
aaataaacacaaaaaacacaataaaattaataaaattttagcgaagtcgaagcaaaacttatg

SEQ ID NO: 101941 - DNA, 348 bp, Heterodera glycines
tttcctggattaaatggcacctctccctttctgtcctccttttttgccattggacccattaaaatgcatttggcattcatttcccatttttcgccattcattctccgccgattgtccgtccccccgggggagagaatgaaagaatgaatcacagcaaaagttccgtcgctcgcctccccccacttccaaagaatgggaaaaaggactttacattcaaaaaaaattcccattattttctattgatccgttcaaaattgcaaatttaatagcaaattttttgattctaattctacaaatgaatggaattttcttaattgatcggtaaatgcccttcaattttcagagatg

SEQ ID NO: 101942 - DNA, 54 bp, Heterodera glycines
ggtacagaaatgggatttgtcttataattttcgtccaatattaagaaaaatatg

SEQ ID NO: 101943 - DNA, 325 bp, Heterodera glycines
gagtttacttactgtaatttgtatactgtaaaagccgtgtgcactcatcaaaattggcggtgctttcccgggatttttgaaatggaccaatcgcaattttaattatttattttccttctaagaattttgcttttttcatttttttttcaccggaatttattttcgaccatatttatccacaaaaaatatcttcttctgctgattcaatttttgagctccatcaatccatcaatggcacaagtacaattacattaaaaattaatttatattaattaattgattaattaattgcctaattaattaagttttctggcgcgtgttcatg

SEQ ID NO: 101944 - DNA, 453 bp, Heterodera glycines
ttccattttttcattgtcccatttttggccaaatatttcagcaaaagttggccttatttttccattcttttcacataaattattaactgataaagttttgtcagttgaattggttatgaatagggaccggatttatatgtacagaaaaatccaaaatatagattataatattgacgaaaaattcgcaaaatatggacgaaatatgggtaatacatgaattataaaatttgataattgaggcatcctatttttctttactaaaaaaattgaatttacttagaaaaaaaaacaaaaattagtaaatttttgcaaaaaatcaattttacacgaattgctaatgaaaaattttttgtgtaatttttggaaattttcccaaaatttttcgattttagggcgtattttccaaaaatttttccatctatgggtggtattttctgaatttttgtgaaaatg

SEQ ID NO: 101945 - DNA, 288 bp, Heterodera glycines
tgttcttactgtgcatgcccaatacatcgttataccgtatacaagattcttggtaaacccaaaaaaaaaaaccccctgcttcttttctatcactaaattgtatttctctgttttttccattttttctattccgtctgtataattccatttctacagtaccctttgcagccaaaaatggtaccctgtcacagaattttcccaattattgtgtctttttactgtacaatctcaattttaccatgtccttcccagcaacagttaataaaattcccttaattttgacagatg

SEQ ID NO: 101946 - DNA, 412 bp, Heterodera glycines
  unsure (1)..(412): unsure at all n locations
cgaccctgggtaccccnttttttcattccaattatttttctgataactcgcgctgccagtgtccctgctcgaaatccgcccgaaataattgtccaatattttgtcaaaataaaaattattatgacgattaataagattagtggaataattattaataaaattgatagccattttaaataattcactgcgtcttgtgcctttttggaatatttttcattatgtcaatccaattacttgtttttcccaaaattacgctcaatgtctcatttgcttcttcattaattagtctaatgacttctgagacatttgtccaatgtacgacacgtaaagttgaggaaggcaaataggacgaaaagtttctaagttttttgtgagcttatctataatgtctttttcagtcgcgttaaaaatg

SEQ ID NO: 101947 - DNA, 508 bp, Heterodera glycines
gcaaacaaattttagctttgaaacatttaaatgttcatttgtggcaaaatcagcttttaaacaaaataaaagattgacgcttttgaaaaattcggttcaaaaatgggaatgaaaatgccaaaaatggaaaatggaagtggcaacaaagaaaatgtggaggaggaaattagcattgacacaaaaaatttatgattaatttctatttatgagccttttattgaaagcgtgggatcaaacgcatttgaattctgtgaataatctcaagaaatgtgcacataaaacccggcaaaagccttctctgtgtgtgtgcgtaacggacaaaaatccgtgtgaaagtgccaaatccgcttttaataacctccggctgctgacgagcaaaaaaaatttttttttgatttgccgtcgtcataagatgcgcagccgccgtggccggccgatgcgataatggaaccacttcactaattgctgacgaggcgcggcaggcacgggtaaatgtgtgccgccaatg

SEQ ID NO: 101948 - DNA, 1003 bp, Heterodera glycines
aacgctttgtcgcgcagtttttttgacggtttaggcgttttcagcacctaaaaaaacctataaaagtgtttttacgcaatttcgaatctgggacctatgatgaatatttaccaaatcctttaatacgttggtaaatagagtgaaaaattgattattatagaagtaaaagagaaaatatattaatatattgttaaaattataaaaatatttacgatggcaaaataaaaacgaaatcataggattattttcttagtttccttttacaattatttatttcgtttaaaaaatagaaaatataatttatagaaaaaaataacaattttaaagattcccccattatgtataatgttaagattaaatgttttaatacataggtaaatggttgtgaaaaatgtattattatagaaagtagaatagaaagtagaagagaacagaataaaaagcatagcaaaacgtgaataaaaatcacattgattaataattttttataaaaattctagctaattccattttatttaatttcggagcaggacaaaaccttgtcattcgaattattgccggacgagtttttggaccataagtttttggcaaaaagttcgaaaaactaagtttttgggttccttctggccataacttttttttctttctcaattaaattaaatattcttggtatattcgaaagcacttgagtaactaactctattagcctgcaaaaactgaaaaattattattcgcaaacaaaaagggcaaaaaaaaagttaaaaaaatgggtttttgagttccttgtggccaaaaagtgttttgaaaacccaaaatgacttaaacgtgaaaaatttacaaaaaattaatttagggtttttgtatgagtgggttcgattcccagctgaggtttaacattttgcccatttcttattatatttaaaactaattataagaaaatcaattggaatgccattgcatgaagccaaaattcctgctggttgggcaaggcgaactccaaatg

SEQ ID NO: 101949 - DNA, 158 bp, Heterodera glycines
agacaacagagggcagacgcctcagatttcttttcacccatttcggccgcaactatggggatgaccgctgaatatctaaaacccaagcctaagccgagacaacagccagttgatgcctccaacttcttttctcccatctcggcagcaaccatgggatg

SEQ ID NO: 101950 - DNA, 211 bp, Heterodera glycines
tccgactaaaatttccaaaccgtaaattcagcaacagatcgtacccaaaaaaccatttatacttttcattttacacatacatattttgtagcagtgaatatatctaattttacaagaaaatacttaagcaaataaaagaaaaaatgcgcaagaaaaaaataatatttgtatttgtgtggtaaagttaaggaatagaaagtgtgtaaagatg

SEQ ID NO: 101951 - DNA, 267 bp, Heterodera glycines
attatatatttcttctatcttttcattctgtttgtgaattgtttctttccactatttatatattttttcattaatgcgtcgaatttttttattatcattttagcatcgtcttgattatatattgtttctttcatttaagtgaaatgttcattaaatattattttgtttaatcaattattcttaaattaattctagacttcatttactttttaaattttacttattttttatattgtaaaaattaattaaaaggaaaactcaagtatg

SEQ ID NO: 101952 - DNA, 86 bp, Heterodera glycines
ccttaatgatttatcattttgggataattaatttttgaataaatcacccagctcgcggatgttcaggctgtgccatgccaaaaatg

SEQ ID NO: 101953 - DNA, 97 bp, Heterodera glycines
ccagtgccagccagccttcaactcaacgcaacatcaacaccagtgcgcgccaagctcgtctacacatttcgtcgcgacaactcatcacttcatcatg

SEQ ID NO: 101954 - DNA, 163 bp, Heterodera glycines
aaatttttacatttaaaggccatcaaaacaaacaattcaatgattacggcagaacatcacgaaaatcgaaaaactcattgtaagtattgctcaaacacattttttaacatttattaatgaaactgtataaaaaaataaatgaatttttagggccccacaaatg

SEQ ID NO: 101955 - DNA, 364 bp, Heterodera glycines
ttggcagcttggcaaaacggacaaattccttgaaacgggggacttaaaaggtataaaaatcatagacacctcctcaacgggtaacatttccaaatcggcactataggaaaaggaaaattccgcgcttagaagtcgctaaaaataagaattgcattgtcagatggtcatgtttctcattttcagtaccccaacatatgggatgaggtcgtgacggtcagtcgaatgctcttccgacgaactttccctctccaaaagcggggcggattctgccgacgatagccgcggcttcctcccttcccccgatgagggaatcgttgagggggaagaagccgcatggggcagggcgtccgactcggcaacaatg

SEQ ID NO: 101956 - DNA, 65 bp, Heterodera glycines
tttcaccgaaccagccaccaaaaaaagtacacgtcaatcaaataaaaaagtgctttgagctaatg

SEQ ID NO: 101957 - DNA, 479 bp, Heterodera glycines
aaaataataatgaatttatatttaggcgtttcaaaagtaaaataccccttttgaaaaaaatttttcactatttttgtcctgtttttttttttaccaaattttttgacaacttttttggcatttttagcataattaagtcgaagccatttaatgactattaaaatgacaaaattttaattcaaatgaatacaataataatattatgggatgaaacatttttatcatatgtaaatatcaaacataaaataatttatgggttgaaaatttgtacaaaataatataaaatacaaacaacattaaattctaaatagacttttttttttactaaattaatttttttattattattattttcttaggcacaaaatacattcatcattatgagaaatttatgtaagcaaatggatttgcgttaaattagagaaaataaaagcatataattaagtggatttctgactattttcattttatgaaaaatg

SEQ ID NO: 101958 - DNA, 112 bp, Heterodera glycines
  unsure (1)..(112): unsure at all n locations
ttcctttcaattgggcacacnatttcttatcaaaaaacccaaagtccaaatgtattcaaatttagcagccaaattgttggtggaacatcattctttcaacgggacaaaaatg

SEQ ID NO: 101959 - DNA, 891 bp, Heterodera glycines
cctgtttcataggaatttttttttttttttgttggtttttatgtagccagggatattgcgtaattaaaaaataacaataaaaatacgaaataatgaaacaaaaaataattatgagacacggacacacgaacatcctaaaaatatgagattacttacgaaagtacgaaatttttaaatgaaaaatcattattcaaaaaaaaatcacttgaataattttaatttattctttacaaatttattttttcattttgacaacgaatatctaatttgacttgctgaatgattcaaccagctgcacaatttcttaatgatgaagcaataaaagtgcccaaattaccaagcatgggaagtgatcagaaaccgcgctacgattataaattgactttagacttatttaattgtgatgtggcatggcacgcttgcttctttaagcaagtagccttcaacaagttcaaattgggtattcgttgtcgaaatgaattaataaatttgtgaaaattaaaagacggatcaaatttgttaaaattattcaattttatttatgtaatttttcaaatttttatccattgtcctatatccggacaatcggtcagtggacaatcatttagaaatggagacaatccgtcagaaaattttatttgtctttcattaatggattggctttgtccatcttagactaattgtctttctatgacggattgtctccttcgccacaaatacaatgtccatttacggattgcccgcgagactcctgtcataaatgtctgaaatgggctttcttggtcctacgactagagaccgagaaattttgcatttaaaaactaatttttgtcggattgtatgtagccagccggagggggtattgcgtaacggccccctgggcatggcatg

SEQ ID NO: 101960 - DNA, 1003 bp, Heterodera glycines
gtttaattgatcattttttgttcggcacttttctaatcaaatattgtattttgtatgtagtatatgaataaactataaaggaattctcgtggatgtaaatccattattttttttatgtataagcaaagtgcaaagtaaaatgaatatgcttattattaaatgaatttgatcaataaaaataatcaaattgaaataaaagtgctctgttcactgcttctaatcagtcagtctttccggtcgccccacttctctttgggcatgttaataatatctgatcataaatgttgatatttctgatcgcatttcttccatcattttgtttaattgtgcaaataaatttaagcatttggtttctgatcaatcacctgtcagcaatttttccgatcactttacggccactttctaatgctcactcccattgtgctttattcatcagtattttctttatgatcaattacttaattttttgaacaaaatgtttcaattatctttatgatcgcgcatcatcaccccaatttccgatcatttacttactagtcagttgagttaattccaacaaaaaatcatctatttattgcgtttaatctaacttactcactcattaaacggcttcaccttggcctccaaaaagtaaactaattgttaattgacccccgaaaagcgggaaaatatttttttgaatgaaattcgacactgaatttccacacaaaaaataactgtccaagaaatgattttgagaatcaaatttcttcacttttactgatcagtcgaatgtatacaaaaatgggggggggggagatcccttaaaaatcaaattgaaaaagaagtgcatccttgaaagaaaagtaaagccaaaaaggaaaaaaaggagttggtgtttgatacgaccgccggaaaaacatttgttggcatttctttggggggcgattggacaatcaatcgtaaaaaattccattattcttttatgatgaaaatatatataatacaatagttagaaataatg

SEQ ID NO: 101961 - DNA, 460 bp, Heterodera glycines
tggatacaaatataatttttaaataataatgttaaaatgagacttttagagattttcaaattttttcaacgagagctttttgaattagagaaaaatgccctgttttttcaatccctcggtaccagtgagctcttccggggcattatttaaatttggcctccctgttcgttagtagaatctgccaaaagttaaaaaatgattaaattagtaattgtaataaaaaaaaattagtttcgcgctagctttgcttacgtcagtcattggtattcaatatgatgccacatttttctttgttaatgtcttcatcccctatttgcgcgtatttcatttatgggcatggcatttttataaaaatatttttttatttatgccattatatatctatttttacatcagatcattattaacacataaaaatttttaaattttccatagtaagaaactgctttcagcaccaatg

SEQ ID NO: 101962 - DNA, 1003 bp, Heterodera glycines
acacttaggtttttgaatttgtaatgcggaagggaccgtactgacgaggcccacccttccagttattttttcagcaattgtcaggtccgcaaatatcgtccgcaattgtcgtccgcaattgccggtccgcaattgtcgtaacaccttaatttttaggtcctaaaaaaaccccaaattaggtgttaaaaacgggcaaatttttgaaaattttctgttcgcttcttagaggtattttagaaaaaaaatttagctcgtttcttaggggtgtattgttcttttttattgcatttttgttagtaaattttggacaaattggcgagaagggatggatgaaatgcgaaaagccagaggaaaattgatgtgtagggcgaggatttttagtggcaaaaaatcccaaaataattaactaaatattgacaaaaaaatggcgaacaagttccaaatttaggggtgtaattttttaaataggctgttttttaatttgaaaataatttaaaataaggcaaacaactttttcactgattgcagttacaaaatattttcttagcaaatattgaacagaaaaaaaatttgggggacgaatttttgtgaaaaataatttattttctgaaatttttaaaaaaagtcattgtagaaactccaaatcaagcggaaaacgcgttcttcatgcttatctgagaaaaatcaagtgctcataaattttacatttgccttattttagcaccctaaaaaaattttgattgacaaaaatttttggttttaaaaattaataatctcaatattgattttgttacttttttgaataaattttgtcattttacacccctaaatttaagactttttagagactattttccatttttagctcctatttgagagttcttagcacttaaaaatcgtatccctagtcataaaagtgcaaaatttcagatttgaattgctagcactcaaaaatgtctctgtctttttaaattatgaaaatttttttttatttaaaaagatg

SEQ ID NO: 101963 - DNA, 1003 bp, Heterodera glycines
cgaatttttgcctactggaaaaatcgctacagagaaaagaaaaagagtgatggagtacaaaatacattgtttttgcatcaaaaataacatttgttttattttttgtatcatttattctgaatttcgttttgtccaaaccaaaaattaaatttttaataatgtgtcaaatattagcgatactcaagcctgcaaatataaattagattacctatatttcataaactattgtattccattgtatgtaccattatattagtagatgtatatgtatgcatggttgtataaactcactcaataatttgctgacgaatttattttggtgaattgccacattttgggtaatcctttggaaatggaatttgtgtcccggcgttaaaaaaataaaaaatcgtaaaaattttgcaaattacaaaaaaagtaatatagataagtaataacaaattaagtgaaatcatgtgttacttgattatctcttatacaatttgccattggttgccccctttttaattaaaaaaccttcaatttgctctcgtaaattaatctgcgaatagatccttccttttttgctgctttattgagtattctgcagcctctgcatgatcacaattcatttactgtcgtaataaacagaaagaaaaactaaaagcattttttcgagtcaagaaaaaaagcaagcataaaacttcttttagatactaaaattgttcggttttgttaggaatgaagcgagttatggctgatcaaaatcaaaaaaggcatttaccagtgtaaattttaaattagtgcgcaaaaaattacgtcagttacgctatttggcgaaatgataattttgtctaacactgcactggacttgacccatagtgaaaacggaaataatgtatataaaaggagcgcatttgcagtgttccatcacataattcattgcccacatattattgttattatatattgctcatcgtctgcaactttaatcccacgaagcgacgtgcccggcgcaacaatg

SEQ ID NO: 101964 - DNA, 66 bp, Heterodera glycines
tcggtgccaaattggacaaaatggtccgtgatgtgttggctgtgagttgaataatacagataaatg

SEQ ID NO: 101965 - DNA, 351 bp, Heterodera glycines
  unsure (1)..(351): unsure at all n locations
aaattaatgtttttttgcatatattgatattttgatgaatattttatatttattttattcatttgcatattatagggcttttatgggcatattcattgcttaatgtagcaatgtatggcnnaacaatttaacataattaataaaaaaatatataatttttcattattacgttactttatttatttgagttctttctttaataatatgaatatacattctttgttcattttactaattactagggaagtttctgagagtcaattgagattaagttgaataattttctaataagataatggtaatataatgtcaacaattacacatttagaagtaattaacttgtgatttatg

SEQ ID NO: 101966 - DNA, 210 bp, Heterodera glycines
ctccctgtggctcctgaaagaataagagtgaatggtgcaataaacatttttgtcatttttttgaatcatttcatttatatatatatatatatattttaagcttggtacaccactattttgtgttttattactcacttttaattatattatttagtttgcctattttgtattgcaaagaattaatattttcctcttgtttagctaaaaatg

SEQ ID NO: 101967 - DNA, 358 bp, Heterodera glycines
ggaaattttctttttaaaaattcttcataatttgttatatgtatattccatttgttggttatgcattttagtgcacaaattcaacaacgccccgtttggacagttcttcaagtgaaagtgaagaaaacaatggaagcgatgaagagaacgattgacagtagattgttgatgagacgactgctttttaatcattgttgttttttttgtaattaccgtaaatttgttaattcgaaaatgtggtattgtcacaaagttacgaacatagatattttttgaatttttccaatttttttcgtttacctattttagcatttgtttttttaaattaaggccttttttctttgaatctgtcggaatg

SEQ ID NO: 101968 - DNA, 1003 bp, Heterodera glycines
caatttttcaaataaaactccgagtgaaaagaagagttaatccatcaaaatttttgggtattttcaaaattgtaataattaatttcatttttttttaaattgggttaaatttctaatttcttttccacccttaatttaggcgaacatcaagcagaagaaattgacacggattactacaatttgaggaaaattaaattggccgacatttgtcatgacaaggaggaaccccttgtaaaaataataaaaaaaaaaaaattaaatttttaaattttttttttcttaattagggcaaccaaattagggctatccgaaaatacatttatcggacagcgcaagtggacgagcatattttggtgcttcttaaagggcttaacaacatggaatatccggtaaacattgggctgctgctaattaattaattattttaatcagaatttaatttgatttaaaatgtcattaactgatattgtttatttattttccttttttaattaattattccatttattttgatttttaatcataatttactaaataattaaatgcaatttaatagttattttaataagatttaaaattattattcaattagcgaattatgtttttgtttaatttccattcaaattaaaattttcataatttattaaataatttcaagataatatttttgtttaaattgatattgatcaatttataaaaataaataatgggttaatgagtttaccatttaattaatttaaaaacttaaatttagttttttaattgtttaataaaaattaggttaggtgtataaaccatcgatttaaaatgtttaattcgaatttgtttaaatttgaaaaatttaagcgcagcaaacagcgaataaattttgtggaatacaaaaccacttatttggacttttacattcgcagcatttcacggcacagtccacgacaaaggcaattaattgccataattagggggggggtaattaatttacttttttctttgtagatgccgaatg

SEQ ID NO: 101969 - DNA, 344 bp, Heterodera glycines
taatacaacaaaaaatgcgccttgaaaaaagttgaaagttaacaacttataagtgaaagtgagctatctgcgtctttgccttaagtgtaaaaaatacgtatgagtaagagaatgaaattaaataaaacgtcaaaatattcaaatttaaatttgcattaattattttgcatttgtttgagtttgatttgatgggaatccctccctgcctttgctttgtaaaagatttcccgggttagctgcaagattggaaatacaaatacctacctaattaccacattgacaaagaagtttacaagatttgtttttagccattcttatattctagttttttttctgaagaaatg

SEQ ID NO: 101970 - DNA, 806 bp, Heterodera glycines
ataaactggcatatttttgggaattttgcaatttttcgtttttcataatccattgccgatgataaaagttttttttatatataattttgtttgttttttgatttaattgaggaagtaaagctttttacaaattttccatattttttttatttttaaccggttttgttttattaggcctttactgtttgtcggtaatgttggacaatgatttaacaaattctcaaatattgtttttcaactaaaattttttaattctaatcaaaataattaaagaaaagttgaatgaaaagggtaaatataataaagccgttaggccctactaccagtgctaatgaggtaatttagtccaggggactctcttacgcgtccgtaattaggcccctcagggcttggaagggaagggatgatgaatggatctctgggggtacctcctaggcggggatcgattggccgttccactgaagtgactcccgacactgatcctcacactgccgtttaagcgctatcggagtgataaatgggcgggggaaaggccatttccggtcccggccttataatatcaatggaaaatcacaccaaaattgagaaaaaaaattgcaaaattttttataattataatccaaggcaaaaaaaaaaaagatttgcgaagaattgttttttggaaaatttttcaaaaatgaaaattttgggcattaactacaaaaaacattatttattacaatttaatatattctatttaattatcaaattaatgaaagaaataattcacatgtaaatttatttttccttacatataattcaaaatg

SEQ ID NO: 101971 - DNA, 223 bp, Heterodera glycines
aaaatgaaaataaataaatacaaattcaaatttagaaaatcggaaattaaaatgctaaatttataaaaaaaaaaatcgggaatcaagattttaatgcaaaataggcttcgaaatgctgaaattggaatcctgttttaaaaatgcaaaaaaattattcaataaacttttttgaagcctaagattttttttttgaaagtttctataaaattatttgtagaaaatg

SEQ ID NO: 101972 - DNA, 126 bp, Heterodera glycines
tcctcattaatagtagagtgcctaattaacaagatcaatcaataatcgaaagtgttttaaaaatatacaaaaataattattcattaattactttgctttttccaccgttttcgtttcgttcagatg

SEQ ID NO: 101973 - DNA, 108 bp, Heterodera glycines
cggaggaaggcaaaatcgaattgtcggaatgtggtgacacaaaaagtaatgaacttttgagtgagacgagtgggacgaccatgccgaaaaaaacgtcgcacaaatatg

SEQ ID NO: 101974 - DNA, 198 bp, Heterodera glycines
gagagaacaacacaaaaaccaaagtcagaattcaaaccgccgtcgacatcaaagaaacccgatcaccacactccggcaaaaagagtgtcagagtttgttgatctcgatccacgaccctccacatcaaggcaggccgggtataacccgcctcccccgacgcccaaaataaaacatgagccgacaacaaagagacccatg

SEQ ID NO: 101975 - DNA, 1003 bp, Heterodera glycines
gcaatttacgagggttgaaagtctttactaaagttgcttctcgaccttggagagagagaaaaattgggatccgggagaaaattccctgacaaaatataccgagaatggctggagaaatataaaaaaatgttgtgtaaccataccctcgttggggaggaaattttcaaaaaaaaaaaaaaaattcttagaaactcaattaaagacactttcatccgatttggagtgtaatcgtattcgcaattcttgcatcaaatcggataacaaccctagtccttacagagggcctgagaatagaaatccatataaatcggatctcttgtgacgaaaaatgccaaaacagtttagggcgtcactaatttagtgaccaaaatgctccctaataatcccagcttttaaatgacgaataataatggaaatttttaggctaaaaatattgtgtttttatattatttttcgctaaaaaaagcataaagatgtttttgtcttttttgacgaaattttttttataaataatgaaaaataggaaaaaatagaaaaaaaaatttagaaaattaaattttagaaaacaaaaatatttatgcattcatctttgaatgaaaaaagaaattattcatatgaaatcgaattaataatctctcctttgcatatttaatgtgcatttttcaaatgacaattaaaagaaatgtgtttaaatctcatttcatacacattaaaatccaataatttttccccataaatttacattttatttaaaatttaattttcttaattagctaattaagaaattatgtcttttttccttttaaaattgatgaataattcccttcaatccttcggtttgtgtgaatgaaaacatttgaaggaccatcgatttaattaatcgctgctttatttattcaccttttacaaattaattcccctcatttaaaccattttttctcaaaatttaatcgatattttttaatttataaaaattttttaacattaattttttttaaagatg

SEQ ID NO: 101976 - DNA, 199 bp, Heterodera glycines
aaaaaaatataaatattcaaaaatttttgaactattgaaaaaatatttattgtaaaaatccaaacacaaaaacaataaatattaaatgaatttcttttttccaattagcgcaccgatgccgaactaatttatcaaaaacatcggccaaaagtgagcttgcccgctttggctatgaggtcaaattcgacacagcaaaatg

SEQ ID NO: 101977 - DNA, 427 bp, Heterodera glycines
aaaaaggcattaaaataggcatttaaattttttattaaggatttttgagatcaaaatacgtaaaactaaatcaaaaaacttaatgttggtcatttaaatgattattaatatttaataattttttcgaataaggaaaatttttaaacctaaaattttttatcaagaaaaaaataataaattttggcgatcaatttttgaggaaaaatccaattcttagggatatattttctcaaattttttgggtcatttcttaggggtgtattttcccgaatttattgcatttttaatggaatttttcgtaaaaaacgccaaaaaaggcatcattttgatcgaataggtaaattataaaaataactgatttgaaattgtttgcaaaatattctagtctttttgaccccaaaatcttatattttttttcaggccgatg

SEQ ID NO: 101978 - DNA, 1003 bp, Heterodera glycines
tcgattcccacacagaataaaatatttcttattcattttaattgtaaagatatttttaaaatttaattaggaaattttccaactaccaaaaataaaaacaattaaaatatttctttcatttttttaaacatagccaaaaaatacaattgttagtgccaaatctttaataaatggtgacaagatttccaaaaaccgccggacccaaattccctaatttttaaaatttaattcaaaaaccagcagaaaagtgatcattttatagacaaaacctcttaacaaaatacacctaaattttccccggcggcgcctatcggcaccgccagacccctctactcaacaattgttgtaaaaaaatgcgctagaaatagatctcatcaaaagtaaggaattttaaataaaatttaaataaattgatttctcatttttgatttaaaaaatgtgaaaataaattgatttttaacacaccgagtcaaaaaacgagacatgtgccaataaatagagagtgcagagaaaaatacatttctctcattttggcgtactatttctttacagagaaagaaaaaaatttaaaaaatgacgatattcaagggcacccccacaaagtgtccaagccacgaaatgtccaaaagagtaaaaacccacgaaatgtccaaaatttttcaaaatttataaaaacaaaatgagtctaatttaggatttttagggttttcggggtcgctgaatacgaatataccctttatattacgccttgcctaaccttaggcccatccgaataataaaaaaactcaatttcgagacttggacattttgtgggtcagcgctcctgccctgtcctgaactgtaactgtgagaccgattatttaattccaagggctgtcaagtcaagtgtccttatttctctagcatttgtccttattttgttaatattcagtaaatgaaaatatctcaaatttttttaattggttttttaaagattaaattagccatttttttctgcaaaatg

SEQ ID NO: 101979 - DNA, 356 bp, Heterodera glycines
agtaggaaacaaaaatgggggaacaaaaactatggcattttttaatatttcaatggatatttttttatttagttcaacaatgttcgaacttttccgtacgaaaataaatcaaatgcagtctttgttaacgctggaaaagaaaatcaccaaaggtcgtcgcgtttttcttttaatcgaccatttgaggacgtcgtaagaaacgaattcgggtgatttataccctaaccctttaccaatttaaaccttttttatatttttttagagaaacgaaaatatttcttggtaacttatcgccgcgaatcgattctaacaatttgttcgacatatttcgcaaatttggcacaattcgaaaaatg

SEQ ID NO: 101980 - DNA, 340 bp, Heterodera glycines
agattttccaagcattattgatttctcaaagatttgtttactttttaaaacaatgccaaaaaaaaatccaagtccatgccttgatccatgccatgacagcctggatttttcctgggtttttgtccaggaaatccaggccattcttttttcgaaatgttcaagggcttctttaatgtccaaaaatttcagatttattttataattgctcttatttatgtacatattaaattaaggtttgaaatgtgagcccataaaaagaggggactctttctttttgctcaaaaattttcacaaaattccaatttacgagccaaagtttgagaagaacaagcaacaaatg

SEQ ID NO: 101981 - DNA, 875 bp, Heterodera glycines
ttcataatttagttcaaagttaatacataaatcaacaccatcgatagtattaccggccggtatcgcccacccctgggcgacgaccttttagatagaaccggcgcaatttgttaacagattttgtgcaaaaataatcgaattttgtgatgttgaccaatttttaagatcttaagaagttttatggtctgggcgacagcgataggttacgcagtggaaaaaaatcaaatttgttacaaaaattgctaatttcaaaatgaaaaaacaaaaaaataaaactttagcataaaatgtttaaaaactcaaatttttttaaatttgcaaaattaatttattaaattttattagcacaaatatgttaatgcttaaatcgccggcatggcgtccggcacagctgcttagagaaaagacactgcttgtgtggaaaatttccgtgagccaatgaacgtgagaacgaagaaaaaagcagagagagagagagagaaagaaagaaaataagaatgaaaagaaaattagtatttttggcgtatcttttaagtactgtactttcaaaatcattacagcatcttatttgttagtctaggtcattttcctaaaaactgacaatttcaatttttcttgaaatttttgtttgaatgagtaaaattttgaaaaatttctgtatgaatgaaatttcttgaaatgttctttctttataattaagattctcgaaatgttccaggtagttgcgttttttgacaattttggtgcccaaaaacgtcccaccctcattattacattgtgacttttttgtactattgaataatttaggtaatcgataaataaataaataaaccattgccccatattttttctttcaggtattggaacgcgacatg

SEQ ID NO: 101982 - DNA, 62 bp, Heterodera glycines
ccttaaatttaaattatcattaaatggaatccctataaattattcactatgtgttggaaatg

SEQ ID NO: 101983 - DNA, 429 bp, Heterodera glycines
aaatataaataaataaaaatgaaaaatattattatataatgttaaaatgaataacaccaacacaacaaaacctgacatacaaattttgaattccccagaagagcctaatgaaactcttttacatgtactacttttttctcattatcttcttgcatttcctgtgtttttgcttttttggttcgttttaattcggtggcttaaaagtcacggtcacttaacgcccagcgaggcagagacagtaatgcatgagatgaaaaatatccctcgacaaccaccaatatttttcgcaacaaaatgatgcaagattagagaaaactgacagtgaactctctctctctcttcagtatgaccaaatcgataatgagtcatgctggcggaggattctcaaagcgactcattttttttttcatctttcattttacaaaaatg

SEQ ID NO: 101984 - DNA, 1003 bp, Heterodera glycines
gaaagaaaaaagaaagagagtgagagagagagataagagagagagtgagagagagaaagaaaagaaagatagtgagagagacagaagagatatagagagaatgaatgttagcttttttattcaattattttttaaattataaaaaaattttttttaaatttatttattttaatttaataatttattttaatttaatttaatttattttttaatctttttatttatttttttatttcaattaatttgaactttaacttttatttaattttaatcctattttaatctaatttcatttattaatttaatataattttagttttatcaactttaattctaattcatttaactcgaattttatttttagcgctcaaatttaacaagcgggctcacaaaaggcccctgcgtgcgctcagatggcacgcacgagcgctcaaatggtccctacgtgcgctcaaatggcatacgcgagcgcttaaatggcacacacgcgagcgctcaggtggcatgcgtcccttcccttccccataaggcatgacagctgacgcccatcctctgcctccctttcccttctctaataggatttggccttgggttttatccttcagatgttttttcaattatttacctcttctgggattggatatatttattataggtgttttttaaaggtttaaatttggtactgaaatgtccctttccactgggactgaaatggcggggctgaaaattaagggccaaaatctgcatgggtaactacttatcagttaataaggaattttcaactcttcaaatttgcacgccgccgcataatttaattagcacctcacacacgaaaattttcaaaattacacaaaatataatgccaaaatattaaaaaaaaaaattggcgactcgcaggcgtaaattcgaaattttctttttttaatttctaatttttctttcttttttgtatttttattttacttccatcttttttatagcaattattaaagctgctaaaatg

SEQ ID NO: 101985 - DNA, 852 bp, Heterodera glycines
agtgtgaaattttgctgaaacaaaaatattctaatgatttccaattaaacactatcatctgcctttaaatagaaaggtttgcgcacattaattagtaattaatacttgcaaattactaattaaagacaaattaggtgcacaagtttttgtaaaaaaaaaaaatccatccccaattcgatgaatgaatgaataaaattaaaataaaattcatcaaattacgtgatactcttgatactctttggtcggaaacaacaaaattttgttcgttgaatccaaaacactttgaataggcttttaaaaaattaaaaaaaaaaaattcaaattaccatttttaattagaggtacaggaaaagcacacgtttttaggacttcaagacgaatctggcattccacagcgtaatttgatcaaagtaacgccagaatttgttttttcataaatttttatgcatttttagggaataacggtccgatcgaacagcattcttttaatgttcgaatgattttacgaaaatgacaaggcaaaatcatgggaaaattttgccagttatttgaaagaaattaattgttttttctaattaaaaaaaacagtttcaaaattgtaagcatttcgtaagttgctagtggtgccgtccatccgctgacgaaaaacaaataaattatgccaacattttaagtgcgtgccacgtttttttctgcttctctgtttatatacaaaaaaattttaatgtttgacattatgaaactatatataataaattgtttttacataaacatattaaaaaaaaatccacgaaatataacaaaaaattaaaattaatttcaattaaatattatttagcgatttaataaatg

SEQ ID NO: 101986 - DNA, 1003 bp, Heterodera glycines
tggaactcaaaattctttgcgggacgggatcccgcgggattaatcccgcaaatcccgcattttccaaaaaatgcgggattgcggactgggatcccgcaaaatcccgcgcgggctcccgtcccgcgccgggctctacaatttaaatcttaatctgaaatttttgaattgaaaagatttttcattttttggcccttggaaatttaggcgaatgtttgaaaattcataattcacttctaaatgaatcaattaaagtgcaaaaaagcattaaaaatagagaaaaatctggagcattttatacctttttagaattttctatcttcaaaatgaagaagttattacataaattttggaaaaattcgttttttgagaaaaaaaaaattaatagcgctgttctgaaaaggttttttgaaaaacacgaaattcttcctctataagcttctgtttattctatatttttataagacttttgaaaaaaagtacaaaaataaactgattttggaattcgggatcatagatggaagcaaatggtttttttgtgccatgggttcagatccacttgcctgtaaaaatgttttttagggtttttgggaccataatcaagaacttggcatccattttgcccaattccaaagccttgatccgaactcgaaaccccaaaaataattttttaaaaatgttgcaggcatgtggatttgaacccatggcccaaaaacccatttttaacaaaacaaaaaatatattgggtataatatttctatatttgcttgaaaattttttagtgattttcatcaaaatcttttccagtgcaatttattaacagaaattttttctaagctattgcttcgctattagacaatttccaaaaaagttatacatgaaaattgcgaaaagtcgaaatttttgaagttttttcgtaataaaattttttccaggcttgaaaatcttttcgcttttggtaaggctaatagagcatgttaagagctttcgagtgataccaacaatg

SEQ ID NO: 101987 - DNA, 142 bp, Heterodera glycines
cattccgatctctgggactcaacccaccagcatttcaatctctgagactcaatctccggcattccaaacactgggactcaacccaccaactttcaatgacattccaatctctgggactcaatctccggcattccaaacaatg

SEQ ID NO: 101988 - DNA, 781 bp, Heterodera glycines
ttttgtatgatagacgcaatttttatttatttaatttataaatttttttagaaatattcattctttaatgctattgccaccaggggccgtagcaaaataaggtggttatttgacgaggtcattttaccacgaacttattaagcgattaaaaattctaattttttagttagtccccttttttactgaacagggtctttgttaattctcatagaaatggtttattttcattaagctttgctccggaaaattgccaaaacattggtccgggagttgcatgccacctgcaaaactttcgtcacattttgtctctatcttattactttccaaagataggataaaactattaaataacaattattcccaaatctgttgtgaattattttgactatatttaagtcatttttggttgcatttgagaaaagatatttttttactattaaagatatttcggcattttactcttttaattttacaacatagctatgataaaaatgaaatagaaaaaatattggtacaaaattgaaaagactatacacgtacttataaatttactcaaccaacgggttcaaaattggtcgaaaaaaattaaaacaaggaggcccggaaaatgggttctgttctgaatttaaaaagaaaagatttatcaaaagttagaaaaagcgcagcaacgtgccgccggcccaggaaatttttggaaattctaacaattttaaataatcaatccttcaaatccttataaaaaattattctaatatttttaaatgacaatttatagaatatg

SEQ ID NO: 101989 - DNA, 244 bp, Heterodera glycines
aaatacggtataggtatttagaagtgtccaaattgagataaaaacaaatgtcaaaatttttattgtactttttcgaaattttgatttacatttactgctttttaaggaaaattggcgctagttgcaaagaggtccattttgaaaattttttcacttttttgacataatttttttgtttttgaaaattttttccctttttttgacatattttttttgatacggaatttactttttttactagatg

SEQ ID NO: 101990 - DNA, 135 bp, Heterodera glycines
tttaaatcagcagaggaaatgcaaaaagaagaagaatggttgaaaagcattgaacaaaatgtatggcatttatatttaaaaatataaattaatttaattatttttaaatttattttcagtttaattttttaaatg

SEQ ID NO: 101991 - DNA, 460 bp, Heterodera glycines
tagttggctgaactgaatgaatttaatatcattcaatagacctaagagttctctgttagcctagaaaatttcgaaaaatttggttaagtttcaaaaatattatggacaaaaaacttaaaaaaaaatcggttttctgaatatttttgtacatgacttttttgaaatttaaccaaattttttgaaatttagcaggctaatcgagaatatttaggcctattgaatgatattaaattcattcagttctgtcaactatgaaaggagttgtgcctcaaaaagcaggctggcgcccaactggtcggcgcccaatcgacccccaccgtggtcgacccccccacccccacccttattgttatgtatgatcagaaacacgaattagtcaaaagccgaattgctcatccatttatcccacgaacagaatgccaacaacggcagcggcggcatcggcaaaatgttacaaatg

SEQ ID NO: 101992 - DNA, 1003 bp, Heterodera glycines
accgggaaaaggctcgtcaaaatatttaaattttctttaattttttccaatgatgatgatacacactctttttgtctttaaaataacacctattttggcattttcgaactttagcacctattttggcccttttccagaaatttcatagcaaaagtgcaataaaaaagaacatacacccttaagaatcaatccaaaaatttcagaaaaatacacccctaagaatcgacccaaacattttcaaatacacccctaagaaataaaaaaattttgtttaaaaaatatctccaaaatttattatttattttccttgactagttgccttgtgcaagcatagttgataaaaaaaattggtcacttttggatttttgtgcataaagacactggatatttccaatctttaacacctatttacgctgattttggcatttactgcgtttttagcacttattttggccttttttggcaccaatttcagtaactttagcacctaaaaatcttttagctgtagtaattaaagaccaaaaactatttattttagagacatttactgagagaaagtcattttaaactaaaaacaattgatcacttaattaatgaccatttgatgaagcggtggtagcaaatggcgaattggcccatcattttggcctttagtttaatataaaagcctgatgaatatagccaatgccttctgcttctatttggagttgaaaaatgccaaatgaattcacaaattctaaacaatcaaaaaacggtgtaaatatcacaaatataatttatgaaacttatttttggagggggtaaattccatttccatcagaaattcacgatccaaacgcgactcagccatggccaaaatgagtacttttcttaacattttgctttttgattttttgatccagaaaactatggccttttaaatttgtccttttgaaaagtattggtaaaaattgtcgcgaattttaaattgacgaaatttcttttattaattatcaaacagatg

SEQ ID NO: 101993 - DNA, 332 bp, Heterodera glycines
  unsure (1)..(332): unsure at all n locations
gatgtgccacaattcctgtcgatgctcgccncaattctgtcctatcgccgccttgcgacccacgtctgaagcgcatcagtgctgaagcattgcctgtttcgtcgccctccgtccttccgccactaccaaagttcaaggcaacggtgcccgtgttgaatgtcaggccggtgtcctctgctgccgccgttgttgtaccaccgccgccgccaccgtcaccaccgccaaatgtgtctgttttcaagcaattggtgccatctgctgcttctgttgcgacgacggcgccggcaccaccaaatttgggcttcaaacgcgcatatggccttgtcggaatg

SEQ ID NO: 101994 - DNA, 53 bp, Heterodera glycines
acatggcaaaatgtaaaaaataataaatgaattcttcaaattttggcaaaatg

SEQ ID NO: 101995 - DNA, 130 bp, Heterodera glycines
tgtaaagtttgagaaccgatttcaagacaaaacaagcaatgttattctcccatttcagtaccgcgtttgctataatttgcacgaatttctcttgggacgtcgcgcattgggcgccaccgcgccgacaatg

SEQ ID NO: 101996 - DNA, 993 bp, Heterodera glycines
  unsure (1)..(993): unsure at all n locations
ttccaacgaaatccccggatattcgggcagatacaggcgagtttcgagattatggaagcaatttttggcttttttataattaaacagtttcaaaaataaaagaataattgaatgagtgaaaattggtcaatttacattaatttataaagaaaatttgaatatttattttttaatttacggtaaacagacatttttttcacttatttcttctttctttttgatttggtgccaccaacattttaatggacttactggggaaaatacaaaattttaattgtactaaaaattcccccagtgccaatttggtcattctttgttttgtgacttttttttgtctcagaataatccaactaaaacattgtaaatgttttttaaatattttatggaccgaaggacttcaactatgactccaaaaggtacaaattttgcgggcaaatcctcgggagtccccccccccggtttctcgtanaaagccaattcaagtaataaaatataccaaaaattttaaattaaaaatgcttacctaattttgggttgtcttatctttttgtttcttttgcagttactccaatgataaccctggcgaattccatttgcacattcgaaatgtgtcgttggatgacgacggacaattccaatgccaacttctgaagccgggtggcaaattttttcgtgcaaatgcttttgtcaccgttttaggtccattcattttttttcttgcttaaaatttcaaaaaattcgtttccacagtgcctccgtccggcgttcgcttccaacattaccagtccggctcgaccatcgcggtcaacgaaggcattccgttgaacatcacttgcgtgaccgaccgatcgaagccggaggcaaaattagaaaaaatcaaatatttaataattttgaaattacaagttctgctgttaaattattattagtcttttatttacccattttataattaatatttgtttaaaatttttttgtgtaaaggtgattatg

SEQ ID NO: 101997 - DNA, 126 bp, Heterodera glycines
tttttcataagttaatacatatttatagttcccttcggtgttttatcaaaagatgaagtgatcgccgtttatcagttcaaatcccttccaaattgtcatgggatttccgacggaattttcccaatg

SEQ ID NO: 101998 - DNA, 393 bp, Heterodera glycines
atgaagaaggtggcgtcgaattttttttggaaatttccttttatatgttttttaaattttggtccaaaaactttacttccctttcaaaatatttctaaaatttgtttcattaacattttctcattgaaatattgagctaaataataaaaaaaataatagtaattcttttacctttaggttattttgccacaatttttttttattcacgaaatatgaaattcagaaatgcccaacaaatttttctatttgccttggctatataaattataaaattcattaaaaatgatcaggacattttctaattaattactttcgatgaggacaaaataagcgataacgattcaataaaatcatattaattcactttacaattatcacccaaatcgtaaaatg

SEQ ID NO: 101999 - DNA, 283 bp, Heterodera glycines
ttgctgcgatttgaaaggttttgttcgacggaacgacgaaatttgaaacaactcatttgtaatgcgagtgattcgcacaccaccgctgacgcggacaagagccttgaatcacggaatagtagttgaccgtgatgggaatgcacaccggaccgggaatttcgaagcatttggaaacagaccgaactcgcccttagctccgaattaaaatgaatccatagcaaatgggaatgatgtgactgatttagagcgaaccgcaaatcgtcgacttatcggtgtcggaatg

SEQ ID NO: 102000 - DNA, 848 bp, Heterodera glycines
tggtaataatacgacaagaaaattttggaattattaaaaaatagatgataaaataactttctgaaattttttttgatcaaattttgagaataattcaaaaaatttttagaatttttagcaaaaaattttgcatttcgtgttttcgttttttagggcattccgttttcgtatttttcgtgtttcgtatttatttttcgattcgcaacaactctgtatcagtgttttatcaataaattttaaaatttaacgtaaaacaaggtcattttttggataaaatatgtgccaattttaaaaatcttacaggcgatttatatcggcatcgccgtgtcttaaaaatcctttgatttcttaaaaatagcaatttcgcggaatgttctgatttcgaccaggggtggagcgcgaccgcgggatgtttttttgcacgatccgcggccgcggcaaattgaatgcgcgctgtgcgaccgcggattcttttgcgcgatccgcggatttttctgtgcgctctccaccctgatttcgacccaatacgccattccaactggatgagttttgacggctttcgatcgtcaacgaatgccaacattggcacggaacggtttggcccaaagttgggcgacaaaagcgccgccgggctgctagagccgttccagcagaaggacactgagtacagcttcatatacaacgcccaaattgcctccggtctccaatcggcggaacaaagcgcggccagctcgcagcaaaaggcggtgacgcgcatccaatgcttggccaacattcacttcgcatccgaacggcatgcacagctgcgactggagcagtgccgggtgggccaacagaacgacaaaatg

SEQ ID NO: 102001 - DNA, 398 bp, Heterodera glycines
tcgattttgcaaaagtaatggctatacaacaaatgcaaatggccagaagatggccaaccgtccgctgattcatcccaattgcctgcctccctttttcaatctctttagaattaaatatcattttttgcataatttgttttttcagagtgtcagaactttttcatcaacccaatagttaattaaagagggcaaggaaatgaaagtttttgcaaaattcaacgccttttatatgacttaaatttccaaaagaaattcattccaaaaaaagaatataaaagcaacaaatctcctccaatccctcactaatattcattttcgtctttctgccttttgctggccaacgacacacacatttccctcaacgaccttcgaccgactacggcacgacgcgtacgatg

SEQ ID NO: 102002 - DNA, 781 bp, Heterodera glycines
agtgagtggggattggcataggacaaatggacaatgaaatgagtaagtggattggcaagggacaaatggacaaagacagtgagtaagtgggattggcataggacaaatggacaagaaaagtgagtaagtgggattggcaagggccaaatggacaaagacagtgagtaagtgggattgggcaagggacaaatggcaaaagacagtgagtgagtgggattggcaagggacaaatggcataggacaaatggacaaagacagtgagtgggtgggattggcaagggacaaatggcataggacaaatggacaaagacagtgagtgagtgggattggcaagggacaaatggacaaagacagtgagtgagtgggattggcaagggacaaatggcataggacaaatggacaaagacagtgagtgagtgggattggcaagggacaaatggacaaagacagtgaatgagtgggattggcaagggacaaatggcataggacaaatggacaaagacagtgagtgattgggattggcaagggacaaatggacaaagacagtgagtgaatgggattggcaagggacaaatggacaatgaaagtgagtaagtgggattggcaagggacaaatggacaaagacagtgagtgagtgggattggcaagggacaaatggacaaagacagtgagtgagtgggattggcaagggacaaatggacagagacagtgagtgagtgggattggaaagggacaaatggacaaagacagtgagtgagtgggattggaaagggacaaatg

SEQ ID NO: 102003 - DNA, 1003 bp, Heterodera glycines
  unsure (1)..(1003): unsure at all n locations
ataacataattttccggtggaagtttaccggcaccatcggacaaaatttttttttaatttgatcatttttgaatttatattcaaaaaaaggtcgtcgatttacatggctgccccccccctctcttttaatgtatggtcactttcactgaatgataaatgggctatttctttgaataaatttgtcaaaaattgcaggttatttgttactgcgaccaaaattaagcaattgccaaccgaattggtcagatttcgcacttaccctcacgtttttccgatgattccaccgacccgcagaaaattagcgtttggaaagcggcccgttatacaagtgcggcgcccacttattttccaagtcttgacaagtacatcgacggaggtaaacaaatatgaccttattgaattatgaaattttgatttgatgaattagcaccagattctggtgaatgagtccgaaggttttcggcccatattcaggggagacgggacaaaatttcatcgccgaaatttcgccggccaaaatttcgccgccgtaatttcgccgggacaaaatttcgccacaaaaaaaaaattaaacattaagaaaaaaaaaaatttatacgaaaattccaagaaactctttttccaaattatttcatgaaattttctttaaaaattctgaatttttctcgaaaaattccaatgttatcaaaaaaacgaatcggccaaaaaacgaacgtccgtcgtccaatggtaccaccctcgtccccctatttttgatatttttcgaaattatattccaatatggtatgccaatatttgacaaagtcggttttgaaatttacattagaaaaatattttgacttctcgggtgtcccttccgaanttaattactggatatgtgcatgattataatgcacgtttttggtcctttttgagtcaattttttgaatttttaatcacttggagtctgtgccttaagtatttttaaaaataattataccaccaaacccttttaggaattatg

SEQ ID NO: 102004 - DNA, 129 bp, Heterodera glycines
tgtaataatatttcatttcatatgtaaaataattaattttgaaaaccttaaggcaaacaaaacggactgacaattcgtcgacaatttctccaattgatgagaaaaaaggagcaaatgttgtcaaaaatg

SEQ ID NO: 102005 - DNA, 419 bp, Heterodera glycines
gagccttgtggaactgatcaaaaaatggtacaaacgcactgtaaaggtaaaaaaatccgtttttttttctttttgcttttctggtctacaaaatttttaatgactttttcctgaaaattttttcatttcgggggagggggggggaggattccccggtgccggaacaggacaaaacacagccgccgaaacacaaccgtgaataaatttaaaaatagaatttcatcaaaaattgctgtgagaaagaattttaaccctttttttcggtttcggaaaatgctagaaaccatttcactttcgtttttggactgtttgaaagtttttttatataaaaatttcgttgacaagattttgagattatttcccaggtggagtaggaggccacgcacaaactgaacaaacctttgattaacatgggcatg

SEQ ID NO: 102006 - DNA, 175 bp, Heterodera glycines
aagtgcacttttaaggggacggataaaacaataaattttaatgggaaattcaaaattgaaatagatacctcttgaaaattggatcaaattatgaataattttgagtttttcactttcatgacaatttaagctgctcaaaccgaccagctttggctgcccagtttatgacgaaatg

SEQ ID NO: 102007 - DNA, 554 bp, Heterodera glycines
attagtagggttatcagccttgaaatatggatttatatggactaaaaacctttaccaaatcaaaaattttaacgtagtaatgttatttttaagcccctttcttcatagcatatgagcagaaaaaatttataaccttaataattagtcataaaaataaatgaaaacatttttaaaaaatgaaaaattttatgccgtttttaaatttttttaagtggcttatttttttaatttagacatcttttttagacatctttattttaaattaattgaatttcttttaaaagtgatccgcttgtatagcatttatatgaaatatgcgaaagagaaagtggaccatttaatggaaagggacaaaatgaattggaaagaaatcggaaaatatgacaaaaaatttggcaaatttttggagttaattctgacaaaactttcaagtgaatccaaagaaaaattggaagaatttgtggttgaattggtgagcagctgcaaaatcaacacttcctacagacaaaaggcgggctcagtgcttttcgattacaaaagtcactacaaaaatg

SEQ ID NO: 102008 - DNA, 758 bp, Heterodera glycines
aattgccactgatttcgcaaaaaaatattttaacactaaatttggttcatttacttggctaaaagcaacagaagccggtgagagcagctttttttttttttgctctgcgggacaaaaaacttgttcagtcaaaccgactctttttcggcaccgtcgaaaaaatccggaaatttggccatttgagaccaaacaaaaattatgggaaaattgtgatccgccggtgccgttaggtgccggggaaaatttagtaaacaaataaacccaccattttcgggggaaaacgaaataatttttcatttcgtcgggcgaactatctcccccttttgtccctctggtcacgggcctgctgtggaaattattctccctgccctccctatggccattacgagcaaattgtctattattgttttcgttcgagactttgtctgtccccgcgctcccttaactccatttaatctttgtcctccgtcaggcagtacgctccgcgtcggcttcgccaatgtccgatcactttcgtcgtgggtagtcgccacttggacgcgttgcgctccgccgtgccgcctccactcgcggccaatgtgcgctgcgtgggcgtaccactgccgttcgcctacggcacccatcacgccaaactgtcgctgttcgagtcggaggacggtcgtgcactgcacgtggtggttggcacggcaaatttggtgtcggaagattggggcgcgaaaacgcaggcgttttaccatgcgcggggcaaatttgccatg

SEQ ID NO: 102009 - DNA, 338 bp, Heterodera glycines
tgcgaacattgattattttctttttcgtgcatttgaatcgatttttagcaataaatgtgaattttgttaaaaaataaatttttttattttattcgaatccgggtcaggggttcggaatcggtcgaaatggatgtcggattcgtgatcagcgaccccgaaaacccctagaaattaatttcgggggaggaaggggaaggagttcgactgcgattttcgacatttttttccgcgtttcacgaccgcggcaatttgaatccgcaaacgcgggattcatcgatattttaatttcaaatttttatatgtattagttgacattgcaaaaagaagttcacaaaatg

SEQ ID NO: 102010 - DNA, 571 bp, Heterodera glycines
  unsure (1)..(571): unsure at all n locations
actgatntagtaatttcgtctgtagtaataaatggtaatttcattaatgcgctaaataatatttatgaatgttaatcacagtacattttttaatatatgaaaaagatgcatttattagaaaattaggaaaattaatttaaaaattaaattttatagtttgaaataaaattattagtaatttgattttttctatttttaaaataatcttgcaaattaaacatcatgaaaataattgacactatttgaatatcttaattttcatctaaattgatttaacttgatgctacgcataaaaaatatataattatattttcttttttttttgcataatatactaaaactctcatctgttacttttatgaattgtgtatgtatttttatattcataaaatgaattaatgataaaattaaataaattttaataataaatatattatgatttttgtaattaatagaatcattgttaattaaatgcattctacaatataatattatgttcataatttattttgattaagactttatgtttatggttttatttctaataatgtatttacagaacaagaaaatg

SEQ ID NO: 102011 - DNA, 206 bp, Heterodera glycines
agttagcaaattaaacgtctcgactattttttttttgttccggacacttgactttttgcggcgcgtcaaaataaatattcaaaaaatactaatccctatattttaaatttttgaatcgggctgaatacgttatctgaacccttgagtgaatactagtaattggtttatttgtgttgcaggagtgcgagttgccgagtacagaaatg

SEQ ID NO: 102012 - DNA, 525 bp, Heterodera glycines
tttagaaaatcttattttataggtcatgcaatggagttagctctggctaaagcagtcgtaaatttgtctactctgagataaattttaaatgttttaataaaatccctaagtgtcgggtccccaaaagtcgggtccccaaatgtcgggttccctaagtgtcgggtccccaaatgtcgagttccccaaatgtcgggttccctaagtgtcgggtccccaaatgtcgggtccccaagttgcaaatccccaaaagtcgcaccacgatggctacacctattaaaatcaggcagcgaaaattgcgcaaggccaaaaattaaatcaaataataaaaatatcgaaaattcagagcccttaataaaaaaaatcaaaaattaatttattaaaaattaaaggcataaaaagtacagtcattataaaatagatgaagcaagaaaagagtcatttaaacagaaaaaatgtatgccattcatccgtcgttagctgaaacttgttgaaagaattaaattgctaaacataagatatggcatg

SEQ ID NO: 102013 - DNA, 130 bp, Heterodera glycines
agtattacgcggaagtccttcaacaactgaagcgtgccattgatcccatccggccaattaaaggcaagaaaaactacataatgactttaataattactatttaagtgatgtgcgacttcgagcaggaatg

SEQ ID NO: 102014 - DNA, 157 bp, Heterodera glycines
ttatgagcgctaaaattatcagagtgccgaaaatcgcatgtgatctaagcctagcaaaaaatggtcaagtaaaaatcgtaattacgctcaaaaagcttctcaaacaattttagcgcttccaattccttctacaatcgcctttatacatcccattatg

SEQ ID NO: 102015 - DNA, 1003 bp, Heterodera glycines
aaaagtaaaaattatgtagaaaaaacatccaaatttaaacatttaccaaaaggaaaaggatgataagcggcgaagcacacaaaacagaaaacatgtcagaaactagaacagatggtcggggttcagggctgcggaaggtgtgagaaatttccggcagaagatcgtaattgacatgagacgattttggcgacatcgaagcaacaaaaataaatgtacgacctaaaaatgccaaaaatcacacaagccttattctgacagaacactaacaaaaaagtacctaagtccaagccaaaccccaaaaaattacgtaggttttattttcagcctttcgcagatttaaataaaaatacataatgccacattaaacttggcatttaaaagaagcactaattcaaatgatcagtcgaaagcaaaagcaacaaatggacaaattgcttgaaaaaatttttaaacgaaaacaaaattgaaagaggtaaattgaaattaaaattaggtacatatgtgtcatttattcttttttttttattggtaatgcattttcaattacctaataaagtaatgcattaattttagtcattttttcgcatttttatatgttttcgttattcccgtctgctctttttttgcttctccaccacattgacatttattcgactgaccaaattgaggataagaaaaatagccacaaggaattggataccgaaatccgtacgctcttcaacgaaacaaaagtacggattttgattctttgggtttctttgaaatacaaaacaatcaattagagttcgacatttttaaaaaagcctggacctggattccttccatgttggcctggacctttggacaaaaaccctgaaaaacgccaggtcctaagaaaaatcccggttgaaaaaaaggacatgtacctggaaacaaggaaaacccattcctacaaactttataaccatcaaaaagcgtgttaaatacatttaggattatattccagccgcttttcgactacatg

SEQ ID NO: 102016 - DNA, 698 bp, Heterodera glycines
  unsure (1)..(698): unsure at all n locations
aaaaaaatcaaatccaaaaatcgacttttctcgagtggtttcttttacgtgctgtaataatgattttgtntcaataaagtcaatgaaagcattgccaattgggtcattttttgataatatttatttgtgttccaatcaatatttggggcgttaaaatcaccgcagtaaattattctatttgattcatttacacttgttaaacacaccgtttcaaaaaacgagatgtgtaccaataaatagagagtgccagagaaaaacattatctttttttctctaattttttgtctccttttggcgcactatctaatattttcattatttgtcgcgactcacgtcacgagaaataaaatggaaatgataaattttataagcatgatgcaatttcattaaaaatgggaaaaaccttaatttaattggaaatgttccccctcttcgtcgttctattcaaaaaatatttgtttgtttacattcaattcttattcatttctcacacaaaaatgtattaatcagcgaatgacaccctatttaagtcgtggaattgttattgaaatcggttcagtcggaataaaacatcattcccctgcttgtctactgtttgtcccaatttctattttgccaaaatttttgccgggccaaatttgcctctgtttggtcccgacaagtggtgcaacggccgggaacctctgcactgatgaatg

SEQ ID NO: 102017 - DNA, 392 bp, Heterodera glycines
tcattggattaattatttgcatttattaaatttgttaattttggtatttatttaattggaaaaacataaaactgtttttttttgttaaaatcgctactgtattatatgtagatacaaaatttagatagatttcaatacaataagtatcgttctttttgctaatcttcaaaaagaagagtaccactgaaacccactttgaatttgaagcgatacgccaaagttaaaaaaaataatgaaaaaattttgcttttaaattttcttttacctacaaacaaagtacaaacaataaaattgcataaagtgaaattcctaaccatttagatgaaattcgaattccaataaagttaggtgctgttaatctattatttaaattcatttaattgtggcttatg

SEQ ID NO: 102018 - DNA, 986 bp, Heterodera glycines
tcttcaatttttaaaaattatgaattaattagagactatcacaaaagctttgagctgagaaaattcccgaggttggagaatagccaaaaaaaccggcagtttatttttaaaattctaaactccattaaaattttgttgccactttttagccaaacttatttatatatatttttaaatctttctttctttttaccttttaaaatttgcttttccttttttgaaggttctgtagagttaattgttgcagatgaactttcaatcactggcaatactgccaaaaccgcaggaaaggaaaacaaaagcaatataaaatatttcatataaatattttaaaaaataatttttaaatatactaaacttttacatatacaaattaattttcttaaaattaatatttgtattttatattatatttttttaaattatttcttatttcgtaaagtattttgagccatttagcctttaaaatttgcattaaatttatgaatattaatactaatagaatgttaatccaaacactacacaaaaaaaaagaataaattttcaaaaatgaaaaaagcatggtaattaatcataatcgatagaaataaagcatgaattaaatgtttaattcatatgaattgtggcattggctatgaattaggcccatttcgagaaagaaaagaaaaatgagaaaagcgcactccatcagcttttttttcttaaaaattatttttatattttgtatgccttttatcaatttcattttcgttgtgactgcttaaaacctacaataaagcgcgtccagacatttgcggacggacatttgcggactgacatttgcggacggacatttgcggacggacatttgcggacaatttcgggaaaaaataaaaaatttttataaaaaaattttttttttaaatgcaatgcaaaattttgactcatcagaacgtttcttctaattttagatataaaaaaatattttgaagatatgcttaatcatg

SEQ ID NO: 102019 - DNA, 699 bp, Heterodera glycines
aaatttaaaaaaatgtttatatatttatgtgttttatagcttgcgtccattttattcgcaagaatctcggctcaatttcctgttttttgtaagcctagggctcggagaaattttttgtttttaggcctaggagtctcggcaaatttctttgttttctggatgcccaagactcagagaaattttcgttttttttgtacgccttggtcttggagaatttctccttttttttataagcctaagtctcggagaaatttctcaatttttggagacctaggtctcggagaaatttcatgtttttttgtaggcctagatttcagggaaattctcaattttctggaggcctaggtctcggagaaattttaaggttttttgtaggcctaggtttcagagaaatttctcaatttttggagacctaggtctcggagaaattcctaaatttctaatttaaaaaaagaatttccattttttggctttttcaacttttatcacgtccatcatctttatttgaatggtacccaaaaaaagcttcaactcgaggggggaaaagcataagaaatgtgtgcactattttctattattttcacccctcccgcgccaattgtttcaaatttaaattttcgtcacaaaaaaataaaaaattttacgctttaagaatttccattttttaattttattcttttaattttttgacgcattatg

SEQ ID NO: 102020 - DNA, 852 bp, Heterodera glycines
tcgaatgatgtttttatcacaattcataacataaataaaaaagaaaaaagggaactaaaaaagaaaaccgaacccatgagaaaaaatagaccaattaaacaagaagttttcttaaaaaatcaggaaatttttcaaatccttaataaccaaaataattcaaacgctaaaaaagtggagccaaatctgaactttaataatagttttggtctggaaaacattacagtgtccacaacaatcgttttaagtaccgcgtcaccacaaacaaatgaaaatttgcaaacccaaagccccaaaacaacgatgattcctagaattttaaccaatttaaaaacaacggtaccacccaaaattaaaaggccgccgccgacaaaacaaaaagccaatgcttctaatgagaaaaacattctcattgatagaattcaggtacaaacgactcctgcacaacaaatatacaaatctccaggaataaaaggaaaatcggctcaaaaacagtttaaaaccactccaaagcccatggtggtcacgactcaatttccaattacacaaaaaataatcagcacgaccacttctccaaaaattaaattaactttaaccacaccaaaaccaaagctaactattaatgccttagggaaactaaacacaaccacaaacactaaccaaaaaaatagaactgaattaataaaagaaaaaaaaattcctcaaaaattggaagtaaaatcttccagcccaaaaaaattaaacaaaaacattacgccgcaaaacactttaaaaagtcagagcgcaaaaccgacaacaattctcaagcaggaaataaaaaatgaggaaaatataaacacaacatcgggaaaaatg

SEQ ID NO: 102021 - DNA, 193 bp, Heterodera glycines
attactgaaatgccagccaaacccatctcttctgtggatcgcatgaaattgttgctgagttcgggggatggggcggacgtgcactttttggtgggccaaagggacccaaaagaggcgagtgccgtggaaattcaaagcattacaaaattgttttggcttttagcttttgtcggctcacaaactcattctgatg

SEQ ID NO: 102022 - DNA, 226 bp, Heterodera glycines
tcgtagcagcacttgattttgaaaaacaataaacaaaacgccaaaaaagtttacattattactaaaatgcttaattcatttaagcagggattaattgttttacgccgtttaaagcaacaatttcattttgttaataattaattacattttaaagcatttagcacaacagaaaatggcaaaaaaagttgttcatttaaaaaaaaatagaaaaatccagcgccacatg

SEQ ID NO: 102023 - DNA, 108 bp, Heterodera glycines
tgtatgtcaaattaattataaagcatttttttaatgaaatttctcaattatttttttaagtatttctggtatgttctgtgcgcttgcgttgaaagaggagttacgatg

SEQ ID NO: 102024 - DNA, 187 bp, Heterodera glycines
atttggcaaacgacgaagtctccgcgtggccaagaaaaagaataagcgaagtttgaggaaaatgtgagccgcattttccaattctatggcaaatgataagagctttttgcatttcagttggatttgcaacgatctttggatggacattttccctcattttgaccgtcctcaactcggcctcaaaatg

SEQ ID NO: 102025 - DNA, 499 bp, Heterodera glycines
actgatcatggcactgatcagttggacttaaaaggggaggtgttagagaggcgaacattcaaatgtttgtaattttctctcttgtgaactttgacctcaaatattggttttccccatttattcatgcccttcccttcgtccatcccacagtcattctgttattttccttcctatttttggtgctccccaatttgctccgtccctccgacaaatattttttgtattatttttccatttgtgttaaataaatattttggtgttcgacatcacaaataattgtttgagcaattaaccggctcaacattggcgacgcctgttctacagaacctcaacaattcgaacattttctcgtgttgaaattgttcgaaagtggaaattcaaaaatctcgtgttgatttttggatttcgcagaattcttcaaaaaaccaatcactaattttgtgtgcggttctgctatgtgcagtttcttcttctaagtccatcctccaaatcaaccatg

SEQ ID NO: 102026 - DNA, 243 bp, Heterodera glycines
tcttgatgagggggggggggtcgtgaattttgggaggccaggccgttttcgtacgtgcacaaaaagttgtagaaaatttgccacaggcttttcccgaagcattccaaatatttgttcttggcatatgaaggaaattgtggcggacttggcaatcaattggtaatattttttattacaaatttaaaagatttaaatatttttaatccattttattttatgctttagtttcgttttgcctcaatg

SEQ ID NO: 102027 - DNA, 184 bp, Heterodera glycines
acaaaaaaaaacgtttaggtagtattgtaatgtatatattattctttcttaatgaagtgattattaaaatttttgatttaagtgattttctcatttttttcaattgtcgtgactagaaaaattgtactgttgtttttgaattgcacaaatattctgctgtttgtttgtgacatcattcgaaatg

SEQ ID NO: 102028 - DNA, 156 bp, Heterodera glycines
aatgtgcccgtatgtaaatcggtcaaagcggcggagagagcccgggaggaccatgccattgtggaccacatgttgaatgccacggacgtcgaccaggcaccaattgtcttccgtgtcggcaaacgaatggatggtcgaccgcgccccctcaaaatg

SEQ ID NO: 102029 - DNA, 847 bp, Heterodera glycines
aattttaaaaattatcattccgtaatctaatatgtagatcctgaactgagatttcgatattgagacaggatttttaaattttatgaaaatttttggtaatcatcgcaaaaaattttgcaatcttggctttgatttattttgaataaaaacactggcgggcaacagtatgccaaaaatgcacgttttgtcaactagagcccggaaatttcaaatttgcggatcctgttgcaggattggaattcaaaaatttttgcaggaccggacccggccggattaatcctgcaaatcctgcattttaaatttgcaggatcccgcgcaggattgcggattcttagaaatttgaaaaaatttcaattaaatttccaaaaaagaaaaaatacctgacattttgaaaaagaaatttttaggggctggcgggatgcattaaaagggcgactaagattattcgaatgggtcagacggtaaaaagagatcggaaatcaaatctgttaggtcggtcaataaatttgactattttttgcttttcaaaaatgctttttttcggcgcaattttttcaaaaactaggaacaaaggggtccatctatgccgataggcgccgtctgaaatttttgaaaattttatcaattaattaactgattttgaccaaaaaaatgaccaaatgtcacaccttttgactcaattctacaggactaatgtcgatccaatggtgtcgataggcgccgccgggaaatttttttgcaaattctaggtgaaatttgagatgaaaattgaatttattttgattgattttattataaatttattcaaaaattttgacattccgtcttataaaattttcaaagaatg

SEQ ID NO: 102030 - DNA, 92 bp, Heterodera glycines
ttttttaatgagagtgaaatcgtagtgtagcgcccgcccaaaatcggaaatgaaaattttggggaaaaaaaaattgttttggtcaaaaaatg

SEQ ID NO: 102031 - DNA, 541 bp, Heterodera glycines
cctgcaaatttcagtttttaataaatttatagcaaaaattatgtttaatttcagagcaaatattaattcattagatataaagttcaaagtttaaacctactttaaaaagtgacgaactcagagactataaaaaataataattcttaagaaattatcaaaaaaattgattcagtctgcaaaaaaaatccaaaaacaaatatttaaaaaattgaattttcagttgtttcgaaaacatattaaagccacgtatttcataagtgccaaatgataattacgtgataatgtgccatcagcagctgaccgactttggcaccacttgcacacaaaattaaatttttggcaccatcagcagcttaaaagaataatcgcaaaatgactacaaaaacaaaaatgttggaaatttgaattatttttactgaccaatttcaagcggtctcaaatgtggaaaatgcaacggcataaatcaaaatatggcatttttctcggcgcgtacgcattctgcttacacttaagcactcttgtcccccatcactagaaaatg

SEQ ID NO: 102032 - DNA, 150 bp, Heterodera glycines
aaaataattgtgattttaataaaaatacactacaaattattcgtcatgttctaaatttactgtctgattttcaacggaatattttgacaataatcgtaaagttttatctatttgcgttagaaatcagataagaaatgtccggcaaagatg

SEQ ID NO: 102033 - DNA, 269 bp, Heterodera glycines
tctacaaaaattcaatttttgccatttaaaaaaataaaaattaaatttgttaatctaattgccaatgccaaattctgcaataataaagcatttagtcatttttataattaatttggctaattgtcatttaatgactaccgtatgctaattctacaaaaaaatatattttaccattttttccaaaaaaaattttctaatttccaaatttcatgaaatttccacaattttcctattgtcttacatggagtaagccttgcttttcacagatg

SEQ ID NO: 102034 - DNA, 458 bp, Heterodera glycines
cagtagtaattggtcgggtgatgaaaaaacagtgatcaaccggtcaaatgattgaccagacattacgatcacttgacaatggcctctttagtactgctcagagttcccgaggcttgagatcgaaattggttcgggaattgaggaggagcaaaaaaaaaagcgaaaaatttcccgagttttgagtccgagaatctcgaacagctctcgcatggtgtaatgacaacttgtacaaaagataactcgcacaattgcttaggttaggctaaagcctaagctttaggcttgtcctaggcctaggcttaagctaggctttattttctgaaatacgagttgccattgaccccatcggtattttgagtgccaattcgtcaagtttttatatgtattggacaaaagagcaccaccgaccgaccatataataaggtccaccgcccgaaacgacgccattggtggcaatg

SEQ ID NO: 102035 - DNA, 178 bp, Heterodera glycines
tcgaatgttctataaggttttaataattttctatcttgtttttttgtaatacatatttaaagatttcgttgacttttttaattgtttaatggctaaaagaaatttgccacacaagctcaattgcaaaagagcaaggcaaaaaagggagaacaagcgagaggagcgacgaactaaaatg

SEQ ID NO: 102036 - DNA, 84 bp, Heterodera glycines
tttgtaaaatgattttgggtttgagcgggtaaattcctcctcttatagtgggcggagtcctaaatcccaggtatataaatgatg

SEQ ID NO: 102037 - DNA, 98 bp, Heterodera glycines
actgtagatgcgggaaaacccgtttttaactatttttgcccatagaaacatatatcattcattaattatcaattatcactttgtccggtgagcccatg

SEQ ID NO: 102038 - DNA, 415 bp, Heterodera glycines
tccctggtgcttagcgcccgtttttaaatattttaattttttcttaggcctaagaggaagttttgcaacaatttcaaatttaaatgaaaatttaattaccagactttaaaaattaatttgacaaaaagtaaccgtaatagaaaatttaaaaaaaataaaaaattaaatttacttaattatcgatttattggtatgaaaaattttcaaagacctgttgtttacttgagtaaacaaatcgtgggtcaatattattgtttgttgaataaagaacgtaatcaaaaacttacgtacttttaaaatttgctcatgttaatggtcatttggtttagctgttctcatatttttttaataattaaattattttactataattttttattttacatttttaaatcattaatttataattaatatg

SEQ ID NO: 102039 - DNA, 549 bp, Heterodera glycines
aaacagtggaaaataaattttctaattatgcgagaaattatatttaccaataattttcgagaaatctctttttgtgatcagtgcgaaacgtattttgaaaagtgccgggccgagtacatcgcgacgatttttagcggagcaatcaatgagaatttgagcacagcgttcgtcagcccaacgaatggcctaataggcaatcaattaattaattatctaatttgaaaaatgggaaatgaagttagaaaatgaatgctatgaaattcaggattaaatcttaaaatcttattgtaagcagattcagaaccagccaaactgtgagaaggatttcgggaaaggatcaagcggtattgggtatcgacaagcgccggtggagggattatattttaattttgtaaaggaacccaaaaatcggggaacgggcgtaatgagaaagagaccaagattaatttgatggcattaaaatagtgctttaacgaaattctcggcaaaattgtcgacgggctaaccaactaagaaggattaaaattaattattacagcattccaaatg

SEQ ID NO: 102040 - DNA, 1003 bp, Heterodera glycines
attcatgtggaagtattcgcaattgttttgttgtttttatttggtgatttctggtgttgattaaaaagaaagaaactgtactcaattagcagcagtttaatgcgtcaaaaccaaaataaaaaaaatttttaataattttttaaaattaaaaaataaaaaaagctttgctaaatgtaacgaaagaattgaaaaatcacgggcaacaaaatttaatttttttttattaaatttaaattattttaactgagttaaatttcaaattatggaaaatttctctaaattgaggatccctgctctgtgtgttgtgaggtgtttgtctctttccgccgtttgagtctcgtttttctgtttctcccccctcccccctcttttccgcctgttccaacgcattctctccctttcccttttccccctcaatcggcggttgtgtcttcaaacacatttaaaatcgcttttgagacgggagaaaatgaaaaagtgacggatgttcgtcctttccttttcccttccttccgtccgtccctttctttggccttttcttcgatttgtcgcccgtttctccaacttaacaaaaatcgccaaaagtttgccttaactttggttaagctaaacaaaaacaaaggaaagagcgacggaataaataattcggcttttcctcaaaagcattttaattatttattttatgttttttttcgccaccactgttaaaaataaagagaattaattgccaacggcgatggatacaaattcattttctcattttcatccttttccttccccccccccgtaccaattggaatattcattttaaattgaccataaaagcaacgaaattgggaaacggaaaaacatttattgtgtgtacattttactggaaatttattattaaagataaaatgcgctctgtaaaaaatgctcgacgcaaccacaaaatttcaacttggaaaaataggccaaaaagaaaaaataatgcgcgaaaaaaagcgaacaaagcaaaacaatg

SEQ ID NO: 102041 - DNA, 763 bp, Heterodera glycines
tagcacgatgcgagtcgtagccttggcattttttggctatatagtcttagtcgtggcatttttcattatgtggtctcggtcgtggcattttttgattgtgtggtgtagtcttagtcgtggcatttttttcattatgcggtcatggatgagttgtgcatggatgagttgggttcatccctagcaaatttaattcagtaaaattttaaaaaatttccagcgatttttcaagcagtaattcatcgttaaattttgaaaaaaattgctggaaagttttttaaaatttgtttttcataaagttttctaagaaaaaattattaattttgaaaacaaagaaactttgcgaaaaaagccttaattcgggttcgtgattgtgaattggccaaaagagtgccgaattcgtactcagcgccccaaaattttacctattaacgtgtttttggaatgtaaagaagtcaaacaaaaaggcttaggtttggcttaggttttctgtaccacccccccccccccccccgaaactgtaccgccccccgaaagatttaaaatattatcttagaaaagcgccttaagcacctattaaagacagaaaagagcacagaaaaattattctgttagaaaattttccttggactaagtcttagtgagtctgatcaaaagcttggggacgcgtatacttagagaagtgtgatttttagaaaagtttaaattagcttagaaaagcgccttaagcacctattaaggacagaaaagagcacataaaaaaatg

SEQ ID NO: 102042 - DNA, 694 bp, Heterodera glycines
  unsure (1)..(694): unsure at all n locations
ttttaccnttttggttgaaatcagcagttcctgacttgagttataaagtgttaaaaatttgaaagactcataacttttttcatttgtatcgaattacttagcattcgcttagaaaaagattctacttttcaaaagctttttttagataccagataccaaacttgttcagtttagttgggaatgaagcgagttatggctgattaaatttaaaaaatacaaaaaaaagcatttaccagtgtaagttttgaattagcgcgcaaaaattacgccaattacgttatttggcgaaggccaagaattaaaaaaggtaataaggctgaggttcggttccgctcaacatcattaacattattatttattttttatacgaaaaacgaattatgaaaattatttttgaagaatatacaatcttggtacatatcattcgaaagcccatgaagcttttctaagcaaaagagcaattcgttgaattaaaaaaatatattggcgttcgaaaaatatacctaactgttgaactagcgcataaacaaaaataattgtctaatcgatcagaaaattttctctatcgatatgcgtatttaacattattctttctttctttttcatatcctatttcatgttaaaatatatggtaactaattgagccaaaatccagccctgttcattataaatatttttttgactcaattaaatg

SEQ ID NO: 102043 - DNA, 184 bp, Heterodera glycines
atcgtgttggtttatgggactgcattttactcagtttattaaactcattatttatgagcaaatatatttttgtcactaatttgtctaaattacctaattttgagttttttccccatatatctatatttttttctgtggtcttttattcatttaaatttcgtcggacttatttgttaggaaaatg

SEQ ID NO: 102044 - DNA, 1003 bp, Heterodera glycines
agcttcaaaccaagctagaaacatgttttccgtgcgtttcaggcctcccacagtccaagaaaagaatatggatttccatataattccgagccctacttattataaaaggcgtaatgatggtaaattcatgtacaaaatggtattaatgctgcggttgtagaatgaacgacaagaaatgaaaatggtgtcaaaaatactaaactatgacgaagcggcaaataccttgaaggaaggtactgtagttaatagaattttattatttaaattaaaattctctaataaattaatttttttatttagtttcatttattaataaatcgagttttgtttattcatttcgattttgatggttataatatttttatcccatcccttagcaattttcttttcaattcaaaaagttctgagaatatacatacatacatatctctaatattttcggcattttttgggtttatgtgaaatctttttactcaaattaatgtttaattaattgaaaaagagcgaaattaatattatgttgataaattaccaaattatgttaaatataaacatacaaattactaaaaattgaccctaaattatattaaccacattatcttaatctgcacattgtctatttcaggatttattctgtaaaagaggacttaggtgtccaaaattccgacggtgccattatcaaattttctgatgcccaatttaatttaattttttatttaatataaatcgaggatcaataaacttttccttggccgattatatttcatttaatttcaatatatttatttttttggaattccataaattattttttaacatttacaaacacggaaagggaaattaaaaatttttaaaatcaactatttaccattaaatataatagattgcaattgattgagatttttcaaaaataaatagagattttgcatatattccacttataatataacaaatataagcagaaaaaacaaaatttattattttttttttgcatcaaaaaatg

SEQ ID NO: 102045 - DNA, 509 bp, Heterodera glycines
ttttcttctcttctcacagtgacgtgggaagtgatcactttgggccgtccaaaagtcgaatttcgacaaaacaaacaaaaaaaagcagaaggaaggtcaaacggaggaaattgcaattttttacgactgaataaatgccacaaaagtatttaaatttggtaactttttgtaaggggatgagaggaaaattgggaaattacaaattttggaaataaaaaaaagagggaaaatggaaaaacggcgggcgaaatgcgaacaaataacaaaatatgagcaaagaaaaatggtcatttattaattactcgttttggccactttctcggaacgaataaataaataaataaataaatgttctcttttcctttccttcctattttaatgcgcaattattttgtgtaaatgtttttttaacataaatatttacaccgaaaatactttttaataatttaatcaatattatttaattatttattcgctattaatgtgcatttctgaatttaagcaaaatg

SEQ ID NO: 102046 - DNA, 573 bp, Heterodera glycines
atctcattctttatcatttttagcccatacaacgcaaatcaaatacatttcgaagtgtttggggtaaaattgtctttttttgataaatcatttctataaattgaaagttccagcagagaacttcgaaatccaatgacgaattaatgaattcgagatttcattagtttctacaatcgagaaaaaattttttaatttgaaaattatgttaataattaggaaaaaagtcgatttttagggggtgtatttttcaattttcttgtatttttattgcaatttttctcaaaaatgccaaaatatgtgcaaaatatgtgccaaactccaaaatatgtgctaacatattttatgtgacaaaacgccaaaatatgtgtttttatgtttttataagtcgctctaaatcaaaaattgttcggagataatgctatttttgggcttctctcgccataactaagccgcaaaaaaaatatgtaaaaacataaaaatccgggccctatttattagattgtttttaagaattaaaaaaaaaattattcgtacttaaaattcctacctttattcaacattttagaaaatatg

SEQ ID NO: 102047 - DNA, 458 bp, Heterodera glycines
aggaatcttcgatctcgcgcatcattaattgcagtgtccctaattcacaaattccgaattctccccccccccccccaccctttagcacttcgctgcacgtgaccactccgttgcagccgtaccatttgtttccgccgacgtcccaccaccacggccaccagcagcagcaccatttgcacgccaacaactgccatccaccgccgcaccagcaattgcagcacaaccagcagcaacaattgtgcgcctcaagcgacgcggctttgccgcagcaaaacggcggacacgcgcagcaccagacgcagcagcacagccaagcgacgaacaacggacagcagcaactgctgacccaccggcatcctccgcagcagcggcactgttcgcctgccggggttactgcttcaccttcgtcctcctcctcctgttcatcgcagcagcaactgttgcccatatgcccgatg

SEQ ID NO: 102048 - DNA, 150 bp, Heterodera glycines
tattcggtgccgttccctctgctccttttgtccattcttagtccaaattcccgtggtcaccctttgcccgcccctttgtcctaacagcttaagcgacaagtggtgccgctagcaaatcaaaatcagatgtcttccgctaagctgcgcatg

SEQ ID NO: 102049 - DNA, 86 bp, Heterodera glycines
ttttggggcaaatgccatttaaattaatcaacttcttatgtgtcttttggcccggtcgcgcgaaaacactgccaatttgagcaatg

SEQ ID NO: 102050 - DNA, 144 bp, Heterodera glycines
ggggtgttcaattgctcagcaagaatcataatgctgttgctacaatgcaaataccttcaaacggtagagttttgtcaaaccgaatttaaaaataaagccaccaaattcagaaataaatgtttggatgggttcattttgaagatg

SEQ ID NO: 102051 - DNA, 252 bp, Heterodera glycines
aattgtcagatttgagtttcagtaatgaaaatgccgataattcattggaattgtttaagtttagtgatgcgaataagaaaaaaagggcttcagattctcatcccttacgagtatttctggttacggacttgctgaagctataggatgataaacctataccaatttggttgctcgaatagctacttacccgtttatcgatgtcttggtcccaaagatcgttaagaatgcatccggcacttctcatcaaaaatg

SEQ ID NO: 102052 - DNA, 87 bp, Heterodera glycines
cagtaatttatcaaagtttgtaaaaaaaattaaaatatttaatgaattaaaagtttccgttttcagtttccttttcggcaaaaaatg

SEQ ID NO: 102053 - DNA, 110 bp, Heterodera glycines; identical to SEQ ID NO: 98226

SEQ ID NO: 102054 - DNA, 86 bp, Heterodera glycines
ggtttataaattcaaatactgaatcattgactcccaataaaacaccgttagggcatggtgaaatattgatgggaaagaacacaatg

SEQ ID NO: 102055 - DNA, 547 bp, Heterodera glycines
agcaaccagcaaatcgctgtataacatccaacagtaccagttcaattttgtcacccctcccccctcccattctcgtccccctttggcgctgatcggatcggtcagcagcatcagacccatcaaaacgaacggcaaaaagggcgccattccctttacggcacagcgagcggagtgagcagaggaaaaagggacgagagcggtgaagaggagcgggaaccaatcccgcctcagctgggccaagccgcatttggccaaagcccgcccgagtaaaagattggcgacaaactggtgccgttagcaggggctttctgcaaacgtcggcaaagcatcagtcgagagttttggtcgccgaggaccaacagcacaacgaagagaagctaacggcaaactggtgccgttagcagggggcaactgcagccaccaacaatcggtctacgagcgaccaatcggtctacgagcgaccaacgagcacgaattcgagaagctaacggcaaactggtgccgttagcagggggctccagctcaacatttcgagagacgacaaatg

SEQ ID NO: 102056 - DNA, 129 bp, Heterodera glycines
ttcgtcaaccaaaaaagcgcccttgtcaacatcccaatcaaatgtaatatttaataaatgtgccattttgaaaatttaaattttattttccatgttcattcttaaatacaaatgctttaacaggagatg

SEQ ID NO: 102057 - DNA, 684 bp, Heterodera glycines
aaattaaatatatagattgttattgcattctgcatattatttttcaaatttataattatttttgatttgaaaaattttttataagatatatttgagtttgtttaaataaatttttcttatttttcgaacaaatatgctttcattaagatgtggaatgatgatttagaaagtcacatttaataggatttaaaatttataagattgtacacatgttttctttaatggttactattctttgcagcaagatattcattaatatttcattatttacatttaataaatatagtgatgaatgaagttcaatttatgtgggttgttcaatttcgccattaatgttcttcctttaaatattatattttaataccttaactgctacactattgtgttttttttaatacaaatgcacacatgtgtgcgaaagtgttcttactccagcttctgccaaccaccgcctggcgcgatcggttccttgaattcgcagatgcgtggcaaaaatttcagtgtttttttgtactaaacgcttttttcccttttcgttttagtaaaacagaaattgtttgtttcattttatttttggtttttaaatattttttttttgttttcgtgaaataaatatttttcctttctttttgatttcaatttgggtttagttttataactaattttaaatgttgacacttcatg

SEQ ID NO: 102058 - DNA, 1003 bp, Heterodera glycines
ttgcccagatcggcagtgttatgttcgtcggtctgatcaaatcgggcaaaggggtcgactggcgcgtgctgctcaacgtggccctgtcctggctgctcactttgccattgtccgctgtattctccgctctcataatgttggcacttaaaatggcatttctgtgaaaaatggaaatgcctttgctttgcacttttggcacttcgcaactttggaaaaagattttcgtcctaataatttgttattttgtttttaattgtttacccatgtgaatgttgttatctcttttgtatttttaattgatttttaatatcgaaattaaataaacatatttttcgaactttttgatgacaaaaatttatttgaacattaagcatttgcactttctggcatttaaattagggtagtgcgggaccgggactgggccgagccgggattcccgatccccgataggacaaccgggaactataattttaatgatcgcatttattattttttattgttattattaaattcacttacaaacataccaagaaaactttgctaatttaatatttgtttttccaattaccaattaaataaatggcaataaaattagtcgagaatttgtctcgaccaatttaaagaattttaagaaaataccaaacaaatgggcattctttcttttaaaacatttttcgttctttttacaacatcacttttcctttttaatttatattcacataacattttgaactttctcacaaaatgattgttccttttatagtaattgcctaaatttcatgagaatgaaaagcacggcaaacacaaaatcaaattcattttgaagcattttctctcaccgttttattttcgcctttccgtttttctttttaattattcattttcatttatttgttccaattaagttaattggtgaaatgagctccaaatggcactgtggaaactgcttgctttaacaaaatattctgtacatttcatttataagtcataaaaaaccaaaatg

SEQ ID NO: 102059 - DNA, 68 bp, Heterodera glycines
cctgcggggaagtaaaacgatgatggaaaattgaaattagtcttggcattatcacattgacgagaatg

SEQ ID NO: 102060 - DNA, 1003 bp, Heterodera glycines
accagactcgaaccccttgaaatagccggtcatcagcgtcacaaagtgaattatctttctgcgaggataacatgcacagaatgttgtgattctgcgaatcgggctcggaccaattgccaaatttgcacgaccgtgtatggaacgttggatcggctaaaaaattggtcagtgcgttgttaaaatttctgcccatacattatgtaaaggttcatcgtctattaataggagcgaagctgaaggacacgagccaatctcagagtttgtagaatggattatgcgcgcatggactaacaaatttaaaacttatatttgggtgggttaaacccatttaacacgccaaacctttcttatctacacgtgtttttgaaatcaggcgcacaacgcatcacgatttgacggccactttgtgttaaagtatttgggcgaaactaaacgccgcccggatgttgtaatgaacgggcttaaaatttttgaattccgcctccaacattcgagacgtcattcactgctcacatggcgggattcttgtcttcttatgccaatccgactcgaggatttgccaaaaacgttcagtttggattgtgcggacaagccgttttttccatacgcattcaatcggcagttagcattaaaaactatggtaaaagttaacgatttctgtgaaatttagtgaaaattataatgtaaatttgcaacatctgccgccaatgaacgactattacccagggtcaatgaggcaagacaaatatgataagtttataaaatggtatgtagaatgagtgaggagatgattcgaaactctaataacaaaacgagcaggtacgaagaaaacaaaaacactccattttcgctgacgcaggagttgcgtctctactgccaaaacgacacagaaattttgctctccgcgattatcgaatttcggcgaatattgatggacgaggttaccggaggatttgatgtgttacctctcagcgctacaattgccaggttcagttaacagatg

SEQ ID NO: 102061 - DNA, 547 bp, Heterodera glycines
tttttcaacaatttgctctggtgacttctgatcccacatgtctcttcaattccgtccgttctcaaccaaaacgtaataaaattccccgaggcgttttacctccgttttccgggggcgaaaatttttcccttttcacaaaaaggccaacgggtgagtaggtggacggaccgacgggcatcaccgcccccgagggccgaatggccatcgtcccctccccccttccttccccccccccccatttcttccgcctctcagcggcggcctccgtccatttttcaaagacggtgagtcgggaagatatgtccgtcccttggaggtggtgatgagacgacgaacacccaatggggaagggtccgtcctttctcgactttggcgatgagcctacgactcactctcgattgagagagaggggcggaagagggattggccatccaattcagcgggaccattgaaggtgttgagggaggagacactctgctggaggagaaaatatggggattctctgctggaagagaaggaagagattgataagggaagaaaggaaatg

SEQ ID NO: 102062 - DNA, 187 bp, Heterodera glycines
tcggaggcataaatgccacaatttgagctaagatctcttcgaatgggtctgcgctacggattttcactatgctatgggaatgaagaatattacaaatcagctcgccagctgttgattttaaaaaaactgaaactttggccccaaaacggaaaagtaccctttttattagtgtcgccctgaaaaaatg

SEQ ID NO: 102063 - DNA, 130 bp, Heterodera glycines
  unsure (1)..(130): unsure at all n locations
gcctgcannggtccctttagtttcaataaaaaaaattttntgaaaaaatctgctcattaaaatattcaaaaccaataaattaaatgctctaattaatccatgccactttcagaaatcttttctgcaaatg

SEQ ID NO: 102064 - DNA, 187 bp, Heterodera glycines
agtaattgaagaaataacaaacaaacagaaacatggcctattctctgatcacttttgcgtggtcgtctactgtttttttcagtatttgactgagttcggttgggccgaaaatgggcggagaatttgcatcactcagccgcgacgggtggccgccatttcgctggcgagtcgcgtggcggacgaaatg

SEQ ID NO: 102065 - DNA, 69 bp, Heterodera glycines
ggtcaggaataatttataaacttaaatttaaaaaaaaatttttttagcttttttggacaaaaaataatg

SEQ ID NO: 102066 - DNA, 206 bp, Heterodera glycines
aaattgaagaaaaacgtaaaattaagtttcaaaaattggaaagggggagaaaacagagaaaattatgccattttttgtagaaaatttatcagaattaacaccatcgcccaccgatattttgtctattagcccaattcatttttcaactagaaaaaactccaaaaaatcatgaaagctaaaaataataaatttttaccccaaaaatg

SEQ ID NO: 102067 - DNA, 1003 bp, Heterodera glycines
tataagtatttttcatcttctcaacttccgcttcttctgcagttgtcatagtttttgttgatgaatttgcaataatttagtcaaaaaatgaataaatgtgtcaatttaaaatggattttgagcgtcatttgttaaagcaaagaaatatttttcatggattttaagtttggaaaatacataaaagtgtagaaaagaaagaaatgtcaaccgtaatcgaaaaagtttgaactcaaaacttggccaaattgttgtgactgagtcgtagacgatgccgccacggcaatattattgtagtgccgaaagcacaagtagtgggtatgaaggggagaaagaaggtgcggtgcgtaagacaataagctaatgtaattcaaattagaacaattttaatcgtcgtttcactcacaaaaatgccattcccaattttctgcttatttcaatcgaagtgcgcaaaaattttaggcatttgccttttaattcaaatttaaaaaggtaaaaattcaatagtagacaacatgtgtttatataatattcgagaaattttaaaaaggaataaaaattaatattaaaaaattaaaaattttcacgaattaaaaaaaaaaatttcctttggccgagtttttcgtcagtttgtacactttaaaaagtgaaagcttatgtaaataaaataaatttatgccaataacgaaatgttggcaccaaatgatttattgttaaatgcacagtgttttcacattcgtccaaagaaaaataaataaataaaaataaaattttttaaaaatttaatggccaaacacattttataataaaaatggaaatgcaattagaacggatttgttggatttaatgcatttattatgaacggggccaatacatattatggctgccacaattattccttaaattttccatattattaaaatgctttaataaaataaattaacattttccattttccattttctttttttatttatttctttaaaatgaattaaatagcaaaatg

SEQ ID NO: 102068 - DNA, 1003 bp, Heterodera glycines
atttttattaatttattatattaaaacatttagaatgagctttttcttcaatataaaattatatgaattacataaaatatataaatatttttttaaaataaatgttttcatgaaaaaagatagaaatttctttgactgatttgtttcataaatgatttgttcggctttgatggatatgtttaaaaaggagaaatttggctaaaccttgtgattataaaaaataaatatttctacgttgtttaaatgatgtcatttccgtgaaaattgcccaattattaattgatttttttcactaataaaaattttattaataataaaaaaattttgattgtataatattttttaaatatgaactgaactataaactacaaaaataaatggatttaaacctcataaaatgccaaatttatcaaactctaatttcaacaattgcaaactaagttatttcatgattttttggtaaatctcatctgtttgtagcgaaaattttcggaagcgaacaaaatacttaaaaaattgccaaattttcaaaaaattactcttttgtgctgttttattaatttctagaacgttgattcttaggggcgtatttttagatttttttgcttttttcttgtgaaagtttcctaagaatggccaaaatatggactaaaaacgcaaaaattgcaaaatatagaatattcccgaaaatcccaaaaatatggatttacatatatgaaaatcttcaccaaatcaaaaaaaaatttaaaggagaaatgctatttttcaacccctttcttaataaatagtatatgcgcagaaaatttatttttattccacatttcatggttatttgttcatttttattgtaatatttcaaaatttacacccaaatacagtcatggtcatatgtttaacaacacttcaacatttttgatttaaatagctataatattttaatttgattataaatgtgtagtatgtcttaagcttttttgttgcattttttctgggctttccaatg

SEQ ID NO: 102069 - DNA, 436 bp, Heterodera glycines
tcccctttccttaatccgcaaaatgttttttcattcgttcatttctaatccatcgacaattattcctccattcttctttaaataactcagaaaaatctttgtgtacattaacattagcagccccattcttaagggcatcactattcacacatttgtatatatgtagcaacaataaattactcctttaaaatttagctaaattttaaatttttcaaaactgattgtgagacttcattcaaatgcagcagcaacagcccgttccgaagtgtggcaatggtcggtgttttttttaaaaattattaatatataaaggaaggattgtattatttttgtgcctttcttttcgataggccgagtaacaaacagtcagacaattttcatatttagtgaaatgcccctgtggagacgcgtgccagtgcggcactgactgcaaatg

SEQ ID NO: 102070 - DNA, 98 bp, Heterodera glycines
ggtgcaaattacttacaccgattgcgaattatttaccgattcaaccttttttccaattttttttccagtcgtactgttccaatgtcgcgcgcactatg

SEQ ID NO: 102071 - DNA, 315 bp, Heterodera glycines
aattaccatttttttcaaatgtttccaaaaaatttttcggaggatgggacgaagcgatacattgagggagtggaaacgagctgcccccgttaacgacctgctccgaaataaaactttttcgatacaaattcagttttttttttgtcaaatacacattttttagcctggcacattccgttacgtgttcttgttttgtttggcacattttatgcacggagttggcgcaactccactgtacaccattggcttgtcctacattgacgaaaatgtgtctattattaaaattttcaaatatctctccaaactcaaacgatg

SEQ ID NO: 102072 - DNA, 78 bp, Heterodera glycines
tggcatgaactgtcctacaaaatggggacacgttcgtggcaaaattagtgtggcggtgggaaagggtgccaagaaatg

SEQ ID NO: 102073 - DNA, 715 bp, Heterodera glycines
ttcataaccctttttgcgggatgagctttttgaaacaattttataaatttttgtttaaaaacttaagttttgtagtttgtaagtatcaaattcttagatttattgtaactgttgaccgatttccaatttcttaacagattttgcaccagaatgggttcgtccgtcgatgcacccttaataatttgaagcaccccactttctcattgttccctatctcgccatttcttcatgatttctttcaaattgcaactgtttaaattatttaattttaattttatttaattttttgattttttgtcaattttttgcgatttttgggtttattttctttcatttttcattataaaaaattcaaaagaatttgcctttttgtcgcaaaataaaacccaaaattttatgtttcctaatgaataaccaaacaatccaacgaaaaagcgacaaacttagtcataatttgaatgagcaatgatacaacaaaatgacatttaaaaaacagagtttggaatggaaaaacggagaatttacggagcccaagaaagcatcgttattaaaaaacataaaaattaaattgtcgaaaatatttttgataaaattcagagaatgtccaatattattttttcacatttcccatgggaaaaattgaaatttgtttttgttgttttgccgtctttgatgtttctttctgttatttataaaaattacagtttttcatatg

SEQ ID NO: 102074 - DNA, 52 bp, Heterodera glycines
atttaaaattcgaaaaaatacaaaaattgaaaataaatataatttgaaaatg

SEQ ID NO: 102075 - DNA, 60 bp, Heterodera glycines
tcgtaattttttggcaattgtccaatttcgtatttttttaggtattgtttacaagcaatg

SEQ ID NO: 102076 - DNA, 707 bp, Heterodera glycines
gtagctccaaaacttaaaaactgcttaaacacggtcggaatggatttaagacgatataaaacgatggaaacaaaaaaaatgcaaattaggatactaagcaccctgaatctacttttttaaatcgatcccaaaagactgtccagttttgagtttgggagcctatgcttaatatttaccaattttcgccaaaaaagttataaaattattttatttttaatttccaacaaattttatccaaaaattttcctttttaatttccaaaaaatttatccaaaattttcctttttataaaaaaaaaattcttttaagcacctacaaatatttttgtacattaaaaccaggacttccagcagcactgctgattatcagcagttttaaaggggtcaaaattgaatttttttttaagatgctgatttgttctaattttaagaaaaaatcttcaaaaattgctaaaactgctaccaaaaactctcaaattttcaaatttatggcgatatgttggttttttttgtgtgtgactttttattccttcgagattttattgcttatgttgtttgttaagtattttccgagagctcctccttttgacacatgaacttgaacggactttttacacaaaacgaaagcactcatttcactttttttttaaatcaaaaaattgtatttttttaatattcgggaacgtggaaatttatcgctttggaatg

SEQ ID NO: 102077 - DNA, 201 bp, Heterodera glycines
ttgcgcgcaagtgagattttgtgcacattcaagcgcttttatatgtgcgtaggagcaccgtaacttcgtctttcacgtagcgcgcagcactgtaccttttcgctatataaaagcacacaaattgatgcaaaacttcattttaatcagacgattttttgcaaaataaaaatgaatacttttaataatgttcagcaaaacatg

SEQ ID NO: 102078 - DNA, 560 bp, Heterodera glycines
atttgagaatgttcgagtgatatgaggcttcgaaggagtgaccaaacaaggaaagattggaaaaattccctcgaattttcaaaatctgtgaaataaaaatgctctccaattccccccgcgaaaaatatctgtccgatggttcacggaaaaaattttacctttaatgcgcacattttattacgagttttcggccaaaaatttacgaaattataagaatttttcgtaaaattttgaagctaattcaaaaaggaaaaaaacaaattccaaaaatcgtttttcatctgtcaatttattttccgacgcagaaaacccttgtcccttccgaataattggataatccctccattttctggtgcttttccaacatcttccaacatatttgtgtaaaaattgtagaataatgacatggaatttggtgcagaaataattaatttgttgcctttgctgtcacttttttttaaattacttccattgtcacataaaaaaatgtgaaaattaacttttcagcaaaaaatcgggaattttttgacacgaattgcagcttttaattatcgcagatg

SEQ ID NO: 102079 - DNA, 69 bp, Heterodera glycines
tgtgacggcatcagcgtttacagtgccgacggcgatttggcacaaccactgcagaaatagcggaaaatg

SEQ ID NO: 102080 - DNA, 384 bp, Heterodera glycines
tatgctgtttatgctcaagacaaacatagatgaaagaaaaaaactttaaaattttttttttgaaaaatgttcgaatccgggttcggggttcagaatcggtcaaaaataaggtcggattcgtgctcagcacagtaaaatagccctagaaaaatttttccatgatttttaaagaaaaaaaaaacgggaccagtaaactccatgattgccgtattaccggcttaggcgccggctttgagattaattttaggatgatgtaattaattctgaatacttcataacctttctgaaatattaaagaggtgttgatgactccttaattgagcctatatattgtgatttacaacagtatttcctctccttttttcttaattaagctgacaaatg

SEQ ID NO: 102081 - DNA, 434 bp, Heterodera glycines
ttccttgccttgtgctttagcgcccgcttaattagcacaattagcgaaataaagcctcatttcaaaaggttgactgatgatattttacataaatttatctttccctttttcccttttattaaatgcgcacattgcgcaacagtgaaacgcaattttcaactaattttgaaattgttttgcgtgaatttggtttcgggtcatccgttgggatggcgcgggggggggagtaattgcagggtcaattaatgaggttattgggtggcgaatggtcgctctctgttgccggtgggcgcatcttcacccaattccccaattcaccgacatttccgccccggcggtcaaatccttccccaaataattttgtatcctccgaatttaattcactcactctccgccattcacagaattaaatcagcgaaaatcccccaaaaatg

SEQ ID NO: 102082 - DNA, 612 bp, Heterodera glycines
atgcaaaaacacctaacaaattgggtgaaaacgaattcccttcccattttaagtcgtacaaagttttcatggctcagcgatgtccgctgacgtgcggccaatgcgcaaatcatttgaagaattacaaagatttgcgacgcactgtcagcagcagattttgatcaaaaaattataatttttatttatattttctttccaattttctcttacttttctctttttttctcatagtctcgcgatttccataattatacgaaaaacgaacaaatttttcacatattttccaccaatgaaatgaataaatgaatttgcgatgactcatctcatccatccttttattttcaccctttttcattggtttagcagtcgcttttccaccaaacgaaaatcccatcaataaatatttgtttgactttgtcccatttccaaacactgtgccactcctctcccattgctccgccccatttcttcagcatccatcaacatttattcgtctctttcccttctcatttcccctcctttgatttggtttaattttattttagtcattattcttttttgggtttaaaataatctcattaaatattttggcagcattaattcccacttatg

SEQ ID NO: 102083 - DNA, 721 bp, Heterodera glycines
  unsure (1)..(721): unsure at all n locations
ggtaggaaaacgaagttntagcgaatgcaaaacggaacaatcgaattccgctgacaaattaatgcccttttcggcgcgatttaacaagctcaaacttaagcgaggaaacattccgcggaagtattcgttattatttttacaaaaaaacttntaagaaattttttagtgcatttttttaccaataaaatttttatggcccatcgttaaatgtacaattaattcaattaattaagaaaataattcaaattgtacacatttatgtttttttttttgcttttgtctaaatgataattcgctgtcgcttatcgttttccaaaaaagaaacaacgaattgaaaaaagagaaaaggggcggacggaggaggaaattcataaattaattacaaaattaaattgtaaaattacccttaaattttgggcaaaactctcataaatcacagagagaggaaaggaaaaggacagtcgttttttaactttcctctcaaatcaattaattcccttctcagttgttttaatttaactttacgaattcggggctattatttttccaaaaaatgtaaaaagagcagaaaattgccaaataatcacttaaatgggataaatggaatagaaaaggggcaaaataaaataaaaaaaaaccgaataaatatatttaatttgattatttttaattatttgattcttcaaaactaaacaaaataataattattatattaattatg

SEQ ID NO: 102084 - DNA, 331 bp, Heterodera glycines
ggtgctaggtcgatccacaaaaaagctcagtgtgggcgttccacaaaaaaagctcagtgtgggcgttccacaaaaagctcagtgtgggcgttccacaaaaaagctcagtgtgggcgttccacaaaaaagctcagtgtgggcgttccacaaaaagctcagtgattgataaaataaaataataaatttaaaataataaatttaattattgtattggtaacatccacgttgaaatcaataaccatcaatacatataattttgggctaccactgaaaatgtaaaattaatacaataaatttttatatgtttaataaaattataatttagaaaatg

SEQ ID NO: 102085 - DNA, 378 bp, Heterodera glycines
acattaatttttataaaataaaaaaaggctctctattatattaagatggtcgctgatcaagaccgtgaaacgccaaccatttttattttaaactcttcaaatcactttgaagtgatacttaatttgattgggaaatattaaataataacgaaattataattatggccagcaatataattaatagattaaaatagttatattattaattaattaaaatcattattcggtactgaaatgacccgcctcttctgatcaccactcatttgcctttttgtcacttcgcacacatttgcctttttgtcacttcgcccacatttgcctttttgtcacttcgacacagcaccactgaacataccgggctttccgggagggagaatg

SEQ ID NO: 102086 - DNA, 57 bp, Heterodera glycines
aattatgaatcaaaattaccaattaatgaaaattttgaagaatatttagagaaaatg

SEQ ID NO: 102087 - DNA, 85 bp, Heterodera glycines
ggtaatgcgaataaattagtataattgtatgtataattaattagaataattaatttgttgcaaattctttgaagtgccgccaatg

SEQ ID NO: 102088 - DNA, 481 bp, Heterodera glycines
ggccggggtcattacccagccctttctgtagagtttttgaacgaatttgaagtagtaaaaatttagattttttgaacagtccaagattctttgataaagaccaattggggttctaaaaaatggattgactacaactcaaatattaaaaacgatggacgatatatatatttctatacaaaggaatcaacaaattgacataatctatattgattttgacaaggcgtttgattctgttccaattgatttattacttcaaaaaatcaaaaagattggaattgaaggaaaaatttataattttttaactaactttttaaaaaatcggagttttaaggttaaaatcggcgatgaattgtcagaaagtttcaaaatattttcgggagtgccccagggaagtgtcttagggccattactctttttaatttttataaatgatctgccgtcctttatttcaaaaaaagcatcatcagttggcataaaaatg

SEQ ID NO: 102089 - DNA, 113 bp, Heterodera glycines
aaagtgaagtcatcaaattggccaagaagatcgtcaaaaacgattttgaaaagaagtgccgcgagatgttggtcggtgccattttccaagcatttattcgtcagcttaaaatg

SEQ ID NO: 102090 - DNA, 1003 bp, Heterodera glycines
aaaacaaaaagaaaaaatgttcatgggaaataaattattaattttctgctcctttataaaagtacatataattttccattcataacttaacactttttaaaacgttgctaaatttgtcacagagaaagtaatttcatcattaacaacaatttctgtgattttcattttcaacttttgttttggtgttaatttgattttttttaagaatagcaaaatttattaaaaaaaacgctgaataattatgtacaaaaattattacttttttgccttaaaaatgtttggtttacaaacatacaaattaattaaaatgacattattaatgcccaccaactgaaaaccgccaaaatttcgagaaagtgcatttgtccatatttcatttttgcttctacaaatgatggtaaacattacatgtgttatataacaattcaaagattaaaattgttttatctttaattggtactcttaaaaaatccaatttttcattgcgcaacagaatttaattatggtcttagaagtgaacatttcagctggcaatttcgcattaaaagttaatcgccatttgtgaacattagccaataattactaaatattcgacaagcagaaaattgaaaatttaattatcactttggaatttaagacaaaaaatcaaattacacacttaagtgaaactgcaagaaaaaggaaattataatttaaatttctttcattttgacaaattaaaccacaattaagagcagcattgaacaaatgcctgaatatggtcatataaatattaatcgacttcaaagcagtgaaagcattttctattagttattttcttaatgcattaattagttcccatgattggcatagtcacgcaaagccatgggaaaacctaagacagaagcaaaattgtcaatttgttcataatttgtaaaaaataaaataataaattattattcttgacattcgaaaattaaaccaaacaaaagccgaaagctgaaaagattttctttaaaaaatg

SEQ ID NO: 102091 - DNA, 853 bp, Heterodera glycines
aaaatctaatcactgatagtcggaattaaaatggtttcttggcataacaaaaataatattttgtaaattctatttaaatttcgaaggcgccttgccgaagcaaaaattgccttttgtttactccttaaataattttggcccaaattttttgagaaaataaaggaaaagtctgatacgataaaggtgggtcacgcagaaatttttttgaaatatttgttagatttgttaagaaaattacttcggttttatttttttctctttaaaattttacttttttttcccggaggtgcgtggtcataacttttcttaatacatcaaattaaacaatcttgtagtcattcgatagctcttgggttgctctattagcatggaaaattttagaaaagttcactgacaaatcagtacggcggcgcctatttgtaacgccggccctaaaatccttatttctattaaaaaaaaattggctcaaattcgcaaaaacaggtcatttttggacaaaatttactaacaaattgcattaaaaatttaaaaatcgcggctgcgtctatcggcaccgcagctaaatcttttttttttatgaaaatgcgttcagaaagtatggcaattttttgaatttttgatcacaaatttcttaaaaaaatctcaatgaatgtttctgaaattttttaaactaatagagcaacccaagggctgtcgtatgagataccaagattatttattttgttggatgtttttcttgaaaatgtgtaaattaggtaggcacttttacgaaacgccatagtggcattttttaaaacgaccttaaaaaaatttcagttggttcgacactgcttgaaatgaaagtgaacccatg

SEQ ID NO: 102092 - DNA, 322 bp, Heterodera glycines
ttgtgaagggagaaaaaacggagacaaaataacggagaaaggacggattgaaggaattcagcgaggcgatgttaccggtgccgaaaaaagctgaaatttagcggttttttatgagtataaatggaaattaattttgaatttacccatttcaattgaagcgaccaaacaaagggctcttagaaattcggaagttgaaagaatttgttgaggaatgaattcatctaaatgacattaaaatattatagtttttcattaaattattttttgcctttttcattgccaaatttcggtgccctttctctgattgtaattgctaaaaatg

SEQ ID NO: 102093 - DNA, 953 bp, Heterodera glycines
gtttcgttaatttgtatttcgttggtgtttttattttataagttcagtcagtgtagtgcttttcgccacttgtttctttttcgtgttggctttgtcgtcggagtaattgattaggagtcgctctgtccacttaattatttaaattagtgatgggtttgctgtagggtttattatgactttttaattatgtttggctttttatggtgtcctttttcggttttttgattgggtttggtgatccgtgtgtgtgtgtgtgtgtgttttttttttttaaattgggtttgtcaacccttgattttgtatgggcttggtgacccttatacttccggatgacgagcagttgcgcaacggtgaatttgacgttttgacgtggcaatcaggtgcagaccggacaggcagcacagtaagacgaatgggcacagcaggacaaacgggcagagcggcaggcacggcaggacaaatgggcacagcggagtggacaggcacaacagggcgaacgagcacagcgggacgcacggcaggacaaatgggcacagcgggaaaggcacggtcccgggtcgtggcaccaattcttgtcgtggcgacaagaaatttgcgtcgaactctgcggggtgaaggggacgggaaggggatgaaatgggcgaggcgcgcagagtagccggtcgggggaacgtagggggtcgggaccgatcggagagcgatgagtcgtgccggttttcgtccaggcaaatagaccaagttgggcacaattttaataagagtatgtttattgtgtcgacctcaaacttgggtaattaaaccgtcccaatcgggacggtgaaggaaacgaaaaatgggggacaaacatgataatgtgaacggggaaaaagggcacaaaaacggtgacagtaaataaatcacaaatggaaaaatgtggtaaaatcaaaaggggtcagaacggcgaaacggcgatg

SEQ ID NO: 102094 - DNA, 65 bp, Heterodera glycines
ggtaaaaactgtttattttaatttaattaattaattttttttaatttgagggaaccactgtgatg

SEQ ID NO: 102095 - DNA, 240 bp, Heterodera glycines
ttcttcccgcccattcttctttgatgataaaacgccaactctactaaaatttaaaattttcaatttaataatgaaatttttgtttatacctaaattctaattttagcatttaattttaagccttcaagccgaataaaatcttttttcttcgatggatcaacaggagaaaaggtaaactttcaatgtgtggtaatttattcaaattaataaaaacaaattttttaaatttagttccggatg

SEQ ID NO: 102096 - DNA, 302 bp, Heterodera glycines
ttgtttgcctaacaattttcattaaactttctcctttctatagactttggaaattaatttcctggtctttaacgagaaagggttatggtaatgtgcctacagtattggcaatactgtacttggccgggggaggatccttcggatgtggtgttgaatcacgtcctatcccctcggcattcaaaagattttgtgagtcacccctcgttcaggggaatgattcatctcttccattgaatggtggtataaaagggtggcggatttgccacccaaccacactcttcaaatcatccttccacggaatg

SEQ ID NO: 102097 - DNA, 1003 bp, Heterodera glycines
atttttttctcctttattaataaaaaattttgatttgagaagccaaagattactttaaaaatttttgtatgtataataattctaaagctttattttttccttaatttatgctagataaattttaacattatagctttctattaatatttatcataaacaaaaatttataaaaaaatttagcctttttttggtcgtattatttctttcttcataatacattaaaaaaaaattcttaacagagcaaaatttctgataacattataataactctgggacaataaaaagaaaaacaaatttctaatctgatgccgattaaaggctgaccgagattcttgaaatcccggggtaaattttcgctctcaattctcgagctgaaaattgctcgactttttgtttctcgttttgcttgtcttgtcccgaaaattttatctcaagcagctctattaattttaattactaaattttctaaaattaaaaatatcttttttatttaagcggttcaaatgatgctaaacatgcttttagtcttcatttttatttgtttctttaacaccaatggcacttttggtggggtttgcgtttcaaaatacgatccgatgataagtgagcaaatgccatcgaaaaaatatcagtcgaccaattccatgccaagaacggatagctattctcacatcaacattaatggtatttatatatttttgaattaattctaattgttgcaaaggcttaaaatagcaaatttggaattcacgagattctcgaaatagaaatgagtgagctttggccatgatgtgtttgaccattaaacccggaatattgaaaatttagtttttaattattcaaaattcaatataattcaaatggcaaattttaaaaataattttcaaattaaaattatttaattttcttatttgaaataaaaattcggtgtcattttcagatgcagttataaaaattgaaataaaaattcgattaattttgttaaaaaaatatttttagaatg

SEQ ID NO: 102098 - DNA, 581 bp, Heterodera glycines
  unsure (1)..(581): unsure at all n locations
tttttgttttaaaagtcgcgaaaaatgttttctggggctttttgggtcgctgattatgttccttgaactccccagggggctgaaccccaaaaaattaattgttaagctacttttcgagttattagagcctatcttctaggttttttatttttggagcctaaaaaacttaaaattttgaaaaaaatatttttgactatttttggcgtttgncccanaattattaacaaaaatgcaataaaaatgaaaaataaattttgtcattttacactccgaaatttagattttttagagcctattttccatttttagtgcccatttttggggttttttagcgcctaagcctagcggttttagagcctaaaattggatccctaattatggccattttggccaattcggaatcatcggacccgaactcgaacaagaagtataaattaaattttcgaatttcgccttttgttctaaaaaataactttaaacttggctgggctgtacatactaatttaatttttaaaaatttattaaggtatataatatttatgtaaatgccgatctgaaattgaggctataacactaaaatg

SEQ ID NO: 102099 - DNA, 297 bp, Heterodera glycines
tattggctgtggacttagatgtaaattgtgaaaataggctaaaaccgaaaagtcggggctaaaatcttttgctaaaatggtgaaaaaaggtgaaagatcgaaactacaaggtgaaaaatataggtgaaaagtcatatagtgccatgttttcgagcgggatatgtgatgaatgtccaggtgaaaacaggttaaaataggtgaaatggtaaaagaacaaagctgaaatgttcgagaaatggtggaaaaggtgaaaatatatataggttgagtgcatttaagagcataataaaaataatg

SEQ ID NO: 102100 - DNA, 99 bp, Heterodera glycines
aatcaaaatattgcttcggcaagccaaagtgctaatgaaaaggaaatgaaaagaattgcagaaataaatcattgtagagaaattattataaaaacaatg

SEQ ID NO: 102101 - DNA, 1003 bp, Heterodera glycines
atcacaaattatgttatacaatatatgtgcatattgcctttaggatatttagtgattttctgaaacagcgtttgttgttttcttaaaaactggctcaaaatcacaaataaattgttaaaatgttctgatttttgaccccaaaacctgattttttggcccgatgttctgattttgaaaaattttcgatccgcgccctgtctaatacacaccctaagtattattaaaagtcaaagaccatttatagaatagttttctaagaatttccaatggaaatgtattttttgactttaatttttaagtagttaatcatgtggtttttgggatggattgtttaaatgttaaaattttttcaataaaaatcaaaaatttgcgatgagcgacgaagtgaacaaactcaacagattatcgctgaactttaaaatttgattgcaacatattgctgataaaatttgatttaataattgcaactataattttttaattaaaatgtctttgtttttaagccgaattttttattttttgattaatgatgtcatttttttcaagagtttgtgatgcgatctctgttttattaacagtgctgctggcctattctggtattacttaaaagtttttgatagttgaatcgttttatatgatggtccgcaaaagcacacataaacaaacttctttccatggtaattcgtaataaattttttacaaaatgcttaaaaaaataaagctccaaaaaaagctttttattttctataataagcttaatcaatattctttttttttttttgcaaaatttgtataaattatttttcattgtatattatacaatatttctttaaacattatattgtcttctattttattgtgcgtcatttagtcatgccaccaatgcaaatgaattaatcccctgattttatcttttttataaaatgcaaatgtgtaggaaattattcatttaaaataaatttttatttaaaaatattattaataaaatttatttagcagaatg

SEQ ID NO: 102102 - DNA, 1003 bp, Heterodera glycines
acacaaccggtcggttactctatgtatactgtatgtattataagttctttttttcggcctaatttttgagttcgaccaatcttccctgcatctgtcctttaataatttgctcttttcatctttttatttaggtaattttaattatgaaaaagcccctaaatgcatgtacgtacacctatgttaatttgattaccgtatatgtctaattatagcccatggggattatttttcaacctcctcagaaaaggggggataattagagactgggggattatgatatagggattatttttcaaaacacctcgtagactgggggataattggagactgcgggattaatagagactgggctataattagagaatatacggtaatcaatcaaacgttattcgcattttcctaaccactcgttcaaccaaactcacagatcaatcgttcttaaaaagtaaacacttaactctcctatttatctaattaattttgatggggtgatgcaactgaacagggaacaagaataatttatgtacaggaaggagaggggaatgggggggggggcgggtaatcgttgtgtcgtcgtgggaatgtcctcctccacccctccctctgctactccattcctttcatccatttcatcatcccttcccttccaactcatccattataaataagttccagtcatattctcagtgtcagctcacaatgttctagtcattttctcagccaccagtcgcatttatttaatttttgctagctgtgttatttacttatttgtacatatgcacagaaagagaggaccaggccattttgctgctattcattcattgcattattcattcattcgtctttccccttttccacacaacaaataaattcacattaatatttacgcaatttctcattcgaatgaatgtacaatatttgtttctaaatcgaattttgtggatgttatgtatattttgcaggttaattattttgtccgtcctttttgtcccactcaaaaatg

SEQ ID NO: 102103 - DNA, 323 bp, Heterodera glycines
ttgtttatttaacaaaaattaattttttatttgcaattttcgccgccgccaaacaaaaaattgataaaattttgatttttgataaaataacggtccaataaaatcactcataaaagccctcagttttgtgctgctcactaatgaattcaattcacacacacacgcacaaacattaacattaacattaacttatataatttataacattttgccccaaattaattaattaattaattggctgttgaaattttatttattttttgctttttttttgttttgcccttttttgagattatttaaatttaaatttttttcagacaatg

SEQ ID NO: 102104 - DNA, 87 bp, Heterodera glycines
agtgtgttcttttgaattggtttataactcatctaatttgttattatcaagcattttattatgttttgtccgccacttttccaaatg

SEQ ID NO: 102105 - DNA, 155 bp, Heterodera glycines
agattgaaacggctaatggggctgaatggacgccgctattgatggctctgatgatgagacggttaagaaaaaaaaactggatttataaatattgttcccaagctcagaacacaatcagcatatgaaacaattcttacaaaaactacagaaatatg

SEQ ID NO: 102106 - DNA, 396 bp, Heterodera glycines
aaccgagatggcacaccacgatataaggacgatctcattttgaagaatttatacttgttgatcaaatgacaaactctttctttgtaattttgccgagcaatacgccaggctttgttggaaataaaacaaacaaattcaaagtgcacttgccaaagaagttggtgtttgatggggccgggtggatggttggactgtcaggcataatttacccaaacaggtgggcgaaaatcatggctattgggtccgatttttggcttaagttgggcaaagctgggtacatcagaccgacaatatgtgattgttcacctgcacgacggccgaaaataccgtttccgtgtgccaaagggaagttttctctcgccacagcagcttgagaggggcattcatcatggcatg

SEQ ID NO: 102107 - DNA, 86 bp, Heterodera glycines
attttttttttggattatgcgtttcatttgaaaaataaggttgtgcgtggcacgggtgcaaaaagtgttatccaagtgataacatg

SEQ ID NO: 102108 - DNA, 217 bp, Heterodera glycines
ttttatttaggttgaaaatgcgcttaaattttcaccaaatgttgggccaatttgtttgttcggcctcggttgacttaatcaataaataatgaatatgcgttttaatgttttttttcttttccattaagatgcatccggaaacgacaaatttggcacattttcaccattaattaattcccaatttattattgctggttggggcttaactcagccaatg

SEQ ID NO: 102109 - DNA, 222 bp, Heterodera glycines
  unsure (1)..(222): unsure at all n locations
ttttatcaaagttataccatcacacgaaatgcttcaatggatgatgtgaaggatttgaagctgcacaaaagcactcaaattattttgatcggattgnnccagcnaaccggacaaagtgtgaccagtagggaaagcagcggcacggatttgtcattggacgatttggtcaaaaatgcaaaaaataacaataatttaaattgttgtttctttaaatntagaatg

SEQ ID NO: 102110 - DNA, 704 bp, Heterodera glycines
  unsure (1)..(704): unsure at all n locations
attaaaatggcatttttttnattgagcattaattaaataattgaatcatgtgccagttattattattataaatttttaaaagagaaaattataatttctaaatatttattcaatttcactttcatgattttctgccaaccttttttcagttcagaatgccaaaaaagtaaaataatcgccagtttagtaaaatttagaaaaacgaaaacaatgcttgaagtttaaaaatcagacaaaaaatttttgaaacaatttaacccaaaaattatgcattattttaaatccatttcggagcattaattttgtttaattaatttttgagttttttaaacatttactgactatcaaattatcagtcagacccagtcactttctatcacttatataatgctgtttaggctatcagggattgataaaactaagtttgcacccgattttgggtatagccagcaaatctgttgtgcgccaatatcggataaccaaaattgcatctcccaattttttaaattttaatgccaaaattctgcaaaaaaaaaaaaatactaggcccaaagcaagttcaagtcgggctccacgtgctgcaccatcaccgactttcccccatgggtggtgaaaatggcacagaatcagccgcgcaaattttcgccggaaatcattcgccaaggcgaggcggtcatcccgctacagtacggcaccaacaaatg

SEQ ID NO: 102111 - DNA, 73 bp, Heterodera glycines
atcatttatataactaaaaattgtacaattcagatcacaaaaaacaattatttcttgctaattattcgtcatg

SEQ ID NO: 102112 - DNA, 75 bp, Heterodera glycines
ggtgggggtcggaaacgaacgaacggcacggcgcaatcgcaaatccattgaaattcccccatttcaggaggcatg

SEQ ID NO: 102113 - DNA, 84 bp, Heterodera glycines
gacgacattctgttgaacagtcagttgggcttgtccatcacattccaactgtacctgggacgatggagcaacacggtgacaatg

SEQ ID NO: 102114 - DNA, 238 bp, Heterodera glycines
cgaaaaattttatttttgccaaactttattttttgatttaaattcttggatgagaataagtgatttgctgatcaaatatgatcagttggactataaaaataaaattttatattatataatcgtataatggacttatttaaaaaataaactttcaaggacgtacttggtaaatcaatttttaatttgaaatgattaggctagactcgaaataaggacagccttttaaataaggacaatg

SEQ ID NO: 102115 - DNA, 65 bp, Heterodera glycines
tggaagtccccttatatacacggcattgctataccgtccaaattcacaagtttgccgtgtaaatg

SEQ ID NO: 102116 - DNA, 272 bp, Heterodera glycines
  unsure (1)..(272): unsure at all n locations
gcagttttgttactgtaagagacacaccgtgatcctgtagtatatatttgcgncacgaacggtcttaataaaaaatgattgatcatcatctgattgagtttttctttactattttaaaactcataaattaaaacttaaaatttattacaatttaaattattttaggatcattatttaaatacccaatttttgatacatttgtaaggctgtgtgatttgtcatatttctcatttggatttaattttttattaaagaaagatatatttataatg

SEQ ID NO: 102117 - DNA, 414 bp, Heterodera glycines
tgcgcttactgtctgatgaattagcattaaaatcctaacggaaacgaagtgctttttctgctggtttaacatactttaccaaaggtccaaccgctgctcaaactgcaaaagatcaagccccattggatgttcactttggacgatttgatacgaaacgccgttcagcaagcgataaaatttcttagaccacgtgacattttggcacttttgctgctttgactgaccaatgcttctcccttccttcagaagagccgacgagtcgcgacgaaggcttcgccaattccaagcaatgttcgtcggtccatcagttgctgcccgtcccccaacaatcttcgcttttggcgccggcttcgtctttcgatctgttgggcaaggcgtacactgaccaaatcaaaaggtaaaaacagccaaatg

SEQ ID NO: 102118 - DNA, 671 bp, Heterodera glycines
  unsure (1)..(671): unsure at all n locations
caaattgggaaaaatacacccctaagatttaaaaaatttctcaaaaaattgatcgccaaaatttcatttttttcttgataaaaaatttttagattaaaaattttccttattcgaaaaaataataaaatgtttatttaataatcatntaaataaccaaaactaagcttttgattaagttttacgtgttttgctctttaaaaatccttaataaaaatttttaaatgccttttttcatgcctttttcgggatttttgtgccttttctttaattaaatttatttatttcgccgagccaggaattctcccctcctactttccatttttttcaaaaaaaattgaaaatgccattggtgcgttaagcgattttctgctgcccaatcgttagaccaaattatacggcacaaaaaattttgctaagataaacagatgaacaaatcagctaacatatgaattactgctattcacttcaaattaattaaggtcttcagaaataataaaaaatataaaaatatatattaaatatatttaagtttttgcctttgctcccctcactctttcattcccttctgctgctgctaccatccacaattgtcattttccctctcattgtaaatattgcgggcaccgctggatccattcccgtggatttaagtaaatttagccacaaaaatg

SEQ ID NO: 102119 - DNA, 1003 bp, Heterodera glycines
taaattaaaaaatttattttttattataaaacaaacactcttttaaatgaattaaaaacattaaaaatagccaaaaatgcatagcaaaaatattgtacaccgcccggattcgaacttcccccccccctcaaaataatgcctcagaatccccaatcacacagggattctgagggcttaacgttgtaataactgaaatctgatgtcagattggtgatcagcaccctcaaatagacctaaagacatgtttttggatggtttttgatggaaaaattttcccactcaaaaatcatgtgctcccccctttggacccgaagcacaaaatcacttttattttagctctggttgtggagattttgaatttttaaaaaattatctgggacttttaggccgcttcgcggcctcgaacgggcgcttcgcgcccgtttttaaaattttgttgggcttggacgggcgcttcgcgcccgtttttcaaattttattgggcttgggcgggcgcttcgcgcccgtttttaaaatttagttgaactcagacgggcaatcacacagggattaagagatataaaagggattaaaagaggcacaacagtgattaaaagaagtacaactatgaaaagttcgaaatttataatatagaatatttattgaaattgaaaggaattaatttctcgaaaattcaaattaaataaaacagttattcatcagaaaataatttaaaataaattaataaaacaatttaaataaaaaaattaaataatttaaaataccccttgagatttttcaaatattcgcccaaattcccaagggccaaaaaaagtttgaaaatattttcgaatttttaaaaaattctaaaatgtacaatgattggttatttattgtatattaatttgttgacaaattctaattaaaaaaaacaaataaattctttagtttatcaattttaaacaacagtgattaaaagacgtacaaaagtgattaaaagaagtacaacagtgattaaaagatg

SEQ ID NO: 102120 - DNA, 650 bp, Heterodera glycines
attttcactgggactcatttgtcccagtgctcagatggcattggttcgactttagactttgatcgtcaaaatcttttaaatgataccaaatttgttcggttttggtttatttaaagagtaataaaagccaaatttgctccattttcgagtttttaaccagttcaaaaaccgattttttggcatttccgcaactgctggagacctaattttcgtgcatagctcctcgagacgaatcgaatggcatatcatttgtgccgtttttctggaacgttcgggcgttcactttatttcacccagacagaatattgttaaaatgattctttttgcttttaattggttttgcgaaaggattcatttttttcgtctccttttcatataatcccttgaggggattaacaaaagttgacatgtatttatgatgtcattatgtatgatttaaaacttagcggaagtttatctttaagacaatggaactcaattagtaaaataagctgagaatgatgtcatttaagaaagggaaaacaaaaattgattaaaaaaaatcaaaactaattaatttatgaatattttaatttgttattcatttaatttgcacttttatataggcacagaacgaaaatttgttcggcgcctatttgtctcggggaatg

SEQ ID NO: 102121 - DNA, 1003 bp, Heterodera glycines
caatgggacgaaagtggggaggacgacggaagagcgagggaaggaatggcaaaaagtgccattttggccaattggcttctgacaataaacggcaaaatcgccaccggactttccccgtgataaaatttcccgtccacgcgaaatgttttctcaaaaatgctcattcatttctcacattgttaattaattatgcattgttattcacactgttgaattattgtcttttcatttaaaaaatatttcgttaagaatattttatttgataaatattaaaatgttcaacctcatctaaataataatagggccgtggaaggggaggaattatgcaaatgtgggtacttccgtgttttgccccccccccctcgaaaaattttaaaattcttattttggggttttcgaggtcactgatcacgaaaatggtgtttggtttgacatctgctgatgatatctggtcatagattaacaaaatatctatgattttttgaatttttaaaatttttcaggggggcgggggggggggggggtagcaaaacaagcaatttacaaaaagtgcaaatttgggcgcttcaaaaaagtgcaaaaataaaaaatcagattttttcaagatgtgtaaaaaatgataaaatgttaaaatttagaaaccccggtaacggcaattgtctcactgccagacactcaaattggtctctgcttttcaaaattttccaaaaagtgcgaaatcggccatatgtgagcctaaatttactaaaaaatgctatttccacaataagattttgaaatgcacaatttttattttgtcctccgtttttgcttattttacagtgacatcaatggccaatgtcattgtgttattaatgacacggtcacttacaaaggcttagttctgagttcgcgcaaatgccgtttaaatattttatagcaccataactttataggctcttctgtagtccttaagtccttaagatcgcaaaaaagaattatttcttgctaattattcgtcatg

SEQ ID NO: 102122 - DNA, 141 bp, Heterodera glycines
ggtccgtaatggtgtttcaagtggaacatatatgtgaaagatggcgcttttcgaagcccgtccaaataaattggcaaaattttggagtgcttttgtgatttcaaaatatttttatccccaaattttccagggtcgacgatg

SEQ ID NO: 102123 - DNA, 714 bp, Heterodera glycines
caataatttaattatttacatttaaaatttaattaaaatacaatacatatatgttgtaattaaaacaaattttcaaagtaaaatttgaaagttctagctaactcctaagtttctgttaaatgctttcctcaagaattaacatgttttttaagccgaattattatgatagagatttatttttaaaattaaattaatttttgtaataaaacaaaaataattgcaagaaaatgaaaagatgcttttttttaatttaataaaagttattttttatattctttgttgataataataaggtacttgtagattttgtcaccctccgcaaatttttttagataattttttctatgctgatttattgtgctaatcacgacccatcttggcccatcgcgaaccccggattcgaacaaaaagtctaaaccccaatttttgaaaattcgatttttgttctaaaataaattaaaacaagcaaaaactgatcataaaccattacaacaacaaaaaataatcattacacaaagattcgaacataaaagagaatttctgaaaaattcgaatttcgacttttattttaattcggttccgagattcgaaataggccaaaatatatgccatattcttgatcagtaacccaatccgaattggcatgatgcccttctctttgatcagtaacccaatccgaattggcatgatgctcttctctctctctcacaaatg

SEQ ID NO: 102124 - DNA, 100 bp, Heterodera glycines
cctgaaattgtgtttgggtacaattatatatccaatttataaaatcataaaaaccttccttttttaaccaatttaactgattcattttcagatctacatg

SEQ ID NO: 102125 - DNA, 593 bp, Heterodera glycines
ttggcgttttgtcttacgccaagcaaatttataaattctctatttttctttttttatttctttaaaatcggaaatccttaacataaatttccaaattggaggtgttctttgatcctttctaagcgacttaattgattaatgattaattttttaaataagaaatttacgaaaaattttataggcacttaaaatgcagttttgggttgttttttcctatttttttcaaatttaggccttagtgaaaaaataagaccatatttcgccttaaaaatgatcatttaagcatattggaataagtctcgcttcaccttcgtaattaaaatttaatgctatgtaatacccttataaattataaaaatcgacgtctgccaaaaaaatgaattttatttttttaaatttttttttaattttagcaaatttatctattcttctgtttcttacttacttttatgctattcgcgcacaacaaataaagcagccagaggtggaaagaaagtctcgtccaaataaagtaaaaaattcttaaattttcaatttttttaaaatacccctccaaaatttccgtttagcaaccgatcaaaaagccaaaaatg

SEQ ID NO: 102126 - DNA, 325 bp, Heterodera glycines
  unsure (1)..(325): unsure at all n locations
gaaaaaattgataaatntaaattttattaaaaattggttaatttatatcaaaaataagcaaaaaatggaaatttcgattttttggtcgattttctcaagaaattgctttttttcttctaaaacgagtttttataagatttagccatttctgaaagtgttactttccgtttagcgaatttgaagaaattttgagaaatcataccctaaatttggaaaaatttatgtccatatttttgccattttatatccatatttcgcgattttatgtccatatttttggactccctaatcatcatccatttgtcattatttttacaaaaaaatg

SEQ ID NO: 102127 - DNA, 119 bp, Heterodera glycines
tataattttgacactttaaccccttaattgattacatttttgtgcttcatatactgcgccttttttctaatgccaatcaaaacttcccttttccttatgcttttgcttaggcttcaatg

SEQ ID NO: 102128 - DNA, 140 bp, Heterodera glycines
tggacagagtaaggcaaacaacaaataatgcacgcactcaatgctcattaataatgttgccagaaattgctacaatttgtcaatgcttcttccgatcagaaaggctttattttaattagtggtggattttctgcccaatg

SEQ ID NO: 102129 - DNA, 621 bp, Heterodera glycines
aaaatttgcactcttccgatcctttggatggtcagtttcagcaggcgtcgtcgctcctcctactttgactcatgtcaagtgctactgataagtatggggggggggaaggtgaaattgcacggtcgaagagccaatgcgaaagtgacgaccgcgtgcaagttccctaacgtttcagtcccgaagagacgaggcgatcgatcgctctcttcacattgtattcgtctctgctgctgtccaccagacatgctccctcgtgtcctaatcgttcagcaattgccaatccaatcctgtgaataggcacattttgtacggcattttcatatcagtgatcatcgattgagtacccttctgaatgctggtgtagctcaaacagtggtagctgctgtgttctactcgcccttcttttacaattgtaagagtttggtccaagcgaaacgaccccccccctacaccaatcgtctatcgcatagttttcgccttggaaggccacttgcattgaaaaaagcacaaaaaactcgtgtgggctcgcttcatacatatgattgagaactggtgacatcaaaatgaatacattttagggtgctcgggtactcaaagtttgagaaggtcaatccggacatg

SEQ ID NO: 102130 - DNA, 105 bp, Heterodera glycines
gattaaactgttaggtgaactaagtccctaaatagacgtagcacataggcaagtgatagcgagcaaggttgactggtagaaaagttcaaaccatagcactcaatg

SEQ ID NO: 102131 - DNA, 519 bp, Heterodera glycines
ccgaaaattttttgagtttttcggtttttttcggtttttatacggaaaccgaccgaccgaccctcttgtccggtctctattaataagaatggtttattgctttttttgcgaaaaaatataaaaattcaaaaaaaaaccgaaaccgaaacgatataccgaaaatttttcttcggtttttttttcggttttttttcgggttttataccgaaaccgaccgaccgaccctcttgtccggtctctagttagaattagaattttaattaatggtgaaacagtttttatttatattattattattattataaaattattaatttcgatcattcagtagagagaaaaaattcactttacaatttaatggatatagtgatcctatcaatattttaccattaatgtaaatttataaggaagagaaaaattcatttttgagaaatatttttattattatttatttctttttttcatatcgaataaattataatttttaatttttaagaaaaagaaaaattgtcaacaatg

SEQ ID NO: 102132 - DNA, 123 bp, Heterodera glycines
tagcaatttgcgaatggccatcaggtatataattgacaggagagcggtccgccctaccattaagccacctggagcggccatatttgaagagaggcttaggcaagatccaattttgtattcatg

SEQ ID NO: 102133 - DNA, 65 bp, Heterodera glycines
tgtaagaaagttttaaaatattaaaaaagacaattgaaattttctcaggtggccattgccctatg

SEQ ID NO: 102134 - DNA, 169 bp, Heterodera glycines
actgaaatgttgggaaaagcacagaacggtgcggtggccacgcgaaatccaatagaaaaggcaacgaacgattggcatgagggggaaactgacaatgagaagggagtgaaggcacggcacaaaacaacaaagggaaatgccgtggcaattactgcaactcgtagggatg

SEQ ID NO: 102135 - DNA, 723 bp, Heterodera glycines
atggcatacatataaaagttcaactgaagcggtgccaaaatcatttctgcataaaaccaacaacgatcagcctaaatttgttcatttcattcctaatacctaatcaatgaacgagtttttagttactaaaatcgcgaaattgttgcctaaatagttgttaaaaactgaaaatgccaaaatggttgctatgtatattattattttattagttaatttttgcgaaaggaaataaaagtcgacgattataaaagaggaaaaatcaattatttgcttggaaacatctaaaaatatctaatttacaaataaaatttgtttttaaatctatttaatcattttttgaaaacttgaaaaaacatcacttgaaataataaaattaatcgctccaaaaatgacaatatttgtaaaaaaaaggttgatttttttttatatgaataataaatttttcgaaaacttacaaaaaaatcgttttaaaaaaaagtccgctgtcgaaaagtccgggagccgaaatacgactgattattaaaatagtgaaaaattaaaaaaattagtataaaagtggttgctcttccttcctctgtcactttccattattcattcgccattttcgtctcttcaaattttctccctgacattaccatctgaaatgagtctgtacgtttttcgtttttttctccacatttacccttttccttctcattttttagtctgttcgttgtgtcaatg

SEQ ID NO: 102136 - DNA, 89 bp, Heterodera glycines
ttgtcccaaagaatcggctgagtgtctatcaaaaaaaaaaattttttttttaaagtaagtataaaaactgttttgttctgtttcagatg

SEQ ID NO: 102137 - DNA, 461 bp, Heterodera glycines
  unsure (1)..(461): unsure at all n locations
attgcctaattaggtgatagcccataatttggtcagcagttaaatgaaatctgattttcgcctgattgatcagttaaaagaaacaacaaaggatggagccgctgtntaattaattactaattaggcatctcacttgataagcacagtttgatcaattaaaagaaatctgatcactagtctgatcagtttattgattggcctgattagctaaataaaagactggtgattgatcacggaattatgacagtctaaggcaattcgatcttatcaaattctgaccaattcattggctaaagctgacctgtcctaatagaaaatggatttttgtatcaatggactaactcctttctgattgaaaattatgatcacttaggaaattccaaatcactgaccaggtcaataaaacttcggccggtcatcctccaacgtacgcgccccaatatcaaacgcgtccaccaatg

SEQ ID NO: 102138 - DNA, 838 bp, Heterodera glycines
ttaggctgggggttttttgtattacaactatggtcggggatccctttacaatttaatcatttttccttcttttagaaattactctttttctctgtttctctcctctctcctatagtgaatgcgcatctctcttcccagggggggggccaagatttctgtcctaatactactaatcatttataaaatttttaattaatttgaaaatattgggcggcgctttgaatttaattatgaaaattatcccacccttttcaagcagtatatgtgaagcagtggaccaaaacaaattgactaacaattaagtgcggaataaaaataatgaacaattaattggttttgagtaattcacgtaaatgtaaatattgttgttgttaatattggctagttgatgaaaaaagcatttgtaaaaaaaacaattgatcgaaaattatgttaaaatgttataataaaaataaaattatttaaataatttgaaaaaaaactaaattcaataaaagtctcaaaaatgctctttcttttttttcgcccgcacaataacaaaccaaatacatttcaaggtgttcaggaacaaaaaatggtcaatttttctgataaaattcttttatacttgaaaaatgcgccgcaaatgcttaaaactcctcagcaaataacatgacggcagtaaatgccaacaaaaaactctaccgcaaatttagttaataattttgtcgttcctgacaataataatttagaaacatttttaattgaggccctcacttttctcggccttttaaaattttttattttaaaaaagaaattgtttataaaaatatttaaattgcttaatgaagaagaaatg

SEQ ID NO: 102139 - DNA, 52 bp, Heterodera glycines
acaacagcaacaacaacagaacgatttgcgccaaaaagctaacacggcgatg

SEQ ID NO: 102140 - DNA, 581 bp, Heterodera glycines
acaacaacaacaacaacaacaacaacaacaacaacaacaacaacaacaacaacaacaacaacaacaacaataattggccacaaagttgtgacccaccgatgcaaccatcgccacctgggattgcgctgatcagtaatcagcgaacacaggcaaaaaaattaagctttttctgagaaaattaatggagggagaacaagttttacatagtgaatttattggaaattaaaaaaaccctttttaagaatcaaaattttaaataatagccgcaaaactttttgttaattcgatgcttattaatagattaaaattcggctgaagatcttcaaattttttacgagcgtttattcatcaaaattggttctggtagcattgaaataattacaaaaacttgtgaaaagatttcaaatatccggttacaatcgcattaattgcttctaattgcccatctaattgaccactcagttttatagaatagccaagtgtaacaacttccatttaaaagattatggccaatcaaataatttagttgataaagtgcattggtatgaaaagaaatttatgacaaatcaaaaaatttaatg

SEQ ID NO: 102141 - DNA, 58 bp, Heterodera glycines
tcgtctacaacacttcatcacacacgaagcggacgtggccggcgcaacaacttcaatg

SEQ ID NO: 102142 - DNA, 219 bp, Heterodera glycines
  unsure (1)..(219): unsure at all n locations
ggtgaagtattggtattaaataatttaattcattattannttatggaatcaatgaattaaaattgaaagtaaatattattaaatgggggcacatctagggaaattggtctaattaacaaaagctttttatttttaggaaaaaagcgattttctgaattagagaaacgaaaaatagtgagacattttatggaaatgaaagcgaacaattggacaaaaatg

SEQ ID NO: 102143 - DNA, 1003 bp, Heterodera glycines
  unsure (1)..(1003): unsure at all n locations
ttccttcttccatgtaatttatgaattcaattatataattatttccaattctttaattatactctgataattgaggtctaattaaaatataaaaatagatttggaagtcaaaatggcgaatttgtcatctgaattgtgggatgaaatttaggtttttccgttttaataaattctagggttacacgggtacgaaacccgggtcccgggtattgccaggtatagaaaagccggtacaaanccgggtccgggcatccggtaaaaccgggtattaataaaatccaaaaaataattactaatggaggtaattttttctttaaaataaaagctcatacttacaaaggagaggtacccaagtgacggtggaacttccgaatgaaactttgaaggtagaagatagattactccccttttgtcttaatttttttttttttttgctanatgaagcttctggccgagatatgaagcttttcctttttgccatatcaatatcatttaaaaagaatgaaaagccaatatgtctgtcactgtttttaggtttatttttcaatttttctatcttcctaaatttttctcaaaaatgctaacaataaacattggagagggaacagatgagaggaggaccaacgaaaagaattttttaattaggaacagaatccaagagattaaccactaagccaaaggagcaattgatgaagcggcttttaaaattaatattaattaaatttaataaaaaattctttcctccaactttgctcaacgatttgaccaagacccccattcttaccagtgtactcttttggacccggacctaccgggtcgggtaccgggtattggattttcaaaaatctgggtccgtgcccgggtagtaaaaaaccgggtatccgggtctgggacccggttgggtacccggaccgtgcaaccctaataatacgcattaactgcgaacagttcattggaaattttatcatagcaaattatttggcaaaaaattgcagtagggatg

SEQ ID NO: 102144 - DNA, 428 bp, Heterodera glycines
agcggaatgtgagttctgaaataataattttgaacaattccaccccaaatgctggcacccataaaaaaacgtttttttactatttttactttcccgctttctttttcaggttcatttacatcccctcggtatgtttgttttttttattatttcttaagacttatggctgctgctgtaaattcttaaaattaattttaaaactaaaagttcaccattccgcaatttaagcgggaattttattgtgctatttcttgaagtttaaatgattttttgcttatatagacaaaaaaaagcgcaaattccaagggatttttgaggccggaattcatgattataaaaatgttttagtctcttgttcattaaacaataaaattcattttaaatttttcccctccccctcttcttaggtcagcatgttgccggaaatg

SEQ ID NO: 102145 - DNA, 484 bp, Heterodera glycines
cttaacttatcggaccaatcctttgcccgtggcacctgtcgcctcagcgttttaactttacatttaaatgttatcccgttttaaattcgatactaaaaattattgaataatttttcaaatatgccatgttaaggacattctgtggtttctctcttccagttacggtaaccgtatcccagcactgtttggccaacaattgctgcccttttaccgtatgatgcccggctgggccatcgttctgtgtttttattttgcaacaacagtcgcttaccaagcctcaaatattgccacttttctcattcagatgaatcgtttgactgcaattgcatttcccctcaaacagaaaagggtttttaattattaaaatattaattaatattttaatttcatccattagatttgggaaaagcaatcatttttgatgatattggcactgattgtgttcgttgtgccattgctaagctgtttgccaattatgaaaatg

SEQ ID NO: 102146 - DNA, 140 bp, Heterodera glycines
aaacattaattatgaattgatagagcaattaatgaaacgaagggagggggaactcatttggaagctaattatctcatcaccaaacaaagacgctttgtccgcttggtcccgctgaaagagccgaattcatccgaaaaatg

SEQ ID NO: 102147 - DNA, 60 bp, Heterodera glycines
aaagtcagaagttttcgcctctcatattccactagccagctgctaaattttgaatcaatg

SEQ ID NO: 102148 - DNA, 468 bp, Heterodera glycines
taatcatgttcaaatgatcgcattaatcgaattttcgtaaaggtaaattttgttgaagatatattctgacgctataaaaaaggccaatttgtacaaaataaaaaaaatttattcgtatagtttaacgaaagcccaacgttttcttataaaaatgattgtttcaccaataagttaatccaattatagctcatttgagattataaattgcttatttggtatagggaaattgcgaaaactttccttaaaagaaacattatttatttacattctacaaagatttttttataatttttatttatttttaaataataatttatgttttatagtttaattgtttattttttcgaaaatttattcgtttgtttaaaagagattaaaaaataataatcttaaaacattatttcttataatggttaatttattactatttattataaaatttgaaataataaattttttttaggtatg

SEQ ID NO: 102149 - DNA, 425 bp, Heterodera glycines
tatgctccagcagcaccatcagttcggcgccttttcgtttaccgacccgacgctggtcagaaacctttaatcatttgacaaatcatcattttatttaactgatcacttgtccgacccatgccgtttgagttggacaaacccgaaatacgaaccaaaaaacaccctccaatttgctttcaaacattcatagagggttaagaaataagtaatagcaataagatttttaaactttcttttgaaataaaaacgaaaaaccaaattgaaacttttcctacaaaaaaccgctaacaataagaataagaaagtgaaaaacaaaaaaaaattacggttttttcaaaattttttagggatttgggaacttcatgtacccttttgtttgacagcctctccaattcaattcatttttgaatttcaatttgaagatg

SEQ ID NO: 102150 - DNA, 702 bp, Heterodera glycines
tcaaaattaaacctgcttgatatcgttcggtaactttaagtattcaatgttagcttatacaatttcaaaaaatttctttgctttcataaaatatgacggaaaaagttaaaaacttttatcacatttttcgctgctattagataaagttataagcattaaagttatcaatttattttatggccgtgtaaactacaatgtagctgatttcatggctttttacttaatatgggcttggatactttgtgggtccgtcgacattaagtttgggcactcactatatggaggaatttcgaaaaaaaatataattttgtaaaatcttattaaaatttaaaattaaatttagtaatttaacaaaagatgtgcttacaaatttatattttcttgaaaataaaaaactttaattgtggaaacctcttgaacagactgagccttgtaatgattacaaataatacatatgtatgaaattgatatataatgaattataatgagcctagcaaaataagcatggttaattgagaggacatgcgttaaaaaactttcgattcctaaacttgattaaaattactatgcttttaaattagatgattgtaatttttaggcaattaaaacatttttaaatttgaaatccttaatttggtgcccaaacttcccggtgcctaaatttctggtgcccaaaacccccgcggtgggggcgccggaatg

SEQ ID NO: 102151 - DNA, 906 bp, Heterodera glycines
tagctttgaaccggacccggtctgggagatagcacttgaaaaacaactaaattgttcttaaccgggccagtcgggttaaggatcaggcacttttggtgccccgaaagtaatgcaataggcttcaggaaaatgaccaatcactgagttttttgtggatcgacctagcaccgttaataacatccaatgtgtgcatctggtactcaattgcatgtaaggaaacaggaaatgcagaataaaatttccttccttgacacatggagactgattcaaaaattttaacgaaaactgactactaaatgatattttattaaattaataaaaaattgaaaaataaattctaaaagttaatagacaaaaaatatgtaaataaaaaaatattaatataattaattacaatataaaactatgattcatgttaaattgtaaatcttttattttataaagattttttatatttattttataaaaaacataataaaataaaaagacaattcttaaatttcaaaataatcatcagttcaagtagtataaggcaccttaatccggtgtaaaatccttaatccggtgtaaaatcccccccccctgccctccacccttccacatcctttctttctgccttttaacattccatttcaatttccccctcgcaccacttttcacccttttcttccgcgcagtttgttagttgttgccccccaatttcaacgcctaattgcgcacaaatcgatcgctgtccttcgcaacaccccccccccccccccgacgaatatccttcacaaatacaataagttgcggagatgattctccttttacattttacgttttgtaggacgtttaatctatgtattataatttttttattttagcatcagaaattttttaaactctccaattgtctgcaacatg

SEQ ID NO: 102152 - DNA, 498 bp, Heterodera glycines
ttcaaatcccaccccccccatcctttttccaatcatccccggtgattggacggcgacgcgaacgacgagagagagaaacgggagcgaaactcccgtcttcagcgatcggaagagttggcacgtccggagtgctgactgaagagctcggacttaggcggttgaacctgggagcaccggcttctcccccaaattgagtcggtggtgccgttattcaaacaacagcccacttcttgtttgcctcccgcccttctctccattccacccccttgggaagagaccgagcggcagcgaaaagagagagagagagagaaaagagaccgaattttgaggagtggattggagtagaaggaagggagaaactccccgccaaatcggcagagagtttttgccacaaacaaagttggtgccgttagcagggggccttctgccacgaacaaggaccagcaaccgggagcacctcccgctacacctcggactaaccagagcgaaacgaaaatg

SEQ ID NO: 102153 - DNA, 483 bp, Heterodera glycines
acatttctcaaattgtaagaactaagaatccaaagacaaaactaaaaaaacaaattcttctattctatgtataacaataaaattttacaactcaaaaatgcgttaaaattttacttatttatcgataaagaaaaaattgccatcagaagggcgggaaccacttactctgatgactgatcacagtaaaatagtcacagagtaagtgaataaatatcaagtgagatcacaggttaagataaacaataacgaaaaatttatatgaaaataaaatcgaggtcaaagtcaataaaatgcctcaaaagttaataattctttatacattggtgctttcagaatcaagagtcaattctaataattttttaaaggtgtttaaagagctagacattaacgttttatcaagggcattccaggccttgactgatctgttaacaaaagatttggaagattttttagattgtaatttaacatttaaccggaaaaatg

SEQ ID NO: 102154 - DNA, 1003 bp, Heterodera glycines
aaaataaaaataaaatttatttttttcaattatttatactagagtagagcgggaccgggaccaaaacacggacaactgagtacaactgagtaccgaggtcccggttttgaccgggacgggaccagtcccgggttttttcccggttttcccagccaaaaattcccggtttttcaccccgaaaaggtcccggtcccgggtttgcccaaaattcccggtcccgctctactctaatttatacacttacacatataacctatttttgtgttctatatttgtgtcacatcgtatgaataaatataaggcaaacaattttggataggtaatatttgggtacgctaacgtgaaaatcccgatatcccgattgaaaatccaggtcctctcgtttcggctttctgatcccggcaagtcccagtctcggttttttaagctgctcgttacaagcctatttttattatcctattaattattttcaaagaatttagctaagtttcttaccatggggttctattttttttctattttttaataatccatttttaagagaaatatttaaaaataaattaaaaatgtaatcatttgtttttgtgtaattcaataattgccaacctgctaatggtgtcatacaacactcggatatgcgtaaaatgtataatataggaagtaaaaaattgattaatattatcaattattattattattataaaaaagtagaaactgtcagaataaaaggcaactctcaaatacgactttgatcatcatttttttttgggttttatttctttttatttacaataaaaattctaaattaattttcaatctttctatttttcattgcattttttaaataataatacatacattttaaaaaagtcacgggaacaatattcgaaaattcattcatctttggttgctttttaaaaatatggcctcctatctgtaaaattgtcgagagtattttaaaatatatattttttgtcatttctttttagataaacaaaaaatg

SEQ ID NO: 102155 - DNA, 163 bp, Heterodera glycines
ttcgtcgtcgtcttcgcctcgtgcgtcgtcaccgtctgagcggaagcaaaggaaatttactcttcgaattgatcgagtgacttccgtcgattcacttccttttaaaatccgtccattgcctggaaagggtctttttgtgagcgaagtttgtgccgagaaaatg

SEQ ID NO: 102156 - DNA, 392 bp, Heterodera glycines
tgttgctgaacgttgctgctgatgtactttgtgttgatgaagtgcttgtgccgaattgcttgtcgactgcttttgttcgtttggttcagctgcgaataggaccgaaaatacgaaaggacaaaggatcggattttgccgaggaatttttcacaacggaggaaaataaattatttcggaatttgctgaaacgactgcgatcgtttgaagctgctgtttgcagccaatttcggcaagtcggaaatgaattgaacgtaaatgctacaagtacgagttcccaatttggacatttggagagatcgatggatgagctaagtgctagcgaagaaattaatgattttgttctggaagagaaattcattaaattggaggaagaattcgaaaaatcaaaaatg

SEQ ID NO: 102157 - DNA, 447 bp, Heterodera glycines
ttattaataaattgtttgaaaatcagaaatgaaaaaatgcaactttatttatattaatattaaagtgactaaaaatgaatgaaaatctgtttttatacttgttaatgtttacttaacctatattcttaactattataaatagcagttgaatttcttttttttcattaatcatcttttacaaaataattttgcaaatttcctctataaaattaattaatataaatctagattaattagaaaaatggtccttcttgctgaaaaaattgcacaaattttgaattgtcgaattaatgagctccgtgatcgtctaaatcatccatcggattgtgaaatagttgtgaaagcattctatggaaagcatattcaaacaacatacaaggacagaaatggatacaccaaaacttggtttttgggggtattactgcgcaaggagctgcaaccacaatg

SEQ ID NO: 102158 - DNA, 75 bp, Heterodera glycines
aaaaattggaatttgattggactaattaattgcccaattttcggtttaaggtttgaccggcggagtgggcaaatg

SEQ ID NO: 102159 - DNA, 197 bp, Heterodera glycines
atgatgcttttttgttgtttcctatttgtaaacgattccttaattttcacagatcctgcttcaacaacaattccatcgcttttctccatcgtttgcgtccaattttcgccgcctgtccaattaattaaaccattcgcgacgtctatacgaccaatgatcacacttttgagtccattttgcgcaacatttggccaatg

SEQ ID NO: 102160 - DNA, 1003 bp, Heterodera glycines
ttatttcaatttttatatgataattttgtttaatgaattaaaagttttaccactttcttcatgtttgctttaaattattttctcgcgcttcattcacttttttttgccattaaaatttgtgtccttttaattgggtatgtaacacgcgtttttgtgacgataattgctgttgtgtaatccaaactatgatatttctttttcttaaacaaaaaaattattatgattcataatttttatgttccctaaaaataataataattttttattttttaataaataaaaaaaattcatcccgatggaattgttgctgtttcgtcatgacgaatttgacaaattgtacggctgtgagggatttaatgcggacaaaatcccacttgaagaaagaacaaacattgtgaacggatgcattttgatcacactttttttcgtttttgaggtcttaaagagaatatattaagaattaatatctatttttttaaattaattagttaattttaaattaattaatagttaatttatttatattaattaatttaaaattaatttttttaaaataataaaaaaagcaaaaataagaaaaaaaaagaaaataataaaaaatcaaaaaaatatcattaaaaaatctaaacgcaatcgtggaaaaaaacctacgaataaaaatattttcagggggtgattgaattagggctgctctagagtaaaaatttgttatattcggatagcgagaccaaaagtaaagaaaattctcgaaacttaaaatatgaaaaattaagctactttacattccgtgtatggtatcaatttacaaaaacatgaaaaacaatgcctgctacaaattgatgttctttattggcatattggacatggtcattttttaattgaataaatgcaataatatttatcattccaatttaattgctttgtctgcttcatgaattctcatattttattaattatgtatttgtattttttaattaaatttccatagtcggccttgttcatg

SEQ ID NO: 102161 - DNA, 472 bp, Heterodera glycines
tttggggtcagcagatgatgagtgcagtgttactgtacctggacggtaacggtgcggcttcctcgtgccggtggcattcgatctgcgggccattgaaacaatgtgtttgcagagatggattattgtataatatgtgtatatgtgttcggtaacgcttaaaataaattttttgaaattacaaatggacaaagattaaataatgagaatgaattaagagggctgaatgaaaattcattcaaattaaagaaaaaaaaaattctgcttagaataggtaaatgatggtaattggaataaatgattttcagtctatgcattttcttcattcatttcctttcttttataatgctataatttcaatttttctcattgtttttctcccaaatttttgacattttgtgacacatttttctttataaaaggcattccatcgaccatttttcatcttattttttatcaccgtaatcacgccatg

SEQ ID NO: 102162 - DNA, 1003 bp, Heterodera glycines
gtttaaaaataaattaaattcttgcttcccagtaatattaaaattttaaaagacacaaaaacttgcttatatgataaaaaaccaaaaaattttttattaattcatttggttctcgggccttaaaattaatgatttggcagttttcactatagcatttacgattcattacagctagtttgatcaaacatataattttgtcacttttaaaaacaaaaaaaaatcaaaaatgcattatttttttaaaaatttcccatcggccattcaaaaaataaaagataattcacatttatatgttccgcttttttaacaaatagcagaaattttcaaagcttgccgctgatgaccccaaattgccttaattttttaaatcttgtccaagaatccaaaaattctaagatttaattattcgaatagtattctttatggtctaagttaattttcaattatttttcctgcaacttgttaattttatacataatttattgaacatttggtttgaatttttttttacttcgcacataaacatttggacatacttggtttaatttatttattttacatgtaaattcttgaaccccacacttaaacgacaatgtcataaagcatcaacattggatttttaaaaagttaaagctttatccttaattttcacctcaaaaaatcatttttaaacaatggtgttcttcttgtaattgtaagaaaaatttcgacggcatttctggtttaattgttttttttaaataagttttcaatgggtcatgaaattattattatttttcttgtgaattttaccaatctaagcgaactaattaaaaatcttaagggttaaatgttttagtagctaaatttctatttttttctcatgtgcaaagattaaaagggctaatgacagtgcaaattctctctaatactttgtgtacgcgcgaatggagacaattaaatggcagtgaaaaaaattgtttttaccaattatttacgaatgataatcactcagtaaaatatg

SEQ ID NO: 102163 - DNA, 1003 bp, Heterodera glycines
caaatttcagtggtgaagaaattaatgccttttgttgtttttaatatcgcacgaatttctttcataacaattttttgaaagaaactttcgtttcaaaaaaaactcattttttcattcggaaaaagcattatttttcggaaagacattctcaaataatataatagatatcggcaccgccggaatcttaaaatccttaattttcttaaaaaatgcctcaaattttcaaaaattggctatttttggacataatctgacactgtattgtattcaaatatcaattttttctcggcggcgcctatcggcaccgccggctccctcttcctccctggtcaccaaaaagttttttcaaaaaataagccgcaaaaaattgttaaaattaataaagggagtcaacaaataaattattaaaaaattttatttgaagcaatttgaaaaaatactgattttcgacccataaatgtgatttttttatttcaaatttctcctttataaatttttttatctattttttctttaataaaaggattttccttcaaatttgtgcattaaaaatatttttgttagtttttaattaaattttcgaattactcccgctcccgcccgggactcccgtaaaatttctgcgggattttaacgggagcgggattttcacgggattcccgatcccgctcccggaaaattttgaactcccgatcccgctcccgctcccggaaatttttttttaccggactctaataatagataattatgggtgtcaatttatgatactacacaaaaatacaattttaagggaaaaccccttgttttaattagtgatgtacattcgagagttggactcccaggatgagcgtgctctggttttattgagtgcgcctcgttcttgcgttcgtcttactaaagatgttcgggcatattaaaatttgaatttaggctaaaagttttgttgtggttgactaagaaattaatttcaatatcttaatgaaaacatcaaaatttaggaatg

SEQ ID NO: 102164 - DNA, 665 bp, Heterodera glycines
ctccactttttttagcccttttctcttttggcgtttcctatgctttgcacgtgaatttcctctgcattcgttgcaaaactctagcgagtgggcgagcaaatgcgctgcccacacaacaacaaatgtcggacgatggatggggcggggaggggcggagaaaccttcgcccaatgtgacttttggccgggggcggcccgtcctttctcatcaaatcgtccataaaatgagggggacacagtgaacccttctcattctcatccgcacctttttgtacggaaattgacctcagtttttgggtggttaactcttttcttgggacttcgattgactacgtggtgagaaagaaccagtccaaactctttgatcagatggacattttgtttgtttagcgctgcgctcaccgatttctcggcccaaaaattctccaaggccacttttgcaataattttgttagtttccccaggtaggaggggtcctcccccgtgccgtacacagctgacacatacatatgacaaccaaaacacaaacaaccacaacaacaaactctcctcagcccatccttgcgtatttaaggctgtttaaatctaaaattatcactttttatctgttcccatttcgagcctaaattattttgttctcatttaaaatcacaacagcctgaaatg

SEQ ID NO: 102165 - DNA, 88 bp, Heterodera glycines
aaaagaaatcattgtgttggcatattttggcgtccgacaaacattggcactgatttatgaacagcggcgagaaaatgttttaagcatg

SEQ ID NO: 102166 - DNA, 1003 bp, Heterodera glycines
ttttttgtctgttaatgtttttcggatttatgacgacgatatcagcaagcttttcgaatggatattaatcaactggtaaaatatgtaattaaactcattggtgcatttttgcgaatgtgaattttgctggttcattttcggttgctttgtaatttcaatttgccttcttatgctttttctttgttatgaccatagagcactcgcttctctttttctcgtaaaatttccttttcaagaacagaaaacgggtggaaagtcacttcattaggagacactttcgaaggcgcaatttgccatttcgaggagcgctgcctttaaccgtccatcattcacttctctttgtccattattcattttgcacattctgcggttggtaattccccccccccgcttttgaaaggatttgtgtgatcgataaatgaagggagaggtgagtgaggagcactttcgaccccgtccgatgggccctcccccgcccttttgccctgtgtacgcaaatacaattgaatggcgactgaggggactcgggtgggtgttgaggaagagaagaggattctgagaaaggaaagtcctttggatgttgaagaactctcattttctcctcctcaaaagcataataataatgtgtaacggcacgcacttttttgcccttcaatggatggacggactgtttttgcattttgctcctttctttttttgtgtgttatgaaaaaatcattttggtgcgatttgttgccctttgaagggccattcccactgaccattgttgttttattggatcattaattataataattaattgtctgacacccgtcaactttcaaatgaattggtttcctttctgtttccctttgccccaatctttcgtccatttattgtctcctcccccctaattactctttcttttgcattttaatgaaacggttaaaagggcatatgttcttcctttcatttagcagagggaacccctcgccaattgagtgcgttttttggcattgccatg

SEQ ID NO: 102167 - DNA, 502 bp, Heterodera glycines
ttttctcaaaaaaatgattcatgggtccttttattctcacagtaaactcaaattaagaaattaaaaatcaattaattaagaatttatttaaaaaagtagtgggtcttttatccgtgggtcttctgtcggcgtgggtcttttgtctgtgggtattttgcgagtgggtcttttgtctgtgggtcttctgcgttgacaccattggaagcactgggttcaaggtggaaaaacttaaaaatttttaggattttttaataattcttgaaaggcttattttatgagtggtctcgaaaattcaaaaccaaatataaatttaaaaaaagtacataattaattgattttattgtgtttcttaatcttatactaaattagaaatacattcatttcttattgttttttcatttttattcttttcttaaattaaaaaatatttttacttttcaattttaattatttttttaaatagcattgtaaataaaaaattatttagctgaatgattacatg

SEQ ID NO: 102168 - DNA, 269 bp, Heterodera glycines
  unsure (1)..(269): unsure at all n locations
aaaaatagtatttctggacttctcagaaatcagaatcagtctccaatgtgcancaaattgtaggccaccagccacagcccccttgcttctcccagttttaagtctcggatttgtcaaataaattcaagacttcaaattaataatcaaaaattctcttaaaatttttttgaacccaattcaaaaaaggaaaaaaatttgcagtcaaaaaattattcgaatttctccaattttgtttccataatttccgaaagttattcggtatcataatg

SEQ ID NO: 102169 - DNA, 386 bp, Heterodera glycines
tagtccaaaaccgtccgaaaatcggttttttctatttcggaaattatttacattaagagttctacattttcagttataaaggaacaatctgaccaatagaattgattatgcattaaacaaaacctgaaggtggtgagagagaaggaatagcgttccgtgctcatttcggcaacaaaaaaaaatgtattttgtgaataaattggcttaaaattgatacattaaactgcaaaataataagcaaaaaacaaatgaatgttatgtgaaacggttcggcgaaaattgaatccaattaatgaaagtacagataaatacaaagtttggtcccccgtaagacagtcatacttccaaaatccatcatttttcagaaaataacatgctctataatg

SEQ ID NO: 102170 - DNA, 203 bp, Heterodera glycines
aattttgacatttcacccattcatattgaaaaattccttgactgcccaatttgcatgtgctcctttgtgattggggagggggccacttctccattgttttcacattttccatacttcttgtattgtcccttggctgagaatcagccgtagctgccccgtttgtaaatttattttgccttgaataaatttttttcattgtaatg

SEQ ID NO: 102171 - DNA, 274 bp, Heterodera glycines
aacactaatggactaccgcgacttcggacaacaaagggaaaagggcgaccgcctgtctcctcacaatcgcacattttcaaagtcaacaacaacgacaactactgccttttttacgccttggaactgatgcgctactactcattatatatcaggggagtaatttcaaggaaacaatttagatggattaacaacaaccaaacaacggttttacgacaaaaagtgcagcaactgctccgcgaggcgggtatcccgacaactgaaccggaatacgatg

SEQ ID NO: 102172 - DNA, 151 bp, Heterodera glycines
tgctgtgggtcgacctttcttggtagcacttgccggagctaaattttttctattaataaatggttatcttttgctggtcttcataatacatttcatagagacaaatcctcaaaatttcattcacagcagggacgtccgcctcgtcgaaatg

SEQ ID NO: 102173 - DNA, 452 bp, Heterodera glycines
aaaattatcagagtgccgaaaatcgcatgtgatctaagcctaacaaaaaatggtgtaagtaaaaatcgtaattacgctcaaaaagctcctcaaacaattttagcgcttccaattccttctacaatcgcctttatacatcccattatgagcgctaaaattatcagagtgccgaaaatcgcatgtcatctaagcctagcaaaaaatggtgtaagtaaaaatcgtaattacgctcaaaaagctcctcaaacaattttagcgcttccaattccttctacaatcgcctttatacatcccattatgagcgctaaaattatcagagtgccgaaaatcgcatgtgatctaagcctagaaaaaaatggtgtaagtaaaatcgtaattacgctcaaaaagcttttcaaacaattttagcgcttccaattccttctacaatcgcctttatacatcccattatg

SEQ ID NO: 102174 - DNA, 650 bp, Heterodera glycines
gatcagttcagggggcctcagagatggtgatcgcttttggtaggtcattgttcattcctctttctgctagtcattccggtgcttaaataagcttcagctcactgtcgattatttaattttttaatcaaactttggttccggattaaataattgaacacactactagcttgaccaccaaatagcttcaataccgtataccctcccaatacaattcaggtacgaaaatgatggtgtgttcacacagcttcagctagcgcaaattcggaaaacctcactggccaaagttctgtgtacgaacggcgacgacattgaccgtattcaggtagtacaaaaagttgatactaccgtatctttcactgacttggcgacaataagtaggctcaacccgaaactggtgaataccatatcgagattttatttacaccgatgaatcatgcacttcatcataaaaaaaattctgagcccagggaatgctcctccggcagcgtcaaaaatgtaatggaaaattccttgaattttgaaaatcgtacccaagaaatctgcatttttttgcctagtgcggttctcaaaagctataaatttttttggactcaaagagaaacaatgggtcttcagttggccccttccgaaattcgtgctttctggttatg

SEQ ID NO: 102175 - DNA, 99 bp, Heterodera glycines
agagtctgatcaatgggaaataaaaaggaattcttattaatttttgaaaacctttgaatgttctgattaaatttaattgataacattttttcaggaatg

SEQ ID NO: 102176 - DNA, 396 bp, Heterodera glycines
  unsure (1)..(396): unsure at all n locations
atgttcgacaatcatttaatattgggtttttaatatatctctaatatttgaaaaagtctgcatctgtattttttttactacataggttcaatatcagcaaaacganaatntagaattaaatgtgccacaaatcacaaaatgcttattgctaaaaaactgctcaaattgatcatggacaatcaaaaatataacatttgaacattttaagcgtgttttgaatgaattttgtaaaaatgcggctttttgaccaaaaatgaggcttttgaaaattttaatctgggagccctgattaaaatgcttaacgattgaaaaatcccgggtcatacatatttcagcattttaatttgttacctcgggagtttggacccgagcggagcaaattgggcttatggcatg

SEQ ID NO: 102177 - DNA, 155 bp, Heterodera glycines
  unsure (1)..(155): unsure at all n locations
attaaaagaaaaaaaaanattttgggcatttcatcaccaagggccggcaattaataaatttcccgatgttaattatccaaactcatgcgagttaatcatttatgaaaatgtgaaaaacggtaaacaaataataattggaacaacatgaagagatg

SEQ ID NO: 102178 - DNA, 481 bp, Heterodera glycines
ttaattcttcattgactcctcatttccctcccgggaattaaataaaaatttgaattttctccaaatcgcaatatttttcttttttattttttctatcaccatatatcaattttttaataaaaaattataaaaaatataattttactgggatgccttctttgttattttttcattacatttttcgctgactctttttcaaataaaataattagagtagtgaggacccggtggtatcgacaggtaacacctaatttagaattcttattttttccttctctaagttgttttctaaaaaaagttaacaacaatacatactttatttattcaaaaataccatttatactttatgcccagaatttaaacgatgttaaaattaaattatttttaaaattaaaagaatttttccccaatcatattccgtctcattttcatctgtcagcgttcttcatcctcagcacgcgttgcatgctttggcacaatg

SEQ ID NO: 102179 - DNA, 125 bp, Heterodera glycines
agtgagtgggtagccatatttattatggactattgcatttaattttatttgtacattgactctaataaacctataattcgtcgtgacaatttcaaaattgcttttaggccgcacttcgcgcaatg

SEQ ID NO: 102180 - DNA, 756 bp, Heterodera glycines
ggtaaatttcgagttactggttcggtgcttttttggagttaggtaaataatttggacggacggcagaaaatgttttttccaatactattttaataattttctttctctgtttccactgtctgccttttgtaatggaatggaatggtagagaatgaaaaaggactatgcgtctctacacctcatgaaagggtcgaagtcgcttgggccgagtttttgaactataacttttttcgttgtcaactaaatcctacaatcttggtatcattcgatagctctaagtgtcctctattagcatgacaaatttcgaaaaatttcatttaggttcaaaaaagctatgacaaaaaatgttcgaataaccagttttttaatcttctgctcaacataacgaaatttttcgaaattttgcaggctaatagagaaatcataaatttcatatttttaaatggattaaaaaaatcaatgaggacgccacaaaaaaaataatgcaaattcaattgtgattaaattcattgctctcaattattttaattattatttatcaattaattatttgttgaatttttttaattctaccgaagatcagtttcacagattgattaagctagcttttatggcaatgctttctcaacattcattagaattttttttattaacaattctttcctaatggattttgccaacttaaaaaaattatttatcatttataacaaatatttttaaaaaatattaaaatataattattttttttaacagatg

SEQ ID NO: 102181 - DNA, 920 bp, Heterodera glycines
aaagattctctggaatttttaagggcacacggaaaagcgcctcagataccacaacacatctccacgttggagtcaaaagttttgggagttttctacaaaatcacacacgattgttgtaggagatggtcccctccattagatacgagggcaccagccaatggaagaacagtagaagaaattgaatgactagcaatagcaggattacaaaagatgcactgtaaaatgacaaaaaataaaaataaacaaaaagaatcacaaagacaatcatttttggcacaaaagaataaatcaataacccaatttttaattggttgttaattaaaaaatatcgcatattacactttaaataggaccaaagagatatgaatagatgacgttacaactcagtgccacgcgatgcccgaaaaaccctttaggtcaattcgactcaaagccatcccaaactattgtttttggaccagcgcaacgatcgtccgtcacccaccccccaactccccacaatccaaacctagacttttacaattgtaataacccgattatactccaaagaggacgataccaaatcactccccagcaaacacgaaagggagttgtatgctatatttgcaactaaccaggtcatatatcgcatgaatgtcaaagagtgatcgctacagcgagacgtaaacaccgtagcagataggagtaggcaacaatttgctacgggagcaaataacatttcactgcgaaacaatgcatacaatcagcgaaatgccataagaacatatccggctgtaaaatcccaaaatttcctcaaacaaaattgcatagtgatgcaagaggacaaaccccccgatgcattttgccgaggagtgaaattgacatccgaaatttcgagtttcatcgaaaatgaacttggtgaagcaacgcagactgaaatg

SEQ ID NO: 102182 - DNA, 374 bp, Heterodera glycines
aggtagtgcatgacaaggtgaagcttactctttgatggtcccactcaaaaagtcggggaatgatggtgttgcaaaagtgccatttttgcattgatggaggaaaatatacgaattattagcgttttcggatgtacaaaaaatgggtgacgaatttatgattttgttagacgggtttcttacaattttcgaccaaaaaaacaaatcgtggtaaaacatggaatcaaagtcagacattactactgtaaaaaattctaagagcgaaagtaaaaaatgtaaactttttcggaagttgtatgtttagcactcacacttaagcactttttttactcgttgagaatgtcgtgcaaaaccatcattttcagacttttttcatg

SEQ ID NO: 102183 - DNA, 1003 bp, Heterodera glycines
ttctaacaattttgtacctcttctgatcacagttgtacctcttctgatcactcttctaatcactgttgcacctcttctaatcactgttatacctcttctaatcactgttgtacctcttctaatcacttttgtagggcgcgaagcgcacgtccgatctcaacaagtttaaaaaacgggcgcgaagcgcccgtctgaggccgcgaagcggccgaaaaggcccaaataaatttaaaaacgggcgcgaagcgcccgtctgagctcaacaaatttaaaaaacgggcgcgaagcgcccgtccgatctcaacaagtttaaaaaacgggcgcgaagcgcccgtctgagctcaacaaatttaaaaaacgggcgcgaagcgcccgttagagcaaaacaagatttgaaaaacgggcgcgaagcgcccgtactatgccgcgaagcgggcgaaaaggcccaacaaaatttaaaaacgggcgcgaggcgcccgtccgctctcaacaaatttaaaaaacgggcgcgaagcgcccgtcaaagcaaaacaaaatatgaaaaacgggcgcgaagcgcacgtccgatctcaacaagtttaaaaaacgggcgcgaagcgcccgtctgaggccgcgaagcggccgaaaaggcccaaccaaatttaaaaacgggcgcgaagcgcccgtcaaagcaaaacaaaatatgaaaaacgggggcaaagcgcccgttcgaggccgcgaagcggcctaaaaatcccagataatcttttaaaattccaaatatcttcataataataatttatttacttttattaaagaactcctatattttttaaattagaatttgtaatattaatttcttaatttcaatttaaataaatattcaatccctgtacatttcaaactctctttttaattaataaaaggaaatttattttatttttaaaaatttattaattacattcaatttttaatcttactttttaataaacgatttccttaattatttaattttaaaaccatg

SEQ ID NO: 102184 - DNA, 386 bp, Heterodera glycines
ttatagagcatgttattttctgaaaaatgatggattttggaagtatgactgtcttacgggggaccaaactttgtatttatctgtactttcattaattggattcaattttcgccgaaccgtttcacataacattcatttgttttttgcttattattttgcagtttaatgtatcaattttaagccaatttattcacaaaatacatttttttttgttgccgaaatgagcacggaacgctattccttctctctcaccaccttcaggttttgtttaatgcataatcaattctattggtcagattgttcctttataactgaaaatgtagaactcttaatgtaaataatttccgaaatagaaaaaaccgattttcggacggttttggactatg

SEQ ID NO: 102185 - DNA, 160 bp, Heterodera glycines
aggaaaaagactatttacctaatacatatttgaataaagagcattgtttcaatttctcaatcatattgcttttttgttgtaattttgtctaattttgatacctccaaaaatttgttagcctgaacaactgactgccatttaacatttgaagcagtgaatg

SEQ ID NO: 102186 - DNA, 145 bp, Heterodera glycines
agtgcgcattcgaggattgaatgacgagccacgacggtcaagaagcgattttcgaagacgagtaacgaaaacgcgatcatcgtcacatgggaaaccgccggtcctccaacggcatttggctaccagtgaagcgacagaaacaatg

SEQ ID NO: 102187 - DNA, 166 bp, Heterodera glycines
atttgttatttatgcttaagcgcctttatttattatcggccaaattaaaaaaaacaaacatttatgattgttttgtttttatttcttggaagtttcgttttcactttttatttcccataaatggtgcaattgcaattttatttttcgtattttaagcaaaaaaatg

SEQ ID NO: 102188 - DNA, 276 bp, Heterodera glycines
tccctttttatagagaatttttacacggaaattgaggggtaggaaaatatttgtataaaaggggcgatttaagggtagaaacaatcattcttcatttgtcctttactgacataataagcgtctgtctccttcttcattttgttccccttttgactgcacttcagcaacaatgctcatcagagaatagtgagttgcttttcatcatcatcattcttctgacacctccttaattacgttaattaattacgctttccttttttcagtcgcatcgtcatg

SEQ ID NO: 102189 - DNA, 277 bp, Heterodera glycines
aattcaaaacagaaagacggagagatatttgttctcccattcgaatttcgaacccaacccacactttaggcatttatggccctaaaataagtctagttataagcatcctgaacagctttattgcttttttgaagggtgtggcatcaaaatggaaaagtaccgaaaatagatcaaagtatggacaggaatttaacgaccccaaaaagaatggcgagggcattttcggaaagattttaatttaaaaatttaacagagaggaaattaagtgccaataatg

SEQ ID NO: 102190 - DNA, 198 bp, Heterodera glycines
tgtcaaaaaatcggttcaaattctcgaaataccttaaagcaattatttgttcggtcaaaaagcgaaaacccaattattttcaaagcaagctaaaaacactatttatttgattttctaaataaatatttgaaacccaataagcccgcgctaaaattatatcgtcaaaatcctaatctccatttttgtttattacgtatg

SEQ ID NO: 102191 - DNA, 139 bp, Heterodera glycines
ataaaaatgtttgttttttcgattgcctcgcatttgaaacaaagtaaattttctaacgcaataattctgcaattattcttccctttgtgacgacatcattcggaactcggccaaattgtgctaattgctgccaaaaatg

SEQ ID NO: 102192 - DNA, 58 bp, Heterodera glycines
aattgcaaacggaaataatggaacgcaatttgagcagacgctagccgaaagagaaatg

SEQ ID NO: 102193 - DNA, 1003 bp, Heterodera glycines
tttccggcactttttcagcctgaaaagggcaagcacgccgctaattctattttccttcccatttctgaatttttacatcggttctgaccctttttgagcagttttgagtttgtgacctaaagcaatattttccatattttctgatttctatgctaaaagaaaaaaattccttcaaaatttcaaatatggattcataaaactcggaaatttgactttttatagcttttctggcaaaaattctacaatctgtgataaaaaaaaatataaaaaacaaatttaataaattgctgtcataataattcaaatgaatttggaattttttaaatttataactgcagcaattaatacttgttttatttttgcccttttttcggcgccactttcttagttaattattttttctcttattttctctctctcactctctcttttctgttcacctaattcattttaaatccttcttactcttatatttcattgtctctgtctctcttctctctctcacgctctttctttctcttccctttcacttggctcattggcctctctgagtctctctcactatatcgctgcatcctcagccaatcgacacaaaacggcgcggtcccatcgcatcatttgccttgccctcttctcgcctcactcggtgctaggtcgtttcctaaaaaccgccaccatgggcgtttcctaaaaaccgccaagtgggcgtttcctaaaaaccgccaccatgggcgttttctaaaacccgccaagtgggcttttcctaaaaaccgcaaccatgggcgtttcctaaaactgcaaagcaaaaatttcgaaaatatatctttcctttttaataaaatttttatgtcagttgtttgccaacgttataattaatataaatcttaataatattttacgccatttatttgccaacactatcatcattgtcaagcgcaataaaattaaaatattaatatatttattgctacttataaattctaactaataaaatttataaatg

SEQ ID NO: 102194 - DNA, 160 bp, Heterodera glycines
tcgaggaagacttcaccaagtgttgggcacaaacaaaaacacttaaaggttgttataagtgtcagtcgggagcccaattgaagcttagatgttggacggaatacggttcagcattgtcagatgtctactgtgttgatggaacacgtttcacggtaccatg

SEQ ID NO: 102195 - DNA, 198 bp, Heterodera glycines
ggttttgcttttgtttggcatttcaaatatccgatttagagtaaacacttattgctaggtaacttattttattttttaagcgtggaaggaaaaaacaaaaaatgagtaacaataaattgtaaggtgaaaatgcattattttttagtggtctgaatatttgaacatttggtgctttccaaaaaataggaactcggtatg

SEQ ID NO: 102196 - DNA, 171 bp, Heterodera glycines
cagcctctgggaggtagatcaggtaacaggagaaacgaaaatcctcaaagtaaaagactttgatattgagccacggctcccagggatattcgaaattgaaaggcactcatttcaccaaatggctttgttcaacgtctctgacctgaaacacatgcttttctaagcggtatg

SEQ ID NO: 102197 - DNA, 1003 bp, Heterodera glycines
taccaactaattattatgatatagtaaatcaccatcgcctacaaatgcaatttgcagcttctactcaaaaaataggcgtataaaacggagaaaaacctcaaactttgattaaaaataatttttcgataattgttttcatcaaaatagataagaatatacataaattcattaactcccgcgggataaatgaaaaataatttttttaaattttataattataaatatacaaatttaaacaaacaaattttgtttatcgcaaaaaattgttattttaaaatttattaagtcaactcttttttgtttatgaagctgcaattaacaagcagttaaatgttcgcctgtttctccccaatcgagtactaatgagatgattgaaaagtgaatgtcattttcggacgctttaatttgttcatggtaaatgaaattgttttgaaattcggattaaaagattttttattaaattattagaaaattttccagaagaattttgagaaaattcgcaatttcgcgttttttggaatttcgcgtttcgcatttaattttatttcgcatttttgctttctcaaaattggcgtttcgcattttattaagaatccttgaaagaaaaaaatttggcgattcatcaattcgagaaaatgtaattaacttttttcgcctagtcaaattttataactcatatataatcaattgctcttatgaaattcaattttcattgaaaaaaattaagcaccaaaaaaattggtcaacttttttaacatttgttagcacagcttaacaatgacttaattgaaattcggcggaaactcttctccaccatttgaatgaacgtggatttaaactgcaaaaaggtgaacaaattttaattagataaagtgcataattatcggtctctatccgaaaattagtgcattatttaatggcaaaactcgccaacaaattcattcaaaatttttttaatttttaaaattattttctaatcattaatatttaattcctaattatg

SEQ ID NO: 102198 - DNA, 683 bp, Heterodera glycines
aaaatgaaaaaaaataattaaaaaaaaaataattgctggtgtgggtaagggggaaggactgtgtttcctccaggcaaaaaatttttaagaaaatttaataagcatttgtagggtttttcagcagtttcccctgcaaaatttggtgagcttctgatcagtctagaacgttgtgtgataaaatgaaaaaaataatttaaaaaaaataatgctggtgtggtaagtgtgaagaactgtgttcctccaggcaaaaaattctaagaaaatttataagcatttgtagggttctcagcagtttccctgcaaaatttggtgagcttctgatcagtctagaacgttgtgtgataaaatgaaaaaaataatttaaaaaaaataatgctggtgtggtaagtgtgaagaactgtgttcctccaggcaaaaaattctaagaaaatttataagcatttgaagggttctcagcagtttccctgcaaaatttggtgagcttctgatcagtctagaacgttgggtgataaaatgaaaaaaataattaaaaaaaaataatgctggtgtggtaagtgtgaagaactgtgttcctccaggcaaaaaattctaagaaaatttataagcatttgtagggttctcagcagtttccctgcaaaatttggtgagcttctgatcagtctagaacgttgggtgataaaatg

SEQ ID NO: 102199 - DNA, 311 bp, Heterodera glycines
agtcggaccagggaaattttttcttttctcgcagatggtttttggcgccgcaacacatcggttggtcgatggcatttccgaacacttttgagttttaaagggtcaacggcccgcaagagagagggggggggggttctaatccagtaaatacggtaatcaattttcaattgtgaattcattttcctttttgccccccccctttttaattggttttctttcccccttcatcagacccaaaagaggcggttcaaattcacgcattggtcaagtcgaagaagagcattgccgttcattggggcacttttgagatg

SEQ ID NO: 102200 - DNA, 834 bp, Heterodera glycines
  unsure (1)..(834): unsure at all n locations
ggcccgcatggggcaggctcccgtgtcggtccagttttgccggatcgaaaatgggcgcccgacaaaggcacaccacgcgccccctccgtcggtttacctgttgtcaaaagagctcacgtctgaaacggggatggcctgcacccgccaagtgttgttagaattgtcggcgaacaccaccaagcaaatgctgacattctccaggcccaattcattttgcaattggaaaaaatgttcattccatggcggagtcacatcgcttttggggaacaaaattatccttgcatttggatggatctaattaaatttttttatcagtttgttccaaacctttaggttccttatttcgtcttgtgataaattctatgacttttacagtagcgcncgctttttcttttttttgaaaaggacgaactttcaattcgttttcttttgagcccaaaattgaatcgctttgttcaaagagtttatctttcgtgaggtatgcatgtagttatttaacattattataaagtttggattttaagattttccttattttcatgagcttcacatggcgtgaaatggtacgaaaataaagtatttttggtcctatttctcttttttcctttctttttttagtagactccaaattgtactattttagacagcttaggtcctcaaaattcccagtcctttttacctacaatatgcggggaaataatgcaaattgcacttcttatatacctacgcattaaaagaaattttttccatttttccggtgtttttggttcaaaaatgagtatataagccgacttttttgctccctctcagcataatttccgtgtccaaataatg

SEQ ID NO: 102201 - DNA, 394 bp, Heterodera glycines
ttaccttcctctgcggacggatgaatcatttaaaacatgccaatccaatcaatgcctttccttttccttttcccttttcttttgcctttcccttttctctttcccccaatccgtcgccattgaataattaattaattgcgttacctaattcactcgtttttgtttgcacaaatatttgggtaataatagaacctatttaatttgtaatgcccacacattcccttgcttttgccattaatcggctaaatttgcgaaatgagacagaacaaaagtgagtgtggcacaatgtaattaattaattaattaatttcacacatattattcattctcgtcctaattaattcagttttccgcttaatctctgccgtcccttcgcttctcctccccccaaatg

SEQ ID NO: 102202 - DNA, 95 bp, Heterodera glycines
ggcccctttttttccccattttgaaaataagttttgtttttgtcaccccccccccccccgggggggggggggatgagaatggtgcagcccaaatg

SEQ ID NO: 102203 - DNA, 708 bp, Heterodera glycines
aaaagtaccgacattttttgatgttcctaagcaattcgttgactttatcaaatatttgttaattgctttttaaacaaattcaaaaaaaaaaatcaaggtccaggccatgacaagcctggatttttatccaggaaatccaggtccaacattgaagccaggttcattgtcaggctttttttcaaaatgtctagttctactcaaaaaaaacacaacaaatgtacatactgttatcaaagggactgattaatccggttaatttttaactgattatttattggaacgaaatcacgaaattattgtaaatgacacgtcattcattcagtccaaggcaaaaaaaaaaatggggtggtgtgaatttttgatggtccatctcgaatacaaaactgttcaaaaatgaaattctaaacgcaaaaactagcatttttactagtgctaattacctaaattagcaattttagtagtattaattagctaattatcctaatccatcccctcaaattaggtgatccacatggtttgcattggtgcaaagagttcgtcaacaaccgctgggaccaacacaaccccgtcacgggaaaacaatgcgggcgccccaaccgcaaatgccgcgaccagtgaagggcttcgccaccgtggcaccaacaagtgcggaatttaagacatggaaaaaaaatttctggtgaaacttaaccctgtggtcccaaaatg

SEQ ID NO: 102204 - DNA, 1003 bp, Heterodera glycines
ctcctcttttctctttctctctctcttctttctatctctctcctcttcactccctcctcttttctctcccttctctcctctctttctttctctccctcctcttttctatctctctcctcttcactccctcctcttttctttctctctctctctcacctctctttctttctccctcctcctctctttctctctctcttcctctctctctatttctctctctctctctctccctcctctatctctctcctcttctctccctcctcttttctctctctctcctcctctctttctttctctctcctctttctatccctcctctcttcctctctctcctctctctcacctctctctcttcctccctctcctctttttctctctctctctctccctcctcttttctctccctcctcttttctctctctctcctctcttctttctctctctctctcctcttcactccctctctcctcttctctcccttctctcctctctttctttctccccctcctctttttctctctctcctcttcctctctctcctcttttctttctctctctcctcttctccctttctttctctttctccctcttctgtttctctctcctcgattttatgtgctcgctcataacacaaaaaagacgtaaacaacaaacagaaaagaaaagaaaaaaagactgaactattttccaaaaggaattcgtttcgataaattgtttacttttaaatgtattagttacagcgcaaaattaggttcatttctcgtttttagttatacagaaatttaaatttttcttttggcacgataactttaataaatattatactatactctcattcattagttgttcattcgcagtactaaccgaaatatagattcacactttttctttatttatttcgaacatttttgaaatttattagctacatacctaattcgtaataattttcttttcattaggtacttttctgaattctcttcgcttttctttatctgtaaaaatg

SEQ ID NO: 102205 - DNA, 506 bp, Heterodera glycines
  unsure (1)..(506): unsure at all n locations
attaaggcctttatgcgcatctntacccttaaaataatagaagcgagtgaaagacagtctcactataaatatgtgcttattttaaaattatgaatacgtcttttgaaaaatgcaagtatattgtaattggtgagtaattttcaaaattattagctaatcaagaaaggacaaaaattgtcctcaattagtgaaaagaaaaaattcctatttttactccgcagtattcaaagtcaaacagctgcagacagaaaaagtataactacttttaaatgaaaataattaagagatgaaaattttaaaataatttagtagtatccgctagtcaaatctattttacaataaactcattattttgagcaggagggagtccgagatagaattacacaaaatatgtgaatatgttcttgtgtttaattaaggcctttatgcgcatcttttaaccctttaataatagaagcgagttgaaaacagtctcactataaatatgtgcttattttaaaattatg

SEQ ID NO: 102206 - DNA, 86 bp, Heterodera glycines
tgtttattgatgtcgaacttttgttttttaaatgatttgtgatttaaaactgaattgaaaatcatttcagaataaattttcagatg

SEQ ID NO: 102207 - DNA, 118 bp, Heterodera glycines
ggttagtcaaaaaattaaaaatcggattttttcgaggtcactggtaaattgtttaagcactcgaaaggtgattcgtcgatggatttcattcgttgcgaagaaaaagcagcaaagaatg

SEQ ID NO: 102208 - DNA, 236 bp, Heterodera glycines
ccatcaaacgtacaacttacaaggtatcgggccgcatttgcataatttccattgccaatgacacggaaaaattcgtaatcggccaccagtttgagctcacatcgattgccttttatttctttaaggggagaatggcattcaaaaaacggcaaaataagtataattggcacggcagcacaccttttaacgacgcattcaatggacaccaccaaatggaaaacagcaaaaaaaggatg

SEQ ID NO: 102209 - DNA, 471 bp, Heterodera glycines
aaattattttcatttcaaaaaaacaaaaaataaattttataaatttttcgaggaataatgagtagggctttcaaaaatatgcacgaaaaatggctaaaatatgcggtgaaatatgcacaaaaatcgcaaaatatgcaccaaatatgcacaaaaaactaaattagggatggaaattaattaaaaaattttattccttataaaataagttgtttttgcaatttcaactcaaaaaatttctcaagattttcggcagtgaagctcatcgcgcacccattcagtttggatttaattttaggcataatcaaaattttttccgaagagatattcaaatcggaaaatatttgacgaaaaatggcaaaatatgcaaaaaaaacaaaatatgcaaatataagtcccgatttttgttcggaaacacaaaaaagaaagtgtttttcgtactatttagagcatggaaagccaggaaaaaaaatg

SEQ ID NO: 102210 - DNA, 378 bp, Heterodera glycines
ttgtgacatttccaaatgtttctttttcctccccaaccttttcttttttctatccttcatcaatcggagcaatcattgatcgcatcgcacacaattttcatttaagtcacacgaattgaatgtgatgataattaaattgctaaatattaccgaaatctaagaactgaataacaaatcgcccctcccccattcattcgtaattttgatcttcactcaactttccccaattattgcattttctcggctttcatcttttcaccccgataaatgttgctgttggatgattgtgactaaatttacaaaaaatctttacaaattttaaagtttgcgtgataagaacatttgctttatgtgatggtgagtcatgactggcaaatg

SEQ ID NO: 102211 - DNA, 452 bp, Heterodera glycines
  unsure (1)..(452): unsure at all n locations
tttgtctaatcagaacgactgtganaaaccataaattaaactgaacagtttctggttcggctcatttctttgtaaccacacaacgggtggaaaaccagaaattaaattgaacagtttctggtttggctcaccacttcccctttgtctactcagaacaactgtggaaaatcagaaattaaactgatttacatggttccgatcgcagatgtatcatattggtaactttatggttgtttttctggtcatgtttctggttttgctcttttcttttgtctaatcataacgactgtggaaaccagaaattaaactgaacagtttctggttcggctcatttctttgttaaccacaacaacggtggaaaaccagaaattaaactgaacagtttctggtttggctcatttcttttgtctaatcagaacaactgtggaaaaccagaaattaaactgaacatg

SEQ ID NO: 102212 - DNA, 368 bp, Heterodera glycines
taaataatttttataaattctaaaaattagacaaaaaaaattggtggctttaaaatcgggaatgatcagagtatcgcaatgtggttggtaatgaaacagaagagctgctgcatacacttcaacagatcgatcctcagctcggctgcgctaatggccattcaaaaatgtccaaatcgatgaccgtttcatcgatttctttgcgaaaagcggcttttgaaatttaacccataagccacgcattctcatttaattacgaaagtggaacaaattctttatcaaactttgtataagcggcgcccaatcactccttttttattacagaatttattggttattaaaatttacaggatttgatttgaaaaagaatg

SEQ ID NO: 102213 - DNA, 681 bp, Heterodera glycines
acaaataaaaaaaataaataaattctgtaaaaatgccatgatagagtaatcgcaaaatatacatatacctactcatgttagacaaaaagtctaaattatgagcgaactcggactcgtaaaaggaaacccataaatcatagagaattatattcaagtaaacgaaaacattatgccacaaatgaacattataacaaaactttatggcaaaaatcaaattctttgcattttgcaaattcattttgctttacaaatttaggaataccgaatgtaccgaatccttttcaagcttttcccggaatttattctggtcagcagttgcgtaaaaatatatgtactttacattttcaaatgccaataaatgtatacagattataggaattcaaattttatattggtcatttaaaaatgtatgtgaaaagtgtccattaaaggaaataaaataaatgtaccccggatttagaacccgaaaaagcgggattttaatcctgaactatgaccggttcatcctacatccaaaactccgtgctcaactgattagaaccaaaataaaaatcaattcgctgcattttttgctttccgcgaaatttcttattttaaatttaaaattaagtttcagctagctattatcagtgccttttgaatttttcattttgtcaccattttgttgcctttttcacaatg

SEQ ID NO: 102214 - DNA, 213 bp, Heterodera glycines
tgacagggcatttgagcagctggccgcaaaatacgcttacgagaaccatgcagggagaaaaatgaaagtcagatgttcatggatttcacttttatatccggaaaagtggtgccacgcctactccaaactttgcccaggaggcacgcccactctcaaccaacatttttcatctggccaaaactcaaattcatttcgccaattttttccaaaatg

SEQ ID NO: 102215 - DNA, 85 bp, Heterodera glycines
  unsure (1)..(85): unsure at all n locations
ctcgcgcaaaatcaaaaattggaacgttcaattgaagaaattgaggacacattggaccgtgaacgtcgtcaacnggttggacatg

SEQ ID NO: 102216 - DNA, 113 bp, Heterodera glycines
ggttcgttttaaaaaaaaaaacctaacatttttttagcccgcttttcaatctgccattttaaaagtgccacaaataaaatttttttttttttgtaggaatatcggcacaaatg

SEQ ID NO: 102217 - DNA, 88 bp, Heterodera glycines
tcacatgaatttgaatggatatgctggcaaaaaacaatataatttctataatatttttgtttatatatttgttatattatcagcaatg

SEQ ID NO: 102218 - DNA, 257 bp, Heterodera glycines
  unsure (1)..(257): unsure at all n locations
tttctttttttatatgtctaattcagaaaaccaaagtttcgtcgaatggcaataattcatttctattntatattaccattccttagtgtttgaattttcctntaaacaatcatntaaatctgtctttctctaaaaaacataaacaaatctttactaatttttaaattactttgttcaatccttttaaatacttttctagctaaatatcaaaagttttaaaatttcccgacaagaaaattcaaattttcttgaaaatg

SEQ ID NO: 102219 - DNA, 1003 bp, Heterodera glycines
ttgtcaccaacgacttcttcgaaacgcagcaacgaggttgtgtttcgtccgtttctacttccttccaccttgcccatgctcggcttttgcttcccttcaggcgaattacgttacgccgattcgccgtctccgattcccttttaccctcgtcccattccaaccgataaagtgccaaaatttccattttcaaagttttgccaatgaatgggtaaatgctgcaggactctgaccgaatgttgtatttgtacgcctccgattacacgctgaattcgatgctttaccatgcctatcaaatggaacggctgaccattcgagtaaattttaaaaaatcaatcaaaaattgatggcccaatttgtcaaggtcaacgaggcatcgttgccccaaatgtaccggggatttgtgcggtgaatttggccaattattcgggcaaagtaaatgtaaacttaagcacaacatgccccgacattgagcaggtcaatggagactttctgcaggtgcaaaaatgaaaggattaataacttaattattgaaagtgattaaatggtccgtttaagtccatttgcgttggcaaattgatcccggccatggccaaacacttccccaactccaccaccaaatttgtgatgcttccccacgaactgcccgaaatgcattttcataatggacgcagcacaatggacttgaacggttggttgggtatcttatggccttgcatttgcttttggtatttcgtttttctttggcattattttttcggcatttccttggcattattcctcccttctccccgttggccattgatcagctcgcattttgacccttgtctcggacaatgccacccgtcgagatcggcaaattctcgtttcatctgccgaaggaatggcggacattcgactgaatgccgtcgacaggaaaattgccggagacctcaaattgcgcaaattgaacattcggctgcaccgctccgcgattcccattgagccggaagtgatctcacagatg

SEQ ID NO: 102220 - DNA, 110 bp, Heterodera glycines; identical to SEQ ID NO: 98226

SEQ ID NO: 102221 - DNA, 203 bp, Heterodera glycines
ttttcaaattccgaatgtgtcatccgatcgatcaacaatttcagagaggtgatctgtcatattttcttttattattattatttttatttactaattttgtttagacatttctccgtgccactgcttcggtcggctacaaaattcgtattgtcattcgctctgtcagttaccatattcaactttttattcatgtggaaccaatg

SEQ ID NO: 102222 - DNA, 105 bp, Heterodera glycines
aaatttttatcaaatttaatgaaaaattgggcaccagccaagcaaatcattagctaattacccaggtctaatgagcatataaaagagcattttgtgcaaaaaatg

SEQ ID NO: 102223 - DNA, 59 bp, Heterodera glycines
tattgccatttgttgttttatcttaaaaaaaatccattaaacaaaaattcagcaaaatg

SEQ ID NO: 102224 - DNA, 356 bp, Heterodera glycines
taagcggatgaacgaattggcaccgctttccagcagtacgacgccacggcggaagcagtgtttgagttgcagcaaagggtaaatgctcagcagagagatgtacggcttggaaaggcgcgtgccggcgccctcaacgcactgctccaacttaatccatctgaccgtgccatattagagtgcttttccatgctggataatgccgaccggtgcgtctgttgccaaaagagcgtttgctgaacatttgccagtgccattggactggccgccgtttcggcacttccttcgccactttcgacgactcgttcagccaattccgtgttcaggtaaagcatttcgcagaagagggcattccgatg

SEQ ID NO: 102225 - DNA, 287 bp, Heterodera glycines
cctgtttgacattttggagaaattgaagaagaaaaggggcgaagaattcgcgaagaaactgccacaaatgcgaagggactgttccgatatcgcagagttagaggtttggcgcacaaccaaaaacgtgctggggcaaatgcgctgacactgaaatccgtcaatcctgcgatttccgtttcccaaatactcaaaaagtttgcggtttcttattctaaattattaaactctttaaaaatgcaaacttttgcattgtgttgcttttttacagagtccccagccgttcgatg

SEQ ID NO: 102226 - DNA, 885 bp, Heterodera glycines
tttagttcggatattcttcgttataacgccactattcatcactaggaatcactattttggagttttgccactaaaaaaactttttcggaagttggccactaaaatagttttttgccactattttggcgtttcgtcactatttttgccactattttggcatttttttgaaaatttcacaaaaaaaaattcttcggattaggtacagaatttttattttctccttcaataaaaattaggtagtatgtggcgccgtaggggaaaattttgaatttttagcagattggtttttgcgggttttccccaaaaaaacaaaaagtctcagacttattttgaacacggcctcaccaaaaccacaaaataagacaaaatcctcgcattaggtatccctgcgtattagtgtgtttttcgaattaaaaagaaatagaatttttaaaaaatttacgaaatatacaaaatttatatgtacctaaataggtattatattttaattttagaagtcaattgagttatttctcatatgtattcttattcgtaattattgaagaacgctctctggaaaacatcattgtaattaattgaagaaacgctcgtttgaaaacaccagtgaaaatgacgtaattttgtcactttcaaaaatagtttggctctattgcagttatctgaacaatttacacgactataaaataacaaatttaaagcataacttttctagaagtatccaaattagtattcttgatattatttaatgctctaagagttttttattagcctacaaaatctcaacaaatttttatccaatagttgattcacgcaaactttagctacaacgaatccaatgacttcaaggagtattcaagttttttacgctttttttcttcgagaatg

SEQ ID NO: 102227 - DNA, 176 bp, Heterodera glycines
  unsure (1)..(176): unsure at all n locations
gttttaagtcttggatttgtcaaataaattcaagacttcaaattanataatcaaaaattctcttaaaatttttttgactcaatttcaaaaaaggaaaaaaatttgcagtcaaaaaattattcgaatttctccaattttgtttccataatttccgaaagttattcggtatcataatg

SEQ ID NO: 102228 - DNA, 370 bp, Heterodera glycines
tattttttaaaatttattttaccccaatttgtagcctgcggcgtgtccccagtgggccgtggcggaggatggcaattccttcagctggcaatgaatgaccaacggtgcacgaatgtaattttggcagtatttaaaatatttgcattcattttgcctctgtttccccatttttttgccaatgttttttttttgcaattctttcccctcgggatttgctaagtcttgtgattgggtattgggtataagaggttttttgaaaaattggcatcggcttggcaaaagtcgggattagtgggatcccggatacttttggtcgtccaactcaatcattagtgaatttattttgaaaatgattaagaattttaacatg

SEQ ID NO: 102229 - DNA, 213 bp, Heterodera glycines
attgtctattttcttttattattcctgtgattttttaattggtaaatttatataaattatgctttctttattttatttttttcatccgtcccattcatggcacatttctccacaacaattattgctttttcaattattttttgctttttatgtaaaattttgccatttattttattgtactcttctttttttgtgtgctattgatttcaaatg

SEQ ID NO: 102230 - DNA, 1003 bp, Heterodera glycines
aaaaaggaataattaagatctagatgagtttatattttcaaattctgttcgttttgtggcgccgaaaattgaaaatttaattcgatttttgttaacagacttttcaacaaaatttccaattttattgttttcctaaatggtttccgcttcatttccataactttattgagaaatcattatatattttaaatttaataatctattctttacaaaatgtctttaaatgtaaatcataagtattctgtgcttctcaggtttcccttcgccgcgaccctttcacaatgatcaattgtttccgtgtgatcactactagggcttatatttatagttgctaaaagctgccaaaatattagtttttagtttctaaaagacccccaaaatagttgctaaaaatgggtaaatatagttgctaaaaactttcaaaattatggatgtaaaacaggggtgcgatcgaaaaattttcaaaataagaacaccaaggcaaaaaaataagatttttggatcaaaaataagaacattttgcgaaattgcttcaaaacaattatttttcaattttttcgatcaaaaatgtattaaatactatatttttagtctcccattattggttttaacaattttggggaggaaataagcaaatcataaatttcagtgcattccggatcaaaaactcagttttttaacatttttttttgcggcgtttttttccaaaaaaaaattggtgaatgggcgaggggatagtgtccggcggtgaaatttttgtaaaattttgggtctgacaatgagtcgttcgttagtgctttatgagcgatccccctcccccccccccaaaaaaaaagaaataaattgggctcaaattagccaattctattaaaaaaatttcctatcaacggcgcgccgtagctaaagtttttcgaatgatttgacggcgccgtcatcggaaattttttcatttaaaaattaaataatttcctctttttgcaggcccgtctgaagaccatcaatg

SEQ ID NO: 102231 - DNA, 123 bp, Heterodera glycines
ggttggcggtcgcggcaaaaagtgtggcgaccaaacgccccgtcaaaagttcgcattttgctcgattttttccgtgccacgcgcggcgcaaccgccaacgatggcaaatcgtccacgacaatg

SEQ ID NO: 102232 - DNA, 1003 bp, Heterodera glycines
tcccccaatttcacaaccaaatttcatttggcaattttgccgtttctctccccgcccccccccatttgcctttaactgtgatggccccccaattttgatcattctttgaaccccccgattgttgatctttgatctatggcccggtgccctccatttctgtttctcccggtcccattcattgatttctgtgatttcccatttgccccagtaccgaatgcttcctttctgaaaattttcctgtcccatcccggtccccaattcatttgtgattaatcccccggtgatggcattttatctgtgatcaattttgtgatattttgttcaccatttttaaatttttgtttaattacccaagtttgaggcttttttcccggaataaattttgcttaatcaattctcggcgtttgatttggccggtcctcgtccctgcctgccccgaccccgcaccggtagaattcacatttggcccgacccagagcaatcgggacaaattggcgctcctgggtggatttgctgtgaaccacggattgactcgacgaatcccggtgacacaggggaagggaaaagcaaattagagagcctagacaaggaccctctgaggcttgtctagtgttcatagtttcgtatagttattgtcctccgaggcataacttcacgagggacgtagcggacttagtgtttaccctctgaggaagcacttcgtccgaacagagggttggaaggtgttgtgtagtggacgaagtacttgccctccgaggaagtacttcgtacaaaaagggtgttcaagcgcgcacaaggccactgacaaataaggaaaaaggcaaactaacagtcctccgaggctttagtttagccataaggcaaaaggcaaacaccttgtcctccgaggcaggtgtttagtcacagaaggtccaggaccaaggccagactgatcccggaaaaagacacaaaacaacaagtgcaccacaacacacacacacgcacaaccaaactgcacgcaatg

SEQ ID NO: 102233 - DNA, 549 bp, Heterodera glycines
acatggtctattagccttacaaaaagcgaaaagattttcaagctgggaaaatttgcatgttttttgaaattattggtttaattgagacgaattcctgtaaaaaatgcacatttttggaatattttatgattatttattgtaattgcgtcttcaatttgattgaattggtgcacttttaactaattatcttactttcccctatttttaataatatttttcatcaacttttaccaattttgttcaataaattctctcaatttaatgagtcgcgactttattttggcaataaacaaataaacaggaactaattagcaattaatagtcaatgatttcagacactaattaattacctatcatcaatcaacttccatcgatgaatgattatgattctgtttggcgtttgttttcaataaattttcgtgaaaataaaaggacaatggaatcaaaaacaaaaattaattggactatttaagcgtaaaagtgagcagcaaaagtcaccattcaatttaattatacccaattaaaaaaagtaaatcctctttaaaaatg

SEQ ID NO: 102234 - DNA, 93 bp, Heterodera glycines
ttgaattgccaccaccacctccccctgcagagagtgccgaacttatcaacgggttggccaccgcctcctccaagagggaatgtcgtgcacatg

SEQ ID NO: 102235 - DNA, 1003 bp, Heterodera glycines
ggacatccaacagcgaacttggagccatggacagaaaggcatctgtgggagagggagagcaatgatcagcaagggagatgaagagagagagagagagagagagagagtgaggggcgagagagagagtgaggggcgagagagagagtgaggggcgagagagagagtgaggggcgagagagagagtgaggggcgagagagagtgaggggcgagagagagagtgaggggcgagagagagagtgaggggcgagagagagagtgaggggcgagagagagagtgaggggcgagagagagagtgaggggcgagagagagagtgaggggcgagagagagagtgaggggcgagagagagagtgaggggcgagagagagagtgaggggcgagagagagagtgaggggcgagagtgtggtatcccaaaacgtcgctggaacattttttggaccataaatttttcgtttaactaaattaagcattcttggtattgttcggtagctctatgtgtttatagtatttaattatgccaaagcgaaaaaatttggttaagtttaaaaacagttatggccataagaattcaatgccatgatttttttgtataaatattttggaattttttaaattaatagagtttgccaagcactttcgaacatttttaatttggttgagaaagaaaaagttatggtccaaaaattcgtacggcgacgttttgttgtgatggaagacgaagggattccgttaacatttcaatgtctttcttttttgctatttgtctcaccctcgaggattgggttggtggctgatgagttcgtctcataaaactccgaagtgttcagtgtcgtcgaaggcggcgatgctgccgaagtgtgcggtacgaatcccccgccgaggaatgcgtctctgaccaccgtcgtcggcaccgctgtgccggtgccgcccattgcgttcatttcggcccagcagtcgtcgtccatcggccctttgtccgttctgttcagtccgtccaaatg

SEQ ID NO: 102236 - DNA, 79 bp, Heterodera glycines
tcgttacggcttcgcacaaatatatttaaggatgagcaggaggaagatgaagggacagttgtgttcattcctaaaaatg

SEQ ID NO: 102237 - DNA, 76 bp, Heterodera glycines
acagttcgatgaagtgagaaggacaaatttaaacatcatcaaatgggacaaacggacacaaactgaaggacaaatg

SEQ ID NO: 102238 - DNA, 496 bp, Heterodera glycines
tttttatgtttttataagtcgctctaaatcaaaaattgttcggagaaaattgtaaaaaaaaatatgtaaaaacataaaatccgatctatattaataaaaatgaaaaaagaaagtttttgaaaagagaaaaaaattaaaaataaaacaagaaaaattgcataaagaaagaatttttgattatttaaacacaaccgaggcaatgaaagttaaatttaatattttttctcgataaaaaatttcatatttaaaaattttccttattcgaaaaagctataaaatattttaatattcattaaataaacaaaaatgagttttttttgattagattttacgtgttttcctctctaaaaatcctttaaaaaaatttttaaatgcctttttcggaattttcgtgcgtttttttcaattttttggtgcctattatagtgcctttttcgcgattttggtgcctttttagacggtctctaatcattaataccattatttttagaatatg

SEQ ID NO: 102239 - DNA, 389 bp, Heterodera glycines
tgatgggtcccggtctttttttctgtttgacaggaaacaagattacaaactctgatccttgattacatctaaatgataaaaaaatttgttttttgttttaagaacagtttatcaggtataaatataaattagaaataaattgacaattaattctcaactgctaatgacaaaaacatataatatattggaaattatttttgtttttatttttaaatattaaaataattttaaaaaattcataaaaaactgcgtaccaaaaattgagtaaatgctttatgtatattttttggatttcaaataactcagttattagatccattttaataaaaagaaaaataggaattttgtggtgggattttcctatttttcagatattcccaggcatcatg

SEQ ID NO: 102240 - DNA, 323 bp, Heterodera glycines
aataaaaataatttattttataaaatcaaaaatgatttatttaaattaataaagtaatttgataagaatttttaaataaggtgcaaaatgagttccgccaaaattgttgggatgccctcgcttgtcacaatcggctgtttattaatggcaaaagtttgacgatcaattacagaggatttttaatgtttggtaattaattctaatgaaaatatttttaaaatttgttttttcaaggctattgttccatcttcgctaaacattccattttgttgaacaaagattgctccaacattttttactttgaaatttcagtcgcaaaaatg

SEQ ID NO: 102241 - DNA, 60 bp, Heterodera glycines
tgtatgttttggttttgtacacaattgtttgaccttttaggggtttcgcttacgacgatg

SEQ ID NO: 102242 - DNA, 111 bp, Heterodera glycines
ttgtgaagcgcccacagagcgtaatggtgggtgtgcacacatccgatgcacgcaatgtcaggtgaaagaaaccacccaaaatacttttggaaatcattttcagtccgaatg

SEQ ID NO: 102243 - DNA, 115 bp, Heterodera glycines
  unsure (1)..(115): unsure at all n locations
gaaaacatgccaaaagagaaggagaagggaacatnggcagaggcaangacatttcggcgggagcagctctttcctccccccccccccctctcttgtctttcgttttgctcccatg

SEQ ID NO: 102244 - DNA, 815 bp, Heterodera glycines
ggtaaattcaatataaaaataattttaattaattttttttaaattttacaatttttggcgttcctccgtttgtttacctcgcgttgaaccgttcaattcgtggggaatgcgttcgcttctttcgacctcatgtcaatgcgccacaaacgcttaaaactcagctgataacacgacggcatcaaatgccaaaaacactccgcaattttggttaataattttgtcgatgctgacaaacaacggacaaaaacaacgacagttgaaaatgtaaagcatttaataaaacttttaataattaaaaaatatttggacggttttggagtttaattgtgaaaattttcccaccattttcaagcagtatatgtgaagcattggaccagcaaaatggtcagtcagcaaacaaattgactgacaaatgagtgcgtaacaaactgaacagtgaaaattattgttttgcataattttatttaaatattggttattgttgactagttgattaaaaaatatctgtgtaaaacatgtaactgactgtgtaaaaactaattcatcaaaatttgcattaaaatgtcccaataattttttagtgtttttaaaggttagccgacttttgcgccgcagacatttgcgccgcgacacttgcgccgctcagcaaaaaagactcttgcgccgcgacatttgcgccgtacagcgaaaaaagacatttgcgctctgattaaaataaatatatgtgctttatagaataagaattgatagatattcattattaattcctttttcgaagcctttcatgtcaattccatattgaagtgcacgtaatg

SEQ ID NO: 102245 - DNA, 156 bp, Heterodera glycines
ttgacctgaaaattggcaaacataaaattatgcactaaaatgccatacaatatattaaattttggtaaaattgaaaacaagaccaaactataaaagtatttaatgaaactaatattttgaagcatcactcacagcccaataagcattccaataatg

SEQ ID NO: 102246 - DNA, 507 bp, Heterodera glycines
  unsure (1)..(507): unsure at all n locations
tgccaaatctctcaattttcgagctatgaatcggtctctctaggggtttaaacttgtcggagnaacttcccccacccccctatcgatctgtctcatcgagagctatcgattgttaccatcgagattggtccacgagaaaaaatatcgtataagtctagagaaccatatttcttttaacggattgccatcctttcatcggcgtgaaaagttttaataaagttatcttgttataaaaaatattattataaatctaatatttttggcaccctcccgagagaaggtgcagttccaaaaattagtccacaacgttccttacaggaacgaaaaagtgttgaaaaataggcaaatatatgttaatttaaaaactaatttatgatgggtttaaaatagaggaaggggagagagaactgatcctttatatttctctttttgtacgccttcttttccccctcgcccgtctcttgctcttagttcactttctctcattttcctcctcttgtcagaatg

SEQ ID NO: 102247 - DNA, 90 bp, Heterodera glycines
ttttactgtattttgttctaattagagtttaatttacatttaatcaaagcaattaagttagatgttgattattcggcacttttgcagatg

SEQ ID NO: 102248 - DNA, 86 bp, Heterodera glycines
ggtgaaaaatcaagcgaaaaacaaaaaattcaatttttcttttttcattttaagaccatctcaaagcggaatacattaaaattatg

SEQ ID NO: 102249 - DNA, 286 bp, Heterodera glycines
ggttcgatgaaactttttaaaatataagcctaaactttttggcctgtttaaaaaggaattaaaaatttttaaaatatttattcatctcccttttgatagaaaaagcatcagagagccttatttaacttttaattaacatttggtgcgtttcagagcactttctgaaaaaatacttatgaattaattttgcaaaaaataaataagtaatgaaaaagtcagaattttgaaaaattttaaaaacaacaagcgttggcattttttcaggttaagttagtcctttacaatg

SEQ ID NO: 102250 - DNA, 100 bp, Heterodera glycines
tcgcgctgctggtcactgcttctgctgaaaaagaaaccagcaagagcccgcttgatgtgctggacccgacaccgttcggcacagtgcggtgtaaaggatg

SEQ ID NO: 102251 - DNA, 301 bp, Heterodera glycines
  unsure (1)..(301): unsure at all n locations
aattctatcctttntgccatttttataagagacattcgtatgagtaagatagaaagaaagacggaaatttaaaaaaaacagttaattcaaaagcacttttttatttttaccagtttcccagtgaataagtaaaataatcagtcataggacagatcatttgttagatggaggaaagtgaatgaatgattaattaaaaaacaaatggaacagtgacaaattagtaaaacgcattttacaatttatttgtagtcagtaaataaaaattccatcagagagacattcaaaatttaaaaaaaaaatg

SEQ ID NO: 102252 - DNA, 690 bp, Heterodera glycines
cggcggtaggaaaatggcggtatgaaacggccagtatgaaaatgggtcgatcccaaaatagtgattactagtgatgaatagtggcgttaaaacgaagaatttccgagctaaaaatgttttcgtgcatttcagtggaaacaaagccgcagaaaaaataattaaaaaactaaaaatccgttccctactaatcacactgtaaggccgcgaatggaaagactgattcttgagaccgttttgttttcatgactttcgaacaaaacttttctcccaaaaaagtggggagcataggcagtatttttcgacttcagggtttgaaattggtgcaaatgaatgtcaattcgtgatcagcagctatcctgaaaacccttgagggtaatactatcgatggtgccccccccccaatttttggaagaattttttttttttgttctgaaatgtcgtggaaacatatttacggggggttttcagggtcgatcgatgatcgcgaatctgacatccattttgccctatttcaaagaaaattcaaaattttgaaaattcacttttagttcaccctctaaatccactccctagttcactaagttattgctcacgaactgtacataaatgttgaagaattttttaagtcattgaattcacagcctttcttccatctctcttttattatttcgcgaatttttgtgtgaaatg

SEQ ID NO: 102253 - DNA, 1003 bp, Heterodera glycines
aactcgaaaaattgagtgaatagaggggcttatgaccctttaaaatggtcaaattcggacaaatttagtatcatttgaaagctcttgatcagctaagtctaaaaaacaaggtataaactcgaaccgatgccgtctaagcactgggacaactgagtcccagtgaaaaccgacatttcagtaccaaaaaataaaaaagtttttttcttatataatgcacgaaaatcgtgtagccttgaatatcgagtattgcgctaaaaaaccgccgcacactcgactacggcggacagtaggtggagtgagactacaggttacgaacgaaggcagagtgtgattcgtatgctcaatatatcggaactaatgcgcagaaattgggatatgcctcaaattcggtctctaattataactttatttttcattttttcgacctcgtcatactttgtgtggcagcccgactcaaatgactttgtccgagcagactttggcataatacgcagaaccgaagagggttcgctcattttttaggtctttcccttacaatctcaacaaatttagcgggtcaagatttttcctaatttgccaaattttacttttttcaaagttaatatcctaatacaatgaattttgaggagctttaggacaatcaaattttatagacattgatctgagtaaacggaccatgctaagcgttaaatattcttggtatttgagaactcattcttgattattctgtaaaattaaaaaaaaattaggttttaaaaagcttggtaaattaaaacaaatttgttgacttttgattacaaaaattgccagtttgatgatgatttaagtataaaagcgttcgtaaattattcttttaaaatttacaaaatgcaaaatttattttgtcttcgagtttaaaaatctgatcatccccatcgaataggtcaatttctttctgatcggcaccttccgttatgccatcgctgaggcgaaacgggcatatgaatttggacggcaacaaatg

SEQ ID NO: 102254 - DNA, 110 bp, Heterodera glycines
aaaaatatgatccttaaattataacaaacacataaaaatttttgcgcattaaattgagtcaacaaaatgttcagcaaataaatccatctctgcattagcccataaaaatg

SEQ ID NO: 102255 - DNA, 603 bp, Heterodera glycines
ttgctcttttgtcaccgccctttcatttttgcctcaacggtcgtgcgacgtcaaagatttaggccatatcggtgaaactatttcgcacaatttgccttcaaagcgctgttttttgccggggatttgcgccgattttcgttgtgcccttgtctctgtgagcgttgaccgaacaattcaggtgtttaaccacaaaaaaatactaaaacaaattgtggcacttttcaggttcaccaatttcccttccccactcaaagttctttctccgccttccttttccgtctgtcaattctgacttctgttctctacgttcttttgtggactctttttgcataaataaccattggcattgatttgttgtgatctttgaatgtctctaaattttaaattgtgaatctgtgatacatacgaaataataaagttttttgttaattttttggtaaaataaaacaattgaatggactttgctggtattcctttaaagcttcaaatgagcatgtttttatggcttacgattttgccatttgtttcttggcatttcacattaatttcgactaatacatagcattttttcaggtacgctttttaaacactgcttaaaagatg

SEQ ID NO: 102256 - DNA, 556 bp, Heterodera glycines
agaaatttaataattttaaatttttctattattattttattgaataaaatttattagacgatttaatgattttgtgggaaaaatataaaaattacagaaaaaaacattcctcagttttttgccactcttttcactagaagtgccatcgaaaaagtttccaaaaaataagcaaatcactgatcaaaaaaatatttttgattcaaaataagcacatttaaaaaaaaatgcaatataagagcttaaatttgtatattattggaaacgaaaaaaaaaaataatgcaatttttttatcaattccaaaaatgctcttcttaacagattgcgctaaaaacggccaatttttgtggtaaattttaaattaagaaaagcataagagaggtgaattatttttaatataatttatgcattaaaattagggctgagcgggaccgggaccggtgccggaaatcccggttttttcaggtcacggtcccggtttttggaaaaattgaaatcccggtcccggttttgctagtcccggtcccggcgggactaaaataagcactggtaagaatg

SEQ ID NO: 102257 - DNA, 164 bp, Heterodera glycines
cggtgtcatctatgttactagatcggggatcgatccccgggcggccgctcgagcaggacctgcagaagctagcttgatggggatcagattgtcgtttcccgccttcagtttaaactatcaagagagggaggagagggttggagaaggaaaggaaaaaaaaaatg

SEQ ID NO: 102258 - DNA, 468 bp, Heterodera glycines
atcaggtccggggttcggaatttgtcgaaatggatgccgaattcgtgatcagcgaacccgaaaagccttagaagcatgttttcactacttttaaaaacaaaaattaattttttcgaaaaatggggggggggaccagctccactattaccaaagtcagtacctattaccaaaagggcgttatatataatagccatcctagaagccctatacaagcttaaacatttttagtacttaatgtattaagtgcgataaaacttttgaggaaaaggattgaagtcaccatcatataggtatcagtaccaggacccttgttttcaggactttttaaaccaacaaaaatttgtgaaaaatttcgacccaaaaggggggggggacccaaactgaattagtaccggtatatttcatattcctttctttaatcttcttttactttagagagtatttgattgagctttacttgaaaaaatg

SEQ ID NO: 102259 - DNA, 146 bp, Heterodera glycines
ttttttaaaaaataatttcaaaaactttttccaataaaaattttttgtatttttcagggttctttatcaaatataggtttcaaaaagggaataccagtaactgaaattaccatatcctagcatattaagtacaaacataaattatg

SEQ ID NO: 102260 - DNA, 425 bp, Heterodera glycines
tggggaaaagttgtgggaaagggcaaaaagcacacaatgatcaacatcatccattagaagatgcagtaatagcagcagcagcagcagcaggaagaagaaacagttcaaagggagtgaaaagcgaaacaatttaaaataaaagtacaaatgaattctaaatagtgaaagcaaaagaagagaaaaatgctgtaattgaaagtagggagggaatttgggaatgaaatgccaaatgtgcggggggtcggatcgttttatagagataaagacagcaaatatgcgcattcattggcatcatttgggggggggaggcaatgggccaaaagggcgcgcgaggagaagcctaagcaattgatcactctccctcctttagctgtaggcccttctccctccattaaaatcgaaatgcggcgcttcagcagagaatg

SEQ ID NO: 102261 - DNA, 480 bp, Heterodera glycines
gtcaataaaatgtgattgattgagtttcttatttatttcttttcattatttttagttttctgttccaactatttcttaattttttccgaaattttgcacacctgtcaagaaaaatgattgatgacattcgaaataaagaatatccagacgatttttttttgcagttttgaataaaatgtgacagttgtctacggaaatgattgattaccctcaaaattaaggcaaacccagacagtcacgtgactagacccctccccctttttgcctatttcgcacacccggcccaaatcgcaaatcattcaactaaatagttggatttcattaaactctcttcacgctctaattttatttctctccgctctatttttatttgcattaattaaatctattaatctattactatttacctacgtctttttcttttcaaatctctgctctctttaattcttctgtttcaatttcgtttttctttttaaaatg

SEQ ID NO: 102262 - DNA, 131 bp, Heterodera glycines
ttcatttgccagcagggaggaaatcccggctcgaaccatcattattaaattctcgctttgaatttatgtaccacttgaaaattttattttcattaaattaatttttgaaaatttattcagcaaaggaaatg

SEQ ID NO: 102263 - DNA, 288 bp, Heterodera glycines
tttgggcttaatccttttcaaataaacaattttcaccggaaaaatttccaaaaattagccaacaaatatgccatggacaaatggcactttgttaatttagtcgctgtgagtgaatccccgcctctgaaaatggctttttcggcttagtcatccgctctttcattctttcgatgctgcgttctcatctcttttctcatggcttttctgatactaataaagcttcatttcttcagcaaaaaaaaaacttttccaattttccctcaaattttctttcgaattcaaaaaatg

SEQ ID NO: 102264 - DNA, 626 bp, Heterodera glycines
caaattttaacgcatccccgtgcccccggtgtgcattcggccgtcggtggtgtccaatctgaaggcgggctccaacgagggcgacttgaacatgaagttgacggagataaagctgatcaatgacatcctgaagaagcacaagcgcagcggggcaccgataaaaccattgccgaatcgtaaaaattttcagtttttggtttttcaaatgccataaaatttttcctcccctcccctacttgtccacctatgtcgtgcactacacactgcccaatgttcaacaaataatccgttttaagaaccgcttaaaaatattgtcgatgtttttttcactcaaaataatcgtattactcgacagaaaatttaaaaaataaattttatggattaattttaagaagtggatacttttttttgttaaattttacattaaaaatctaaattatcttagatttataggaattttccgtggcggcgcctgctggcccgcctgaccaaagccaaattgtgtggctaggctcatgtttttaaacgcataaaaatcccaaaaagggcatagaatcctaaaaatactgataaggcaacaaaaaaagagcatgaaaaactaattttaggttttctgttaacagatg

SEQ ID NO: 102265 - DNA, 500 bp, Heterodera glycines
aaaattttgtaaaattaataaagggagtcaaaaatataaagttaataaatgttttgttcgaattaattataaaaaataatttatttaagcaatttgaaaaaattttctgatttttgactcaaaaataagatttttttatttcaaatttctcctttataaatttttctatatatttttaatttaataaatggattgtcctttaaatttgtgcattaaaaatatttttgtgagtttttaattaaattttcgaattactcccgctcccgcccgggactcccgttaaaaatggacgggattttacgggagcggaatttttacgggaatcctgttcgggactcccgtcccggaaaattttgaactcccgatcccgctcccggaaatttttttttaccggactctagttaaaattgaaaaaaatttaaaaatgtaaaattggccaattggcgattcgaatggatttaaaacattgctgattttcacttttcatttgtatataaatg

SEQ ID NO: 102266 - DNA, 329 bp, Heterodera glycines
ggtttaggcagagtatggtattgtagttcgagagtctccgtgttgaggagggctcgactcgagaaaaatctcgagttttcctttcgtctcgactctcggtctcgggttgcggggtcgagtctcgtcaattctttggtcaagaattgccaaaaactgatccagacgcccaaaaaagttttttgaacgccaataaatcactgtttaccggtcaatttcaaaaaaattggttacggtaaaaataggaaaaattttcaaagaaaactgtattcaggctaggtgcgtttggcttcctttatttgggcgacggaagcgccgcgccgggcaacatg

SEQ ID NO: 102267 - DNA, 391 bp, Heterodera glycines
atataaatacattccctgtttataacacgtgaatatctcttctaagatgttgtctattattattttcggaaatttctaactattgaattattgcaaatttgtataagaaatgttttccgacttgttgtaaaatatatgttttttatattgtaagtgtaagaaagaatttgttaaattataattattattttaaaataaaattaagatcatattattttaaaaaatgaacataaatattccataaaataagtcaggaaaaataactgtttctaaatgttaactttgaacaaaatttattttcaaaaattttattaataataacctttaacttaaaagaaatgaataattaaagataacaaattgaaaatatttaaatatttttttagaaatg

SEQ ID NO: 102268 - DNA, 1003 bp, Heterodera glycines
ttactctaggaacatccaagttaaacattcttggtgtcattcgacagctctaagatttcccctttagccctataaaatttcaaagaaattcgttatgtttaaaaaagttatgaccagatttcaaaaaatttgttttctaaacattttggtcataatttcttttgcaacaaaacaaaatttttcgaaattttcagttttaatggaggattcttggggctatcgagtgataccaagaatgtttaatttggatgtttctataaaagttttctataccataaagggcccaatttggctcacattttcctcaaaattcgtttattcattttcttggccacgcgcacactccgccgccttccaaatgatgtcacaagtgaacccatctgttactgtttatgttcaccaattgctgcagaagaaatgagtcggcaattgtcggaggaaaactttttcttttttctgatgggcggtgccataacaaataattttgactaaatgaaatttttgtatgaaaaggaactagcaaaattttatttatatttgtaaaattaatctgttgaaaattagtattacaaattgctaacggttggaagccgaaaatgcaaaaacaaaaaacagtgaaagtgtttttaaaactgccaaatgttccttccttttatacctttctatgagcccacaaaaaaaaaagaaatgcaaattttttgttgcctttgagtgaaattcgatggggtataaaagcgatgcatttttcccttttccaatcattcattctacgctctgttttccatcattgcctctccccattttcacaatggtaaccgaataaatgcttaaatgtcaaaatgaagactttttgattaatacaacgaaaagatgattagacagggtattgaatacgtatttcttcgagaatttgctgaaaaattttttcgttattgttagatctccgaaacatatactgatacaaataagattgtaaaagctcggggttagtgccgtggagatg

SEQ ID NO: 102269 - DNA, 1003 bp, Heterodera glycines
ccgataatggtgctttttttttaaatttgctaatttagaaatttttcaagaaaaaattcttagaaagtttttaataagaaaattctaagaaaaaaatatttcgagaaattctcagccttagaaaaaacaaaaaaattagcttgtaaaaaagttatatagaaaaaacttctaaaattttgattttttgcaatttcatgttataacttttttggtaattgtctaatcgcgaagcaatagcttctaaacatgttaaagtttcgaatgataccaagttcgttagatttggtcgacaaaaaatgttatagtccgaaaacttgggctggcgccaaaacgtcggcgccaaaacgatacggacccctgcctcccacacctatataggattttaattaaaatttttggtatcttcaaaagttttctattgggaaatttccggttggttccggtctctgctttttcgcggttacggtcctggtcgaaaaacttggtcccggcttttctggtcccggtgtcggtttttgtcaaaattcccgtttccagtcccactcaactctagtttttatcgtttattaaactttataaatataaacgcttaattctgggattttgttcccggcaattagcacaaaattaatttcataaaaataaacccaattttcagtttgtattgggcaatttgctagacttttggccagaattgatgaaatggaagcgcaaataaatggaccgaagaaaatgcaaaaaagaaaattgtcaacatccccagcaacagcaggggataaaaatattagtgggagttcaatttcagtggtgggtgggattttatattattattatttgggatggatttcatttaaatacatattttttttttgaattatccaatttttcaaatactaaaatgtgattctaagccaatttgttttgctatttttcttagatataattcccaaccctagtaattatttttaaattgcattttcccgtacagaatcggcatggaatg

SEQ ID NO: 102270 - DNA, 164 bp, Heterodera glycines
tattttttcagcctaaaataattttttgaaatttgtcaggctaatagagactacttagccctatcgttagatatcacgattattttatttggttgcggaacaaaaaagttagagcactttaaagttgactgcgccaaagtgaccccgactcaaatttaagcatg

SEQ ID NO: 102271 - DNA, 104 bp, Heterodera glycines
attgaatttttaaaattgtatttcaaaaaattaccttttcgtcaacaccaacagatcacacgtatttacttatttaatttctttttatttgcagacaaaaaatg

SEQ ID NO: 102272 - DNA, 394 bp, Heterodera glycines
  unsure (1)..(394): unsure at all n locations
aaaaatgtcacacgtataaaattcataagttgtctcagtttcaccgaaattaatattccnttgtatcatccaatagcactaggtgttctctattcaaatataaatttatgtagaaagaaaaaagttattatcataaaagtaaaaaaaaaattgggtcagaatgttttgtccataccttttttgaaattcaataaagtttttaatatggaatattaatagagcatttcttagagctatcgaaattccattaaagttggaattctgactgtagattttttgtacttttatggccataattttttataattgaaaaaaaatttcgaaccgcttggcggatttatgaaacaacccaagacgaaaattttgcattaaaaatgatcaactgatttatatg

SEQ ID NO: 102273 - DNA, 882 bp, Heterodera glycines
ttgaaagaccaattttgaggcgatgagtcagattccatagctaaattacagaaatatgtaaaagtagatagtcaagaattttttaccgctattggaaatagcatttggggaattacatttaggcactcatgtttgggaaacgagaaattttgacgtccattaaaaattttttacggtgatcactgatcagacactccaaaaaggttcagtgacgaaacgttcggccaccgtcgaaaattagctctttccggtaaaaattttattaaaaaataggtaaatacaaaaaataaaggtaatagcttagattagagttgagcgggaacgggacgggaactcccggttctacgaggtcccttgtttttacacataaatgttcttttgtgcaacaattgctaaacgtttattccttttaaaagagttcaaattatatcatttgatttactttagttgtcaaaataacgaaaaaataactatgtatactgtcttttttaaattaacacaaaataccccactttggcatgttgaatgatttgtcacactgggcttgacttaggcctatgcctaaaacaggcctagtctatgccttgtatgaaatgtacatatatctgatctataattattttccgactaaaatggttcgaaatttagttaacgccattttttaacatttcctctttttttgttgactgtatctacgttaagcccaacattaaccatacttaaattctttttcaattcctaaaactgcatttttacttttgtttgtttctgttctaattaaactcaacatgaatattttggctgtttctttttaccgttttcatctgcctactttttttttaattgcagtgaatttcttctttaagttttaatttagcaatg

SEQ ID NO: 102274 - DNA, 204 bp, Heterodera glycines
tgtatgttttcttttaatttcttctatccatgttggcattttttcatatttttacacaaattttgatcccattaatttacatttttcacaaatttcaaatgcattttaacccccttctttgaattccatttccatcaatttgccccacagattgtcaacactttgcccgtcgctcttttgtccgcttttgtcctccgacaaatg

SEQ ID NO: 102275 - DNA, 391 bp, Heterodera glycines
tttggttgattggagaacaagcgcggtcgaagttgacgtgtgtggaagatgtatcggttgaaggtgttgcgcaattatcgtcgttgagattattttattattgggaagtgagcgaaaatgcgaatgcccgttccttttatacaatctcagccacgacaattcttaaacccaacattttgccaaatttcatttgatatataaggggatgcgttttcatccttttcaccttcgctactaccatttgcccatttcgaagtgcacccactgcaacatttttgtgagttttttctcttttttttcgtgtgtttttttgtcttctttttacatcccctccatttgtgttcagaaacggcctcgacaaacaagcaaattcttcaccaacacaccgatg

SEQ ID NO: 102276 - DNA, 150 bp, Heterodera glycines
aaaaaagaggtattaaaacataaatttgaccaacgatggtcaggaccatttcaatgtgtaggagtggaaaaagaaaaaaataatgtaattttacaatcgctagataaaaaaggaaaattacggaaagttcaccaagaaaaaataaaaatg

SEQ ID NO: 102277 - DNA, 880 bp, Heterodera glycines
cattcgtcagagtaaaaaagacatttttgtgtgatattttctccacgtgatggcatattaaaaatagcattttcatactttttaatgcgaaaggtgggaattgctgaaacggaggtgtttgtgagcagtgaaatttacacatttatcggtgaagattggttggtgaagttgcgggcggatcggacgcccgacacaaaccatcgaaggcttaataatgtgggaacggggggaggggaggggggggggggatatgcgaaagatggaaatcaacgaacgatggatataaaaaagtgtccaataaggttgtggatagcacacactttacttttctgtaatttgtttaaaaaatattgttttttgatcggaggcgacagattgtgagatgatcggtgtaaaaagcggtgggatgggaacattgcacgaacggccaagtttttgccggctttaaaatgatttgttgttgcaaaatggatttcattttgaacttttagttcattgcttcatcctcttcggctatactgttcttgaactttgttgagcaatggcaaacaaagaaaacgaagtaataatgacaaaaaatttaaattattttcacccctcatcctcaaacatccccccgggcataataattaccctaaagaaatccaaaattggccatgtgcggagtttcttatatttccacttttttaatgagtcttttttggtatttagtgcctgatttaaatagcacgaaatgtacaaaattgatgggcaaagaagggagtggagcaaattatttgaaaatggccatttttgagtaaattaatttctatttaaggtcgaaacgtgggagctgagctctgtctgccagacaattaccatcaccgggctgtcccaaatg

SEQ ID NO: 102278 - DNA, 139 bp, Heterodera glycines
ggggtcgtggtgataaggtcaatgggttccaagacaattctgatgtcgttgagatacatctagatcattcccgtttcgaacaatgcaaacagtaaataatatcacatgtccaatatttagataaatctagatgggtatg

SEQ ID NO: 102279 - DNA, 484 bp, Heterodera glycines
ttagggaacggaggagaagaatgcattttagtctcggaattccattagtttttcgcttttttagccctcttttttcttgttacatataaggtatttgtggacattattatttgtcgctgttcacaccttatacataattatttttggaattaataaattatttaattgcgattttaccgatatttttaggataatctagctataaaaatttttatttgattattcattaagcacctaaaaatgcttactgcgattggttaatttgaagagaacatctttgagcgcccttcgactcattcctttcaaaaatgggcatttttaaaattctcttccaaaaacttactctgacaagcagggcaaagagctgaagaattctaaatgatttttaaattagtttaattttatgtttacaactgtcaattaatgccgtatctgatgaatcagttacaaataaatttttagggtgtcagtgttttcgggaatg

SEQ ID NO: 102280 - DNA, 93 bp, Heterodera glycines
  unsure (1)..(93): unsure at all n locations
cgagcagtactattagtgggacgtccgatcatctagaaggattctcctgatcaaactcncgcccgatgccgattgaggtgcacacgaaaaatg

SEQ ID NO: 102281 - DNA, 484 bp, Heterodera glycines
  unsure (1)..(484): unsure at all n locations
aatagaagagcagatctcgagtaaaaactagacagctaaaaaataactgtgatcatnntagggggtcaaactatgggcctatgcaaaattcaaaaaaagttaccaatggacacacaacataaggaggacttgaacctggggccccctttttggtgactaactcacagaccactaagacgaaaaatccaacaattgtactgggagcccgaaattgactcgccgtgtttattggtcctaattagttctatgagcggatcctaaaaataaacacaaaccaagtcaaaccatttggaatctgttatagaatgctgctgcagttttctatttgcctcctccaactttttgcgctcttcaaatgccaagaatttgtgtcaaaatttagaataaatttctaattaaataaaaattgtggtcttttttagaataacattcgctgcatttttctgtttttgcctgctgtcccattgctttttaattgcaaatg

SEQ ID NO: 102282 - DNA, 262 bp, Heterodera glycines
ccccccccctttactacgcccttgttctttttatgattgttagtaaaaggttcaaccctttgcgtattatgaaattttaaattaagaaaataatttcttaaaattgtttattaaacaaaatctttctaaaatatattttataataataatttaataattacaaattaaattaaattaaattaaatttgcatatgttaattggcttagggccaaattccgcttcgaattgtccgcgtgtttgcgtcggcatggcaaatccatg

SEQ ID NO: 102283 - DNA, 91 bp, Heterodera glycines
aaattttgtattttcaattttttcgctgttattttttttagcaattttataacaggtaaatctgtttgccttgcattagtcaacaaccatg

SEQ ID NO: 102284 - DNA, 263 bp, Heterodera glycines
tggtcgaaaatatttcattttaaaaaggcaattacaattagttgtgtactgtagattaaggaaccgtatcctgtttcttaagattactgtagagtcagaaacagtactggttccagtattttacaataaataatcaacagaattaattgtgtactgtagagtcaggaacagtaccgtgtcctggcttttcttataaattactaatagaatccgttaattctctaattcttttttcaatttaggcaccaccaccagggccaatg

SEQ ID NO: 102285 - DNA, 285 bp, Heterodera glycines
tttggcatcctttctctcgctatttgccacgcattttttgtcattatggctaacttattttatgaaatatatgctaggaacctgatcagactacggcagggtttccgggacctgttaattttgagaacgaataaatgaattttcgcttatccaaaaatcacaccagaaaacatttggaaatgaaaaccggtttcatacccgaaggtttgtaacgctaattttcgaatttggatttttaataaaaatgaacaaatatctaaaaaatattttgtttaaggcaaaatg

SEQ ID NO: 102286 - DNA, 146 bp, Heterodera glycines
tgtgaggaaaagtgaggaaatgtcgcccttttatacaactttttttccgttaatttcgaaatttttttgcttgtctatataaagggagggattgcaaaatttgctctcattcattgcgcccgtcaaattttaattcttctattatg

SEQ ID NO: 102287 - DNA, 103 bp, Heterodera glycines
cagcagcaaaacagcgtggatgggagaaggccacaaaaaagaggagaatgaattgaaccgagtcgaaagtgtcattgtccgccggctcctctttttgaacatg

SEQ ID NO: 102288 - DNA, 505 bp, Heterodera glycines
tactccgttcgcagtagatcacttattcgatgattttttaacatatgttcaaatgtttttggcagttctaacgacaatcacttaatttgcattttttttttgcatttttgacattagtagtattggggtaaaaatcttggcccccccccctgggcagagagatgcgcatttattataggagagaggagagaattagagaaaaagagtaattcttaaaacttggaaaagggattaaaacggaaaaaaccccttttgttatttttttgtcttgcggcattttttaatgcgggaaatgaacaccattttccatcaaaaggaaggggcgggaagcgctgccatcctctttttggagatggtcccatttttttgagtttgagttcacagcgaaaaaacttttcatttcattcaaaatttaaatttcgcgcgtcttttgacctaattattttgcaaaatcctgcccctgctgagtcagctgtcaaccgaaaatgattgatggctaaaaatg

SEQ ID NO: 102289 - DNA, 121 bp, Heterodera glycines
ggtgaaataatggggctattaaagtttctttgcagtttttcaaaagaattcttggtataccgtcaatagaagtattgtttttatccttaagtttacataatgaaaaataaatttcagcatg

SEQ ID NO: 102290 - DNA, 959 bp, Heterodera glycines
aaaaaaagtgttcgaaattatgaaaagataattatgagtttgcttatatagaaagagcttatgctaatgaaaaacttttttaattaaaaataacatattaaaaataaacttttatattaaaaaatgtttgggtataacttgaattgttaagtgaattaaaaaacatgcaaaccacactactcagcagggtcacaaaataatttataacatttaaaaatccaaaaaatacaattttttgaaaaaatcaataaataaagtaccaaaaatcctaaaaaccggacactttaataaaaatactcggaatttggggaaaaaattttttcagagccattttgaaaattagaggccgtttttgggcaaaaaatgcttaaaaacaacaaaaaaacaatttatttacaaaaaatacatttaaaaaaactggccaaatttggaaatttttttatttttagagccattttgaaaatggaggccagtttttggcacaaaatccttaaaaacaacaaaaaaacaatttatttacaaaaaatacatttaaaaaaactggccaaatttggaaatttttttatttttagagccattttgaaaatggaggccagtttttggcacaaaatccttaaaaacaacaaaaaaacaatttatttacaaaaaatacatttaaaaaaactggccaaatttggaaatttttttatttttagagccattttgaaaatggaggccagtttttgggcaaaaaatgcttaaaaacaacaaaaaaacaatttatttacaaaaaatacatttaaaaaaactggccaaatttggaaatttttttatttttagagccattttgaaaatggaggccagtttttgggcaaaaaatgcttaaaaacaacaaaaaaacaatttatttacaaaaaataaatttaaaaaaactggccaaatttggaaatttttttatttttagagccattttgaaaatg

SEQ ID NO: 102291 - DNA, 70 bp, Heterodera glycines
agggaatgggcctgagttcaaagagaatttacacaaaaacggccaagtatttactgaccgttttgacatg

SEQ ID NO: 102292 - DNA, 95 bp, Heterodera glycines
acgatagcccaatacaatatgtcaatttcaataaattttaatcttttcatacctttcggggtgggaaattctccgaaaatgccaaaaaaaacatg

SEQ ID NO: 102293 - DNA, 637 bp, Heterodera glycines
atatacaataaatctacgatctttttcctcacgccactttttgcggcgttttcttaaaaaaagaattgtgcaaggggatgatccgaatatgcgccgttttttgcggcgcgttttttccaaaagacttggggaagggggcggggcgatccggcggtgccgataggcgccgcccgggaacccatttttgaattttgtattgattcggctaaggaaattgtgcatattttaaatttaagtggcgtgaaaagtaaaaaagaatgtcgctaatttgctcgaattgtgaaatttagacattttttgaacaaaattgttaacaaattccattaaaaattcaaatccccgaaaaagcagttttaaaaacaacaacaaaaatcggtttagtggccggatcccttcacaaaattggacgtcgacctctctttccaattatcaaaaaagcacaaatcttagaactgttcattaacggctttactttcgctttcaatttaattttttttaggttatcgttgacgaaattgagttgctcaaccacaaaagcatttcgttcaagcattcgtcgtcggtgcattattttgtcgacgatttggacgacgcccaactgacaaacgaaacttacgaaagttggatcaaagacatg

SEQ ID NO: 102294 - DNA, 776 bp, Heterodera glycines
aacttctaatatatatatatatatatatatatatatttatatacataatcatatgagttggcggttttaagaaacgcccaatgtggcggtttttaagaaacgtcccagcaccgtttacaactatgcaaaagtgaggcattctctcgcgaaattgttgacgctaatttaaaacgaaaattatttaatcgggttaatcggtatttgaaaatccatattgttttcctggactttcgcgatttatgtccatgttttcatagttaccatattttgacataatatcctcccctttggtgccgtaaagaattcatcaaaataaattcattgaattatttgaaaacaaaactttaaattcttttttgagtaataagccggaaaaactagaataaaacaccaaaaaattcttaagagatttgttattttacgctgtcgacctcattttgcctttgatttcgcatttttgtctttgtcgaataaaactttcttatttgttagagaaattttttaaatcaaaaaaagtgttttgattttctttaaaatcaaaagaataatttttttttaaaactaatttaaaatgactttttgacaaatacaatacttcaataatactcaaataaaaatgaaatgaatagaaaataaagcaaataattttttttaataaacacagatatgattttgagcactttcaaaaattgcttattttgtggctaaaataaggggaaaaagtggacgctttttgagcccagcggtctcatttggacaccgtcagtaaatttatg

SEQ ID NO: 102295 - DNA, 67 bp, Heterodera glycines
ggtgaggaaaaaggggacaaattgacacggaaaagcaaaattaaatggaatgaaatgaaaggtgatg

SEQ ID NO: 102296 - DNA, 120 bp, Heterodera glycines
gcattttttgaattattggcattttgtgtctgcccacccacggagcctttggcaattaatgagcatcgattgatatttctgatcagatatctgcacccggacttcgacaaagaagaaatg

SEQ ID NO: 102297 - DNA, 414 bp, Heterodera glycines
aattataaataaataaaaatattattatgtaatgttaaaatgaataacaccaacacaacaaaacacgacatacaaattttgaattccccagaagagcctaatgaaactcttttgcatgtactgcttttttctcattatcttcttgcatttcctgtgtttttgcttttttggttcgttttaattcggtggcttaaaagtcacggtcacctctcgcccagcgaggccgagacagtaatggaagagatgaaaaatatcccccgacacccaccaatattttttgcagcaaaatgatgcaagattagagaaaactgacactgaactctctcttcagtatgacaaaatcgataatgacttatgctgatggagcattctcaaagctactcattctttttcatcattcattttacaaaaatg

SEQ ID NO: 102298 - DNA, 258 bp, Heterodera glycines
tttctgttacggaagttattgtgccacaatgggaaaagacatggcgaatgtgccattctgttgagggaagttaaacattatattaatataaagttggataaaacacggagattgtgctgttctttgtattttgtcgatgggtccctttccatcgactcattcctcgcatttgttaagcctagactaaatcaaattcgaatagtccaaaaatgaggtttaaaataaatgattttacacaattaaaaactgtaaaaaatg

SEQ ID NO: 102299 - DNA, 174 bp, Heterodera glycines
ttttttccaatgaaacggaactagagaaattttttttgaatgtaccattattcatggtaccgaataggaagctgctcccgcggcgataatttacattccggaagttgataattttgaggaatacgaaacttaaataggcctacatatctcccaaaaatattcagggagataatg

SEQ ID NO: 102300 - DNA, 135 bp, Heterodera glycines
gtgaaatttgcacgcccggccaacagagggattattcgtacccaaacaaaaacggatcagtgatcagttgcgtacgctgtggtaagtgaagtggcaaaagggcggcggagcgattcattagaaaaattaataatg

SEQ ID NO: 102301 - DNA, 267 bp, Heterodera glycines
ataaaaaagattaataattataaaaatgggaaaaacgaaataaaaattttgtgttttaacaattagggccgtaaggtccgaatatggacttaaatctgacctatttttaccacttgcgtttttgtactgctcaaaaatgaccaatttaaccagtaaattctatgcccgtggaattggaaaatggcaatttattataaaaattataatggaaattattttgagatttaattgttattttaagcatgtgacaaattgagaagcaaaatg

SEQ ID NO: 102302 - DNA, 140 bp, Heterodera glycines
ttatttaataatgttatatttatattatttttaatttacattttacttttttaaattttttataatatttttaacgtttaaaaaaataaaataagttaaaattaaagcgaaataatttcaaagcgcaacatttagaaatg

SEQ ID NO: 102303 - DNA, 1003 bp, Heterodera glycines
taattaattcattaatcaatttaagagcaaaacaattggcataattaattatcgttttgaattaattaattaattaattcaatttaagagcaaaacaattggcatgattcttccaaatcccatcgcccatcttttcgcgaaggatcactcgcaaaacgaattttctgccctataaaaacgatcccaataaggtgaattgatcaaaaacaaacaaacaaacaaataatttgtaaaataaaaataataccattccaaaaaatccgggcccaatgtccatttgcctggctctaagcaaagaaaagccttggtttttctgggcctggactttggtccaaaaaatcttttccatgttttacataaaataccaggttcagttgttattttagagaccggattttaaatggccaggactcggtaaatgaaccggaaagttgcggaaccatacatatacaaggggtgtctcaacttcgcccccgcgggggtgaaaatacatccctaagaatggcatttcttgtgataaaatgcaataaatttatacaattttgaatttttttaaacatcttgaccattttttataaaataaagtaattttgctttcttttttaatttatttatggtttagttgttagtgctgcagcactaacaaaatttttgttatgagttcgataccggttgacgttttcttttgaatttatttttttatgattaatgtacaaaaacacccataaaattgaccattcttggcataattcattaacaaattaaactcaatttttaaaaaaaatgtcggtttttttcggttaaaaaccgaaaccgaaaaccgaaaaaaaccgaaaaaaaaaccgaccgatccgatctctagtttcaattatataatatggaccacagcaaaaaattaaaacaaaacgaaacaaagttaagttagaacatgacggcgcactctatgttttcgaccaattgagcgcagatagacttcagaaattttggcgatgtgagtttcatg

SEQ ID NO: 102304 - DNA, 570 bp, Heterodera glycines
tttctttccttctctcttttctcaacctttctctctctcccttttgcgtttttctttcccaatttttgtttcttttcgcttccgccgagtgagacaaataaataaattttagagaaatgaaaagctctattcaccaaataatctctatggctatagcatttttaatgtgtgacggtcgaccgacgaaatgcaatggaatgagtggccccgtggcctccgccaacggcgaacgaccgaccggcggacggacaccgccgccacttaaattggggtgacagcgtcagctgtgtgtctgtactgtctttctttctctgctgaataattgtgaggggaatggagaacctccaaaatgtgccgattcggtgcaaaaaaagtcgtatagccgcaaaattccatggcacttaaaaaagacgaaaattgtttgtgaccagccaactgaaatgcggacggaaatggaggattgtacccgataataataataataataacaaaagcaatggtttatggcaaaaagcacacgaaaattaacaaatttttatttgttgaaatttttaggttacgcaaattatg

SEQ ID NO: 102305 - DNA, 522 bp, Heterodera glycines
aataattattggggggacaacaatgatttttccaccatttgttgttgtttgtttgtttgtgcgtgttattattgtgcctttaataattgttatagaattttagttccaacttattcgtttggctttttacaaaaaaaaaaaaaaatttttttttgttaggaagattttattcattgccgccacacaattcaatttaccaaatcatccgagaaatgaatggacaacccaaattcgagaggcaaaacatcaaaacccccgaaaattgtggtttttctaattcaaataattgaatgttggtactctcacaaaagccagataataatgacccgggaaaattggcctaaattgtgcctaatttttatcattgccctgaaatgcgattttaaatctgtcatttaaatgttatcaatggcatgtgccatcatttttcatcaccatatttgggttcattcccaagttttttttaccatttaattgctattttttgagcaaaaaattgctctaaaattttgatcagagatg

SEQ ID NO: 102306 - DNA, 1003 bp, Heterodera glycines
aatttggcagtttttggtgaaattttgttaacaaattgcactcaaattttcaaaaattttccccagctgcgccccacattctcctcaaaagtctttgggaaaagcgtgcgcgaaaaaatgttttggaaagcaaaaaaaaatgtgatcaaattcaatttcactgatcatttaattaattttaatgatgattatgactaactttttttttgaattttttgcttgtataaaattttaaaaaaatacggaaaattaaaaaaccccgaaccccgaccccgatccctgctcccaaaaaatctaagcctaaaaatgactatttaattaactttaattaacttaataaatatatgtttaattataaatgcataaattctatttgcattttttacaaatcggcaaaacgctgacctatcccaccaaaaagagacaaagaaagtcactcatctctttatctaatgcattttttttattacattaataattcctattaatcattcacataattatgtgcaccttatattctacatcaactcttaattacatttttatgttatatttaaatttttattaggaaatttttcaataatttttttctttagaaataaaactggcttagatggatggacatttacaataattatcttattgttgacgaaaaaatggtcaattttaccacgaattgctgtagtaataaagcttcaattctcaaagtcaaatcccaattttctgcaatgtaaaaagctttcatattttaaaataagacttttactaaatttagtgaattcacgaaaaatcggcattacaaaaataattataataattatgggccagaatttttgacaatcaccgatattagcaatggttcactgcagaacggttccgaattgttggcgcaaattattttgtggaaatggtctcagggatcacagaccattctaaaagtagtaattgatttatttgttgctaatttcttttctaaattaggcaccaattttagacctttatg

SEQ ID NO: 102307 - DNA, 343 bp, Heterodera glycines
ggtagaaatgaacagagacaaagacaaattttttgttaaaaaataagtaaaacatttttgaacggactcgaacctacgcctttctcccttttctatcttcaaaaaacatttagccatacatgcaattaattcttttttgtacaggagctcattttcgggatagtgtgttaaaattcaaatttatttttaaaatatttttttattatttttttggctttcagtttttttcataattttttaaaagtgcctgtcctgcccccaattccccccccccgggtcgattctcaagagttcaaaatttcgggttctacaaatttttacagaaaaaacggtagtagaaatg

SEQ ID NO: 102308 - DNA, 391 bp, Heterodera glycines
  unsure (1)..(391): unsure at all n locations
ccgttagtggtcaaggtgancaaagatataaatttgtgattttnaaattgaaaataattttaaaaaatcggaatctgttaaataatttaagaaaaaaaattaagttaaataaagctattattagtttatctcataattatttgcatcctaaaaaacggtgattatgtcaatctttggttttattatttctttggcaataacttttttaaattttaactatttgagttaaaattagcttcatttgattcaaattcggtattctgcaccgaatgataccaaatacaaataatttgtttttacttttaaaatttggcatactttttataggttgaaaaataattatgaaacgacccattattagtttatttttattttaaagaattatttgatg

SEQ ID NO: 102309 - DNA, 721 bp, Heterodera glycines
tttgacaatgttccatttttggcaaatttatttgtaatattgatcaatgatcattttcattaatatctcctgacatttgtcttttttcacgctttcttttgtgttttaaactggcgatgccttcgctcactcagaattaaattctctactaatttccattcataatccggaaaaacggtcaaaaattataatggaactaataaatgaatacgaataaacggcaattaaagagagaggagtattaatggtttaaacatcggttgctaaagtgactgcaagaaacgagctaaataaacagagaaagagacagagagagagcgagagagagagagcgagagagagcgagagagagagaggggggggggaggggagacttctgtttagtattgtataataaacaataattattcttgcataaatgacaaagcttggtgtgggcgggaaggaattggtgtgtttggaagaaaatttatttgcaccattttattaattaatatttgtttaatatcattgtggacacgcaaagaaatgcatttgcataaacattgaaaattcattgattttcaatacaatattttatatacatatacgaatataaattgtgcttttcatgccagaaatataattatagtaataaaataaaaattatataatattattaatttatttcatttcgacctacaaattttgataaaaattattttgattcgcttaaacaatg

SEQ ID NO: 102310 - DNA, 867 bp, Heterodera glycines
ttcttcagaataaatatatcagcagctaaagaatacgtcaaatgatgattttgtttgtaaagatgagattttaggcacgaaaaaaaactaaatatgtagtcctttacggtaggggtcaactccttccgggcaactccgtctcagaactgttcaaaaagctatcttttttctgagttcaccaaatttatcaaagatggtatcattctaaattcgaatgatatcaagattgttgaattcggtgaacaattaaaaaagttatgttgactcaaagttggctcagacggagatccggtcctttaagcaggcaaaaaaaaaacattggcattatgttaacaattaattttaaaatcctgaataagtaccgattctacagatcaactttaagcaaaaataaagtaaaaattaaggttcgagccccgcccccgggggcgggacaggttttttgggctcacccccgcccccgcccccgtgacgctgacccccgcaacccccgcccccgcgaaaagccacccccgccccacggggctcgaaccctaaaataaagcatacctctgctgctgataaaaaagaataattaaaaaggaggaacaaagaaatttgtttcaaatttaaattgatcatttgtttggcgaaatgttttctcaaatcaaatctcgacatgaactcaaaaaaccggcagcgacaaagatgcctttttctccatgtacataaattggtttgccttttttcgtcgtgagatttctttttagagtgctttatcatttgtttttttggtattttatttcgtatttatctctcaatgtttctttcctttctgtttcataatattttcttcctccgtcctcccttttcgcctccttttaaatg

SEQ ID NO: 102311 - DNA, 267 bp, Heterodera glycines
tgaaaaggacagagacaaccgcgtccaaataattcaaaaaattgataaatggggccgactaaagaaaaaatggaaaaaatgatttgaaattaaaagtgcaacgaacattatcttcttcgtatagcaagaaactgctaatgcgaacaccagaagcagcagaagaagccgctgatgggctgctgtcattagcttcaacaagcagcttgccttttgtggggcaaaagatttcatcgtgaataggaaatgagaccaggcaatggccaaatg

SEQ ID NO: 102312 - DNA, 218 bp, Heterodera glycines
  unsure (1)..(218): unsure at all n locations
ggnccncagnncacnnncngcacnnncnnncgnnngcccanngnnnccnncgannnnccnnnnnncaggncgnnncgcaaaanncccancnnnnggcaccaagggcggngcaggcagngaagaaacngangagnncaccggaggacncaagngncaancngaagnngannaaagncgnnaaaaagttgggcgaaacgggggaggagtcgcagctcatg

SEQ ID NO: 102313 - DNA, 463 bp, Heterodera glycines
tcatttagagtcagcaaaaagtcatttgacttaaattcccatccctagtcatcattttgcaaaatattctcctctttggtggtcctcctctgttgcgttccctttttcttcctcttccaatcggtcattttatgccaaaatgtttccgccccttccgtttttgtcaatgatttttcgcctcccattggcacattgtccaaccccatttaaggcaaaaaaaatgtgattttcgtgtttctttcatcaagtactatccgtaaaaaataggaaaaatctaaaaaaatcagggctctctctattcatatacaaaaaatattcaccaattcccttttcatgactataaaaatcttttgttttccgctttgactcattaaaaaaataaagtttccaacgaattattattctgctcttttgtttgacatcattcggaactcggccaaaattgtgctaattgcaaaaaatg

SEQ ID NO: 102314 - DNA, 170 bp, Heterodera glycines
cctaaaaatgaaaattcattttagcgcaaaaaattttcatctcaactaagactttgttaaaataattttttttttcgaattttggagaattttcgggaccaaaattggttggcttcgttattttataataaaatttggtaaaaattccaatttttcaacaaaaaacgatg

SEQ ID NO: 102315 - DNA, 442 bp, Heterodera glycines
actgaaaaagaaaaataaattaaataaagttattccaaacgaaaagttttgtaaagaaaagttgcccagaaaattttctcactgcccattttttcgcagttattttttgggaacgctattttccagaagtttttttacaaagaatcgcgatccgttaaaataacaaataccaacggcttttataagtgaaattccattttataagggcaatcaaaaaataaaaaagctatgcggaacttctagaaattcttatatttttttacatgttttgtatagtttaagaataatggaattaaaaagttttgtgccaattaagcaaattaatttgtaatgctatttctctctcatgctttttcttatcattagcttatcagatttccttattatttttcgtgccattatttcccaccccacgcgttcttctcactttgctgaagagatg

SEQ ID NO: 102316 - DNA, 71 bp, Heterodera glycines
ttgtgaattttaaaaacgaaccgggacgggggggggcaacaatttctgggaagaacaaattgcgaacgatg

SEQ ID NO: 102317 - DNA, 1003 bp, Heterodera glycines
ttgttgtaaagtgcccatttttagtttttttgctttttttttgttttttgcaattagaagatttttcgtaacattttcagcaatcgcgcaacaatgtttggttggacattttccccttttttgaatgttctcaactcggcctcaaattggcactgcttttgcaacgtttcaatgagctctggtggacaaacattttgatgacaattccaatttcggcaagtttttttgactttttttttgtaaaagtgagtagttaaatgcttttatttaattgaaaatagttttttgttttattaataatacaaaaatttttaaattttgaattaaaattttttttttgtgatgaataaatgtttgacatttaaaattgattatttatttctttttaaattaaagaattcatttgttttttaattagaatttgtcaaaaaattaatttcaattaaatgtatatataattcatgtacatttcaaattaatcactgttatacctcatctaatcacttttatacctattctaatcactgttgtaaagttcaaatccggacgatgtatattatttattttctatgtatttttggattatttatttcatcttattaattttaaattaatcatttaaatatgaaaattgtcaataaatttttaatgtttaaactcttatttaaatatgtttttatcctttcgataaattttttgtccataatttgtattttttttatactccatctgtttattcacattttcatgtttgaaatggtgtgcgttattgattaactcaacttttttgtcagtggaaaagttattatgggcaaaaaagaaaagaaattaaaatttttcggttttcacatatttgttaattttgtttaaatcatagtaacgaactgaaagcatccatcagtgcttaattaaacgataatttaaatcatttttagaccaaaaaacgtgaacatttttctttgaaatttttcaacaattttttattttttcacaatttcagatg

SEQ ID NO: 102318 - DNA, 772 bp, Heterodera glycines
tcttaaaaatcgattaaacggactctaattgaataaactaacgcaaatttttaagcacacacactaaaatagaacgctactgtatagtttttgtaggcaaacttctcacttttttcaagataaggacgaaggaaacacaaaagaacatgaaaatcagcttaaacaatattttattagcgtaaaaattgaataatttcttttgtttctgctcatcaaaaaaattacaaaaattgcaaaattttgactgttctttaaggcattttgggtaattagactatttgttaacagattttcatcaaaactgacaaatttttacgagtttgaaccaatttttgaaagaaaaaataacatttagaatcaatccaaaagaggcaattttcgcactttgcatatcaaactgcttacaattagcattcgcataaaaaagaaagattcctctttaaaaaatgttattaaatcaaatttgttcttttttgaattatcgcgttaaatttatgccaactatgctatttggcgttatgagcaatttttgtctgacactgggcttgacccgtcgtgttggttcatcgctctttttccggacgccatgtaaatccaaattgaacagaaaatattgtttgtatcaaattgcttttcacaatgctttacaatttcatttctttacaatactttaaatttgtttacataaaaaatcagggtaaaatttgtggggagcttctcacgtctctctttatttaattataagtattatttaaaaaaacgggtggaaatg

SEQ ID NO: 102319 - DNA, 58 bp, Heterodera glycines
  unsure (1)..(58): unsure at all n locations
ttttccttcaaaagcatcccncctccccccccccccccaggtccgtcctaccgtaatg

SEQ ID NO: 102320 - DNA, 1003 bp, Heterodera glycines
ttgttagcttattcctcctcctctttcaatgcttttcgtgtaacaaccctttctaatatcggtaaaaaattttgtcgtcgtcgtcaaattggtggcacagtttttcacacgacggttatgaaaatgaaatttttttcgtaaaaaatcggccaaagtttttctgcttttatgacaacggtggcggttggccaacaaaagcgtcaatttgtgggcggcggaagggtccttcagcaattcgttgttgtcggagcacataaattttgttgaaaaattaagagaacgcactcttctctaagaaatttgagctaaagtttttaagtgttttttattttaaattggggaaaacaaagtttttcaacggatttcaggacagaatttggtgtaaatccgtgttcaaattagcatgaagatgggaataaattagctaaatgctaattgaaatggaaaatcttacagttcctcctgttttttaaggctagacttgtgaatcagcagatttttcttacgaaataattttaatttttttttttaaatttgttcattctggcataatgtttcatttttaaatttcatggtttttaattttcgtttttgtaaggttcaatttttaagaaacccaagtaaattttctatgaaatttccgcttcatcagaaattcttatatttttgacactaaatttttcgtgaaatttttcccgattttttaaaaataaaatttttcggcgtcaaacaacaattacagtaaattgaattttgtacaacaattgtaaactgtccaacaatttcatgtttacttggatgacggccaagcgatggttgttgcgtcggctcagcttaattctggacctatctcggcacattttgttagattttgaacataaaattggcatttttattcggccacgttttattgtagaattttttttttcaaattttatacacacaaattgaattggaacaaatattgtagcatttgttcaaaagaattttgtttctacatatg

SEQ ID NO: 102321 - DNA, 140 bp, Heterodera glycines
  unsure (1)..(140): unsure at all n locations
tttaatttttcggcggaggaggaacggggcggggaatgaagtgcatacgcttntgaaaccaagcctagtccagttttggtccattcattcatttttataatttgagaattcatgaaaataatatttatttagcattaatg

SEQ ID NO: 102322 - DNA, 616 bp, Heterodera glycines
  unsure (1)..(616): unsure at all n locations
aatggtttttgagacatatttccacaattttagaaaaatatgggttttagtgaaattttagaaaatgtgattatttactgattttcccaaaattactttatttcgagcgaattttttaataaacttaatgatttttttaattaaaatgggctcatatgtacttgaaactttgctttttattttgttttcgcacaatatgttttttgactttgctcaaaaagtttccggaatagagattgggccggcggtgccgaataggcggncgccggggggaatttttgaaaattttactctgtttcttaccaaaaatttcccaaaaaaagaccaaatttctctatacacggcgagtcaattttgggctccaagtacaaataagtttattatttatttagtaatcagaacgccaaaactttgcaaaacttaaaatttattggggattttcccttgtaaaaatagaagagccgatctcgagttaaaaacttaactttcacaaaataaacttagaatcgatagaggaggtcaaaatattggcctatgcaaaatttcaaaaaaatcgttgcataaggaaaaattttttagcatagcaaatatttataattgtttacacaaaaaaatg

SEQ ID NO: 102323 - DNA, 241 bp, Heterodera glycines
tcagtccctctccatcaagtccagagcagcgttggccttttgtcgcaagtcgttcttttgctgctgctgctgctgctgctgttgttcttggtgttttgggaatgtgatggcaggcagttctccgtaggggatgttgaacacgcgcgccttgttcttcacgcggaaaaagcagtgtccgggtagatcatagatgatgtcgaacggtacaaattgaactttgtcgaaccgtgtacaccaaatg

SEQ ID NO: 102324 - DNA, 97 bp, Heterodera glycines
  unsure (1)..(97): unsure at all n locations
atttcaagaaaataaacgattttntggaggattcttctaacaaaaaaagaaaagcaaaaaacataattaattacccctttcaaatcattcaaaaatg

SEQ ID NO: 102325 - DNA, 253 bp, Heterodera glycines
gtaatgagagaaacggagtgatcgctatcattcttgttactaatgtgcaatttaaggccgacatgtaatcatatgctgactatagacgtgtacaatagggtatttaaggagaggccattcctgactaatttttgatttgctatatgctagattttgaccagaattaatcgtaaagttaaataatttaattccaactatgtattttgaaataatattttttaatttaattacagcgaatcccgactttcaaatg

SEQ ID NO: 102326 - DNA, 488 bp, Heterodera glycines
tctttaattaaattcgcttgagctaatattttcttatcttacatgatctgctagttatcgatatgaaaatttcaatttttctttctgattgtgtgctttggatccttttttgttgtgtaaatttatgcataataaactactggtatgatagttcccggaaaaaatctttatgtccccctgaaccgcctaggtcttatgctgatcaaggacgattcgtttttggccaattctttttttattccgattagtttttggccaattattttttattcggattcgtttttggccaattcttttttattccgattcgtcgttttaccctcttatgcatagatttgtattgcttaattttagtacagccaccgcggaatgttcggcatccaagcgatttgaactgtgatttttctaagcccgaattgtgtaaataaaatttttgtaaaccatttttaacaaaacaaatgtttgaaaattaggtaaatggcgaaatg

SEQ ID NO: 102327 - DNA, 370 bp, Heterodera glycines
tttgcaattttctttgagacataaaaatttaataagtaatatttctcaaatttaactattttcatgtgtaatactttagttggtaccccctttttgaaaaaaatattttttgttttcaaaaatcatgaaaacataattctaatggattacgagcgcgattgtcttctatcttacaataatcccgagaaaattcctatcctgtgacaacatacacaaacacccacgccagttttttaggaattattttaaaaaacttgaaatatataaaatttaaaagttcccactactatcatgtgctgatttatattgaaatgttgcacatgactgtcccgcctgatctcatccgccagggaaccatctcctggaaatg

SEQ ID NO: 102328 - DNA, 595 bp, Heterodera glycines
ttgcctttatgaatctgacataatattttaagtgggattttccgaaaatttatctaattgagtttaatataaaattcgatagttaataacctattccgaattgatcagaccattcaaaattgtgtttaaaagccggaaaaattgaaattgagttcattaaaaaaataatcaaaaatgaaaatatttcttttttatttcttgctactctcggcagtgaagaagaaaaaaacttgtcattgctcttactgtatgcgttgaccaaagacaaaaaattaagtgtttacctttgtgattagtgatttattgttgtgtttttttaattagttgtcattttgcgtttaatttatagttttagtaaaatttgttgataattacctaatgttgaattttatttaaaatgtaattggaatggaagttttaattccgaatgctacattaactttaaacattaaaattgattgagaaaattatctttaaataatcaaaatgggggggggggcggcgcaaatgtcggcgggcaagtgtcattttggctggtcggcgcaagtgtctgcggcgcaaacttgtcgcggcgcaagtgtcggcggcgcaaatg

SEQ ID NO: 102329 - DNA, 118 bp, Heterodera glycines
attaaaataaatatacattcggttgaagaaaaattaaaatattaaagcaatttgatcaaatatatggcaaattaaaaacgaaattaaatgaaaaattggaaggaaaagggacaaaatg

SEQ ID NO: 102330 - DNA, 207 bp, Heterodera glycines
ggtgtgacttgtctcagaaaagacgagagcgagagtttggcgagaggcgagagtccccaaaaagacgagagcgagagtttggcgagaggcgagagtaccaaaaatggcgagagttggcgagaggcgagagacgagaggcgagagttgtcccacccctggtacaccggcagaaaatttgacatcgaaacttagattttaaaaataatg

SEQ ID NO: 102331 - DNA, 208 bp, Heterodera glycines
attacttttatgacaatttttgtgtccaaccttcgaattttgctgggcaacaaaataagggacgaccgaaggaacaaaaaacaaaacaaaaaactgtgccaaattggcatttcgttgtcttcaattagcatcgaataatcttgataatgctgtgtccctttctctttagctcgtcggcttttaccttttgctgcgttacgaaggcatg

SEQ ID NO: 102332 - DNA, 784 bp, Heterodera glycines
ttttaaagggaaaagttaatgaaaatagtgtgacgggtgaagatactatgaagatggtgaaaataggtgataggcaattaattaagtgtttgtacatattgcttagaatgcattttcagtgcctggtgatatagagtgcgcggtataatcaattgtctgagttttgactaggtgggctgagtttttggctaggtgccaattcactattgattcgtgcgctaaccattttcatcatcaccaaatgctacaattttctcgtccaccaattatcgtgccttatgatgtctgtccgtaccttatacacgccaaacaatagtgaaaggggcgtgactcagtcagccatgcgcatactttgttcgctaaactcggtaccagccgctaccgtttatcacggacagtggccggcgtctctttttgtgtatttaaggaagggatttgtagcacattactcactttattaaagcagcaaaaattaaaattgattatttttaattaaatatgtccgaaaaaattccttaaaacaggaaaagaagtaagagcaaaaagaaatgtaattaatttttttaaaacggtcccaaaaaaaaatgacgaaacaaattatttcgaggaaattgagagttatataacggaaaacaaaaaattcggcattacggggcatgttacaaaattctattttaaaaatgcctatacagagtcggctgaagaaaactttaaaaaaacaattaacaaacttattgagaaagcttgtaataaagaggaaaatggacgtaaaatttgcaaaatg

SEQ ID NO: 102333 - DNA, 172 bp, Heterodera glycines
  unsure (1)..(172): unsure at all n locations
agtcttcngggtgtaataaagtgcaccccaattcaaatccattatcgtaacttctcacaatctccacataaattccgaaactggcagaaaaaaaaattgtgtttggttaacacaaattacaaatcacacactttttcacccatccctttcaagcagtaacagcagcagcatg

SEQ ID NO: 102334 - DNA, 166 bp, Heterodera glycines
tgccctccgggcgctgctttgccggcaaatgaagcgtaaatagacaagcaccgtgacgagaatgtgcagcgggagaaactgtttaaatttgggggaacaattttcaaaatagatcagaatgaaaatttcatatttaaaatgatgatcattgattgatgacggcatg

SEQ ID NO: 102335 - DNA, 134 bp, Heterodera glycines
gatcattttttgatcagaacatagtgtagattaaatattttggaccattttatgccaatttttttaattgtaaaaatcaattaattttaatttttgcaaattctctgatcactttttacttctgatcagttatg

SEQ ID NO: 102336 - DNA, 1003 bp, Heterodera glycines
ctctctctgtctccttctctctcattctttctctctctctctcgctctgtctcccctctcgctcttacttcactcttctttcacacattctctcttctctcccccactctctccggaacgggccaactccgtctgagccaactttgagtcaatataactcttgaagtttttgaccgaatcaaacaatcttgatatcattcgaaagctcttcacaggctctattagcctactaaaaattacaaaaaatttcgaactataaaaaaagatagaaataaaaaactttgaaaattctgccttttttgcggttttaaactgacaacttttttgagagctgattaatcactgagaaatagcttataaatatcttctaaacatctagggctttcgaacgataccatgattgttaagtttggccaacaaagaaaaaagttatagctttttgaacattgctgagacggagttgacccctaccgactctctctgcttttttttatcatctcaactcttttgattctctcttttctcccattatctcgccttttctcttccctctcacccactcctctctctctctctctcactctttctcccttctccgttctctttccccattctctctctctcatccacccccccactctcccttcttttctcgttcttccctttgtctcctcctctcatccctcgcactctctcttatttttcctatctctcacttcttattccctcacgctcctacgctttcatcacacataagtaagcaactgtctggtcttcccttttttctttgtatatgctatttcttttctttttctcttctttttttcatattaagtcaaaacgccaaatgccaatttaattgagggggcggggcttgctctcatttaatatacttaggggatacttaaacatgcttttcattcaaaacaaatatcaaaaaccaaatcagattattttcgtattataaaggaaaattaccaaacctttttaggaaacaagaatg

SEQ ID NO: 102337 - DNA, 950 bp, Heterodera glycines
gtacggtggcggtgttggtggtgtatcgtatagcggcgccgcattcgcgccccaacaactgcagcagaagcggttcgattacgtaccgacagacccctacagctatgagaggtaataaaacacggaataatcaaaattatgtgatcaataagcggaacaatgaattttggggccacaatatttgggggagaggggggggtgtttgaccaaatttggactttgtgaaagtgtagaccaccctgagaaaaccattacctcgtaattctaaggccatttacccattttcggggtggaagtggccgaatatacaatcctttttcgaaataaaagcggcataattttaaactaagctttggataataatcgaaagtgaatggaaatccgctgtcggctgtttacttttgttgactttccttctaccgtaccccggggaaccaaaggcaaaaaattggcaaatcttaatcctattacataaagctgtcttcgacagcactggttatactcaatgtacctaccttctgcttattcagcttctaccctcttgtgccggccaaacgctttgatgccggcggctttggcgccgcttacggatcgcgcggacgcttttccggctttctttaagccctttacatgggatgatgaaaaaatgtgttatgataaaaacgatagacgacattttcaattattttctcgatcgaaaaataaatttttggtcgaaaaatgttcaattttttgtatgtgttccttacagcacttgtaagactgatcaattggacaataataaatagattattattattaatttataatcagtaaaatcatattaataattaaatcaactataaaaaaattagacgaaaaaattctataaaaatatttacattgcaaagtctaaagtcttttaaaactgtgaaagtcgataaaagaagccgctgcggtcttctgcgatg

SEQ ID NO: 102338 - DNA, 297 bp, Heterodera glycines
taatgcgctccattgagcagtacaataagcaatatataatgaattgtcctaaacctaaattgtttttttattgatttgctataaatggagcaaaattttcaatcattcaatgtgacggacacaaaatttcggcatccatttacattgacgatttccggtagcacaggaagtggaaaatcagaatgggttatacgttttttgagaaatgtggatgcccgggtatctaatgggccaatcaatatgatattttattgttatggtgagtttaaccacaacattgcttctctccaaaaaatg

SEQ ID NO: 102339 - DNA, 836 bp, Heterodera glycines
agtgttctccccccccccccctctcattttgtttttgtcttcccctaattgtgcccagaattgcaccaccaccactaacgcctcactttttgtcccgctgtcagaagagtcaggcctaatcggacaaaaccctccctcctttccgtggctctcatctccgctgatcacacaactttttcccccacccatctcttcattccgcttgacgacgcatttccccctcctcctcctccccctgtgatggtggcgaaggcaaaaacccaacggggacactccatccaaaagagaacatcgtgaaggcgcctcttccattgcggacggacggacatcctcaaaatggcgagtgcaaaacagaattcgtttattatgaaaaaggcaaattatacttttttttatttttataattccttttgttgggatttttttccttgctccttaaattaatgaaatggactctctgaatttggctaatggatcttttcactgtttgttgttgttgttctctccatcccatcccttcttctttcactgtccttgaactcctccaactgaaaataggcgggctttctccggccttccgtcccccccccccccccctccccccataatcagccccacctttcccattttccgcgggggggttttggtctccaattaatccatcccccaaacttttgccctcgtattcatcgtacaaatggttattacaactggggaatgtcataaaatgggggggaatttggtgacttggaatgtatcaatatttgtaaaaggaatgtgtataaaaataaaattaaaaacaacaaagaaacttaaacggaaaagtgaaaggaatg

SEQ ID NO: 102340 - DNA, 99 bp, Heterodera glycines
aaattttattcaaagtaatgcaatggcaatcgatgtaatattcgggtcctttgaagaatttgaacatgtccgcgaaaatttttaaatttgtgcagaatg

SEQ ID NO: 102341 - DNA, 1003 bp, Heterodera glycines
ttgtcacatttttttcctccgcgcaacatcacacgaaaatgtccccctttccatccaaaacaaaacataaaacgcacgaatcaaacgaacaatttttcagctgcgcctttttcagtccgtttttgccatttttgttcacaacagccaacgactcgactgagcacaacgaccaccacactatcgaccagtaaaaccattacagcggtggcgggtcgacgagtctttcccccgccgccgttcgccaccgccgccccttctcttcggctggcctctttttcaccactctcttcgcccgcctcacctctcccgccacttttatcaaaacttatcatcggtgcgtttgttggccgtaataattctccccggcgtttgctctgtccccaacagcgcagcagcagcagggcactaacattggccaaaggtaaatgactataaaagccaccaaccaaactgaattctttaatcatcagacagtttgacttttcagcttaaacttgtgcccctttaattgaatcataaatttattaggcttcttcctctctacatcagccgcttttatggcggaaaggagtggcgccggacacataaatcacaatggaattgccacactttccgaacgtaatgcgcacagaacatcggtgcaacaggtgatttttgagaaacagagggcgccataacattacaaataaaaataaatttatatttcatacaaattttgtatatttttatataatcattatactttaaatcctactttatctatgtttgtatatatcattttgtttgtctttcttcagtgtccttcgtttgcgccgtttaaaccaaatcgggcattaattgtttcaaaatcttcgctgcttgagtatgaatttgatcggagagggcctaaaaatgaatacagcggccttgacgacccgcgttttctcaaggaggtcactgattataaaaaaaaaattgggtaatacatctttaaatttagttgcatatacaacaaataaatatg

SEQ ID NO: 102342 - DNA, 129 bp, Heterodera glycines
  unsure (1)..(129): unsure at all n locations
attttttattatcaatttatataaattgattgcaaaaacatattntaaaattgcaggcgcttctgctgcttctgaccacgtatttcaacaatgaatattttagagctatggaattnatgaaaattaatg

SEQ ID NO: 102343 - DNA, 451 bp, Heterodera glycines
  unsure (1)..(451): unsure at all n locations
gaaattggaaatgaactcncaaatcatcggaaaattatttactnttacncatcatcttccatccaaagctcattcaaaacaatatgcaattgtcagaagagtgtaatgttttgttgttcccatcctcccgtatttttttcatttattcatcgctttgcccctcggggtaaaaaattgatccaaatcaatacaaagaaacattgtagaaaatggtgtgtacataggttgaataaattatattaatattaatgaaacagataatttataattttggattagaataaagcgtaaaattaatttaattttatgggtcagccttttattcgtaaagtttttgtttataaataaaaactgaaaaggaaataagaggatcatgttagccaatggaaaaaatcataaatgtatatttaattatgtaaattaattaggaaaaattgcagagaacaaaatg

SEQ ID NO: 102344 - DNA, 430 bp, Heterodera glycines
tgcaactttagatgcataaaaggatctttaaacataatgctggtcatctcgaaaagtgcttctcataaaagcatttgtttcgccatcaacaaaaaaattgaaaaaaaattacttgatgaaaaatcatagatttgaaaaaatcatatattagatgatgtcatatgacaaatctgatgtcatattcgtgatcagcgtccccgataacccccgagtagaacaaaatatcattaaaaacgcctttttttctttttttttagggaccagtaaaagtaaccattatcagatcacccatatgtgcacttaacttttttgaaattatgcaaaatttatttttcttttttgatgcaacacttttttcctgcactgtatctaaaaaattatcaacaagagctttggctccaactcggcgcgagtctcgagtgaccgaatg

SEQ ID NO: 102345 - DNA, 119 bp, Heterodera glycines
tttttgtgcataaaataaatcatagctttaggaaattaaaatacttttaaatttttaaagaatttaattgtttgtgttaattgtcttcttaatgcctcgtttattttattccaaatatg

SEQ ID NO: 102346 - DNA, 1003 bp, Heterodera glycines
atattgaagaaatatttaatttataaaattcattaacattatcaccattactcacattaagatcaataattaggggagtatttttacttcgaaaactcaatctttaggggtgcatttttcccgaaacttcgagcattttcgcgaagctcgaagtttcccgccccggtcccggtaacgagctcaaaaaacgcatttctgcattaaaaattttcgattctgaggtcattatcggtcactagaaatcactattttggggttttgtcactaaaatagttaacaatcactattttggtgttttgccactatttaattaaattttagttttgacgtgcttcaaagttgggtatttgaaaaaataatatttttagtaaatgattaatttatgtattctattttacattatatatttgaaaatcaataaaattacatttgatgaagatttgaatattttcttcaatttattccattatctttaaatttaaattgattttaataacgattcctcagattagattattttaattaaataaacactttaaaaattgtgattttactgatgaaataagatttaattattttcttgattgtttgaaaattgaccatgagacatgaaaacatttcaacaaaatattcgcgaactgattaatttgttttcagatttttgtcataaatattcactttctcatcgatctctgctaatatactttttaatttcatatttttatactattcatcaatactgcatttaaaaaccattttaacgatttatttcatttaaatttatattaaaatctatttattaaataaaattaattgtcacctcaataatattttttatcaatgataaaatatgaacatagacatgtaatatgttttaaaccattcattttggataattttgtaataataaattttttaagcattcttttatttaattttaattttattgtcttttttaattgtgaatttcaatgccttttttcacttgtcttcttcgaacatg

SEQ ID NO: 102347 - DNA, 242 bp, Heterodera glycines
ggtgatcagctgatcagaaagaacagcttagatagaaaattgttgatcatttgattagcactgtgttttctgttttaccacttttctttttcatgggatgcaaatgatgctgataattcgtaagactggattttgataaattggcataatgtttggcaattgtttagtactttgggtttaatagagcttcgacattttcgaaaaaagcctgtatatgtacctatatctatattccacaaatg

SEQ ID NO: 102348 - DNA, 1003 bp, Heterodera glycines
gggatggcgtttttgtttattgatttttccttttttaaccttttttaaaaagcgttggcaccactaaaaaagttgtttcgtgcctctttttttgagcctattctacttaattgaaaatggtttttattttactaattaataataattacattttttaataaatttaattttttttgaaaaacaagaaatttctttagacttatttgtaagcaaaagttgaacaattcatttaaaaacaaattatactaaggaatttctaaaaattattctgtttaataattaataaaatttgctcattttctctacacactctctttattgacgcatctctcatgttaagcgcacggtgtgctattgattaattcattattttttgcactcgtcttaggaaaaaaatacaattacttagagtttattttcaaaattctctttgctaagtttagcacagatatacgaataaataaattttcctatttaaaaaacaagaattgtattatttttttagaagatttattatcttagttttccatttctcaccttttttacaatattcatttaaaagcagattttttatattattattattattataacatttttaacctcaagccaaactttattttctctaaaaattttaaggctctacaatttttaatttctttttctcattagatataagacaaattctatgggtgcgctaacaaatggcattaaaattgcttctccgtccaaatcgcccagcattcaactcggctcaaattggcactgttttcgtcccgtttcaattcgctggtggacaaacatttcgatggcaaaaaagtgaattgttttttagggtttttgttgtggcatttctgtttctataaagcaattttttaatggaaattttaatgtttttgaatttttaatagaaaaattttggtactaaaaaatttgtttaacccttattgcttccctttccgctaaatattaattttcgcaatttcagtggtgtgcagcgatg

SEQ ID NO: 102349 - DNA, 242 bp, Heterodera glycines
tttcaaatttacaactataggaagtcgaagttggtcaaaatggatgtcagattcttgtgcagcgagcgatccctaaacccgaaaagcaattttcacatttttttattacaatttacaaagcataatggtctcccccccctctttggtttttgataaattcaaaaacggtaacttttaaagtagcgttagtttttttattttatgttgtaaaaaaaacactgctttgtcccttgtccttgatg

SEQ ID NO: 102350 - DNA, 95 bp, Heterodera glycines
tttttatccatttattctgctcccctcaactttgccatttgtaaggtgacgaattgcttaacccatcggatttgccaatcaaatatgccggaatg

SEQ ID NO: 102351 - DNA, 615 bp, Heterodera glycines
gctgaaattgataaatataaaaaaaatttaaaaaaataactacaaaattaaatatagtttattctagaaattaaaagcaatgcataaaaaaatacttttttacatttaaatattttataaaattgatacctaaatttttaactttaagtaatataaaaatatttttaaaaagatgaaaaattttaaaaaattggtgattttggttcattgcagaaattacctgatattagtagtaacccccccccccccgggaccgttggaggttgacgctaattagaagtgacaggtggtgtaattaggggtgctaatgtgctaattggtcaaacccaagcctatgggaggggtgcagccctttgaacttgccgacagatgggggtggggtggtaattcgtgatgactaattggtactaattaattaattgggagtagggcatggagctagatgtgcggggtgacagatgtttagtttgacaccctcttctacaccagtactatatctcttcgctctttttctctggctatcatcaaacacctgcactatttctccacacccgaactgcgttgcccctataaataggctgtagttttggtctttcccaacacaatcatcaaatg

SEQ ID NO: 102352 - DNA, 567 bp, Heterodera glycines
  unsure (1)..(567): unsure at all n locations
atttttctcttttattttcataaaaatttgctcaaaatcacaaatttgggacatttttgtggacaaatctgttacnaatcgcataaaaattacaaaaaatttcccgccggcgcctatcggcaccgcgggcccctattcccgaagttttagtgccgcaaaaaatcactttcgattttcgtgctcagaatcccaaatgctttatttccaataaaaaaatgatcaaattgatcatggaaaatctaaaatataacatttgagcattttaaacgtgttttgaataaattttgtaaaaatgaggctttttgacccaaaatgaggcttttttgtctgccaaatgaggcctttgaaaattttagtctggctaccctgtatacaaaagtgaataatgtgagggatggtggaccttcttttttaaatcaattttttaccatcaaaaaaacgatagattgcaattgattggtatctcataatgaaaaagttttatttcttcatacattatatttaaaatataacaaatataagctgaaaaaacaaaattcatttaaatttctctgattcaaaaaaatg

SEQ ID NO: 102353 - DNA, 632 bp, Heterodera glycines
tcgcccactctgaaaaatttattactcgcaattattatgtatttattataacctttttaatccccttgaaaaatgtctctttccttttgcatctccccgcgcaagcatttcagtctttttattgtacagaattaaaaagggtattattttaagcacatttaaaaaaaaaaagtgagcgagctttttaatcaaaatcaaaattgcaaaaaattttagagctttttaatcaaaatcaaaattgcaaaaaattttaaatgtttacggatatttttgtcagaatcaaccattttcatcaaaaggtagatattttgtagtaaaatttagagctcgaccttgatctggatctaaattgttcccgtgggggatcgctctgatcagtgatcatgaatctgacattatttttgaccatccctaaaaaggatggagggggggggggaggggggtaattaactgaaaccgattattcatctctccattaacaccccgattaataaaaagcccaatcttcatcaatttttattatgtttaatatgtatgattcttatattttcgtgagcaatgacttggaagtttgaaaacgatttttaatttaatttttgccgactcaatttttctttagcgaataagttatg

SEQ ID NO: 102354 - DNA, 396 bp, Heterodera glycines
tgagatatgtctttgcagggggtacgacaaagaaaaattgaaaattttagcaaaaatacttgggcggagcgtctgttcttgaatcgtggtccgggatactgtattattactattatttttgaataacgttgaaaacaaaggattattaccaagtctaagtttgcttattaagaatttcgtttttaatggtgtaaatttttgttgtgctttatggtggtggatttattatgaaaaatattaaaaaaataaatacattattttttaattttctgtgtttttatttagtaacaacaacgaccacaacaacaactgtttcaacagttgcatcatttgcagaaaattcgactgaaaatgtgccaaagatagccgcgggctatggcattgtgaagccaaatg

SEQ ID NO: 102355 - DNA, 785 bp, Heterodera glycines
acaatttttgaacagaaaattttttcacaacttcgtccaaaagcaatcaaatttaaaaatttaatatctttaaatagccctaaattttttctaatatcctgcaaaatttcagaaaaatctgttaagtttcaaagaagttatagcctgagaaactaaaaaaaataacaatttttaaaacgtttttcgtcataactttcttgaaaataaaaattttttttaaaattttgcatgatattataaaatatttaaggctttctaatgatgattagtgaggaataaatgtgcttaaatatgaatttttggtgagtgtgaaaaaaagtactgattttttctaatttgttctgaaagtagtatatagcgtcaaaaattttggtcaattccgaatcctggacccgaattcgaaaaaaaccgaaaatttaaaattttcaaaattcatttttatgttcgtacttgtacagaataccattttttgatgttccaatggtttttggctaaattaactttttggtcaatttaagaacaaaggtgataattttgaatcttcgacttttttgactaaattttggatgaaacggttggaattttgacataaaatatcaattttcttattttgttccatgtctttctttttctctccataaatagggcccgggtttatgtgctaaaaacgccaaatatgtacatgttgtgccaaaaaatgataatgttctagatttgtcaatatttgatccgaatcatctaagtatccaaaattaagaattttttgaagaatttccgacaaaatg

SEQ ID NO: 102356 - DNA, 419 bp, Heterodera glycines
aaaattttctaatatttatttttaaaaatttcttgtttttcatgggagtggggtttgcctgtccgggtaatgtcgcgtagggccagcatgtcatgcgtttaccggggtctatgacacttttcgagaaaaaagaagcgactagcggacggccggtgccgacgggcactgctttatgtacagatttgccccaaacacaggtgacccgtcggcgtggcctatttcccagcttcgatctgctcgactttggcctcgtccgggcgggcggtgggccggtgcgtccgcgcgcgttcagcgtgttcagctcgctggagcgtggcgtggaaattgagtcggtttatgtggagggccagagccgtggcgtgtacctgcagttcgagtcacggccgcccatttcggtccgaagcgacgcccgaggaatg

SEQ ID NO: 102357 - DNA, 917 bp, Heterodera glycines
agatattaaaattcgcttcctctttttatgggttgaaaaatttaaacaatttgacttttattcctatatttaatttgtttcaacagtattgatgtgtgtcattatattttttgacagaagtatgttatcttataaacgcagttcgatatatatatatatattttttataaaaacatatgtctggcatttttttgagtcaggtatcatatttagttgatttttttgaatttttcatgattaaaactccaaggaggcataattattttttattgaagaaatccattaattaatatttcttttaaaattacataataattattttcccagttaagctcataaattaataattttttacttatttgtaaaaactattcttgcttagattctatttataagaaatacttggaaacataaaactttcgactaaataaagaaagtgactgatcttctgtcaaagaaaataattaaaaatattttttgtttgggtataataaaattttgctaaatcattgaatgaggataaaaaaagaaactttttgtttggtcagcttaacctgggttcactgtgagacacacataaataggccaatccaattgcttgctcgaaatggttttaatctttataaatagtatatatttgttctgcttaacgctcaaacagtttatggacgcactaaaaaaagaaaataattttctgccattcttttgttaattaaaagttttaccaaaaatataggaatatgaagcttatacaatatgtccatattattgttataattaatgttcttgaaaatgtatttttccatcatgtttcttgtggaagcttgagcaacgcagcgagtaatagccaaggttttggccaaggagggggagggggaggaggacaaggcagtggccaagggtggggccaaggcatg

SEQ ID NO: 102358 - DNA, 130 bp, Heterodera glycines
gctgcaaaattgatcattgaaaaaattttaggaatttttttttctaaattttccgatcagtctaggcccgaatatgaatatctgatatcaggtttaacatttaaatgtacttgtaattcatttagtaatg

SEQ ID NO: 102359 - DNA, 241 bp, Heterodera glycines
aacagatgaaaaacatttatttgaccatttattaccaaaaggaacaattttcaaaatcaaataaaattggttatttatatcgaaaaaatatttaaaagaattaggaatggaaaatcggaattatatacgtagggtataacataagttctgtcggccttaacataatccgtaatttctgtatttattttaatattcactttttctttgcttaatcaatttttcagcttttttcccaactatg

SEQ ID NO: 102360 - DNA, 813 bp, Heterodera glycines
actgcaaaattaaaaagcatatttatttacatgcacttttaatcaaagtcaatgtatttttagtttattgaatccatagacagtctctccaatttttatgttaatactaccgatggtaagacccttttttgaaaaagattttcaagaaattaaaaaaaaaaagttagggccaaagatgctcgaaaaacaagcttttttgagttcctctagccatagcttttttgaaacttaatgaaattttttgaaaatttgtagactggtagagaacacttagtgctatcgaataatatcaagaattaagaattttattgctattgcttttgaactaagttttatataatatcaaatcatattgatggattttttaaataacgactccgtaccatcggtattagagatcggatacggaccggatccgtatacgtacttttacggatccgtagtccgtaatacgtattttttttcggccgatacgtatttttatgtactaaggattttccgtatttttagtccgtaagtacttaatccgtatcggtgtcaagtacgtaatactgatacttatccgtattttcgcaaaattccgatctctaattggtattaataaactcaaaatattgtaaaaatcttaattcaaaaaattatgattaaaaagaaattacttaatttctctcaaatttgtttaacaatttgtttggcaatttgttattcccaatcagttggagctcattgtcagaacaacaaatcattttcagctcaaactatgagtggcttcgaacagttcagttcatttttaagcaattaagtctcaaaatg

SEQ ID NO: 102361 - DNA, 173 bp, Heterodera glycines
ttccgggatttcattccataagattgtttttcatcaaatttcatcctgtcaattttttgcactaattgtaagctcacacacgcatttccacattttgtttagctcaattcgccaaaattcttaacttcaaccaacttcacaaacttcacaccgacatttctctcctgaacatg

SEQ ID NO: 102362 - DNA, 534 bp, Heterodera glycines
ggtaattaattaattggaaaactgtagtaatttacagtacaggacagggaggcgcaaattttgtgcccaaattgtaaacacaaaattgttgtttttgttcagcgaacccaaaattgccagcacactgtgtgagtgtgtgggcggggagaaaatcgagaaatacctcacattaaaatggtatttgtaatttgatttgattttgatcgacgggtgtttttggggtgatctgataggctgattgataaatatggacaaaggaccgattgatcaaaatttgattgatcacccaaatcacaaaattgtacaacagagaaggggggcatcttgctaccgcccaaacttttgtcaacaaactctcatacattcttgatcaacttgatcaattgatcaaacgacgtaataccatttcccgaaccggctgaaaatttttttttgttttttgctataaaagtgggccgaaccgacgaaaaaaatcattccataaaacggatcgccaaaaacaaaaaccaacaaatccctcaaaaaacaaaaatg

SEQ ID NO: 102363 - DNA, 633 bp, Heterodera glycines
caaaaaatggcatttttaatatttcaattttaaattaaaaaacatttttcaaatttgaatgcaaaaaaatgtactattccctaatttaggtgatccttttaagttataaaaaggtaaacacattttgccaagagattgaaccaaaaaaatgaggctcgagaattgtgaaaaaaaaaaaattcgaaaattgaagattttctaaatgtaaaatttcggcattttgtttaaaattcaaaaatttaaattccactcactaatgagactaggtttatggcataatgcaaaaaaaaattcaaaatacttagttcattcgttcactttcccataaaaatattttttttatataactcaattttgattgtatttgtaaatagaggttcgtcagctcaccctaaaatttttcaactctcgaacaaaacgccaaaaatttcgggcccaatcaaaggatcagtaaggtttttgatctgggatatagagtcaagattctcgagcctcaccataccggccgttgggtaaagcccacacataagccgatggcaccgcaaaacgtctccgttttcccctcccctcccgcgtgttcagcaccggtccgacgactcggagcagtcctcgctgagccttggcaggccaatg

SEQ ID NO: 102364 - DNA, 1003 bp, Heterodera glycines
aaattaaattttaacgatcaatttttgagaaaatttttcatttcttagtgatttaatttttgaaattttttaagaccatttcttaggggtatattttcccgattttattgattttttaatggaatttttcaaaaaaacaccaaaaaggcatttaaggcacgaaaactcagaaaaaggcaaaaaaaaaaaaaaaaacagtttgatccggaattttgttcaattttggacttctcgtgcgataacatatgtgtgaaaacatgtaaattaaaaaaaaatttctgggttcatgttttgcgcttattttgcgatttaattgcatatttggccattttcagaaaaatctcttctcctctccatccctccctttcactctctctctctcatttctctctcactcactctctgactctcactctctctctcactctctcccactctctctctctctcactctctcccactctctctctctctctcgcactctcactctctcttctctcactctctctcttctctcactcactctctctctctctctctcactctctcccactctctctctctctctcgcactctcactctctcttctctcactctctctcttctctcactctctctctcactctctctctctcactctctcgctctctttctctcgttctctctctctctctcgctctctctctctctctcgctctctctctctctgatcaattacaaatcattttcattgaaaaagcgaaagcgattgaataaatttcaaagattgtgaataattcatcactaaattctcattacaattttccatttattctcattaatgtgaatggttcgtcctctaaacgagttttttttttaaagtgtcccgtggaaccaaaatttggttgacgcatttattttgcaaaatgagcaaaataaaaggcaataaaactaattaattaattattgcacggatcattaagaagaatcttttaatttcctccctaagaatttttccaaaatg

SEQ ID NO: 102365 - DNA, 1003 bp, Heterodera glycines
ggagaattattttgcgacatcggcccattgtctgtacacaaatttttatttgtgccacgtaaaccctagacgacaaaagaggccaaactgggtgccacttgaaacagacaaattggcactaagttcgcgtggtgagacgtaccacgtcgacgaattttgggtcgatccacggtacgaagaaaatgacaacacgttccaaaattacgcgtacgatttcgcactgatcaaggcatttgccaaaattgtggccttttttcacaagcaattttattcagagcagttccaccgtttctgccgaacccgtctgtttggcttcacgtctggaccgctttaaggactcttgggggaatttagtcggctatgggctacatgtaaaaataaatgataacatataaaaaatataataataaattgttacatttttcatcaatttttagcgtgccgacgcagaatgggaccaaaaactgcgccatgctgtcgtcaacttatcacccagcgccatatgcaaactgttaatctaataattttatgattttttgaaatttcaattttaagaaaatggggtgccaatgcaaaactctgttctggctctgcaaacgcaggcgctttaattgtaagtcaacgtaatttttaattcttttttaattttgtcgtttttccgccattttactcatgaaaatgccgaattcaaaaatagacaaaattacaaaactaatattcaaattctttgcatggttaagagcgatttaaatacaaaaattttttggatttttcaatttttcaaaaaaatttttacttggaaatttcccggtcccggcttctcaggtcccggcaagtcccggacccggttttggcaaaaattccctgtcccgtgacactcttcctaaaatagacaaaattccaaaactaatattcaaattctttgtatggtgattctggtgcggcactattgactggccatctgccgagcaatgtttattttgctcagggaatattgagcatg

SEQ ID NO: 102366 - DNA, 320 bp, Heterodera glycines
tttcttttccgcaaaattttgaaaatttcaagggaaaatgttttttctatagtcatgtttataattttttcaaaaatttatacattttaaaaatcgtattttcgattttttctgcatttcgatttttcaaaaaataaattttgaatttattagtttttttttaaattttcgaatgccattcttttggattggaatcatttttttgatttatttcgtaaatttgtgtcaattttgggagtggagaggggaaaatctccttttttcaaaaaaaaaaaaagttgcattatttgctgaccatctttccatttttaggacaaatg

SEQ ID NO: 102367 - DNA, 1003 bp, Heterodera glycines
accaaattctgatcaacactctgatcaatgatcaacccatcccctgtactggacagccactgctcctcccaattcgcacactcaccccccccccctcataattagccccccccctcacctcattaattattaatcaccccccccgggccggcggcaaagatcaaagggaaaaaacccattaatcattttcacaccctacagcgaaacctggatactaactacttcggtataaagcatctaacatatgctattagtaaaaaaattacggctaaatttataaaaaaattttggggtgtgttaaacatatgaccatgactgtattataattttattctagtaaattttaaaaaaataattagattttttgcttcttttctctgtatgtatgaaatttttattaatttttcagttggcgatctgtagctttttttttggttaaataacattttagcataaatctcaccttctcaattttacattgttctgtatcaatttattgcaaaataaatggttgcagcgattgatccggtgaattttaattttgaattgacaaatagggttaaattttaaagtacaagaaaattagtttgaaaatttttattaatttaaatagctttaacttttggattttataaaataaaaacctaaataaaaatttaattatttaatattttcacttgaaataaattaaaatttgaattttttttaattttttgaattttttttaatttttaaaaattcccggttggtcccggttcccggtcccgaacaaaaatcgaggtcccggtcccgacttctcaggtcccggcaagtcccggtcccggttttgcccaaaattcccggtcccgctctactctagtttttagcacctataaatattagcccctaattattaccatagtggtaacataacgccaaacagacgatcaattccaatgccaagttgcaaagtgacagcaattgatgagccaattagaggcactaattgaatgaagaagcaatg

SEQ ID NO: 102368 - DNA, 561 bp, Heterodera glycines
gagcacactattttggcaaaataaaaatttcaaaaaaaaaaacttgaattttctcttaagggattttcggaaaaaaatgtttcgcaaattgaatggcgtgttttggatcttaaaaatggttggtagcaatgaaaaagaacccacaggctcttgcctgggtttcgtacctcaaaatttttttttgcaaatctgcattaaatccatcaaaaaatcaacaagcagtgccaaaagaattacgatgttgaacgcgactttgtctttttttttgatcagacgaattttttttatacgttcggctttgatcatactattcagggcagcagttccgtaaccagagaaaaaaaaatcgcagatcgggaacccggagactttttttttttgctctttggcgataattttttttggactacctaatttttaaaactttgccctgttgatgaaaatacaattttttcgccaaaaatttttctgatcagaatgggtatttagcatatgatggtagtgctgctgactctctgatcacatccctgtttcctgatcactttttcttgccttaagatg

SEQ ID NO: 102369 - DNA, 136 bp, Heterodera glycines
tcccttttgcgcgctctcatctttggtgggggctgatcagtgaacaaggaatggaacacatgcacagaatgtgcaacaatttggtttaatgaataatttttcccattaaaattataaatccaggtcggtcgttatg

SEQ ID NO: 102370 - DNA, 473 bp, Heterodera glycines
ttttatgtgtaatgctacctaaaaagtgttaacaaaaaattttatttgcctatttgagggtttttgtgcctatttgcgatttttttctgcctttttaggtgcctatttcgcgattttttgtgcctaaaaatggagtccataatcattaattatcggttttgtgaaattttaacaaggttaattttaaaatgatcgggaatttcagttcccaatgagtcatttttaattctttcactttttttcctgctgctgtcatcttttaccgtaccaaaactgtccccattaccgtataactaccggttcccttttcacagacccttctcggctttgccatcggcacccgacgtgccgcctcgttgctcgactgtttggagctgtgcctggcacacaacaatttcaacagtaatcaccaccaccatcgccaatcgccggcaccgtcctcctcgtcaagttcaagcagtacaacatcaatg

SEQ ID NO: 102371 - DNA, 443 bp, Heterodera glycines
agttcaggattggcatcagaccggcacatgtgccgggattcaaaacccggttttgtcaaggttccaatcccggccctttaaaaaaagcgggatcgtgatcccgtgaaaatcccagcgagatcccgacaactacgctggctcttttgaccaacacaaagtagaaaattcacaaaaatatctttttagcatgaatggcatggaatttcgacccgattttcgacattattgcggtcggaattccgatttccaaaaaaattttgtgatgccactgattgctgaaacttacgctttttgtggtaccttataagaaaaaagaaatgcatttttttagatttttttccgtttgtcctccattttccgggaatatttcccaatttttaaacgcatttcattttgaggtgtccgactttcatccaattggtgccaaggctgttttgtggatg

SEQ ID NO: 102372 - DNA, 130 bp, Heterodera glycines
ttgtggaattttgcagtggtgggacaaaacaagtaaagttaccatctgtgcaaattgtttttttaatttttccgcgcattagtacggcctgtgtctgcgacgcaagggcgcggaggcgggagcccaaatg

SEQ ID NO: 102373 - DNA, 475 bp, Heterodera glycines
  unsure (1)..(475): unsure at all n locations
aatttgaatgaaatgtcgaatttttcactnntagacaatgagcaaatgagttggagaagacctacggaaacatttcacggctttaaaaaatcaaaacaaaaaatgccaaagttcctaattgtgaacaaatttaaatcagttaaactttttttaactgttaagaattaactacttttttaacaaagctagcatttcctaatatattaacctggggttttatgtcacttttacaaaaagaaaaaatgcttttttcaaacagttttgatattgatatggtatttgcctatagaaacaagaaatgcattaatgttttgtgagatgaatcttctgtttcttgactatggagtttgccattaattacatcaattttcgcattttaataacgacaacaaagtttgtttttaaaattcaccaaattatttaataaaacatgtttttctaatggtcagtgtaaacaatatcaaaagtgaaaatg

SEQ ID NO: 102374 - DNA, 280 bp, Heterodera glycines
ttcaaaatatgagaaacgataggaaattaatttttttgaccataattttagggtgccaggttttgaagttttaaccataaatttttcgaaacttaataaaaaaacaatttttttttttgaaatttgcattcttttttacctctgctactggtaagatatattttcataaattcataaaaaaatcatcaaaattttgttctatggatcagccccaaccgatgaaaacaatgaccagcagcaagacaatgccattggtagcggaaaacttatgaaaggcatg

SEQ ID NO: 102375 - DNA, 125 bp, Heterodera glycines
acttcattatgccacattcattatgccagtactaaaaacaaaaagcaaaatttaaatacctatctgtttaaaattgtatttttcgattgctaatttaaaacttcccttaatagcttttgctaatg

SEQ ID NO: 102376 - DNA, 263 bp, Heterodera glycines
atatgtgatggaaacgcaacaaagtaaaattataatctttttttttcagttattagcgcctgttttctagatttttattttgaagcctaaaaactttaaaaaaaattttgaaaactagtttttgtctattttggcgtttttaaagtttatttaaaaatgcaataaaaataattcacccttgaaaatcgaccccaaaaaattcttctgcaaaattaagtgaaaaatcctcaaaaattattttttagatttaattcttaaatatg

SEQ ID NO: 102377 - DNA, 1003 bp, Heterodera glycines
gcagataggcgccgccgggaaaattttttgaaaactgatggatctgttaatagattttgtccaaaaaatgataggtttttgcaatttttagagaatttttttaataagatttacgaatttttgggccatgcgatgccgataggcagcgccaggcgaattttaaaattaaaaaaataaattaaaaaagaaaccgtcaacctgaatcgaactcacgacagaaagtaatgtcaaggttgattcattaaccactacaccacactacacatcaatataaaaaatttgtcaaaatggttaaaaaaatcaaaattgtatgaattttttgccttttatccatgaatatgtcattcttaggggtgtattttcacccccgcgcccccgcgggggtgaaggtcgcgggggcgggggatggcgggggtcagagtcacgggggcggggacgggggtgaggccaaaaaacctgtcccgcccccggcgggggcgggggtgacgggggcggggtccgaaccctactttttattaaaaaaaataaccaaaaatgacccaattaatataaataaaatttcattcacaaaattattatttttaacgacacaaataattgacattttgaatttttaatgaaaaaatgaattttttttttattttgacaatattgacaaattcaaaaacacaagaaaaatcaaatatcatttatttataacttttggcttggtggcttcaagaacgcgctagcacctttatattacatatagcagaaatactttataaattttctcaaaattcattaaaattacaattttttcatccaattaaattaattaacttatttcgcacttttggtctgcaaaatgccaaaaaatttcgctaggagctttctggtttaaaaattattgccaaaaaattcagcaatttatttcctgtaaaaattcgatctcaaattaaaaaggtacatttcgagaaatgatcgcctctactttttcccactgttcttcgcctcaacaatg

SEQ ID NO: 102378 - DNA, 429 bp, Heterodera glycines
tcaagacgatttattttttgaaaatttctacggggctttaatcactgaaccattgtcaaattattttaccattaatcaagacaatattaccaaagtcaaaaaatttaaatttaatccttctaaatatatatttaaaattactattgctctcactgtgcatgtacacaaaaatttgtcacaccgtaatatagaaattttctgtcaaacaatttctgaagaagtaacaaatagcatactatcagactttttacacacaacagaacaaaccataattgactcaatcgaaacggaccaaagaaaaatcaaattaacaaaatttctcaagagaatagaaaatcgaatatctaagcagattaaaaaacagtgaggtccatattgctatcatccaattcttgtactttcaactcataagtatattttttaaatatg

SEQ ID NO: 102379 - DNA, 386 bp, Heterodera glycines
ttttttgcacttttttttcattcgtttatattttgtcattttttattgtctaatttagctacttcttttctgatattctggtgattcattatgtttttgtttgtttccatttgaagttgttttaaattgggcttttccctaagtattaatttaaacatagcgccaaatctttcccctttgggcagttaatatgtttaaggcgccattgcatgagctcgtcataatcacgcgtcaagaaatgcccacccccattccaaccactttcaccttaaattgttctttcgacaaaaaggaaccctcactttctcttccacccatcacggcactttctccacccttcgcctgagggggtggcaaattggttcttttctttttgcgttgcgatg

SEQ ID NO: 102380 - DNA, 621 bp, Heterodera glycines
tttttagacaaaaaaatattttaaaaaatttttgcctgaaggaaaaatgaacaaattaggaaatatcataggtaacgaagaaagcaacccaactcatctacagcacgatgcggctctgtatcgtggcattttttgtgcatgaatgagttgggtatatggatgagttggtatagatgagttgtgaagaattttctcaaatcaactgcttttataatggaaagtttgcatacatactacatatgtagttttaagaaatactaccgccgaccgacctatttaaaaagaaaaaaatagttgcaagcgaaaaattaaattcaaatttttgttattttttcgaaccagcaaaagcctggtttttggtataataaacaaaaaaccatttttggattggcgaactttaaaaatttgaagatgatttttaaatttttcagtcactaaattttgcctacattttcggaaatcggaagacccaaaaaatttcggaaatcggaaagattactcattgcttactagtcttgtaattaacgcctttttactatcgctttccaattcgatatttgtttaagtgttaaacattcagtccattcgaataaaaatttctgtccgattctctctgaaatg

SEQ ID NO: 102381 - DNA, 189 bp, Heterodera glycines
acttaaatgtggaaattttgagacttaaaacttaggtggcgagatgaaaatgattaaccatccgtagaaatgaatcagtgaccaatccaggattcaggtttttggggatttggaggtaatttaatcttttgagccctttgaaattgctaaccctccatcggcggcttggatccatcccaggatggaatg

SEQ ID NO: 102382 - DNA, 505 bp, Heterodera glycines
aattaagaaaagtcaaataaacctcaaaaaaaaatgcaataaaaaaaaagccaagcaaatgtcaacgaaaaacacaaaattatggaaaaaatacagaaaaatttacgtaaattgattaaaattttttaatcatttaaagcaaaataaaggaaataaaaacggtaatggaaaaaatgaaaaaatgtggcaaagtcaaagaaaagaataattaagaaaagttaaacaaacctcaaagaaaaacacttaaaaaatgcaaataaattaataattatacatgaatagagaaatggaaaaccaagagtacaaaatcatcccgatttgaaaattaaggaaaattaaaaacaacaagggaaaaaaagtctgtatggcgtatgcatttttttttgatcattcaatcgtgctttttttttttgcgcaggccaagcagttctgtgttgagtgcgagcatccggttgaccggcgcacgcatccgctgggctgccgcgctgtgtgtggcctgtgcatg

SEQ ID NO: 102383 - DNA, 197 bp, Heterodera glycines
ttttaatgtttttttggcaatttgtgatggataatttgagtaatatataatgtttgttattaatgttaacattaaaatggcattttcattgaaattgttttatattgatttttttatgcgaaacgattaatttcgattagaattattgagggatgtctttacaaattatttttgcatgacaaatccatcaaaaaatg

SEQ ID NO: 102384 - DNA, 75 bp, Heterodera glycines
ggggactctaagcatttattgttatcggtccaattataggcgaagtcagcttcggcgggagaattgcgaacgatg

SEQ ID NO: 102385 - DNA, 178 bp, Heterodera glycines
tttcaaggattttaaacttagggttattcttgagcaaggttatgaaaaaaatttttgtcaaaaattttccatttttatgacttttaactaattacttacaaattagcaccaaatcaatccttttctcaatttaaaataagaaagatttgccataggtcgcagtgcgctgttcaaaatg

SEQ ID NO: 102386 - DNA, 1003 bp, Heterodera glycines
tagatggtcaacaaatgagataattattgttaaaaatattaacgcatttatttttaactgtttttcagtatgataaacaactaatattttgattaataaaagatataaaatattttactgatttagtatgttatagacattttgttataatttgatttaatttgaagtattaatttaatttattatttttactcctttaatgtgtagattttttctatgcaaaattaattattttaaaagttaattttatgtgattattaattaaataatattttattcgatgataattttcattttgtttttattaaaattgtataattgatggtttgcctgtatatttttatttgtttttataccctttttataagattttaatcattaaaaaaattcaattattaaatttacaaagaaattttccatgtcacacgttatcataactcgttgaatcctcctctatagacatgacaatacgaaaatgtaggagcaataatttttataaaaatatgctttatctttaacttatatagaatattttattttattttgaagattaataggaattttttgtatttaaatttatttcttgttaataaaaatttagttcacaaccataaatctattttctaaatgtatttattaaaaatacatctaaaaaaactaaattttgcactcgtcatttaagaaattgtattgagttttattattcgaatatggaaacttatgtagattcattaaatattacaaaacatataattaataataagatttttagcgaacttaacacaataataattattgattaattttgttgtctttttaaaatttaatcttattacttcttcagttaacaactgaataatttgtaatattttgtttgattttgtcctattttgaatttaaaatttatatgtttgaaaaatttatctatatttctggattaatttactactcttgaatttattttagctttaattcactaatactactgtttattttcagaatg

SEQ ID NO: 102387 - DNA, 598 bp, Heterodera glycines
aaaaaatcagtaaaaatgagaaatgcttatcatatatgttaatacatgtcaaattatttgccatgttatttaaactttttttataaaattcttcataacttcgcctcaaatgaacaaaattttaaaatcttgttaaaattcgatagcactaactttttcctattatcctgcaaattttcaaaaaaattcatgaagttaaaaagttctgacctgagaaactcaaaaaaccaagtttttctgaacattattagtcataattttttttgaaatttatcgaatttctttccattgggttaaaaaaattcttttcttagattccgtaagaaaattacatttaataatattataattctttttataaattctaaaattatttggcaaatttatttaatatattcaaaaaacgagcattcctagctgattcactctttcctttttgaatggaatgtgaattggacaatattttttagtgatgtaattttttagtaaataaataaataaatcagttttcgtgatattcgtacataataaaatatttgaataaaataataattacttttatatttatgaaaaaattatccatttttaagggaaaatg

SEQ ID NO: 102388 - DNA, 1003 bp, Heterodera glycines
tttcacattaaatctcaaatgaaattagtttaatgtgccaattttttttttaattgcttgctcgatcaaatattctaatatttttctaaaacttttttcaccgttttttctgattctttgaatatgaatctcgttatgttttctttaatcccgaatttttattttgtttggttgtttttgatatttctatgtaattttctttttcggatattttattttgtttttaaaataattttttatgtttctttttttttctcttttcggaatcaatgtcaagaaatttttttgcctccattacttcttcctaaaattttaaacttatgtatattagtattttaaataaaattgcttttaaaactttgaaaattcaaaattatttaaagtttttttattcaacaaaaataattatgcaagataacatcgcaatattgccgtccaaactcaagcaaaataagaattttttatggcgtgaaaagactatagcgagccaaaaatgcaaaattttgacctccaaataatgcagccatttaatgattaattacttttgaaagctgtcacatttcctcacaaactttttgatttttttttttgcaatatttcagctcaaatattttaaactcaaattaacatataaatgccatcgacttcatggaaaaaaatcctatggacaaaggaaattgtctcttatttataactcaaaaattttttaattgattttcactattaaaaaatttaatttgtcttttgtatgttatttttgataagcaagttattttcttcagccaaatatatgtaatttattttgaatactcctttcaattgttaaaaataatgttttattaattgtttatagttatacgttagtagtatatgacccattaatccggtgtaaaatcccccccccccttcccttaccaaaatctcccccccgccttttcttttcctcccatcgcccttcatttccaagccagccgattcacaactcccttcctttgcgcaaatg

SEQ ID NO: 102389 - DNA, 570 bp, Heterodera glycines
tgactgattgctggacgatttgatcatgatacatatcaattgacgatcattaaatacgaaatgagaaatataaaacgatcaaacatagaagtgatcagatcataaattatggtccatttgatagattaggcctataaattggacaccgacggaagaagagctgatttttttaaattagattatttcttgaaactaaaataatgggattaaagccttgtcaagagtgatcaaacggctttatccgttttattttccattgacacagatctaagcatgatgcggagcatccccgtgttcggttatgcccggcgcggcggtgccatggcggctggtggaacccaaggaacctttggcggcactttttctaacggtgccccgaccggctttggcactttgccaataaatggtgcggctgggtttggcggcaacagcaacaataatgataacaacaacaacaacaactgtttttttggtgccggtggtggcgaatgtgccaatgcgtggaaccaatttggtggtagtgccaacaacggcggcaacgacggggcgccaggcgatggagaagaaatg

SEQ ID NO: 102390 - DNA, 673 bp, Heterodera glycines
aaactatgaacactagacaagcctcagagggtcttgtctaggctctctaatttgcttttcccttccccctttgtcaccgggttccgtcgatttcagtccgtggttcacagccaatccacccaggtgcgccaatttgtcccgacttgctctggggtcgggccaaatgaattccacggtgcggggttcaggggcaggcagggacgagacacagaattaataaaaaatttattccgggaaatgacctcaaactcaaacttgggtaattaaacaaaaatttaaaaatggtgaacaaaatatcacaaaattgatcacagataaaatgccatcaccgggggattaatcacaaatgaattggggaccgggatgggacaggaaaattttcagaaaggaagcattcggtactggggcaaatgggaaatcacagaaatcaatgaatgggaccgggagaaacagaaatggagggcaccgggccatggatcaaagatcaacaatcggggggttcaaagaatgatcaaaattggggggccatcacagttaaaggcaaatggaggggcggggagagaaacggcaaaattgccaaatgaaatttggttgtgaaattgggggacatttttggccgcttaaataacaataaatttaaataaaaagtggcaaatgtgagcagaacaaaatg

SEQ ID NO: 102391 - DNA, 790 bp, Heterodera glycines
tttttcatcaaattaccaaatcttgtggatttgtggccattcttgtaagaaaaaataggagtttcgggggcgcggcggtcccgataggcgccgccggggaaaaaattggaaatttcgatcatttataaacaggttttcactgaaaattagccaatttataggtaaaattttgaaagattttatgggaatttaatccaattcttaggggtgtaaaagtcgcgtttcgcgccaaaaagcgaaatgcgaaatgcgaaacgccaaaaaatgcgaataatgcgaaaggcgaaatgcgaaaagcgaaacctaggcacatccctggtaggtaccagggctgttgcaaaaggaaaaataaaaagcgaaaaggcgaaagcgaaatgcccaaaaaaagcgaaaaggcgaaattttttttccaaaaatagatgaatttgaaagtctcaaaaaattcaccttttaaaatgcttaactgttctgaagattgactgctctttggttttcataaattctttatgcaaagattaataaaaaagaagacgtgaatcggcatcgaactcatgagagagagtaatgtcaatgctaatgcactaaccactacaccacaatagacatttacgtagcaaagcaaatttactttatttaataaaaattttagtaaaatggttaaaaaattcaaaattttgtgtactttttctcccacgaaaattccattgtttattttaaaaatccatctttaggggtgtactttttttcgtttttctgcaaaaagcgaaaggcgaaaagcgaaagcaaaatg

SEQ ID NO: 102392 - DNA, 250 bp, Heterodera glycines
tcttgtgccattaatggcatccgtcccgctttttgtgtgccgccccatttccggcacacttttttttgtgtgtccccaaactgccaacaaaaaggcgctttttgaaagaatgccgcatcggcacaccgcggcaaaatattttttcagttttttggtccccaatttttccgcaatttttaccgttctacggaaggtcatgctgaggaaagccatggcaaaatgggtggcaaagatttagattttggcaatg

SEQ ID NO: 102393 - DNA, 324 bp, Heterodera glycines
tcgtaatgatatggtgaattaagacgtcgaaaaaatgtcgagacgaaggctttacttatggccaattcgaacctcaacacgctaacagcgagagggaccctaaggaaatggccagacaaatttatgtgcctttaaatcccaaaatcctaagatttttagtaatttgccaactaaagccacattatgggctgagtttggacttcataaactagaaattttgtggaactatgaatccaaattcaaaaatccgtttcttttttgtgtctttttaggctttaactttgtttaagaattgtccaatcgtcccgcccgtttcagcgaatg

SEQ ID NO: 102394 - DNA, 514 bp, Heterodera glycines
ttttttgattgtttcgtttgttgtgttcacaacaattagagcgcctttgccccgtttaccctcaaatcgtcgccattatccgccgtttttctttgtttgaccaatttcttcaagctattgatacataaaattttagacaaatttggtttgattcattttatgatatcatttttgtcagttacaaatatatttttgcctttttttttgttgtggagcgctgtcagcaggttatattacatattctaatttgaagaacaaaagcggaatttttgtggattaataaagccgcatttttccatcattttcgaaggcggatgatagaaaattcgaaccttagttttgtgaacatttgacctcaaatccgatggaatggtagtgcatttttgtaaaccgcacaggtttggcccgcagataaacacaactcattaaattggacaattttttcgtcactttttcattaaatgacccatttaaatccaattttcagacaatatatatatttgttatcaaaatg

SEQ ID NO: 102395 - DNA, 1003 bp, Heterodera glycines
tacaaaaacgaataactgttttgaattatatatgtatcatttttatggaagcaaatatttgaattaattcgattttgaaaaaaattgcgtttttatttcgttttcttgaatgtaaaatgctctaaatttcagtgaaaattttgttaaaaatggtcaacatttctatttttcctccggcggcgtctatcggcaccgccgggccttccaaaacttattttttcataaaaaattggccaaaaattgtcatattttgaataaaatttttcaaaatgctgattttttgtcagccaaatgctgattttgaaaattttcagttggcagccctggtttttccgctaataaaatattgttttaagtcgatttttcatatttttattgcgtttccttcacgctactattagttttagaaaaatcttatttttggggtccgaattttagtttttgagccattttgtcttattttgaaaaaaaaacatggaaactctgttttatttacctgctgaattttccctctaaccctccccctgcggtctaaattttttttgttgtgtatcgattatttttacatgctttcggatgtgaactgtctgacttctcgctgtctccactcctacacaaacacaaaaacaaaacgaaacaaatattcataaaacaaatattgctgataatttcgcaacttttaaaaaaaatcattgttttgtttttcatttttttgaccggcaccaccggggaaataactcataaaaatagagggaaaaattggcatagatccataaatttggcaaatacctttttaaacaatatggaagtttcagcaaatttttggccaacgatttttcaaatttgaaaaggctcaaaaaatatcaaaaattatggtaaaactaaaattcgttttttttaaattttttttatcccttttataaatgcgcctcatttcagagctaattaccgaagacaaaaattttgatcaaatttccgagtgcaattttttttatataaaatg

SEQ ID NO: 102396 - DNA, 108 bp, Heterodera glycines
ggtaattggactcgaatagtttactcgtttttaatatagaaaattaagcggaaaagaaaggccgacggaggagggaccaatgaattggcatctgacgaaatcaaaatg

SEQ ID NO: 102397 - DNA, 964 bp, Heterodera glycines
tgcacaaagaccgaccgacgaccgactttttgctgcatttctgacacatttcccccccccccccccaaatttcacgcgatggaagcgaaaggggggggggaggaaaagccattttcataagctaaaataggggagggaggtgaccaaatagaaaagggagggagcagcagagggaaatttgagttacacacatatttttgaaaagcaattttgccaataaccttttaggaaaaggaaaacctcgggagcaatgcacaaagcccctccccccccaaatttaaggggaaacaatttttaataatttaaatttaaaaaattaattagaagttccaattgtttttattttttgtttgtttttgctcgttttaatcgttcttttttcgtttaattatcacttcatatttcacttctctttctctccatatttcattcattttgattagaaaaatgtgtacaaagttttatcaaagttaaagtccatttccatttttgataaaagtttttgattgacggggaaaaacaattaattccccttttgtccgcaattgaaattcattttctaatcgcacacagaattaaatgatgatgatatgataataataataatacggcatccatttaattttcttctccaatatattttattattctttcaatttaaattatgcataattttcaattattattttttgcttttctttctttaattttccataaatttaaattaatattttttattttgttattttttattttgcagcaaatttatgtaaaataatctcagctatttcctattattttccaaaatttttcataattattgccataaatattttgtctaaaaagtgtccaattatttattaatcattatttttttctgttatttgtttaaaattaaagatttcaaaaaacatttggcccatttcccaatatttttctgatcagttttttgtcgacccaaatg

SEQ ID NO: 102398 - DNA, 484 bp, Heterodera glycines
aacaacgaaaaagaattgagtctcgcgagtttaactcagcagaacaagctgagccgtaagttttttcattttcaaattttatgaatttcccgaggttggctattttttcattttccgatcgggtagcccttgtatttgtttcctcgattggtcggaataaattgcgtttggccaaaactgttcctgctaaatttgatcaactaaggaaaaagttatcttaaagttttgtctcagactcatttggccctctccgtcctcccgtctgacattcgagaaaaagctgagtaacttcaaacactaattgattttcaaatcctctgcagggtcggacttttttatttttgtccggctaatgatcgaccattacggctttacgtccgaccaataatttcttttcttagatttgatcgaattgtgtgaagaaataaagaaaaggaaaaatttaaatgcggaaatattttcaaaaaattggaacaaaaagatg

SEQ ID NO: 102399 - DNA, 470 bp, Heterodera glycines
actcataaaggtcgattggactcataaagtgcattagagccaaatttacaagcatttcattcattattcatttgctttggggacagaaaaaacatttggccattacttttttgtatatcattataattttttttatcaaaattataatttttttaatttcgcatatttttaatttcagatatatggtcacgttgcatttgcatttttttagggaatgttttcttgctggctttatccgtgtacatttgcttgactttcgcccaaaatatatgtataatcatagggccataaatacaaagctaaattttttgtttatatgtaattataataaaaaaaattaatatttaaaactgaattttctttcattaattggtgtcttatttgtttgaatacattaaacctttttaaaaaaatatttatgaaatttttttttatacaaaattcgatttattatttcatttatgaaaatg

SEQ ID NO: 102400 - DNA, 108 bp, Heterodera glycines
aatattaagcattacaaataatatcttcagacaatattattttattttatattatctttattcacttagaaaaaccttcaattaaatttatttattttatagaaaatg

SEQ ID NO: 102401 - DNA, 121 bp, Heterodera glycines
tctttcgcccgtgcttgggtccatgaagttggtcatccaggtgagacaaattgacaaatcaattttaatgacccctttcttctccctcattaaggctgccattgtccgtattatgaaaatg

SEQ ID NO: 102402 - DNA, 59 bp, Heterodera glycines
agtaatattgactatttttcaaatttgaataatttttctattttaagggaaataaaatg

SEQ ID NO: 102403 - DNA, 819 bp, Heterodera glycines
ttttttgaccatgctcaactcagcctcaaattggcacttctttcgccctgtttcgatgcgctggtggacaaacattttcaatggcaaaacgaattgacgtaagtttcaattaaaaaaaacataatcataagaaaaattgcaaaattttctaaaaattttcattttttttgagacttacaaatgaaggcctctattttttcacttctttttgcttttgaacataaattttgtgtttaatccatatcgaaatttttggttaaatttaattcatagaaatgccgacttatcaaaaaattgcaccgaaataaaaattttccaaattcgacatttttttcttgtaaagcggatttttaggcattttgcacatatcatttttagcctttgcgattttataatttttattacttttttcagcaagtgcgcaacgacacttggtggccttttcccatcttttgaccatgctcaactcgggctcaaattggcactgctttcgccccaattcgatgcgctggcggacaacaattttgatggaccaacgaattttttttataaattcggcaagtttttttgggttttctttttgttttaattacaaatccaacaaatttttttttattttttttgtaaaagtgaataattttatatgttttttttaggattttgtgcaaaaaatacactccaattttcaatatggctcataataaaaaattttccaaattcgccgtttttttgtaaagtgtgccgggggtttttttaggctttttctgtttttttctgatttttattttcataaatttttcagcatgtgacatttggatg

SEQ ID NO: 102404 - DNA, 76 bp, Heterodera glycines
atgatgattatgcggctttgcttacgcagacgaggcagaggcggcacactgcgctggcgacgaggcaggtgcaatg

SEQ ID NO: 102405 - DNA, 696 bp, Heterodera glycines
aactacttcaactaatttcgaatccctgacccaaaatcgactaaaacagaagtcaaaaacaaatttgaaaaattgatttttgttcacttttggttcaaattcggatctggggttcggaattagtcgaaatggatctcattttacgtaatcagcgaacatgaaaacccctgaattctttttactctccctttgttcgtttgataaaaaaaaatgtccccccattgtatgcatcgcccccccctactttaaaaatgccaaatgttcttatctaagacaacatttttgaagatttttctctatcttttttaagtgttgcggcttttcggttctttaaggttaataaagctttcttagagctttcgaatggtaccaagtttattgaatttgatgacaacgaaaaacatgtcataacccaaaaaataagagctggttgaacaaagagccgaaaataaaatcaaaatgaaaaaacgaaagaattgtttgaggtgacaaataggtaaatcgattgcaacattttgtttatgtgttttttgattcgttaatattcattcaccaccggtcgaaagcagcaaaacaaaaaaaaagtggaaaggaaagctttcgtgtcgataaatttttcaaaaaacagcataaactgcgtgacatacacattgaattagtatggttaattcttcatttttattggcttatcaaatg

SEQ ID NO: 102406 - DNA, 1003 bp, Heterodera glycines
ccgcggcgctatcatttttatcacaccataatatacaataaatacatcactttggctacggcgctaatatcctgattaaattgtgttttgttaagaattttttggcttgtttgttggacggacggacgaaaaaaaaattaaaaaatgacgtcctattattaaacaattattattaattatttctttatccgtccgcccctctttcgcgcaccataaaaaaagcggcatttccgtctgtctcctaaaattggcaaaacgtcgccggaggtgacggaagcagcgcatttgtttgcaggtgtttctccacaacagcttatgtcaatgtgattaattactggttatcaaattaattttaatgttttaaatttaaattcaatccgagacaaagtgtcaaccgaaccaaaaaaataacggacatttcgtcaaaaagtcgagacaataatcaatttttattcaaaaaactttacattaaattttggtccagttgaccattccggctcggcaaatctgttaaaatgtctcggaactttcgatattttgtccaattttggcaaatttagtcggtatttggtccaatatcaaaattgttgactttattatccttcacggcttttgaatcaaattttcgctatcttgttcgaaaggatgagtcctttgtattaaatttgttgatattagagatcgacctggacctggatccaggcctggatttttcctggatccaggtccaggtcattttttggcaacctggatttttcctggacctggattttcctggatttttgtccaggaaatccaggtccaacatggaatccaggtccaggtccaggcttttttcaaaatgtcgatctctagttgatattttgtccagagaattttcatgacaattttttttgacattttgcccggttttttcgtgccaaaattgtttgtcgttttgtctcagccctcccaatgaaaatacctccataaattacagccctttttgaatgccacaacaatg

SEQ ID NO: 102407 - DNA, 686 bp, Heterodera glycines
atatggactaaaaaagcccgaaatatggactaaaaaggccaaatatggccaaatatggataaaaaatgccaaaatatatgttgtaaacccccaaaaatcccaaaaaaggtgtgcatatttaatatttgcttaaataaacctaaaaagtacaataaacaaccaaaaaatggggtttaaaacttaaaaatgcatattttttattgttgttcgttgtatcaaaaacacctccaagtttgccaaatttcgaaaaaattctcattaaaaaaaaagaaatgttcgcaaaaaaatgacgaaaatatttattgaaaatgccaaaatgacgacgaaaactcaaatttttcgtgttttgtggggtgtaatttttaaaaatttccaaaaagttgatctttaggggtgtatttttcgttttttttttcatttttcttgtgaaaatttccaaaaaatggccaaaatatggactaaaaacccaaaaatggcgaaatatggatttattcccgaaaacccccaaaatatggatttatatggactaaaaaccttcaccaaatcaaaaaattttaacgcagaaatgctatttttaagcccctttcttcatagcatatgcgcagaaaaaatatgttaatccatataatttacaaccctaattattagacaataagttttttgtttaagttatagattagaaaatg

SEQ ID NO: 102408 - DNA, 499 bp, Heterodera glycines
ttcttttctttgttaaaaatattttccgagttaaaataaagtaacagaaaagttgcttttcttaaaatgacagtataatgtaatgaaaatggcattagtttgaacagataggtaaaacttctttaaaaagagaacggaatgggaccattgaattcgcaaaaaaaaaagaaaagaaggaaggaaatataaattgaaaatttaaataacgctaaaaaaatttttatgaaacgaattttattttaatttgtattgaaaaaaaagaatttttcgtggttttttctttagtaagtttctgacagtgacagttatgttttggttttttagttttcaaacaaattcttttcacttgcatttacggttttttgaccattgaatccttttttcacgttgttttattttattttgataatcggtcttttacattttttctttttttcattccttttcaagaacttaatttgaggattacattgaaaataattaattagacttcaaaatg

SEQ ID NO: 102409 - DNA, 88 bp, Heterodera glycines
ggtgttgtgagcggcgatggatcgaatggatgcttttccggatttccctgttataatttccctccccccatttcaggtggccgaaatg

SEQ ID NO: 102410 - DNA, 75 bp, Heterodera glycines
atttccctcccgtttttgccattttttcagaaattcaagccggacgtcaactgatcgccatctttcatcgccatg

SEQ ID NO: 102411 - DNA, 102 bp, Heterodera glycines
gcagtatcaaaaccccccaaaccgaccgcaaccaaaaaagtgtccaccgccattttcgtcgcgcaaaaatgtgtcccattcgacaaaaattgcggaaaaatg

SEQ ID NO: 102412 - DNA, 127 bp, Heterodera glycines
aattttagataagaataaattattaaaaactatttttcgtaggatgaatcaagaaattttgtttaattatttgtccattttaaatttgaacaattatttagctaaaactgaccaattcacaaaaatg

SEQ ID NO: 102413 - DNA, 79 bp, Heterodera glycines
ttttgttgtttgtttttgattgtgccgttttcttccgtttattatttttgcgcgttttcccccaggcgccgatcggatg

SEQ ID NO: 102414 - DNA, 353 bp, Heterodera glycines
  unsure (1)..(353): unsure at all n locations
tttttttaaatgcaaaaaatgtgagcacaattactatcaatctttcnncaggatntaatcagggatggcaccatcggaaaattgtttttttgattttccctcatttttaacagattttcaccaaaataggtaattttggtggattttggaaaatttccgcgtaatattttgggaaatttttggtgaggtagaggtaggtcttggaggtgcaccaatagtaaacagttacaatgaaaaatttcttgttttttttcaaatttgattaatataaattaaacaaaattaaatttactacaattagagccctggttaaatattaaaaaaataatttctttttcaattttattcagatg

SEQ ID NO: 102415 - DNA, 68 bp, Heterodera glycines
tggctataagatttcactaattatttattaatttacctataaatttttactgaaataaaattgaaatg

SEQ ID NO: 102416 - DNA, 509 bp, Heterodera glycines
tgtctcggtgacggtgccggcactaataaacaaatcaaattatttaagtcaactaaaaatgaggtagctatgaattgatctgtcccatttttcacgcaaaattatcggaatatttgggttcagattgttttacttatgttgcagaattataaattactttagaatgactcttaatacataaaatttccccgaccgtcccctaatcacaatttcaacaaattttataacacattcattaaattcaaattttgccgccgccaaatcatgtcagtggggcgcctaaagttacttattcttttgtgtccaatattcctagtactaatctttgttgatcactccccgagccaaacaaaggaagataacatctgtatggccatttggacaatgaaaagacgacaaattgacaaaagaaacaaaaatttggagaactaaagtggatgggaaagggggggggggttaagcgatcgggccatactccgctggtcatttctctgaatattcgcgccatg

SEQ ID NO: 102417 - DNA, 225 bp, Heterodera glycines
ttgtatggaacagcagcaaaaacaaggacagcatgttggcacgttggaatttgtgctcacaatggaacgactccctgagctgaatggaacgaaggaccgaacaaaatacaaaaattcttcaaaaaattttcgtcggcaacagaagaattgccggaaagtcgccgcatttcagcgttggaaagcaaaatcagtggaaaagcagagcgtgcttttgacgccgccatg

SEQ ID NO: 102418 - DNA, 239 bp, Heterodera glycines
atttgtttgtttgaattggaataattcagggattaaattcgatctctgttcgccagtgcattttaatggatcagccgatgagattgatcattccgctgaaattgcctcagtttcggcattttttcctctttccgtgcgcggaaaaaggcttttcaaaaccaaagaacaggtggcacaaaagaagaagcactcacgcttttcttttccatttgtagcggatgtccacacaatacgccatg

SEQ ID NO: 102419 - DNA, 266 bp, Heterodera glycines
  unsure (1)..(266): unsure at all n locations
acccgtttcaggtagcagctgaccgagacgtattcggacgaaggagaggaggggggggggggggggaatacgggaaanctctctcgaaaattggacattatagcaaattaaattaataattgttgtaaatgttttagtaattaggcgcgtaattagcctaagattttacacataaaaaattcttttaaatgctataaaacagtttttgatttttattttttcagtctatctaaaaatgttttaaggatttgccacgtccgtccatg

SEQ ID NO: 102420 - DNA, 326 bp, Heterodera glycines
aattaatgtttatttaattacaattttattcaaatacctttatttttattaaaatttaaaaaagaactttcgattgtctgagactgaattttttcagtgttattttatttaaaaaaaagttattaaattttcaaatttatgcaaacaaacatttcaaaaagctttttgattagagaaagcttttgaaatgattgtgtttgtttagacagtcaaaagaatcaaaaaatgcctataaaaggaaggcgatgaaaggaaaaagcacccacaggaaaatatcattttattattttaaaaaccaaaattttattttagaaaaccaaaaaatg

SEQ ID NO: 102421 - DNA, 255 bp, Heterodera glycines
ccaaaaaaaagaagagattattataaatttctaaaaagtattctaattgatgggtcatcattttgcccaaattacttttttgccgtcaaatgccagcccataaatagaggggagattcagcgcaaaagatcaaatgttcattcattcattcatttacatgcgaagatgaattttatttccaattttcatattttttttatttaaaaattttaatttgtagccagtccaattaataccttattaattcgaaaaatg

SEQ ID NO: 102422 - DNA, 71 bp, Heterodera glycines
cttcgtcaccgctcgaaactgactcattcaataattcctgctgatgctcaaagaacacagtgcttgaaatg

SEQ ID NO: 102423 - DNA, 268 bp, Heterodera glycines
tttgcctttttctgtgtttgctttctgttggggtgcaaatctgtgcaatttattgacattgagcagcaatttaatcgctttaacgaagtgatcgcattaagcggacgtaagaaaatttaattgacatttgaaaatcggtaattaaattaattaaaattaattattttattatttaatttggcaaaatgtgtcaaattggccaggccaatgtgaagttaaagctcaaagttcgactcccaagcatttttttttgttttgcaacacaatg

SEQ ID NO: 102424 - DNA, 107 bp, Heterodera glycines
ggtaattctaattacgcaataaatatagttcttcttctaaggcttattatgaccgacttcaccctggaatgtatcgccttttctgcttcggaacttttgggaaaatg

SEQ ID NO: 102425 - DNA, 131 bp, Heterodera glycines
tcaggtccattgataaatatcttaattaaaaactcttcctttgaaattcagaaaattcaagcggatcaagtttttttacgtctcctgttaaaaaagtgcctcgagatgattttgcatctttttcggacatg

SEQ ID NO: 102426 - DNA, 1003 bp, Heterodera glycines
tttgtttgccattccacctccctacccctttccccaatcatttcaaatccctccacaaaatcccatcaaatccctccacaaaatcccattgatacaacaataaccaatcactgcgcaatgaacaatatttttatttttgccgtggattgttcgccgttttttgggcgctcccaaaaaattctgtcgcttgcccatttcccgttgtcagaagagataattgcccaattctcgaccaattcggggaacaatttaatctctcaacaataataatagatccataaatttcaaaatttttgttcaaaaatgggatagaataataaaaaaaaattcttatttatttggttttggattctcaaaatttcattttattaatttggcgattccccaaattttcattgtcactttcatttttgattcccattcccgtccattagctcaatcatttgttgtttttttgggtgctccacgaccttcggggagagaaaagtcgagaatcggggaggaaattcccagaaaaatatgccggggatggctggagaattcgtcgggtagcagcagcaactcctttgttttcggggaagaaattttaataaaagtcgcaaaaaagtcttagaaaattacagccttagtttttttaattaaaatatttcaccaaagaattcaattatcttaaaattaaatcaaatgtctaaaattgcatttttgctcttcatacttttggcagtcaatgaatgtacgtcggcccaacaagttcatcccgaaccaccaaaaagtatggccatgacatggtttttaatgaatgacttttttgggaggctgcgaatggatgaaatctgtgaaaatttttttgattacgatatacagtaatctcgcagcctaattaccctaatttaccaagacccgtcttcccaaccgcttctgccacatgggcgatcccgtcgtgatgaaccagagttgacaactccaacaacaacaacacccgggaaatcgtcgacggaggatg

SEQ ID NO: 102427 - DNA, 98 bp, Heterodera glycines
ggtaaattgaaacgaaataattattaattttgaatgcccatttaattacgccccaacttttaagccgtgtcgccatcggattcgcccccaaagaaatg

SEQ ID NO: 102428 - DNA, 175 bp, Heterodera glycines
gctcaatcggatccaagacgcgtgggtgccgctgattaaattcaaattcgaaatcgacccgaacacttccgtcgattttgacattggactagaaacatttgcaatccatgacgaaatttttaaatccgaagagccaataaaatacgaacaatgcgacgcattgtcagcgaaaatg

SEQ ID NO: 102429 - DNA, 499 bp, Heterodera glycines
cccaaagccttcaacgcaaccaccacgaccctcctacacgtcatggccagactacgcgacaagcacgtgtacaagccaatgacggtggagtataggtggcccgctccagcgccatccattttcagggctagttgattcggcaggtgagttgttacacactccttagcggattccgacttccatggccaccgtcctgctgtctatatcaaccaacaccttttatggggtctaatgagcgggcactttggcaccttaactccacgtttggttcatcccacatcgccagttctgcttaccaaaaatggcccacttggagctcaaacattcaacgcctgggttcagagtcaagcaaccctggcttcatacccatttagagtttgagaataggttaaggacatttcgtccccaagtcctctaatcattcgctttaccgagtataactgcttaacgagctccagctatcctgggggaaacttcggagggaaccagctactagatg

SEQ ID NO: 102430 - DNA, 250 bp, Heterodera glycines
taaaaaaaataatttttttttaaggagtttttgggagttatttaaaaccaaccccccccccccccccccgcgggggggggatttttggggcccccgtcccccccccccgggactttgacccccgcatcccccgcccccgcgaaaagccacccccgcccgcggggctcgacccttacaataaaatgatttaaaataaatatttataaaataaaactaaatttgagtaaatgatcgtgttttgcagcaaatg

SEQ ID NO: 102431 - DNA, 87 bp, Heterodera glycines
  unsure (1)..(87): unsure at all n locations
tttaaaatttaaattttgttntgtctattcgcttttcccgcccttttcacgtttctctccgagcaacacttttgcgtgtcgccaatg

SEQ ID NO: 102432 - DNA, 464 bp, Heterodera glycines
ttcatttaaaaagcagttaattattgattattcaatatatcttttttgaaaagaaaataattaaaattttccctttgctttgtccaaatattattttgcatttaaatgatcaataaaataaagatattacaatcaataagtaactgaaaaaatctacaacagattccattccaaaaagaaataggaggttaatatattgggatttccttctttgctttatatctaacaaacgcaaaaaattaaatttctaagcaattttataaatttttcgattaatggagaaagtggcccagcagaattattatttagccgattaaaatcatcgtctttggcaagtgctgcccaaaaggagtttgacttcatccatcgtgttttgttgggcccacaacgggacaatttgacagcaattgaatatttagtggcacaaaattttagccaaaattcatcaatgatgcctgcttatg

SEQ ID NO: 102433 - DNA, 251 bp, Heterodera glycines
atggatgagttgggtatggatgagttggatatatggatgagttgggtacggatgagtggggtatggaagagttggatatatagatgagttgggtacggaagagttgggtatggaagagttggatatatggatgagttgggtactggatatatggacgagttgggtatggatgagttggatatatggatgagttgggtacggatgatttgggtatggaagagttggatatatagatgagttgggtacggatg

SEQ ID NO: 102434 - DNA, 1003 bp, Heterodera glycines
acaaataaaaattggctcagaaaagaaaaaattgaaataaaatcatttgatgaaatatttggagaaaatgggcagaaaaagacgaagaaaatattaaagaaaaaagaaagaaagaacagagaaaaagaaaaataattattgaaaaacttaataagataaaataaaaagttaagcaagaaagaagaaaagattcaaaaaatgtaaaaaaattacgccgaaatcattaagaaaatcggagttagccatttcataataaaatggcatcatggatttaggtagcattttaaaaaatgaaaattaaaaatatatctatttaattttatatgattttttatatttctatcacatattgtttgcattattttttgcgtaaaatgaaaaataattttttgcaattttgtgacggccaaaattaaatgtaaagacagcaaaaaccagtgcttttgcgcaaatttgggacggggaaaaaatgaaatgagtgaacaggtctaaaccagtgcttttgcgcacaatttgatggcaaaaataaatcgtttcctgtgaagaaaaatgtaataattttaacgatggtcgaagctaaaaccaaaatgaacaaattgtcaacaaaatgattacaacaatcatattcttttgtgtaacaactcctatttggtttcatttggcctttgttgtgcctatttaaagcggtggaaattagtttttgtcacattcaactggcaaccgatcacttatattattcattaaacctaaccaagattttgccgtatgttattaagaaaattgtttaacttttgtcaaatgaaataaagtgccgagataaaaaatgccaagcttttacaattttttggtccaaagttcaagtcccttacatcccaaattcattttctcttttaatttttacaaaattccaattgaaataccacggagcattttcccattttcgttgtttttctaatttttctcttttcatttaagtaaattcatttataacaaacgaccaatg

SEQ ID NO: 102435 - DNA, 336 bp, Heterodera glycines
ttcgctgaaaaatggggggggcaattagcacaatgaaaatgcacataacaaaacaattaattacctaaataaactgacgatttaagtggcggtggaggaggacgaataattaagtggatggaatgaatgaacggaatgaacgtggaaaagcaaaatgtgtgggccttaaatagcaaattttttagtcggaagagtcaaatttttcggataaattcatatataaaaggcacaaaaaattcatttggttgccatttttccattattaattatcggcaattcatcttcatcaatcatcccttctctgtgtacaacgaaaacgacgacaattgagcaatg

SEQ ID NO: 102436 - DNA, 258 bp, Heterodera glycines
tttccaccccaatcactctgaccgccgcccaccaggaagacgtgaacagtaagagatcatttgcgcgggattaaccaattatttaattgacggcctaatttctgttaagttcatgtgctgttcagcggacctttgaacgagcgaggacagtatgaattcactgtagttagcaacaaccgcaattaccccgtgtacgtattcgcccgagaccccgtcagatacaaacaggtcgaattcggaggggggtggcaacggatg

SEQ ID NO: 102437 - DNA, 681 bp, Heterodera glycines
attaaaaatgcttttatccaattcagcaatttaccccgtataccaatttttgtgttaaatattaattatactttgttctcattttaaattattttatttggcgttttgttttctcaattttcttcccatttttacttctttggattttttgattattcgtctccggtctccaaaaatcttctgcatttttgatattttgattgtgcttaaaaataagtcttctctcgcctctgacgtttgtttggattgttattttgttgttccgagctttattctaatttgttgttttgtttctcaattaaagtgattagcctaattgtgtgtctgatttggcgaattcggttgcagcagagcgaagaaaaaatattcggttgtgcattacgtggcgctcctggcagtctcgggtaagctcactgcgtttaaagtttttctatcttcgggtgaaatcgaagcgtccttgggctttttggcgttgttgaccccgaagaccgggaataacgctgcttgcagactgctcaaagactgagactgcagataaaacaaaatttgtcgaaattcgaagttgctcaaagactgaggcttgctcaccattcaactgtattatctcaaagactgagaaacgttgtgaaatttggaaatacattattgattgtaaaatgaaccaagacggttaaaagaatg

SEQ ID NO: 102438 - DNA, 676 bp, Heterodera glycines
attcccgtccattaatttctggtcgtttctaacacctttctctctctctctctttctctccgttttttcctttcgtccatttttctattatttattttaattttacgcccttttctttgcgctgctgttatctttttttattggctggtaattgtgtgacaatttctttttcaaaaattgtctcggatgatggacgcgcaatttgcgaggattttttaacatgaaatgtttttttattaatttcattttttggtgataaaaatttttctccacccttcccaagagaaaaaaactaatgtttttttggattctggttgaggcctgcctgccttccttggtctattcatactctttctgtcttggtgtagaaaatccctaatttttcagtgcattttgtcataaaaatcctcgttttcttcaattatctttgtctctgttgatatatacataaaacgatgtatgaatgactttctaacagcgttttatacattcatgcaaaaagcgctttgttatttttgagcaattggcataaatttttgttgaaatttcaatttttttcaaatgcatttttacccacacaaaaaaaatgttactaaaaaacgacggcacatttttttaaatgcaattttgaaattcacaatttaaatttggttgtaacgtccccttcatcgggatg

SEQ ID NO: 102439 - DNA, 497 bp, Heterodera glycines
atttttttcattgattattcatatatttttgttttgtcaccccccgcggctgtccccattgggacgggcgggtgggtggtggccggcgggtggccgaatgttttgaaaattaaaatgaaggaatacagtctgcccgccggccacaaaattttatatcatatttgttctccacatagccatagctggaggatatgctagtgtaagcattgctgttagatgagaaaaattacataataccatatagatgcaatgcttacactaccctgtctcccagctaaagacccctgccgttttttccctcaaatcattgaggttttttacccggcgggtcttcttctcaccccccacttcatcatttattttttttattgtgtcagcaataaatttacctgtaaattaggttacatgtttttagcaaaaggtttttaaaaaataactatgatttttacttaattttttataccactttgctaagcttttttcccttagtcgtcatg

SEQ ID NO: 102440 - DNA, 219 bp, Heterodera glycines
tagttggtgggcatgccctccaatgtgatggcttgggccggaaggttaaaaacacgtgtagggggtgacctatgcgcgtttttaactctccaaaaatggcccaaatcatcgccctggagaggggtcatgcccgatttttttttgatcggccattttctttgacatttttaactaaactcaatgggtgaatttttttttaatttaagaaagaaaacaatg

SEQ ID NO: 102441 - DNA, 199 bp, Heterodera glycines
tatcttatcattaaacaacatttcgtcacaaatacaattttcccccccaattccttcatgtattaccgttcaattttttattaatatatttagatttctttcattttatatgttatttttaattttaattattttatatggcatcggaattataataaacggcgttgtaattttggtcatattaacttttaacaaaatg

SEQ ID NO: 102442 - DNA, 373 bp, Heterodera glycines
aaattggagatattgttcataaaaattttgattttattcgcacattggaaaaactaaatcgtacagaaaaagaaaactaattttaaatcgcgcaaatgctgaccaattgctaacactcgttgaaatttgtctaaacatcctttgtcaacgtttcaaaatgacagctcgccagagaaagcgtctgttgccatatgccaattttgttcggagtcttgctcgacgaagaaccgagaaaggagcccgcaaacttttagttcaaaccggaggcggactaggcggggtctttgcggctctgctcactccaatattaatagatttgacgcgctccgctataaattcaagcgcaatttccgagaagtaaccagttaagatg

SEQ ID NO: 102443 - DNA, 589 bp, Heterodera glycines
aacggacggatcagacggacggatcattggaagaaccgaggaaaagattttttttaggggggaagatgttgggaccggtactctattgtccgcccatattattttcattcctttatttctctccccttattctctcctctatctctcttccctgttgtcccccataaataccctgcgtcctctgacctccccgtcattcagttgtcaaccatttattttgcttatattgtctcaatcaatattcgccctttgtcctccgtccccttctctttatttatttatttgtgtctcccaacttgaataaaataattgtttattcacttcgccggtttgggattggacggcacaacattggcgacgccctgccgacatcgaactcaatcatctcgactttttgttttggttttgaacaaaacaattttgattgttcaacctttcagttgttgttcatcaattgttaatcgtcgtgagcagtgagcatcaaaaaaaaaatggccgaagcagcaattcgccaactgtccgacgtgttccagcagttcttgactgctcagcaagcaaacgcggcagcaccagcacaaccgactcaatg

SEQ ID NO: 102444 - DNA, 438 bp, Heterodera glycines
acgatgagcagcgcctgcgccttgcgcccgtcgtcggcgatgggtcgtcgcttcgacggaaatgctataactatccattaccaccattgccaacaacagtaacaacaacagcagatgaagcggagctgccggacagcacaacatccggcattaattcgggtggatttttgggaccagggttgaagcaataggacgagaaaatgccgggatatgtgactagaaaatgccaaaaattggggctagaaaatgcaggatttggggaaataatgtctgggattcgtggcaagcaaatgccgggattgggactgaaaatgccaagacttggggatagaaaatgtcgaggatttggggtgagaagatgccttggatttaagacggaaaaatgccgggatttgggacggaaaatgccgatattcagaccccgatttgtcctttatg

SEQ ID NO: 102445 - DNA, 631 bp, Heterodera glycines
tagcaaatatatatatatatatatatatatatatatatatatatatatatatatatatatatatataaatgcaatttgatatttcacattaaacaagaaaattaaattaataatagacactgtttcaaaagcaattactatgagaagcaaagaaattgaattaatgatacagtaaattactgttatttaattaaatttttacatgagaagttggcaaactaaaatgatattatgctccatttcaaattataaacttatgatttttttgtctactttaccaactttccatgggcaaatcgtgtaaaattttgcctctattccatttcaccgcgaccacaaaaaaatagacatgaccttaaaattttttgacaaacgttaatgcattatgtataactttttttagaatcatccaaatgaataattttttgaagttttctggccattattttttttaaacagaacaaaattttttgaaattttacagactaatagaggaatcttaggactgtctaatgatactaagaatgtttaatttggatgcttctagaaagggctatgttgcattaaagcaacattttaattttaagcaattgtttattttttaattagagtaaacattttttgcattatg

SEQ ID NO: 102446 - DNA, 149 bp, Heterodera glycines
aaaatacgaaatgaaaaaaaagcgaaatgcgaaacgccgtaaatgcgaaaagcgaattttttttttaaattttaccaatagcttttgaggttgtgatgcaaaaaaaaatctgcattttccggttcgatctttttctcagataaaaaatg

SEQ ID NO: 102447 - DNA, 225 bp, Heterodera glycines
cttttctgtcttattttaaattttcatttagtaacaaccgtttatgtttgcatttcattgtcaaattgcgacagctgaccattgtttttcaatgaacaaaagcactcccattagctgattagatgtcctttatctgctgcaaaataacaattgctcattttgttatttctttaatttataaaaagcgaatttagaaaaaattatttaaaaattgcccaaaaaatg

SEQ ID NO: 102448 - DNA, 116 bp, Heterodera glycines
gctaaagtaatttaaaattaataaaatttcattataaaaaagaaaggaaatagaaattaaaaaatgaatgcttaaaaatataaaataaataatattatgtagagattataaacatg

SEQ ID NO: 102449 - DNA, 689 bp, Heterodera glycines
aatgaccattaaatttgatagattaaaaaccataaatggcattttcttttctttttttaaattttgttttttcctaaaaaataaatgccaatttctttccttttattttttaattttgttttttccataaaattcattcactttctcactgaactccgcttaattagcattctgttcttcttgttttcttctttatctgtcctttcacatgataaacaatttttgagaatgcacgtaattagcaaacgcaccggtgaacaatttgaaatgccattcattcggtaatttttcttttatctaaaaattttcgaatttccaaaaactaaggcctgtaacaaaaaaaatgtagttcaaaaagctgccattcaaaatttgtgaatagcccaactaatttatttcaaattccctccctcttctatcttatggtaatcacgtgcttttgccaatttgaagaatttcttttcttttttcaatttaaccattttgtcattcctttttttgaaataaatgtctattaggaaaaagctccattaattcattaaacaataagctttttcatttgtcaaatacttaaattgtgtgggtgggtgggtagtatataatatattctataaatattctgtaggatcagttaacatttactgaaatcaaatttaaatattcatcggcaaaatactacctgcaaaatg

SEQ ID NO: 102450 - DNA, 1003 bp, Heterodera glycines
aaaatttaataaaaaattatatatttcgccgatatatgaattaagattttaaataaaaaagttataaatttttatttatttttagttaaaaaataaattttataatttttatctgtttgttttttcactccaattatttttagcttttgcttttcacatcgcttggaccattttttgcatcgttacttatttaaactaatacaaataacacattaacaaacaccaaaaatttgtaattagtctgctaaatggtaataatttgcaatcaccaattttttcagttttggcatttgtccgctttccattcagtttggcattcctgttggagattttaatttaattaagatatttgttttaattttaaattattatggcattttatctctatttattttatgtttgttgacctctttaatttatgtttggtacttttcacttctcattattctcattaatttgttttccaaaatttcctctctaaatttcgttctcaatttgcttcacattggtgatctcctcggacttcaaaaaaaaatattgtgtgtggctttgtcttcgtgtgtttggtctccaccccccaattcaattgaaggaaaacggtttttctttcctatttggcgctcctgaggaacagcaggtaaacggggaaaggcgagatcggaattaggtagttttgtttgaagtccgaaccggacaacaaaatcaacggaattgaattgaccctgagccagggcaaatttcaaaatttgaagaaaagaagttggagtgaagttgaagaaaagagttggagttgaagttgaaaagaagtggagttaaaaatcctgagacaggataaagggcaacaaaacgattcgagtcgaacgttttaaaattgcaacaaattcgagccgaactatcgcattcgccgtcctaatcgccacgccatcaaacgaaaaagtggaaaagtgtcgacagcggaaacttttgttttgtttttgctatacctgagccaggtgcaaaaatg

SEQ ID NO: 102451 - DNA, 992 bp, Heterodera glycines
aaaaagtaaaggctcaatgagtagcaccgacgaagtgaaaggacgcaaaaccgatggaaaatgagcccaaagcgctgaggacatcgcttcttagagggcgaggatgtgatatcattgttgatttaaaatatgtttggcattttgttgtttaaatttaatgtcatttttgtttgtgattttgttagtagtagttagtttatgctgtcgtcagcaatattgattgtcctcgcctattttaatttgaaattaaacgataatttttcttcggcattgtgttttatgtttgctttgggctgttgtgctttgccgtgtgctgtgcaacaacaacattattaaagtcgccctgacaacgctatctgttttttacgactctggtcagctccattggttaaataagtgaatgtaattaatattgctgttcaagactctcggtctcgagtctcgacttgagaaaagtctctggtttttttggtctcggtctcgagtctcctcgggttttcattctcggtctcggtatttgagactttcgagacgcgagaccaagacttttttacacctctaataattggctcttggtaaacttatattatataaattttaggttcttttttgttcaatttggttaacatatgcgttggtacagtgggttgggttcttggttctgttcattatttttgcaatggaaaagttacccccccccaagtatttatttttcttttcatttttcaaaattaatgtttttttttgatgagaattcaatacaaatttaacaatttttttcttctgctgcttctcctctgccctcctcctctgctgtggctgtcccccctgcttctctgccctcctcttctgctgcttctccgtgcttgccccgagcttgaccatctgctgctgctttaaaacatggggagggggtgacattttaaattacaatttgtaggaagtgacatttctcaccgaaaacataatactctaccaaggggtagagtatg

SEQ ID NO: 102452 - DNA, 80 bp, Heterodera glycines
aaacttttcagatcgatgtgtccttgcattttcttctttccgtttcgccggtgatcaatcgaatgctcagcgtggacatg

SEQ ID NO: 102453 - DNA, 327 bp, Heterodera glycines
tgtttttctgacatgaacatttattaagaaaaatcaagtacttgatgaaaaatcatacactaattcaatgatttttcgaattctggactcagatccgtaatcagcctatttttttacatagaaaactagaaaagaaaatttttaaatttatttttcgccgggacaccaattctccactattacccagcatcatgtgcagaaaatgctaatgcgcagagttaattaatcgattatttttttaaatgtcaagtatatatatatacgcacttattctatgaatttatacaggaattgcggtccattttattggatccaaactcacaaatg

SEQ ID NO: 102454 - DNA, 1003 bp, Heterodera glycines
taaagatcgagcagtcccccccccccctccaagtagtagtgtttcttctaatttttaaattattcctttctcgatggaaattcactacaaatttaataattccgttagaattttctcagttgaaatcaaaatcaaacttttacataaacaaagtataggcaatattctgaaaattgcgcataaatcttttaataaataaggcccaaattccaaaatcataaaagcaaaaatttgttaggaaaagcctcaaattattaattttttaaatttatagaaacttttaatcaatttttttctcggcttcgcctctctggaaattttcgatctctaacaacataattattattatttttgattgcaaataatttttaccacccactaaattttgttagggaaaaaatattttttcaaagacttggtgcttcgaaaacttcgcgttttttggatttcgaacttcgagcttttgaaaaaaaaatgagcttcgtgtcgagcttctgctacatgtgtgaaaacttcaaaataagatataaatgaattaaattgttttttcattttgggttgatttttattttaaattttaaatagaaaacaataattctcctggctaatttcttcatttgcatgtcatttctccacatgaacaatcagcatcatatttcaatagaacaaattatttgaataattatttagaaagttatttaattaaaatgcataaataatcatggtctatattattttgttttaatttagccacttttgtgtaaatctttttttgttttaattgcatcgaattatgcttaagagaagttgatcagttgtattctttttatacaaagggttattacaattaatttttttattaatttaaatttatatcgataatgtttatttaaaaggaagctaaaatttattttaatatattcatactttttacaatattaaataattctcttttctttgtcaaaaattatgtaatattatatttatagaaatttagtcaatg

SEQ ID NO: 102455 - DNA, 1003 bp, Heterodera glycines
aattaaattaaggacactgattaccaaaaaatggcggaggaaaaattccatttgaatttcccgggttgggacgcactgttcgccaagagccgcttttttttcatcaattcgctgcccgaaatcgattttgcccagtccaaaattttgaagagcgataagcgcgtcaaatttattggcggcttaaattttaaccgtccgtcggaaattgacgaaaaagcaatggaaaatgtaaaatttaaaaaatatatataaataaaaaagatgatgattaaaagtcacgagttccttgcttattggtcaaactcatttgttcttgactcaataatttttcaatttttcattactttccgtctcgagactaatttttggcttcgaaacatttgcttatgacttttaaccgccttctgtcggcttctttcattcagcagtgagatgaaattctgtgggcaaaaggccacaaaaatttgcacttcccggcagaagggggggagtcttttaagcaaagcgaatttctgtccaaaagacagaaactcacagagtccaaagggacaaattaaagggggaaggacatttggaaggagaaattcttctcctttcctttggtaagccttttctgacccaagggggtcaatggcttaatggtctgtattaaagggctcctgatgtcccttttacagacagggaaaagattaagactcttttcttaatctttattcaatttacacaattacaatttaatgcaaattgtttggacagaaaactgtccggctgacttaatcaaaaattgatcagtgaagaaaatggagaatgggccgggcttttataccctcacaaatcaatgggggcggggccaggcacgtgaaaaatgtgcacaagcaaagggaaaaattccctcaaaaatgatgactcataataaaaatgaagagagaaaaagagatgagtcataaaaaagaggagcgagcgaatgggaaaattgatcgatgaaaaggatcaaaaataaatg

SEQ ID NO: 102456 - DNA, 140 bp, Heterodera glycines
tgttttggatcctacagcatcttttcaccctgctcgttcgcttattgtgttgtttttggccaagccaaaatgcaccgcagagagaagaatcccctctccttgccttccaaagtctgcctactccgcgcaggcgccaaatg

SEQ ID NO: 102457 - DNA, 431 bp, Heterodera glycines
gctaaataaaataaataaatattttacttttataaaatcataacattttatggctatacggtgtcaaacatcgccgaaaattttttaaaatttcaatgagttaacagatttggatcaaaacgaacttttttaaaggttgattgactcaattttctacgagtattcttcttttttttgaaaaaagtgtcatagcaaataacaaatttttggatgaaatcttgctaacttaagaaccaactataataactacaaaatgaaacatcacgaggaaaaaaaattacaaccaaaaatcctaaatttaactttttcgcgtattttataaacaactatctaattaaatagccgataattagttatataaaaatactgtagactttaatctttcgattgataccaaaatgaagcattgatcaagtaagaaaaaaattatg

SEQ ID NO: 102458 - DNA, 413 bp, Heterodera glycines
  unsure (1)..(413): unsure at all n locations
agtcatcgttggcaaagcccccgggttccaactgctccattaagcgacgcatgnnncngnagcngnnacngcacagccaccttaaacaccngccggangccacgcaggcgccnnagcgaaggcancggcggcaaagcccccgggagccaactgctcacgggagccacgcaaggaacggnagccgaaacggcacagccaaccgaaacaccngcaggaagccacgcaggcncccnngcgccggtagctgctagtgcacagccaatagagactcattccccgaatgccacgcatgcgcctttagcgaaacgatcgttggcaaagcccccgggttccaactgctgcacgggtgccacgcatgttccggtagctgctactgcacagccaaccgaaactcctgccggatgccacgcatg

SEQ ID NO: 102459 - DNA, 285 bp, Heterodera glycines
atacaaaagtgattagaagaggtgcaaccacggaagggaaaggcacaacagtgatttgaagaggtacaacagtgattagaagaggttcaacagtgattaaaagaggtacaacagtgattagaacaggttcaactgtgattagaagaggttcaactgtgattaaaagaggtacaaaagtgattagatgaggtgcaacagtgattagaaggggtataaaagtgattagaagaggtgcaacagtgattagaagaggtacaacagtgatgagaagaggtaaaacagatg

SEQ ID NO: 102460 - DNA, 767 bp, Heterodera glycines
ggtttttgaaattttgaccagatcattttggtctaacattcgttcaagattccatgcggcggtagacaaagaaaggtcctttcttggatttttacaatctatgacaatttaaaatgcgtccaattgcttatcaaaatcttcgcaaaatatttgttttaacgggtctttttttataataatagataaggttcgagtctcttctacgtcacataaaattttaattataaattgttggacaaaaccaaaaattgtaggcggagctcaaggagactaaaaggtttacagcgtcccgattacttttttgggtgagcccggcccagtacattccttgactgaacattttaaagaatttgggatcactgcattttgttgtaaattctaattgaaatttcctttttttcgtaaaaaattgcataaaactattacactgacaatcaccgtacaatcattttttttaaaatatgccaaattattatattttatttgcttatttcaataaattttgggtaaatcaatgattcagtcatttgccacaatagacagatgagcattgaaaagtgcacaatttataaaaatcacatgccaaattagggcttcacaaaatgacacgcaatgcttatgctgctataatttctattttaaacaattacaaaggacattttcaaattttattttttcattttatttaatttattgcattactattttatttttaaaataatatttttttgcttttatgtatattaaaattaattaaattttagatg

SEQ ID NO: 102461 - DNA, 715 bp, Heterodera glycines
acattctaaaaaacgaagaaatcccgaatataaaattaaaaaatccatccaaattcgaccatttttacaatgcggtacggtacctccccgcgcaagttcagggcgtgggtaattttttaaattattttttggccatttttgagtgcacctcctttgtgaccacccaacacagtgcaaaacccactttgtcaacgattcgtccatttggcgcagtgtttgtcggatgccgtcgaagggtttgctctgttcgcgcaaaaactcgcgcattttttccaacggttccttgtacaaatgtgtgtttgccaagtctttcatctcttgcgccgcctctttgatgtgaaacgcaacgcacgcgacgccttcgatcaccgtttcgatgtttccggtggcattttgtgccggatactttgtggggggggggggtaatcaacggacgaatgtaggtgaatgattaattgaaatccaaaaagtaattaaaaaggcattaaatcgcagccacctttttttgccataaaaacgatgccactatcaaaaactttcccatttttaaaaacaaaaaagtttgtctgacggcgattgtctcaaaagattttcatctttacgcacttggaagccccaaatgagcatcattaggacgatgatgttccggagtttgcccgtcatcagtttgggcagcgcaacgaacagaaggaaacgcaacggacggaaagcgatg

SEQ ID NO: 102462 - DNA, 605 bp, Heterodera glycines
tagtgccgtgttttaaaaaatattgccgaatcggcaataatgcgaaaaatggtaaaataggagcgaaaatttgaaaatcagtgcgttttttcaatgaaattaaattaaaatcgatgaaaataacttattgagaaaattaattacaaaggaattgaatttcattcttttttcgaagcaaaaaaataattggggtttctacagaaaattctttttttcagttttttgttagtttgtattcttaatcattttttcatatctttgatgaacctattcaatgttaagattttaatggttaaaaattgaatgtcaatctttgtgactagtaattttttcgaattttcaattagttatttttgtcgatggcttatagttttagtaaaacttattgataatagtggaatttttatgtatataatatttttgactgcgcggcgcaaaagtccatttttgctgggcggcgcaaatgtcgcggcgcaagtgtcgactttgctgagcggcgcaaatgtctcatcacgcatttttaacgtaaaacaaaacatttacatttttcaaatcattttttaacgcaaagcgataacaaaacgaaacgccacattcaaacgatg

SEQ ID NO: 102463 - DNA, 1003 bp, Heterodera glycines
cgccgttttgtgctttttgcttctcatcgaagtcgcctttgtgccaattgtgaacagtgcgccactgtaagcactttctgtgcttaattgcctcttctatcccatttttgccttttccaaaaagtgagcgggaaaaacggctgactgccagccaattgggcaaaggcgccgtcgtcggtgccggcgtcggcttagtcggcgccgcactttacgccggcggcaaaaagttttggaacaaccgaaaagcaaatgctgcggcaggtaaaaaatggactgataaagcaaagaaaagtaattggaatttaagccgacgcaggcggagccgacgcggccaatttaaaaacaaagggccgaaaatgaaaggatgccaaagaaagacagaaaacggagagaattttaaatgaaatttatgaaaggacagataaaattttaaaggtgcaaaagttgagaatgttttaaaataagaaataaaaaaataaaaagaagaaacagcaattcattagccaattgctaaaggacttaaaatattttaagaattcattgaatcttaaaataactttattttatcttgccaaatatattcgactaaatttaataaaataattatgtttgctttaatatacaaaaaaagaaaaacttccttttttctgcccattaaaatcaaatgatggaagcgagctgagcaaaaacggccaactcagcccacagttattcctttggaggtgtctatttttgtttgtttgtgaacattgcaaatgatggacagtacgaactcattagtgggtaataatcccttgcccgtaattgtgttcgcccgctttaatggcggtgtttatgcagcgggggggggcaaaatttggccattgctaagggcgccattcgttgacgccaccttttttggccttataaataatcgcaaaagaagcgcaaatgcattcattccctcaaaagcaaagccatccatccatccgatcattcgcttcatctgccaatccgcaaaatg

SEQ ID NO: 102464 - DNA, 928 bp, Heterodera glycines
cctgaatcgtttggaaaaatatgtgttagcttttttattttttgaaaattttctaccgacaatggaattgatatcccctaaatttttaaagccattttcaactaattaattttgtcgggtatttcctgaccgatccccgaattttctctccccagaggccggtagatactctaccattaagttccaaaaattacaaaacaaaattattttcttcaaaattaggcatgtaatccgcccaaaagtgtgggaagaggcaacttggcactcaaacgatggtggtgggacggccgtagttgtaaggtacaacaagcaatcaaacaatttaatggatgagataagcaccggcttttcccattttctgatttttgagatttaagcaattcacctacaaagggcagggcggcaacacaaacaatttcccatcaaagaagcattgtgtccaagtgtgcaaggtgaagttgcacggcattatccaattgagaagggcaccatgggggggggggagagggactgtttgaatgagaaaatgagagatgacgagagagtgtgtggaaaggagaggagacataagagaatccagtagttagagatcgaccagagattgggggattaaaatgagaaaaggaaagatggagagagagtgtgtgggaaggggaggagaaaataagagaatacagatagatgaagatcgaccagagattggggaattaaaatgagaaaaggaaagatggagagagagtgtgtgggaaggggaggagaaaataagagaatacagatagatgaagatcgaccagagattggggggggggactgtttaaatgagaaaacgagagatggagagagatagtgtggaaaagggaggagacataagggaatccagatagttagagatcgactaattgattgcccaattttcagccttgaaatg

SEQ ID NO: 102465 - DNA, 690 bp, Heterodera glycines
ggcccaacgtgaagtcaatggccaagggcgctggggcccatcgtgaagtcaatggccaagggcgctggggcccatcatgaagtcaatggccaagggcgctggggcccatcatgaagtcaaaggccaagggcgctggggcccattgtgaagtcaaaggccatgggcgctggggcccatcgtgaagtcaatggccaagggcgctggggcccatcatgaagtcaaaggccatgggcgctggggcccatcgtgaagtcaaaggccaagggcgctggggcccatcatgaagtcaaaggccaagggcgctggggcccatcatgaagtcaaaggccaagggcgctggggcccatcatgaagtcaatggccaagggcgctggggcccatcgtgaagtcaatggccaagggcgctggggcccatcgtgaagtcaaaggccaagggcgctggggcccatcgtgaagtcaaaggccaagggcgctggggcccatcatgaagtcaatggccaagggcgctggggcccatcgtgaagtcaaaggccaagggcgctggggcccaacgtgaagtcaaaggccatgggcgctggggcccatcgtgaagtcaatggacaagggcgctggggcccatcatgaagtcaaggccaagggcgctggggcccatcatgaagtcaatggccaagggcgctggggcccatcatg

SEQ ID NO: 102466 - DNA, 751 bp, Heterodera glycines
ttaatcttcctctcggggaagcttcttcttctctatctcacgtccataaatttttacacgtcccctataaaaattttactgccgcaagttttttcgcgtccataaatttttcatgtctcaaaaaaatttagatgttccataaaatttttgtgcatcctataaaatttacgtgtccaaagattttcacaataaatttttactcttcacacgtttttacgcgtccataaaaatcgggctataaaattttcaaggtttttacgtcccgcggtgttacgattccataaaatttttaacgtatcataatttacgcatctcattgtttttacgtgttctacaaattttatacgtccctttaaagtttttactcgccgtttttacgagtctataaatttttcacgtcccaaaaaagtttagatgtaccattttatacgtccggtaaaattttacgcgtcccatttttttttacatattcatacacgtcataaaaaaattttaagcaccctacgctttttacatgtcccataatttttacgcgtccaaccgtttttacgtgtcttaaaatttcacacgtagtataaataccgtgtcccatagtttttatgcgtccaccttacgtgtcccatcgtatttacacgttttaacaaaaaattcttttaaaaatagataaatgaattttgttggttcatttcaatttgtaaattcaattatgaaatattataaattaataataaataaattcccaccaattatg

SEQ ID NO: 102467 - DNA, 316 bp, Heterodera glycines
ggttggttggtggaggcgaaattaatatgaaaatggaaagaatccaaaacgccttgaaaatttgaaaaaattgaccctttttggttttttttgaacaaaccagttaatttttgctatttcgatttgattttatcaaatgaatattctaaaaaattctaaaagggtacaacattcttgggaacttttgatgaaattggtaggtatttttgcatttttaacggatgaaatttcaaaaaatcggttaaaagtcctctcaaatgcatttttctttcattaggaatcgatgggactgtccgacggcgactcggccgaaatg

SEQ ID NO: 102468 - DNA, 63 bp, Heterodera glycines
cagcaacaggtggttatcggagtcgatcggcgtcgatgaacgtgttgaccacgcccgacaatg

SEQ ID NO: 102469 - DNA, 196 bp, Heterodera glycines
actaattgaggagggaagtaattaacgtgcaaagcctcttttgcaattattattataatcataatcctattttgataaatgattccaaattaggacctcaaatccaaacacaatttgagcgccggccccccgcatcaaagttgtgaagaaagcgtgagaaatgaagtaagagtcaatggcactgagaagggaaatg

SEQ ID NO: 102470 - DNA, 183 bp, Heterodera glycines
gagtttccaaagttggaggatgtgcatccattttactcggatctgatgaacattctctatgatcgcgaccattacaaaattgcgatgggacaaatgaacacggcacgccatttggtcgatggaatagcgcgggaatatgtccgactgatgaaatacgccgattctttgtatcgttgcaaaatg

SEQ ID NO: 102471 - DNA, 638 bp, Heterodera glycines
aaaaaatttttaaaacagcaaaaattaataatatataaaaaaatttcatgtcttaatatctgccggattaaaatgaatgaagaaaattttaaaaataaatctccattcatagccaatattattttgtgtttgtaattcattttggccggagtttggtcgatatttggcattatggtgattcctttgatcggattagagtcaaaaacctgaaaaatttattttaattaataaattaaattttgaatttaaacataagggtgaagattttaaaaagtagtttaagaaaaaattaaaagttatatataataaaattaaaattaaatcacgcaatttattattaatcccaaggaactcattaaacttgtctctataaaagaatggatacttacatcgtttttaatttaatttcaattatatgtatgagttctgccaaaatgaaagaaattaagacgaaaaataaaacaaaagactgaagaaaataatataaaaaaacaaataaatttaatgaactgaataattaacaaaatatataatgattaacataagcagctttattttggtaatacttcaaaacttgtttaacatattcgattcatttaaaaacaaaaaaaaatagaaaaaaagaattgcataacatg

SEQ ID NO: 102472 - DNA, 162 bp, Heterodera glycines
atttgactaaacaattgatgattgaatgggtggacaaagtgttgtatcccgctcttcgcccacaacaaaaaagtctattggttgttgacagttggacgggatggaataattttaatccaccggacggaattgaattgaaaattaaacaaattcccaaacatg

SEQ ID NO: 102473 - DNA, 376 bp, Heterodera glycines
  unsure (1)..(376): unsure at all n locations
aaaattatttagaaagataaaaaaccttttccggttggaaggaaaagggaaaaatagtataaaaaaaagaaagaattatttttgggttcaattcggcatcaaaaaacgtcggccccaaccataataattttattgccccaggacggaagagataaattacttcatctttcttttcatatggcaatttaaaagtcatgacaaaatgtgacgataattatattgaaaatttttttgactttttaattatttatttgttgaaataaataagaaganccgttaatngttgtcaattagtggtcttgaaagtgttttaagagtgagtcccgagtttttgccaaattctattaattagctcattaacaatgtattatagatg

SEQ ID NO: 102474 - DNA, 647 bp, Heterodera glycines
tagagtagagcgggaccgggaattttgggcaaaaccgggaccgggacttgccgggacctgagaagccgggaccgggacctcgatttttcttcgggaccgggaccgggaaccgggaccaaccgggaaattttaaaaattcaaaaaattcaaattttaatttatttcaagtgaaaataatacaaaattaaattattattttttatttaataaaatccgaaagttaaagctaaattaaattaaagaaaattttcaaatcaaaatttcgtcaattattttaagcaattaatcatttgggctaaatggtcgaatattatttgaaatttagatttacttatcacaccacttttttcggcgcgctttttccagaaaacttttgggaagaaaggggttcggcggtgccgataggcgccgccgggggaaattttgaaaatttaagtgcgatttgatacagattttcaacaaaaatggcttcttttttgggattattaggctcaatttgtatggattttctttaaaaaaatgataaacatgtgtcctttaaaagaaaaatataatgaatcatatttctcgataggaaaccaatgaatatacaaaaagaaaattcaaaaacccccgccccacggggctcgaaccctaatttaaatatg

SEQ ID NO: 102475 - DNA, 781 bp, Heterodera glycines
aatttttgatggtttgatcaattttatgcgtgtttactcccattacttatttctcaatttcacatgattgttgtaccgtcctctgtttgacgcattcagaaatttccgcgtgggctaatttccgttcttgacaatgtcacgtcatcaattgtcacgttggttttgtttccgcaattgatgcagtgaaagtatttgaatttgtccgcaaatgtcctgtgctctaagcacttcccgagtctcgtaattagctaattatcgaatcagtttttcgttgtcaaagagtcctcacactttttttgtctcatgtctaaatttgtgcagcttttccaatttgttggttggcgtttggttcggtcagtcatcagttgaacaatggaattgtttaaatttaatctgccagtggtcctatcagcgatctctgcccgctgtttttgttgtctcgccgcgacgcattcatcgtcgctgcaaaatcattgctgtcatttccctatgtaattagctaatcagtgaagtgaaaaatggcttaacgcatgtggaaggccattaaaggtgtggtgataagaaagtgtgttgtgcaatgaatgcgatgataagggcaaaaagcatttaatttctctcattagttgttttaatataatttgctttgttcttcgccctaatcatttttgaattctttgcaagttttaatttttggcctttttcacataagcgaaaaatatgcctttctctcgacttgttgcttcataagaattttttctgttaaaatttatccgttaaaatg

SEQ ID NO: 102476 - DNA, 212 bp, Heterodera glycines
aatcaaattaaaatgtgttatgtgcatataggccagcaaagtcagtagataaaagtcaattagtggtgagccgaagtgacaaaaatatcaatgtttatattatttaaaatttaattattatttttattttaattgcttaataataatcataatttagcttaaatttaatcaaatttattcatatttgaatgtagctctacatattctctatg

SEQ ID NO: 102477 - DNA, 383 bp, Heterodera glycines
agtatgtggatgcgtacgcacgcatctaccgtatgtaactaaaagtattatactgtacgcattatggatttctgcgtaagcaattagaacctttctcatatagaatccggaagagacggcctgcaaaaagttttgttttgtaatcgattagtcattttttgttgccgcaggaaggtgtacaaggctatatcgattggttgattgtttataagaaggagggagttctcatttcttctcattcgttaattttttaatactaaatttcgtctcgctgtcctctatcaatattttaattaaaaaatattaagcattaaaaagcattaaatcaatgtcaactcaaccatctagctttttcaacgtcgccatgccgccccttggacatg

SEQ ID NO: 102478 - DNA, 146 bp, Heterodera glycines
ttatccatgcgaacaaaatgcgtttagtcaattggggaacctcggaaatgccaccttttctgagtagaaatagcaaaactatttcacacaatttcaaaataaacttttgccaaacaaaccgagtgccctcgtggtaaatgaaaatg

SEQ ID NO: 102479 - DNA, 398 bp, Heterodera glycines
aagtgcgctaaaaatgatcaaatgattatcaatttttattttcttaattccaaaatgaattcgaacgcaaaaaattaatcataatacatgtggtaaaaatgcattaaaaataaaaaattcttgaatttgcttctgaattttttaattttaaatagaaaattactttttcgaaattttgcacaaataagaggcgaagaaattcaacgaaatttttattaggattttgatttaaaatgttgagaggtttaacaaatttgtacactgaatgttggatcgtcaacaccaatgagaaatgactaacagaaaagagggagaaaagggcgttggcttaggaaaatagcttataataaaggagagacgagcagacgatgagtgagagaaaaatagtggtaaaaatg

SEQ ID NO: 102480 - DNA, 673 bp, Heterodera glycines
taaaaaatttaatttatattagttttatctttaccagttgaaacaaaaatcttttcggaaacctttttaatgaataattttagaaaattaatttttagcggcttttaaaaaatttcaaaaatttggagcaaactcattcagtctgcttgtatttcattcatacgtaattatgagaaaaatctaaacaatttaaaaatggcatatagttagtccgaatcaaagaataaaatgaaacttttttttggaacctttttggaaattttcaacactagtaccaaaaaaatcaatttataacgggcgccaaatagccgcgccagaaaagcaaaggccaaaaaaaccgcgccaaactgatccagacccactttggcttgatttggtattaccagtgaagaaagcaccttaatgtggataaaagctgtcccattgttcgccaaaagtgcgcctttaattgcgcaacacattgtttagcctttagatgcaaagtgatatgggaaatttttgagttccggtcccggtttaataaaatacaaaacacaaaaaaaaatatacaaaactctacttaataaattaatgaatattatgatattctatcgatgttaattaagattataataattcttttctgcatatacatatatttcttttttacaaaaatatttctcttaatgaaatg

SEQ ID NO: 102481 - DNA, 262 bp, Heterodera glycines
ctttgcagttttgtaacccccatgaaattttcaattcatttcgagggtaatttgtggggctgatcacgaatgacctttgttctgctcaaaaccatctttttcatcctttttatgggaacagtaaaggcaatgattactcttcgcccataaatataaagttttttccaaaaaagcacactctcttcgctttaacattattaatgtttgctattattttctaagttttattttccttcaatcatcggctaataaaattcaaatg

SEQ ID NO: 102482 - DNA, 811 bp, Heterodera glycines
aattggaaaacccgaccgtgtgtcagtctgctcatcagcagggaaaggtttcgctagcatatataaatccgttctctgctcatcactcataaagcaaatgcacataatggcgccagagggacaaaagagaaaagaaaaaaaatatgagatttttaggaagggatgaagagagaaaatttcatggatttttaaaaaatttagtaatttataaagaaacaaacagttttataacagatttaattgttcgtcatctcgattctcgctgttccttattttgcgttgtgtcagttcctctccacacctccaaatagttgtttttttttctaatttgcaaaattattttcttttttacttgtaaattttgaaatttataaggtaaatggcatttctaaaaagaattaatttaaatttgatgaaaaagttgatcatttttgaacgaaaatgaaagatgcacatactcatgaccttgattgttaattaaatgatttttctgttctttctcgtcaatttcatagtcagatttaatggaaggggcaattaaaaataacattaaaacttttatttatttattatgcataagtaatttaatgcagaaatttatgtaaatttattatttgctaaaaatgagaattgcttaactatcattcgatcagtaattattattcaaaaagtggatgtatagtcaacaagaataattatttttattaaatataataatacaattttaatttatattaatttataatgaaaattatttaaaaagtaaaacatatttccttgattttttataaatttgtagaattaaaaaatg

SEQ ID NO: 102483 - DNA, 629 bp, Heterodera glycines
cataaatcgcgaaatatggaaaatatggatatggaaacccatcctagaagcttcaaaccaagctaaaaacatgttgttcgtgcgtttcaggccctcaacagtccaggaaaaaaatatggatatccatatgattgccatccctagtgatcaatgatcagcgaattaagcttaaaaatcttaaatatcattccttgaaatgaaaatgctaattagtcattaaaacaccgcaatttgcttgaaaaatatttatttttaaattttttatataattcattatataatttaacaaaaattagtttaaaagatcctattttttgtttccaattttaaaattgatcttaaaatttccaagttttaaaagacatcaataaagcattaaaaaagtaaagtgctaattaggcaataaaactccgcatttgcgtgtaagaatttttcttttgaaaattcatttatataatttaacaaaaattagtttaaataaacctagatttggctaacaatttaaaaattacaaactctggaaccatttcagtataagcttattgcatttctcaggtacgctttacgatggtgccacacttttctccattgcgcttccggcacatttgctgctctcgatcatcccaatg

SEQ ID NO: 102484 - DNA, 124 bp, Heterodera glycines
cacccgtgcttttaggttggtccgcgagctgtacggcgtcaacgtgaacatgcgcgtcggcattcacagtggcaaagcgcactgcggggtgttggggctgaagaagtggcaattcgacataatg

SEQ ID NO: 102485 - DNA, 127 bp, Heterodera glycines
tgtgataatttttggcattgaaacgtaaaatccccggtaatttaaggttattgttcacatttttcccgcctatactgcgatacgatggatgtctttgggaaggacattcaaacggattcgcgaaatg

SEQ ID NO: 102486 - DNA, 613 bp, Heterodera glycines
attgttacttcccctgatcggtcacacggggttcatttatgagcgcccatctcgccaaaattattattataaaatgggcgtggcacctggcccgacttttttgcgtataaatacgggctcaccgggtggcatttttcatttggcgtcccttttcaaattcacaattcctatggcgatcaacatctccgacaaaaaatcgttgtgcaaccaaatcctcggccaaacggacctcaccgtgacctcgagtggtataaccatcagcggtccccgcctctcgacaccccgcttcattccttttgatgaagcgggccgttgtaggtgttgtaagggaacggagtccgaaattgacactgtgatcacgaaagaaggcatcacgctttggtgcacccgcatagagaaggcccaattcatcccgttcgatgttgtgtatgatttaccgggacattgttttttccgtctgaaaaataagtctcgtgtgttcaacataccctatggcgacataccctcttctgacacgcacaccactaaacgacggacacacaccaatgaccatcagcatgaactgaagcgcaaagcaaaggtagctcttgacttagtggaggccggactaatg

SEQ ID NO: 102487 - DNA, 157 bp, Heterodera glycines
tgtcgaagtgaatgaaagctgtgaaatattttgtcaatctaattcaacttagtctttaatgccgacaaacttggtaaattttgtgtgataaaatgggagcttttattcgactgaatcgatggctattttcagaatcagggttttttatgcgaaaatg

SEQ ID NO: 102488 - DNA, 125 bp, Heterodera glycines
ttgacaaaagtttaaacaaaaaacggcgaaaggtcagacaatttgacggaattcgaaggcgaaatggcaaataaaaggggagggaattgcgactcggacaattcattctcgtggccctcaaaatg

SEQ ID NO: 102489 - DNA, 307 bp, Heterodera glycines
tagtttatttgctaaaatcaagcttacaaaaagcggttaggcatttaaaatttaagctccgtaaaaattcaattaaaaatcatcacatttatttttttaatttttcaatttttaaatttttcttttttggcgaactgtctacccttgtaacttctaaaaaaggagttgagactgaaatcccgcgccagatcccgtcccgacctgtctctgttttccatagtgaacaaataattattgttgtatttttactctttcgctgctccacacacatctctttcatgaactttagacaaaaagtattttaatg

SEQ ID NO: 102490 - DNA, 157 bp, Heterodera glycines
ttttgttgagtggaaattattaagacagttttcgtttcggatttcaattggcttagcaaagatgaaaaaattatgtgaaatcgaccgtttcttttacacgaaatgtaatttttgactcgattcattaatacaaaaacatcctacagaccaaaagatg

SEQ ID NO: 102491 - DNA, 103 bp, Heterodera glycines
  unsure (1)..(103): unsure at all n locations
aatggaagcgctgaagaaagtgatcgattgnnagcagaatgccgccattgacactgaacattcgctgtcctcaaaattgccgcncaattgttgccaggaaatg

SEQ ID NO: 102492 - DNA, 1003 bp, Heterodera glycines
aagaggatcagattcgtgctaatttgtaagcgcctcggattacccttgaaaataactttctcgcaatctattaaaaaaacaaatttcgggaccaataatctttaccattgcccatggacggtaaaaaacgaaaaaaattgccaaaaaataattggcgtaaaacaaaacgccaacacacgcaaaaacaaagtatatgcacttacactggtaaatgccttttttgtattttttattttgatcagccataatacgcttcattcccaacaaaaatgaacaaatttggtatctaaaaaaagattttgaaaaggagaatctttttctaagtgaatgctaagcaatttgacatctcagaaaaaagttgtgagagtttcaaatgttcatcacgttataactcaagtcctaggcagctctttctaaccaaaatgctaaatttattcttttttctattgattctaaatgttcaaagtgattttgtacccttataacaaaaattattagaattttcgaatttggtgttttttgtgtgttagagatgtgaaaatagtacgccaaaaggagaggaaaagaaatgcaaaaattttaatcactccataactttttagttaaccctttttttgctcttaaaaacccttacatttcgttcctaatttttttctctatcgatatcgcaaaatttggtgtggatttaagaaacagaaaaaaagttaaacaggatgaagtgaatcgttgctttttacataattaaaatgaagagatagtacgccaaagtgagagaaattacaaagaaaaagagaaacgacgagatagtactaggcttttctctgcacagtggagttgacccatagtgccaaccctctgtgtcggttttttttaaattggcgttttgtctcttttgctgacttaatttttctctttagcttaagcctatgctttaacaatcgcttatttttctgttcttcaaatatattttcatttccttacatttattttatcagtgctaatg

SEQ ID NO: 102493 - DNA, 82 bp, Heterodera glycines
ctttttaatgcttttgttgaggggcccaagccaaattgttttttttatggggccgaatggacagctccacccgtcaaggatg

SEQ ID NO: 102494 - DNA, 117 bp, Heterodera glycines
tctgaataaattattttatgtatttgttcgtttcttagaaagattctcatatttctgtcttattgtctgtctgttccttcgttccatcagttcctttaagaagaaagaaagagaatg

SEQ ID NO: 102495 - DNA, 468 bp, Heterodera glycines
  unsure (1)..(468): unsure at all n locations
tgtccgtgtttntatgtccatattttgggtttcccataaacctctattagaatggcccccatcagttaaattgcgcttctgactactcctgatgatcagaaattttccgaaaaatcattttgaaaatttttagtttaaaataaacttacttaaaaataggtaaatttgtttgaaaaatatgcaaaaaaaaaagagaggaaaatttcggctttttgatccttttcagagctttttttccttataaacgacttttatacggtattcagccattttacatgaatttgaaggaattttggaaaatttacctctcaattcggaaaatttatgttcaatttttgcaatattatgtctatatttcgcgatttttggtcctaaccaacataattcccaaccctaaatagcatacttaaaaacgcataaaaatacttaatattgatattaaaattaataatttaattttcagtaatg

SEQ ID NO: 102496 - DNA, 71 bp, Heterodera glycines
gaaacacaaaatctaataaaaacattttttgggttttaattgtcccttcccaggttattttgctccaaatg

SEQ ID NO: 102497 - DNA, 169 bp, Heterodera glycines
ttttgagtgggggggaaaggcattttgaggggatggcgccgacccaagtgaccgagtaaatcgggcgaattggcttccttttcttcgacgtgtctcagtttgtcaagaacagcgccaaattggtcctccacgattttatttgccattgccattggaacggcgggccatg

SEQ ID NO: 102498 - DNA, 209 bp, Heterodera glycines
tttcaccaagaatgaatgttataacgactaatttcacttttatatactcaaaagttgggccacgcccatcatttagttactgattagccccgcccactctcacctaaataattcacctgactaaaaaccgaaatcattttaatttgtctgtccaaacccaaaatcatccttcattaattccaaacaccaaaattattttatacaaaatg

SEQ ID NO: 102499 - DNA, 151 bp, Heterodera glycines
gatcagcgaaacaacaatcgaagtgtttccctgcgttccaatctccctatccaacatcagctaccgaacaacaaaggactgctacaagttcatccctgtcacaatccatctgccaaacacaacacaagacgcattcctcgacccggagatg

SEQ ID NO: 102500 - DNA, 65 bp, Heterodera glycines
tttcccaggtgccaattccgtcctgttcaatgcgttcgtcgttcggcgtttggaacaaagagatg

SEQ ID NO: 102501 - DNA, 65 bp, Heterodera glycines
caaaaataattgggcacatttttttgtttggcatttagcgacaattgcaacgaagcattgaaatg

SEQ ID NO: 102502 - DNA, 273 bp, Heterodera glycines
taaaaaattttaaacattttttaacccacacatctattacaatttcagataaaaaaataccatacgaatttttaaaaacgaagtttctaattttggagatttttagcgtttttcgagtgcctctttttgcttttttaagctcttctcttgaaaaatatgaaaacgaaaattcaacaattatctattttgcaccagttttaattccatggaaacttttttgaaaattaaaagaaattaaaattatgagtaaatctccgtccatttgaggatatg

SEQ ID NO: 102503 - DNA, 1003 bp, Heterodera glycines
aacaaataacaacaaaaacaaaatgatccacggaatatttatgccaaatatttccattttatttactgtttatgaaattattatttaatattatttattattccgaatgaaaaagaaattgtgagaagaaaaggccaacaaaatgaaaagtgacgaaaaaacacgatgatttgttaaattgtgattttaaattgaaatattgatatattttaattgaactttggaatttgtttcgccactcatgagaggaaaaacagcggaattcaaatcagagaaaaataaaagaatatgattaataggatgcggaaaattaagttggatcacccacctactcaagagaaaaatattaattttcttgtgaatctcagttttttacccccgtttttcctggggtccccggctgagtcatctgcgctttcttaaattcttgaatttttatttgttttcattccaagaaaaattttttttcatttttattatattatgtgtcaattatcatccttatttagtgacttattaattgttttatttttaattatacaaagcaccagtagattatttttaaattaattctataaatgtataagacacttatagaatattttctaatttaatagttacaattacacatatgtattaattataaaatataaaaattcaattcgccgcccctgctgctcttgagagactcggccccgattctggggaaattttagtctcgggtcttcatattagtcccgagtattagcactgctgcattcgtattaatattagggactaaaaactctattaaatgcggacaaaaaccaacctgaaattttccagttctttcggatgaacgaaagttcggaaaaattgtgccataaaaagaagaagaatggttggcggaaattaaagatgaggtggaaatgcaactggacaaaatgatttcacaagaagttcggattgatgagccaccgcagctcaaaaatgaggacaaatgattagaaaattgggacgaatg

SEQ ID NO: 102504 - DNA, 155 bp, Heterodera glycines
cgacgacgacggaacagcggcaaaacgtggcgacagccagcaggacaggcggggaggagcaaaagcggcggcaacatcaaagacaacaattaacgcggaccaacggcaggaagaggaggaggaggagggcatttgtttaatgagtaaaacaaatg

SEQ ID NO: 102505 - DNA, 222 bp, Heterodera glycines
ggtatgcaatatattattttgaattttgaaaatcttttaaaatccaggacgcttgcacacggatttaaataacgttgtgcagaagttggtcggagttcattcgtgcgacatgaacgctgcgcatgtggaatgtcagcgtcttgtaactggactcaagcgacgtgctgctgagacgtgcgaagcacctgcgaccattcgtgctcaagtgcttcaaaacacatg

SEQ ID NO: 102506 - DNA, 102 bp, Heterodera glycines
  unsure (1)..(102): unsure at all n locations
aaaaatttaggggcattngcctaaaaatagcatccctactaatcaatgactatattaggcccattaanaatttatttttagatggcatacactttgaaaatg

SEQ ID NO: 102507 - DNA, 142 bp, Heterodera glycines
attgattttcttgctggtgtctcatacaattgttcgatggacccctgattttttgttattgtcaaattgttgaaattaaattgctttaagttcgaatctagtagcaaatgtgttaatttaattattatagtgaaataatatg

SEQ ID NO: 102508 - DNA, 1003 bp, Heterodera glycines
caaatagagctaaaatttttagaccccctaagaatagaccccaaaaattttcagaaaatttttttaaaaggcatttgatcactgatttaattatgatcggtcggtcatttcttaattaattcatttcttcttcagctgatcactgtttttgttcgtttgtccctcactcatttcgcccttttgtgatgctttgtcccgcttcttctgccggtggcggagacaaaggccttaattaagcgcaaaattcaaattggataaaaatcaaatgctttttattgctcacccaatgcaattagtgccactaaaaagccaaatgaacacattgttacaattgttgttccaattttcatctttcttctgctgtagcttaaccgccgtggtctccgcaattttatggacataaaatagcaaaaatatggacataaattctccgaattgaggggtaaattttcaaaaatattcttcaaattcattaaattctattagaatacatctaaaatggctaaatacggtataagaactcgttttaaaagaaaaaaagctatttttaatgaaaaccaacaaaaaaaaaccgaaattttcctttttgcttatttttgacataaataaccaatttctaagaaaatttaaatttaatcaattttttcgacaaaattttgttaaaaaatgtctttttcggaaaattttccagtctttggggtcaaaacggccaatttagctgacgagggccgttctaataggggttttgtagaaaaatgccaaaatatggacataaatcgcgaaatatggaaaaatatggatatagaaatccatcctagaagcttcaaaccaagctaaaaacatgtttttcttgcgtgtccagaaaaaaaatatggatttccatataattggaagccctagtgatcagtgatcccggaaatccctgcctgaaaagtcaatttttgttgattaatggggaaagcgtaagtggtgaatgtttgccgaaaaaatccattttccaatg

SEQ ID NO: 102509 - DNA, 791 bp, Heterodera glycines
ttgggattttgtattttccgatcagaaaggaactgaggtaagaaaaaagagtcggacgagtggggggtaattaaagcgagtcgggtcaaacaaataatgtgccttacgtggaactgatgggactgatcgaatttcttttcaatatgggcgccgccccacgacaattgctcacttacacttctgtgatgggcaaatgaacattaaaattacatgaatttggcagataattaaattttaaaaaatccacaaaatgtacaattaaaaaatttctgtcgtattttaaaattccatcatttagccacaatttacaccctacaaatcatttataaaaaattaatgtttattattattagggattccttttttaggcacaaaatcgcgaaacaggcacttaaataggcaaataataggcgccaaaaatggagaaatagacaaaagacattttaggcatttgcctaaagaaggaatccctggttattatactatttcgtaactttcaaaaacaaaaatgataaaaaaataacaaagttaattttctatttatttttttgaattaaaaaataaaaatgtttatcttttatttttttaattaaaaaaaattgttatttaatattaaaataaatatttgaacaacataaaattatttccggggaaatgcttgaaaaataatttccggcggaaacgctgccatttcgaaaaaataaacacaataataattatgaaaataatgctataaaagcaaagtttaataaattattatttataattgaaaaattttgagaggaaatatg

SEQ ID NO: 102510 - DNA, 670 bp, Heterodera glycines
  unsure (1)..(670): unsure at all n locations
aaaaaaaaagttnatataaatattttaataattttcagttattactttttttaattaaaataataattttttgagtttctgtttttaaaagtctcattggcaaaatcttttttagctcatttttttgactatgaacaatttattattaataataaaatatataaagttggattatcttaaattaatctctaattgaaaaaaatattattgattattttgtaaattaaaagttcactttttacaaaaaacttcgcttataataattatgggtggaacaatatggatatgcctaacaagaaaattaatttcctcaaatattaaaacatcactaaaaaaaaggaaaaaaaaggtaaaaaacaaaataaaagaaaatagaaaattaataaaatccttaaaccaaaaaaatgaaaaaaggttttttttagaaaattagaatgaagaaaaagtttggatctgctaccctttttttaatatttttttttgttttttttttggttttttttaattccttttttatttttcaatattatttctcaaataaaataaaaataataataataatttagtttattaatattacatattgcccatactcatgatttacatataatataggcaaattatttaattcgttttttttctaagataaaattcattaacaaaaaaaatg

SEQ ID NO: 102511 - DNA, 94 bp, Heterodera glycines
tgatgagttagctttttacagtattcctacagttacatcgccatttcccatccgttggcatactgtcaaatcggcaccaattcccgtgcctatg

SEQ ID NO: 102512 - DNA, 582 bp, Heterodera glycines
aaaaagagaaaaaagagatttccattttttggtcaagaattttttttgtttgcgtttcaaatatcgtaagattgtttgataggaccagacaagagaaggcaactgttggttcctagtttgcggtaaaaaaatgagaaaaaagatgttcctagggccagacaagagaaggcaactgtttgtaccaagtttgcggtaaaaaatgagaaaaaagagatagctattttttggtcaagaattttttttgtttgcgtttcaaatatcgtaagattgtttgatagggccagacaagagaaggcaactgttggtaccaagtttgcggtaaaaaatgagaaaaaagagatagccattttttggtcaagaattttttttgtttgcgtttcaaatatcgtaagattgtttgatagggccagacaagagaaggcaactgttggtaccaagtttgcggtaaaaaaatgagaaaaaagagatagctattttttggtcaagaattttttttgtttgcgtttcaaatatcgtaagattgtttgatagggccagacaagagaaggcaactgttggtaccaagtttgcggtaaaaaaatg

SEQ ID NO: 102513 - DNA, 510 bp, Heterodera glycines
atacaaattagccaccatacccattaatctatcttctattcaaccttttttgctatatttacattacaaaattttagatgaaagttacaaaaaaaaaatcgacagaaagtggcaaaaaagcttggttgaaattacccttttgtgactttttctggggggagccaaaccgaatttttgtgcgtttcttcgcaaattacgttccgatcacaacaaatttgtagtgtttctacgtgatttggtgttttcattttttgttctatttctgtcacacattttagctgtatacctatttttgcctaacattcgaaattttctgtccataatccctattccaaacgcaagaggtgaagaaatgttgaattttattacttttacctgtattgtgaaaagaatattaaagttatcaattccaacaaattgctataattatagtttccaatgaccattacttaaatttctttcaaatattccaaagtgtatcccatttaaacaatttttggatacgcaatg

SEQ ID NO: 102514 - DNA, 412 bp, Heterodera glycines
tgatcagattaatgatgatttgtcggctgatttggtgtattctgttttgaactgttgtcctagtttttatgaacaaatatggacattttgtacccgcaaatgacaattaccgtgtaacaaatgatattttcgacaatagaagctcccattaaaatttgcccgggaagataatcctaactaaaattaaataatctttaaaaatgattcggcacatcatacttttcgttcacaatataacacaaagtcgctgagatttccacgcaaaagttgctcaatttgaaaaatttcttcggcgggaacatctaaaaaatataatttacaataataatctgtttttaaatctatttaaacattttttgaattgaaacttgaaaaaaatcggccacttgaaataataaattcgaaaattatg

SEQ ID NO: 102515 - DNA, 359 bp, Heterodera glycines
gtcattgataatggtgagtaattcattttaatttttgctttttaaagatataaaatatatttttatatcttttatttgttaggtatgcttgatcaaaatctaagctctttagactaaggctagtaggtgaaacacgaaaaattttgcgtgctatatattttgtgatatgatttttgtataaagcattttattaatcaatcattatttcaatttggtaattacgaaaatttatttgaaaattcattttaaattttttttctctttttttttgataatttagtcacaaaagtcggtccgcaaatgtcggtccgcaaaagtcggtccgcaaatgtcggtccgcaaaagtcggtccgcaaatg

SEQ ID NO: 102516 - DNA, 122 bp, Heterodera glycines
tttttttgttgttttaggttttggctaaaaaattaagataaaacacttttaaaaacacacaataaaaataaaacaaaattttaaattaatttattattaagtgttttctgactttcgaaatg

SEQ ID NO: 102517 - DNA, 355 bp, Heterodera glycines
  unsure (1)..(355): unsure at all n locations
attttgtgtcnaantttccttgcnccttaaaggttaaataaaacccataatcaacctggaataaaatttttcaaaatttctaaaacctaggaatttgtcgtgaattcaattttctaaattcttagcccaatttttgaaaaattatcgaaaaactagcattttaaaaagaaaattgtttaagctcgcgctggaaatttgactgaaacatcgtcagaactcttcttctctcttctgcttggcattgccgcggttggcaaaaaaaaatttttttttctaaatcaaactttgttaactcttgattacgatttaaaaaaagtcagtccgctaattgccgatttttcaaaaaaaaaaaatg

SEQ ID NO: 102518 - DNA, 1003 bp, Heterodera glycines
acgggtgtttcccgcacgaacccaagcctatgggaggggtgcagtcctttgaagttgcgcacgggtgtttcccgcacgaacccaagcctatgggaggggtgcagccctttgaaggtgccgcccgtggacccatgcctatgggaggggtgcatccctttgaagttgccgcccacccaatccaatttcccaaatccgcacgggtgcttttttttttttgcccatccctccccgccgatgcatcgccgcgaaatgattcgataaaaataatcgataatgacactacccccatccctccccgccgatgcatcgccgcgcaaattaatcgataaaaataatcgataatgacactagcactgtcctccctatcgatgtcgctgccgcgcaaaaaaaaaattaatcgataatgagaccgccactctcatccgctccgtcgatgcgccgcgattccgagtcgtgaaaaaaaaaatcgataagcaccaaaattgtcaatgaaattcgaattaattgtatgatataggaatattaattggacaatagttgaataaataaaaattcatttaaattaatgaaattgaattttctgaaataattgatggtcttttttttttctcttccattatttcgcaatttgcacgtgactttacgatttcgcaatattgaccaaaattatgtcacctgtcaatcaaaattgattgattggttccctattttgcattttccccatcgatttcgcaatctgcacgtgactttttttttgttgcatatttcgcaatagacacgtgactttctgcccattcgtggaaaatttatcatttgtcaacgaaatattccacaatgtcaatgaaaaacagtcacgtgccaggtgtcagctgacacgaggcattctgcggccactataaaagccccccaaattcacttctccattcagttcaaccaaaagttggattttgctaaaataaaaattgtgcgctcttatttaaatatattaaatttaattaaaatg

SEQ ID NO: 102519 - DNA, 224 bp, Heterodera glycines
tctaaatgactgacagggaagtgaatgataaggggcgtggcataggagggcatactgtggatggatttcgaaatcctcccgtctggaggtccctgcgtgctctcacttgagtgggcgtggcctattcccacgtgacacccccctctccatcacgtcacatacagtacccccacacttttcccttctcattttcatcttaacacacaaaaatattcctcgaaatg

SEQ ID NO: 102520 - DNA, 204 bp, Heterodera glycines
tgttttgctgaacattattaaaagtattcatttttattttgcaaaaaaaatcttgtgattaaaatgaagttttgcgtcatatttgcgtgcttttatatagcgaaaaggtacagtgatgcgcgctacgtgaaagacaaagttacggtgctcctacgcacatataaaagcgcttgaatgtgcacaaaatctcacttgcgcgcaatg

SEQ ID NO: 102521 - DNA, 518 bp, Heterodera glycines
tttcattaaaactaaattaggattaaatttggtttcgttaaaataataaagacttttatgaacgggatattcaacacctgtatattctttgtccttcgcaagtgcatttttgcaaatcatggtaaaatataagcgaataaattttttttaaaaaatgataataacaaaataggtcttcacaattgccgttttagaaaaaaaaatgacgaaatgattttgcaatttgttaaagttcttaaaatttttttaagattttacattttttgacaaattttattccttctttaattttaaattaattattttcatgaagagaggtcattaaaagttaaaaaaaacccttctaaaataataatttttgtaacagaattcatacatattcatggtcagcgaccccaaaatcccttaaattttttatggcattatattttctgttactagatttttgcatcgggcaacctaaactggaaaagtgccaaatttcaattggaagttttaaatagaattttctaaaaatg

SEQ ID NO: 102522 - DNA, 74 bp, Heterodera glycines
ctctacttttcaggcccatgtttcgtatcatttccatgccgccaaatgggccggcactttgggtggccaaaatg

SEQ ID NO: 102523 - DNA, 360 bp, Heterodera glycines
gcccagtgcgttggacagacatttgtacaacaactcagggtgggtgtccgtcacacagtccgtttgactataataatcaccaaatttgactaggttgaggtccaaaacacggagctgtacgacagcggaaccctctacccttacaaggcgtactcgaccaacgaactgtcctttccgaacagtgcaaagggacactttatggccagcgcgggctaccatctatcgcggaagcacgacgacgcgacggacgccggttttctggcacgctgtgcgcgcttcgcgggcggccgtaaagcacgcttcctttcccggctggacttcgacctgggcaaccaggagctgtatctgttgaacaacatg

SEQ ID NO: 102524 - DNA, 896 bp, Heterodera glycines
tgccttagtttgtttccaatcctatttcggattcccggccataattcgatcattcgaaaaaatgaattccccatttttgttcgaaaatttgactaaaacatttcaaaaattagtcacaatattacattattataaatggtcaggttattaacttttgtttgaatacatccgcgcgggattcgtaataggccaaaatcagttgtaaaactcaattcatagaatggtcatattcgcgatcagaaccccaaagattttttcgcggctttttaaaccgaaaattttaccaaaaatttgccaattgtataaatgataattttctatttgtcagggcatgtctcgtgatcctttgaatatttggcaaaacactccaagacaaattgagcgaaagattggcgtatacaaacgaagcatcgcctgtgactgaatgtgaaaagcgaaaattgtttttctttgttgttgggcttttggttgtttaaataaataaaaaacaattctgaacacattacaccattatattgcccttatgccgttttttattcgtatttttgacttcggagatttgtcggactatttcaatttgactatgaaaagctgtttgctttagtaaggaacataaacaaatgggacaaaaatatcctggtaatggcaaaaagtgaaggacaactgccgtcttgtccctcccccccccctttccctctctcttctctctctctcctacatactctctccccctctcaatcacttgagcagttttcctgtgcattcgctttctcttttgttttatttgtgctttttccacgctcaaagtcccattcattcctttgcttttgccgatcgattgatccgaacaaaacaaaatataatcgaagtccaagagaagacgacgtaaaggaatg

SEQ ID NO: 102525 - DNA, 326 bp, Heterodera glycines
aaataacgtaacgattggttttcgatttttttgaacctgagcttgagcatcacaaggttctaatctaaattgggcgttatagttgattcttatcgtgaatcggaaacgaataccgggaaatcatcccgggaaccgagactgggatccgaaaaactcgggaaattctcgagtcgatgaattgcgaatcccacacatttctagtgattgtaaagcgacgttcattttcattgttcttatgttttttttcattttaatacccaatcttctacgctattagaacaacatggcaccgggggatgatgcctttttggacgacctaatctatg

SEQ ID NO: 102526 - DNA, 365 bp, Heterodera glycines
ttcctccataactttgtgagttcggcacggatcgagcttccggagggaccattggaaagagcagctcgagctctacaccattgtatggaaagaaaaaatagttatttctgggactttttcagaaatcagaattaattctccaatgtggcccaaattttaggcccccagccacagccccttgcttctcccagttttaagtcttggatttgtcaaataaattcaagacttcaaattaataatcaaaaattctcttaaaatttttttgaacccaattcaaaaaaggaaaaaaatttgcagtcaaaaaattattcgaatttctccaattttgtttccataatttccgaaagttattcggtatcataatg

SEQ ID NO: 102527 - DNA, 262 bp, Heterodera glycines
tgttttttcaaattaatcaaataattattcgtaaacccccaccgaaaaaattagcgtcctaaatttttttttaatattttctctacgaatcatgttctgttttaaatgttaaattagaatgaacattgacaaatgaaataaattttggaaaataaatttaatatttaaaaatttaatttcaaataaaatttaaatttaaaataaattaggctctgccaccattccaattgcgacccgatttcccaattttgggggtgccatg

SEQ ID NO: 102528 - DNA, 168 bp, Heterodera glycines
ttttgggtgagaaaaaaagaaattaaaagattatcattttgtgtggaaaattattaataattttgaccattttttggtcgaaaaattaaattctttttccaactattaatggtggttaatggaaaatggaccagaaacacttgaaaattggcgtttcagtgaacaatg

SEQ ID NO: 102529 - DNA, 1003 bp, Heterodera glycines
tgagtaaaaatatttctcccaaaaaaggggacaaattggtgtaggaaagcgaaagtggtgaatgaatatggagaagttattatgttacttacccttttatgaaagataataatcacatctttgttctgctactgaccgatattttaagtgtgggaaaatgttcaaaatttgtacacaaatatttgggcaaaactgctgagcaacaggagggaaatggtttaaatttgaacataaatatgagtgtacattttgccaaaaacataaataaatttgccaaaaaaaagaaaatcggtacaaaaaaatggtgggaaaaaagtgtcaaaattcgtaccggaaatcctgaacaaattggggtgaaaacaaatggaaaatgggatttgattagtcatcggcaatgtaaatatggttaaaaaacactcccagtagcagaagggcaaaatgcacaacattaattggttcgaaaaaaatcaaaaaaaaaaaaattaaattaattataatttgccaaaattaacggattgtattttgtgcaaaaaataataaaattatgcaaaataaaaattttattaaaattataaaaaaaaacgattaagggcgaatcctaaaattttaaatataataagacaaaatgaaagaaaaggcaaatagtgttacataaacggcgccaccgttttcttttcaaaaaaagggattattttttaattgctcaatttgagtgggcccatcccaattttctcagcaagaagtaatttttgtggtgggtgctgctggtatagcaccccaaatttgacaatttgagttccgttcaccgccctccgccggtggtggccgattgtcgggtacaaaacgatgacacggcacaacaaacattttttttgttggatgtcgtcctaatcccttagatccctatatttgcggtgagggttcaaacaaaaaatccgggggaaaattgcgcgcgcattttgtcggaaaacaaatctttcttttttcgaaaattttcagtatg

SEQ ID NO: 102530 - DNA, 92 bp, Heterodera glycines
taaaaataggactgttatttaaaaaaaaaactcgccgaaaaattgtttaaaaaaattaaacaaaaaatttattcgaagttttgaataaaatg

SEQ ID NO: 102531 - DNA, 127 bp, Heterodera glycines
tcttttacctttatggccgtgtaatttatttgacaagcgcaaaaatgatgaaatgcgaagagaagtattggcttttgtaagtcatacgcattggcattagtgagtgattggtgtggccaaggcaatg

SEQ ID NO: 102532 - DNA, 52 bp, Heterodera glycines
aaactgtcccagtggtttgcatacggattggctgcgtgatctttgcattatg

SEQ ID NO: 102533 - DNA, 313 bp, Heterodera glycines
acatttggccctttttgacggtcgtcgtcggagtgatcgatgctgcccgccattttcaacattactcctccgtaaagtgactcatttcattttaatttttattcttaaaatcattttttggttattttcaatttcgatccatgacttatttctaacaataagtttggaaaattttcttgaaattccaataaaaattcataattttttttcaattgtaggaaaagactcagataaaggttgtgggaaacaaaacaattttaggcaaatttctctgactcttttgggcattttgcggtcgacagaatgccaaatg

SEQ ID NO: 102534 - DNA, 139 bp, Heterodera glycines
cacagaacagtgcggccgggggagccaactttttggtctttttgggtcacgcttttgatcgactttttggcagccttcggtttttggtcgtccgccgattggcgttccgcccaattgttcttcggccctctcccaaatg

SEQ ID NO: 102535 - DNA, 357 bp, Heterodera glycines
gaatatttattaaatggaacttaagaaaattaactcacaatttgcaacggaatttccttttccgttttatccgttaatttttcgccctttggacttagacaagaaaaaaggcgaaagtgagcaatgaaagctatcagaattggcaaaaaagaaagaatcattttcgaaagagaaaacatttagaaaataataaaaaagaaatatttgcaatgtttttaagggatgcaattttaattggatcgatattcaatttaagatttgccaatcacttccaccaatttagtgacgacaattatttaaaaattacactctcgcaaaatcgagacaaataattagagaccggaattctcaaaaatg

SEQ ID NO: 102536 - DNA, 314 bp, Heterodera glycines
tgcatcaagattcgtcagctgctgaggacaactcttcttaataatattaaaataactttttataaataaaatcaaatttattttcagctattttttaatttgtttctctaaaaataattgattttttctagtctgatcttccatcagctgttttatagcttggctaaactagtccatcggagaattttttatatatattacgttagatgcccataacagtatttagccgtaattgaatttttataaatttaaacccaaagattttatagtaattattccaaaactgggccataattttttatcattcgtgaatg

SEQ ID NO: 102537 - DNA, 285 bp, Heterodera glycines
taatttgacttatttgggtggatgggtatgtatgtaaggggaagtgccatttggagaaatttaaatgtaagggattggcgcgagttaaagtattgttggctttttttctaaacggtttcattaattccatctttaccctcaaattctcaaacctgaatgcaaagtttcgaaataattgaccctccccttctctaatcgctctccgctaattgaatacaacaaagctttcaaaatgtgacccctaacggctaacggggacgaaccatttgctgtccttcgcccatg

SEQ ID NO: 102538 - DNA, 409 bp, Heterodera glycines
ttagagccgaaaagccacccccgcacacggggtccgaaggctagctcaaaccaagtggaaaattcgttttttatgcttaatatcggtagggtacgattcggtgccgccgtttcggtgcccgccgtttcggagccgtttcggtgccagggtgggttcactgccaatcaacgattatggctactcaaattctaacaaagcgtggaagaaaaaaattgttacacgatggttttctgtatgtcttcgaaaaattaaacaaacggggtgacgtcaagttttggaaatgtgaatttttcggacccaggacatcaaatgcaaatgtcgtttgcacactgatatgaatgacaatgttttggaggtttaaatatttaattattaatgttagatatgtaaattttaggcaatcggcatg

SEQ ID NO: 102539 - DNA, 895 bp, Heterodera glycines
ttaaatagattaaaattcaaaattttcaaaagttaactcaaaaaagttcattgctcctcttcaaattgttaaggtgcgtttttgactttttgttcttatattttcataattcatactaataacaaaatgttttaagagatgagattttctcaaaatttgtcttaaaggttgaatacattcaaaagtttacaaaatgctaaaaaatatttaaatcgtctgtgaccaaagcttcatgatcaacatcagagttcggtcccaaaaaatgattggtcacaaattgcacaaatcgccttcacaccgctggcacgagcctttgccgccttaaaacggaacggatttgtcaatttatttctcatttataaaaatttcaatatttttctttacctgaaaatctgcaagttcgtgtgcccgcgatgcaacccgtcgatttcattgcgcaagtccgcaaagtaaatgaggctgaagtggcggggggggggggggggggggtggacaattaaaataatattccatgacatgaaattctggaagaaaatttcagaggaaattcaaggaaatagaatcgaccctgctctatccaatggtatataacacatatgcattttccgacttacagttcgggtggttcccttgttagattttcaaaaaagctaaaatacttttttttcttcaaattttttaatttttttttgcggcgacgttatgtcccggcgacgttttgtcggcgatgttttgtcctgatccggagcccaccttacatttttaactaaaaatatcttttttatgacttaaatttgttgaaaaacaggactgtggttacttttaaatagcttagttgaacattaaaaaagtatcacataattttatagccgattttggcgtctccgccatcatg

SEQ ID NO: 102540 - DNA, 555 bp, Heterodera glycines
tcagtaaagcggaaacggcgaagcaaagacatgcctaaaaagaaagcttcgaatagaactgttacaattgggcgaaaccttttggctgatagggtccattaggagtctagtgaaggaaaatcgcatcattcttttttggttaagacccacattcataaaaaagctaaaaaacacagtttaaatttatgttcaataaagattatagaaattttattatttcgcttggtttatctttccaaccccacaagaaattgctttgtcccgtgtctttttcgtttcgttaatttctctcccttttcttcttcttctatctctctctctctccatttctttcaattaaattccttctttttaaatgttttcttttctcttttccttacaaattagctttctttttctcctttttctcttctgtgaatgaataatgttttgattttgtttttgcgtttgcttgttttatcgtttcctttctttttaattcactgttttggtcaaatacacaattttttgccaaaaatttttttacatatagagagaggtttctaattataaatg

SEQ ID NO: 102541 - DNA, 1003 bp, Heterodera glycines
ttccttcctcgcattttcatttaaattacatgtgaaattcattcggaatactttttgaaaatgaatgaataatatgtcaataatgaaattaatttgtaagcattaaaactatagacccggataactaactgtttcgatctatcgaattaagtttttaggcttttaagtggattttaatccttgaaacaaatttaaaaaaaataaacaaacttcttattacttttttctttaatatatattttttatggtatttaaccgtaataaaataggataatttaaaaacaattactgaccaaaagcttcgttagcttaaatttgaatggaggaagcttctgccgattttcgaatttctttgtctcccataccggcaaaagtttaggttatttcatttaatcctacaaatttggatataaacggagttctaaatttaactattttggccactttttgtttcagttgtcaaatgaaccagagatgtttaaattgaatttgttcaaaattaagaagcttcaaattggcggcggcgaaatggcctcgaccctccaaaattttcgatttttgtattgtgaattataagtgccaaaagtttaatttatttcaatattaattctgtaaattataatgttaaattttttctgcttctttcaatctatgtttagttacctaattacatttaaggcacttaaacaaatttgccattcaaaattggctttattaaatttgccgacacgtaaagcacttttctttttgtacttaaaaaagatgcttaagttactgtaataatgctattatttggtttaacgcatataattatattacgcaagcattcattttttgtgccttcggccatgtcatttacaagaattttacgctcacatttaacatggacaaattaagaaactctaacccattcattagtcgcctaatgaggaaagcggcgcttaaaaattaatgaaaaaatggatgaattcattttgggataaattcagaaaaatttccaatg

SEQ ID NO: 102542 - DNA, 366 bp, Heterodera glycines
tttttgccaaaaaatttggtggaacactttttattatttacaaaataattatatatatactttttaattcattattttgcaattcaataatttaaaaaaattgcttttttccacatttttctgcaattattaataaagatttattaaaataatattctaatttattttatgagtttttaacaattggtcatgtagtgatcagtaaaaaataataattaataataaataaatttaaatatttaattaacacaaattaattaattaattaatttaatttttattctttttaaacacattttttttgccaaattggtcagacttttcaagccgccgcgtaattacccgcgcccgttgcaggacaatatg

SEQ ID NO: 102543 - DNA, 86 bp, Heterodera glycines
ccccataaatgtttgagtaccccaaacgggacacttgaaaaaatcgattttttttgtttcataaatatttttttcagaaagtcatg

SEQ ID NO: 102544 - DNA, 852 bp, Heterodera glycines
tatttcacgtgcctaaaatagaatacttactgataaattttgtaaaaattaataagttattaccaccaggaacgcattttcagttttttaataatttttttctgcagttttttgactcccctaaaaattctcaatgatatatcgaaaaaaaagaaatttgaattcctgggcggtcagacttccataaatccaagatatttctcgcttcagattctcgacaaatccatctgttcatttcatagttttattgcttaaattcaccaattcttagacattgattaaattttttaccaacaacttttatattttgtgtgtgtttttaacttctttcataaagcttaaaaattatttttggttttttatgaaataaacgcaattaaaatttatttcatatttatgagtttattttatttgggcattgaagcgcatttattatattttattgtttgaatttaatttgaaaaaaattattcacaacggataaaaagttcatgttgacgagatttgctcatatttaaacaaaaaaaatgcagcacaattaggcacggtttctatttatattaattttaaacatttgaaaataatttttattcaattccaaaagaaaaaaaaattcgaacaaaaattaattttactataaatttacctaaaaaaattcttaataattaaaaaaaaatattaaaatgattttgagtgcaaatgtagatgctatttaattttcgaccaattatgtttaacgaaggattttgaattaattttaaacatttaaaacaatttttattcaatttaaataaatcttcgaaaaaacaaataaaggttatcattccattcttaatcactttttaagcgatg

SEQ ID NO: 102545 - DNA, 544 bp, Heterodera glycines
  unsure (1)..(544): unsure at all n locations
catttttatcaagaaggccataatataaaaaacgatcaaatgaaaatntaatagccctaagagttctctaatagcctgaaaatttcaaggaaacgctaattttcaaaatagttatgacaaaaatatttgaaaacctggttccatgtgtactttttgctataactttgttcaagcataacgaaattttttgaaattttgcatactattagagaactcttaaggctattgaatgatatcaagattcaaaaattagttgcttttaagcaatgttatgggtaattatttgttgaaaattttcatttggtggttttttatataaacgccctttttgagtgttcatttaacgatatttcacccccaggggaaggccacgatgggaagagggggaggaaggatcgataaatgaccaccgaagagagaaggtcaacaacaaatgtcaaacttttaacaaattgcttcaaaaacaaaaattttcccggcggcgcctgtggacaccgccggacaaaaatccccgaaattattttaaaaaattggcttcaatatg

SEQ ID NO: 102546 - DNA, 362 bp, Heterodera glycines
ttttttcgtcgcatttcgcaaccaaaacattcgcagaaactcacgcaaaggattttgccggtcactacagctttacaaattgggaacacttctcaaattggagaaacaaaaagtgttcatttgaggaaaggttcgtggcattgtgtttaaataacttttcaaatcttttccaatttaggtgaagatgggttcggtttcacttatgcgggacgcgaatctttcgcaaataatcgcaaggaaaacctttactatgtgaagggtttgcgcaaagagtgtggaggaattgccattggcgacagaattttgcaggcatttaaagaaacttttaaagaaatgttttgatctttcagattgatcaaatg

SEQ ID NO: 102547 - DNA, 186 bp, Heterodera glycines
gaaagattttgagaattatgggacagtaatttgtgaaaatttgcaaaacattcaaaaaactcggcgatgaaagtgtattcattttggcattcgttggctcaactgtacaacaaaaaaagaactcagaaaaaacgacccgacaaaattggcattgttcatttgttggcaaaaaacctgggcacaatg

SEQ ID NO: 102548 - DNA, 550 bp, Heterodera glycines
aagaaaataataaaaaacaaagaaaatataaaaaaataaaatgaaaacaaaaaaaataaatgttttgtggtttgtacaacttgaatgtattataatgaatagtttttagtatttaaattattttatataaatagctttttcattagaatttgtgatgtggtttgggtggactcaatgtctgctacctcctcgtggttgagtctggaaacagagttaatttcctatcatttaagtgaggcattttaactctggccaaagcagacaaattttttttctttttcattggggcgcaaatgtggcacaaccagtattatgtataattttttcaaattaaaaactaatgggatattgacatgtcgacgaataaacaagaacaaattggtcaaacattccaaaacttaaataatattaataaattttatttcttaataggttataattcttaaaatgatttaaagatagaaaatctcttaacatgaatcaaacagtcttcctaattaagaacatttatttttaattacctaaaattaatatcaattataaaactatg

SEQ ID NO: 102549 - DNA, 69 bp, Heterodera glycines
cgtaagcatttttagcgtaaaaaagttattaaaattttaaattgcatcaaatttgaggctttatctatg

SEQ ID NO: 102550 - DNA, 91 bp, Heterodera glycines
  unsure (1)..(91): unsure at all n locations
tcggaatgggtacaatttaaacccttnaacgagtatctatgagagggcaagtctggtgccagcagccgcggtaattccagctctcaaaatg

SEQ ID NO: 102551 - DNA, 730 bp, Heterodera glycines
  unsure (1)..(730): unsure at all n locations
aatttgaatcggcactaatcccatgagtaatgtcggctaaatttgcatttcctccgtgcatatcaagtgctttcctgacnaatatataaaaagtaataaaaagttttgaaaaacaaattaaaaattttggaatttttttattaaaaaaccaattaactaaaaactcaaattcaattcaaattcataacttttgcagcgtctctttcattcctagcccactcagcagaaagtctccggaaaattatttaatagacaatcaatcaagaccaatctgtcagtgaagaacaattcgtcagtaatgaaaactccgttttacaaaatattttgcgatttaaaaaaattactgaattttggggttcacttcggttgagccccagccatgtaggctaatagagcatgtgaagagctttcgattgatacaaacaatgttgggtttggttgacaaagaaaaagttagagttcggggccaaacacttcggggcccaactgacggagtccggaactttgtcatcatttttttaaattaataatttaatttattaacatcttaaaaactttttaattaaaaatgatttttcactattaaaatagctttttaatcaaatacttatttttctagattttaaaataaaatctgtcgttagaaaataattttgttgacggattgtccactgactaatttttttctcagagtgatgaatttttcacataaaaataatttacctagatg

SEQ ID NO: 102552 - DNA, 58 bp, Heterodera glycines
agtttgcctcatatttttgccatcttttattggaagagtcattttgttttttcagatg

SEQ ID NO: 102553 - DNA, 800 bp, Heterodera glycines
aatcggcacttaatgttgccggtgctaattttgtgtgtcgcaaatcccgcgtcaaaatcccgaaaattaattgtcacaagtttcaaggagaaattcatacattcgatagatagcaaaccggtactagtacagtttgggtcctatattttggtcaaattaaaaaaaaaatttttttttgtttttattgtcgcaattgctttaaataacaaataaaaggagatttatgtgattattgggtacaattccgcgatttgggtccacaaattataaaaaatgtccggtcctccaaattgcttacgccacaaaaaatcagaaatgtatgtggaaaaaagtgatctgtgactgccaaatctcgttttgtgttcctgcttgaacttctgccacgtcgattcaattgtgtttgtatgctgcccagtgacaggatcaaatttttaagcttttccatcaatctaaaaagcaattgcgacaataaaagaaaaaaaaatttttgaaaaaatttgacccaaaagggggacccaaacttaactagtaccgaaaataggtgctaataactcgaaaagcacaggaaaccggttccagacccggaaatttgaaaatccggttgatgagttttccggtttgcccggttttcgagagtccggacccgtaaaccggttgtttttggaaatttcggctcggaccagtccggctgatttgaaaatctcgttctctacttttttttcgtaacgtgtaaaatcccagccatagtcaataaacattttagaaccatcatccatcaccattctacataataagaaatg

SEQ ID NO: 102554 - DNA, 108 bp, Heterodera glycines
attaactaattcccttttaataatgtcaattaacgtaagaatatttacttttaaattgaaattattaaataaaaatataaatatagataatcactgaggaggtaaatg

SEQ ID NO: 102555 - DNA, 771 bp, Heterodera glycines
atgcgaataaaatacacaagtaaaaagaaattgaaaatagtaaattgaaaatataaatattttttaacttgtataaaaaatgcatatgcaattatctaaaatacaataaaaatacacacaattaatcatttatcggccagggcatagtggaaaaactttaaaatcacaatattatagaatttccaaatgaataaagtcagaataaaataatttgcttaaataaatatagacccactgaatcaaccaaataaattattataaaatttaaaaaattaagaaatattaaatttaattggataaacgtctatacttgacacatataatcaacaattatttagattttacaattatccctcgtacggcaaaaaaaaaagattttcgacacaaattccattacaaccgagtcaattttgagcctccaattcagaaaagatttgaatgtatggcaaagttgtttttgtaagatagtaaaaaaaacaaagggcgaaggttcgagtccgctcctcaacattaatatttttatttatttgtccaaaaaattttaaaaaatgacaattgtaaaaaaacgattgaaggtttttcccaaccaacttgggcaaactttgtatcaatcaaaatctcttgacgaggtgaagcttttaagcaaatgctatgcaatctactaagtttagggatgggacaattatcaataggctataattttcagaaaaaaatcatattttctgcataaacatttcgaaatctttataatttcagagttgcctatgtatg

SEQ ID NO: 102556 - DNA, 213 bp, Heterodera glycines
ttatattataagcatcagttcattaattgtgttttcttcagacataatcccttctctcatgtcctgtaatctgttaattaaaaaaaaaactgtgtgaaggaattctgttatttttttcaaatattacgattagcattttgactattaaatatttttttattagctatataaacaaaatacataattattttttagtccatttccgcgcgaatg

SEQ ID NO: 102557 - DNA, 1003 bp, Heterodera glycines
atttatggactataaacagatttgattcctgacctctctttaccgtctgagcccttcgaaaaatctttgtcgacccatcagccccttttaatgcaattggaaatttttttgaaatttaattgaaatttttaagaacatttaagataaatctaaattagaagatttctgataaatcagaacaggtgcgatccctatctagcggttcgttgtaactcttaatttttgtgggaggggatcccgcggggttaatcccactgtgataatattgagatttaaatatatattggcgttttgttattttaatttgtgtcatttttgtttgtgattttgttagattatgcagtcgtcagttttcctattgatttgtcttcgccttatttaattttgaaataaataattgtcttcgacattgggctgtgttttggttttgctttgggctgttgtctttgctgtgtgctgtgcaacaacaacattattaaagcccccctgacaacaaccatatttgttttttacgacttggcgctcctggcaccggtgaatcagcagtggacaaaaacaattggacgtggcctcgaattgaaaatagggaaaagtaaatccctcgacaagtgtggacaaatcggaaaaaagggaaaacaaattcccagcaagagaagagtcgaatcagccgattgtggacagctaaattttgtaaaagggtaaagtaaaacccgcgaaaagacgagccctaacggttgaattgattggaaaacgggagacaaatccctcagttttcaacggactgtcgacggaaaacctaaaagggtgaacaaaacccagaaaggacgcgaggagcagacgaacaaggcgaattttttttttttttgaaaacgggaaaagcaaatcccctcttcacttcaggaattcgtgaaacaaatcacgcattttgtcagttcggtaaagcaattccgtcgacaaaactgactataaaaacgggaaaagtaaatcccatttcgacattatg

SEQ ID NO: 102558 - DNA, 125 bp, Heterodera glycines
tggtgcattgttaacattattcgcattgctcggggctcttcattcgccgctacgaatccgccatttgacaaacagtcacttgagtgaatgtaacggccgagctgaaaaaggggtgggacacaatg

SEQ ID NO: 102559 - DNA, 726 bp, Heterodera glycines
tcctttttgtagtgctcaaacagatagtcgagcagttcgcgctggtggcgactgcacagcaccagcacagcctggaccaggggtgttttccgggttaagacaatgtccaaaaagtaggggttttggattcggggcccgagcgtaacttggaccgtcccggcttctgtgtatcaaccaatgatcgatgagtgatcaacaaattaggcaaaactctcagcgaccaatctattttgatcatttgatcggaaattaagcttatgaaaaggttggaaccgaagcaaaggactaaactaacaataacaatttggaacacacaccttttggcagaagaggaacagaagaagcgtaaagcttagcaacagcaccggcggaggggcgaaacaaagcgtttttttggaagtgctaaagccgcgacagcttttcatttccaattcactttttcacaaataattttttgaaatgagaaagggaataatggaaaatggaggcattaaattgtgcaatggacggaattttgaattttgagagtgcttaaacgctttctgaagagggcttattgggcaaaagcggaggaggggggggggacgaaggggcaaagataaaatggggccaaagggacggaagacggaccaacggccgaaaagcagcgaaataggaggaaaatgaagggagacaggcgcaaaaaatggggtgggggtaatgggataattagccaataaaaaaatg

SEQ ID NO: 102560 - DNA, 1003 bp, Heterodera glycines
caaaaataaaataaaagttacaatacaattatatataaggttcattttttgaagttttgaaaattgaaagtgtcacattaacaaacaaaaatatttaagattaacaatcaaaaataaaatattcacaacatcaaatacggtaaaagcaggcaggtactgtagaacaaaaataattttttctttccacgcgcaaatattaatattttgaatacaaattaaggaggcgataaaaatggaaaatacgaattgcaaaaatatgtttttcaacaaataaatttatgcgaatacaaataaaatgcaaaaaatccaaattaaaggtcaaaacataaacgaaaaaataagaaatatcgtcgacacaaaattaaatccaccaaaaataaaatcgctcaaaatatgtattaattaacaaaattaaaaatgctgaggtcaattgcaaagataaaacaccaagcaaatacaaatcaaaatcagcttaacaccacagcaaaactccaattgttcgttcgaagattctttgatccctcgcgcttggcaatttctgtttgaatgaaagaaggagagactataggaggagtttaaaagttctcattttttcgcgaaattttttttcaaagaaatctcgtgagtgtactgtagcgtaaagtagcccggaatcgggtccttgaccccgaaaacctctgggcaaccggttctggactgatcaaatttgtacaatattaaaggcaataaaatcgaaggcccattgattcattgcgtggcatttcctacgcaaaagcataagtaaatgcgcataatgcaaatgatgcttgccaaacagccacacatatatgtacatatgcacatacatacacttacatatttccatgttggatttatacaaaattacgcaatgtttttaattgcatgaaatattaaaaaatttaatgaaatataataaattatcattatttctttttttgatttcattttcttgctcaaatttaattggcaacagattaagatg

SEQ ID NO: 102561 - DNA, 181 bp, Heterodera glycines
attttggaattaatttaatttatcccacaatttcaaatggatttgtaaatcagtcaaacagttcttgttttttttaaattagcatatccatctgaatgactttctgcgaattctttgcaaaattggctctgttctcgtggaaatattgtgtatttaccacgcaattttgaaatttcacatg

SEQ ID NO: 102562 - DNA, 179 bp, Heterodera glycines
ggtccagctattggggggggggagttgcaatgggaacacccaaaaacgggagacagtccatcaaacatttagagaccgtgataaatgccaagaggaaaagtccgccttggacctgacagttacaaccgaccaagagggcaattactacatcttatttttgtatttaggagtccctaatg

SEQ ID NO: 102563 - DNA, 639 bp, Heterodera glycines
tgaattagaggagaagggaaggtatttgcatgtgaaattcgtcattttcgaaccaaaatatggaaatgacgctctattcaaaaatagcgttaaaaacttatggcgttttattttatttttttttcttcagcacaattcctttccccatctgatttccattttcattttaatttcgtcctcagtttttgtcttgcatttgatttatggggaatttcctcttcccccgtttatttttctctttttatccgagttctacttaactttctttgttggtacactttcattacaaaacagtacattcaattcgaatacgaatttgaacaaaaagtcgaaggttcaaattctggaacttaacatttttcttataaaagtacttaaatgacttttttttgcagggagtgatggctttcagtttgcttccgtgtattagccgttcttagactaaaaatacaaaattctaattttgaactttcggttttttgttcgacttcatgttcgggattcaaaattactaaaatgggtgtcatatttgttttcaccatgcctggaaagccccactgaaattgttttaattccaagtcaccaaccaatcaaatattttccccattttttcaggtgcatttaatttgtaaaaaaatg

SEQ ID NO: 102564 - DNA, 215 bp, Heterodera glycines
ttgaaaaatacacccctaaaatcaattttttgtcattttttatatattttcaaaaaaaaaaaaaatttgtttgccgaaagtaaccaatcgattcttaattttcattggagaactttcaatttataaaataatttattggaaaaaagattaattttaccttcaaacacttgaaaggtatttgatttgcgattgcgctggcgaaaatgataaaaatg

SEQ ID NO: 102565 - DNA, 441 bp, Heterodera glycines
aatgtcagatcttggcttagtaggcgaaatgtcatcgtgccttcaaaaaggtttcgttaagtttcaagaaagttatgaccaaaaatgttgtaaaaaacttggttttttgagcttctcaagttataacttttttgaaacttaacgtaactttttgaaactttataggctaataaaaaacggttgggcctattgaatgatatcaatattttaaaatttggtttcattttgggtgaagttatgaataattttctgtcaaaaattttccattttttggaaaaaattcgttaaatgtgattttggtgcttcttcatcaaatacaatccgtaaaaaaataggaaaaccctaaaaaccaggttttatccaacgcaattaattaattattctgctatttgtttgacctcattcggaactcggccaaattgtgctaattaccaaaaaatg

SEQ ID NO: 102566 - DNA, 167 bp, Heterodera glycines
tatttggggataggattttaaaattaaaaatgttaaaaacaaaatgccaaagttgcgagaaatgccgaaattatacaaatatatgttgttaattagcgcactaattaagtgtaattttgggaattaattagggggatgagttggacccgtcggacaacacactgatg

SEQ ID NO: 102567 - DNA, 663 bp, Heterodera glycines
aaagttatttgcagggaatggatttttaggtgctaaaaataacgcgaaataggtacctaaatagttgctaaaaaactgaaaaatgccaaaatatttgctaaaaaagttgccaaaaattggaaaaacatgtcaataaatgtgtgaattttccaaaatttcctcatctttgtccttttcggttgcacaaattgtaaatcaaacatatttgaagattttgcatttttcataataattttttgttgaaaagcatgaatagttgaaaaaatagtttttttttttaattttacaagcaaaaatagttgctaaaaagtcgctcttctaaatcgaaaagtgatcgaaaaatgtgtgtttttttgcgcttatctcacatatgctattcgcaaaaaaaaaataggtgaaaacctaaaaatccgttcattggttatttgacaaataaatttaattgagtttttaagacgaaaattggagttgcaaatgttcggcaattcttcgaattgtttcacaaatggcggattaccgaagagaatacagtgaccaattttttaacaacaaatccaacagctggggatatgacaatttcatttcatttacggtgagtgccaattcaaataaataaatgcccaaataaaaattaaatgatcattaattaataaggaactgatg

SEQ ID NO: 102568 - DNA, 603 bp, Heterodera glycines
aatttattgccaattgaaaatgaaattctgtattttattatttttatttttgattgccctaattattccaattgaatcagaaaagaaaaaacttcagcagaaatcatttgatgcaatatttggagaaaaatgggaagaaaaagaagataaaagggaaataattgaaaaatattataaaataaaagagaaaataaagcaaaagggaagaaaatattcaacaaaagaatgggataaaattaatttgaaaattgcattaatttttctaaaatctctttacattgtgaatttattttatttttattgaaaatatgtttattattttcgaatgagctccagtagaaagtaataaaattttatttaatcattaatttaccaattggcaattattttgtcattaagataaaattattattattatttctttgcaattaaacaggatttccttattttattaagtaaaataatgatttattcagttttttaatcagaaaaaaaatcatttaaatgcctcaaaaatgaattgccatttaattgaagaaaaataaaatcttgaaaatgaaattctgtattttattatttttatttttgattgccctaattatg

SEQ ID NO: 102569 - DNA, 1003 bp, Heterodera glycines
gtgtgttatctttttatggctcttttcggtgccaacgagcatttttattttgtttttactgaaaatgttgagttgaagagtttttatagattttttggaatttacagactttttggaaacaaatgatggcatcctttttctgtttccaaaatttgttaacaatcgcagaaaatttcaaaaatttaacccgagggcacttaacggcaccgccgaaccaacaattgctttggttcttcaaaatttgagttaaaaaagctcacatattagtcattttcatgaaaattcaaaaattacatttgtacattatctttagtgtcaggaatttaacaccaaaacaaaaacgcggttttccatttaaagcattaattaagaaagttctcaaatttttattaaaggacattgctttgaaaattgcctcccatcaattcgcttcattttttgagtcaaatttttgttggacacattacatttttggtgatctcacaaattctttatggccaatcattcttcaaatctatccaatttctttactttgtttatttaatttgtaaaattattttagatataatttaaatttagtttaaaaaaaactgatcactgatttgtgtgtcctgccaaaaattgtgacgcaaaagacccaattccgatcagcagcaggggcatttttcccatctttttgaaaggttttaaaaaaatattttttaattaagggagtttaaaaagaaaactataaaccttttttgtcatttttaatgataaaacaaaggataatattacatgtaaaataatttcaatttttcccattatgtgcccctttaaatgagttaaattatttaattgagcaaatatttattttggttattcagcgcctttttaaaaattttatagttttttaattttttaataaaaacaaatcgacaaaacaaaataaacttattttatttgtttatcgagaaaaaaacattattattctttaaggtactttttttttggaaataaaatg

SEQ ID NO: 102570 - DNA, 1003 bp, Heterodera glycines
  unsure (1)..(1003): unsure at all n locations
tcacatttaattgtcccataatgtcttttttaaaaagatgtggatcggaactggaaatttcggaattttntccctttaagtattattttatttatttcttgaaacttcacctgcgtccattgttatgactcggacattcatgctttgaagactttttgatgacacttagaattttacacaaaatttttgaagctaaaaattgaaaatttttattttatgacgaattatgactttggaaaaggcggattgatttcacaaagcaattaacaaaatgcagcgaggggagtggagtgctaaatccataccaaaagacagtgggaaaacgaaatgaaaattttaaattccagtcatagaggttggccaatttaagtctcgcttgctatcccgcggaatgtgcgaattaatttcttttccagcaatttaaatgaaaaataaaaggaatttacataaaaagttacattatttaatcggccaaatttgggttttcaaatttttttttatttaaatgaatgatgtgttaatgagtggagggattggaaagctgaatcagccaaaattttaaaaagagagaaaactcgtcgtaaaatatggcccttcaatttgtcgttgttctcttatcttcactcttgacaaataattgtcggatactccggtcgatgtgtggtggtactaaaaacacaacaaattgattcatcgttcgtccctctccccttcttcacaaacactttttctaatgaaaatgaatggaacggaacggacgaacaacgaaagaatgaaaatgaatgaatcatcaatgctgaatgaggagagagcagcactatttatcgcataattggaatgcctatcaaattttttaaaattgtgctttttgtccgggagaaagcccctctcccgccccccttcctcaaaaaggtggtcagagaatgagtgcaaattttaagaaaaaatctctcctcgaactgtacttgcatataataaaaacatatatatttttaagagaatg

SEQ ID NO: 102571 - DNA, 875 bp, Heterodera glycines
attttttattttaagttatctgaacagaaatatacatggcgcggggagcacatggtgagaattcaataggtttttttattaatgaagcagggaaattgttgaaaagccgggacctgcactaccatggactagaaaaagtccgggtctcagttttcaattggaatctggaaaaaagcgacattttttcgtggaaaattttaattttatttttcaaatttaaaattgatattcaaaatgagcattttcttcttttttgcaatagagatttatttataaaaagggtttgaaatatcgaaaattttaaaggattatctgagaaattttgatcaaaaacaatatcaaaaaccctaaaataaaaagaggaaaacaatcaaccttgatgtctattgtggcaaaaaaaaaatttgcctatgactttgctcagaagcaaccaaatttggaactcatgatatcttcgaaagccttaaatgtttctgtttgccatgaaaatttcaaaaaatttcgttgttttcaaaagtttatgactaataatcagggaacggatttatatgtttttacatgttttttttgcgcatatgctatcacatgaaaagctcaaaaatagcaatgttacctgttttctctgaaagtcaattcgtcccagcaccgtcataacgcttttttaagttcccatttcccgttaaataattttttttctctcaaaagtacgtgaatgaaattacacatgcatgaattggggtggaggatatatgagtgaaaagatggaatctaaacatatacaacagatttattgtagcatattttgcgcagacaattaatgttctaataaataagtgacctttaaaattcttaatttaaggctgtttttgaatatg

SEQ ID NO: 102572 - DNA, 417 bp, Heterodera glycines
ttcttctcaaccccaactcctcctgccataatcaaagcaattcaattttttctctttggaaacatttgaaaataaaatgtcttaataaatgcatttcgccaaaataaaatgttttttaatttttttctaatttttcgtaaaaatcttcctctttcccggcgagatttcctttaaaaattgacgatattttacggggtcggaagaaaggtgggaatctcgttcccgtcccgctttgaaaatagatacctacctaatttttattcacaagtttaggttttgactaaagacaaacaataaatttataaaagactgcattcaaactaatctttttttctctagctttgttgttccatttttgactttaatttgtattttattttgcgtctattcttcaccatttgttcgaatttaaaaatg

SEQ ID NO: 102573 - DNA, 173 bp, Heterodera glycines
tacttattattgccaataatttgttcagtagaacaaaatttattaaaatcttaataaattttatttacattaaattatttttttatgtttgtaaaagcagaagatttagatttatattatttataaaaataaaaaattaccaaatttatttttgagaatttaagaagaaaatg

SEQ ID NO: 102574 - DNA, 149 bp, Heterodera glycines
tcttattatatttaccaaataaaacttcttttatttattcggtattttttccccccttattcaccccgccctctctccctcgcgcccttccatttttgcccccctttgccgcccgagttaacaagtggtgccgttagcaatcaaagatg

SEQ ID NO: 102575 - DNA, 1003 bp, Heterodera glycines
ttaaaaacaaagttgtgtcaaaatgtttccatcccttccatttttggcaataatttttcgtctcccattggcacattgtctaacccatcggtccattttcgtgccttttttcaatttttgatgcctattatatgtaaatagtccttttttcgcgattttttggtgcctttttagtcgtgtctacaaataacttattgaattaataatcaattcgaccagttcacgggaagcggttaaattctgaaaatggggtgtgtcctgattttaatgacaagcactgtactgttattggaactataaattgcgtatgaaaaacttcacaccctgaatttttctttttaattgatacataccagggatggcattccgaggccctaaaaattttcgaaaatcggaattccgaccccaaaaatgtcggaattccgtgccatccctggtacatacccatgggatgcatcgagacgagagagaaaatttatattttaacggaaaacaacaacaaatcagagagtaaaaacgagcataaaaaatggtcagatcactcttattcatcaccataattcaaaatgatcgaacatttctcaaatgcattaaatcaccttcaaataattggacaccatttgcgacgtggcgacaaaggcctaaaaattcgggaaccgcccaactcgtcgcggccaactcgccgcggggccaactcgccgcgcgctttctcgccgcgaggccaactcgccgcgccttgttttttggcaatctcgccgccagaattttttcgtttaataatacattaaaagcaaactttattatgtatttaataagttatatttcatcaaagtttctctccaatttaatatgcttcaaattgaaagtcaacaaaggaagcaaaaattgcagaacgaatgattcctctatattttcgaaatttaatgtggatatctcatgactagggatgatatttttaggctctaaaaatcggaattcagcctaattgtgctacaaaaacatg

SEQ ID NO: 102576 - DNA, 401 bp, Heterodera glycines
agattaatcagaggcacctcttttttggacttttcacagctcaactcggccatgtacaaaccctgtgcaacattccttcgaataaaataattgaaaatgggactttcgaacaaattttatttatagcgaggcatggccagaaagaattcccaggcttttggcctgggaatctgtaggaggtgagctgtgcccttgtccctttataatctgattattttacattttgcttttgtactttgcgctttctgttgaatcctttgacgtaatttctatattttctgtttggtcattttgtctttacgcacttttaaacgtaatatttgcttcgctatatatatatatattttttttttctcaaatcaatttatctgcatttctgataggttttagaatttccaatg

SEQ ID NO: 102577 - DNA, 52 bp, Heterodera glycines
  unsure (1)..(52): unsure at all n locations
aagaaatcattcatttanntctatggctaattttgcatttaggcctgagatg

SEQ ID NO: 102578 - DNA, 55 bp, Heterodera glycines; identical to SEQ ID NO: 99576

SEQ ID NO: 102579 - DNA, 491 bp, Heterodera glycines
tgcctgcaattagcgctatctagaagatgtatattaatgtctaattgaaaaaaataaatgataaagtgcgggagaggaatgtaaaacgttatgaatttatacgaagtcaagttgtccatccagttgtaagtgtattaggctacgagatcgctaaaatgttaatgagcaacaaataaatgagcggatttgaagacggaatgaaaaaatttctatgtgacttcatttctctctacccctttgttaattttactacacactactcgattggtaaaccaatgtacatgtgctgaatgaataagtcgagttaaatacccggaagataaacactaccccttgacaatactcaaagttttggatgatttctttagaaaattcgatattctgttttgcccgtcaaagtgaatagtaggctctgattctctttatttatgaagtgcaccaaaaacaatcaaaaaggcaggatagacgtaaatacatatgcaaacataatg

SEQ ID NO: 102580 - DNA, 448 bp, Heterodera glycines
  unsure (1)..(448): unsure at all n locations
tatttatgaattaattttgcaaaataataatnaagtaatgaaaagtcagatttcgaaaaatttaaaaacaacaagcgtgggcatttttcnaggttaagttagtcctttacaatggagaaggcctgcaaaatttggagagattatatcgattttagtgcgctaggttcgatgaaactttttaaaatataagcctaaactttttggcctgtttaaaaaggaattaaaaatttttaaaatatttattcatctcccttttgatagaaaaagcatcagagagccttatttaacttttaattaacatttggtgcgtttcagagcactttctgaaaaaatacttatgaattaattttgcaaaaaataaataagtaatgaaaaagtcagaatttcgaaaaattttaaaaacaacaagcgttggcattttttcaggttaagttagtcctttacaatg

SEQ ID NO: 102581 - DNA, 77 bp, Heterodera glycines
cctcatccattatatcgtgagaggccgagaattcgaattcaactcacagacgaaaaagggagaatataaatttgatg

SEQ ID NO: 102582 - DNA, 402 bp, Heterodera glycines
aaattttttcccccaaatttttttcttacaaaatttttggtttaaaaattcaaatttttgtaaaaaaaattaagaaaaggaatgtacctcattgtaactgcaatcaagggaataaaagattttttgctcaatttttggctgaaaaattttggtcactattcgtcactattttggactttttttcactattttgtcactattttggcactttttcatcactattttagttaactatttcgggatttttcgtcactaaaaagtcggttccctattaattaaggatgcgcgatcagtgcgcgatgttgagcaaatcaaacagcgatacaaaaaaaaaatcccccaaccggcggaggaaaagcgccggaaagaaaaccattttatgagatatttgaccgatttatg

SEQ ID NO: 102583 - DNA, 854 bp, Heterodera glycines
aagctttcataggtttttcaaatgtttttaaatcaattttttatgcttatcgcagcaaaaagtaccctaaattatactttattcattgtttttgaattgtttttctcctaagaatacctttgaatttttattgctttttgtaaccaattatctttgggattattaaaaacaaaattttgattataccccaaaaaagttctaaaaatgctcagaagtgaagcatataaaagctatatacggccacatttagagtatgaaatttggaatcctcagaagaaagatcttatatgtagaattgaaagaatccaaaaatattttacaaggattgcctttaaaagatgtggattagtcccaaaatcttatgaacacagattagaaattgacttaaaaagttagaaataaggagaactgctacagacttagtcatggtccaaaaaattctaagagggtatacacaccttaagcaaatgaactattttataataacaaaccgaaacaatagaaaaccccttttgcttcagcaaaagaaatatatttctaaaacaaaaaataacttttttaatagaaccgtatcttttggaataagctgcctaaagaggcaatgcaaattcagaaatataagattttcagaaactatctcctagaaacactaaattcttaatgctattgttgtttccttaaacattgggttcctttagcattaattttttaatttgcaccactgtaaatgtactttttagtaccttgtggttgctcgataaataaatttaaaaaataaataaataaaatatacataaaaaataataactcgaaaaagttggccaaatttttccgaattttcttttaaaaaaatg

SEQ ID NO: 102584 - DNA, 109 bp, Heterodera glycines
caccgctgcagatgccgcggcggcggcttttgtcgagccgtcgctgtccgttgagtaaacaaaggaagcggcggaatgatggacagaatgttggcacaacgtgaagatg

SEQ ID NO: 102585 - DNA, 137 bp, Heterodera glycines
  unsure (1)..(137): unsure at all n locations
gaagcatcacaaaggtatgaaattcgtggtactacatttgcagactgacactgttctaaatgtaaaatcttattgctttttggggaaccgcacagtttggcgggcgcgggtttttttgcncaggccttatgaaaatg

SEQ ID NO: 102586 - DNA, 78 bp, Heterodera glycines
aaaaacccgatcaaattaggtaaataaactaaattgatctgctcttattaagaacatccactgcttaaatatgcaatg

SEQ ID NO: 102587 - DNA, 129 bp, Heterodera glycines
ttttgattgttgattaaaccgcacccagcggaactttacaccacccaggtgatcagtttttgtcgatgagaaaccgcacccagcggaacttacaccacccaggtgatcagtttttattgatgtccgatg

SEQ ID NO: 102588 - DNA, 562 bp, Heterodera glycines
  unsure (1)..(562): unsure at all n locations
cctcatcaacttctgcaacttttgacatttcgttccccttntaaaaagtttaattgtcgcgccaaaatggttgggtagattggctggtgttgagagaaattgttcggaagaaaatagtcactgcggagaatgatgttctcgcgaatttcatccctttttatagagattttttttacaggaaaattgataagtaaagtgttcgtataaaatgtaaaatttttaatttttctccccatttatagttatttttgtagtcagtcttagtgcagcagaaaagtcatgaatttagtaaatggattacggaagattttcttaaactgctataaagcaaattttcatattttgttttaatggcatttaaattgaaaattccccacccctccaaaaatacacccctaaaaatcgaatttttgacttcagccccccccccccccgcccccgaagccaagggtctggctacgcccttgttttgcgcttgcataaaagaaataattaaaaaatgaatgcagtgtcagtgtccgaatgaattatgatttccagattttattttccatttgtgatg

SEQ ID NO: 102589 - DNA, 308 bp, Heterodera glycines
  unsure (1)..(308): unsure at all n locations
aataattgttggaatattttcttgtaattttatatttgcaataaaaaaaattgtaaaattcgaaattttaatgctttttgaaaaattttttaagaggaattttgggtacatataaaattggcccagtaaatggcacgaaatattttaataccataatgtgtccaagaaattttgacatttcgttaccgtgaattattttcgattttccgtanattgtttgccaaattatgtgtttaaaatttaaaaatatatatataaacatattttaaacattaaaaataattatttcccaatgttttaaggtcatg

SEQ ID NO: 102590 - DNA, 186 bp, Heterodera glycines
aacgcagtttatgtgactaatattttgtacatttgtaaatgcctcgtcctaaattaaattaaaaaaaaaaaaaaaaaaatctttacattaaacatttttgttgattgggaccgtccacaaattagtaaaaccttactttcctcttttagatttttttcaatttgataaaacattaatttcgccatg

SEQ ID NO: 102591 - DNA, 510 bp, Heterodera glycines
aaagacaaatctctttcaatttatttccgattttattttattttgtcgcataataaatttggtttccgatttatgtgcaattataataatttttgtcaccaaataaattctgtttgattacataacgaattggatgatttggtatttcttccactccttccgcctttgtatgaacagtaattttaaacaaaaagttatctacttatattatctaatatgttaatccaataaaagcggcaaatttatttgatgcataagtccgccggccaaatgaccttgttttccgattctcctcccattcaccaccaaataaatatgcataaaaagcacctatcgtcttactccattcatttccgtttgccaaaatagtaaataatttggggttaatatttagaaatgaaaattaatcgccgcttcaccagtaagccgagtcgcgcggaaacgagaccccttttccaaattaaaataaaaaataagaccaacaaagggttggtggcctcaaaaataatg

SEQ ID NO: 102592 - DNA, 315 bp, Heterodera glycines
atttagtgcggaaatggcttttttaattttgcaaaacaataaaaaaatttataaataaaagattttataatttgtataaaatatataatattcaaaaaattgagttttttctttttaatttaaagatttaaaatttttttttgtaattctgcaaaactttttaaatttacattaatgggctcaattaatttaattgttaagcttaatgaataaatttcattgaattatataaatttatatgctttgatgtttttgtttgtttattttactcacatttattttatctaatttattttttattttttcagctaaatg

SEQ ID NO: 102593 - DNA, 669 bp, Heterodera glycines
atggaattatgacccattaacttacatttgcattggtgtccctccctttttttgaccattcgaaaatttgaaactaacaaaaaaaaatttttgttttagtggcataattgaggagaatatcagcattagcgggggctatcggccgccacggatattcgacactttggcggtgcaattggtgggcaaaaacgggggacaatgagactttatgcaacaaaaaacaaccctttttagttgttttttccgataattggggcgaaactgatagcggtaagtgtcgaaggttgtcggtatttcaaataaaaagtgccaaaaaacatttcttccatattttggtgtcatatttacagtggtggtcccgctgggcattcaaattttggatacgccggcagccctacgacgaggaggccaagctgtacatgatcaggaagaacttgaagcagtccgaggagcaatttcaggtgcagcaaatggcacaattatccccgggaaaatttctcaagctataaataattcaagaggcattttccactaattttaagacaccggaaatattttattcccaaaatttaaaaaaatgcgaaatttaaattgattttggcttttctatttgcttttaaaatcaatttccgttacttcccggcacaggcaacggagccaaagctgatg

SEQ ID NO: 102594 - DNA, 956 bp, Heterodera glycines
tataattgtctggtgagaagaggcaaaatgaccaagggacacaatttggtgggaaaaagtaaaattattttcaagaaaaaatgggaaaattaatttagtcatttgttaacaaatcgcattaaaaatacaaaattttccccaacggcgccctattggcaccccccagaccccccccccctcccccccattttcccagaaaattttgaaaaaacgcgctgcaaaaaaaggtgtaataaataatcccttttccaaaaatgttctaaaaaattttgatgaaataaatcattgaatattttttaaacaaatatagaaatatacgataaaaaaaatcaccttttaattggttaagaatattaaaatttagcctattaaaatatttagaaaatttcattatattttatatttttttaaattttccgattccgtttttcgaaaattttttgggcctcggaatgccatccgtggtgccaatgtttgtttgttaattaatgcattaatttggactccataaatctgtccattttttcgctgattttcataagtgtgcattttccccctttctgcgcattgtcagatttctgatgtccccctgccatttcattaaccttgctcaacttgatcatctttttgcggtcgaacagtgcaaaatgcataaagcagaaattacgcgactctttggagaaactttacgaaaagtgagcaaaaaataaattaaaatattaagacaataattttaaaaattgattttagaaaccgaaatttataatcaaacaaaaaaaaagggaattttcaaagtttttacgaaatttaccccttataattgtgttttaattctttttttaatttggcatttccaccaccatttgcttagaacaaagatctcttctccgacttttatgcgatgcgcatttcggatgaggaatttgccggattaatgggcattattttttgggatg

SEQ ID NO: 102595 - DNA, 1003 bp, Heterodera glycines
catgaagatccccttttttctattaacatgtggaatcattgttaggaccacaagtcaaaacaagaatgaatttataatactttttaatatcagagtcattaatgattgttctgaagaaaggagagcggattgaatgagttgaaccaactcagaggatagtattcgagaaagaaaaaaacataaagagacaagatttgtttttagaacagagcccggaattttaaatcatatttttctatgcgttattatggcgagagaagcccaaaatattttctcagaacatttttatttagggctacttataaaaaaataaaaaccgcccgaccctaaaaatgcatattttcttgaaaaaatttgctcaaaatctgttaacaaatcgcatttgaataatttcatgaaaatcaatgaattattaaaattttattacatttttattttttcaaaaattttcaatttataaagacttccagtttccagcagggtttgatttcgctttcacccttttggagtgaaagattttccgggaaccgggaccaaccgggaatttttaaaaattcaaaaaaattcaaaaatttttaaaaaaattcaaattttaatttttttcaactgaaaatgatacaaaattaaatttttattttgttttttatttaataaaatccaaaggttaaagctaaattaaattaatgaaaattttcaaacaaatttctttaattatttcaaacaattaatcatttttggactaaatgatcgaatattatagaaattcagatctccagaattaaacttgaaagcattatttgtgctgtaaatatttaaattattcggttgtccttaatgctttttgatacattgcacccgttggcccttgggaaaggccttttctcttttttataatgatttaatttcatttttttttgaaattgtgtatatcctcaaatgtcgggtcctcaaaaatcgggtcctcaaatgtcgggaatatccgcaaaagtcgggtcctcaaatg

SEQ ID NO: 102596 - DNA, 294 bp, Heterodera glycines
  unsure (1)..(294): unsure at all n locations
ttaaatgactcaaaaataaaaaaaattctaagaaanagttggatgctnncaataggcagattcattaggcacttattaccaattatgtaggatcattaaaggcattttccttggctgaattatccctttttatccaatttatttatttatgaaaatttccttattttttgagaaaatgatggaacgcttctccgcttcatttttttgctgcttatttctcccactttttctctcaacatttgaacttggcactgctgtgacaagtaaatattaattgaatgaaagaatgaaatg

SEQ ID NO: 102597 - DNA, 448 bp, Heterodera glycines
aaaaacatttcctcataattgttgccacttttaaaatcccccgctaatttgtcataatatctcaatcatattgaggctcctacagtgatcaacaatagcttcactattttctgtttcatgaaatgtcgagaatctctatcaccaactgacctaaccataatttccttaatctatcccgaagagacagttggccaattagcgctaatttggccttaaacacctcattaaatgccgaatgttttaagaacggttccgctaatttgtttatttgggagctaccggaaaataaaaaataaaaaaaataagcaggactaaggccggccaaatcggtcttatttttggacaaattaaaattgtagaattagttttggccaagtcagtgccgatgcctttacactaattgctgttccattaattcctgcctaatcccaaattgtgcagcagaatg

SEQ ID NO: 102598 - DNA, 569 bp, Heterodera glycines
ttacggggcagctgcctcacgagccatgcttttggggtgcttccatacgttggagctgtggtataccgctcagtgctgcacgtgtgaaagcctgtgtatggctgctgcgtggcaatgtgtcggtggcgggccgcctcgcttggctggttcgctgcgccaatgtgggatgcacgctcgtggggcgacctaacggctgtgctggcgtctgtgcgtcgttgagcggttgttgtggcaggcacataacacactgactggggatggtggtttcgttcccggtcttacgtgccgtaactagcggtgtgtttgtgcttgctgctacgtccgtggccgtgatgagacgacgcggtagtgcccgtgcttggcctagcacgtggcttaagactcaatgagtgtcagctcgggcaccgccagctttttctttttttttcattatttttttttacacttctgttgaagaatgaattctagtcttatcggtggatcactcggctcgtggatcgatgaagaacgcagccaactgcgataattagtgcgaactgcagaaaccttgaacacaaaacattcgaatg

SEQ ID NO: 102599 - DNA, 417 bp, Heterodera glycines
acaaattccacctgggtgagcacacatttcagataccctccctatcattatttcttagaaataactaataatctgttgcacagttatttcaaaataaattcgaatatattagcttattatgcatcttcagtgtgcattctaaaataaaatcattttttgttctaattttatgatttatttgtttctgttgactaaatagtcggttcttatagcaaatattaatttatatttgcgtagcttcaaatgagcattctgccttcaatttcgaagggaagtgaatttttttataataaattgatagagagcaaaaagcacgattgtataatattcaaaaaatttatctatgcatttgttgaatgttcctaaacccgatcaaattttaaaacctttatatgaaaacatttattgcaggaaatg

SEQ ID NO: 102600 - DNA, 764 bp, Heterodera glycines
aaaaattttcaaaaaaaaggatttttgctttagatttttgctattaaaaaaaatgtagaaaattttgggtttcgcattattttcatttcgcattttttattttgcaaattcgcgtttcgcattttattttccaatttggcccatccttggtgggaccccccccccccaagaaaatttaaattttctagaaaaatctggcaatttttaaaaattttattcactttttcttaacaaaatgcattaaaattgcaaagtttttaaaaaggttgctgccgaaacttctgccgcaaaaatttttgttattgggtaacgcgtagatttaaaaaatgaatttttgtgacaatttttttttgttcttcgcggtgttttgtttttgtaaaaatcaacgaaattgaaaataaacgaaaataacaccgtttatcagttaaaataaaaatatttggatacttattttaatttgatttttgtacaataagctactaataaaacgcatttaatgcattatccttaagactcgaaaattttttatgaaaatttttcaaaaaaatctctaatcatatatctcatcatcttattgtaaggatgagcgatcggtttttcgcttgaacttaatcttttgttagttagaccccgctggaaaagattatttttgtaaaccaattagcgaaaattatcacttgaagaaatttacaaaacaaagtgatatgaaatgggaaacttggaaaagatttctaaaattaccacattttgtattttagattatg

SEQ ID NO: 102601 - DNA, 430 bp, Heterodera glycines
ttagtacatatttgggcatttttcgggtttttagagcatattttgaggatttttagtgcatatttaatgcgcatatttggcattttttagtgcagcaacttcaaacccaaataattagtatatttgacactctgtccataattttttttattgttttaagcttcttttataacttcttttgaaaaaattttaatcattcaaaaccaaatgattggcttctttggcgcgagtaaatatcttgcattatttaactgattaaaacttttaattgcactgttttgtcaaaatgattttcaaatgaaaagccccgtttagcagtgacaccaggtcaatttttatcccacctccaaaaacaggaccggtaataacggcaaagttcttttaatgataataatttttacgattaaatattggaaatataccgaaaatg

SEQ ID NO: 102602 - DNA, 344 bp, Heterodera glycines
atttccttttgacttttaatataaattcaaaaaatagatcgtttccgcttccgttgacgaagtcacggtgaaattcatcatgccaagcggaagatcaatttgcattagcgccaatattatggtttgctaatttcaaatacaatttgcatttggcaattaaaagatgattaaatttcaaattttccattttaaaattgttttcttttctcaatcaatgccctttactaacagtaaatgccactttttaggagaattatcctcgcgaggcgccaatttggttctgtgagtcggaagagcccaccgttttgccactgctcgcgcagctcaccggccaacaagagatg

SEQ ID NO: 102603 - DNA, 230 bp, Heterodera glycines
aggtctgcggttgtttttttaggaaaatcactgtcattttagggttccgattcactcgcagaaagggaaggtggttccgctgctccaaccgggactgtgaggcaactgcagcattgagtaaagaaggcggaactaatggtgtgctcggaagaaaagagcacaaccatctgccggacccagcgtgcttccacgcggaggtaaaacgcaacggaattaagacgacaacgatg

SEQ ID NO: 102604 - DNA, 373 bp, Heterodera glycines
taggaatttctactttattttttgcagaaatacccagaatattcgtacactgagatgtatcaaaaaacaatggactcgacttttcaacagtccccgggacaacaaagggaccttatgaatttgcccatttattacggccatttggccgatcggatccttccggtcagttgtccaaatgcgaaatgtgcatcgaagtgatggaaaagtttttagctaattgatgtcattttccaacgtgccttggaggtggatattggcccgaaagtgttggactcttttctacgcaatttcggccctctctaccgcctccaccgtataaatcactgaaataatagtaattacccaacttaatttgaatttagcgcagccaatg

SEQ ID NO: 102605 - DNA, 188 bp, Heterodera glycines
aaaataacatttaaatacgccttacactctacagcagaaccccagcaagcgtccctccccagctccccacagagcatcggtgtgaaaattcacatttaaatttatttattaaataacaacatttaaatttaaaaatatatatttaaataacaatatttaaatattaataaaaagtcttacaccctatg

SEQ ID NO: 102606 - DNA, 717 bp, Heterodera glycines
tacgaagatacaatattaaaggtcaataatttgtgcaattttatttaacaattcaaatgactaatttcaaaaggacaaaaaataaaataaaaatacatccattggacaagtcagtggatcaaacctatcctatctttggatcaaagttattatgaagagggaaggctcacaaatgaagacaaatcggaaaccaattacaacaaatctacccaaaactccatggacacttgaggcctctcttttgttagaaaattaatgttggagccgaggggaatggtgagggtgggatccagggacggtcccaggatttcggcttccgcctgctcaggcggcgacttgcctttttttctcttcctctattatgttacccttttctcactcttctctttatttctctctctatcatattgttttctctgtcctccttctctttctctcttcttcctcttttatttcctttgtcttacggaccaaaatatgtctaaccaattctatttcatttttatttttctcttccctcccatgcatatttttagcattgagaaatcaataccgaaattttgaaaaaatggactgacatgaaacaaaacgaaggaataggtaatggtcatttatttttatttgtcttttttctttttcatttattcaatagtaacatttttatataatgaaaacttaaatttaaatctttttttagagtaccaaaactcaaaaatg

SEQ ID NO: 102607 - DNA, 417 bp, Heterodera glycines
attaagaaatagttttaaaaattattattcttaaatagactactacagtttttaaaaagctattcaattttataagcaatacatttagctaattttttgaactttagtgcgctgttataatgtcaaaaactttaatctgagtaaattatgatcaattaattagtaaatacttctaaagatttgaccgaatagcctgaaataagtgttataaaagctaaacaaaaagtataaatattaaacaatcggaataagagctggagtttaagtccattaagaaagccgcacattcacccattctctaatatatttaattaagttatttattattttgtgggtccttagtctgtgggtcgtttgatactgcacccttactgcaaaagtgccaaaaactgtctaataatttgcattaacaaaatg

SEQ ID NO: 102608 - DNA, 252 bp, Heterodera glycines
tttttatacaaaaattttccctgaaattttgtatttgacagttttaacaaaaaaaccgaatcgtgacaaaaagctaacaaataagcatatagcatttaatcattcaacaattgtattgttctgcaatgcccatttctccaacaacgagcttagtcgctgatcacgaatatgaaacaaaaatgtcaaaaaaaatttgaatgccgatttttgttcgacaaattcaggtccccgtatacggaatctgacaaaatg

SEQ ID NO: 102609 - DNA, 126 bp, Heterodera glycines
caatttgaaggatttctagtccaataaattttgaaatttttgaattttattatgttgtaataagcatgtttatttatttttcttgactcttaagatgatgacgagggcgtggtccaaattcgcatg

SEQ ID NO: 102610 - DNA, 1003 bp, Heterodera glycines
aaaaaaatccaaaatttcggcaaatatttgtacatattttcatttttttacatattttgaaaatttataaagaaaaaataagtttgaaaatgttgcctaaaaataccaaaaaaagtaatttttatgtcattttgtggccatttcatattttacggggattttctttcccaaaaaataccattaaaaaaattttatttacatatttggagttttttgtacatattttgggatttttcttacatatttatgtacatatttggaccactttttgtacatatttttggcagccctagccattacacccctaaatatgaaagtttttagcaactatttacccatttttagcaactattttatggggtttttagaaactaaaaactaattattttggcagtttttatcaactataaatataagccctaataaagacactttgttttctttttaaatctttggcattttgttttttacgccaacaattttctccgtttttttaccatccatgacttaacttcaaaaaattatccttaaacaattttaatggtttttttcatgttctaaaacagggattgcacagaattccgacttacagacattttggggtcggaattccgatttccaaaatttgaaaaatgtcggaattttttaactttttttttggattttgccttcaaaaggattattgtaaaattataaatttattaatttagtataggtatactttttactttattcacagctattgtatttcaatttcaattctttttattccaattttccgcactttcgcaaatgccaaaatcgaagcgcgacagagttggtcagcaatttattattcttcagccaaatttgtccataattttcttcaatttgttttttccttcagtttctctcacaaaagtgaagaagaagagccgcgagggcaaagaaaacattttgaaagaggcgggaaaaaaatttgtttttttttgaaaattccaacaaaaatttaggtcagagaatg

SEQ ID NO: 102611 - DNA, 215 bp, Heterodera glycines
attaattcaaattgagaaattgcattaattaaataatgttaacgttacttattttagcaattatcacttgcatctgatggtgtaaagggtgacgttgaggtgattataaatatgaaaattaaagtctgcttaaacggtttaatttgtctaatttattgcactaattatctggatttattttgaatttattaaaaggataggtcactccaaagatg

SEQ ID NO: 102612 - DNA, 283 bp, Heterodera glycines
aaggcattaaaaaattaaatttaattgaaatttcactcccagcggggcggctaattaggaaaatttggaaatgaagtgcaaaaaaaaattcttgaatcggagtttttttctaaagaacggcttgtgaaaaaactaaattcacgggtccactaagtttccttctatggattttttaaaaagcccaaatttttagttttataactttcttagaggtttttttaaattttttacaaatatttcaaagaaattttccgtttttattttactaaaataaaactctatg

SEQ ID NO: 102613 - DNA, 1003 bp, Heterodera glycines
ttgaaccctttttttggcgggggatggcctcccccgactgtccctcgttttttcttttttccacatttattcattgtccttcttcgatcaactttgagtttcaattgcggagagtgaaaatattatctattatttattttttcaaaatgaggctttttgaacttaaattaggcaattaaaaattttcacttaacatccatgatttgagcattaaaacaaatatttttttttctaatgagcaaattaatttttgctttttttatattattttgcctaatttttgaataggttccgaaaacctggcattcactcctttttggtggttttgccaattttactgtttttcatttaaatgtcttattattggccctttacaatgggcacttttacaaatttatcccaatgtttcttcgtcgtttcgatgttttataattttgcattttttgccaaagaaaaattcttaatgaatttttccactattttctttttcttttttctgctaaacttcaattcggttcaaccatgtggttggctgaaaaatgggccccccacggtgattcaaaggccaatttggacagactcggcaagttacaatggcctggtcagtaaatgaataattttgaattttatttaatctaaattatggtgacatgacaattcgtaccaaagcgtacttgcgccaatggtcttttattaattttttaaatttttatgcattattttgtatgagttgatgctgaccccatcttcgtggcatggcgcatgtgaaattgttatttggggacctctatatttagtaattcattttaactcaaattgacaaagtttttaattaacttaattaatctcaatcattgaaaagcaagaaaatgcttcagtggtccttgagaagaactttacaactctgtcttagattaagatttgcttggttttccttttgtacgggttgttaggaggttgctctgccaatggtcccatttcataccattagaacgcaacgatg

SEQ ID NO: 102614 - DNA, 970 bp, Heterodera glycines
ggtgggaattccccgacaaaatttgttctttatagcaaatgcgtagaaaaatatgcaaaagcataaaatttaatattgcgacgccaaaatgtcccgcgtcaaagtgacccgacccattaaattaatgattagggttgtaaattatatggattaacatattttttctgcgcatatgctatgaagaaaggggcttaaaaatagcatttctgcgttaaaattttttgatttggtgaaggtttttagtccatataaatccatattttgggggttttcgggaataaatccatatttcgccatttttgggtttttagtccatattttggccattttttggaaattttcacaagaaaaatgaaaaaaaacgaaaaatacacccctaaagatcaactttttggaaatttttaaaaattacaccccacaaaacacgaaaaatttgagttttcgtcgtcattttggcattttcaataaatattttcgtcatttttttgcgaacatttctttttttttaatgagaattttttcgaaatttggcaaacttggaggtgtttttgatacaacgaacaacaataaaaaatatgcatttttaagttttaaaccccattttttggttgtttattgtactttttaggtttatttaagcaaatattaaatatgcacaccttttttgggatttttgggggtttacaacatatattttggcattttttatccatattttggtccatatttggccatttttggcctttttagtccatatttcgggcttttttagtccatatttaatgtccatatttcgcgttttttagtccatataatttacaaccctattaatgatgaattaattcaaatgaatactaataattagggatgcaatttttaggctctaaaaattgccaaaataggtaggctttgggttctaaaaaaccccaaaaattggctctaaaaacctcatttttaggggtgtaaaatg

SEQ ID NO: 102615 - DNA, 170 bp, Heterodera glycines
tataaacaaaattgtgtaaagcttctttataagaacattgtccgagctgctaaaaattggcaaaagccattaacaatagggcaaacggactttaatttctcacattcaaattatgttttaattgaaaagcaccgattgttaaggcaaaaaacttatttcttcacaaaatg

SEQ ID NO: 102616 - DNA, 54 bp, Heterodera glycines
tttttcctttttggggctcatctttcttcccatttgtttattccctcgcaaatg

SEQ ID NO: 102617 - DNA, 1003 bp, Heterodera glycines
cagtgaaaatcacaaaaaaattaacaattctttttgaatcattttttaattgctccctcagtttagccaaattccaaaatgcctttttccgctaattgcataattatgataaatgcctttatgtcttgagcaagtaaatgaataaagttggtgtgtttaaatttaaaaatcatcgaagataagttgaaaaagcgactttattgggtttaattcctaattaatcatacggaataaaagaggtgctattcttaaattacgtaattaaaaggtgcttttactggtattgaatatatatttcttcgagagtttgcttgaaattctttcttattgtcaaatagccgaaacatttactggtacaaatataatagtactgtaaaggtttgggttgtgccatgaaatgacgaaaaccattttcaataatcgcctcaatgccccgtgtttgaacctgtgggttttgatcggatccgtaaactgcagaagagccacttctcattgcttatcgaattttgatcgtttaatttattaattattacacttaaatttttgattattatttttgtaaaagcaatcgtaatttttgaggaaaaccttccaaaaaaggaaagtgcgaaatacataatttgtgtatttaatttgctttctcttcttcctttgcccattcatagcaaccggaattgctgcgaatgcttctgctttccgtccgatcggttctctgtttgttttccgtccctccaaaatgtccaaatgtttgatcagtgaaaatttcactcgccaactccaaaaaaaaaaacatatttttatttttttgctcggcttcatctcagatcaacaaatatcatttgcaacttttatgaattttaatgttaattatggccgacgaataattgaagaaaaatttaacacaaataaactaatcggcactgtttttcccccgttaattccctcttttagtcgttttgctaatgagccgcccaattttttgacgctttttcccctttaaatg

SEQ ID NO: 102618 - DNA, 53 bp, Heterodera glycines
aaaagtcggaagaaatcgaaaattttgtcaaagagtgtaatatttgccaaatg

SEQ ID NO: 102619 - DNA, 627 bp, Heterodera glycines
attattcattcattcattcattaatcatttataatttttgctgatggttttgatggtttcccatcatttggtgacaaatcagttgttacatacatatcagtcaaaaccattttttgattaaatataatggacttactaaattactaaaatcctaatgagaatcattgagattgaatttaaatgcaaaaaattgaaatggttttataacacatataagaaatgttgaaaactattctgataggaatttttatagtatggtgacaattttttttagaaaacttggattttttatttgattttttatcaaaaaatatgaattttttgctagcttttttcaaatttatgcttttttatccttttcattactttttttatgtgtttcaatcttttttgtgcctttcgcatttatttcgtaaaatatttacggaaaatccaccaaaaacaaaatgcattcattcccaatgaatcatctccatcattctgtcacaatttctattcaccacttattcgatctgctgcaaaaccaaatggattcattttacgattaattaaaaaaattaaaataaaattgtaaaaaatattaattttagaaaaaaaaacatcattagaaaaaaaccatctcaaatg

SEQ ID NO: 102620 - DNA, 1003 bp, Heterodera glycines
  unsure (1)..(1003): unsure at all n locations
ttttctcaggtcaaacattgaaactaggcctaggcctatccaaaatgttggtacttgttgaaaaaaacatttttntaaaaattatattatcaaaatcgcaaaatccagaccccctgttgtgattgttatcagcggagcgaccggcttgaacacgccgcttagcatcggctgcatcattttgccgtgttaattgccgccattctttccgttgaagtaaattcagtaataaaaacagtaactgaatcaggttaataaatttgtataagcgccatcttaaaaaagagaatctgtaatatattatttattttgcagtaatataaggcaatgaattgcatatatcaaatgcacagaagcgcttaattaagcttttccacggcttaacgcaaagataaaagttagaaaaattgctgtattgttggatcattaatgaaaaaatactgtagcaatgactcattaatcatttcatttttccgaatttgtcaagtggttctgattggattaaaggaagaagaaaagggggaatgtaaagacagaacgaacgaacaattaaaactaactttttttgtcattaagaatgaatggaaaatattttgttcaattcataaattaaaatataaaatttattttatttaaaaaaaacttttaaggggggcatgactttctaaaataaatctccgaattgtcgtcggacacggaatataaaaatatttttcacttttaagcaggatttgtcaaatggttctgatcgaataaaagaaagaagattcaaagaatggaaagaaagaacaatgctaaactatttgtaaaaaatgggaaaataaaagcaatattttattcggttaaaaaattttattcaagagacaagaaaaatatatttataaaatttattttttatttacgggtcttaatttcatataaataaataataatttccctttttttggaattttcactaaacaaaaaaacgaaaaaatttattatacatttacgttataaaacaatg

SEQ ID NO: 102621 - DNA, 725 bp, Heterodera glycines
tgttcaagtggataccaaagatagaggaaccattattcgtcccttagatgcgtcattctcacaacccgcattttcgtggcacttatactggatttcaacttttcaggaatatttaataaaacaaattcggctgtataagtgccaatttccgaatatttttcaattcaaagtttcatgggggaaaaagctcgcttctgacttatcacaattttgtctggtcctttttatggctttttgtcgttgtgtgggcatacgatagagttttgctttgttcttaaaactttctttctctgcaatgtgtagtctctatacaactttttaaagaaatttatctgtttatatcgaatcacaattaaaaaagagaccgacgaattattcggtttattccaaatattgtctccgatatacaaataatttctataaacaaattttgcctgtttatacctttttaagttgtcagttttaatgtctaacataacacctggaaacacaacacagactcagagaggttttgtaggataaaattcctttctgatttatccaatggttaaggagagggaggaggtgacctcagcgcagataaagtggagtttttgtggtgaattaagatgaataattgtttggtctttcagcttagggaaatcaactctctgattgcggcatttccgagttccattggacaaacgccgcctgattccgcgcttggcacagcactgaacaatatg

SEQ ID NO: 102622 - DNA, 1003 bp, Heterodera glycines
aagcaaaagtttaacattaataattataaaaaggtttcttaaatatatttattttgataagtagtcgataatttttttaaattttgataaaaaagttttttttcaataattaaacaaattcaagtaaaaaacaatgcaaatgaaaacgggggagggtaatttttatttcggaataaatttaataggaaaaaaaacatgaacagaatttttacagcgttggaaaaagataaagaaaaatacctacctattaaaagatttaaaaaatcaatatatcataaaaaagttttaaaaaaataattgatcaaaataaaaaaatattaattcatacaaatcaatgtagacaaaatctgtgttcaaaagtttaataattgttgtcgcggaaagcgacataaaattcattcaccatttaattagttttttgttcattaatttgtcgatcaatttgctctcggtcgcttctattatgagtcatccttttcccccttcattcattttccctatgaatcatccatcgatcgattttttgtatgcacatttgttcacgtgatttcctccgccccattgatttgtgagggtataaaagcccgccccattttcattctcttcacttcttctgctcagcacagaattatatttgtttaatcgaataaagagtaagagaaaagctcttctctcaatctgtaaaggggacattcaggagccctttcatacagaccattaaattgacccccgttgggtcattaagagggttaaagagaactctcagtttcagtgtccacatttgggcactgaaatcatcacttgcattttttcaacactgtccccgtcggacagggaaaggaaagaattcccttagagggaaagatttcctttccagtgattttttgtccattccgcgacaaaaattggagccccataggggtcaagctccagtcgtagcttaccccctcaatgagagaagtccaagctttgaataaagcttgtccaacattcgtaagagatg

SEQ ID NO: 102623 - DNA, 1003 bp, Heterodera glycines
ttttcaccaaaattcacgttcattgctcaaaatatttttaggggttttccgggtcgggaaaaccgattctgacatacaaatttgaaataattgaagcgattttgtgcataaaatgtgaattttcttgaaaaatggaatttgacttttttgttcgaatccgggttcggggttcgaattgggtcaaaacagatgccagaatcggttttcccgaccccgaaaacctataaaacgaatttatctaaaaaaaaatttttgaaaatctggacaccgataattaacaagtacccattttacattaattatttggtaccgataagaaaaaagctatagccaaaaacatggtggggcccaaaagagaggggccaaccaaagtgaaccgataggggaagagggagtttcttaagatggtccaaatttattcactagtgtcttcacacctctattttagggccgtcattttagcgtggattacgattaaaaatcattttgaatttgaaaataaaggggaatccgaacctgaccccatcccagcagaattctgctgcttctgtagcctaaccaaaaaatcgccgaaaaatttattaggtcataacttttctctctgttaaccaaaaaaagagcttttaaaatttgcttatttaaatagttttaaagtttttttttattttttcgagggaagaagtgtgcactctttaaataaacaaccaataatgccgaatttgtgaacaaattttctggcggacatacgacttcaattccagtggaaagcatgacaagtaatttaagtgtattatgccgcaaaacaaaacttttttttctacaattagtgctggattatatcataaacatatggccctaattaactgttcaaatataacaattgattacaacaccgtggatgattgctttaaagaaatgagaggacatgggtactgtgtattgacctacaattgccccctaattattggattaaaatattccccttttttcaatttcagggatg

SEQ ID NO: 102624 - DNA, 69 bp, Heterodera glycines
tcatctttccaccgggatttttggggtcactgatccgtgataatgacccccccccctccccgaaaaatg

SEQ ID NO: 102625 - DNA, 478 bp, Heterodera glycines
tggcacagagttacggttttgtgcaatgaataaaaagcattgctcagtccacagagacgaggcagactcatttcagctcaaatcaggccttttaaaaatcgaacattctattgaaaaacacatttaatgtgccaatccttatattttttataaaaataaaatagtcattatctaattaaccaattgttgcattattatatcagttacttactatgctatcttttttattggcttgttcctcaacctttgttcagtgccaaatttaatgccaaatgttgtctcaaattgaggaccatctcttcctcagtttttggattgaatatgctcaaaagtatttgattgatgctaaggtgataaatgggttttgttgtgtcttgtttcttccacttttttgattggccgtgttctcactgttgcacttgaccatattccccaaattcggcaccttcaaaatgtggagtaccgacacattcgaatg

SEQ ID NO: 102626 - DNA, 305 bp, Heterodera glycines
tatgaatgtgaagctggcggcaccgccttttgtatatggagcccattgttcggacacttttctactgatcgttgacagaattgtaagtaatctgtcggataaatgggtcacttggccatcatttcccttctccaataaatattttgtactttttttcgcttttctaataatttccccatagacgaatgaataaccccactaatttttcttggctgctcgtcaacaattgcgtttgtcctgtgaaggacaacttatgttaccattttccgggctataaaaagccggtgatttgtgcccataaaatg

SEQ ID NO: 102627 - DNA, 248 bp, Heterodera glycines
aaatgccaaatgtggttaaaatttacatatatgtggaaggaaaggccccaatcgttagtttcactttgctttcaattttacctttatttcctaaacccaaaatggattattataattatgaccgattaatgaccgaatgtcccaatgaaattgaggcaatcaaatttttccaaaccaatggcctgctacacgcgcaaatgtccggggcgcaaatgtggggcaaccattgaattgtacgatccaagatg

SEQ ID NO: 102628 - DNA, 141 bp, Heterodera glycines
  unsure (1)..(141): unsure at all n locations
aaacgactatgctaaaacggggaactaaactgtattaatattttacaattttgccgcccttttcgcctaccctgtnaagagaatcnttaattcactaaataatttctcaattttcttctataacagattactctttacatg

SEQ ID NO: 102629 - DNA, 215 bp, Heterodera glycines
tggggggggggggggaaaacccccgcgcattttttatgaggaaattcattttttgaaattataaattttaaaaaaaattgtgtaaaataccgtaccccgcttgaaatgcctatcgttggcacagtaccgtacctcgcttatgtttgccttcacaaacagatcgccaatacgaactgatcagaatagcaaacgcggcgatcgacatctacagtatg

SEQ ID NO: 102630 - DNA, 68 bp, Heterodera glycines
gtttaattaattgttcaattaactcaatttggcttaatttgtttgactgttccgatcaacaacaaatg

SEQ ID NO: 102631 - DNA, 272 bp, Heterodera glycines
atttgagaacgacggaagagagaaagatgatgatgggctttcgaagatttgagcttatgaaggagcgatataacgaaaaataccgtatcgcaaatctgatcactgaagcattgggacagtattcagaatgagaattcacttttttgaaagtttatcatttttttatccatgaaaaaagtaaagtaacggaataaacattctttttacagtttttcgtcttcatactttaatagcaattaataaattcattcggctctctatttttccagatg

SEQ ID NO: 102632 - DNA, 250 bp, Heterodera glycines
taatgcggtgccgcgagtaataatgggccacaacgcaaacattgtaggggcgcctcaggttaccataagcaagcattgagtcggcgccctcttccgtgagtccagcaaagaaggcgtgtgggtgaagccattacggtcggagtatgtagtgatgagcttacgatgcgcaaattccttcaacaatttttctcgatccgcaacgctagcacaaattcgcgcgcccacttcttcaggggaacagtccaaaatg

SEQ ID NO: 102633 - DNA, 461 bp, Heterodera glycines
aattatcttaacaaaaaagccgtaaaacgaaaaatacatccatagcatttacctcgaaaacgtttgaaatattcgtaattttgcaactgctaattatgaataaaaaaaattgtttttttttttttgcatttttttcgtgtttcatatcaattagaatggaatcttcatttttttgttttgtttctttacgtttacatttgttatttgatcaacattttcataaatcatttttttttgtaaaaaaatgatatgtcagaaatttttattaaaaagaattcaaagtgtttagtgtatggtgtttcatatatttaattacgtaaaattcctccgataaacaaaataattacttcgttttttttaaattacattgaatttattacacatatcaaaaattttatcagttaacattttgtatttaattgattcaacattatttacttgcagaagacatgttcaaaatg

SEQ ID NO: 102634 - DNA, 381 bp, Heterodera glycines
  unsure (1)..(381): unsure at all n locations
ggtcgatctctagttttgaaattatctttttatatgaattataataatttgtcaatttaaaacattataattttttattttttcttaatcatttcattttgcttattgattatccatcctttatttaaaatttataattgtatgaatataatcttttctttacattctaatattctattaaatttttttcttcgttctcattgtttgctatgatcatgcttttttctctctttttttttttttgcgttgcccaattccccccccnncccccacccattttcatttttcattttattaatatgccttttttaataatactttttttttgcccttttgcattttcttaaatttattttcattttaggctaaagaaaaaaaatg

SEQ ID NO: 102635 - DNA, 160 bp, Heterodera glycines
atattaataaatcaatttcctttcctgcgcaatcccaatcaggataataaatgataaaacaacctgatgcgcaatgcctatataaggcagcccctttttctatataccgcataattttatttcgcaatgtatcctttgtatcctactgtattgaaacatg

SEQ ID NO: 102636 - DNA, 104 bp, Heterodera glycines
ttttggcactgtcggccaccgcatttaagcgccttggggccaacaaaaaggcattcaatcccaactccccataatcctcctcttcccttcctaggtcaataatg

SEQ ID NO: 102637 - DNA, 149 bp, Heterodera glycines
ttcgcgattttatatccatattttgacagccctagttatggccattatttttggccagcagaccattttaatcttccttttcgcatccctttcaaatatataatgaggtcaaaaagactttttcattcataatacatatcgcaaaaatg

SEQ ID NO: 102638 - DNA, 73 bp, Heterodera glycines
ttttggatgccttttgaacaatttgtgttttatttcgacgcggtcgacattacgcagctgagagaacatcatg

SEQ ID NO: 102639 - DNA, 777 bp, Heterodera glycines
ctatttttacaagttttttgccttaaaacggccaaaatttggtcatttttagtgaaaaagtaagtgcagttgttacccagcagtggaaaaaaagttattggttaaatagcaaaaaaaaaaaaaaaaggttttcaggttcgggtcccccccccccccgaaaaaattgttttagatacgcccctgcggtcaaccaatggcacttcgtacaattttttgttttaaattttagaagaatgttttgctttttttttaaatcacattttgattaattaaaaatttttctacggacttccataacatcacaattcgaatgccatacataaaattgcctataatattccatggccattaattttaaaaattgtttaaaaatttttaaaaaattaaacccaaaaattatttgaattgttgtattaattcacaagaaaaaaaagtccgcgttacttagaggtaatcaattctttctctaactgtcagttctcttcttttcccacactctttcaccctctcactatactcttctgtaggaggggcaaaaaataaccaaaacatttggctatttccatcactgattttttttttttgttgcttttgtttttaaaaaagaatttccatccaaaacctttgggttggaattttaaaatattttcttctggcgtaattgctaaaaatgccaaatttccaattaggtattttatgtaaaaatttaaaaattaaatttgaattccaaatactcccataattgtttttttccccaaaaggtatgcccgtgacatg

SEQ ID NO: 102640 - DNA, 201 bp, Heterodera glycines
tgataatgaatgaattaatcaattgactgattggtcggcccttccttttcaactttcgtatattttgtaaccttttgaaattaatttccattttatgttattttattaaaaattttattatttttttttctttcattttaatggctgccttttaatttttattttctccatattttcttctcacactttttcaaattaatg

SEQ ID NO: 102641 - DNA, 512 bp, Heterodera glycines
agtctctcctttctcttcgcgttcacacttttctttcttgtcctcctttgatacttctttctctttcttggcaaataaatctgatcttccgtgccccaattaattttagtcttactcgttctaacatttttttttacttattcctctttcttttctctcttccatgaccttattttcaccttttccatcaaatattattttaaatgaggaccagagacggtcctgttgttggtgtgaggggctgagggcgaaagctcatatctaaactaaacaaattaatgttccgcatggctacggccgcttaaattacgacacaacggctacggccacctaaaaatctcaaaattgtggaaggtgtggcgatttctgatgaatttaagttcagatctaaaacaaataaaattctgatggactccgtcgccgtgccttttcttttggacaacgtcccgtctttcaagtttttctccaggagctttgtcctttccaatcacttcgtccacactttcaacatg

SEQ ID NO: 102642 - DNA, 89 bp, Heterodera glycines
aatagcttctgagataataaggtttatcataaaatttcatttaaaaataaaccctcaattattggtatgaacgatactttccaaacatg

SEQ ID NO: 102643 - DNA, 355 bp, Heterodera glycines
  unsure (1)..(355): unsure at all n locations
gggggggggaaaatataattttgttttagaaaaacactgaaaatcaattaataatntaaaggaaaaataaagtttgtttatctgtagaaattntaaaagaatttcttgaatttttaacttaaattaaattttagaaatgattttaaatgtaaaataaaattatattattattatttaataattgttgtgcaaatttaattagtgcatttcattatttatgtaatttccaattcttgtaatatttttttgctagacaaaagtcaaaaatgataaacaaaatttgtttatcccaattaaacttatcaaatgacactataaaaacaattttgtcaaggcaagtaaatgtgcagggatg

SEQ ID NO: 102644 - DNA, 666 bp, Heterodera glycines
tttggacagaatttgatcatcaatcgtgccagagcacataagagcgaaatcgatcgaatgcaattgatcaagatcagtgagaattgtcggtgaagtgcggcgacgcaaattgtccaaagcatcgccactggtaaagcccagtgcacacttcagatttttgttgtttttttaatatgggttcaatcccatatgcccacactttattttaccgttttttcatttaatttactattttaattactaaatctgttaacaaattacactaaaattttcaaaattttccccagcggcgcctatcggcaccgccgggcccacccaagttccccaagttttctgaaaaaatgcgccgcaaaaaaattgtttaaaatctgatttatttaaccctataaatgatgggagaatgtcttgaattcaattgatcaagatcagtgagaattgttggtgaagtgcgacgacgcaaattgtccaaatattatgtaaaaattaattttaggaatttttgcaaatttgaccattttcatcgatttttcggaattttgatcgtttttttctgatcacttttggcgcggagccaaaagaagccgaaaattcaaaatagtaaatcgactatgcctctacacgataaaagtggttataaagtgatttggacatttacagtttgatatg

SEQ ID NO: 102645 - DNA, 98 bp, Heterodera glycines
caaatcttaatatctggtgaaatttgagcaatttaatatcccccaccattttttgtcgattttgaaattccgtttccatatttagtagagtccgcatg

SEQ ID NO: 102646 - DNA, 226 bp, Heterodera glycines
  unsure (1)..(226): unsure at all n locations
ccgatttgctccggaacaatttancaaatcggcagaatccattcctatttttcacaaaagggtctatctttgagtccgaacaattgagactcgagcaaagtttaaaagacatgtcaaatcggatgatgcgtcccgagttggattttactgatgtgagatttatggacttaaacctcacggaggcacacggagattcggtagccggacgccccctgaggaccgaatg

SEQ ID NO: 102647 - DNA, 55 bp, Heterodera glycines
atttcatactttaattttcctcaatcttattttacgatttttattgaaaaaaatg

SEQ ID NO: 102648 - DNA, 446 bp, Heterodera glycines
gtacttttctgttttgtcacaagccttggatttttttcatttagatttttaggggtaatttgaactgctgagaaatgcaatacaattatgattccgactccgtaatgtttgaatgtcctaaccaaatcgaaccatcaaattttttcactcaataaaagacattttggcgtaaaatgctgtagcttcttcataaggtgctagtaccttccctaaatccgccatcaggcatatgatgtgtagtaaataaatatggactaatttattatttattgcacaaattggcggaatttaggaaatgtcccaacacggcttcatatccagggaggggggggggggggacaaaatagaaaagtatgcagtcttatcatagcataagcttcattttttataagaattatttggttaaaatctcaacccaactaaacaaaataaattaaaattgcatg

SEQ ID NO: 102649 - DNA, 1003 bp, Heterodera glycines
aaatttatggaaaaaccaggggaacaattccataaattcatgaaccaaataaataatttaaaattatttttttagaaaaattacccttgtgttgggtactaaaatttgtattccgaaatagaggctttttaaataaatatatggaaaacccagaggaacaattccataaattcatgaaccaaataaataatttaaaattattttttagaaaaattacccttgtgttgggtactaaaatttgtattccgaaatagaggctttttaaataaatatatggaaaaaccaggggaacaattccataaattcatgaaccaaataaataatttaaaattattttttagaaaaattacccttgtgttgggtactaaaatttgtattccgaaatagaggctttttaaataaatatatggaaaaaccaggggaacaattccataaattcatgaaccaaataaataatttaaaattattttttagaaaaattacccttgtgttgggtactaaaatttgtattccgaaatagaggctttttaaataaatatatggaaaaaccaggggaacaattccataaattcatgaaccaaataaataatttaaaattattttttagaaaaattacccttgtgtttgtcgcgactcacgtcacgagaaataaaatggaaatgataaattttataagcatgatgcaatttcattaaaaatggggaaaaccttaatttaattggaaatgttccccctcttcgtcgttctattcaaaaaatatttgtttgtttacattcaattcttattcatttctcacacaaaaatgtattaatcagcgaatgacaccctatttaagtcgtggaattgttattgaaatgggttcagtcggaataaaacatcattcccctgcttgtctactgtttgtcccaatttctattttgccaaaatttttgccgggccgaatttgcctctgtttggtcccgacaagtggtgcaacggccgggaacctctgcactgatgaatg

SEQ ID NO: 102650 - DNA, 137 bp, Heterodera glycines
atgcgatacttcgaaaaaaggtgcaaattaactgttaattagtactaattaacagcaataattaataccccattaagattcgctttggcgttgctacgttcgttcggcaacttttcgaattatctcgcaaaaaaatg

SEQ ID NO: 102651 - DNA, 202 bp, Heterodera glycines
tcgcgatacttctttttctgtgcaccatcatgcaccaatttatcattatttagttttgtttaattacttgctgctggttcatttgtagttaataaaagcttaactgtcaaaacattaaaagtaattttaaaaaattaacaaattatttgaatgcaatttttttttgcatatccactcgtacgaaaacggcggtacgaaaatg

SEQ ID NO: 102652 - DNA, 682 bp, Heterodera glycines
  unsure (1)..(682): unsure at all n locations
agacttattttttaattaaaaataagtgttatattatctcccatgatccagncaatataaaaaattgtttttntattccttttttatatgntaaaatgncaaaacaaattttatatgtggtgttgttttgctaatacaatattttgatatttgctttcatgcccttgaaatggaaatttttaatggttatgcgaaatatttgcaaattcttactataacagtatttgtttatgttatcaatatgattaaattcgttttaagacacgcttgttgtatttttggcccagttcgttccgctcaaatgggccgagtaccgtagtgtcgtggtgtgttgcgtttccacaatgtccatggcctggttactgtatgcaatggtgcactttgactcgctctttgccgattacattctttacattgtgctttatatgttttacaatacgctcaatgccatttccaggtcactatggcgccaaaaattttcggcaatttgaaattcgatgattcaaaaaatttcggaaattctacccccaaaaatgccgggcaatcctataaataaaaaacccgcatcttttattgactatattttaggttattttgaacaaaattaaaaaaatcttaggtggattattaccaaattctaaaagaattaagccgggagattgagtttcaacaattaaaaatg

SEQ ID NO: 102653 - DNA, 1003 bp, Heterodera glycines
ttagccgcccattgatcctccgattttggagaaagaagaaaacggaggggagccagccgcaaaaagaacgaaagcaaacgacgaatgaaggaacaaaagggaaagaaaagggcacggcaaaatttgacagaaaatccattgccataatgtttttttggattgtttaaataaagcgtaaattaaatgattttaaaataaaatttgttgatgtaattttctcgcattttcttgagtctgaagtataacaccaggcaaggcattccgagctccaaaaattttcaaaattctgaatttcgtgccatccctggtatgcaccagccatttggtccagtggtagggaaagggacaaatgggcgaaagtttccttttattttgggtacaataattggagaaagaaatggattcatttgccataacttttttctgagtgcaaattgacaaggaataattattgcataattggcgactctttgtggaaaatgcgcagatgatacggtgttccaaaacttaagtatactgtagttggtataccgtaggtagttttgtttcctctccatccaagtcacacaaaaattcagatcaccaaaactgactgcccatccctattttgtaccgtataccattttttccattagcaccatacataattttatcattttttgcactgcctttgcaccgagcgaaccggaggaaattcaaattcagagcgtgaatttctgaatatctggcaatcatgtcgatcattggtccggaaatttttttctgtaaattctaataacatgtttataggggtgttttgaggcgctgagcacgaacccggcctccatttcgaccattcagaaaaaaattaagaaaaaatttcgagacaaatgatcgacatgattgccaaactcttttccatatgccgtaattgtgccgttaatttcggcgggtgcgaatttaacttcggggaccgtttttccaatttttctgcgttcgacaccctttcctcttacgttcaatg

SEQ ID NO: 102654 - DNA, 453 bp, Heterodera glycines
ttttaacaatatttattctgaattaatggagattaacaccaaacttatttagtgaatgttaacgtaaattcatcaaaatcatatttgttatgtaacggcattttatgtagtgccccagcttcagtgaagcagttaaaaacaggatttcattgttaaagtatactgtatatatatatatatgtctgggatcgactcatttccttaccaccgtttccttaccaccggttccttaccaccgtttccttaccaaccgtttccttaccagccgtttccttaccaaccgtttccttaccaccgtttccttacccacgtatttggttcatttccataccaaaaaaagtttcacaaattttggtaaaaatttcaaaaatagaaaagatttccagcggttggatgcttatcatgaattagaataaaatcgacttaatttctaatgttacagctaagaaaatg

SEQ ID NO: 102655 - DNA, 118 bp, Heterodera glycines
gctaaacaaaaaaaaataacaaaataaaaaaggcatttgatgaccggctatgaaaacttcgaacaaaatttcgcctttcacttctgccatatcaccgcagtacaaatagaaaagaatg

SEQ ID NO: 102656 - DNA, 120 bp, Heterodera glycines
tttcttcggcgcaaaactgaggcatccgatcacgaaattggcgacgcttaaagaacaaaatctgttagtggaaattgtttaatcttaatttttaatccgcgactttgtttgctcgaaatg

SEQ ID NO: 102657 - DNA, 702 bp, Heterodera glycines
ccgccggggaaaattttgaaaatttgagtgtgatttgttaacaaatttcaacaaaaaaaggctggtttatgagattactaggctcaatttgtatggattttctttaaaaaatgataaaatacaatttaaaaaattaagaatcatattttgtcgataggaaacccacgagtatacaaaaaaagaaaattcaaaatattttaatttctgtagagggattgaaccaggtggaagaagaagggaaagtcaaggagactagccattaagccacttgcacactttagcagtgttacttttaaagaatatattaatttttttttcctttgactctaattttcatcactaatttttccataattttttggaaaaattctcaaatgtgtttggcttagaatttagggagaaaacgatgaatcaagtttgggactgacttacacgcttccacgctaactctcgaaaaaatgaattgcccaattcagtccgggcacattaaaactcaaacaaaccgaattattacatatttcgggtatttaaaactattttttgggagaaaaatattgtaaggaaatgaggttgggctttttaacctgcaacaatagttttgttgacaacctcgtgagcctttaacaaggaataaaaaatttttaaatttaaaataatgccaaataaaatttaaatctctttctaaagggtcttgaaccaatg

SEQ ID NO: 102658 - DNA, 217 bp, Heterodera glycines
ggttattactaataaataccccccatttatgtctgtccaattttgtcttttttagcgattgtactttaactaacaatttgggcaaaaatggaccctccgccctagccaaaatattattacataaatctgtttaatcctccacggttcttcactttaagccaattcgtcgtcaaatccgcgcaccgttctcgatgagagtggtggaccgaaaaagatg

SEQ ID NO: 102659 - DNA, 911 bp, Heterodera glycines
gtatgtgatgggaaatgaggcgagagtttgcgatttttggtcaagctgtgagaaaattagtggagaaacaaaaaaaacaacaaaaattcaatttaaaaatgcataaaattggaaattgttttggtattataggaaaaaatttttgaactcgatgaaattagaaaggttgattatttttaattcgattaaaatagaaatttaaatacaataaatttaatttatatttatttttaattgatattttaacaattaaaatttactattattattttttaattattttattatgttaaaattatttaaccgaattaagaaggaatttaaatcatattaattttcaatttattaaaatttatttttaattattatttttaatatattaaaaaaaactttatttaaaattattacttagatcagaaatatatgtatattttttaaaaaaacatatttatttataacattaatttaaccaataaaataaatattattttgataaaaaaaagaaaattcaaagaaatttttctctgtataaatttatacaatttataattaaattaaaatatttttaaaaataacttttaatgcccaattttatatttttttaaccttcaaattcgttcacaatttttcgtcatgtcagcagtcatttccattcattgtttgttattcattcattcattctcgtaaatttttggatttttacaactaattttacattgccttttatggttggttgtttgtttatttttgattatgatcggatcaatgaccataattttgtttatatttttttgaaccttttttttgacaaaaaatttgttgaaatattatatttttatctatattcatttttttaaaaatttcattttaattgaaaaaaacagatggaaaatgaaaatttttgaataatg

SEQ ID NO: 102660 - DNA, 841 bp, Heterodera glycines
  unsure (1)..(841): unsure at all n locations
ccaaaatatanaggaaaaattttttaaaacattttttctccatcttcctttttgatactaaagcatcagagtgctaaaattaagttctaaataaaatctgggcgcatcggttcgggggaaaatatccccgaaaacaaaaaaatcgattttttcaagtgtccgtttggggtactcaaacaattatggggagcaaaaatccaacgcagaattaaagtacaggctatagggaagctattccggaaggattcggtctccccataaatctgggcgcatcggttcggggggactgccccgaaaacaaaaaaatcgattttttcaagtgtccgtttggggtactcaaacaattatggggagcaaaaatccaacgcagaattaaagtacaggctatagggaagctattccggaaggattcggtctccccataaatctgggcgcatcggttcggggggactgccccgaaaacaaaaaaatcgattttttcaagtgtccgtttggggtactcaaacaattatggggagcaaaaatccaacgcagaattaaagtacaggctatagggaagctattcccgaaggattcggtctccccataaatctgggcgcatcggttcggggggactgccccgaaaacaaaaaaatcgattttttcaagtgtccgtttggggtactcaaacatttatggggagcaaaaatccaacgcagaattaaagtacaggctatagggaagctattcccgaaggattcggtctccccataaatctgggcgcatcggttcggggggactgccccgaaaacaaaaaaatcgattttttcaagtgtccgtttggggtactcaaacatttatg

SEQ ID NO: 102661 - DNA, 1003 bp, Heterodera glycines
tcaattttaattacagtcacggtcaaaagtattggagcgaaaaacaattttttttttaaatccgattttctcaaaaatgaatggtggcaaaaaacttataactcaattttttattgagataaaattctgaaaaaattcctgctaagctaacttttgacactgatcagaaaaggcttttacaccaacttgatcagatcactccttcatggtgatctgaaaagccaaaaatggcttgaaatcggggaaattttcgaaaaaaattcctaggaggttaggaaaatttttctggaaaatttgagtaggcctatgaaaaagagcacaaaattctctacaaaattgtcttttggatggtgagtctacgatgaatacccgcagagcaagagagggtgtcaaaattgactaccataaaaatgactgattttctaccattttcccttgaaatacggtagaaatccagtagagatgtgccgtgattcacggtcacggtcacggttaccgtgaatttcacgggttttttcactcacggtcacgattcacggtaccaattcacggttattccgtgaaaaatttacactggataaaattgaatatttatgaaataatttttttctatagagaaatttggtcttttttttgggaaatttttggtaagaaacagagtaaaattttcaaaaatttccccggcggcgcctatcggcaccgccggcccaatctctattccggaaactttttgagcaaagtcaaaaacaatattgtgcgaaaacaaataaaaagcaaagtttcaagtacatatgagcccatttaaattaaaaaattcattaagtttattaaaaaaattcgctcgaaataaagttattttgggtaaaatcagttaataaatcacattttctaaaagtttccactaaaacccatatttttcttaaaaattgggtaaatatgtctcacaaaaccatttataaaaggtcggattcaatttagaacgtccacaattatgcgaaaaatg

SEQ ID NO: 102662 - DNA, 166 bp, Heterodera glycines
tttatttctccttttctctctctctgtctcttcatttgtttttgtcgtcccacgtttatttttatttttgataaaattaaaattcggaaatccattgaatttaaaaaacaaaattaatttattatcttcctctgtccaatttgtctccttttgctccccccaaatg

SEQ ID NO: 102663 - DNA, 648 bp, Heterodera glycines
ttctgtaaaatgaaaaaaagtcaaacattgcaacaaaaaaaaaaaaaacacatgcctcagaaattacgagtgaacagttggtggtgttggcaaaagtgaatgtgaatgaagcaggttgcttttatatacactttaggcgcgcagttaaaatccaaaaatcgcatccctactaataaatgaaaaattttctcaaaaatttgtctccaaaatttattaattttcttggcaaattttgatattaaaaaataatataactacgatttggcataagtttgttcattttataattttgtcattttacacccctaaatttgatgtttatttgtgcctattttgcatttttttagtgtctatttttgggttttttttagaacctaaagcctgttttccagaaaactcattcttgcatttgaccgagagactcgaatgataataacatttttagggtttgataaggcacatctattcattaatttacagattttgacaaataatctcgcaacactaacattttcagtttgactcttaaaagttgcttttattacctatatttttgtaatttatttcaacacacaaatttttgttacagattcgtgtacaattatttaaagaaaacagcgctttctgttcttttctcgcttcaaaatg

SEQ ID NO: 102664 - DNA, 165 bp, Heterodera glycines
tgttcatccattgatcatttgtttggatttcctgcattatttcgaacctcctctttttgctttcttttgtccaatttgtttttgctgcaaaatggaatatttcactaaaattttgtcattagtcttaattacagaattaagaaattgagttgttttcttgcgatg

SEQ ID NO: 102665 - DNA, 1003 bp, Heterodera glycines
ggccaactcgtactgctccaatgttttcggcaacgcctttcggcactgccggaaccctcctttcaggagaaatttaaaaaaatactttgcaaaaatttttcaagcaattcgtttaatgtgtataaatttttggttttttggtgtaaatcttttaaaaaacagtgccaaaattcgtcaccaaaaatttccctcttatttttaacttaactcaaaaacgtgaaagagaatttataaaattttcaactttgaaaacccatatggatttaatttcgataatcgaacatttttctaattatattgcttcggggaaaagtgacaattttttgggttttgttccaagtcttgggcaattctcagtctcgaacataacgaaaatttagacatgttcgtgcaacatgggctcaacattgcaccaaataagtagtataaggtcccaggggccggggtccagacccctgtccctgcttaaaaaaacacccatttttgcttttcatgattttgccccatgtgccggggtccaaatccatgagaggattaattaattaaattaattcatccagaggcagagggactcgaacccaagaggtctaagccaaagcactaccactgggtcaacgatacagttatccgaaaaaggataattagcaattatatatatatatataatttaaaatcgattaaataattcaccaatgggagggggattcgaacccaagaggtcaaatccaacgcacaaccaattgaccgaggaacataatcatccgaaaaaggatatttgtcagttatgtagtaaaaaaagtgtcgcaagagtcaaaaatggacgggagaggggatgcaggcgacattctcccttttgcctatataaagggatatttgtaagcaaaaaaagcacaaataaaaatttttttaaatgttcaacgcaccgtttacattaattttatccggcgctacgggaagtggaaaaactcaatggctattgaaacttttaaaacattacagtatg

SEQ ID NO: 102666 - DNA, 996 bp, Heterodera glycines
aaattttcggtttatttttgtgatgggatgtaaagaggggaagggaacattcatgtcattcattaattaagccccacgcgctctcgcttttctctcatttcttttaccttttctactgcactattttcttacaccgtctgtctggcaaagagaacgctcattaattaagcgtttttctctcgcttttctctcatttcttcccttatctattgtactattttctttcactgtctgtctgacaatgacaagaaaaaaacattaagcggggccaggccgttttcgtacgggccgttttcgtacgaacacatgtttttggactataacttttttctttgccaaccaaatccaacattgttggtatcattcgatagccctatgtatcctctattagcctgcaaaatttcgaaaaatttcgttaaggttcaaaaaaagttcgagccaaaaaatttggaaaatttggttttttgaattctcatctgtctgctggtacgagaagttcaaggcgttataatttttttctttattaaataaattcaacaaaattggtatcatttattaaaaagctgtgaatgattagaagtttgcaattttcaagttttaatttattattattttgtgtcaacaaaactgtcatttttgaatgttgtgcaattcgaattctgatcattttttaatgtaaatgatgattgacgaaaattcggctttttaaatctgaaaggattaaattatgcattatttggcaaatgataaaatgattaaaaaaacaaaattcttaattcaattttaaaatattaataataattaataataatcgttcattaattaattaaaaattgggaataattcacaattacttttcgtttgtttgttcatttatcagtcaattcagtgatcgattatttcatttcagttccaacttccagcattccatgacctcaaattgatttatttctaaaatatttttgaaaatttttgttcatacgcatcggaaaaatg

SEQ ID NO: 102667 - DNA, 1003 bp, Heterodera glycines
  unsure (1)..(1003): unsure at all n locations
atgccaggcgctggaatttacttgcggggaagataatcttcatcaaatgaagtagacatattcttgaactttgccggaaatttttggttttggggcaatggtaaagaattgtggttcctaattattaaaaaaactttattttgggctcgaaaccaactttataagggattttcgagggtgctgattacgaatcttaactcggatttatccaattccaaacacccgaattcgaacaaaaacgaaatttttttgcgttgatccatttttctggggtaaaaagcttctaattcattcaacaattattaattctgatgtaaaacaatgcttcaattgttattatttatatggtccctaaactgcatatgaaccannataaaatgtctcnaaaagtatttatttttcaaaaaaatcaacgcggcaaaatttcaccgccaatttttaaacttcaaatttaattcataaagcgaaaaagtatatgaaaatcatgagttgtcattaattttaaaggtacttatgcagtttacggggcagatttaacatacattttttaatgcctataaaggtattcattttacatgcataaaaacataaaatacggaatttgaatatttattcacgaaatttgataaacagaagcaacttgagtccaaaatttgtcctttttgtcgttgaaatatagttgcatgtcttttccgcattcacaaattttttttgagtgaagtaatttgcattctcggagccattactcagcgtctggtttttgcagaagagtaaataaatcatgaatattgaaagtcttttaaagtttccatgctcaaaataaaaatgtaaaatgaataaggcattaaaaaatttcttcgacgtatttcgactcgtgagtttaatgaatgcaaagagacgcgaattgcatagtttttattccatctaacatttgtccttcatctatttttaaatatttaattttgatcaatataaaagtatttccgatcaaattcctaaaatg

SEQ ID NO: 102668 - DNA, 583 bp, Heterodera glycines
  unsure (1)..(583): unsure at all n locations
ttaataaaaaaatgaagaactcaatncaagaaatcagtttttgattttattaatcactatttaaaaatttttttctaaattctgagaaaaattgatttttaaaaattacggattacggattgcggattacgggaaattacggggtttttggaccnccgtaattacggattacggatttccgtaactgagaaaatcgccgtaattacggattacggatttccgtaattgcaaatccagttgcatgcagccctgtgtccaacacaaacaaaaaagcataagaggggtaatattttgtaaaaaaggatagataaaatttagcatattgtaaaaaaaatgccaataaactatcattgatttttttttgctttatacacttatcatcaaaaatataaatacatattttaaataaattttatttttatcgatattttggctataatttttattttattttattttatgtctctctttaacaaatatcattatttgtttttttcttcttactttagtccaattaaaaaacatatttctaacttgggttgttaaacatttatttgacaaggcaatccttttatagaaaatg

SEQ ID NO: 102669 - DNA, 1003 bp, Heterodera glycines
ccccccccccccaattcgtccgttttttgccctttctctcgagactctcgacaacgattgtaaaacaataataatgataatattttgttgttgttctgcatagattagtgtgtttgtgtagtggttgttggttttgacaacaaaaaggccgaacaaaaaaattgcctattgttttgttctgttgagggtcgaccgtttgtctcgttgagtgtggcactttgtgaacgaacagcagagagcggcacagaatatacatataattagcaataagccacacttttttttggtgaagccttcagtagacggagacagtttttgggactacaaaatcggtaattgtgtgatattttaaagttttaagcccttggggttcaacttgaaaaacaccttactaaattacgaaaattttttgctttttggttcgattccggagtggcctgaaagcacgaaaaacatactttgggtggttgttaagttacttttcgaattattagggcctattttctaggtttttatttttagtcttaaaaacgtcaaaaaaattttaataacctattttgatcttttttggcgttttgttcaaaatttattaacaaaaatgcaataaaacgaaaaaaaacatctcctaagaatcggccctaaaatttccagaaaaaatacaccccttaagaaatgaaaatttttccaattctcgaaaatttatttttattttgacaaaattttttatgtatcgcaagcttaattttgttcgctttttaaataaaattttgtcattttctaatcccctaaatttgagaatttttaaagcctattttcttttttttaagtgcctattttttattttagagcctaaaacctaattattttggcaatttttagagcctaaaatataagccctaaacataataaattttttacaatttgtgccagttttttttaatttagcaatttttttcatttttggtggctgttattgctcaacatcaatatcaatatcatcatg

SEQ ID NO: 102670 - DNA, 269 bp, Heterodera glycines
aaagaaaagggggagatcagtgatcagtggatgtgatctgtctgctgctgatcatttggccaatttccaatcagcaaatttattttttttaattttaagggtgtcactgttttatgtaagtccctctcatatttgtatttttaacgcctcatacaccagcatggactatataattttttggctaaaaatacaaaaatatctctcccctaaatagacaaaagtgatgcaagaaggaacggagtgtgggagaaagtgggataaaggacatg

SEQ ID NO: 102671 - DNA, 951 bp, Heterodera glycines
taattcaagtacacactatagggaatctactccctaaggcatcggtctccgcataaatctaggcgcatcgagttcggggcagttgccccgaacacaaacatatcattctttccaattgtctcgtttggggtgctccaccaattatgggcagcgagaattcgtcgcagaattaaagtgcagaatatagcaacactattcccaaagaattcagtctccccataaatctgggggcatagattcgggggcctcccccccccccgaaacccaaaagtaaaaattttcagcaaaatttcttaataaattgcattaaaataatcaaaaattttcccggtggcgcctatcagcaccgccggacccccataaaaatgatctgatttaatttaatattttttcaaaaaaattatttctaccgtcacttatctgtttagcccattttatttaacttttaaaagtcatataaaaacgcgttcaattaaacaaattatcactcttaataataagtattattcccaggctcacaattaaggccactatttttagtaattttttttaggtttttgagatcataaattttcgtgacttatgggcaacatatctatttttaggagcaaagattgccaacatgaaagaaaaaatgagaaaaaggacataaaaaatctccaaattctatttaaaatatttttttggacctcgaagaaatttttcgaaatttagcattattttattcaaaaattgaaatgagcttattttctttgattgttgtttttattttggtgcttttgacaagcaaaagttgtcaggtccaacctcaaggtatttaattatttgaattttaaatattttattattattattattatctatttttttaaataagttttttccaaccaattgtcgccaattaagttctttttgaattatttaattaattaatattcagccgtggaaatg

SEQ ID NO: 102672 - DNA, 189 bp, Heterodera glycines
gggatcctctaatggtcattcaaaattcaaaaataattttattaaagaaaaattacatccgaaattaattaaattaattcgtcaaatttaaaaaaaaagaatgagcagaaagaggcggaaaaaatatatgagcacgccaaacaggaatattttcaagtgatttgggccacgaagaataaaaatgcaatg

SEQ ID NO: 102673 - DNA, 284 bp, Heterodera glycines
tatgaatgtttttaagaaatgatttctttctcgtgaattaattatgcatgcctcaataaatgaaaatcgtttgttattttgtctgttatccaaatgtttttttcttgtctcggtctcgacttattcttcgaagccaatgtcaggattcggtccgtagtttggaattgacacaaaatcgccctaattttaaaattgttctgaggaaaatgtaattttggctttctcgtgcgatgcgatatattcgcataaaaattttaacattattataatattaaacaaaaatg

SEQ ID NO: 102674 - DNA, 1003 bp, Heterodera glycines
caattctcttcttctgctattagcctttttaagccgagatgtattgtcctttatatgtaaaaatttgttttttattttcgaatcaccgaaagtctgaccccgagaaattaattttatcaattgtgtcgctttttgttttttcatttaacacatttggcttttattcttcctgtggtccattttattccataagataaacttttctattctcttttttgactgattgcttcagcaaaaataagttatccaataagatttttttaaacatttcttagattttcccattccttagcattctccttgtctttttcctttttttggcattttcttattgcaggtcatttcttcttaaccttataatcggaattaaatcccttcttttataagaaaatattttaaatctgaaggactggcagaaatcattattttaataattggttatcttcgaaaaagaattaataattatttcttggaaatttttacaaatttcataaaaaattaatttcccagcggttcctattggcattgcggcaaaaaattatggccgtaaagctttcacttttttcgagcatttcggctccaatttatttttggaactcaatataatttcaattttgctaactctgttaaaactttgtcctattaaatataaaaattgtttaatttggttgcttaaaattggcggcgccaaacatatcccttcccctcaaaaaccacgaaagttggtcagtttttttgtattttggcattttgtgccttattgcatgcttttctaagaatttattgttaaaaacgcataatgtttattaaaacattcacatatgtattttggtaatatttcgacattttttgtaagtatttatgcacatattttatgaatttcttaaataaaattttacatttctacttagaatactaattaagaataaatgacaaaatcaatttttttttcattcaataaaataataatttaatgtttttgctttaattggtcagcaaaatg

SEQ ID NO: 102675 - DNA, 164 bp, Heterodera glycines
ttttctttttgtttgtcgatgtgttggaatgacctttgaaaaaattgtcagctttttgcactttggaaagatgcaaccggataagctcgtaaacaattttataaaaagcataattttcaaagaatataaataataacaaacagcgaaagtatcaattaaagatg

SEQ ID NO: 102676 - DNA, 417 bp, Heterodera glycines
agcagaatgaaaactgattgggacaaaaaaaactaattttacccccgaacgcctcgaaagttggcttctttttaataatagaatttgtaagcatttgccctctcattttacaatttcattaccactttcgaaaacgaaaaaattcttaccacaaaaatctttgttcaatttaaattagcaaatttaaagtgaatttttaattctttttagataatgaataagttattctttcaactagtaaatctttacaaggataattgtctccaactgatgcagaaaagctgaaaaaccaacaattggacacttgggaacaactgcaaaatgccattttgaaagaaaaggaagcgaggtaaaaatggggaaatgaattacatattataaaaaataaaaaaattaatttaaagagagcaaaaaatg

SEQ ID NO: 102677 - DNA, 102 bp, Heterodera glycines
ttttgccatcgttaaaagtgcgccatcgtccgctgtttcatctcttattttgtcatttttcgcttttgcttaggctgtgccgaactgctgctgaccggcatg

SEQ ID NO: 102678 - DNA, 95 bp, Heterodera glycines
aaatacataaaaattataatcattataattaaatggattatctttccagttaatgacccaaacattgccaatgctcaaaacgaagaagaaaaatg

SEQ ID NO: 102679 - DNA, 711 bp, Heterodera glycines
  unsure (1)..(711): unsure at all n locations
cccccccccattcctcaaattgtatttatatttctatttactccccgatnntaattgctgtcttttcttnacatcatttttgatagtttgctccctttttcccactcttttccttttgctgtggtgaaaagagtgcagcactttgcatttgctaattgtcaattactcaaattgtctttaattcttgtgaattttaattgtttttatttcataattccatagaatttcgtcatagtctaatagtcgcatttttcttcatagcctgaatctcctctctctcctcatcattcattctttctctcttttctctctcttttctcaattcgtcgttcattttgcccatccctcattattactgcgtttgtgttacaggcaaaatccttttgtttattcccttcctttccttgtgaggcccaaaataatttgggtaatactaccaccgaacgatggttacactcccccttttcgaaaaaaataattcaaaatctttttatttttaaataaagttttaatcggttttttggtcgaaaaatccgttccgacatccatttctaactctggacctgtgatttgaacaaaattcaattttcaactaattcaaagagtatgcaattacctaattttgactggattgatttcgtttattttccggttttttttatttgttataaatttagctttgtccaaacttgtggaattattttcctaatg

SEQ ID NO: 102680 - DNA, 87 bp, Heterodera glycines
  unsure (1)..(87): unsure at all n locations
ttttntgggaaaatttacaaaatttttttttttttttccctcactagggggctaattaatcccttctcccccttttgtttcctgatg

SEQ ID NO: 102681 - DNA, 52 bp, Heterodera glycines
  unsure (1)..(52): unsure at all n locations
tcaaaatgtcaatatnntagcacaatttgaaaatctgctgcttgcgagaatg

SEQ ID NO: 102682 - DNA, 210 bp, Heterodera glycines
gaagcggacgagcaaatggtggcgatgcgcaatgagacagggtcgaaaaagacagggaaaactgaacacaaatgaacggtttcagcgcaacgaccggtggacgtggacaattggacgtacaaggcgaggaacgtggtgctgttcaaccatttggcggaggccccgctgacgatgggcgaacacatcgaaagggccaagcagcgcgaaatg

SEQ ID NO: 102683 - DNA, 183 bp, Heterodera glycines
aagcgaaacggagacgaaagcaacaaaattagaaaagaaaacgcactgtttgaacattggataaacaattatttaaacaaatgtgacacccttttccactcacttttggtttttgttccatttttactttttcttttccctttaattttttattcgttcaatcccttctttctttttgcaatg

SEQ ID NO: 102684 - DNA, 100 bp, Heterodera glycines
agggattggaacgagatataatattactgtaaaaccctgcaaattttcaaagtttataaacattgctggccctaatgttccatttttgaacaataaaatg

SEQ ID NO: 102685 - DNA, 265 bp, Heterodera glycines
ggtagactaatggagactaagagattatttttcggctgatttatttagtggaaaatttttgaaatttttttgaacatgtcgccaaaaaatgtcatcgcgtcaaaaaaaatcatatttattgcatttttgttaaagaacttctgaaaattgacaccaaaaatggcaaaaatgttattttttgcttccggtatgcataaaaatgggaatttttaatgaaaagttcagaaaatatggaatcgttttgctgtttgtaaagcaatttatg

SEQ ID NO: 102686 - DNA, 288 bp, Heterodera glycines
gatccagagaagcaatatgttaaaaatgaaatgggacatcacttttgtgctcctatattttgatcaaattgtgaatatggtaaaataaatcaaataaatgtttatgtcacaaatgcaaatatggtatcattggaaagcccataaaaaatgatatccaatggtatgttacttatctgttgaaattggaaaatgacaattttatacgcaattttttttttcaaagcatgatgggacaacacttatgaccatgactgtattttttgcagccctagtgatttggcatttatg

SEQ ID NO: 102687 - DNA, 115 bp, Heterodera glycines
cccaccaactttcaatgacattccaatcgctgggactcaatccaccagcatttcaatctttagggactcaaatctccggcattccaaacactgggactcaacccaactttcaatg

SEQ ID NO: 102688 - DNA, 452 bp, Heterodera glycines
tttccccagcaaaatgttttggatggagaattggacacgcttttttggtcggcacgggatggagccgcttattgcaaattattactagtaaattcgaaaaaattttgactcactaaatttgtccaaaacttatttcaaactccataaattctgaattttcacagaataatagaaaaatgtttgagctatcttttcgtaaatcctccaaaaaaaaggtcaaatgtctcacatgttttaagacaatgatgatatcggtattcggcttggtcgtcttgaaaatttctcaacccatcgatcaacgccacaattgtcgagcggctgggtcgccttgagcagcttatacagaaacggtcaatgacaacacaaaaaataatcgatccggggactcaatgtccttctccacctcctcacccagtgttctctgtggtcaaccgccgcctcacatcggaatg

SEQ ID NO: 102689 - DNA, 749 bp, Heterodera glycines
cgttggatttttgctccccataattgtttgagtaccccaaacggacacttgaaaaaatcgatttatttttgttttcggggcagtccccccgaaccgatgcgcccagatttatggggagaccgaatccttcgggaatagctttcctatagcctgtactttaattctgcgttggatttttgctccccataattgtttgagtaccccaaacggacacttgaaaaaatcaattttttttgttttcggggcagtccccccgaaccgatgcgcccagatttatggggagaccgaatccttcgggaatagcttccctatagcctgtactttaattctgcgttggatttttgctccccataattgtttgagtaccccaaacggacacttgaaaaaatcgatttttttgttttcggggcagtccccccgagccgatgcgcccagatttatggggagaccgaatccttcgggagtagcttccctatagcctgtactttaattctgcgttggatttttgctccccataattgtttgagtaccccaaacggacacttgaaaaaatcgatttttttgtttcataaatatttttttcagaaagtgctctaaagcgcaccaaattttatttacaacttaattttagcactctgatgctttagtatcaaaaaggaagatggagaaaaaattttttaaaaaatttgtccttatattttggttatatcgtttgcttttggtggggtgcttggaacagtggaatcatg

SEQ ID NO: 102690 - DNA, 1003 bp, Heterodera glycines
aggaaattggtgaagaaggagaaatttttgagaaaaaattaaattttatttcatttagtcatgggattacacacatgcacatgtggtgtagtggttaaactttctacctttcataatttttcgcctgggttcaattccccacttggatagaatattcctcacattttctttaccattattttaattaaaattttaatttaaaaaaatattccaacttttttctttcatgttaagcatcctaaaaacccaaaacttaatcaattggtcatttttttttacaaattctgttaacaaatcgcattaaaaattacaaaattttttcccggcggcgcctatcggcaccgccggccctccttgtcccccaaaagtcttggaaaaaacgtgccgcgtaaaaagcggtgttgaaagcaaaaaaggtcattgatttacattaatttacatggccggaaaccccttcgcaaaattggaaaattggctgctgatcccttgttttgcaataatctgaattttgaggtctatatctgaattttagtgttctatgtactgaatttgaaaaaaaaaacttggtcaacctaatatacatatacttctgaacaattctaatgctaaaaaacaggtactcgcgcgaaaactgaataaaaattttgtatttggaaaattttgtccaaaaatttttatgttctaaaattaccggtttttaccagtaccggtaccggtaccggttgaaaaagttggtaccggtaccggtaccggttttttcagtaccggtcagtaccggtaccggtttttttgcaattaccgattaccgctcaactctaatgaaaacgaaacttaatctggacaaaaaacaaaaacgatcgataaacaaaacgattttttaaatgaacacatagatatagattaatttccaaaataggcttacagtatttaacgactaatcattattagtcttaaaattacagaatttttaaggaccattcaacaaatttaattttcaacaatg

SEQ ID NO: 102691 - DNA, 273 bp, Heterodera glycines
cgactgccagacggaaaatgatcgccaaaacaatcatcaaaattacactttttttttttttgccatttttgttttttgagcatattttatgtataataaataatggcttgttttgctcattgggtcagtaaaaaaaataatattaaatggttttgcccattttccacacattttaaatttaaattgaacttttttttatttaatttaatttattgtttttacaaactaaattagttttattattttacaatgtttcaattattttcttcgatg

SEQ ID NO: 102692 - DNA, 89 bp, Heterodera glycines; identical to SEQ ID NO: 100234

SEQ ID NO: 102693 - DNA, 501 bp, Heterodera glycines
  unsure (1)..(501): unsure at all n locations
gtcaagggtacgcaaaaaccaatgggtttaatgatgtatacttttacanttgtgaaacaacacaactatgcgccatcaccaactcgaaccgaagattttcatcaagtttttttattttaatttatattttgcttccatttattttaatccgaggaaaatgtggatgagttgcctgtggatgacgtgccactgtgcttttaattcacttgaaaatattgtataggttaaatgcttttaaaatatttgcgtccaaaaattatgtataaaagcaatatttccgttattcatttttcatttaccacaaaatattacaaatctccggcatagtattaaaatgactgacgacagagaaccgatagcgacagcgagtgccaatgaccaacaatcagcgactgctcatacccgtagacatggccacagagtgcgtccgagaaagcgtcaatcgtcgatcaaaagccacaaggacatccttccggtgcttcgtatttcactcagagaatg

SEQ ID NO: 102694 - DNA, 1003 bp, Heterodera glycines
cattttaaaacaatttgtattccttttatagcatcgtggttcaagcgatgacactgtacaagcttttgttggtaatttttaatttttttttatttattaaaaaaattatttttaatttgtacaattatggcgccaattaaagtcgcatatttttaattttattaaaaggcttttagtttgaaaaatttttctgcgattttcgtggatggtctctccctgatcatgaatctgaaagatattttaaccaattctgattttttaacctaaattttgaaaaaaaaacataataaactaaaaattttaatttaacaaattttcaagagttattattagggtgatgatttatatttacaaaaaatcccgaaaaatttaaataaatatttaagaaaaaatgccaaaatatttttaaaaatattgaccaaaaatgagaaatttagagcaataaaaattgaaaattttcttctaattcaaatataaaaacaaaaaagtgaaaaaaaaaattcttcaatgttgcatttgcaaattaattacatttcaagtgtttcagaggtaaagttcatacgatttaagacaaaatatttttaagattgggtgcgacttttttcaaatcttttttgttttgtttttttttaaattttattttaaaaaattttatttttcctaaagtcaatttttatggagtatttttcgtttttactgcattttgttaagaaaaatttcaaaaaacgcaaaatatttatcaaaatattgataaaaatgcaaaatggttttgtaaatttttatagtgtatataagtctaaaatatttttttatatttatgggtattgaagttaaagcaaaatcggctaaaaatgatgtttttcgtgcatttctcatcaaaataaagctgcagaaaaaaaggtttttttgcgtgccaaaaggccccactttgatttaataaaattcaaaatatataataacttttaacactagcacctaattatatataggtgccgatctgatg

SEQ ID NO: 102695 - DNA, 1003 bp, Heterodera glycines
atttggaattttgagcgcgatttgttaaaaattttgtcaaaaaaaatgattttgactgaggatttttcgaaaaaatgtttaagatttgaagaaaaagttcgaacattttgccaaataaaaaaaaatcatgcatttttgtcacttttttgtcaaaagaccacaaaaatactcaaatttctcaaaagaccacaaaaatacgcaaatcctcatttttcaaaaaaatcctctttgaccctctaaaagaccacaaaatgagtaaaaatactcagatatcgcagctctgatttaatcgcgtatcgtacgtgataattttcgattttacatcaaattaggtacctaactaattttattcaaacgattcgaccaattttttgattttaagggattttaatgtggaactaaattcactcatacgaattaaagggagaaattatacaacacttgagcatttgcaattttctgctgctgctgtgtttctctttctttttcgttttcatttttacgaatctcgcaaacgagagaaagagataaaacgaaagaacgtgtgagtttttgtctgtcagagaaaggaaaaaagcagcaattgcatgtggacaaaaatgttgttggcttaggatggaatcttctcgaatgaggggcaaatctctctgcgttgagggagatagagaagggaagaaaaatgtttccttctttgctaaaaagaaagaaaatccaagtgcctaaattaattttaaattgcctaatttaaatcagtcacaatgttattgtatgtacatacttttttctaatatttctattatttctttttagcatttcatcgttaaattaacagtaattttactttggaatttgaacgtaacaatttctcgtcaaaatgtttggtggcggaggagaccccttcagaaacccatttgagtaagacagacaaaaaattcaaataagcacaatcagtacttaattaactaacctttgattttcattaagtcaaatgcaccaacaaatg

SEQ ID NO: 102696 - DNA, 133 bp, Heterodera glycines
atagcgaagaattcgtcagtgtcttttccaaaaataaaggtgaagacggggtgaagataaatggaaaattgggccccttctatgtttcaagtcgttgtattggataaacaaaaacaccttttgtttgtttatg

SEQ ID NO: 102697 - DNA, 846 bp, Heterodera glycines
ttacaattatcaaaaaggaaagttcaaaagattatttctggtctgtctgtatatttgaaaaggaatttgtgattttgaagtgatagcactgatttttatctaccagaagtagtcatatttcgttcaaattttttaactattaacattatgccagattaaaaaagtgacaaatttaatttaaaaatacccattaaaaaatttttcaatttgttctttccctgggaattcatatctgcattttttgctgttggggcactccgaaaaaaaccacagggtgagggccctttttttcgtgaaaacttgttttatgggttttcgggagtagctaatcacgaatcttataccaattttgacaaatctcttacccgaactcgagtgaaatagaaaactaagtttttcggagtttgcttttttgcttgaatttaggttagacattcaaaattggatataatggatgtcagatccctggttagtgcctcccgagaacccttcagaatttgggaaccaaatatacaaacaataagtattatatgttaggtttccttacagtttttcaattctgttttgtttaagcgtaatttttaaattaaaaacggcaaggtcgcagaaaaaatcagtaaaaacttataaatccggtccctaaattataatttatcccacaacaactcctcgttatattttcattctctgactgccccatgttttttgattcttaggtcaacccgattttggttaatccgccagcccctaactcaaaccaatctctccctttcctttttgtctgactaattttcaaacaaaaaaataaaataaattaattgctttctttttattaagcaaaaaatg

SEQ ID NO: 102698 - DNA, 83 bp, Heterodera glycines
acactgactgaccttagaacatgtaatccggcatttttactgatcgacgacttaccgctggatcacaaattgcggaaggaatg

SEQ ID NO: 102699 - DNA, 299 bp, Heterodera glycines
ccaaagatcactcaatattacaaaatccctgaattttcgaaaaatatcacttcggcttcctcaaaacacataattatgccaaatgatagcgaacatttaaaatcgaaaaacaaagcaaaaaataaataaaagtcttgtgaaatgttaacgatttctttctcgtccctctaaatcttcacaataacttcttgaatgatttgtgttgcgtcattttgttgaccatcttttgcacatcgtcactttcaaaattgtatctcatgtaattggagtcgttcgttgccgcaacaattttgaaaatg

SEQ ID NO: 102700 - DNA, 539 bp, Heterodera glycines
  unsure (1)..(539): unsure at all n locations
agtccntttaaaaaaataatttaattagaaaatatacatgaaaaacattagtttgtcaatccaaacacatcacaagttgttaaactataaaatgacaagaatttattaaatatataataaattcatttttgaaatgtatttttaaataaaactaaaacccttctaaagcaaacttttaaattaaaaaaaaaattaagaacgctaaaagaattcttgttttaaaatatgaaattacataatataaattaaaacattttaacaaaaaacaaattgtagtgctgcaacgaaaacaattacacttggattttcagctcaccaagaaaaattaaaaatatacacaatacaatttaagaaaatgtttagtattatatagaaaaacaataaatttataatattctttaaataagaaattctcacaaaataatgcaaataaatcacgtagacatccaactacaccaagggtaaatcccagtagaccaataagagatttattttaaactgttgagattaattattattattattttagtaaaaaaatg

SEQ ID NO: 102701 - DNA, 1003 bp, Heterodera glycines
gtgcaattagtggacgcgaccgttgctcccccctcccctttttctctccccaattcactaccaaccgctctctaacaaatttgttatggcaatttgcatactttcgaggatactctctccctgtgcttttaatagccgaaaccgcgcggcctttccattttctatgttttcatcgccattcttcgctgttttgttttattatgtatgtgttttgcttcacttatccgggccatcaaatcgtatgcgatacattcattcatttcattttgctatgttctcttaaaaaagcacaacggacagataataattgttaaaacagcgtcaattccgtcgtcgtcactttttattattatttttttgcaattaaaaaatgtccgttgtgccgattgttcaatttttattcttcttcgacggtgtttagttttatatatttctttctgttgttcgtccgaccgacatttttggcatattgtttagtgtttgcaaatacattcattcttttttaattgtgctttttatttggacacttttcgcctaaggcatttccattttttgtcgtgttttttttactgtgctttctctcccttctcccagagtttctccattagttgggccaccttcgtcccttctctcattcgattagttactgtccttaccgacatcatttactgtatcatctacgattagtgactgattgtttttattttataatttctctctctttctgcatatttctctgcctcgtagtctctctctctctctgattgtcatctctgttagaggatatttacctttcgatttgttgtcagaatatctctctttctctctctctgctcattggtctttggtcgtcaccatcgcttaacgttgcaactcggttctttaccggaaacactgtctttgtttggtaaaatacggttacaaggttttaatattgtaaaggatctgataaaagtgattttctttgagagttggttctaattatcggtcgtcgacggaaatg

SEQ ID NO: 102702 - DNA, 1003 bp, Heterodera glycines
ccaagcctaaaaatgtcggaatctgaaatcggcattctggcatttttttttattcttcgatttggcgcagtttatgaaaaaggttttgatttgatgttcctgctgatttcgacgttggatttgcttcaaaataaaaaagtttttaacacgaatgttttcaaagaaatagtacataaaattgccattagagaaacaaaggaaaaatgaatgacaaagagaagaagaagaagttgcgtccttttttgagaactaggtaatccgctgcagaattatgtttataaattcgcgaccaaatcccattttttgccattatttacttttttgaaaacttcactttctatgccgtgccgtttttttttttattatcttcaataatcaaattttccatgtgcctaaatgcactttgttcatcattttaaattagttatgtatttaatttgaatcacaaaaacataaacttaggaatatgctattgctaattgctagcatagactgcccttttttcaattgctcgtgctctagtgaattttaggcatcacaattgactgttagaagtccaatcttcagtttcgtttgccataacttttttcttactcggacaatacctacattcttggtatcaagcaagagcttgaagtctagcaaattatttttgatatattctaaaaacggctgctttcgtatctcgttgtaatttttttcttaatgtcagtatttactcgttcttgtgtttatgaaatttcagaggactttcaactttcctttgatgccaagaatgtaggtatgaccaagagaaagttatggcctaaactggacttctaacagtagattggacgcttaaagtgcacttgaacccaaatttagcaattttttgttttccaaaactgcaactataaaattatagtgattaatgacaacaaaacgcttttcaatgcttttcagcgatacttaagcacatatatttgtcttctaatttactgttgtcagctgccaatcaaggatg

SEQ ID NO: 102703 - DNA, 488 bp, Heterodera glycines
ttttttgttttaggggcagtccccccgaaccgatgcgcccagatttatggggagcccgaatccttcgggaataacttccgtatagccagtgctttaattatgcgtcggatcttatgctccttcatatatgaatgagaatcccgaacgggcactaaatagtacatattctcttgtatttgagtattccagcgggtaaaatcacatagctgtgagcgcaacaaaattatgaaatcatcccgataaaaaacgtcaaaataaattcattaaatcaaacttaaaattgcttgcgataagtcgtaattttctcacctatatatttttcatttattctacgacacatttttattctgctgaacagtcgtcagaataaattatttcaatcttctgacagtttgaacaaataaaaccaggaggcttaagcgcaagaaaatgaggggtgtcaaaggaggtatagcaatatcaaaaaacaaaaaaaaattggagccatg

SEQ ID NO: 102704 - DNA, 326 bp, Heterodera glycines
ttccagtctcgaattctgtaaaattttgtccccaattccctgccaatttctcgtacaattagcttcagctgtttacaattgtaaatgtcattgtttttcaatatttctctccttttgtcaaattctttgattatttctaatatttcttgttcatcaaaatgatcagaatggtagcttcagtctgtggaatctccctgcgttatacgagcgctttcttcatattcgttaaacattgacttctcagtgatcgtatcatttgtttttatcgggaatgctcactaattcaatgcgattcttaggatttatcttttttatttataggaatg

SEQ ID NO: 102705 - DNA, 1003 bp, Heterodera glycines
aaaagcttttgtatgttaatgtttgctttttcattatattgtaaaaaaaaagacatggataatacttataatccatgttaagtgaaatttaatgataaatcgaaaatgttgtaaaattcattatttaatacaattaaaaaacattaaactgaaaaacatattttttaatttaataaatacaattaagctctattaaattatttttcatttttatatatgaaaatatttaatggttccattaagcatattgggaaaaatatgattattactaaaatatagttaaacttcaaattgtttatccttataatagaattttcaattaataagtgaaatattaaaaattattctataagcgtaatctggagtttttaaaaatgaaaaaacctcgaagcacaataaataaaaagaaaaaagatatattcaacggtttttgaagtgttgcaaatgcaaaaaatgcaaaaaaaattagaacaattaaatttttaataatcattaaagttatggcttaatgaaaatattgaaaatgtataatcgatttaatctaggaagataaattaatttaaaattttatatttatttaaacgaaaattatattttaaaacctgtttaaatataattcatttacgaataagacaaaaagaaaatatacaataaaagaaataataaatatacttttttcattaaacataaattttttaatcaataatatgcaaataataaacctattaagttttaaaatttggaatgtaaacttatcgtaagcaaaaaaaaacgcgacaagagatgaattaaaaataaagcaaagttatatagaaattacaatggttgtactaaaaatgaaaaaaggcattaatcaagaaaatagctaattcatttttataattatttaactgtaaaaatttatgaatatttgaaagaattttaaaagtaatttattttctaataacaaaataattcataggtaaaaaatttttctgtcaggccttctaatgtttttagaatg

SEQ ID NO: 102706 - DNA, 827 bp, Heterodera glycines
ctgaatccgatgactttgttgggaaacggatttcgcgggattggcaatggatttccaaaggcggatttgacaatttgcattttctttgtgccattttcttcgatgtccaattgcataataagcaatttgttgttcaatttccatttgcgtgtcttgaagtgttcgtccacgtaaaagtcaaagcggcggctaatcagtgcaattccaaggccaagctgagaaggcgcaagaaaatcgaacaccaaaagccaacaatcgccgcagacaaagttgaaaaactgaagaatttttatgaaatatatatggacaaattttggcaaaaaaattaattttcggaaaagcataaaaacggcaattggcgattataaaagccgtacattctatttctgacttttttttaaatttgggttcatgctgtttatgttctgtttgtggttgattaggccatcctcgacaattagtttattccgggactgaattttacgttaatgttttttaaactttattttataggcgtccatttcagtcccaaaaaggcataatttttcagttgattttttctttttccatcgaaaagaatttccatcaaaatgagttgaccctctcagaattcttatttaaataccgacatttttcgttttgcacacattttagagtggtgctgccactttgtgaaaatttgtgtataaaaggaacacattttgtccattgtattcactttctaacaaattaatttcggcatcgctattattattttgttcaacaccttccgttgccatccatttggcaatcgctggggctcgtctacgcggacgaatttttcaatg

SEQ ID NO: 102707 - DNA, 253 bp, Heterodera glycines
aaaaatggtgtaagtaaaaatcgtaattacgctcaaaaagcttctcaaacaattttagcgcatccaattccttctacaatcgcctttatacatcccattatgaacgctaaaattatcagagtgccgaaaatcctgtaatctacgcctagaaaaaaatggtgtaagtaaaaattgtaattacgctcaaaaagctcctcaaacaattttagcgcttccaattccttctacaatcgcctttatacatcccattatg

SEQ ID NO: 102708 - DNA, 169 bp, Heterodera glycines
tcccccaccctattaattacccctttaattaattgcccttttaccgctttctttttaattgccccccttttctgttacttaaggtgcgcccgagtcggaagtgcacaaatatttcggcactttgctcaaatcgatcgcaagtggacagaacagcaacactttggagatg

SEQ ID NO: 102709 - DNA, 118 bp, Heterodera glycines
tgccgaccaaacggaagccgcggcgaaaacatttcgcacattcactgcgcacagcgcactaattttgttggccgccgaaacggaggaggagagcacgaaatacgacattttggtgatg

SEQ ID NO: 102710 - DNA, 844 bp, Heterodera glycines
tgatgatccgaggatctgggaagccgtataattgagcacttaggcattttaaaaaacattaatttacttcacatttattagacttacatattttaactcactaattaggaacaaagtgacgaatgagagcaaaacaacaaacacttaattgataacactgataagaaaagacttttaattgcttcaaaattcgctaaaatataactttttctttttgaatattataaaaacaaatatttgttttagaaataattttgaatatttggcttttgaatatgaattatcgaaattctttgcttttccatccgccacatttttgacaattttgccctctgtccgttaattacttcgtttaatcttttccccctgccaattagcgatgctttcgactcaattgtcccatgctttttccgattgctttctttgctccctgctgaagatgcttcagcttatcacttctcttttcctggtccgttcctccaatttccgatcacttttctctcccctcaggtgatctctctccataaaatcagttacaattggatttttctcatcgcttttcttgcgctgccctttttcggcctttatttgcttttcggtcctaacaaaaattgccgttcattcaaaagggagtaaaggagcagaagtcggcacagaattgacttggcaatctgtgtagcaatggcactgttactcagaatttgttttaattgtgtccattaattaattcttccctcaggcgaccgtttgtttgctttttgccaccgttcttttcgttgggtattttcaggcaataaatttaaattttccatttcgaaatcaaaatttgaagatacattcaatg

SEQ ID NO: 102711 - DNA, 421 bp, Heterodera glycines
aacttgtttctgatacctattcaaacgagatattttgtattcatttgaaatcgcaagttttcgtatttcctttgttagtagatcaatatttttgtcatattggtaaaattttgttttgcgcgaattggaaacggatgttaatttctgaaaaaaaaacaatttaatgttctaagtggtatttaaaactaacagtatttaaccgaagaaatataaaagcttagtgaatccatattaatttatttgaattaaaattattaaatttccgaaacgaatgcctttttaaaagtaacttttggtctctgattatccatttttcggttagcaaaattcttaatgttgatcggcaaaattcattttttttattattatgcaattcatatttcaaaaatattgtttttctttcacttcaattttagaaatg

SEQ ID NO: 102712 - DNA, 317 bp, Heterodera glycines
ctcagattcatgatcattgatcagcaccccaaaaagacagcgggacttggagattacagccccattgtttttcacagcgcgtagacagaaaacttttttgaacactcttaagttgaaatgaagaattttaaagaattaaatgttccgacggtgagacggtatccaccgaagaattttttttttggaaaatttaagaaaattttaagagattcttgacaatcagctaaaaataattaattcaaaaatggaagttgaaatcaatttgaaattgtttagtacggattggcggcggtgatggtaaatcagcagatccaatg

SEQ ID NO: 102713 - DNA, 171 bp, Heterodera glycines
attgttgaccatttcggatatgtacagaaataatttgtcaatttttgacttaaaaatgttttgtttttttgctgatcaatgatgacgtttctgaaacgaattttatatccaaaaatataaaaaaaaatttttttttaaagaatccccagcgaaattaggtaaaccgcaatg

SEQ ID NO: 102714 - DNA, 162 bp, Heterodera glycines
ggtgaaaatcggcgtggcatttcaagatcttgaggggagttaagcattttgaactaaatttgccaatggcattttcaaacacacaaaaaattttttatatgaattataaaaaattggaaggaataaatttcatcattcatttaagaaattttgaaaaaaatg

SEQ ID NO: 102715 - DNA, 461 bp, Heterodera glycines
  unsure (1)..(461): unsure at all n locations
gaaaaagtaaaaataaaagaagaaancaattgaattaataaaaaacaaaactttttaaaagcacataacaattgaattaatctcacagcttgagaactgataagtcgagcacaaatgatctctaattcttcaattttaattattttttccttttcaaattttatttttgatttcaaaagttaaacattcgttataaaaaatgtaataattacatttaattcctgtgtatttcacttaatttttgagtctttttcaataatcgaaattcaactccccgaggggtttcaaactcctcctccgcagtccgtgccatgccaacgcatcagttcccaaaaagcagtaaagtcgcgcagccaattaggaattttccctactatgggaaaacggcgcaattaaaaataaaacatttctgactcaccggacttagtttcggatgaatacctttgctttaactcattatg

SEQ ID NO: 102716 - DNA, 953 bp, Heterodera glycines
ttttgtagagaattttgtgctctttcccataggtctactaaattttccagaaaaattttcctaacaccctaggaatttttttcgaaaatttcctcgatttcaagccatttttggtttttcagatcaccatgaaggagtgatctgatcaagttggtgtaaaagatttttttgttcagcatcaaaagttagcttagcatgaattttttcagaattttctgccaacttggaaattgaatttttggcgattaactattttgtccataaacatatgaccacctaaaatgggcgctatgcctattcactcacgtgtcattttgttaataattattatttcagaaattgatttataggtttagaaagcccataaaaaatgctacaaaaaatgacaaaacattagttcgtttcagatttattcaagcaaaagggcaactatttttctcgatttatcatttgtccataaacatatgaccatgactgtatatgatgtcgctcctgtacttgctgatagggacagatattgttcacattagaaataactttttatgattgtacattgtcagaaaatgcataattttatcaatcattaataaaattcaaattagttaacttattacaagttagcttattaattttataaattgtacaaaatttttttttttttacaaaatcattattaaattaaaattaataaatttatttattattttcttatactttccctttagaaataaacttaattttttagataattgtaaatctcgaattttctgctttttattacctttttaatttgagtataatataatttttttctcacgtttcttaatataattctactaataaattattctttatttaaactttatctgtcgaagtgacaacagacgtttcgatactctaaaaaatagttttatttattaaaacataaatgagaagaaaatagtagaaaaatg

SEQ ID NO: 102717 - DNA, 313 bp, Heterodera glycines
tttttttaaattggcaaatttaattcgaaaaaaaacattaaaatcaaataaactaaaaactgaaaaaaaaattttaatttaaatttaaattcgacccttaaaaggtcaaattaaatgcttaaaaggattaaaaattggatcatttaatatcaaaaataattttaaaaaatttttaaatttaaaatcacaaaagaaaaaaaagttgataatttttatttaaaaattaaaattcggtccttagctggtcatcaatttagcaacggtccgacgtcaaaaattcatgcaaatttgcacaagtttgatggcacaaatg

SEQ ID NO: 102718 - DNA, 102 bp, Heterodera glycines
ggtgagtttgagtgagggacactgaggaggcgcctggtgtgatgaaaaggagaaaaagaaaaacgcttcggcgatttaaaatgcccccggggatgaaaaatg

SEQ ID NO: 102719 - DNA, 851 bp, Heterodera glycines
tatgtgtgatatatagagaacgaagacatatgccttttattctgcgactagtttcgatgtattaagcttaaataacacattttcactttgtttgaagcttctacgatgacttttattatgcctttttggaattttccgaaaaatgcttaacaaaattcaataaaaaagaaaaatacacccctaagaaatgacccgacaaaaatttcagaaaatacaccccttaaaaattgaaaaatttctcaaaaattgatcgccaaaatttaatttttttttcttgataagttttgctccctaaaaacgtttaaattttttaaatgccttttttgggatttttgtgccttttaatgcctttttttattttttggtgctattatagtgcctttttcgagagcaagaaacaaaaaagttatgtggcctcaaaaacgaaattttaggctaagcagctttattcactttctatgaattcccaatcacatttattattatttttgcttatttttactaaagaataactatcatacagttttttagtttaaaaaatgattttttatattatacattaattaaaatttatttgtttttatgttgggtttgaaccccaaaaatgcgaaattaaccaactaagtgaaaacatagccaaaatttcaatttttgaggcttcataacttttttgtttcttgactatgggcccgtaatattagaaattcacaatagaagtcgaccctgctctatccactggtataaaaaaaatttgcaaaaatttttctggtggcgtctatcggaggcgaactcaagccagaggtgatatatttcttaagcagaagaatttttacgagtgctataataaaatg

SEQ ID NO: 102720 - DNA, 933 bp, Heterodera glycines
ttcactaaatttccaatttataattaataaattaaatttttaatttgaagactcgcctcttttgcgtctccgtcgcccaccaaaaaataaacatccgcgtcctcacgcgtgctcaacaaatgcttcatccgatcaagcactgattgggacatgataagcaatatgaaaatcgtatttatctattaatgtaatgaaatgaaataatgggaattaagtgaattaagatattcaaaattggcaataaaataaataacaaaatcggctaaatccttatgattttactggactattcagctggctaatcatatgccaagcccataaacaacgaatgagtgaatggtgaaggcttcccctatttttggggggaagatttaaaaatcgcaaacattttaattaatttatttttcaatttgtatgtaaaaacaaattaaaaaaagtaaagggtggaaaatccttacccgatttgaactttcattcatggaaattggaaattgaactcccaaatcatcggaaaattatttacttttacccatcatcttccatccaaagctcattcaaaacaatatgcaattgtcagaagagtgtaatgttttgttgttcccatcctcccgtatttttttcatttattcatcgctttgcccctcggggtaaaaaattgatccaaatcaatacaaagaaacattgtagaaaatggtgtgtacataggttgaataaattatattaatattaatgaaacagataatttataattttggattagaataaagcgtaaaattaatttaattttatgggtcagccttttattcgtaaagtttttgtttaaaaataaaaactgaaaaggaaataagaggatcatgttaggtaatggaaaaaatcataaatgtatatttaattaagtaaattaattaggaaaaaattgcagagaacaaaatg

SEQ ID NO: 102721 - DNA, 199 bp, Heterodera glycines
tttgtgatcaaaccaaaagcagctaggaatgattatttatttgaatagtatttttttattaagagaaattttattggattgccaaaactgattttggaacgagtatttatagggcgacgaaacggaaaaattttgacaatttaaaattttgatgaattcgccaaacattttgattgttcagcttgcgcatgcactaatg

SEQ ID NO: 102722 - DNA, 794 bp, Heterodera glycines
  unsure (1)..(794): unsure at all n locations
gcttaaaaaatacacaaaaaaaaaaaaatttttcgttaaagatgnnaaggaaggngancgngatttgacgctcccttttggacttgnaactctcggatttgaggtcgctgaccattggcaagaaattcaaaactttttcggtgcaggcaatttcaaagggtaattaattaatatgtatattactactattaattttactaaattaattttggcataggttcaaatagtaattaattaatatattaattaatattaattttacgaataattttggcttggtttcaaataccttatttgtaaagctcagtattttgtaaaaagaacctggagctgggtttcatgtgatctagacccggatttcctggacaaaattcaggtccaggaaaaatccagtcaattcatgtcaatctttttttgcttttcaaaacactttttacggccagttttttcaaacaaatttttaataagagggggaggtcgggcggtgcagataggcgcccgctttgcaaaattttgtaattttaatgcgatttattaacgattttgttcaagaaatgacaaaatttcgagattttgagccattttttgaagagaattaaaatttttagggccgtcgagaaatttttttagatttaatacccattttaaatatatttcgccataaaaagacggaaaaaaaattatccccgaaatccatgtttttgatgcctagacctggattaccaaattgatctggacttggatttgctgaataaaatccaggaaagtccaggtccaagaaaaatccatgcatg

SEQ ID NO: 102723 - DNA, 455 bp, Heterodera glycines
ccgatagatcctatagatatacatatattagcctttaaaatttgaaaacaattagttaatattcaaaatattcagcagacgaacacaagaaaagagaaaagttttttgaatatttttggtcataactttcttgaaacttaacgaatctttttgaaattttacatgataatagaaaaaacttagggctatcgaatgttatatagaattaaaaattttgaatgtttttcagcaaaattatatgaaaattttttttaatttgatggtttttgagtaatttcataagtcataatatgtacatacgtacttttgtgttgttggctgcgtagaaacgacacaaaatttgaacaagttttgaaagtgccaaaattgaataaatattctgtttgttttttattcattttttctacacataaatccttcctaataaataaaagctacagtatcattaggacatg

SEQ ID NO: 102724 - DNA, 1003 bp, Heterodera glycines
gctttccgcagttatgcaaatatcgcttttcttcttttgaaaattaattttaattcttttttataatttaatgcgttaaaaagaaaaaaaattctttcgttttcattggtttttcattaagcttttttcacaatttgtatcattaaaaagccaaaaatgtgttgttgcgggcgctgtgattgtgggcaattatttgctgctgcccttcgtcggtgtcttttcgtttgttcccaacggcagaagaagaagatcacttggcgctctcataaataatcccgttggaattagccaacaaattttgaaacaacgcaaaaagcgtgcgaaaagcccaaaaaatggtcaaattgaaatgactaaagattttttaaataaatttgttttttaattttattttttcctttaaagttgtcactattgcgtgaaatgtttccaattcttccgttcacttcgcttcacaatctctgtctgacccatccaaatttcaattccaatctgagcaaaccaaataaaatcaaatactaatttcaatacgatttcgattccctctgatgcttctcactttcccttcacatccgtcgatgcgtccatcccaaccgaaacgaaaacattcaaactttttgaggggaggcggcggtgggtcactcattcgcttccccccggggggtcattctccccccccccccccccgctgtgatccagcggagggagaggaggagaagaagcaataatcggtatctcactccttctttgcccatcggcaaataaccaaatgaccctttaaattgtcagtttgatggcatcattttttttacaaattaaatccacattttgtcggtataaaagctgtacctttgcccatcaaaataaaaaaaaatgaaatataaaattaccttctaaatatttagtgaaaatgtgactaattattttataaaatatgttcttacatttattttagttgttattttatttctttcattttatcgacaaaattaatttcaaaatg

SEQ ID NO: 102725 - DNA, 619 bp, Heterodera glycines
ttcggaaaacgaaaatatattattaaagtcatttgcgaaaaaaattattaaggcatttaattgcatgccggaagaccaaccgggcgacagtcgcacgatttaacttttacgtgcatctacacaagaaaacgtgaaatacaaattacaattcatttttgggaacatttcacttttaagtgcacatgtacactaaaaacgtgaaatacaattcattttttggtttttacacaataaaacgtgaagtcgcgattaggtaattttctgtgtttttgtacactaaaaacgtgaaattacaattttgtgggtctaaaacgatttaacttttacgtgcatctacacaagaaaacgtgaaatacaaattacaattcatttttgggaacatttcacttttaagtgcacatgtacactaaaaacgtgaaatacaattcattttttggtttttacacaataaaacgtgaagtcgcgattaggtaattttctgtgtttttgtacactaaaaacgtgaaattacaattttgtgggtctaaaacgatttaacttttacgtgcatctacacaagaaaacgtgaaatacaaattacaattcatttttgggaacatttcacttttaagtgcacatg

SEQ ID NO: 102726 - DNA, 313 bp, Heterodera glycines
aaaatagaaatttttttaattcattggggaaaaaatgttcacttaaagaatggcaatttaaaaagaaaagtaaaatgaaaatttggcaaaaatcaaaatttaaattttgtaaaaatataattatcattaataaattttaaattttatttagataaaatattaataataataatatgcaaaaaaaaatatgcataacatatttcatcaatatttaaaattaatatgaggaggaaaaatgaattttcataaaatcaatgagaataaaagcaattaataaaatgaatttctaatcatttttattttatgaaaaatg

SEQ ID NO: 102727 - DNA, 275 bp, Heterodera glycines
ttttggttaaattgctgaatagtcgccgcaaaaaaaaaatttaattttttccttgaatttttttagtaaatttttttcaaattttttagaattttttcgaaccagactcagtagttgatcagtaattttttccagaaaatctaaaaaaatttcctgtttgaggttttataaagtattttcatattgaacccgaccgagtatttttgtgtcaaccaccgcccttggaaattcataaaattttgctgcactttcttcgatcgatatgtaataatatg

SEQ ID NO: 102728 - DNA, 152 bp, Heterodera glycines
ggtgaaagtggaaatagaattttaagaaacaaaaatttagagttgagcaaaatttaatgaggacaaataacagcatcgaggggtggcatcgctctttcaatagccaattccgcttccttcatccgccattaagttattttgtcaaaaaaatg

SEQ ID NO: 102729 - DNA, 329 bp, Heterodera glycines
  unsure (1)..(329): unsure at all n locations
tatccaatgagtttttaaaaatttncgagtcacaactctcacatgagaaaaataattaggaagaaaaatgtattacgcccttcatactgtttgtgaaccatgcaatattttcagttgagtgttttataagattacaatataaaaatagtaaaaaagagaaaaaaaaccaaaattcaaagtaaaaaacatggattattgaaaggtcatttttgaatggaattatgcatattttaacacttatgtattgagaaagcaattttcaataaaaaaatacccaaacaaacagtcaaacagtaattgattaatgagcattttgaagtaacagcatg

SEQ ID NO: 102730 - DNA, 78 bp, Heterodera glycines
atctccgactggtacggaaaccaaaaatggtcctgtttttggcccaaaacggtggcatttgccaactcgcccaaaatg

SEQ ID NO: 102731 - DNA, 77 bp, Heterodera glycines
ggtggaattgtccaagaagaatgaaatggattagatttgaatttgggccatttcaggtggatttggacgacacaatg

SEQ ID NO: 102732 - DNA, 684 bp, Heterodera glycines
ttcaatttaattcacttttaaattaaaagttttaatttaaaatacttttttttattggaaccaatacaaaatgaacggcggttaaactgttggcattccaaaaaattacaaaatttaattcggcccatttttattttcgttttgtttgggttccgtccgcctccttcgacggaagacaaatcaaatggttttgaattaaaatggcaataaatcactgacaaaaagattgattgatcggtgtctatactcaacttaattatttcaaaaattatttttaattagtgaaatttctctcaaatttcagaattttaacctttcatttgacgaattgttttgtttcaattagcgacgcattttaaattgttttttttccaaactgataaaagttaaatctttttggcgtcagtttaattctttaaaaaaaattcataaattctgaattatttttgtgcaatttgttaatcataaatggacgcaaattccctttatttttaaatttaccacaaattaaagaaagtctttggccataatacgtttataattaaattcatttttaaatttttttacacaatttttacattatttggctttccatgcaaattaagcccaaaatctcgggcttttaaaagaaaatgttgccctaattgaagaagattcgaaactgtttgttttttgttacaaatg

SEQ ID NO: 102733 - DNA, 442 bp, Heterodera glycines
ttggctcctctcattaatggtgccggttaaaagggtcctgtggttgttaacgcaccataacagcaccggcacaaagttcgtcagcttcagctattcgccccccccccccctcttcgccattcacttttttctttttgtttccctcaattgaccaattttatttttgtaaaaattaaattattatgtaatgctctttccatttcattttatgcaatatgtaattgagaaaagaaacaaagcttttcaaacaacttttgtttattttgagtgggttttctttactgaacaattcaaaaagcaaaattgaaaagctaaactattactacatatagcctgaggacaaatgcaataattaagtgaattaaatgtgccgtttttctcttttgggctttttgggtcattcacgagattaataaatcatagtccgcttttcaacaaaatg

SEQ ID NO: 102734 - DNA, 856 bp, Heterodera glycines
ttttaccacgaaataattattcggtgttttttgtttccggagattttggtgaatttaaatattataattagagccatttttagtcaaaaaaaatcgcgaaataggcattacattaattaggcacaaaaaaaggcaaataacattttttattaacactttttaggtagcaaaacatataaaaattaatcaaaaaacttaattttgcttatatttcaactattttaacgttttttaaataaagacaatttttaaaccaaaatttttgtcaagaaaatataattaatttttgggaatcagtttttgtgaaaacttttttcaattcttagggggtgtatttttcatttttcttgcatttttgttaaggatttttccgaaaattctgaaaaaggcgccaaaagtggcgaaatagtcacaaaaattggaatttaggcattagcacaaaaattccaaaataggcaaagttaggcattataaaagtcatcgtaaacaccccaaacctagcgaaaacgcgtttttcgtgcttatctatgcgtatcaagtgcgcagaaatttaggcatttgactaaaaatcgaagcactaattttaatccctttttaatatttaaataaaagaaaaaattaatattttatttattagggctgaaatagttttaccgagtaccgagaccgaagaatgacaatgagtaaaaaaccgagaccaagaaacgtgaaatcataaaatccgatattaactttttagtttttagcaattttcaattttagtacattgtagaatttctcctctcggtgatttcaaaaacccgagaaagaggagtgaaaaatcgagaaccaaaccatcccgaacagccctaaaatg

SEQ ID NO: 102735 - DNA, 991 bp, Heterodera glycines
cagcagatgaaaagcatcaccataaaaattttaccttttcttcgctcgaatatgctgcgataaaacaatgtaagaatctagaaaaaaatattttatataataaaaaatttacaaaaatctatattatttaaataaaaagctaaattattttaagcaattctttccaaagcttcatgggtctttgtttcggaagagcttaaaaaaagtaattatgctaaataaaattgtaatcatttaactttactttcattgacctaatataaaatttaactagagatctgatttttatggatttccatatttttttttgcacattattttggcctaataccacatgaatagttttttgcttagtttatgttttaggatgcattttatttccatatttcggatttttgtccatatttccatattttggcattttcatataacaaatcgagaatttcatcccctaaagatggaaaattttggaagatacgctcataaaatccaaaaattttgaaaaaatataaaaattgtgcaaacattttttattaataacgtttgtataaaaatgagttttaaagaaaattacaatttttgcaatttttctaaattcaatatttcagtaaataataaataagaattatagttctcaattgtgaaattctataattcatgaattaaaatggtttttccttcttgacaaaaaaatatgggtttatgaatttttaaaaattcaatccaattttctgaaattattagtcaatattttcatgtttttgtccatattataaccatattttggattttttatccataaaatccgggccctaatataaccgatacacaacatttttaatttagtcttttattctaatgagcagacaggagaagtcgaaaatgaaattaaaatcttacatcgacgtttgtacgaagacgaaaacttgtgagattttaaaattttcacaattaaattaaaattcttagatgttggctaaaaacaattatg

SEQ ID NO: 102736 - DNA, 151 bp, Heterodera glycines
  unsure (1)..(151): unsure at all n locations
ttttcgtgccatatttttggcagccctaatngatgtgtgtatgagtaaaagtgatatatactgtacaattaatgttgccaagtcaacctattattaaaaaatcattttttgcaataaaatgncatagtgaattatagctaagtaaattatg

SEQ ID NO: 102737 - DNA, 492 bp, Heterodera glycines
gagataaatttattgttttttattttggagattggtcatgaaatatttgagttcccgatgcaatgattaaacaaaatgatagtttctgggcttggacgtttgcaacccacagacttagtgtctttttgcacataataagtgcctcttatcccattgactttttcaagggtaattccaatcgtccacaaaaagatatatgtgatgtttttgagcagttctgcaatgtaatttcaggttatcgaaaaacaactcacgctttgacaatgtattaaatgcaataagcaatttggatggtaattttgagaataagcaaattatttcacaaatttagggtccaaaattaatgtcagatgaatgataatcattttcgaataactctgagcacatcgcaaaaccgctaaaaacagaatgacaatcccatggaatttaccatcttttgattagtgttttattgtatccgtcttcttgtcgctagcaaattgcaacataatg

SEQ ID NO: 102738 - DNA, 145 bp, Heterodera glycines
ataatgaaattatttattaaaaaaaatttaaaatttacaaccaatcttcaaattaattaaaagcattgaaaaataactcaaaaataaatagaaaaataatgttacaccgtccggattcgaacttggcccccctcccctcaaaatg

SEQ ID NO: 102739 - DNA, 56 bp, Heterodera glycines
  unsure (1)..(56): unsure at all n locations
ggaccatccctcaaaaatatcagcaaaaaatacttctttccaggngagatagaatg

SEQ ID NO: 102740 - DNA, 841 bp, Heterodera glycines
tcagaattatcttcctcttgtaacattaattattttttctttataataaaaacgatttcttcactttgggagtgttttttttttaaattttgtaaaaaacatatttatttatttattagtgagtgttttttataattgggacaattttgggtcggttttaattatatttttcggatatttaattgccttctcttcttcttatcgttatttaattcatttttggattttatttttcattaaaattgtccgacgatttccctttccttcggccgaccacaatttgttgcaatttctcaatttgaattcaattgaatgaatggaatggctcctcttctcttccttcgcttttccgtttttgcggtgttttttttgatcatttgtccgtcccatcgttcgctttttcttttctcccattcgttcgttcgtccgttcgtttccctttctttgtccatttctcccccttattttttccaatggaatttaaattcatcggacaaaaaatggcaatattttttctgccgtccgtccgccgattcattcattgaataatccaacatttgtccatcattccgtccgctgatgcccacaaaaagccattttgcagaacaaaaattttcatatttccgctcactcagtgccaagggacaaataaaaaacactccaaaaaatgaaaggccccaaaaagctgcagaattttgtttttgcaatttaaaaaaaataaataaattttctttgtaataattttctttctttttttgataggaaaatgattactgtgaaagtaaacattctgttcaccagctacaatggcttctgccagcccagcggagagcacaaaatg

SEQ ID NO: 102741 - DNA, 947 bp, Heterodera glycines
acattttaattgctctgcccccccccatcgaatcgctctttgccttaggctttcccccgcgggcgctgcccattgatcagctgctgctgctgaaaaccccaaaaaagtcgcgcactgcgctcctcccgcccgccccccccccctcccataatttgagatcatcgctcaaagtacagctccacgggcgaacaaatgcaccaccacaaaactccgtcattcattcactcccagtcattcagtgctcgcgccgttggtttaagtgtttaggacacgttaaacaacaagctaaaaattgcttataaaaaggcaacaaattaattaatttttaaatgcacacactttatttaccacttaattaaaaatgactacgattagtgttcccatccccgttaataatgaaatatttaaattcaattaggttaatcgccttttgtttcccgaacctggagttggtcactaaaaaattgcttataaaatggcaacaaattaattaacttttaaatgcgcacattttatttgccaattaaatgccaacataatgtttacgattagtgtccccccattaaagtgtaataccctatttaaattcaattaagttaatgccgcctcttttgcccgaacttttgagttggtcatttccgaaatatcagttgaacatttaaatgaaaaatctcaaaaatcaaaatacacctctccgatccgaagcaatttgggattaattgtcaccactccctcgaccctcgcacgcccattgaccgccccatccccgacaagcgcccgcccgaagaattgttagcctaatttaatttttaagatttttcaaatctgtttcacttaactgctaaaaatatctctttttgattcaataatttatttcataaatcccccaatttttttttgttctttttaaatgactttttcagttagccgactgaattatcaaaatg

SEQ ID NO: 102742 - DNA, 427 bp, Heterodera glycines
attggaaactctgctgaattccgagtccaaaataactttttgatgagttgtccaatagtttagtattgtaatagcttaaacatggattagcagtacaaatcagtcatcgagagtttgagttcaattgaatggccgctttaaccatttggctgccctaaattaagtcttcgacagccaaacttcgagtttacaaaaaaaaaccatcttttaacaaattttaaagcaaaagatttcttgaaatttcaaattcaaaaattagactaaaattttgaaaatggattgatttccgtacagttttgcccaaaagtcggtcaccggctgcttcctgctgctgcttctgctttgggtgggtcgagagccgggcttcatgcccggcttcggcgcactgttccccgccgacttctacaccgactccacctcggccatg

SEQ ID NO: 102743 - DNA, 542 bp, Heterodera glycines
ggacaaaaaaaaatcaaacaaattatgcgattataaaagtcaattttgtatgcctgttaccgcgggataaaaccgatttcgcaattctagacaacaatatatacttgattcgatcagacctttgcatttataaatatagaattgttgaccgtcaagttgaactaaagtttgtggtcaatagtagtagcgcgaaattcaactttttattatttaaagaataccgcgacgacgccaataataataatatacttcaagcaggctctcaaacgcctcagttaaaattattgttaggggttgcttatacatttgacgtactactgatcataatttgtgcatttgccgtaaaacagatccgccgagcgagcagcagaagtaacacatcttccgaaaatcttggcatgttcgacctagtggaattggcagcgcttacaaataattccaaagaactggtgtacacgcccacaacagtagtcaaagagaggagtatttaaggcaactattctggccatcagcgctcatttcgtacactaaaccactatatg

SEQ ID NO: 102744 - DNA, 391 bp, Heterodera glycines
tttcgttggtccgttcgttcgtcaaaaaaaaatccatcccatctcagcaaggcttggtttttatctttagggatgtcaattttgtaaatataaatttttttttcctggaatcttcatagctaaataatagagtgccacgggaccgggaattttgggcaaacccgggaccgggaccttttcgggttgaaaaaccgggaatttttggctgggaaaaccgggaaaaacccgggactagtcccggtcccggtcaaaaccgggaccttggtactcagttgtactcagttgtccgctaccaggtcccggtcccgtggcactctactaaataatatgaaaaaaatttttggtcatgtaattctgtttctttatttttaagctttattccactaacatg

SEQ ID NO: 102745 - DNA, 52 bp, Heterodera glycines
agtccgttcatttgtctttctttttggcattttcacttaggtgctcaaaatg

SEQ ID NO: 102746 - DNA, 1003 bp, Heterodera glycines
aaaagcaatttttaaccattatttttctatttaattggataatattacaggttattttaaaaaattattggaactcataatgtagaaaacacaaaataaacgtcaaaggaaaagatttatggcaaaggcaaaaatattccagaaattcttggcaaaacgccattctcgtggaatgatgaatgaatcggtgcataatatgcacaaatttacaatttacaacaagcattagcctttttatgcttttgttactaaatcttttcactgttttttctccctttttcaatttgaaattgtaaaaatattcataaataaaaaaattacagtaacccacgcatcgaaagtgaacagttaaagtaatgccacacattttttcaacatttattgctttgttccttctcttacggcttaatggcatctccggggtcactttgtccgccggctcccacttggacatgagtgtaattgtcacagtgcagaaaaactatacgggggacaattgtcaagcagcgatggcacaatgggacgcaggcgaagggaaagacgccgaaaaaggcactaaaaatcaaaaacaaaattcaatttatggcatttcgtaatttacattaaacgccccaattggcacggttggtttcagttttattgttaataggctttgtccaaaaatacaattttttcaaatgtttttctgctaaagaagattatttgaaaaatttaaaacaaaattgtttaattgaaatttatcaaatttcataatttttttaaattttgaccccataaaaaggaattaaattaaaatatttattttttcctattgtgtacataaattgtgcagaatgtctgtggcgaaagtgtacacagcaggtgcagtacaaagtcgatttgggctacagtaaggttagtctgtgcatgctgtatatcagaatattatactttttgtaactgtagaaattgattgaaatttaatattttatttttcaaaagtataaaatgaaaggtcagaatg

SEQ ID NO: 102747 - DNA, 158 bp, Heterodera glycines
gaattatgcaaaggccgaaaagccttgaaaactgagactttggcatttgccaagcttaacaaggttttctaacgagtttaatggagggtaaccaacacgaacccccctgggactttccctggaagctaatttgtgctaattgccctcattataggatg

SEQ ID NO: 102748 - DNA, 165 bp, Heterodera glycines
agcacgggcggcataactttgagcggcccccgcctgtctgttccccgtttcattccgtttgaggaaaacgggcgttgccgcgcgtaaagcgttccatacagcgaactgtcgtcctcagacaggtgcaccaagcctctaccaccaccatcaccaccaccaccaatg

SEQ ID NO: 102749 - DNA, 112 bp, Heterodera glycines
tgtactcggcatgcggaacggtttcaaacgacacttggtgctgttggcatttctccaaaacaatatttcttaccgccctagcggttcgtccattaccatcgccccaaacatg

SEQ ID NO: 102750 - DNA, 371 bp, Heterodera glycines
gttttaaaatttttataaaaaattttttatgggaccttctatgcacaagtaccacaaaatcttttatcaaataaaaactatagggcttgcatgactggaacaccttcacaaatttttttaaaaagttagaaaatttgagcttttaagtgcgcgattcgcgaccgcgggatttttctgtccgcgccccactcactgctgtataaccgaaaaggaattcatgctttttaaccgcaaaatatcatttttatgtttggtagtcgaatgatcattttgatttttttcatctgcgagcgaactgatttagacttttcaacaaaaaattctaccaaaatttcttagatttaaatttcggagttcgcttttcaaaaatg

SEQ ID NO: 102751 - DNA, 1003 bp, Heterodera glycines
gcctagtaagccgagattcgcgaaaaatgggcgaaaaaggaaaatattacgaatctgataaagcattctgggttttcgaatctattgaaataaaagcaaaatgaaagtcatggccagcattccgacaaattatgccacaaaaataaaatttgaaattttcttcttccattttttacaaagaatttcaaaaattttctattggtttcctcacaattaagaaaagttacggttataagcagatgagttttatcagcagctgatcaaataccaaaaccaaattagtcaactccatgaaaaatcataaatgtttaattatgaaaacaataaaaaattatatgtttttaattcgcaatgtttttgatcatagcccccaaacgaaaattaaatcggcaagagataatttctcaattttttattcttttttattttgtacaagtagcaaaagcgaagaaatgaatgaatgaatgaatgactttacaatttgtcatccgttcttcgtccgttcattcgttgggcgcgaggacataaaaggcgaatgatttgtcatttgtaattaattagcaaaaattacctaataaattaaataataattgccaatcatttttctggtgtttttattttttatttaaactttgaaaaaaggttttctttttcgcaaattgatgaaatgataataaaacgagtttatttttgtgctcatttatttcctttttattttattgcaaaattaaaatattattctttgggcatataaataaataaagaagttggaaagaaattatcattttgcatttgtatcactttatttggagaagaatatggttaatttattgaggctttttttacgtgtaataaaatttaaaaaattaaaaaacgcatatatttaacaaatttaccattcattgcttatcaccgtaatttcgaaatgaattgaccttttgaatttattaattaataattaatgttataaggcaccactaattttaaatctattcttaaaatg

SEQ ID NO: 102752 - DNA, 1003 bp, Heterodera glycines
taattttatttgctgaataataaatcataacttagcttaaactttgtcaaattaaagatcttgagcgatagctttaggtgtcctcctctattataagtagggatgatatttttaggtgctaaaaactgccaaaataggtaggttttaggttctaaaaacccccaaaataggtgctaaaaatgggaaaataggtgccaaaaagttccaaaattaggggtgtaaaattgaaaatttccttcaaaaagcaaagatattatgccaaatgattaatgagatatatcaaaaattctaacaagaaaataaataaataaattttgaagatgaatttttgagaaatttttcatttctcatcaggggtgtgtttttgaaaattttcgggtcgattcttaggggtgtatttttcgtttttattgcatttttgttaacaaattttgggcaaaacgccaaaataggtgaaaattacggggagctcaggaaaaaatagtgaaaaacctaaaaatatcatccctaattataagtaattaaaaatttaaacaaaatttttacaaaaaattctaaccaaaaaatttcgacaaatttatactcaattatctttgccccgaactttttaaaaaattaataaaaaaattttgaactttaactgaaatatagaaaaatctttaggcaaattatacttataaagaaaaaaaaattggttatctcaattctaggggtatgtatttttcgcttttactgcatttttaagaaatttccaaaaacccaaaatgtcaaaatatttaattctctaatttattaaaattcctcacaaaatcaacaaaaattaaatacctatttgaaatattaaatgaatttataattcattattttagaaggaaatttaaaatgagatatttatttaatgaaaataattatttaaagaaattaaaataaaataaacaacaaaatctccactctgattattagatagccaagacaaattgtatccagattttaatatttaatg

SEQ ID NO: 102753 - DNA, 115 bp, Heterodera glycines
  unsure (1)..(115): unsure at all n locations
attttanttaattcctttgattggattaggtaatttatacagctaaaattatagataaatatatatatatatatttaaaatatatttaaatgcaggtggaattaatccggcaatg

SEQ ID NO: 102754 - DNA, 53 bp, Heterodera glycines
attatttgtaaataaaaaattattattttttcgtcgcaattccgccaaaaatg

SEQ ID NO: 102755 - DNA, 198 bp, Heterodera glycines
ataaaaggcgagcaaatggcataaccaattcgttggtgttattcattataatgaaatttcataaaatatttaaagaagagtttctgttgccaataaaaaataactttaatttaatttattttattttattttcatttaatttaatttcctttagcagatccaatttctaattcaatccttctactacttcccaaaatg

SEQ ID NO: 102756 - DNA, 158 bp, Heterodera glycines
gccgcaaatgtctggacaccaaagtttacattgtctagccccttaaaactttttaatattttatttttgcgtcgatgtttgtggatgcatctcccctatttcctgtttataaatttccctcctaatttgtaagggaagtgtaccacaccccgcggatg

SEQ ID NO: 102757 - DNA, 139 bp, Heterodera glycines
tctttcaaagagcgcctcccctaagtatgtttgtttgttttttttgaaagtgtactgtcgaattttttttgttatttaaactttttttgacttttccccagactttttccattttggcatttttttagcaataaacatg

SEQ ID NO: 102758 - DNA, 948 bp, Heterodera glycines
  unsure (1)..(948): unsure at all n locations
aattttaggaggggacttttcgacagaaaaagtaattaactttcaaattaaggggcgtaaaatcgtaaaattttttccaaaacaacaaaatgaagccaaaccagtattgaaataaataatttataaaatctaaaatcctttacctagaaaataaatttaaaaaaattggacatgaatttttaagaaaattgtttcattcttcctaggagtgtattttgaaaatttaaggaccggttcttaaaggtgttttttctaaaaaaaattttcccaggtaaaaaacgtatctctagtaattctaatttagcaatccatatttgtatgttaatttaaaagaaatttagtaaaattgacaagcaatataatttattttaataagaattatttgtttttatatttactgtcgaaaagtccgggagcccacaaatcaggggtgagacgcggccgtaatccgcgcttttaatttgaatcctcgaaccgcgaccgcgggattttttgggacaaaattataaagaaaatttgaagcgattgtcttttttgaatattcaaattttaaataaattttttgaaaagttggattatttttctcaaaaaattcgtttaaaaattctcttttttcctcgacggagctgaatacctttaatttttctttaaaaaattgtatctaaatcaaaaaataaggtgattttttaaaaatcttttaccaatttgcaatcaaattttttaaaatttttcgtgcggcccatatcggcacattataaggaaattttaaaaaattaaaaaaaagttaatgtgaaaaagttggaaaatttttgagtttttaaatacgcgatccacgatgcgcggtaatttttttgcgcaatccgagaccgcgggatnattctgtccgtgccccacccctggcccaaatccgaaaatgcaaatgcctttgttactgattagagttccatg

SEQ ID NO: 102759 - DNA, 66 bp, Heterodera glycines
aatttataaaatgtcgatgaattggatgtgcatggaccaagtgggcaccgaattgctgtggaaatg

SEQ ID NO: 102760 - DNA, 268 bp, Heterodera glycines
ggtgaatttaattaaatatcaaaattccaaaatttaatttaatatgtattttggtgttgaagtcttttttctttttttgcatcctcacttcaactcttgaaaatattatagttttgtaagaaaaattctgtttggcaaatctgcaaaaaaaaaatggatttggatattttatatgtcttgagtcccttcgtaaaattaggcttcgccctctccccccttttttaacgtatgccctcgaaccaaacaaaatatgtaattcaggtggatg

SEQ ID NO: 102761 - DNA, 614 bp, Heterodera glycines
aaactcctcatattccctttcacgctcatagcaaaaaaaataaataaataaaattttaatagttattttgtatgttaaaaaagcgtgttttgtaataggtaattatcattgatcaacactgacgtggaggagttaataaatgcttttatcgttcaatttctgtttgatacgcgaatttgacatcgaagctttttctgtcatcaatcatgtttttacgggcaattgtgcaaaggatttaaatcggcttttgaactggtcaaaactcggaaaatggactatgtgctatctgagaggttttgatcccgttcaaacacaaggaatttccaaaaaaggaatttattttggcagagccgaaggcataaagtcacttcgttttttgtgctaaaatattagaaaattcaagtaagttgcggcaggcactttaaaccggtttgaatttgaaatggcaaactttgcatttaaaatatgctgttgaagatctaagtagtgtagaaatgagggggagagaggaagaaagaggattttctgtgatggattttgggggcacagtcccatcgacttttatgcgtccaatcaaatttttcattaaaataaatccattaaaacaaaaaatg

SEQ ID NO: 102762 - DNA, 202 bp, Heterodera glycines
  unsure (1)..(202): unsure at all n locations
ctccctntttgatagaaaaagcatcagagagccttatttaacttttaattaacatttggtgcgtttcagagcacgttctaaaaaatatttatgaattaattttgcaaaataataaataagtaatgaaaaagtcagaatttcgaaaaattttaaaaacaacaagcgttggcattttttcaggttaagttagtcctttacaatg

SEQ ID NO: 102763 - DNA, 653 bp, Heterodera glycines
ataaaatcgaaaattcaaaataaaaatggtccaatgaaaggcgagctaaactgggaaaataacatgtgaaaataaattaatgaaattctatttataaaattagtgattaattcgattaaattttaatctaagaaaataaaagttttccagtaaaactaaaagaacaaattaatacacaaataaagaatattgattaagcaacattgtgtagactcgaatatattggtaatggaattgaaaataaaactaatttaggaattaatatgccttttaaatgagaaattcatacataatataaaatcacacaagaaatttttggaaaattattttttaaaacgacattggttgtctgcccctcaagaaaggcacggatcaaataaaatattaactggtaaaatttaaacgtttgacgtcctttcaaggacggatacctcccctgtcataatatcgctatattcctgtacaagctgatcagagaaaaaactctttggacttgcaaagagcaaattttgcacgcaaaaaggacagaattgccaacgttaatggaaaaatccgatgttttggtacacaaaaaattgccaatactctgtaaaagctgtgaacaagggtccatttctttttttgtaaccagtgcgccgttcggatttaacatg

SEQ ID NO: 102764 - DNA, 323 bp, Heterodera glycines
cctaaaaattcgaaaattataaaaaaaaatttatattatttatgctttttttgaaaaatagaatttttaattcaaaattttcttaaaatgacacctttcaaaataattaaaaaaatataatataatttcatttaatcaaaatgagtataatttataaaaaataaaacattaataagtagaatttcgaaaaaatgtaaacattattttaaaaaataagtagatttgctgagtaaagctatgcaataaatcagcataaatatgggaataaaaatgaattcgtaaaagtatttctaatcattttaatgggtttattaagaaatatg

SEQ ID NO: 102765 - DNA, 478 bp, Heterodera glycines
ctaaggacaaaacgccaaaaaaccccactaatttaaaaatttgccgagattttcccttgtaaaaactgaagagccgatctcgagttaaaaaagaaactttcaaataacaaaagaaaattcgatagaaaagaccaaaaaattcacttaggcaaaatttcaataaaattggtcaataggaaaaattttttttcaaggacaaagttttttctttttctctcattttgacgcactatttccatgtctctaacatataagataacacatggttcattttcttgctaataaactattttttcaaatttttatttaactttgaaatattcttaagaattttcccatcaaaatgagcacaaaatggttttgtttggtttacccttcaccaagttataagtattagaaatttagttgacacgtagttgtccaataagtccttaagatcgcaaaaaacaacaaatttctttcctaattaatcgaaatg

SEQ ID NO: 102766 - DNA, 824 bp, Heterodera glycines
  unsure (1)..(824): unsure at all n locations
aattgngaattggaatagttaaaattaatttttcacctgtattatccaaaatcgatttagcactaaatgaccataaatccttattttctattatattccatgtatctgactcgattttggatcataaatatgaattttggtgaaaaattagttttcgacttttgttcgaaatcgggtccggggttcggaattgatcaaaacagttctttggttcgtgattagcgaccccgaaaacccgtggaaaagcttttttgacaattttttcaaaatttttacaaaaaaaaaattgttcgagttcgggaccggaattgaaatttgtcgaaacggatgtcatattcgtgatttctgggctaatccttgtcccattcattcatttgccccatattttccggcattttaaagccaatttttttttggcacacaagggggttttgggtttctaatttaacttttctaaaatttgatatatctgtggttctaaaatagtgccggtgcctgaacacggatttaaattttgttttatcattgtctccgtcatattcaatttcacaattcttaaatgatcaaaatgattatttaagcactgaaatttaattagacaattacccaatttttgtgaacgttaataccttttaattcatcaaatgcaaaaagcgttatttaataataaaaattgctatttgaattgacatttcttcatcataatttcttatccattaaagccattgtccttaaatgaggctttatggcagcgaaatgagacttttcaaaaatttttcatcttcgagccatgagtttactggtaccataaaaaagcaaaaatg

SEQ ID NO: 102767 - DNA, 340 bp, Heterodera glycines
actgttcatttttataacagcagttttaagtcaagggtaatcaaagatggtatgatcagggatggcagatgtgaggctttagcctcattttgtgggtttttgataggtcaatgaggctttgaggctttttgtggttttttgagaaattttgaggctttttgtggttttttgagaaattttgaggctttttgtggttttttgagaaattttgaggcttttttggttttttgagaaaaactgcttatttctaaattgatcatggacaatcaaaaatataatatttgaacattttaaacgtgtttagaatacatgtaaaaatgaggctttttgacccaaaatg

SEQ ID NO: 102768 - DNA, 147 bp, Heterodera glycines
aatgatccgacagatcatcaaatagaaaatattttaaataaatattttaattaattaagatctaattttttgacgtaaagtccgctcataattattaaattgataaaaacaaatttaaaaattaaccaaatcaggaaaattgggatg

SEQ ID NO: 102769 - DNA, 106 bp, Heterodera glycines
tttctttttctatacctaaaacaaattatgtaaataagataattaatatttctttattatgacaattaaaacaattattattatcagtttaaaaactgaccaaatg

SEQ ID NO: 102770 - DNA, 402 bp, Heterodera glycines
tatataattttcaaaaattttctttttttttttgtatgtattgttgtgtgtctctttatgtaaatctgctataatctcgtgcctatgaataaattggattggataaagatcccgatcatttaaaattattctgttaaatggccaaattgatcatcaaattattagttgctgttttatttttgtttgaaaaataaacaaggcgccaaaatgaaatgccaaataacttaatttaaaaaaatttttccttgcaaaaaagtcaaccaacaaaatgatggatttggactgtgttgaaactatggttctattgaaaatttcataaaatatgtgcctaaaaatggttaataataataaaaaaaacaatttttcgaccgtttacaaatctgaaaattttaacgcggaatg

SEQ ID NO: 102771 - DNA, 191 bp, Heterodera glycines
ttttgccaaaattagattcaaatcgaattaatttgccgatcagagcggaagggacgagtccggctggcagtgatgtgctcaaccttttctcccatggcaatttgcttctgttcggcgctcgagtcgaaccttcgctagtttatcagcgccaattcatcgaagccttcaatgacacggcaatcaacaaaatg

SEQ ID NO: 102772 - DNA, 809 bp, Heterodera glycines
gggggggggggggcaatcggagaaggggcgggaaaatggcaggcacaaagcgacgcgcaaaattgggcagaatgggcggagtgtttgtttgtcttatgaaaaaacggctgaatgatcggcggtcggtcggctgtcaccaaaagggcgcctttaaaggagcaaaagatggcaaagtgtgggcagaagaagcactacaacagacataaaataaacatcgaaatgaccttttcccgacagaatccattcacaacaaatgatcagcgcaaaaaggcctaattaaaagataattgccacatttagccaattagttcacttaattacgccgcgctttttcctaaatgattggccattttccctccgcaaatcccattgatcagcagccaatttcaacgacaaagcaattatttcagttctcttcattaataggacaggtgacaaaattaatgaaaaatcaaccatttttatgcctctaattggcatttcatattttaattagtttttgggttggggttttgtgaaattaatttgcaaatgattgttttgtttcgtcttcgtgtttcctcaatcagttcaatgtttggcaaatgtcgtcacggagagaagtgtaattaaatgcaaacaaaagtgacgaaatttggggaggggggggggaggggaggggtgccaccattacaattcaaaacgaattaattagcatttgataaatacttctccgtgcctcttaaaagggcagagtcaaccaattgggtggcattttcatcaacggtcgtccgctgccccaccaaactcggcttcacatcatccaaatg

SEQ ID NO: 102773 - DNA, 235 bp, Heterodera glycines
aatcatttactctttttctcattgtctctactttttttttctctcccttttctttgcttatagccatatgacaatttgctgtggggcggtccttccctttgtctcctcccccaatgtgcttgtatatgcttttcctttgtccatacacacatcactccacctggccgttggattcggatcccgacccccctcactccccgctccgaatcgggaaagctcaccattgttaaacatg

SEQ ID NO: 102774 - DNA, 135 bp, Heterodera glycines
aaatcgctagaaaagggtttcaaaaatttgtttttaatttttttgcgagttaagcgccagtcactacaatttttgaccaatgggccgttcttcattagtttattgtagttttcttcaaaaatgccaaactgaatg

SEQ ID NO: 102775 - DNA, 187 bp, Heterodera glycines
  unsure (1)..(187): unsure at all n locations
aaaatcgcaaaatatggaccataaaatggcaaaaatcgcaaaantatggacataaaatggcaaaaatcgcgnaaatatggacataaatggcaaaaatcgcgaaatatggacataaatggcaaaatttcgccgtgccaccacttctgtcagttaccatattaaactttatttttgggtggaacaaatg

SEQ ID NO: 102776 - DNA, 68 bp, Heterodera glycines
tggtcgcaaagcagaccggcgtgagcactacatatcatggtcgctaagcagaccgatatgttgccatg

SEQ ID NO: 102777 - DNA, 527 bp, Heterodera glycines
taatgattcattgtcaattcaagcggttcagcccaatctcttctctcacctgacttgatgaggttgtccaacctctgggcacgttctctggccgtctcattggaccgattggggttggtcaacgggttgttgtggccgtcgtcaaaaagtcccgttgtctcaaaatccatgaaaatataggtctcaatatgacacatccttacaccacacgccccccgctttaattcgatcttatggttattatttgtaagtgtgaaagatatctgaatattttatatcaactaatggaaaacaaaaatatatgtatttctattttaataataataaatatataagcagcaaataagcgtggaagaacaaaacaaaaacccgtctgtatttaaacggtgcaatctgaacggttaagcagcatcatgtccataatacaaaacgagatgaaatgtcagtatttaaattttaaataatcaaaaatcaagtctgattgtgagtctttttggaggaggtgtagaagcagtcggggaaagatg

SEQ ID NO: 102778 - DNA, 210 bp, Heterodera glycines
tgatttgtgagggtcgtaagttatgaatggcgcgaagattttcgccaattgtcagggtcagaggggggaaatgccagattttggattcacaaagggataattaatgctcaagcagtcgttactgtctgcgcacctaatcccccacagcagcccactcatcagccaggaattgtcatcgaagtacggtacgacaacaaaaagaaacgcatg

SEQ ID NO: 102779 - DNA, 248 bp, Heterodera glycines
taaatttattaaggactacttcccaagcaagaattcatatttatgggtggttgcaacaagttactaatgataaacaaaataagctactatattctgataccggttaaaaaaaactaagttcaacttaaagtgttattttttagatagtgtcatttacaaacatcccaagggcaaaactcctatagaatttggcgaattccttgggtaatttcaagcattttttttaaatataattttttagtcaaatg

SEQ ID NO: 102780 - DNA, 1003 bp, Heterodera glycines
tttgtccgatggcatttgcttttcggtgcctgctctgaacaaatcctttaaacttgtgtccaattgtctgtttttgtgaccgcattttctattccgtttagtttattacaaataaatgccgggggattatttttctgaaaaatattttttagccaaaaaaccaaattttaattttaaattgggatccctccccggcactccatcggtggcaaagatggtgcgaatcggtattttgggtatggaagtccagggtctgatcagggacagtaataggccgagaattggagacccctcccgccggggtaatgagggatttcaaattattttccaaaccggcaaattataaatccggcactctaattaggtatcattcattttttcatgatattttatttttaaattaatttcgacattaaagttaatctcaattttatttctttaattcaattgacatgggaattgatcagctaaattttcacctttttccttcaatgttcgtcttcttcgcagttctgaccaccgcatttatgtgattaattaacaaaaatattttatttatttgcatgaaaaaaaataaaaaattaaatgttttaattgctcaaattaatttttagttttggcgtcggcggatatgaaccgatgaagtgtttagtaagttaatgtttttccaaaatgggatgtgagcttcgtttaccattcgtttccgcttttcttttctttttttggcttttcccatcgcttcaaattttgcattttgggcattctcaccgctcttaatttatttcttcttttagcattcatcaaaaagcaaaaccgaccattttgggttcaatgtgtgtgaagtgctcaatgaggacggaacaacacaatcgaatcaccaaaacaattcagcaatttttttctacgaggtaaaaatgattaaaaaataaaataaataataatatattttaccaattttgctttattaattttacctcaatttgttcagtttttgccggtaatg

SEQ ID NO: 102781 - DNA, 717 bp, Heterodera glycines
cttcaaaatttcgacttttggcaatttcatgtataccttttttggtaattgtctaatcatgaatcaatagcttagaaaaatcttctaaagatgttaagctttcgaatgataccaacaatgttggatttggatggcaaagaaaaaaatttatagaaagttatagtggaaaagcatgctggcgaccaacgtgagcgtccaactgagatagaagtaaatagctttttcctcttatcctcacttctcgtgtctttctatttgactttccttttctctcttttctctttcattttctctctcggtttactttttgttcttacttcgccccctcgctctccatttccactttctctctccctctctctctctctttgtctctcctctctctttctctctctctctctttctctctctctctctttagttttctctttttctccgtccatttgactctcttctctcttatttctctcctctttcctttgtacgaatctctttcttctttgacgtacgcactcgcagccaatgggtgtataaataaaactcaatttaccttcgtttgcttcgtttatcttgtcattttaaaatctcccattttattttttaaaacaaataaaatttaatttaaaaacaatgttttctttcatttaattttattcgctcgatttcaattatcttgccatcatttttttattttaagtgtttagcctggaaatgatg

SEQ ID NO: 102782 - DNA, 355 bp, Heterodera glycines
gaatttgaaattttaaaatttaaatgtatttattatttttatttttattaaaggaaagtgaatttgaacgtgaaaaaagtggcggagaaggaagtgcccgattaacacaagaagtcagatatttgttttatgatggcatatttggaaataaattaaaatttttgaatttaaattttggaaataaattaaataaaattaaatttttgaattttaaagataaaataaattaaatccaaatttaaaaaaatgaattttggaaataaaattaaacaattttaaattttgaaaataaataaattaaaattaaagttttgaaaattaaattttaattattccatccattcccaaggagatg

SEQ ID NO: 102783 - DNA, 718 bp, Heterodera glycines
atcataatccttggtcacgagcccggtttttaaagttaatttctttatttttgaacgattggatttacacaaaatatttccgtgcgtttgcgccaactgtgaaattgttccattgcgaagcacaacgccaagaaaattaacgggacaaataaatctcttgacacatactgcttaaactactgattttaaaataattagttgttttttaattgatccatgaagccgttgaaaatgccattggcaaatatcgtcttgccgtgtccaataaatttgacgttttgaaggtagccgcccccaaattcattaatgtttaattggatttttaatttttaaaagtgagtacccgtaatgtccgtttccgcgagtgatgcgacaatttgttcgaaatgattgaggatgaggattaacagcaaaaacagttacatttatggtgaataattatcaaatacaaaaaaaaaaattaaaataaaataaattatgccatttttatgggaaaagcgctttcgttgatgaatcagcagaaaaatgatgttaataaagcaaaaaaaacagtgggatggattcattttcactttcatttattccattttctcatttgttcattttttaaattgtataattcgaagcaaaataaaagtaaaagaaattcaattaattagttaattacataattccttttttaggtaattattcttttttaaatccccccgtaaaaatg

SEQ ID NO: 102784 - DNA, 1003 bp, Heterodera glycines
ttttttttgtaaaatttttgatcatatttttaccttttttaatttttggcttcgcgccaaaacgtgggcgccaaaacgaccctggcgccaaaaagtgggcgccaaaacgtgggcgccaaatcgtcggcgccaaaacgtgggcgccaaaacgacccagtcccgcatttttatgcggcgcgcttttacaaaaaactctggaaatatggggtcagaggcggggcctttagacgcttccgggaaaagttatgtaaaattttagacaattttttaatagaatttgtccaaattgattaaagttcaacgctttttggggtgtttttgaaccatctttaaaaatagaaagataggttccgtcgacgccgacaatttttgttgaatttcttgaaatataaccgtacgaaaaagtgccgtttcctttttggttctttttcgttaaaaaagcagagggttttaagagtaccatcgttttgcccttatttcggaatttttgacatttttttattaagcaaatgcttgaaacactgaaaaaaaacatttttcaaaatggcttttcaggttcatgaacagagagtctccgattcccaaacctatccatttccactgtgttttttgttctttcatattaacctaataacaaaagttagatacatataatcaatttcttctatttatttagaagtaaaattttcgtcaaaaaaatgcttcaaaatcaagtggacgttgttggcctaggcgttgtgaacaggaggggttcgagaccgtttggtatgttttacaccaaaaaaaaattaaagtttatgctcagggcaaagggacataatttcgtattgggcgggggtggggggaggcaacccaacaaagtgccgtttgccccgcactggtttttgcattacgagacacggaaaggggagaaagtgcagtaaaacggggcgggggggggaggaaggaagagaagcagggttaccgcgggatgagaaaaatatcgagattcttgcccgggatg

SEQ ID NO: 102785 - DNA, 209 bp, Heterodera glycines
aaaaaaacgatgaacgtggaaatgatccaaaaatgtaccaccaaagaacaaatggataaatttattactttacgacaataaaaattaatccataagggaaaaaagagcacaacacactaattgaacataattagccactttatgcccgaggcgatcattaattatgtatcattatcagaataattggtcatttgtttaaaataaacatg

SEQ ID NO: 102786 - DNA, 100 bp, Heterodera glycines
ttgtttgtcggcaccgccggtggcgtccattttcgctcatttattttttcttcggcatttcttctattccaacaactactgccttttcgtgttcagaatg

SEQ ID NO: 102787 - DNA, 314 bp, Heterodera glycines
ggtcagagagggccaactggagggggtggagcagacggcaatgaaagtttttttccagataaaactcaagcaacagcagcaaggcatgccctatttcccgaacctggacccatccgttcgtaccgaaaactgggacccgtccattatctctgcgttgtccggttcctcctcggtgatgcccacctcgcggcaccatcgcacggcggcaagcggtagaaaatgtgatgtgccaacaatggtcggggaattttttcttggcagatttcgatccgcctctgtcttccgcgaccggttgcgacaccaccccactgatg

SEQ ID NO: 102788 - DNA, 870 bp, Heterodera glycines
tgggacccaagacgtccgcctcaatgaatgaatggaatttggattttgataaaatttgttgttttaattttttgaattgataagggttaaatcccgttacctaaattgtttgaaaattattaaaattttaagaaattagatgctaaacctaacctttgacaaagattatgaaaaaatgaaaagaaatgacgaaatttttggaatgttccttctttttattatctatggattttttttcatgtgcattattttggtgctagtaagatattgccgaatgaattaattggtttttctcttcattttaaaacatttcacgtccccatgccctgcccacttcccgcggaattgatcaaggaaataattgacgctctcccccctccaaaaacacatcggcttttgcgcgtaaattttgttttggcatactttgttaaatgtcggttttattccatgatgagaagattgtttcgcccagagcatatttcaataccaatggcccgaagaaccggaatttatttctttttcgatgtttgtactccccctatttattttccactctaccaataataacatttaaataaaattataattttttatttcttatttgattaatttcgatcaatattttttgataattaaacaaattgtatttttcaaaaaagacctttctcgcagtagcaactcatcggcttttttttactcccttcataaaatgtctcgcttttgccctatcgcccaaatcaaggaatcgggccggcttaacacaccaaaggggaaatttagtgagttccaaacctaccaaattaaataaaaaattttgataatcgttttaggtcttttttacgctctggaaaatgctcgaaactaccaatg

SEQ ID NO: 102789 - DNA, 467 bp, Heterodera glycines
ccattgacaacggcacaattaggacaattagtaccaggggcacttaaacaggcgtgtgactttgtgcacacagttttgatgagtcatcaaattgccggcgcggataattttggcaaaaattggatagttttgtttacattaattaacatgaagttgttgtgagcgtgggaaaacggggcggaaattgtgaatgaagtgttgatattttgggcttctttccattctgaaaaaatggcaccggcaaaattctgtgaatggcatggacaaaaatgttgaggcctccggcataaaaaggtgcgcgcaagaggtaaaaatgggcaaaagtcaaacattggcataacaccgcgcgtataaatagcggataagtgtaaaggaaaagccaccaattacgtcccagttggatcatccccaaaatatcaaaatatccattaatttggttccaaaaatcccattaccacactactatg

SEQ ID NO: 102790 - DNA, 119 bp, Heterodera glycines
actgaagggaaaacacaggggaaaattagggtttttgaggcctcataacttttttatttttcgctataggcacgtaaaattaaaaattcacaataaagtcgaccctgctctatcgaatg

SEQ ID NO: 102791 - DNA, 73 bp, Heterodera glycines
ttttggcccctgttgttttgctcccacagcattttcagctcccatagctattttcgatcagccattacaaatg

SEQ ID NO: 102792 - DNA, 500 bp, Heterodera glycines
tcacattcttagcactggcatgacaaatgcaaaaagtgtgaaaaccccccaaaatcagaggtcagccggggatggatgcgtggagcgtatttatcatttccatcattttggacaggttatttggtgggccaagaatttgcatgggcaaattcgaaattggcgacacggggcagcccccgggggggggggggggggggagggaagctgtgtatgttaactagttttgacaccagaaaagggtccggcacttctttatgactctttttttcattttttctgaacaaacgtttgcgatcattcattttttacaccacattcttggcttatgtaataagacaattgacttttttcgggtgggtttacaaatcttaaatgaaaaaattttataaatttagaaagaaaaagtcattttgcccgaacttttgctggaaatggacaaattttgagggaaaattgaacaacgaaaaagtgaaaggttttatggtgcagatttggcaatg

SEQ ID NO: 102793 - DNA, 270 bp, Heterodera glycines
ttatataaattaattaattcaaattatattacttaacttcaattactataaattccattttttgcataatttcctgattaacatatgatatgacgtcagaaatagttgcaaaatcaaatagaaatttgaaaaatatgacgtcagatcagtgatatgacggaaattgaaattggttccggacaatctattaaatttattaaattggtttaattacccaagtttgaggtccatattcactaaattttctctataaatcgattatcgacaatg

SEQ ID NO: 102794 - DNA, 351 bp, Heterodera glycines
aaaagtgcgatggagaagagtaggaagggaagaggagagacaaggggatgaagagaggaagggagagggggaaggaggtaaaggagagaagggggaacggagggagaataatggaggggagaagggaaagaaagggagggaaggaggggagaagaggagggaaggaggggagaggagagaggagggggagggagacggagggatgggggagaggagtggtgaagttgtgttatcggaaaagaaaaagagaatggaaaataaaaggaagattgattaaatagctatgaaaacgcaacgcctgaggctgtgcaacggtcagcgaaacatgccaatgcgcatggctttattatg

SEQ ID NO: 102795 - DNA, 754 bp, Heterodera glycines
tgtccattttctgtttaatttctctccccactaatgctgttgggcatatatttgtgggcagtgattgtcttcgcacacatattattattaatatttcaaaatatttcattttgttttacttaagtgattgttttatgttattaatttaaaaaatatgatacatacaaatgtagtttgggttcacataggaaaaataataatcaatttttcattatttcaagaaaaaacatgaggcaaagtacaaaatatgttttttaaatcaatgaaatttcgtaaataaaactgtaaaaaatattttgaaacagtgccatttatgaaacccgacaaaactcatggtaacagaaaatgttgttttccgaatgaaatgtttttccctatttttatatgttttcttctagggttaagccccgaaacttggagagagaaaagtcggggaacggggaggaaattccaagataaattttgtcagtgatggctggagaatttaagaatgtcggggagattaccttcgtcaggaagtaaatttttatgaagattcaaaaaaatgtaacagaaaatttttacaacaatatttttgtggctacaaaatggcaaaatttgatgggtttctcgccatttgatagttttttagcaaatatatcctgatttcaacaataaatacatttcataaactattaatccattaacttgagtgctaattaagctgctataagagccataccctttgattgaaagccgctttacccatcgaatg

SEQ ID NO: 102796 - DNA, 638 bp, Heterodera glycines
atcggtcaaaatggatgttggacttgtgatcagcggccctgaaaccccctagaaacatgtttttatgattttttgaaagttgaaaaaattttttaaaaaagggggggtaccatctaaactattccccaaaagggtccccccgtttgtttttactttttgatagaattcaaaatcggtaactttttaactagcgccttaatttttttgaataatgtatttattaagaattaaatattttttttaatcgtttctgctttgctacctaaaattcattactaaaaattgatgatttacctattttggtgcctgtcaatacatagcttttgaattcatattttcgtgcgtttttactagttgtatgattcagtccagagtactgattttttggacaccacccaaaatttatccaaaaatttatttatctcagcaaatttgtgacagtgaccaacgaataatgcttaaagtgataggcaacaaaaatcaattcgaagcattcgtttcgtccaccgaaggggaaaggttcatttctccgaatttccttccatttgtccttttgtaattgtagcaaaagatcgctttttgtgcacttttccgccccttgggcctcctcttgcgcgcagttggacgatttgctgatg

SEQ ID NO: 102797 - DNA, 71 bp, Heterodera glycines
aaaagtgtgtgaaaagttaggcgtagcactgagaagcatttttaattggaaaaaacaaattggcaagaatg

SEQ ID NO: 102798 - DNA, 325 bp, Heterodera glycines
agcagaaatcgggcggccgcatgttgtcaatatttgctgttggatttgcttttttgtgtccgattcgcatggcttttgcttttgtgggatattcctcccccctaaaatgttgtgttgatatttcatctctcatttttcgttttccgttttttacacttccattaatttcgtcttacgacaaaggcttcgaattcttcaatttcgacatttttcactattgttttttacatatatatttatttattctgctaatatcttcatttaatcttcgttttttctattctaccaaatatttcttagtctgttttttcccactttttcaatg

SEQ ID NO: 102799 - DNA, 127 bp, Heterodera glycines
atttaagaagtgggaccgggtgaaacagcgcattcggtcggcactgtcctcacaaaaactgctcgccgcttccgtgcacatcgaaggcgggatggtcgagggccaaatgctgcagcaaaacaccatg

SEQ ID NO: 102800 - DNA, 458 bp, Heterodera glycines
  unsure (1)..(458): unsure at all n locations
gtagaaaattaacgacaaaaattccaaaattacgaatttttanattttaaaaaatgaatnnntagggtccttgctgaattacnagggttatcgtcttaccaagaaaacatggcatntatcaagttcttggtttctgtagccatgaaatacacccttttttcattttcatgttttctgtttattcacgttataatatttggattcattcaaaaaattttaaatttttagaaaatattttaaattattatttttaatttaggggtcaaaatgttgcaaatctgtttcataaaaaataatgaaaaaaagtttaatacaaattttatgccccatttgaaactttttcatcatttgacctattttttacaagtttgggcaattgtttgataatgattaattaattagttaactaattacattttctattacaaaaatttggccaaaaaaaaatgaaaaatatg

SEQ ID NO: 102801 - DNA, 476 bp, Heterodera glycines
tcgcgggaaatgaggcccatccatttttgtagactgacgggaccaaattctctaaggatccgtctaaaattcacaataaataaaaaagggctcacgaatgtcttcaatcaattttaataaatacatctgttgtgtccccgggtttaaggcttaagccatttcaaattaccttttttagagagaggaatttattgaaggaaaagcattaacaaaatatttatgtattctaaaccgggaataagtttgatcaacaacaacctcagagcattttgggtaggtcagtgcaattggttatttgggaaaggatcgatgcccaaaggcaaagaacagcactgaacagactgacccactgcatacatctcgcagcccccgagggggaaattgggaggacttatatactggcacaatgggggtggactctggatagaatgaggagtatgacggcataaacacaaagggaataagagaaatggatg

SEQ ID NO: 102802 - DNA, 1003 bp, Heterodera glycines
taaaacaataaaaaaatataaagttgggagtttaattttatctgtactgcttggtcttattgtattagtttttgttaaaataaaaaataatttgtttgctcacaatttgcaaccggcaaaaaagaaaaaaaagacctgatcaaaataaatggtcaattttgaagtaattataaaagcattttatgtaataaaatgattaaaaaaactataaaattaaaataattttacaattcccacttctttctccagcactttcactgttttttgtcattgtcaactttgacactactgaattattgaatttttacgccactttaactcttaggcaattaaatcttgccttttttgatgttttgtttaataaatgataactttggttttttaaatactattcagaaaattttttcataaatattccattaaataaatctctaaaaaatccccccgtcttcatttattatcggaaaaatcaaaatttaatttccccattagtaaatttgcttcgactaattcccatttttttttttttgcaatttttaaatttaactctggcttttgacgaatatttccacattttacccgccagcgaaaaacgaacggagcggcaaaaccctcgccccgtcaaaccaatgccccagggcaaaagtgaaaggggcagcgaaccgccgccccgccagcgcaaaaagaaaaatcacgaaaaaatgttataatattttaaaaactgggttttatgatattaaatattaaatcattgcatcgcccaatgcactgaaacagcaaatttagtagcaaatgcataaaaaattacaaaattcaaccattaaaatttggattggtgggggtattcaatttaagttaaaaatttattttctgtaaattcttggaaaagcaaaaaagtttttgagaacttggggggaggaggtccagcggttccgataggcgccgccgtagaaaattttgaatatttaagggtgatttgttaacagattttcaccaaaaaatg

SEQ ID NO: 102803 - DNA, 66 bp, Heterodera glycines
ccgcccggcggctacgggcccccgggcgagcaggggccttccagagagccgggatggcatggaatg

SEQ ID NO: 102804 - DNA, 799 bp, Heterodera glycines
atcagtgccaaaaagtgttgtaccgtaccttccttttattaccgtgtgcaaacaacaaaaagtaaaaaataaaaaatatttaaaaaaaataataaacaataaattcacaaaaggatttctacgacacaagttgaagcacctgtgcaagcggtactttgaggtgagacggactttttgttaggtcgagaggggtgccatgccattcttggccatcatttattaattcggcgaggcgagtggattcgggctttcaattaggattaaccaaaaattcgatttgctcttaaatttcggctttatttcactcaggcttcattaaatgagctattcagatataaacttcaaaatttttcaaaaaaaattttttaaagttttttttaaaagaattatatttttggaacaacttagtaagtaattcatttcatcataaaattgaaaaatcgcttaaaattttccaaaattttcgaaagagatattttcaaaggaaaatgtataaaaatgaataatttttgactggattggatcataaactggtcaaaaacggtcaaaaatagccggttccgggccagttaggcattttcaaaaacgaccggtttctgggcccggcctctcaaaaactgttcaaaccggatttttcgaaaaatcaccggtttcggttcagattttaaaaatcattgattttgccaaaaaatgtcaaaatttgattgaaatctttgtaccagttttttcatcttcatccttttaattttattgcttttccatccttttaaagtaccgtcgccactgtctggtcacaatg

SEQ ID NO: 102805 - DNA, 200 bp, Heterodera glycines
aattctaaaatgtataggcatttgttattttaagacaattgaacccaatggcaatataaaaaatggttttctccaagagaatgatgtgaccttacagagacagcaacagcaaatggccgtcagttctccctctggtgggttcagcaattttttacaatagtctaagaaatgttcagtgagttcaactgtagattgtaatg

SEQ ID NO: 102806 - DNA, 951 bp, Heterodera glycines
atttttttcaaataacaaactacagacaccagttacatttaaaaaaatatatatttttaaacccgagcccatttattagttacgaagaaaaaatgtttttccaattttaattgaccgtcgttgacacaaatttatgtacaaaatatttattttgctgataaaatggccatttttgtaaacgcgtcacttttttaaaatcatttttatcaaagacatttttccattgactaatttggtacagataaattacataattttccaaaagataaaaatattattgggtaattttctaaaatttctaccaaatagccaaaaaaaaaatggaagaaaaagtccacaaaatgtagagcccggaacttggatttttggtactgattgtgatttcgggatgttcgcacaaactcaaaaatgttcattaaaccgttacaaaacagagagatgaaccaaaaaatggagagtgcacagaaaaatacaccgctcattttggcgtactattttttttctctgctaacagagaaaacacgaatttttgtacttcaccacattaacaaatttttttctactttttttggtattaaacaaaagcctaatatgtcctgggaattcaaaaatataattggttctattgcactttatgagtccaattaattgacaatacttgatttttatacaataactttgttcatgttcgaacaaaccttctatttttggtatcattcgaacgcacacgaaaattctaatacatatgtatttaaagaaagttacaaatgttaataatcaaaaattaatcaattaatcaaatctttgggtggtgttcaaattttgcacatttaaatttccgtttatttcatcaaaatttgtccaaattttcctcttttttagcaattttttttttactattggtgctattttggtgctgtttctgtgctggctggcgacgacttaaaaatg

SEQ ID NO: 102807 - DNA, 687 bp, Heterodera glycines
tagaacgtgcatattcataaattctctatacttatgaaatgacatattcataagcatagaaaatttatatccataactacacccattcatagagctgggaatattcataaactgcattttttatgttaagccatacgtattgcattgttggctattgttgaggtgtgcgtgcgctgccccacccttaaatttgtatatgttcataaatatatatacacatgagatcgcatatgaatagaaaatttgtatacataactcataacactcatagggatgggcatgcatattcacaaaaaataaattattgattttaaaatattagagaatacgtattttattgttggccattagcgtgcgtgcgctgcaatcattataaaagcggactggtgggatatgcatataaatgtgcaatacgcaagtaatttatttatttatgaacatccttatttaagatgataacgcataaaaatatagcatatacctatctacctattcataaaaaggcatacacacagaaaatccacgtagcttatgattggcaaaattgggcaagcgcgctctttttataaaagcatagagcgagtggggaagaatcacattaaaacaaatacaacaaaatttggcatttttcttttttaaaaaattatagttcggctgaaaattaatgagtcattgggccccagcatg

SEQ ID NO: 102808 - DNA, 404 bp, Heterodera glycines
tcctacaatattttttacatgggtaggtgtaccagaaaaaatttcctaggggactgaaaaaattttcgcggaaacgaatgttatggatggaaagaacagcacaaaattttgctacagaatgcaaaaggttccatgtctctaccactttttgccatagagagaaacaaagtctgaaattcgagaatcccggaaagtacagtataccaaggcaaaaaggcttaaaccccgaaaaattcgagaaatttgtctatgcaaagccaactgtctcgaacaccactgaatttttgaaaacttttacatattaaaattgcattcatcaaaattttccatgcttaagattgttgatcaacaacatttttggcattttgttttaaaatttgtacggcataaaaccggtaaaaatg

SEQ ID NO: 102809 - DNA, 205 bp, Heterodera glycines
  unsure (1)..(205): unsure at all n locations
ataatgagttttgaatctatttaatcatttntttgaaaaaaaacatcggtcacttgaaataataaattctaaaattttgtccaggaaaatccaggtttttcgtgttttgcctggacctggattttttttcacatttgacctggatttcctggacaaaaatccaggaaaatccaggtccaggaaaaatccaggttgccgaaaaatg

SEQ ID NO: 102810 - DNA, 71 bp, Heterodera glycines
tttggatggcatggtgaagtgaattttctaaaaacaatatgcaaatgcaattgcatttttagtttgctatg

SEQ ID NO: 102811 - DNA, 228 bp, Heterodera glycines
tttttttaaactattataaattggggaggaggcggcatgacctggtaaaagtcccggcttgggctttggttcgactttttacgaaaattgaactgaatttcgagactccctaataccccgggatattgtgcctttgttcaatttcaagtttaactaatttatgatcaatttggaacaattaccagctgatcacagaagaagcttggttaaatatttgccctccccatg

SEQ ID NO: 102812 - DNA, 80 bp, Heterodera glycines
aattcaaataattaaaattaaacaaccaaaaagtgaattgaattttaaacattttttgttcatttaaagattacaacatg

SEQ ID NO: 102813 - DNA, 1003 bp, Heterodera glycines
aaatagtaaatatgtctttttaatgctttctggcgctgttaaatgcaaccattttggatcagcttaatccacgattaaaaaattaatttgtgcaagagacgacaagaaaaggggaaatccttcagcctcaattcgatcagtttaaccgtttcaactccgatcagagattgattaaataaaattcatttcgtcaccttttttcgacattttcattaattgatatatttgctttaaattttaaattgtgcttaaaatcttaaaaatttattttgtccttatttgaaagaaatgttctctgattttgagataatgactgaccaaatttgtttttttttcataatcttttcagggtatttggactaatttgttaccaaatttagtcttttaatttatcgctaaaattctttaaataatcatgggaggcgaaaataccaaattttatactatatttaatttacccaaacgctttaaagctattttgccgaatattcttggttttttttgccattatcttttgatttcaaagatttttcgatgctatccctattttcatgtttacgttttttaatgtcaaataaaaatttgtaattaaaaaagatttaaaatttacaataatacaaaaacgtaataaaaacattggaaagagaaaattcaatcaaaatgtttctgttcttttccattttgttgggtcatcgttttgccgttaattgttttatgcccctctcattaatattaattattattagtgacctatcagggacagcaaaaggttcatttctccttcattttttctttcttaattctttttcagataaattaaaaaaagaagtaaatagttaagtatttacgcgtcccatggtattttttcgtcccatggcataactttttatataattttcatgaaaaaagccctttcagctgtaaaagtgccgaaactgtcttaataatttgcctcaacaaatgttagaaattattcgaattcggagcaaaattggagagaatg

SEQ ID NO: 102814 - DNA, 54 bp, Heterodera glycines
actctgttaacaagctaggcgctgttagcaatatatttgtgaacgacaaaaatg

SEQ ID NO: 102815 - DNA, 186 bp, Heterodera glycines
aacattaaaaaatgaaaatatataataaagcttttatggctaaaaataaaatgactaataattatacaaaaattggaatgacataaaaattggaattgctcagtgggtaaagatttttttaaaagtctcctttgggttttattttatacatttttgaatttttaatatttaaggcacaatgacatg

SEQ ID NO: 102816 - DNA, 569 bp, Heterodera glycines
tctctttgcttcttcttttctcccccccccccccctaacttttggcctcacttaaatgtgattttcttctccatccaatttttgtttgctttttgtgctcttttcgttccaatttccttcttccttccgttcaccaaatggcctcattttgcgctgattcgatgcgcaaacacttttcaaaagtgccgttcgtccgtctgtgccttttcactgtcttttttctttggctgtgcctttatttgcatatttttttgtctaatttcaccaaattttacttcaatttttgatcgttaaccgatttaaacattaattaataaaaatttatttttattctgtattgtgatttcaataatgctttattgtctcttggcacttctcaattgctttttcacatttcttcttgtgccaaatgcatattcggatcgattaccaaagtaaataaaataaaacaaatgtaaattaattttgttttcaatttaatcaatgatagggcaacgggtaaatttgttctgttcaccgactttcacattgacaatcattatgacccgcgaggcgacccgaccaaaatg

SEQ ID NO: 102817 - DNA, 448 bp, Heterodera glycines
ttcttctgccttcctttcttcgacgcaaaagggacaaactcaaactgtgagaggggaggggggggcaaaagtgacggacgaaatgaacggaaattggagggaaagaggggataagagaggggggagagagaggaagagagagaagggaacaatcggagtcatggcaaaattaaagaaaccattttgatgccaaacgaaaggggacgaaaagagaaacaaaggaaataaaaaaggggaatttacaaacaaaagttattgcgatgagatgcaatcgctcaacaattgttcttttttgccttttttaatcattttctccccctttttcacctcataatttgtcctctccgtttcctccgatgtctccgaatcgaaatccatcgaaattgtccgtgaagaattgccgccaaaggttctcttccgcgcaagcatttgcctgacggcacgaatg

SEQ ID NO: 102818 - DNA, 171 bp, Heterodera glycines
atgtgaatacgggtagcatcggattctccggttctccttcaatcgcttcaattgttgttgctcttttgcttctgtcgctgttgtcggaccattttgtgctgtttacggtgcagcgggtacggtggaggcgacggaaacggtgccagcggtgggcccgcggcggcgaccatg

SEQ ID NO: 102819 - DNA, 79 bp, Heterodera glycines
tttggttttggtaattactttaatatattaattttataattgaataaattatttggcaggtgcaatttacacttcaatg

SEQ ID NO: 102820 - DNA, 288 bp, Heterodera glycines
tgatgttggaggagattgagtgtattaattaggcccgtacccagaaaatgttcacaaaatctaataattttaatgaggaagggagaaaacttaaatcgggtcgtgccaaatcgtccgccccttttttggtattcccttagaaagcacccatccgaccgccgtttggcatcccttgattaaatttctaaactttcccgataatttattttctgggtgcaggcattattagattttgcttacttcttccgctttccaaattttgtcaattcataagtcatttgcatcatg

SEQ ID NO: 102821 - DNA, 167 bp, Heterodera glycines
taataatgcaatagtcatcttttttaatggaaccaaaacggccgcgccaattccttcgactcatcctttttaaaaatttattgtcataaacaaaataagtatcttacagagacaatttatttaatctttttgaaagtatcttaaaaaatatttttgtgcaaacaatg

SEQ ID NO: 102822 - DNA, 325 bp, Heterodera glycines
aaaaaatgtacgctcaagtgcaagccttttgactaaacattacaaggattgaattatgttattgtaaattttaaatagttaattgttacacgttacatgtcaggcctctgaattctataaaagtgcatcaagtattgcaaaaagtgttcattttttattatgcaattcagttcttacatgttacatgttacatgttagtttactcatttctttttctaatcaaattgtatacgtacacaattattaaaatatgtacgattccttcagggtattaaacaaaaaaaaataaaatttgctatccgagggccggccagccagccatatg

SEQ ID NO: 102823 - DNA, 368 bp, Heterodera glycines
ttccattctttcgttgttttatgtcattgcctttccaatgccattaaaaaaaacattttaataatatgccaagaaagaaattgcttctttttttgccaaataaataaaaatgatgatttttaagtatttatgtgcaaccaatttgcaaccaaccaacaactaatatttctaataaatgcataaaaatgaattttgagcacaactgctgagtgagagtcacctttgactcacaaaactcattaatgttctctgtccaatcaaattgccttaattagttccgataattgtccgtctgcccatgggaattttcttataaaagggtagtgaaatttcgacaaatatcaaattcaccttctaataacaaaatg

SEQ ID NO: 102824 - DNA, 266 bp, Heterodera glycines
atccggcaaattccggaagaaatggcaggtggagttggtgtgcagggcacgaaccagtgtgccggtgccgtcatcagcgatggaaaaaagacgaagccttgaggaagcaaagcaggagtaaagctaatgcattgccaaacaaattaaaagcccaaggcatgtgaatttcgtatcgccaaatataccaaaattgtgccaattcccgagaattggaaccgtaaaaattaccgaaattgtaccgattcccgaaattgatataaaatatg

SEQ ID NO: 102825 - DNA, 1003 bp, Heterodera glycines
  unsure (1)..(1003): unsure at all n locations
gcgcatacaaaaattgaactcggatttgcacgcacagcccagngaaatgactaaggcatacctaattgtcaaaataaatgaagaaagaaaaaattanacaaatatttggatgagtaaaagaacaattgaaagatggccacggaaaattgacaccaatagatttcattaatttacttttttcttaattatttatttttttgaatatagacaagacgaaaaaccttcaagtttaaaaatgacctaaataggcttaaaagcaccctttttactatctcttttttgaaaaaaacgatttttaggggtatattttcaaaaaaaattttaaatttttcatatgaaatttctatcacttctcaaaaatcctaaaaatatgtacaaaaaattgtgaaattttggggttttttttggggacatttaatgaaaatttccttaaaaaatcctcaaaaatttcaaaatatgttcgaaaaaatgcgaaaaagtccaaaatatgtataaaaatatgtacattatatgtaatatgtagaaaaatcccgaaatatgtaaaaatatgtaaataaaagtccaacttttgttcgcaaacacaaaaaagaaagtgtttttcctactaattaggctatggacaggaaaaaaacaagtatttacataaaaaagaatccctggtaataagtatggatttttaattgaatctatctgttgattagaaaaacaattcagaaaagggaaaattatttatttattttttaaatttattaattggtttacttgttttcatttttattgcgcagtttgtcatacttgattttttcatgtgaaaaataccttttttttccttcaccggacttcctgtttacaaaatttaaaatttccacgtatttccggcaaaaatatttaatggaaaagttgcatataaaaacggcaaaaattttcataaaactcatcatcaaaaattcattcaaccatagaatttattcatttcctaatataagtttttttgtacaaaatg

SEQ ID NO: 102826 - DNA, 150 bp, Heterodera glycines
ttgtagcagaacaaatgagacatagctgacaaattgccggggcttttatactccccggaaaattaggccacgcccactttttaaagctatttaagccaagattttctcgcacaatcaaatcagtcttgcaaaatttcatcaacaacaatg

SEQ ID NO: 102827 - DNA, 163 bp, Heterodera glycines
gttctgattaataaataaataataaacttatttgcgcttggagcccaaaattgactcgccgtgttaatcgaaatttttcttttttctgattttttcttccctattgttttgtgtaaatgaattctctggtcgactatttgctcacaaagctgcaacagcaatg

SEQ ID NO: 102828 - DNA, 113 bp, Heterodera glycines
taataaagtgagtaaagcagtgaaaatatgagcgaatattaagctatttataagatttcttgttgtatttctgtgttaaacaaataataaactgtataaaaacggaaatcatg

SEQ ID NO: 102829 - DNA, 91 bp, Heterodera glycines
aataatgctacattcatttattaattggtgcgttttagcactttgtatttttttcagtttattttaataaacttttttgtctgcagcaatg

SEQ ID NO: 102830 - DNA, 1003 bp, Heterodera glycines
ggttttccggtttttggcaccctatgtttgaattccattgttttttgttgtccaataaatgtgtattcgttcagttctgactcttccgattctatgcaccattttcgtattcggagagcatcttttaatgagcaaaacaagtaaaatgcatttttaaaaagggaaaaaacaataaaacatttgttgctttgacagcgtttccaaattggaagaaattgtgcctgcctcgctatggcctgacccacggtttttccacggcttttccttttttcgacgtcaacgcgacccgatgttgcccagaggctattttcagaaagtaattgttttttttatcaatcacaatattctgccatatccctctcccaagagcattgttctcgtcagtgttctaccattggttacactttttcaacgtgttctttacgaggtggcattggcatttttcacaagtggcgaaactgcaattgaaacaggtctcttctatctctctctctttttgtgatcagcccgtgtaacataaaaaaacaaaaaattagagcgggaacccgaaggcatttttctaatcttcggccctttaaaacctgtatccgtgactaccgataaaggccgcctcgaagaagtttttttgtgttggaaatttatccaaatttccaaaaaatgcaattcctactccgctccctaaataagacgggcgtctgtgattaatacatttttgtcaaaattaattcattaatttaaatatttctgtcacagtgtgtttcaaattgaccggcattggcctccgcctacaaaagttggatgtccactttcattgccgttgtttgatctccattttcattatacaattcctgacattaggaattccgacggtcatggatttttgtctaaggtccgaaatacgaaaagaataccgtagcaggggcttttcaaccagagaaaatttttttaaaagttttcatggtttttaaacagttattacttgctccgttatgggtaaagaatg

SEQ ID NO: 102831 - DNA, 308 bp, Heterodera glycines
agaatgaatgaatgatgtgtgatgatcattgtgttggggagcgggaaaaattggtgatggtgtttattttaaaaattgaaataaaaagttttgggaaaattggaaaataattttgtttgctcatccgctgatcggtcagacgggggctcatttatgagcgcccatcccgcccgctttgctgttaacattataaaagtgggcgtggcgtggcaccacacaacttttgtggcccaactttttgcgtataaatacgggcgcatcgggtggcacatttttcatttggcatcccattttcactcattcccatg

SEQ ID NO: 102832 - DNA, 339 bp, Heterodera glycines
tttttatcgggttattattgccgttgaacattttgtttgggtatcttaattttgttaacctttaattggagaaaagacaattaacaataattagttaaattaacaattaatggaaaaagcatttaaatgaaaaattatttttgcatttagaagatttattttaaaaatgtggaactgtttctggccttttccgctctaaatttttaagaaaacttattttattttgtaattaaaatgtttagaaaagaattgaaaacaatgttaattttattatttaaatttcatttattatacgtaataaatgagattctaaattatccataacgcaagtttaaaatg

SEQ ID NO: 102833 - DNA, 59 bp, Heterodera glycines
  unsure (1)..(59): unsure at all n locations
ggtaaaagataattaatttaaaataacnttaagnaaataactttatttttanaactatg

SEQ ID NO: 102834 - DNA, 807 bp, Heterodera glycines
ctttttagtgcctattttacgggttttttgagcctaaagcctacctattttggcagttttagagccaaaaaatattatccctactctattattgctacttataagaatgatttaaccaggtacaatataatcgtcaataaataattactaattaccttgcgaattaattgtccaccattattcattgagcatttcgcaaaacaatgttcagccaatcaagacgtattgttttattggttttgatcaacatatgcttttctggtgaagacaatgtgaatgcaatgcaatattggaataataacaattataatcataattataccaattttaattatgctaatgattctaatgagttgagcaacaatactgaatcaatatcatcacaaattttcatgggaaacattcaaatacgaaaaataaactctaaaaatatatggaaatacgaaccagctaaaaaagtggtaaatgaaattactgaattaaaataacttttaatttaatactttaaatcttgattttttttcattatcaattttagtgtattgaacttttttgtggataaaatcatataaacaatggaatttttactgatcaagaaggtaaatttgaaaaaatttggtctgatgaacaaattgaaaaacttgaaaagtgcaaatttaatattcacattggattctacaaacaaagagtaagaataatgcaacaaatttaaaataataattattattagttatttagttaaatgttttcaatctttcaaataatgaaaaaacaacaaaaaattttaaggaaacgagtttacaaatg

SEQ ID NO: 102835 - DNA, 691 bp, Heterodera glycines
  unsure (1)..(691): unsure at all n locations
atatatttacttaatagttttttgtaaatcaatatnnttcatttaatattttaaatgattaaataattaaattttaaaaattttttttcacagaactcatcgatttatttgttgtaaattttcggatttttntaaagataaaatttatttaacaccaaaatcannaatttattaactattttatttaaaaattttgctcgcgccgatttcgaaatttttttgccgatcaaataaacattttcggattatttcgatttcaatttcatcaacgcatcaccgctcacaaaatttatgcaaattcattaaatatgtgtggatgatcgaaaattttttacacaatctttaaatttatcatcgtaaaaacatggatttgcatattatttaatggataatgaataatgataaatacacatttatttttgcgtataataacaacaccaacaacaaattggcgtcaaagttgaatcaacagcaaggctaaattcatatattaaaaggcaaaattttttggtgtcatttcgcattattttttcaaaatttggaaaaatatatcttattttcggactatataattatttgcaagtttttgggattattcacgctggtcccgccatcaaaattttgattctcaattccgcagcgagatcagaaaatttaaaatttccagtctctaattaataccactaccatg

SEQ ID NO: 102836 - DNA, 66 bp, Heterodera glycines
ctatctcaaataattagcatttttacgctgaagaatttgctgagtgtcgtgccaacgaaacgaatg

SEQ ID NO: 102837 - DNA, 603 bp, Heterodera glycines
  unsure (1)..(603): unsure at all n locations
cgagactctgaaatatttttgcgatatcaaagagtctnggttcaagaaaattatcataaagatagaacganaattntaaggcacaataaaacaagaaaaaagggtgcagaaaatgaaatttttttgaaaatttgaaaaataaataacaaggaaaaaagagggaagaagatataaatgcttcatgaaaagtatgaagaaaatgaaaaataaatatatgatttgattaggtaaaatagggtatatatttcaatgtgcaaaagtcatatttattgtaattattaattattctctacataccttgtatgtattattgtatttgacacttacatacagcaaggaacttagaaaaactcgcaaaattaatttggcaatatttaaaaattcgaaatgccaaaaatggcggaatcggggaaagcttcctcgagtttaatggctgaagaatttcttttgacataacaaatgaatttttttgtgaatatttgcgaatttccctgtgattctacagtatcgacccattaaagagggggtgtgatggtacgtacggtacatattgtgcagagagtgcgaaagcagaaaaaatggaatgaactataattgagtatg

SEQ ID NO: 102838 - DNA, 409 bp, Heterodera glycines
gatgccgccggactctacaaaagacatttaccggtgtaaatttaaaattagcgcgcaaaaatttacgccaattacgctatttggcgttatgagaattttgtctaacactgggcttgacccatagtgagaaagttataaacgaaaatgatcagcaattacttatgtgattggtaattgcctaaacgctgcgattttatatatttcaacttctttagactttgagctgctctaaaaccccggataacaaattttcatggttttttatcacaaaaaaattttgcaaaacaaaagggccctcccttattgtttttaataaaattcaaaaggttcttctttaaagtagcgcccaattttcataccaatttaaatactaagtattatttatttgtatttatttttaaaggaaatg

SEQ ID NO: 102839 - DNA, 168 bp, Heterodera glycines
tttttgtcatgaacccgctccattaaatccttcccaccccctctaaatcggcctgacaacccgcttcagtttctgcaaaatcttttagcccaatctgttacagaatcggagcttttcatatttaattattcaggtcttaaaatctgagaattaaaattttgtggaatg

SEQ ID NO: 102840 - DNA, 310 bp, Heterodera glycines
tttttcgtttctctgaatatagaaaattccatttttcacctcaaaattaaaaaaaaaaaccccaaaaattcactaaaaattataccgaagcaatcgcttcaaaacaaaaatttgcagttcagttttaggcaaaattttttgttttgatttcaatggacggaattttttgtttcgcaatgccttcgggcgacaactttttgctcttttgcgcgatttgccgccaattgcccacggcacggcgctccgttgagggtgtccatttcatttttcatttttttcacccatttcaatgccgtcgcctctcaaaatg

SEQ ID NO: 102841 - DNA, 316 bp, Heterodera glycines
ttttatcatattaaccgccgcaaaactcctttcaaattcatccgatctccgcgctgtattattttatttatttaagttatatttcttgatttttatattaaaacccaatagaaatggaattttaattaatgagaatttttattaatattatttgcaattgagtaggcttttcttatttttcgttaaatcaatagaattatggttatctgccagcattttaatcagaaaattaattttttttcatttatatgtccatgaaaatatattgcgtttaaattaaaaaaaaccaaaaacaattttgagacgataaaaaatg

SEQ ID NO: 102842 - DNA, 915 bp, Heterodera glycines
tttttttccaaaaaatttccagaattttcagtgtagttggcgtcccgatcgctatgaaggagtgatctgatcaaaattgctgttaaagacttttttgatcagcatcaacagttagcatggcagggattttttcagaatttttggcccacaagatattgattttattaaagaactaaaaagtgagtctaaacatatgactaccaaaaatgggggtgaagttgacttttgttttgtaattattagcgatgagaagaaattaggctgtaaacatacgaccatgactgtataaagcaattacaaatttatgttaaattttaaattgacctcgtggtggtgaacctgcaccgtttgtaacattggcaaaaatgatcacaattattaacgaaattattaaaatttgcatttttatcattttaatttgtttttttgagagttaattataattatgaaaaatatttcttattcgacaaaataaatagcgatttttttttttgcatttccgttgtttattattgcatcattaaaattattttacgttgccattgcaaaaatcaataaacaattcatgatttaaaaataaggaatattattttttgcaaattttttttatatgtaaacaaatgatgaatattttaaaatctttgggattgataattctttggatatttccatttttttatgagctcctagggacttgaaaagtaaaaaaaaaacttagcttaaaattatgtctatcaaattgagaaattagcgaaaattatcgaatttgtttaacgaaattggattgtttttaacttggtttgaagctgctaggatggatttcggtactcattaagtttgtatcccccttttgggtcaaattttttcaaaatttttttttcttttttattgtcgcaattgctttttagattgatg

SEQ ID NO: 102843 - DNA, 260 bp, Heterodera glycines
ctcatataaaaatggcgttaaaacaatttccttaacattgaaatgcgacgcaaaagaatacatataaaagagaggtttttattcagtccttaattcattcgcattattaaaaattttttgtccaattacaattaaaatgacaacatttattctatttaaatttttgtcaaattatattagctctaccgaacacatatatacatattatacaataatccatctctgcaaacacattgtttcaatggcccgcagatcgaatg

SEQ ID NO: 102844 - DNA, 760 bp, Heterodera glycines
aacaattaaaaaaaacatttcctctcgccatgtctcaaattctcttaaacaatttcattttttggccgaaacgccgaaaattcccggctcaattaatcaaagaatttaaaatcgcagccttatcggtgaacaaatccaatcgcaaacaaattcagttcgctttggaccacaaattgggatcttcccacggcgcctcgcgcatcattcggcttactcacagtcagccccattgggttcgactcgcgcaagacgcgttccgggaatgggacggactgcacaaattggatggcggggaggcgctgtacatgtacagaaaatagaattcataaattacccataatatttatgcataaatatttagtttaccaaattatttgtgcaactaaaacggagaaattatcagattttgagcaaagccaagaaatgctaaattttaaaaacgtaaaaataatttaaattttgataatccaaaatattttggtaatttaaattaaaatatttcaaaattgtttaaaaaaaggaaattgtccctcctcttaatatttaaaaatttgatgctctttttgaaaaaaggaagaacggcttgttgacattggacccggattggtctcagactcagctgcgcgcttcggtccttcgtcagttcggtgtgccacaccaagtgttccgtgggggcagtgccattcagcgacgcttcccgcatttgcacaattatgacgaacgatggtcggcactgtacgagcctggtgccggcacaatg

SEQ ID NO: 102845 - DNA, 54 bp, Heterodera glycines
acgattgcttcttgcccatttttgatgactcacccttttttggtattaaaaatg

SEQ ID NO: 102846 - DNA, 268 bp, Heterodera glycines
cctaaaaaagaacaataagaatttgattggtgctaaaacattgggtgtactgctcgaattccaaggctgagcaaagccaagtcaaagtaatccaaaagttattaacaggtaaagaaattttatccatcttgtcatggaaaaaattcgacaaatttgcttggccccgccctgtcttcccctattttattttgcattttccccgtcccatggcacttacttgaccaccttgacctgcgtgttgcaccaattctccgcaatcggcaacatg

SEQ ID NO: 102847 - DNA, 626 bp, Heterodera glycines
atcagacaaacattggaaaccgacgaagagaaatgccaaagtaaaaaagacgaaagaaattgtatgtaaattatttttatggcaccaaattaaaaatttcgaacatttcatgtccaatttccttcccttctctctgtctctctttgcttttttcatttgcccttcggcgtgctctttcctttttgtatttctttgctcatttggacaggttttatctgcatttagctgcttcaccttttgtggtggatgaatcatcgtccattgcattttaatgctcagagaaagagagaggaaaaaagagagagagagagagacattttgggaagagtgagagagtctttccttggaggaggggggggggcactttcctttaggggtgactaattgttgtaggccgcctaatgaatgcatttctgtgcgcaaaagccactcatccgcggtcctttgaaagcaacaaccggtcgtttgatcgttctttcgatttgcttctcccattgatcgtcgcaaaagtccgtttccctccaaaagctttgtataagccaaaaatataaaagacgagcgatcaaagccaaatcatttgtttaacaaattcaaaattgacttttgaactgccaatctccaaaatg

SEQ ID NO: 102848 - DNA, 453 bp, Heterodera glycines
cagggatgacacggaattccgatttccgtcatttttggggtcggaattccgatttccgacgtttttgggcctcggaatgccatccctgatagtgatgttcttgagtgggagaggaagcggttctctgctgcactttatgagtagtctaaatgcattttttgagtccaatcaattaaccatacctggttttttatacaataatttttgttcatgttcgaataaaccctttttttgttaacaattcgaaaagcataaagcctaaagaagctaaaataccgtatataaaatttcagcgtatgataattgccaaaaaagatatgattaaattaattgtttgtaacttttttttaaacatagatattctcttatttttcatatttctcatatgatttccttattcatactttgtgctttcgaatgacaccaaaaaacataggattttgttcaaacatg

SEQ ID NO: 102849 - DNA, 145 bp, Heterodera glycines
aaatttggataaattagcgggaaacaaaaaggagcaaatgaaaagtgatcagagaagaggcattgagctgatcagtaaacaaattcatagcagaaaatttggcagagcaatcattggaggaaaagtaaaaaattgggccaaaatg

SEQ ID NO: 102850 - DNA, 230 bp, Heterodera glycines
tttcgccatcaaattcttttcctttattcgtccaatttggctgagaatctcgaaaaaactgatcaatcgaatccctattcaaaaaccattctcccaacaaaattcgtctttttcaaaaatttcaaactagtcctttccctcaaaacacgcggcggaaagtcccagtggtgatgcgacatttgcagcgctggcatttgcggcgccgacacttgcggcgcccagtcaaaatg

SEQ ID NO: 102851 - DNA, 107 bp, Heterodera glycines
tttacggaacaatgaaaaaataggtggacaaggacaatgttccgatcagttctgtgcttgcactcggtgctgtccaccaatgtttgatcaaacagcgcctccgaatg

SEQ ID NO: 102852 - DNA, 188 bp, Heterodera glycines
agaagaatgatgatgacggcaagctcatgataaacgatatccttgttgaatttagcatagaaaaatatgttgtggagcgcaatttgcacttttcatagcagacaagaaggcattttgaaattgcccaatttattgacacatgcaattacaactatatatttttgtttctttttaaccacaaagcaatg

SEQ ID NO: 102853 - DNA, 62 bp, Heterodera glycines
cctttaaaatatagaatttttctccctatgaaagttaaaataaaataatttaaatttgcatg

SEQ ID NO: 102854 - DNA, 81 bp, Heterodera glycines
aaattaaaaacattaagttgcaaacggacgcgaacatttccaatttcgttggagaaaataacagacataacatattggatg

SEQ ID NO: 102855 - DNA, 355 bp, Heterodera glycines
ttttttattattttattgttatttgactcttcgtaaataaattattttatttgttggtctttctcactcggacaaaagacacaacaaatttggcgcagtcagcagtcgtcttcaaccaaacagaagaccccggactgcacagcaacaaaaccaatagaccctaggcgggtgaggtctgcaaattctgcagtttttcgtcatcaacaaaaccaatagtccctaggcgggtgaggtctgcacatattgcagttaattcgccgaaaaaccaaaagacctgagaaaggttgcggttccgcaatacgcggtttttcgattttggacactcaaattcggcaccggcaaacacttcggcatg

SEQ ID NO: 102856 - DNA, 270 bp, Heterodera glycines
tgtacgacgcgtccaaccccacccaaactaaataaataataggcaaacattaacaactatgataccgtatcgggtgttcaataagccaacggctacaaacttctctgaaaaagcaattccaatcaatcagaactctctcagacaatcgagtgatctgtatttgtgtgtgaattgggagaccttaataggttattacagccttattttgcattaagctcaacttagtgcccaacaatatcccaagagtagcccctttctaagttggaaatg

SEQ ID NO: 102857 - DNA, 770 bp, Heterodera glycines
aagagaaattaggagtttttggagtccgcgttgggaaaatttttaggattttaatgaattttgttaagaaattttgttaaaattcaataatttttctcttctcccacctcccccccccaatggtcgtacttaacagtgtaaaaatttctcggtttccgaaactaaaaaaccgagacctagaagttaggtacagtaatctgatttaagtattcttaccaaaattattaaattcaattaaaatattaaaaaaacactaaataaatgtattaaaaatgatattgtttggtaatttagacttaaaagcgattttaaaactttaatattttccgctttttaaaataattttaatatttaatagactttttttaatcataaaatgctggcctgtcatttttatgttatttttgactaatatacaattttattatttgtttgccaatcagtcatatcggagaaaaacatttatttcttcatttttccactttttcagttttttcttccatacagaatttttgttactaatggcccttcaatgcttttatttgtcaatcagtcacattcgtcgaaacatttacgttgccattttcacgcatattaattatttcacaaattaatgtgttactaatggcatgggtgtgagagcaaaagccaaaacagccctttaaaaagcgcacaaattggagcaccaaatcattcattccgctcaaaaattaccaatttcctttccacaaaattacccaattctcattaacaaacctacgaaaaaaatg

SEQ ID NO: 102858 - DNA, 350 bp, Heterodera glycines
aaataaccattttaaaaattttatttacatatttggtacatatttcgggatttttttttacatatttatgtacatattttgaccactttttgtacatatttttgacatccctaatgattaaaaggaaattttccaaacttttttttttgctgaaaaatattaaatattttttgaaattttcttcccaattaacggaattaattaccttgaatttatgttgtttttgcttatttttaacaaataatttaaagattaatttcgaaaatgaatctgcttgggcgacgtttgaccaattgctttcaacatttttgatttggaagcaaaataataaactgacgatcggacaaatg

SEQ ID NO: 102859 - DNA, 847 bp, Heterodera glycines
agaaacactgaggatccgacaatctgagctttaaattcacacacacacacacacacacacacatatatcattttgcattttcatataatcatttttaattgcattttcatataatcatttttaaattgcattttcatacatcattttcaaattgaaatttccatatacgcattgaaataaaaatttgaactcaatataatgacaaataattagctaagattatggtatgattaattaattttgtccaatggtagaccagaaagggtccatatttaatcattaaaagtgaattttgaattttgggctttgtgtaaatgattcataaataagcagtttgcacacgatgggatgttttgcatagtaaaatgggtcacctttagggatcatacacccaaaatttgaattctgagctgcacatttgaataattaatcgcgcaaataacgaaaatgttgatgggcatcggggagaatttgggtcatcaatcggcacgcgagaacatattgtcggcatataaaggcggaaatcccctgtgttatcctcatttttaaatgaacattcgtccacaatattgtccataattttaatttattttttgcacaattaaatttaataaaaataaatatcttattttcaatttttttttaatttattaaactaatttgaatcattaattaaaagagaaaattttacttcataatttgcaggtcgtttccctgaatctcaatttatcccaacattatcaaaaatgtccaactcttcttcaaaaaatggtaaaatagctcaatctctcccttcacaattaacaatctgtcaccttcagtaccggacgaaatcgactgcgaaatg

SEQ ID NO: 102860 - DNA, 386 bp, Heterodera glycines
aaatgcagatgatggcgaggctcgtttttaggggcgataaattttaaattaaaaaaaaaaagttatcccaactctcaaaaacctattttttactaaaatagaaaatcttgaaaattaaatttagcataattttcttatcatatttcattaaaatttccaaaaaaaaatttcagggcgcctaaaggacaccgccgaacaccttataccttatttttttttgaaaatttgatttataaatggcaaaaattgtctttttcgatgcaccactaaaaattcctgcttttctccccggcgctgaaattttttgtaaaataataatttcattttaaacaattatcagccatttttttacttaaaataattaaagattggaccacaatgtgatg

SEQ ID NO: 102861 - DNA, 442 bp, Heterodera glycines
  unsure (1)..(442): unsure at all n locations
ccccgcttttccttgacaatttgacgtaacacctatttttattaattgaactgaaagcaaccaacgggtgaagcncgctaattgcacgcgcaattgtgtatattttgtaggcaaaacacgcaattgttaccatatgcctccgctaaatcgatcgtaattagtgcaaaatcagaaaaaaagttcactagaaacaaatgcgtttcgtgctatgcatctaacttttagctttaaaaaggccaattacttgataattctcagagaatttacccaattggccgtttgacacattttaaatttcaagaaaatttattaaaaaaaattaaaattaatttgtttaataatttaagattcatcagatttaattaacctaaaaagtaattgtatcaatttccaaaataaaagatttttgccaaaactgtgatcattttgtgtgtccaaaatg

SEQ ID NO: 102862 - DNA, 216 bp, Heterodera glycines
  unsure (1)..(216): unsure at all n locations
aaatttggtacagcacaaatggcacaagctcattcagaagtagcttcatgcctttgaagtgaaatcaatgatttaantcagtatcaaagtattaaattggggttgtgggattgggaggaaatagtcntttgtattccaagggatgtccttgnaaatagnccatgtaatgaactgccattatatcgctaaatgagagtgcaataacatttaataatg

SEQ ID NO: 102863 - DNA, 459 bp, Heterodera glycines
ttgtatgagaaaaatttaactaaaattgaaagattaactaaaattatatggaaaaaaatataaattaacaaagttcaatagattcgaatgttttttagaaaagcattatagggaatttactctaaaattgaccgagaaaataaaactactaaaatgatagagttagaatttgcggttgaaaaaacattattttaggggaaaaaatcataatctcaaaaaattgacactcaaactcaaaacagagatttttaagaaatctaattctttctctgctttttctttttttcataataatttcttttagtttggcgtattatctcttcatttttaatagaaaaacagaatttactctatgcatgaatacctcaattagttacctaaaattactagataaataggtattcaaattatttaactaattttcagcacatttttcagataaatttattaagaacaatg

SEQ ID NO: 102864 - DNA, 278 bp, Heterodera glycines
ggtgattatagccgtacttaaaacagatttatggcagggtattgggcaaaatattgttgacttttttgtattttttttaagttatgccgtctcactttgtctctgctgcgcactttgctctccctgcactgtgaggatttgctgtggtgcgcggtgttccgccatttgatgccgttcattccgctcggcagaccccgccggtccaaccaaagccgtcgcttcgacattaacgtgtcgttggacgccgccgctttctttctcaaaagtgtcccggaatg

SEQ ID NO: 102865 - DNA, 336 bp, Heterodera glycines
tctcgccgggacaaaatctcgccgcaaaaatttaaaaaaaattcaaaaattgatttttttcaaggaaaaaatcttagaaaaatttattataagaaaatataagaaagaaaattattgttaagtttttcttgaaaattgcgcggccaaatttggaagttccatgccataaaaaagcaattttttgtaaattttgaaagtttttatttttagtagaaaacttttggttttgtgtagcattctctaagagattttggtcaaaaactttttgtcaaaaacttattgctcacttttccgctatttattaattttcataatttcagttggtttgcagcgatg

SEQ ID NO: 102866 - DNA, 1003 bp, Heterodera glycines
cttttaaacaggccaaaaagtttagctttacttttttttcagaacctgatcagaagcgcaccaaactttgcagggatactgaagggaagagaaatagcctattttaaatattatctagtcagttcatttaaataatttttatccaaaaaattttttttgggttttcggggcagtccccctgaaccgatgcgcccagatttatggggagaccgaatccttcgggaatagcttccctatagtctgtactttaattctgcgttggatttttgctccccataaatgtttgagtaccccaaacggacacttgaaaaaatcgatttttttgttttcggggcagtccccccgaaccgatgcgcccagatttatggggagaccgaatccttcgggaatagcttccctatagtctgtactttaattctgcgttggatttttgctccccataaatgtttgagtaccccaaacggacacttgaaaaaatcgatttttttgttttcggggcagtccccccgaaccgatgcgcccagatttatggggagaccgaatccttcgggaatagcttccctatagcctgtactttaattctgcgttggatttttgctccccataattgtttgagtaccccaaacggacacttgaaaaaatcgatttttttgttttcggggcagtccccccgaaccgatgcgcccagatttatggggagaccgaatccttcgggaatagcttccctatagcctgtactttaattctgcgttggatttttgctccccataaatgtttgagtaccccaaacggacacttgaaaaaatcgatttttttgtttcataaatatttttttcagaaagtgctctaaagcgcaccaaattttatttacaacttaattttagcactctgatgctttagtatcaaaaaggaagatggagaaaaaaatttttaaaaaatttttccttatattttggttatatcgttttgcttttggtggggtgcttggaacagtggaatcatg

SEQ ID NO: 102867 - DNA, 618 bp, Heterodera glycines
ttttttgagtgattttcttattaaatatgcatgccaatttttgctcatattttaactcctaatagtgccgcccccgccgattttagtttccaaaaaatgattatcatgttggtactgaagccgtactcaaaaaccatcaaatggaaaatttttgggaaaaaattattctttgcttaaaaggaaccaaatttttaattttttaaatcattcggtagctctaggttttctcaattagcctataaaatatcaaaaaatttcgtttacttttaaaaaagtcattgccagaggaataaaaaccaactttttcaaacattttttgggcattactttttggaaagacgaaattttttaaaatttggcaggaaaatagagaacatttaggtctatcgaatgatatgaataattaaaaatattgtaaagcttataagtaaaaattttaatttgatagtttaacgcccattttgatagtttttgaggtgccacaacaccatcattttaatattatgataaaaattatttaaataaaaaacaaatatcctaatggtaacacaccatatgagggttatacggtaacggtaaaaaaaaattgtttacaggtttcgaacaacagttagtatg

SEQ ID NO: 102868 - DNA, 681 bp, Heterodera glycines
attacagggtaaatttatcacggaaaacccttaaagctatcccgtgaatcataaccgcgattcaaaatttaaatttacttaaggtcagtcaggttaagtttatcagaatttggtttttaaatttaaatattgccaagattcaaatataataacttaaaaatgcaaaaaatggcaaattttaaaagatgaactttcaggcgtaattaataatgccgtaaattttcaatcatttattcgagcataaataaatttcccaagaaaatgatgttattttcaaaacataatataatttaataaaattatacattagaagtccccatataaaactaggtgtatgaatactaatgaaaacttttttacaaaaactataatattttatgctaaaataaaaatttaattttataattcagtaataattttatcatttttttctgtcaataagttataaaatttctttctattgtttcttattttaaatctgcatcgtcaaataataaatcaataattatatatatttatctatctcaatttcttataattttataaaatttacattcattattaaatattaaatattttttatattagtaataaatataaacattaatattacactggtaaaacataaattaatttttgtaaaatcatttgaaatttaaaatcgtatcagaaattcaaatg

SEQ ID NO: 102869 - DNA, 58 bp, Heterodera glycines
  unsure (1)..(58): unsure at all n locations
ggatttcaaaaatcttttctacaacaaagctcacggcttttggtacgattcnaacatg

SEQ ID NO: 102870 - DNA, 68 bp, Heterodera glycines
ggtaaaagttaaaaagagtaaattagggaattgacaatgtttaagaattccaacggttcttcgatatg

SEQ ID NO: 102871 - DNA, 1003 bp, Heterodera glycines
tttctggtttattttctaagaattgaggcctgactcatttccaatttttttttggccttccaggcatttcctagcaattttacttcactataacaaaaattattaatttttgtcatccatttcaggacaatcccctggccactttgggctgctcatgtggtgcaagttttgcaccgaaaaatcaaatcgaataagcaaaggacggaaacggggcttcgtttttatggtcattgcttttttacttttattattattttatttgtttcaatgtttttgtgtgcatttcactgccggtgtatttgtagggaataaaattcggatttaatgttcctgttttcttttttcgttttgaacggttttttccccctatttttttgatcatttttctttggattcgtccattaatttgcctttttcttcgctttttccgatgaatttcgttgtccgtttgcctttgtctcccttgaaatcgtttcttttgccccgcctttggccccccttttgctgctgctccgtctcttcttcttccgtttgttctgttcctctgttcgcccatccttcgctcgtttcttttccgtctcccgtcgccgcatttttgtgccaacgcgcggccgtcgccggacaatcggtgaaaaaatgcaaaaacgaaatcaaatatacatcgaattgggaattgtcctattttcccattagtgatctttggcgatggctttttcttataggtcataactatattttggcagtttttttaccttaaaatgcggtccaaattttgcatttaaattcaatgatcaaatgccttttattaggttcaatttttgacttttttcccatttcattctcttctccctccttttgacagttgcccctccgcctctttgacgtccgttctcgtcaaaaacagcacaattaccaccaccaccatggcactttctcggcccgcttctccgcctttttgcgccgtttgtttccctttggccgtggcggtgccgtcgttctgatg

SEQ ID NO: 102872 - DNA, 86 bp, Heterodera glycines
tttcgggtcatttcaaaatttttagctcatctcactgatattttgctttatctctctctatctcaaccaacaacaacaactcaatg

SEQ ID NO: 102873 - DNA, 81 bp, Heterodera glycines
aaatcccaccaaaatgcagtcaatcaacagcagctaggaatgaatgggatgtttgcacctccggttttgtggccacagatg

SEQ ID NO: 102874 - DNA, 126 bp, Heterodera glycines
  unsure (1)..(126): unsure at all n locations
aaaaattcttcttaaaatttttttgaacccaattcaaaaaaggaaaaaaaatttgcagtcaaanaattattcgaatttctccaattttgtttccataatttccgaaagttattcggtatcataatg

SEQ ID NO: 102875 - DNA, 380 bp, Heterodera glycines
gctgggggataagctaatggcagaaatgagcttggaaaagaatgtctattctttggctggagggggggaggaggaaatggtaggaaaatcggcaaaaccggcacttttaggctaccgatgtgccaaatttcaattggcgatagtcccaagcgaaaataacttttctgtttttctcaaatgtctgaatatctgggctaaaggtaaactttgaaaaagacgaacatttggcacagtctaattgattaattaacgctaattaactaattaatgaatgccaatttgcattgcttcgtctgctaattgccattccccgctgttcagtccgtctcatttatggcggccttttcggctttttcaacggcgtctctttgtcacttatg

SEQ ID NO: 102876 - DNA, 632 bp, Heterodera glycines
  unsure (1)..(632): unsure at all n locations
gagtatttttatgagttacnaataatcgaaaaaaacatttgaaattatagtgcatcatttgtctattttttcggtctgaaccagatcaaaatcggctataaatgatttgccaaaacttttttttgaatttttctattattttaagcgcctaaaaaatcctgcctctgaaattttgtttttttggctatgtgcatttggctatgtgccatatggccaatagtttcaaacaaaataactttttgaaattactctgattatttttttattaatttattttaatacattttttgcatttttcagattttaagtttgtatttttaacgggttttttttgtttgaaattattttagctactttatgcgaatttagttttttgagttttctaatttttaggaaataggtattttccacacaaatattttatgttaattttttttaattaaataggaacgcggaaagccaatcaatgagaaaaatgcttccaaaaaaaagttggtggttcaataagattaaataaatttatgattaaataatattttctaataaaataaatttattccttatcattcatcaattcaccttaccacactcggttaaggcttaaggattttaaaaaatcaatcactgatatg

SEQ ID NO: 102877 - DNA, 155 bp, Heterodera glycines
ttgtcaagaataatttgtttttttcttttaatgaaggaaaattttaaaattaaaaatcaaaagataattaataaataaattataaaattatatatagcctattaacttcctagacacgatttaattaacttttcagtattacaactttcataatg

SEQ ID NO: 102878 - DNA, 146 bp, Heterodera glycines
attaatggcaattattaaaatgccaattgctctggcttgacaagaagcatttttaattgattcctcaatgcatttattaattatatccccgggttcagtacacaaatgcaagtgcacagaatgtactcggtctgctgcctcaaatg

SEQ ID NO: 102879 - DNA, 97 bp, Heterodera glycines
tttatttttatataaaattagttttgtaccaacaactaaaacaattaaaaaataaattattattgaaaataaaaatgaaaacattgttctcaacatg

SEQ ID NO: 102880 - DNA, 482 bp, Heterodera glycines
ttttctattttttttctttatctttctcaatctctcctctctctctctcttttcctttctctttctctctgtgtatcttcgtctctccttttacactgatcactttcgacccattctttttttaccttttctgatcactttccattcttccgatcaatctcggctcaacacagcatactgaataagcatgtgatttttgttcattctctccaggcaacagctgttacggaagggcacaaaatgtatgggatttatctcgaaaattcgtgggaaggaggctatttattcaagtttagagcttctcgtcggaagcgaatgctttgtcaaatggatcagataaaaatgtttcaaaatttgcaatttaacaatcggaggaacttaaaaatttcaaacctaatttttttgttttcttttaaaattaattaataaattaaaataaattttaggtaaaatttgtgcgtaaacacagagccaacaacatg

SEQ ID NO: 102881 - DNA, 217 bp, Heterodera glycines
tcaaatttagcataatgttttttttgctgttctttgcaacttttggttgcgccgttgcttttaatcagtattcgatttcaatcagcatatggccgagccttgacacttcaaagcatcagtattacgtaattttggaattctaatcgaataaatataatattaaaaagaaataacgaacaataatttaaattgttttaataaaattaaggccggaatg

SEQ ID NO: 102882 - DNA, 162 bp, Heterodera glycines
aagcatgcagaaatggctgaatgcttgcagaaaattgctgcggcaatgcgcgaaaataaggaaagagtgtatttagaattttgccaacgtttggatattgagacaaaaatcaatcaagcagagattaagaaaaaagaatgaagagttaaaaaagaacacatg

SEQ ID NO: 102883 - DNA, 1003 bp, Heterodera glycines
ctattttaaaaaagctttattaacacagcggcccaattttgggctccaagtacaattatgctggatttttcgtcttagtggtctgtgagttagtcaccaaaagggggtctcaggttcgagtcctccttatgttgtgtgttaatttcaatttcttcttttacagaagaaggcagaattatttttttattaataaaagttttcgtgtcaataaaaatcatattcaaaaagcgttggttacgtacaacatcgacaattttatgaaatttttttagcttataacttggtgaatagtagagcaaataaaaccattttatgctcattttgaagggaaaattctggagaatattgtaaattttatttggtttggccttaaattgtggacttggctaaaaaagaattaaattattgaaatgttcatcccttgtaaaaaaatttttcctattgcttaattttcttaaaattttgcataggccaatattttgacctcctctagcgattccaagtttattttatggaacttaagtttttaactcgagatcggctcttctaattttacaagggaaaatcccaaaaaaattttaagttttgcaaagttttggcgttctgattactaaataaataataaacctatttgcactgagagcccaaaattggggccgctgtgttaataatgttaataaaaaaaaatcccataaatttctttaaatgaaacatttttaattgcatattttcttttcctattttagaaattaaaatggcttagtgacgagggcagcggggcacagcgggggacaaaatatgccattctaattgttgtgcacatatttagcacatcaatcgcttgacagaacgggggaccaaagcaagaaccaacaacaaatgaccaccaatctttaaacggcacatttgttctgccaaaaaaaattaaaaattcttttacgcatgggagaaaaaagaaataattcccgcggggaattggcggggcatacccaaactcaatatg

SEQ ID NO: 102884 - DNA, 1003 bp, Heterodera glycines
  unsure (1)..(1003): unsure at all n locations
ttaaattttttcctttactcgaaattttcatctctaatttttcactcagacctccattcttaccagtgctgtttttcccggttcacggttgccctaccgggaccgggacctgagcttttcaggaccgggaaccgggacctcgaataacgagaattcctggcccggtccggtcncgcttcactctaatatatacaaaaaaatttttatcgtntattaactattntaaataaaatgatagcgaagataaaattgtaaattcattcaattatatggtgcattgattctttatatagcttgtttttattgaaattttatggttctgtaaatatataaacaaaataatgtgctgattattatttgaattaatttcgattcgaacgtctattaattgtaacataatttttggttgaatttatttataatattttttataacaattataattaattttaataggtccattcaattagtgtttgaatttaacttctcctgtttgccagagtatcatcttcttgtgtcctcattgctggcgaattttataattccttcatttaatatttaaagtttttttatattgatatttaattctttatataatttttgttgtaaagatcatatttaatcagaaatattttttattttaatgatatttagtatattcaaaagaggttcaattattttatgcatttttttcaaattttcacgtatatttatttttaaatttaaattaattaccaaaaaatctaaaaaaaagtttcaaaaaattaatacaattatagtttatcaacaccaagttttgataatttagctctttttgtgtgagatttattttttatgtttcttccttttttcactttaattatctgatttcgttagcgccaacaagagtgcgttatttataagaatgttctgattttggggtagcgacgaaaattgttcttaaaaattttctcaaaatcgcgcaaaaattggtcatttttggtgaaaatctgtgagcaaaatg

SEQ ID NO: 102885 - DNA, 228 bp, Heterodera glycines
acttcaagttttcatcactaaaggaggaacaattcaaggttttgatgctcttgacagatctaaagtcgccgaaagatgcaactttgagacaacgaattttgtcaaagctcggcgcagacggagatgacgtcaagtatgatgacattgttcaagattgtatcaatttcatgacgacaatcagcgaatcaaagctgattgaatcatctgcggccaaccgaagcataaatg

SEQ ID NO: 102886 - DNA, 497 bp, Heterodera glycines
attttttggatgccgctgagttcctgatcgtgtccgatttggatgatgtgctgatcccgaagcttggccaaacatttttggaggaattccgttttctaagtgccaaagtgccttacgcggccggcttttcctacaaccgatacaacaccgaattggtgacaagtgagctagctttactgtgcacgaattaagctgtataagctgtattagaaccatctctctctctctctctctctctctccgcattctgccctatctgtctctttcctatccgtctttcctctcactcttatctttctctctctctctctcgttctctctctcactttcgtcttctcgactcctcctccttcttgttagatctttttctcttgcatttctcttcttcaggcagtgaaccgggcgaattttcccttgcggcattgatcaatgaagcgcggtaaaaagaattcaattttcaaaaaaaattgatcacttattagagtggctaccgaatg

SEQ ID NO: 102887 - DNA, 838 bp, Heterodera glycines
agaggggttggtctctatctatattgacaaaatattcgatttattaatgttatccacggcctagggcccagaggattcggcttggaaagggttcgaagaatttttaaatccgatttgcttttaaaataggcattttcaaacagaggggcgccggtggtgccgcccataggtgccgtcggtgaatattttccgaaaattttgatgtatttgtttatacatttgtgccaaatgactaatttttctggatttttgggtcaaattttctgaaaaatctatggaaagccattgccaataaacagttttcaaaatttcgaattactcaaaattttcaagaaaaaactgcacttgacggcgttttgccttttgtaaaatcataaaaacgtctcttttttaacacatctcatcatttctcaattcattttttggttcttcgcttaaaaacctttttccctgtgctattttttcaaaaattttctcagtcggagaaaattttcactttagccaactttaacaccatttttgggcgcccgcttttggtcccaaatttccaactaattttttttttcataaaaagcaggatgcctgggtgtcgcaagtgcgtgccgcaatccgtcatgtggacgacccacggctgaacaaagtgttgcgctccgtctacgcatatgacaacattccgcgcagtaaggcaaagtttgtcaacttcatgcaaaattcggtgcgcgtccgggaccgcgcggtgtgtgtggacgcgtggaatgccataaggcggggggcggacgcggtagcggaagagaagatggtggcacaagcgaagcggacggaacacgcggaaacaatg

SEQ ID NO: 102888 - DNA, 83 bp, Heterodera glycines
tcgcgcaaccacaacctccggcgccgcctgacccggcaccggcagagcccggcaacagcaacaaccacaaaacggcggcaatg

SEQ ID NO: 102889 - DNA, 159 bp, Heterodera glycines
tctccaacctccttttcatttagccccgatgacccacttttttatatatgctctcaaatttagtatcacattttaacaatttttgagccacacaaatttaatataaataagtttatgttgaaactgtttattgttcattctctaattattttgtcaatg

SEQ ID NO: 102890 - DNA, 597 bp, Heterodera glycines
tgggtggtgtgcctggacaggtgagcctgttcaaatttttgaaacattttggatgcttgcgaatggcattgtccggcggggctatcttaaaatccaccattttcctctacaaattgacattttaaggtttaaattagcttttcaagccaacgagtaattaattcttgaacaggttgccaaaatgttttttgaagttcgattttcgaaacacacggcgtatttttataaaagattattctgcatcgaaggttaaaagtggaaaaacgctttttgccattttgacccaaatgtttagaaatttttttaatcgccattttgaaaaaactaattaaaatcttttaatgccaatttgtagaggacagattggagtattaaaatagaataaagaaatttctgcaaccagacttttttgagattttttcatttaatcgcttttcaaaaaaaaaaatttcttttttttattttaatcgaaaattttgaataaagatttcaaattttcggggggtggggcggagcgatatgctctggtaattgtcatttcggcaatctttgcctcattctcctctctttttggcacagttccatccggcaggaatg

SEQ ID NO: 102891 - DNA, 75 bp, Heterodera glycines
tatagccctgggagctgtcttggtcccggtactgggtgtttgagctcaacatttattagaaaaaataacatcatg

SEQ ID NO: 102892 - DNA, 77 bp, Heterodera glycines
aaattatttgtttttttaatccttgaaaataattttttttttttgaatcttttttgtttcagcaattaagtacaatg

SEQ ID NO: 102893 - DNA, 140 bp, Heterodera glycines
ggtcgtttcccttagattagcttcccgtttccttaattttaatttttgtccttttcatttgaccatttgtcatgcgtttagggtttatgagtttgggagatgagttgaccggcaattatgggatcaaagaccagcgaatg

SEQ ID NO: 102894 - DNA, 113 bp, Heterodera glycines
ttttactttttttttttttttgaatttttcgtttttttgactcattccaaaactttcgacttttttggacgaaaataatccaatttttagttttcatattttttcagattatg

SEQ ID NO: 102895 - DNA, 202 bp, Heterodera glycines
  unsure (1)..(202): unsure at all n locations
tcatntaatgtgattttttaatttttattattttttctacccaagatattgcagaaaaataatattagcattttttgaggtttttttaacctaaaaagacaattttatgcattttggtcaaatttttttaaatgttgcagctttttaataaatttgataaaaaaacgattctatatttaggtggtcgccgttattgatgatg

SEQ ID NO: 102896 - DNA, 457 bp, Heterodera glycines
ttcacgtacacaaatgtgtaaattcattcataaaacaaacaaaaatggagttgaaaagggaaagaatgaagaaagaaagcatttgtctccataaaagtgtttagccatgagatttaggcacacatttggcgaaaagtctttcactattaaatgccaaaatcagtcgacaaaatgcaacaattattttattatttaaataatttttattaaaattatttatttttactgtttcttggtgtggtaatgttgtgcaaatttttagtcatttcatactttggcatttttctattgtaaaaacagaaacattttgcgcaatgctttttcctcaattctttctttcatttttgttcattttgttattagcggacggaatggcgcaacaatcgaacaaagtgacagggccaaggcaacaatttatcattcaattaattaattatttttaatttgatttcaaatg

SEQ ID NO: 102897 - DNA, 583 bp, Heterodera glycines
atgattagggctgctaattttatgtaaatacatattttttcctggattctccatagcctaattaataggaaaaacactttcttttttgtgtttgcgaacaaaagttgggacttttatttacatattttgggatttttctacatatcacatatgtacatatttttatacatattttggactttttcgtacatatttcgcaatttttcgtacatatttttcattttttttacatattttgaggatttttgagaatttatagaaattttttgtaaaaaattaaaatttttttttgaaaatgtacgattttttttcaaaaaatgatatatcaaaaattaatttgtaaaaaatattcaaatgtgattctaagcctattttggtcatttttatggcattttgtgcctatttcactttttacgaagaatttttttccaaaaaataaccattaaaaaaattttatttacatattttcctacatatttgaggatttttgtacatatttcatacatattttagcattttttatacatattttatttacataattcgcaaattttcttacataaaattagcagccctacttatg

SEQ ID NO: 102898 - DNA, 82 bp, Heterodera glycines
aacagcctatggtacgacgcttttttgatgaatttttcatttccaccccaaatgaatgcaatttaggggaaaattcagcatg

SEQ ID NO: 102899 - DNA, 628 bp, Heterodera glycines
gcggaattgggtcgattttgttaagttggcgatgtgattttgcaaatggcattcacattcggagatgatagtagcccgggcaaagcaaatcaattcatctgccgaaatttcatacacgaggtaacaaatttatgttggcaaatggtggccaaaaaattgttaattaaaatttgattaattattatttatatatttatttcggtcgaatgattgagtaccgatgatgaaaggctgtttaataaaaattcacgaaattattttcatacaaattttaatcagaacataaggcataaagaccatatttttgggtcgaaaatctgaacattttgcgaaacgccgcagggaaaatttgagtgtgatttgttaacagattttgtcaaaaaatgaccaaattttgcgttaaactttaaaatttatagataaaacattataatattattattcggtccataattttttttttcaaattgagcccaattttattaaagcttaattttcatgaaatttcctcttctgctgacggaatcgaactcatcattcaattttcattgcctttttaataaataattttaacactttttaatttttatgaatgttttatacggcatttttaatagagaaaggaatg

SEQ ID NO: 102900 - DNA, 158 bp, Heterodera glycines
aagcgcattaaacaaattgaaatttatgtggaaaacctactacatcatcgagaaattacccgtctcaagccaaaagctatatgctctcatttatattcaccgcgcaaaaagaagtggcactttttatggcacagaatgaaaatggaggggaaaaaatg

SEQ ID NO: 102901 - DNA, 54 bp, Heterodera glycines
atggagcattctcaaagctactcattctttttcatcattcattttacaaaaatg

SEQ ID NO: 102902 - DNA, 1003 bp, Heterodera glycines
tgtcccaattaatatttgtttaaatgctcgaatgttaaataacaaatcgtgtatcctaatttaacataaaatgaaaattatttcaatattttacttatcgcataaatattatatagtgataattttgaatatctgttttcgttcaaaataaaaattctattaaaatattttaagaagtttatcgtttgtgtggttaaaattaatctgccaaaattaatactcgctacaaaattctattttttggtatttcccttaaaatgagaaatttaaatttttttatgaaagtcttgaaaaatccgtaatacataaataaatacaaaaaatagcatttttacatttctcttaaataagcacacgctcactctgatcaaaacttattttttttttaatatttatctattaaaattttaaacaatttttttgtatgtataaaacccaaacaatccaaaaaaaatactttcatttattcactaaaattgtatgatcagcacatttcaccatgataaagattgaacaaaaagagcgaaatgagaactcacatcagcagtttatcaaacgggtgaagaaattgggacaaatccaactggataaatgagcgtatattcaaatcaaaatattatcaaaaatgatcaaaataccaaagaacaaataaatgatcaacaaaaaagaaaaacagttcaaaaatttgaagcaattaaagaaaaattgaatcaaaatagaaaatataatcggagaaacagtgtcaaaattgagagaaaaatttaaacgcggcatatgaaaaagatgcatttatttttattaaaataataaaaagaaaatccattaattgcaggaaattggtcggatatatttgccaaccaaaaaattattgactttttaaagaataatttttttcaaaagcctcattatttaaaaattttaatttcctttttattatagaaaagaaatgtattttttattaaaataaatatagttttatatttttatttttatatttgaaatg

SEQ ID NO: 102903 - DNA, 734 bp, Heterodera glycines
atatgatgtaattaaagctaatatttctaatccaactcaaaaacatatctaaaccagggatgggccaaattgataaataaaaagcgaaatgcgaaaagcgaaatttgcgaaactgaaaaatgcgaaatgaaaaaaaaagcgaaatgcgaaaagccaaaatatgcgaaaatgcgaaaagcgaaatgcgaaaagccaaaatatgcgaaaatgcgaaaagcgaaattttttctacaactttttaatagttaaaatcataaagcaaaaatcattttttaaaattttattccaaatttaaaaatcaataaaacgcttttttgaggcgcgctttttccaaaaaaactttttgggaagagggggcaggcggcgccgggaaaatttttgaaaatttgattaaaatttgttgacagattttcactaaaaaatgattaaattttgtgatttttatcatttttctaatgagaaataagagttttggcgcgccgctgagaacagtttttcatcaaattaccaaattttgcgattttgggccattttctaagaaaaaataggagttttgggggcgcggcggtgccgataggcgccgccggggaaaaaaattggaaattttgatcatttataaacagtttttcactgaaaattagccaatttataggtaaaattttgaaaaattttatgggaatttaatccaattcttaggggtgtaaaagtcgcatttcgcgccaaaaagcgaaatg

SEQ ID NO: 102904 - DNA, 61 bp, Heterodera glycines
ggtgcgtcaattttctaaattacctaattacagttaataaattttttagctctctccaatg

SEQ ID NO: 102905 - DNA, 65 bp, Heterodera glycines
tgtttgttattttttgtcgaatagttttgaaaattatgtaagttcagaatttcgccgaacggatg

SEQ ID NO: 102906 - DNA, 155 bp, Heterodera glycines
ttatgaaagttgtaatactgaaaagttaattaaatcgtgtctaggaagttaataggctatatataattttataatttatttattaattatcttttgatttttaattttaaaattttccttcattaaaagaaaaaaacaaattattcttgacaatg

SEQ ID NO: 102907 - DNA, 118 bp, Heterodera glycines
cactagagaccggaaatttcaaatttgcggatcccgctgcgggattggaactcaaaattctttgcgggacgggatcccgcgggattaatcccgcaaatcccgcattttccaaaaaatg

SEQ ID NO: 102908 - DNA, 324 bp, Heterodera glycines
aattcaataatttgcataaaaatagtgaatttttaaaaccaatcaactacgatggattttttaatactcggccattttccataccaaataaaactttccgactgctggcgtacagaaaggaggtttttatgtgaaatttgctatatttgatttttccatttttgccgctgtcccatttagacacttatccgtccgctcggatgagcggcgttcgtccatcccctctaaacgctgcttcatcgtcgtccaattgcaccagtcaaatgctgcctttgccccctccccaccatccctcctcccattcggccacttcaatggcaaatg

SEQ ID NO: 102909 - DNA, 545 bp, Heterodera glycines
aaatggcactttaatgaactgtttagcattttgttggcatacatttatggcattttccattggatttagcacaatccatttggcattcggacattttctctcattggcgccctctcccgtgacaaaattttgaaaaaacaaaatttttttctaaattccttaaaggtttttttcaaaaaaaaaaaatttaagtaggtagaaaagatttaatataattaaaaaattttctttcaaaaatgaaagcaaattaagcggggatttgcccatcattggatggcattcgatttccggaaaatctttggggtcgggtttctgaaaaatctttgaccttggaattcgatttccgaaaaatctttgacatcggggtcccgatttccggaaaatttttggacctcggaatgccaaccttggatgattaaacagtgatttaccaattatttttggggccattaaattgaccatggattatgccaatgtgccaatttcagttggtatttgtgccaacattttgaatggatttaggtgggctggggctgcacccaatg

SEQ ID NO: 102910 - DNA, 599 bp, Heterodera glycines
aatcccatgatcggcattggcatccgcggcactcgtcggcacaaggcgtctttagtcagccgatttgtcgaaggaaattggatcatcagacactcatcagccattagcaaattttcatgtgatttggcccagaagtgtgcgcaactctctaacggaagcaaatgaaaatttttagaaagaaaccaaataaataaataaaaaagaacagcgaaatagcagtaaaatgaggagagcgagagagatagaagcgagagacagcgagttaaaaagagagagagagagagaaaagagagtaagcatcaaaattactcatacatttcaaaaaatcaatccatttaatattattaaaattgctttttttaataaaagtgcaacaaattaaaagtgcgaaaattgatcagcaacgaaagcccagcggaaatcggtggaaatttaataaattgtgggagggaagttgcgaaaatggaaatgttcacatgaattccccaagcttagctgatttttgcagagccaagacaatataaaagtcgggaaatctgaaggaaaaatcacttattaaatttaatttaataaaacaaaattttaaaaaatcgaaaatg

SEQ ID NO: 102911 - DNA, 92 bp, Heterodera glycines
aatcgatcagtgcgcttttgctggcgctcgaccactcattgaccatccctttttcttggtccaaatcaccgcttccgatcttttggccaatg

SEQ ID NO: 102912 - DNA, 390 bp, Heterodera glycines
  unsure (1)..(390): unsure at all n locations
aaattggtgacagatattaaaaatanttgatttaaatttccttaatttaaaagaaaattaaaagaaaataatttaaatatatattaaaattaaatttggtccaaaattttcattaaattcttctccactttgccttttcttcttcttcttatgcttctaccgttcattgaatacgaaccatcatcattgcccggagaaggaatttggtcaaaaaacctttaaataaaaatataaaaattaattaataatttaacacaaaatttgtcgattaattattattgagcaataaataacaatttggcaaaattcaatgttatttttccataattaattaatcattctcattatcattatgtaccaaatgcaattgttgagcaggtaatgaaaatg

SEQ ID NO: 102913 - DNA, 707 bp, Heterodera glycines
tatttaattattattaaaatttagccgaataaaatattgaaaaattttttatatttaaaatttttgaaaaattccgactgccgacatttttggggtcggaattccacttccgacttacgaaaaattattgggccttggaattccgacttcctacttacgaaaatttttggtgcctcggaattccatccttgatatgtacgccagcaaagtctatgaaaatattcgtgaccaagataaagcggatttttctcctaaattattaattaatctaaaattcagggcctttaaagataaatttgtaaaatttattttatgaaagtgtatataatgacgacaacaaatgccaacaatgagcagtggatggtaatattgccagcattcaatatgagaaaattatatgtgtataaccaaaagcaattggacgaattcatcagcaagcataaaaacccaatttacaataaaaatggcaatttgtaaaaatagtaataaaatcctattcctcattattttatccaaaaaaaactcactttcttctgcgaatgaataaataatccttattaatattattttttgattatttgtgatattttattggcaaataaaagctgtgcctttaaaggcaaaatttgatttccaattttattttaatagttactttaggtttaatttagcaattttcgaagccaatttaagaatagtgactaatg

SEQ ID NO: 102914 - DNA, 142 bp, Heterodera glycines
catcaattcgtccaaaaatgaaaaaaattggagagaagataaaaaagggcggtgaccatacaattaagtatagcgaagaacagaaattacaattggaaattgaggaagatgacgacaatttgtaaaagatgacgattctatg

SEQ ID NO: 102915 - DNA, 746 bp, Heterodera glycines
atatcgattctcgccctccacgagccgctccaccaacctttccaacttttcgagccgttcgatgattgggttcagtgtgggattccctgaaccttctaacaacttttcaagccggtcaagacgggcgagaatgtcctctccctcatttaatacttttcaaaaaattaaatttttgtaaaaataagtttcaaaaaaatttttttttactgatcaaaaggagtttgccgcaataaattcaacaatttattttaaaatttttttgaaaagaatatcgattttttcatttctttttcttaccattatattgcagaacgaacggcattcaatttatttaaggattgaatttatacaggaaccaatggcgccgccggccccatgttcccaaaaagtttttcggaaaaagcacaacgcgaaaaaaatacatttttattgattttttctcatttggaataaaaattttaaatgctgaattttttgtcggtcaaatgctgcttttgaacattttcaattggtaaccctggccttaaaatcagcttctttttctacctactttacgattttgattatttttttgctcaattgtgaattaaggcttatataaaattgggcagcaatgaacgaatttgcacgtcactgaattattgaattccaataaaatggatgccattgcgttttccattgctatttcatattacattaatgctaaaataaaacaacaatttctccattttttttaaataccaatg

SEQ ID NO: 102916 - DNA, 70 bp, Heterodera glycines
tcataacagaacgccaatttctgtgtgttttttgtttctttgggaattccaatttcagtgtttgaatatg

SEQ ID NO: 102917 - DNA, 197 bp, Heterodera glycines
attcctttccacctgctaaattaaaatcttcgtttcggaataatgttattcaaaaatatctacttgtaacaatgtagtttttaatatcaaagattgtatatatccttcattttatttttgaaccgtaaacacacacattaatagctttatttttgaaaaataggaattcaaccgcgaaactgaaaacgtcttccatg

SEQ ID NO: 102918 - DNA, 158 bp, Heterodera glycines
tagagaaatagcatttcagcttgacaatgaggtactgatgattgaccaaatatcagcacgtttatcaaagttaaatgtactgagggacgacaatttggaatggaatataaaccctattccacaaatcccaaatcatcgcatttcatcatttagttatg

SEQ ID NO: 102919 - DNA, 123 bp, Heterodera glycines
  unsure (1)..(123): unsure at all n locations
tttttcgggtttttagggcnatatttgggggatttttacctcctatgttatgcacatatttgacatttttagtgcatacaccttataaccctaatgattacagtagatttaagaggggaaatg

SEQ ID NO: 102920 - DNA, 919 bp, Heterodera glycines
agatacgcccttgtcacgaataacaaagatagttgattaaattaaattgaactttaaaagcctttgtttaatttattattaaataaacaattaataataaattaattaatgtgcttaatggagaaagcttataagacacatgtttgaatttattttcattttgaatatgagggatagctcgattgattcgtttgcatttttcttcttaggctcatgtgcttagtgtatattaaatcgacagatgtccaaaaaaaatagcatacacaccgaaagttttaacgaatgtacaagccaatttaaatggtaaaagatgaagaaggcagataatggcatagagaaatgtgtacaagccaatgagggctagaaagtgaaaaaaagaaagtttacaaaataaggagtgaaggaacagattatagtgtacaagcaaaagagtttggaaaggagataaagagaagaagaaataaaatgatggatagtgcattattatgtagatagacggcttaagagaaaatggaggtcaaacaaattgatcatgttaagtcatttttgaaaatttattaaatcacaatcaaaagttttaatgaatgtgcaagccaatttaaatggtaaaaggatgaataagatggagaatggcataaagaaatagtgtacaagccaatgagggcagaaagaggaaaaagaaagttgacaaatcaaggagtaaaggcaaagattaagtgtacaagttgaagactttggtaagcagctataaagagaggaagaaataaagtaatggatgatagccctatattgtgtatatagacggattaagagaaattgaggtcaaacaattgaccatctgaagtcatttttgcaaattgtaaattccatttttgtttaatttaaattggtaattttaattaatttttagtaaaacatg

SEQ ID NO: 102921 - DNA, 79 bp, Heterodera glycines
  unsure (1)..(79): unsure at all n locations
agtaaataatacacaanaaaaagaataaaattaatataaattatgaaatattaatgaatacaaatttcagttggttatg

SEQ ID NO: 102922 - DNA, 637 bp, Heterodera glycines
ttcccgcactgcgtttgccaaagctaaatttgatacatttgtattggtgcttatggcattaataatggacaatgaaaaacaggaaagtataagaaaaagttgcgttataacaaggaaggggtgttggactttcctgttttgtcatattttccggcccacttcagtgatatcctttctatatgctttttctgtcttgcagtaacatttgcaaattgtcaacccactgacgatagtcggctcttccgtggctccccccccccgcctcttttggcgccccttttcccattgtacacggttttcatttttatgttttttcttcttttttccataaataattttgcctttttctttagtccacacataaggaagagcgtcttttattatttatatttttgcagccttttctatgaataatcggtcagatggcgatcagattggacggggtttaatttatgtgcaatgactgacagatagaaatgaaaaagggaggcgatcaatagacagaaacagacaaacgatcattcactctcatcaaagggtgggaggatattaaaagagggacaaatttgtaatcgggcggaacagcagcaaaaaaaaaaaaatgggaaattgaaatggagaagcgttttttgggatg

SEQ ID NO: 102923 - DNA, 486 bp, Heterodera glycines
gtcaattgtaaactaaaattattatttcctgtcaatccgtcgatgattcattttttatcacaaaaatccactggctaaaaatgaaatcttttcactttacacattttgttaacatattaaacaataaaatttatccattaataaaatctaatgaatattttcttggtcaattattttatttttctgatttttgttcatcattttattgtttcaaatggcacaaagtattttcattaaaataagaaaataatttacttaaattttaagaaatgtttcgttggatttagcaaaatttggtcctttaaaagtgaaatttgaacttcatggagaatgttcaaggtctttaattgttgttaattaaaaggcacattaattatttattgctaatgaattgactaattaagccttttgttgtgctactatagcgcattttatggtaaaaattttccatggaaattgtcgaaaagattcaaattcaacaaaatg

SEQ ID NO: 102924 - DNA, 201 bp, Heterodera glycines
tctgcaaattttaatgatcatcagtaagaattactgcaattttaacgaatttattcgaaattgatgctgaaattttagaaaaatgatatttgcttaactgtcgcaattttaacgcattggaaattctcatataaaaggcgagtaaaagaaatggatgcatcattcaataattcactaggaatttaatttttttcagaaatg

SEQ ID NO: 102925 - DNA, 111 bp, Heterodera glycines
tttttaaaagtatctcctgcaaaatatgtaaatcaagcaaacaaaaacgggagggaaaagaatgggtaggcaaatgaaagtgttgtgttaatttttgtccattgcaaaatg

SEQ ID NO: 102926 - DNA, 580 bp, Heterodera glycines
  unsure (1)..(580): unsure at all n locations
aaaaatgattattgcaaaaatgattttntgttacaaattttatgaccaaagggtattataatatgtggccgaccaagcaaatgaatgggcagggaaattaattgttatgtggccaaaaccataatccaaaacacaacaatgaagtagggtttcaagggcccgatccgggtattgccgggtccagaaaagccgagtccggggtccaagtttttaaaccgagtccgggtccggaaatcgtcttcaatcagaccctaacaaattactcatttttttcaaaaaaataatgaaatatttcactaaatatttaatttatattttagattaattcaatgagcaaccaaaaatattttaagatttagtaaaatatcaataaaattttcaattttacaaagtggggcacatgaattgaagagcattttcgtaaaaattgaaaaaaaatagaatttatgcacaatgaaatgaccatctgtgattatggagcaatataccgttattaggtgcgcttttttgcaagccaaccgaagaaagaatttgtgccagatggttttggtaaaagtataaaaaaaaaacataaaaaatg

SEQ ID NO: 102927 - DNA, 818 bp, Heterodera glycines
aatataaattaatattcggatgaggaaaaacgtgaaatattaaaacaatttgattaaataaatgacaaattaagaaataatcacccactctataattcatgcttgcctttttcataaaaaattggaaattctttaatgcgattttttagttttatttttattccgtatccgcttattataatctttatttttacgcacccgagggcaactgggtggatggagattaaattatattgtgttatacaaaataagactgctctcattttaataaatacatagaaaaatattaggtcttattgagttattagcataaaatgatgagaattaggcacataaaaatgccgaaaaaggcatttaaaaaaaggcggctaggcatcaaacacaaaaaatgtaaaaataggcaaaaatatgcattataaaacttatccaagaagctttaagccaagctaaaagccctcttttttgtgcttattgttatgttcaatggtgaacacaacgaagaataaaaatagtttatttgtcggaggcaaaagaataaataataaaattggtgtgtcggtggatgaagaataaatgaataataaaatgatgtgttgaatgaatggaagaagaagcaattgagtgacaaagtgatgggtatttatggacgatgctgcgagatgagtattgacacgaaattgagtacagtaaatggcgtacatttgaatattgagtgatatacacaacacctccccctttaagttggaatgtaatgagagaaaaaaaatgggttggtgagtgaatcaatcaatttgtgtaatcatatcgtgcttttgatg

SEQ ID NO: 102928 - DNA, 160 bp, Heterodera glycines
ttccaatcactgggactcaatccaccggcattccaatcagtgggactcaacccaccaacattccaatcaacaggactcaaccctccagcattcaatcactgggactcaacccaccaacattccaatcaacaggactcaatccaccatcatttaatcaatg

SEQ ID NO: 102929 - DNA, 966 bp, Heterodera glycines
ttctaattttacaaaaaaatctagaaaaattgtcataaatttagttagactagcttaatacgaaaaaaattcaaataaaaaatttctatcaagaaaattcaaggaaatttaaaaaaatttttcaagttttttgagttttttccggaaattccggaaatttagtttttattaacacttagattttcaaaaagctaaaatacttttaagttttcttgaaatttagaaaagttttaatttttttttttttgcggcgacgttatgtcccggcgacgttttggggtgtactctcttttccggtcttacatattaccctagtgaagttttaagttttgttttaaattgatttttaaagaatttgtttttattagttctttgtcgcgttgattccataattttgttaccctccctcccagcaaaggaaattgttgtgtctgaccaacacttataccaaaactagagcaaattaggattgggttttttggacaaagtttatttagacaaaaataagttaaattggttaatgatcgatttagcaaaatgtggtatgtcaaaatgtgaatgaaaaactgagaagagaagaaaaaatcccaaatggtgtccaatgagctgcttatatacgggtcgggagcagatcgggaaaagggttttaggagagaaaacacaagaaacaaaaaggttaagacgaagaatagtcggcacatcaaaaaaagacaaagagaatgtttttgggaaatgccagaggggatgggcgaagggattagtttgggataacaaattcaacatcaaagggaagaaagagagaagagcattgtaaagggaataaattggggaaaaagtccaaaagcaaaatgccgatcaaaacaaggcaaaacggattcaacagaaatgaattttttgcctagtttatattttgtgttaacaataagtctgtaaatactttttttccaaattttccagttgatgatg

SEQ ID NO: 102930 - DNA, 145 bp, Heterodera glycines
tcgttggagtaattccgcctgaattatattttcaaataatatttgaaacttatgctgatttaaaaaaaattaccaattccaaacgtaggaatcaaaaggatttttgctgccagacgaagctcaatgaaattctgtccagaaaatg

SEQ ID NO: 102931 - DNA, 398 bp, Heterodera glycines
aatggacaatccgtcatggataatccgtcagtggacaattcgtcagaaaaattttttggcaatgattaaaaatcttgcaaaaatgattcttaaatttaataaatataatttttataaatttttaacattttagttgctttgtacttcaatcaatggaccttctcgagaaattatatttaattcttttaaaaatgcttatttatttataattttttaaaataactcaaattattaatttaggtttttagtgacttattaattttcacatgattttaaatagatctgcgtatttaaaaaataaatttgcttatggattagttactgacggattattatccactgacggattgtccacttactgacggattgtccgctgacggattgaccactgacggatg

SEQ ID NO: 102932 - DNA, 390 bp, Heterodera glycines
aaaaacaatagtatttcatcattagaattttgaacatttctagtaataattttttaaattttttttcttaaaattcttatataaaattttctaaaattctttttgttttcgaaattacaaaaaaatttctgggtaatccggttctataagcctattgatgcaaatggattgaatatttaaattctcaaaggatataaatcgaaaatagtgattaatttcaaattaatttatatattttcgtatatttatatatatatttttttaatatttgaagtttaaaaaaaatatatattatcgtttaattaagtgtttcgcttgcacattctggccagtactcggtggaagcacaaaacaaagtgggccaagcacactcatcggcaacattgaatg

SEQ ID NO: 102933 - DNA, 140 bp, Heterodera glycines
actcaaaaagcaattaaacattaattaattaataaataattgctgtttttcaattattttattacccttttgcggtcgttgttttgttttccttttgctccgactttttttggcgttgtccgatgtttttccacacaatg

SEQ ID NO: 102934 - DNA, 279 bp, Heterodera glycines
gtcatggggaaatcattgggcacaaaagagaaagacgatctgctgaagccctcctcgggacttcctaatgaatagcgcatttttaaccaccaaccacctcgccactaaccgtgaaataatcttcgatggattatcacgtagtggcgcagaaagaacgaacatttatctggattcaccgtcctcagacattatgaggaacagggaataactatcaatcttcttgtaccattggtacaagaatgtggggggtttagtccccgccgtggcgaaattcacatg

SEQ ID NO: 102935 - DNA, 144 bp, Heterodera glycines
cagacccgaagtaaaacaaaatctaaacaaaattcatttccatcttcacatctatatggaataacctttttatcaagctttcttatgctttgttcattgagaatgtccttagcgaaaattttaagaacttcttttagaaaaatg

SEQ ID NO: 102936 - DNA, 584 bp, Heterodera glycines
gttctaccagacctccaacaatttcttcaaataaaatatccctcaaactttctctaaaaattttactcaaaaaaatttttttttccctcttctacaacccctaaaaacaacaattttccctttgttggaggtctgacttttctaatttctgcttctccattcaaaatttcaattcttttatcactactttccatttcacctcatttccgccaaaagtgtaagtggcacatgcccttcttttggttatttttattttgaataaataaataaatattagaaaggaaatttacttcattttcaactattttttaaaagaggccataagggggattactcggaattctgatttatgacattttagggtcaaattccgatttttgggtgttgttttgaaaaaaaagaaaaaactaattatcttgctaaacaaatttttttaaataaaattttatatgcaaatcattttttaaacactttgacgaatatattgttggaaatgtatatgttaaaaaaaggtgagcgttttcgtaagttatggatgatgtgagagatggacgtaatgcacaaagaaaacggtagaaaaaatg

SEQ ID NO: 102937 - DNA, 184 bp, Heterodera glycines
aaaaataagaaataaatttaagaaaaattgatcaatctattcctaaaatcctgactaattttaaattttttcaaaattatcataaaatataaatgaaaaatttagggctgttgtttggataaattactcagcagatgaatgcgcttcacattttatgcggcacggcatttgtgtgtttggcatg

SEQ ID NO: 102938 - DNA, 591 bp, Heterodera glycines
atctttactttgtacgggagatatgagcgacaaaaacatggatttttggacccaaagactttaatcatacaccccaatgcgcgggaggcgaattgcaaggaatttcgctatttgtatactcaaacacggggaatagtcacacaatatgaccaagtgacaggggaaatgcacgaattaccacctgattctgtgcattatctctccagacacgggaagattgacttcccagaaataccaatacatttttttagaaataaagtacttgccaatttatccgagctatattccccggaaaattttgaagaaacgatcgaagtggcgaaggttgtgcaggaaattgcaagactctcgcggccaaacgcctgggaaattgtctcagagaaaaatgatcaaatggccacaaatatagtctcgaatggcttattttcatttttaagagggggaataatttcagctaatcaattatgggtttttctttgttgctgctatataacggtgacagtattaattcagtgcttcctaccagcaccaattgcacaggccatacagtatttgggcttaggtggtcttattttaaatggcttaagaatg

SEQ ID NO: 102939 - DNA, 127 bp, Heterodera glycines
gctttttttttcaataaatggaggggaataaaatttttaattcctttttaactttgggaaaaagtttcaaacgaacttttgaaaaaatcgattttttgtttcataaatattttttcagaaagtcatg

SEQ ID NO: 102940 - DNA, 1003 bp, Heterodera glycines
ttggacgcgtgcgtgtgtgtgggagaaggagggagtgggaaaaaaagagagtaaattgcaatggaaaagaaaagagagcaaaagaaaggaaagggagagataatgggaaatttgtctcgcatcccttccttatttataacccatcttttattatataaaataattaataaaataatgagcacatttttgtgtttgtttgagtggaaaatccggtatatgaagtttctgtttttgtgtgtaagaaaaaatttgtggttttgctgttattattattttttgtctaaattttcgtttttgttaattgatttccattttgatgtgaaagctttttgttttgcttatgtaaacgataatggagaattgtttgattaaaaaaatacattagaattcgtttgaatgaaaaaggtttgttacttaaaaaagttttttgtacttttccttgcttataatatgaaaagaatctgatttggtttttgatatttgttttgaataaaaagcatgttatgatagtaataaaaaatgaaagaaaaatcctttgatggatagaaaaagcaatataaatgtacaccatagtgttttgatttatgggttatatttcaatttctggattccttttaaatagttctgtattccgttgctgaggttgttttccggtgattgaaatgtcggagaactgagtcccggtaattgtgttgctgaaggattgtcccggcgattggaatgttggtgggttgagtccccccccccccccctccattccatccttttgcttcatcattttccaatcggggggataataattgggaagcaatgagttggccaaaatcaaaaatccattcagtctctgtcattttatgggccagctaattaaatttggatttatctgtttaagcattgtactttactttactttttatttttgcattttcttttgacaaaaccattttaaaaaagtttttcattggtttcacataaaatttgcaattttttaaaatttcagatg

SEQ ID NO: 102941 - DNA, 261 bp, Heterodera glycines
gttaaatgattaaagtgtaaaatgttcaaatatatccgcaaaaaaaaaaaatcattgatatgataaagcgtttaatgatttaaattttggcaattttgaattgcatgaaacatagagttcaccaaaatattagcggttggcgtgggatttggttaaaaattcatttctttttaaatatttacagaaaaaaccagttttcatacagaatttttagcgtaagtttttgcatttgtatatttgcaaaaatcgggggggccaatg

SEQ ID NO: 102942 - DNA, 500 bp, Heterodera glycines
  unsure (1)..(500): unsure at all n locations
caaaagctaataatgatgatgaagggtcggtcatcncatcaaaagatatgagacggacattgtttttgagtagttggaatgagttgtatataatgcatggtggatggagtatgacgagaggaatatgttacgggtaggaagaataatattttggtatggtgggtataaatgtaaatagaaagcataggaatatgctacagttcaaaagtgctacttagctaaaaaaaattacggtagtaaggttaaacacattgtacaaatcttatcagttgagaaagcatggcatatttaataagtgattttgcggtaagaccattccatggccataaatttgaggacacacgacaaaattaaacaaacggaaagaattaatcacggtcattattaacatttcatatatgattatcatcaaaatttgtgtgctaccgcaaaaattctttcttttggatgataagactgacagacagcgaaagattattttgtgagggcaactcaaaatg

SEQ ID NO: 102943 - DNA, 293 bp, Heterodera glycines
aaaaaagccattaagatagaaaaggccgaacggaaccgatcccttttctcgcaacagattctatgcaatggtacttgagaggcgaacattttgcaacgcgagaattaagctcgagactcaagagccaaaaaatcagagaatttctcgtcggactttatttagacaaagaaattcttgcccacattttggatgaaagcaattccaatcatattcatgtcattgataattttccaaattaaattttaaattattgaaaaaatatataaataaaaaatgcaaattcctcacatatg

SEQ ID NO: 102944 - DNA, 71 bp, Heterodera glycines
gtaccatcgaacggcgtggggatgtgttaactgtttgccacttaggtgcaaagcagtacgcctttcgtatg

SEQ ID NO: 102945 - DNA, 205 bp, Heterodera glycines
tgtttcttacattctctactacatattcctgccgcttatttggctcttcaattgtatgcacaattggagcaagccaatcaaaacaactccatactcaaaacgctgtggcctcaacagttcgctgattgggcctcgggttcgtttttattttggtattttatttgactttgttttgtctaaggaccgaactcccgagtttaatatg

SEQ ID NO: 102946 - DNA, 136 bp, Heterodera glycines
attaaatttgccttaaataaaatattaaccggacgactttgatttttttaaaatgttttaaagttcaattacaaatggactaaattaaaaaatgaacttaaattgaataaaaaatgataatatttatacagaaatg

SEQ ID NO: 102947 - DNA, 192 bp, Heterodera glycines
  unsure (1)..(192): unsure at all n locations
tttttttacaaattgagccaaaaccgcatatttgtcattgtttggtgaaaatatgttaacaaattcactcaaattttcaaaaatntagctgagagttatttttgaaaaatgcgtaaattgcttagcagaaatttaaaaaaaaattggaaaaaattcattccggtgaaaactacaaagcgagtttttcccatg

SEQ ID NO: 102948 - DNA, 1003 bp, Heterodera glycines
atacaatttttttcttttataaaaatggaaattttgctcaaaaaatcgaatattttttgctagtaatttgaaaaatctttgttagtttaatttttgtaaattttattgaaaagaatttttacacaattttctagcaaataatattttatttgaaaattaaaaaagggtattttttctagagaccgagccggaccggatccggtaccggattttcctggatcaggaatcaggtccggcaattttttgtaaaaatagggattgaccggattacatagattgaccggattatgagagaccggatcccgaatccggttgtttttgaaaatgccaatccggtccggtccggcgaattcatgaccggatccggtcctgctctgtctcaactcaaaatccttcacttttgttcatttttctttgaaaaatatcttttagccataatgtctttaactttaaatggtcaaattttcaaatttttcccccggcggagcctatcggcaccgccggcgggcctccaaaatttttttctttttaaaaaattggcccaaaaaagcaaaaaatggtcatttttggtgaaaatcagataacaaattgcatcaaattttcaaaaattttcccggcggcgcctgtcggcaccgccggccccattaccgaagtttttttttgtgataagggcgccgcaaaaaaacattcttattatttttccattaaacataggttttcaaaaataaaaaactttaaatttttttaaattttttcttgaaattttatttttattttttcggcgcattgttttttccatggcgacattttctggtgcacgaattttacatataattgatgaaattttgcgggttttttccctaaattaacattgaaatctaaatttttaccaatacggaatccggttacggatccggctatttgaaaaatagggattgaccggattaccggattgaccggattatgagagaccggatcccgaatccggttgtttttgaaaatg

SEQ ID NO: 102949 - DNA, 516 bp, Heterodera glycines
attgtttttaaaaaccaaaattgttttaatttaaatttaaactcccttttatcaatgaaatatgaacgagctggggaagcttttcaggaaaaaaaaaaattttggtaagaattttaagaaattggaagtccattttcccatttttgtcgatttttaactggtttttccgttttttccttcccattttattttggcacttttcgccataaaatattttagcccttttgatcaattgccaatttgttttttttaaattttctttttcttcagaatttggagttaacttttctccaaaaattccccaaaaataatttttcgtccgtcccatcgatgcgaattgggctccaaaatgtgcaaattgacgtcaaattcgtccaaattgcccaatttgcgcacattccgcgcaaaaatttcagcgcaaaacaattggaaatatttttgataaaattgggacaaatcattcacaaattggaggaaaattaccattttgacgagcgggcgcatcgatacgaaatg

SEQ ID NO: 102950 - DNA, 509 bp, Heterodera glycines
ttatctgacaacaccggtacgaagttccttttggtcatcgatgcggaggagggcactctcaaagatcacgaaattcggctctttttcaaaaacattcacacaaaatattgcagcgccatttcaaatccgttttattcgtttggaagtactttgcaatccaggtgatcatctccttttgcaatgtcactgctattttggagggcggaaattgaattggaattgtttcgccttcccccccccccatctcctaatcgtttttcaaattagaattccctcttttagtaaaatagatgccgtggttaacgaactgcttgcatccttttgactgttcagaaaagcagtaattgatcacagaaaagagaactattgcaaataaatataaattattttcttttgagcattttacacactttcgcttgaccgtattgaggttgtaaattaccttaatattatcagaaaacaaagttttacataatttaataagactgatatttttagcctctaaaatg

SEQ ID NO: 102951 - DNA, 366 bp, Heterodera glycines
gagtttagcagatgtttctgctggtccgttgtccaattgcgcgagacgcgagcaaatggtcaaatgggaaaagaagcgattaattgcgaattggtgatcagtggaacagaattgacattcaaattaatgatcaggatggaatcgaagatggatcagcgaatgctttttcaaaaatccaaaataaattgctttctgtttttaggcttctcgacgcaacttttggctaaagtgatcagcagcagaagtgattgaattgctgaaaagtgattgatttatttcaattatggaatttgaaattgacgtgatcattaaatatacttttttgttggtacgatcaatttggatttttttttgcagtaaaaaatg

SEQ ID NO: 102952 - DNA, 61 bp, Heterodera glycines
attaatttaaactatttaataatattttaatgggaaggaagatcagatttttttaaaaatg

SEQ ID NO: 102953 - DNA, 472 bp, Heterodera glycines
aatgtgttctacatcggatggcttaaagttggacaatatttgatgaatccattcggaggtccacaaaaaaatttttgaaattttttttatttcattttttcagaggacgacgacgattttggttgtttctttgacagttttaatttgattttgttgacttttgttttctcaagagctcaattatgtgcttgatcggaacacatacatcggtaggtgtgattggttttaaaacggaatgacttaatccaagtccataccaggctgttcaaaatgtcgagctttactatgtacaaatataagattaatttgacttaggaggcatagtaatttctaacctataaaaacaaccaagattttcgaagatttacgcaaatttccttgataaaaaacctctaaatttgagccttattcggtccctaataaaatctctctcctgactgttttattttaatctctctgatcagcgcatatg

SEQ ID NO: 102954 - DNA, 1003 bp, Heterodera glycines
tgaatccgaaattctctctttaagtgacttcaaaatgtgcaaatgtgccaataaattaactcagtgaaagaaaaagtcagatgaacgaaagagtgccggtgccaatctttcgttaattaatattaattattcattcattggcatctgatatttccttttcatttcatctgttgtccgctttaacaatttctaaacatcaatttatcactccataaaaccttttacaactaattatttatggggattaattcccattagtagataatattcccaatcaaattatcgattgattttcgatcgataatttgagtgtgtctactttttttctctgacatccccttccacaaacccaaacctattggatggtctcctcgagagagagagagagagagagagtacattctatgatttctctgactaatgaaatcgactttaatttaatttgtttttttaaatttattaatcgataattttatttgacccccccatacctattggatgatctttgatcccttcaaccgaaacctattggatggacttgtgcgcgagaatttaattaatttaaattttaattaattaatttaaacgagcgagagctgcgcgactatttccgataaattgtggaaaatcaaaaacatggtcgcggtctcgaaccgttgagagtggaagcgaggagcttaaccacttggccacaggggcagttgaaaggtacgggataattgttgactttatgatgaaaattccgttaaaatttattaatcgataattttatttgagccccccccccccaaaaaaaaaggcaaaacctattgtaaggactgtacacaaataatcaataaacccaagcctattgcctatatcatatccgaagctttaagtaaattagcaaaaaacccttttcttccggctgggctcgaacccataccaacttactgtgctaaccaattggccattttatgccactgggaaagcaaaatccaattcattaaattgtaaaaaaatg

SEQ ID NO: 102955 - DNA, 697 bp, Heterodera glycines
atgaaagggcgagagaagggaaaattgagagaaaagggggagagaaaggaagagaaaaatacaaaaacgaaataaaagaattattgtatattttaaaaacaaatctgaaaaaaaaagaatttcttattcgaaggattattttttagaaattttattttattttttttaaatatgaaaaataataaatcattaataataaatcaattccaatgccaacactctgatgagaagcaattgctaaaacattctaagcaaattgataaccaaaatatgtatagctcaaataagaatatttattatttttatttttatgccgttcttttcttctcaatcccttttaattcattggcgctcaaaattttcgtaaaatcggcgaataaaattcgaattgactctgtccaattgctctttgtttcttcgccttcgtttttttgtattcccaaatgcaaaaagcaaattggaactgttcaaaaaattgatgctgaacagaattttgtggaaataaatttgttgggagaggaaaattggaacaaaaatggcaattttattgccaaagtttcatattcgggcccacctgttaatgagcaggtttttaaacaattaatttttacccatttttaaattttatttcccaattttgatgctcatctcaaaatttgttgacgtcgatgctcactttttacttcgtgctgaaatg

SEQ ID NO: 102956 - DNA, 85 bp, Heterodera glycines
ttatattttaatttttggtatcattcaaaagcctaatattttctatttgtctacaaaattaaaaaaaattttcagaaaacttatg

SEQ ID NO: 102957 - DNA, 494 bp, Heterodera glycines
tggatttcatgctaattattagtgagaaaagtatgatgtataaagccaaaaaaattgcaaatattcccaccgaaagtgcgcaatttgctggcaaacatttgtgaatttaggggcgcacaaaagcatttttttttaattatattagaaatatttcgcacaaatttatttttaattctttcaaaaatttaattttgtaaaaaaaaaatttaaattaaatcatataaaaaaattattaattaattttaataaattttacataatatatttagtataggaatttattgttatttggtattttgtagtcactgaaatcattttaataattcctttagcaaaccatttaatggcgaactaattaatcaattattgaacagcaggtgttttacgcgaaattttatctatttgttaagccaaccgacggaaggattacgtcaaaagccgaaaaaggaggtcgtcgcttttgcgtttctgcgaaaattcgcgtgccaaaaatg

SEQ ID NO: 102958 - DNA, 83 bp, Heterodera glycines
aagtttttggacgagccgagagggcctttaggtcggcatgttcgacagtacctttccgctatgagttaatcaaacgtgaaatg

SEQ ID NO: 102959 - DNA, 382 bp, Heterodera glycines
tgttatctaaattaggtacaatatattaacctgaaaaatgcagaaaggagaaaaattttctatttatttttagataattttattaatattggcaaaatgttctaatttcaaaattttttgtcatttcaaagacaacattcaaatttcttataacttttttgccttttcccccacgaaaatgccattcttaggggtgtatatttaaccccgaccccgagtcggggttaagggtcggggtcggggttcgtcggggttggaagcgtcggggtcggggtcggggttaaccccgaaaaatggcctaaaatgtcggggttcggggtcggggcggggtcggggttggcacccttaatcagattaatgaaacgagataaagccaaatatg

SEQ ID NO: 102960 - DNA, 307 bp, Heterodera glycines
  unsure (1)..(307): unsure at all n locations
ccgtgcccgactcattacactngtgtaaatctcaacgtcaatatgacccaacccatcctgtgattatattgtctatgcggggcatgtgcttgcccgcgacgacattcccgcctttaaatctgacctcaattttaaatgtatttgtcataacaaatcttaatgtgttttgggtgaccactcacgaggcaataaccttaatttagctcttttacaaactaaatataggaaaattgaacaccccatagaaaattcgaaaactttactaaataaaaaacaaaattttttatactcaacatttatcaatatg

SEQ ID NO: 102961 - DNA, 75 bp, Heterodera glycines
gtttaaaaatgaaaattgccttaggcattgaaatcggcggaagagcaatgcaaaacagtggacggggcggcaatg

SEQ ID NO: 102962 - DNA, 770 bp, Heterodera glycines
acttaaaaaagaaaccaataatttagctaatattttaggtgtttatccaatcgaaattattttttggaataatttaatttattattaaaaaaaaaaaattatataaaatctgacctgcccattgagacaaattttggttcgtttatcaaaatgctgatggtaatgagcagaattatttgcaaaacactcggataattttggtggattaggcacataagtacagacaaaaaatgctgggcgtttggcgggggagggaggggggaagaagccgtgctgctaaattaaatcaacggatgaacgaagacaaattcaatgggaaaataaaattgaaaaaattaaagtttttctcaaaaaaattttctcaatattaatagacgtaaaaaaatattaataatttgaattatatttaaaaagttagaaacgattcagagaaatataatgcgaaattaaatgaaatcaaaccaaatttaaatgaaaaatatttaattttataaaaaaaagtattttattattatttatagttagtaaaaaaaaaatttctcctcgtaattacaatacaagattctcaatttaacctctaattacgtgtaatagctggactgtaaaactgaatggtaaataccagggatgggctaaattgaaaaataaaaagcgaaatgcgaaaagcgaaaagcgaatttttttttttaattttaccaatagcttttgaggttgtgatgcaaaaaaaaatctgcattttccggttcgatctttttctcagataaaaaatg

SEQ ID NO: 102963 - DNA, 1003 bp, Heterodera glycines
atgtttttggtttacccccgttaaacccaagtcttaccgtgcaggattccggcacggcatatttggcacatgaaatgcatcgttagaaacaaacgttccatgattcgtggcggctgtatgaaatttcgcctactaaggcaaaatcggacgtttcgcctactaagccaaaatctgacatttcgcctactggacatctcgcctagcttatttgagacgaaattatgtggtctgcccaaccgatcattgagttggttttcctattttttgtgtctctctccgttggctgtggaagagacgtcatttacttacttccttatatcattcgatagctctaaatttttctattttattgtaaaatttcaaaaaaatttttaaagtgttccattttgagcgaagttatcaaaattttcgcaagctgccaaatggcatatgaccccggtttaaagaatctcatgagaattaattaataattcgagaaaagaaattggcacaaaaattggatgccaacttttagattaattatactgacaaaaagtgcatgggaaaattgaaagtttattggcccccgtttatattggaatgggaaaatatttgaaaataagacttttaacagtgaaaattatcgtttatttaagttttctcagcgaatacaatatttaaattttcccattaaaccaaaaaaaaaaagaaagaaacaatttccgcttctacttaaaattcacaattaatactaaagcacagaaaataataaaattgaaaatcagtacaatagaatgcctgttttggaatggtattgatgttagaagtacatcaaatatttttaaaaatttattgagacaatttaagaaatgaaagttttgaatttgatgaaaaattaattcgctcattaaacgtgggatttttaaacatttcgaatcggaaaaatgctataaaagaaatgtttaagttcagtttaaacacattgaaatttaaccaattatcacaaaatttgaccaaaaaaatg

SEQ ID NO: 102964 - DNA, 257 bp, Heterodera glycines
  unsure (1)..(257): unsure at all n locations
tctgagccactccgtctcgccaactccgtctggcccctttagggtgagngcctaaggggccaactccggctcagatactttaaaaagagaagaaaggnnncaacgaannngaaaanacatcccnaagaaagaaaaaagagncncaaaaactcatccgttaaatctacttatttattttcatgataagaattattcattaaaatagtgtctgacctaacattttaaagtaccataaatattttagcactacgaaaatg

SEQ ID NO: 102965 - DNA, 478 bp, Heterodera glycines
ggaaaaaattaaaaaataaataaaaacttgctgattaaaaattcttatggctaagtttgtctcattgttttatttatggctacaatttctgcttttgcattttccgcagaaaataatgaaatgactgatcaaacactttcagttaacatttataaataaatccaaaaaatccaattttattgtttttgcattttttattattcatttatttgtttcgttatttgcagcggtataaaaacggaatgaaattaaattgttcaaatgttctcaattcattgactctttcacgggcatttaagcattttatgtcaataagtcaatgtctggtgccaaatttggtcccatttttggcattttttcatttgctttttgtgtcctttttcgtgtgccaaattgacgccgtttcaggtgaatgaatggaaatcggcatgaaaaaataccgttcatccgcttaatttgccattctttttaagacatg

SEQ ID NO: 102966 - DNA, 639 bp, Heterodera glycines
  unsure (1)..(639): unsure at all n locations
atatttttttataatgaaattatttcgaggtgccggcgtttttcctaaaagcgcaatttaannttaaaaataataaatgcgctagaatttatttatttatataaaaaatttttttttatataatgcaatcaattagttcgaattaagcacatttaggaaacacgcccaggacgattagtaaagtaaaatatataaataatatgtagatttatagaaattgttaattttttctcttgactgggtactgagtattgaagcgttgccgtgtgttatatttgcattatttataatatgtaggtattttttgtaataatttcattattttacatattttttacttatctatttaaattttcattctttctagcaatttttaatttttacatacttccttttattttgttctataatattttattattttctctttaattatttactgcacataaataaataatgctggcatggagcggactcgaacctgcacttactagccaattaatgtgctttttattttaattgcttttaatgaaagacttaattattaattagcctttcatttaatttttaattaataattaaaataataaataatttcaattttattaaaataataagaattttcagttacttaaaatg

SEQ ID NO: 102967 - DNA, 255 bp, Heterodera glycines
ggttttggcaatgggaattaattagttaatttattagactaattagcaagacggttaattaattagcgatggaaagtattactaaacttatgtagaaaaaaatctttccaatcacgtaataagccctttctccgatcagtttccggcaccaccccttcggtccctatcggcgctgcgattagcggcggcaccggcgccgcagtcgcttcgtccgcctccggtgccggcggcgcccttttgtcgtcgtcaaaaatg

SEQ ID NO: 102968 - DNA, 92 bp, Heterodera glycines
agtaaaatttattttttatttttttttggaattatttatttatttattttattgcgcaaaattaataaaattttatttctcgactttagatg

SEQ ID NO: 102969 - DNA, 833 bp, Heterodera glycines
aataagaacgaagaagaacatttatgcatgataattacctcacttgttgtttgagcattattgaaacgagaaatgttttatgaaacacggctcaatttaaattattgtcccgataaattaaaaaaatatttaaattctatggaataaaataagaaaggatgaaaaagtttttagctgcgattcattacaaggtgaaattgcatttttttagctgaatatacataagtagagtgctcattttgcagcatatgctgttttgccactgctgcacagttcgccagcactataattttttggggtaataaaacgcaacttttaaattttaatcgcagttgaaaaatagccttttaacaggtttcttcgctcaaattcaaccaaatgcatttttaatttaacattgattgtgagtattataatattttagaagatgaatgctgaataggtcgtaataaaataatttttttttaaatctgtagttaatcaaataaatcgctgagtttttcaaaaaattttggtaacgtctggcggtgccgttaacgaaatctgttaagaaaattggtgcaaatcttcaaatacattcattccatttttggactgggcattatttttggcttttcgcaatttttttttgcttcagattttattttttggcgaaaaaatgctaaaaattccagtaaaatacacctcccccccctaattcgggatttcaaaaaatgtaaaaatacaccccctaaaaatcgagttcaaattattgaaaacgagtgattaagctttgttgacagattctatgtttccattaaaaaatttttattttttgcagtaaaatccccatg

SEQ ID NO: 102970 - DNA, 602 bp, Heterodera glycines
ttcctcttcctacgcatatacaatttggccgcgtgcgcctcctcataaaatctcccataaaatttaactttattgatttttattttttaaacaaaattttccacatataagcactaaaattatacttaatcaaaatttacaagagcattttttgggattaatgaatagttcaatagcaatttctgaaatcattttgaattattaaaatttacaattttcgatagatattgctgaagaaaacattaaaaataaatttgaatttgtcatatatatttgccctggtaaagggaagaatcgttttttggccaattcatttttaccccgattcgtttttgacccaattcgtttttattaccccaattcgtttttattaccccgatcgtttttttaccccgattcgttttttgaggtagaaattcaaaaattcgaggttgaatcgatgaaattttaaatatttaagaaaaattgcagcttacgaatgtttttaagttgggttacagtttacccacccctttactgtgttttagtccattttgaaatttggaaaaatatttttctaactttaaatttttataaaattttgttttcagtaaaaacggatg

SEQ ID NO: 102971 - DNA, 151 bp, Heterodera glycines
aaaatctcaaaatccaaattgtgacagtagttttcaacatgatgctgatccgttcacagttaaaggatttgatcagaacaatgctgaattgtgttcggctacaacacagtcagacgcatttaacaatgaaacatggcaatttgtgaagatg

SEQ ID NO: 102972 - DNA, 76 bp, Heterodera glycines
cgtaaatttttttttttgaatttattactgttaaaaaattgttccattgttaagttacatgttggccgctaacatg

SEQ ID NO: 102973 - DNA, 588 bp, Heterodera glycines
tttttttggcaacaaattggtagcgaaaatataccctaaaattttcaaaaaaataaaattttttttttaatcattgagacttgaaaacaaaggcctacaaatttggagggagaattaagtattgaaaataaaatttttgagtgagttgccttttacgacaaatagaaaggaagaagttgattgtgggccccgaaaatgtacaacaaacaaaaacaacaacgaaaaaaacgacagaacgccaaaaaatttttttttaaattttgctgattgtgagaaaagacaacttcaatttgccgccggggctgctaaaaatgacatctgcaattttcattatgggaaatgaaagtaaattttatccaagtcgaacatttagggacaaaaaaaaagagcttttccccgttagggctttctagggtcggaaaaaccgattctcgcatccatttgtgcccattttgaatcccgaacccggattcgaacaaaagtcaaaattaatttaaaatttgaaaaaacagaccaaaaaaagtgcaaaaaactttcaaaaacccatttttttaacttgtgcgtttcttgattattattattattatg

SEQ ID NO: 102974 - DNA, 1003 bp, Heterodera glycines
ttataagccggctaatgaactaattaaaatcttccgaattattagacaatagattcacaattgtttcctattttttttattaaaggatttttattcaaataaaattttgtgtcggaattcttaaattaaatttccattttaataattgttttttatttcctattaattaaatgggcttcttaattaattttcaaacaaaatatcatttgcaaatttttttattaaaattttttttgaacaaaattttcaaataaaatttccatttttagtattaaatatattattttttttacaattttaatgaaattccaaaaaaaaaataattcacaatttgtttctattaaaagatttttatccgttcaaatgaaatttccattttttagcattaaacattttaattttttgtttattaaaatgggcgtttgtcagtcgcaggaggaaattaaggcacgagaaatttccaagaaaattgatcgtgatctgcaggtggaaaagcagttcagacaaaaattgctatttttgggtaattttttcaaaatttaaatttaataattaaaattaataaaaaaaattaccaaatgataaatttaggaccagctgaaagtggaaaaagcacatgtgtgaagcaaatgcagtaagaaaagttgaagataactgtgttaattgcttaagtaattttaaaaaatgaaaaattttttgactctattgcactttaggcgtacaacaagcgccttttttcgttaagtgtctcatggatttttagaaatttctcatgtccaattttagtatatgtccattaggggtgtaaaatatcaaaatttattcaaaaagtaaaaaaaaaataggccaagagttataatcaaaccgaaagaaacccattttactgaagattgccattgattgaacgcctaaggtacaacaaagcccaatatttttaggtataaaattttttaaaataattaattatttaattaattaattttcagaattttacacaataatg

SEQ ID NO: 102975 - DNA, 78 bp, Heterodera glycines
ccttgcgcgttggttaattgagttacagaattacaatattaaaataattcatgtagcggggaagcagaaccaagaatg

SEQ ID NO: 102976 - DNA, 113 bp, Heterodera glycines
cataaatatatttttaaaatatattttttggcacacattaaaagttatacgcttttatttgcagttttttttataacaattttcaattttttgtgacggttggatgcaaaatg

SEQ ID NO: 102977 - DNA, 79 bp, Heterodera glycines
ggcccaaccaacggccgtctttcgactcggacgatacgacccgcagcgaacaacaccacgcccgctcaaggtggtcatg

SEQ ID NO: 102978 - DNA, 233 bp, Heterodera glycines
tatatttacaacttatgaatgatgaatgggttttcttaatgtgtttttatggtaaaaacccggtttaccaaaaacccaatacgtattggccgattttactgtcccgattcgtatttttttatgtgggaggcagataacattagacagttcatatacctataataactagagttcgacctggacccaggctgggatttttcttggataaggccggcgcttatcggcatcgcatg

SEQ ID NO: 102979 - DNA, 382 bp, Heterodera glycines
tacgtacccccgcgtacccccccccctgggaccgtccctgccccccccgcgccctctaaaatggcaactatgttttaccacagtcaatttggatgagtgttggcgtcctgtttattcgcccaaaaatgtagaggaatctgtcgaacaattgcgcttgtattgcggaaaaatttggcgaaaacgaccgacggcggaacgtacgaatcttaaaagttgagaccaaaaattaaattaaccagaaaaggaattttgttttttagaaaactttcttaatagtagggccaatcattgcccccgtgaagatttatccatttttagcgaagaacttttcttaaaaatttcaaaaatatttttttttcagttacgtcagtgtctttacatg

SEQ ID NO: 102980 - DNA, 290 bp, Heterodera glycines
  unsure (1)..(290): unsure at all n locations
ttttttacaacaaaaaaatatattgggtataatatttctatattgatttgaaaattttttagtgatttcatcannaatcttttccagtgcaatttattaccagaaattttttctaagctattgcttcgctattagacaatttccaaaaaagttatacatgaaaattgtgaaaagtcgaaatttttgaagttttttgtaataaaataaaattttttccaggcttgaaaatcttttcgcttttggtaaggctaatagagcatgttaagagctttcgagtgataccaacaatg

SEQ ID NO: 102981 - DNA, 273 bp, Heterodera glycines
tatttatttgatctatttatattttcatagggaacatatttcgcgcatttggggcatatccagaaattatcaaaaaatgatgtaccgaaatgcaaaagactgtgctttttacacctgctacaaatctcgtaatgacagggacagtaatgacaacacttaattttatgtgggcagttcatttttcaatttaattttattttgggttgctatttatagaaggggtatataaagggagtgaaaggaccatttgattgataccttgtatcaaaaatg

SEQ ID NO: 102982 - DNA, 222 bp, Heterodera glycines
ccggggtgaaggaccaaaggggcccctggtggttgatcaggattggggggcccccagctcccaatggtccctgaaaacaggggccaaaatcgccaaaatggcgatcagcgaggctattggggagcccatgctcctccccgacgggaaccatcacgccgtgaactcacggggcgcctcagctcgtggttggagaaaaaccacgggccaaactggtacgaaatg

SEQ ID NO: 102983 - DNA, 716 bp, Heterodera glycines
tttctgtgatcaatttgtgataattcgttcaccatttcaaaattttggtttaattacccaagtttgaggtcatttcccggaataaattttttattaattctgtgtctcgtccctgcctaccccgaccccagtgcccgacctttggccccgaacgcaatcgggacaaattggcgctcctgggtggatctgtgaaccacggattgactcaacgaatcccggtgacacaggggaagggaaaagcaaattagagagcctagacaaggaccctctgaggcttgtctagtgttcatagtttcgtgtagttattgtcctccgaggcataacttcacgagggacgtagcggactaagtgtttaccctctgaggaagcacttcgtccgaacagagggttggaaggtgttgtgtagtggacgaagtacttgcccttcgaggaagtacttcgtgcaaaaagggtgttttcgcgcactaggccattgacaaataaggaaaaaaggcaaactaacagtcctccgaggctttagtttagccataaggcaaaaggcaaactaacagtcctccgaggctttagtttagccataaggcaaaaggcaaacaccttgtcctccgaggcaggtgtttagtcacagaaggtccaggaccaaggccagactgatctcggaaaaagacacaaaacaacaagcacacacacacacacacgcacaatcaaacagcacaatg

SEQ ID NO: 102984 - DNA, 114 bp, Heterodera glycines
tctaaaaacataacatcaattaaactggcaattaatagcgacctaaccaactaatagtcaattaaactgattactagggagtgtaattatatggatataaaatcgcgaaatatg

SEQ ID NO: 102985 - DNA, 152 bp, Heterodera glycines
ataataaaatttagtaaaacatcaatattcataataagggatattttaatatactgaattgctgtggaaaatgttttataatgctttttaattacattttattaaaaatatgagattgcttatttacagaaatattttaaggttatcgaatg

SEQ ID NO: 102986 - DNA, 405 bp, Heterodera glycines
attttccggcacaggtcgaactgggcccgaatatttgggcgcttcggtgatcaaccctgagacgggcgactggaagagccgtacgatcaaagtgaaggactttaacagtctttatccgtcgcggtaagaaatgtcggaaaaaaaatgaatagttgaaaaatctttggcactttaaggaatatgttcaccaattatccggttggccacccgaccgtggtgcagtttgacaaggacgtggaatggaggcgtccagaggacattgtcggcgacgacggcatccgccttgagggcatcatcaagtgcttcgtagtgccgccccgccactgccactacgatatcccggtccttccgtaccggatcaacaaccgcacgctgtttcccctctgccggacgtgttccgaaatg

SEQ ID NO: 102987 - DNA, 930 bp, Heterodera glycines
attagatgaaatactgacaaaattttgtacaacatagcgaaaatattccaattaaccgtgaaagctaaattaaatatttagtcaaaatgtaatttaaaaatttaacattttacttaaatgcgtaagattcatcaaattctaaaataaagacggcacaagcaaaaaatatgattttagcctaagaaataaggacattttgaatttttacgatttcaaattttgaacaaaaaatggcagttttatgaaatagtagatctcgtattttgaaaaaaaaaaacttggacctgggttccattttattttttggcgtgacttttacaaaaataaaaaagtatggatgtgggaataatgggataatggctagggatgtcaaaaatatgtacaaaaagtggtcaagatatgtacataaatatgtaaaaaaaaatcccgaaatatgtaagaaaaacccaaaatatgtaccaaatatgtaaataaaaaattttggattttttttttgagaatttccaaaatttctgtaaaaaatccacaaaatatgtaaaaaatgtatgaaaaagtccgaaaaagtccaaaatatgtaccaaatatgtataaaaccccgaaatatgtaaaaatatgtaaataaaagtgcaaacttttgtttgcaaacacaaaaaagaaagtgtttttcctactatttagagcatggagaatccaggaaaaaatatgtatttacataaaattgccatccctaataatggcatagaatgggttatttcagtcccaaaaagcgatttaaataaataaaattatcattttaaaaacaaaaatatttaaaaactatctttagaatgattttataatttatgtgattttaactaacagcaaattttttactatttcaacaaacctcctttaactaaatgccgaaaactgattcggtcttaactcatg

SEQ ID NO: 102988 - DNA, 304 bp, Heterodera glycines
ttagcgcccaatttaaggaatgatgagtcgggctttgaagtggccgacgcattaatttcctgcacaattcgctcaaaatcgcacgctgttgtgctccaatttgtggccaaaaatttaagcaaaaagcatttgtcaaatgcttcgtcggctcaagtgaatttgaaacaaaataccaaaaaacttaaaaattggccaggtgttttttgaaattcatcgactgtcgacgggcgataatattgccgacgaattggacggaatgacaatttgcaacggtggcattgctaacaatgcaagggccaacatg

SEQ ID NO: 102989 - DNA, 467 bp, Heterodera glycines
aaaaaggccattacgcaaatcgttgtacgaagggaattttggcctttttgtccaacaccgccacagcgagcgaccagcagagagaacagccgcgagacaatcaacagaagaaatacgccggcggagaggggggacgaaaacgcaaaatgacggacaggaaaatttcgattgatattttgttttgcaaatttatttgttgctatttccccctaagtgagaagaactgaataaacgcttttttgcatttagtttcactagtatacagtttttgcttttatgaatattttgtatttgtgtttcgttcacatttccccctcaacttttttttctaagaataatgtttcacattcgccgctatgacaaattgcaatggtgtggactggcgatccatcgtcgcactttgagtgtacgtttttccctttgatcttttgatgggttacactttcttcagttgaccgtcgactatg

SEQ ID NO: 102990 - DNA, 243 bp, Heterodera glycines
  unsure (1)..(243): unsure at all n locations
cagcagtttcccgtcgatggatcagctcgnccatgccatggtgcaagtgctgcgccatttcaaaatctctcattgttttgcaatgggcgaaggcgccggcgcggacatttgttgtcgattcgctgtaacaaagctttttagtcaaattggtggtccatcatctcgagtagtgcaaattttatgaaattgtttcgctacattcattgacttttgcatatcccgagaaaggaaattcgaacaatg

SEQ ID NO: 102991 - DNA, 1003 bp, Heterodera glycines
tcatttgggtcattaagtctcattaaaaaatttcaaaaaaaattactgaaagtttttactgcaattattgtaagtattacccatgctgtcataatcttcattttgctgctaaaaaaccctcatttgggtcattaagtctcattaaaaaatttcaaaaaaaattactgaaagtttttactgcaattattgtaagtattacccatgctgtcataatcttcattttgctgctaaaaaaccctcatttggggtcattaagtctcattaaaaaatttcaaaaaaaattactgaaagtttttactgcaattattgtaagtattacccatgctgtcataatcttcattttgctgctaaaaaaccctcatttgggtcattaagtctcattaaaaaatttcaaaaaaaattactgaaagtttttactgcaattattgtaagtattacccatgctgtcataatcttcattttgctgctaaaaaaccctcatttgggtcattaagtctcattaaaaaatttcaaaaaagaagcaacagtgggcatattattatgtcaaaatgataaattatgagaattttttttagacttaatttgaaatttcaagaaagcgtcacatcttttctgactatgaatgttacaatacattttattcaaaaagatgatcttgaaatttgcgagcaactttttgtgtttaatcataaaaaaaaataaaaaattaataattaattaaattccgtccattcatttttatttaaaagatatttatttactcgcaaccttttgttaattgattttcttatcatccatcattattcattcacagtgttttctcatccattctcattcctttcgcatattttgtcaaagcaaatccaaaccaaaacaaaaaattgcattccgacgaccaataaatgttgaattattattcaaataattaaaacgttttaaatattttaattatatatagaatttaaataaaacatttatatttgtatttttatttgttaaaatg

SEQ ID NO: 102992 - DNA, 395 bp, Heterodera glycines
ggttcaacttttatcacactttttgtcaatgatttttttcttctttcagggacatttatgtgatcaaagaacggaagaaattttttttgttattacgcgcattttttatacaataaaagcatttgttgtattactgatgtggaattccggtttcaatatttatgtttcaaactgttccaaactccgaaccctgattcgaacccaaaatcgaaaattcaattttaaaaaagcacattttgatgaaaatcgattcaaacgcacgaaatagacaactgcttggagtcggggtcggtttaccgcggccagctcgccgcacatggttcgcagcaggttcttcgccgcggggtttgaacaaatcctttgaaaaatttttttacacttcagaataaaatatg

SEQ ID NO: 102993 - DNA, 335 bp, Heterodera glycines
tatcaaaaattaataaaatttggaatgataataaaatttgtaaagaaaacaaacaaaacttactgtaattggattattgtacattttaaactgattcatttaccggccatacaataaaatatatttacaaccaaaaaaaggcccgaggctgatcatatcttcgatttttaaatactgatattctacatttctttacttaactatctagcgctttataaaaccgaaatcacagctccgctaatttgggaattttttccaaattaattgaatagcctttttcaaaaatttgggtttttaattttacttttgttgaaatttgcagagagctggcaatg

SEQ ID NO: 102994 - DNA, 122 bp, Heterodera glycines
aactagcaagttcaaactaaaatgaaagaatatttaaatttgttcgaattcggttctgatccgtccctggaatttcggcataatccctaaacttcccccccccctccccttattgtaagatg

SEQ ID NO: 102995 - DNA, 103 bp, Heterodera glycines
  unsure (1)..(103): unsure at all n locations
accagaaccgaaactatctgtatggatggatgacaaattctttacatttccattgcccgaccgnccgnngcccagcaaaattttctttaagaaccttcggatg

SEQ ID NO: 102996 - DNA, 210 bp, Heterodera glycines
aaatttcaaacaaggaaatctggcaaaaatcgtattgctagaaaaacaatttttaccatttcaaaaattcgctagaaaaaatttcaaaatgtttttccaaagtattcgtggtgggaaacgttgtgggggaggacgagctgctccaaacagaaacggagttgcgcttcattctttttggttcatttaagcaaagcggattttgctcggatg

SEQ ID NO: 102997 - DNA, 279 bp, Heterodera glycines
gctgaaaaaagcaaaaatattatttaatttattagaaaaaataaatcatccaacaaaggggtgacgacttaagttagattttagtaataaacaatgtcgagtccaaagagctcttttacagactaaatttcagtgtgactcaatccatttacttttatgttttttgactaacaataagattgtaggggattcgaccagaagaaaaaagcaaaaagattgttattaatagtagcactattataaaatgatcaaaaatttccaaccattcaatgcatcatg

SEQ ID NO: 102998 - DNA, 1003 bp, Heterodera glycines
aatttcgacactgaactatttcaaaaactttcactgttttccagcattttcgacactggaccatttcgacagtgagtaaattcgacactattgagaattttttaaaattaataagaaattttggtgttagtattaggtatgataaattttcctatttcattttctaattcgtactttttaaaaggttaggttggtataactgagtaaaacgtcaaacccagtgtcagtgttagacaatgactcataatgccaaatagcgatattttggggcgataattcaaaaaaacctgatcagtcagtgatcactgatcattgcaattttttgcattggttgtcaaagcgctttgtagggcttctagggcccgaaaaccgaaaatcaccctaaaacatgttttcatgacttttgaagacggaactgccagacggaactgacccgcttcgacccattccacggtcggggtcgttttcgcgtgagggccattttcgcaaaattttttaattaatttataaaaatccagaattttgggactcagaaaatccaagattccccccccccccccgaaatgaaaatttttaaaaattttcttcgaattcgtcccccaaaacgaaactacaatatttatgggaacatttttgaatattggcaattttcgtaacaaagtgcactcaaattttcaaaatttttcaaaaaaaattttctcttgaaaaaattcccggttggtcccggcttttctcgcggtcccgatcccggtcccggtcaaaaaagttggtcccggtcccgacttttctggtcccggtaagtcccggtcccggtttttgtcaaatttcccggtcccgaccaactctagttataccaacctaaccttttaaaaagtacgaattagaaaatgaaataggaaaatttatcatacctaatactaacaccaaaatttcttattaatttttaaaaattctcaatagtgtcgaatttactcactgtcgaaatggtccagtgtcgaaaatg

SEQ ID NO: 102999 - DNA, 1003 bp, Heterodera glycines
tccccacgatttgattgccttgttgtcatgcacttgaaaacacgaaaatgggcatatgggaggctttctgtttgttccagccaaaacgccggcggagtgcaagtgccgaaatgttttggggatatgacaatcgatcagttgtgcccaccaagaaatgtgattggcttcaaatatatttacatcaggtagaggagcaccagcagaagcagaagttctggaaaataatcaattttctaagcagtaaggcccaaatccaaggtcattgaatacaaacttaagtgatgcttgagaccaaaattttcccgagactcgagaccaagacttgactctgagaccgaaactcgaaccgagaccgaaaaacccgagactcgagacttttttcaaaaaaatttttattggcttaaaaatcgtttattaagtttttgaaaaatactcgagtttcgacccgagaattcttgaatctttcatcgagaaaaagtctcgagtctccaatccctacggaatcttattagatgacttttttaaaccccttcaactaggcacctctttaaggcccgtaaccagggggggcagactcattggagagctcggtgagatcgatttttccaaattttaaactttcaaaaagtttctaaattttgacggtgaggtctagcaaacggatttcgacattttgaattttgtgattttttaacgatttttcctgagacaacggagagcaattccaaaatataggtgtcccaccgctatcgactggaaccgataaataaacaatatcatatattctcccagagagattacctactcactcactgattcagggattttaaagttgtgaatatatctcatttagagggtcgaaccaataaattatgagacaaaaatacacgaaaaattttggttttatggcatattaacgtaacactcactgaatgtgagatgacagttgtggtcgagttgcaaatcatagtattctccatgtccctcttcttcaggaaggatg

SEQ ID NO: 103000 - DNA, 284 bp, Heterodera glycines
atcagtttataaaaaaaaagttaagcctaaaatttttcgcaaatttaaaaagcaattaaaaatttttagattttttattcatctccctttttgatagtgaaagcatcagagagccttatttaacttttaattaacatttggtgcgtttcagagcacgttctaaaaaatatttatgaattaattttgcaaaataataaataattaatgaaaaagtcagaatttcgaaaaattttaaaaacaacaagcgttggcattttttcaggttaagttagtcctttacaatg

SEQ ID NO: 103001 - DNA, 129 bp, Heterodera glycines
tgcgaaggtcgtcatttctcaagatgggagaaagctcgtggcattctacacagcagcatatccattttccaatcacttctcctgccgattgtcattgatggactcgaattttcgtccagtgagcaaatg

SEQ ID NO: 103002 - DNA, 81 bp, Heterodera glycines
  unsure (1)..(81): unsure at all n locations
aaaaataactcacataattatgtattgtcaagtgcttntagccatacaatcggcacaatccgttcaaagcatacgcaaatg

SEQ ID NO: 103003 - DNA, 79 bp, Heterodera glycines; identical to SEQ ID NO: 102977

SEQ ID NO: 103004 - DNA, 674 bp, Heterodera glycines
ttgcggcagtggtccgttcagtgtccttaaataacaaaaattttagtcagaatttcgatttccgaaaaatttttgggcctcggaatgccaatccaggagaaaaattaacggattggtcgtttgggctacaattccggtttactaacctaaagttgaaaaaataagttgaaaaaaatcataaaacggaagcaaaggtcatcacagttaacagaatgattttgtacaaaaaaaaaaaactgcaaaactctctaaatttacgattttttatacacattttagaaacaaatgaatgaaacaagtttgaccacactacatattattattttcacacaagcattggtcagagaaacttcaagaaataacgatggagggggggggatgagatgaatatgagaaatagtatgggggacatacacatttcaaagaaaaagagttgtcgtcaaacacaaacattatttatttttctctgatgatgaaactgatgtgactgatggcaatgtcaaaacaataattccatgaaaattcctcaaatccggtccgggtgtggttttcgggatcttttgcattttaagcgtccaattgacttttgcaaatcaccgaattgctccccctctttgtttttaccattttttgcacatttttttaatgtacaacaaatcttgttttctacaatg

SEQ ID NO: 103005 - DNA, 446 bp, Heterodera glycines
  unsure (1)..(446): unsure at all n locations
ttttcgttttggggcaaagctgattattttttttaaatcaacagcaagctaatagaatgcagatccattcgaagagatataactcaaattatggcatttatgcctcagaaataatttggtgagtagctntagcaattctccgcgccctctgtgattaaaaaaataaataaataaataaaataattttggccccaaaaacgggaaaagtaacnttaaaatgaatattaacattaaatatattcatttgaaggaataaattcataaatttttttatatatatattaataaatatcctaagattatgtggcatttaatgatattttttacaattttctttgattttggaattgaatccggcaaaatccgaacaaattttaatgaaatattcggcgaagaatgggacaaaaatgaatgtgaagaaattttgataaaaactgaacgaaatg

SEQ ID NO: 103006 - DNA, 143 bp, Heterodera glycines
cgccagtaccaccggtcccactgcctccactttcccccgaagtgcctccacttcggccgagtccgtctcccgaagtgcctccacttcggccgagtccgtctcccgaagtgcctccacttcggaggagtccgtccccaaaaatg

SEQ ID NO: 103007 - DNA, 355 bp, Heterodera glycines
tttcgttttgttccatatgctaacacatatttccttgctttaaaaaaatatttagcaatctgttttaaatatgaaatattccagaaataattctgtaactattattaattattatttaaacgaattcgaactccatctttactcaccggctcatcactcaagttagtgttcgataaagtgcttgaatgaaattataattaaaattagcacaaattaattgtttattgaatcaaaaaacaaacatttaatttctgagccaaagctcgtttattccctaagaactacaaacaaattttataaaacaaaatgttgaaagtaattaatttaaattttttcagaattctctgttgaaatg

SEQ ID NO: 103008 - DNA, 637 bp, Heterodera glycines
tttcggccaattctgaaccccggacgcgaattcgaacaaaaaagttgcaagtctaaattttcgaattaagcattttttgttcaaaaacggcataaatgatctcctattgcaggattgatgtatttcagtttgtttctgtgtatttaaaccgatttgaagaaaaacactaatttcgaaaattttgactttcgattttttgttcgagtttgggtccggggttcgcaattgagaatgattttcttatagaagtttacttctatattacaatactaatgccatagaattttattttaaaaatttgcatcactgacgcattttctactgacgcattttccactgacgcattttccactgaccgattttccggtcacggtcaaaaatcatccattttcgggtgactttgggaataatctcgatggatcattccgtaaaaattagctcagtatataacaaacatttttataaaatttaattttccaaataaacaattgcactttttttggctctcctccggcacagctgtgcatgatgtccacgtgcacattctcgaatttgtatctaaatagtaaaaacaatatattattttaaaatgtatttaacttcatttaaaaatatatttaattggcagaaatcaatg

SEQ ID NO: 103009 - DNA, 191 bp, Heterodera glycines
ttattgtcgaagaaatctcgaaaataggacgtaatttgggactgattttgccactcgttatggcacataaaaagcaaatatttggatggccacaaagtgaaagtatttaaagggctccaaaacgttttcgcacattcataaaatattcattctgcaaaaagtcaatcattcgctgcttatcattggaaatg

SEQ ID NO: 103010 - DNA, 125 bp, Heterodera glycines
gatcggactttgtatccgatcatcgaccggcgcatgaaagtgtttgaaggatgggacgacacagaggacaacgagcagcaaaatgtggacgcagacgcagagacggaccgggatgattagagatg

SEQ ID NO: 103011 - DNA, 766 bp, Heterodera glycines
tgatctgaataggctagtaaatttaatcaatgcttttgtggttttgaaaccgttttgactttttaaaaagcatacaatttaaataacgaggcttaaaaaattaataaaaaattttggcgtaatgttttcttactttgctaaaaagatcgaaatctaattctatggtaacatgtgatttcgtcagaactaatgggatggacgaactggccgctttgataaatatatttgttgagtgattctacgtgtgtggttttttatgaatttaacctcactcatttgcttctttgactttttgccctgaaaaaatgagtcaaatttaaaagttgttttcggtcaatcatgatgagatacctatatatgaaattatgctcaaaagcaacattctttgtgttgaagtttttaaagttaaattttgttgccgaatggacattggcaactgttgcatttgcctgggtgggttcggcgttgcacagatgggcgtgctgccgtgcctgcacactttccaccactcatgcattcagcgcgcactgggccaaaatgcgcagtgtccgctttgccgtcggcacgccaccgacacgcaaattgtgagaccgaaatacgaaggaagctgccgcgaggcgggcgatttgccaagaaaggttgtcgtgtttaatgggcgggcgccaatgaatttgaatttctgttcgctttatggattttagtcactattcgtttattcagactagatggaatttaaattagcaaaatttcctttcctcaggccatg

SEQ ID NO: 103012 - DNA, 1003 bp, Heterodera glycines
ttataaactattaattcatttttactttaataatgctaaaaaatgattttataaaataataaataaaaacaattaaaaaatacagcaaaaaatatttaattatggcaattaagaaaaaaaataaatttaaattttattaatttatttattaagaaaattaaaaaagaatatatggggggagcaacataaagtttttacgtattacaattgaaaccgggtaatgtgaataatgtaattaaaaaattgtttttaagtaaatataaatttggcgactactgagagagtcttggcgccttgagtctcgacatgagaaaattcacaaaatttttgggcggatggtgggatatcgatttcgttgagtcccaatcgttctcactagagtgccacgggaccgggacctggtagcggacaactgagtacaactgagtaccaaggtcccggttttgaccgggaccgggactagtcccggttttttcccggtattcccagccaaaaattcccggtttttcaacccgaaaaggtcccggtcccgggtttgcccaaaattcccggtcccgtggcactctagttctcactactccaaagtgtcagtctcgtgtctcgtaaattttcagtcttgaatatcaccaattcttttttaaaggaaggcttccggaaattaaggaaaatttgactcaactacagtgtctaattagggtaattagtccaaaccaataaaacaaagcaaatttgatgcaattgaaaattaaaaaaaaaataaacattcgtacaaataatacagaaattatatttgcacaaaatgtgccatcagcagaatcaacacaaaaagctgacgacgacgacgacaaatatttgccgcgccgccactaaaataataggggggatttggggattttctgggggggggcggtaaaaattggggggatttgcaattttcgaattttcttttcgcgcgcggtttattaccaccataccaccatctgttctgacagtcagaagaatg

SEQ ID NO: 103013 - DNA, 90 bp, Heterodera glycines
tagagagatagatataagaaggacacatttatgcaaaaaagtaggcattaatgccaaattgaactgtttttcgttgttacagaaagtatg

SEQ ID NO: 103014 - DNA, 1003 bp, Heterodera glycines
tgctggactcggtttttgcccaactacatgggcccctccccttcaaccctagatgaaaccaagatgaaaaattttcgctattagttttatttattggtcgatttatgaaatcattggcttcataatataaataaattaaataattaattgctataaaagtataaattccacttattggagaatgttatttagtttttgaattttactcaatttcaattaaatttcactttctgtccgaaaacccctggtgatcaaagggaggggtgatcaccgggttctatgccctcgttctcggcttggtcgacccctttcgaattgaggcccaaggggggccgagaaaggagaagagggagggcgggacaaagagggaaggaaagaaacggcaccaccactcaaaggaggagtgagtggactccaaactgcgaccgtcgggattgacccgactcgttcaccggtgggaagggaagaagtgaacctcggatcatccgatcccgttcgacagttgcagttttcgagaacggaccacggggcagaggaaggccccaattgtacgatttgctgttggcaattccgaagggagggaagggaatttgccgcgaccaaaggagcggtcaacaaacacaatttatttgccgtaggataaacaacaatcggagagagcaaagtggggagcgaaaaagataaggaaaaaggggagcgaaaaaaatggatcagtcaagaaaaacagaagcaaggaaaagaaaaaaggagccggggggttaaataggccccgggcagggagacaaaaaatgcaaaacatgtgaatgggtcggcacctgcgataggcgatgagaaggcgaagggaaagcacaaatttgaaaagattggtgatggcgaagaaatacgatgaataggacaaagagggggcaaaaaatgggaatctgagaaaagagccccaatcgggtggacaaagaacatttgaattttagtgaaatagcgataaacaaatgcaaattaagcgatg

SEQ ID NO: 103015 - DNA, 600 bp, Heterodera glycines
ttttcttcactgatcaatttttgattaagtcagccggacagttttctgtccaagcatttgcattaaattgtaattgtgaatatttgaataaagattaagaaagagtcttagtcttttctctatctgtaaaagggacgctcaggagccctttcatacagatcactaagccattgacccacgttgggtcaaagaaaaggctttcaaaaggaaaggagaagcattttcctcctttcaaattgtcccttcagtaaaggagaggaatttcctcctttaatttgtccctttggactctgtgagtttctgtcttttggacagaaattcgctttgcttaaaaaactccgcccttctgccgggagagtctgcttccccttctgccgggaagtgcaaatttttgtggctttttgcccacaaattggagccccgtaggggtcggcttccagtcgtaagcctaccctccaaccaaaccaatccaaagcgcggcctgagcgcttggatcaaacacacaacccaaaggggtttattgtgttttcatcaagcgtaagagcaatgagtgagctcttgcgcatctccattgcaccaatggtggtgcgtctcaagatg

SEQ ID NO: 103016 - DNA, 89 bp, Heterodera glycines
ggtaggggaaccaagcatttgttagttttcacatttgaatctttcatttacaaaaaaatgattggcattaggtgggctccgaggccatg

SEQ ID NO: 103017 - DNA, 239 bp, Heterodera glycines
cccccccccccccaaacggggcgggtgcccattttgcccagcgcccagttcataatatgaaaggagagttggtcaaccaaaattttgtgaacgggggggggatcagcggcccaaaacaatttttggaaaattttaggtataattttgggcgccggcccgagaaattgtttggaaaaattttatgaacttttgttaagaaatatattcaaaatttcaatataacgaaacatttttgtatg

SEQ ID NO: 103018 - DNA, 157 bp, Heterodera glycines
tatttgtcaaagctgatctcaacgctcaacgaatttcgtgagcaaaaaacaattaattatttatatataattaatcactataattagtgggtcattaattaatattagccttcaaaatgtaatttacaattatttattttttaagaatttctctatg

SEQ ID NO: 103019 - DNA, 184 bp, Heterodera glycines
tctgaaaagggcatggggaagaactaattgacgataattaatgctaatgaagccacaattgacagtgcgaatggtaatgacatgaattaactgtacaaaatgctaaaccgacaaaatgccatgatttaatcctcgctaattaattaatcatattaatttttccaaatccagtctgtgaccaatg

SEQ ID NO: 103020 - DNA, 70 bp, Heterodera glycines
atattggaataaaaataatatgttaattaattaaacaattcgtgaatccgtcgctcatcagactggaatg

SEQ ID NO: 103021 - DNA, 139 bp, Heterodera glycines
agagacaagggatgggaaggggacgaaggggagatggctggtgtggttgagacatcgctgcgcatttcatttgtctttgttgtgctctcggttacccccaaaattatttaattaaatttaaggaaaattatttcaaatg

SEQ ID NO: 103022 - DNA, 173 bp, Heterodera glycines
ggtaagtgaaaagcatggccaaccccattttgctttggcattgctcacatcctcccaacttttaagcgcggctattggtttggccaccaaacaaatgccattggacgaatgggtgggacaatgccggggcacttactcctattcatcacacggcattttgtacgggcacaatg

SEQ ID NO: 103023 - DNA, 231 bp, Heterodera glycines
aattttcaagtaagcgaaaaggaccgtaaatttaataatttaaatataaaatggccccctactctatccaaaaggacaggttcggcaggcccgtatttgtgatccaaaagttttatgcgactgggacgggacaaaatctcgccgaaatttgaaaaaaaaattcgacggcgagattttgtcacgtcgtaggtattttgaatttattttcttggtttacatgctttaattatg

SEQ ID NO: 103024 - DNA, 409 bp, Heterodera glycines
ttgaggagagtgttgccgaggttcaatttttattccaaaatttttccccaaattttattttattttttaaggctttgaagacatgttatgcctccgcaacgctcagttactcgcaaaaccaacaggcattctttacaatttgttttttgtatttattttattatggcacccccatatctccccctgaaaattttcctaaaaaattattagaaaaaattttcagaaaaaaatattagaaactttttataagaaatttcttgaaaattttttcgaataattcattctttttttaattttgaaaaacttaaaaaggcacacgctgtttggaagtgaaattcgccatttccccccgtttcagtacactttggtgccccgtgccagccaaagtgtcaaagtactggccgaaatg

SEQ ID NO: 103025 - DNA, 1003 bp, Heterodera glycines
ttgttgaaaaaacacaaaatggtaaaaattgggacaataaaaaaaaaattttaacaaaatttggagtgatagatgcaaaataattcttaataaatggacaaataataaataaattttggcgaaattattatcagactggtgtcaaattacataaatgaatggcacagcggtgtggcgcaagacaaattccagacaatctttttaatttttaacgaaaagataaaagaaacggtgtcaaattacacaaatgagcaggtgtgagggggggcaaagtaaagatgtgaaattaaaaattattggtcaaataaacaaacgcccaacacctgaaagggtgctgtaattatttttaaggagataaaaaattaacagacaaatcaataattaaacttaaatgtatttgttaattcactgaaaaatatttatattattttagaagtaataaaaaatttattttaggaaaataattaattaattaaccttttaattattttaatttctaaattatattttattatacggtcccccatttctttttgcttttaaaagagaaaattgtgaattcaataattgatttttttacttgacccctcccgccttctcgccgcccgctctcgccccccccctgcccccgctgatgacgtcaaattttccctttatgagagcaaattaatgtttattatccattgccaatgtggccgagtggttagtgcgtcagtctggccgcccccctggggttcggatccgcttggtgcggggaatttttggagaattttaaatgaatttaaattcaacgtctttgacctttaagacatttaaaataatttaaaattaaataaatttaattaaaataatttgcataaagtcgcgcagtcaaaaaagtcgcgcaccccccctgcaataggtttgggtttgcaagaaaaaagtcgcgcaataggtttgggtttcaagaaaaagtcgcgcaataggttttggcttcagtactgaaaagtctggcgctcagatg

SEQ ID NO: 103026 - DNA, 516 bp, Heterodera glycines
attgtttttaaaaaccaaaattgttttaatttaaatttaaactcccttttatcaatgaaatatgaacgagctggggaagcttttcaggaaaaaaaatattttggtaagaattttaagaaattggaagtccattttcccatttttgtcgatttttaactggtttttccgttttttccttcccattttattttggcactttttcgccataaaatattttatcccttttgatcaattgccaatttgtttttttaaattttcttttttcttcagaatttggagttaacttttctccaaaaattccccaaaaataatttttcgtccgtcccatcgatgcgaattgggctccaaaatgtgcaaattgacgtcaaattcgtccaaattgcccaatttgcgcacattccgcgcaaaaatttcagcgcaaaacaattggaaatatttttgataaaattgggacaaatcattcacaaattggaggaaaattaccattttgacgagcgggcgcatcgatacgaaatg

SEQ ID NO: 103027 - DNA, 353 bp, Heterodera glycines
ggactaacaaccatcatggttttttgtcaaaatccgatgtgccgacaaccatcaatctaacgtgataggaaattggcaaaaaattagctgatcattatttatcaacaatttctgcatttaattgcatttccaccaaagcattgcccgataaatgcccaaaatagcaactgcccttttttaaatgcaaggacattatgccaaacaatttcagaatatacaattttgtttgctttctctccatgttttcaactttttcatttttgttcctgtcgttaacctttttactttaattcgttcttttagttttatttttttgtgcaaattttgaaagcaattttattaaatacgtcatg

SEQ ID NO: 103028 - DNA, 70 bp, Heterodera glycines
gacataaatctacgagtcgtcgaatttctgacccaataaaaatccgatttcaggtcatcattacataatg

SEQ ID NO: 103029 - DNA, 457 bp, Heterodera glycines
tgttgaattatataccgtagattggtttattattctataatatctatgatttattttttttaaatgtgagcgttgaattttgagcatcgatttttatgtgtgtgagtaatggacggttttcttttctgatcatttttcaagctccatccgaagctctcttctttctatccactcgttcgtttttaaattttatttttatttgttgtgtcattcgttacttttcatcgtctactctgattgaaactatgtaaagtggggcaagagagagttgagagcggtcgcgacaagtgggagaaggggggggggggggggtgttggtctggacttgaaaggaaagttataaactcacgatcacatacattgtgggtggggtatgatttgcatattttctccattcgagttcaatatattgtgaggagaaacgcggacttatactacgttagctcatgcgaaaatg

SEQ ID NO: 103030 - DNA, 146 bp, Heterodera glycines
aagcgctcatgaatatgacatccatttcgaccagtttataaactcggaccagaattcgaacaaatatatcggaacttcgcatttcaacgaatttcgaatttttcgtctaaaaaaggcttatatgatcttttattacaggaaagatg

SEQ ID NO: 103031 - DNA, 362 bp, Heterodera glycines
cccaagttcagatccagacttttttaaaatgtcgaactctattaaaatattcccagcggaatctaaacacacaaggcaattaaaacagaaaccaaaagtgcatttatttagcgttcataagaaagattcggaggtggacagaattttaaaattcctcgtaattttttacaagtaatgtgcaaagaacagaagcgttgttgatatgccgattaaagcatacctaattctttcattttttatttatattatcaatatgaaaaaacctttatcgatatgtatatgtcattcccttgttcattttagcattgaatttctggtaattattgtagttgaaacacagcgccagtgacgcattgaccatg

SEQ ID NO: 103032 - DNA, 245 bp, Heterodera glycines
  unsure (1)..(245): unsure at all n locations
gaaaatgtttgtagaatttttgtgtccatttgatacaantttggattantataaatttgggcataatgttttttatttatttaaaactttttaaaaagctttaccaaagctaaagcttaagcttcattaaaagcaattaactccacattttttccctttaaaagctctgttttaacattcaaaattttttacccattttagcccagtatttcaacaatttattcatttcactttcaatgacaatg

SEQ ID NO: 103033 - DNA, 319 bp, Heterodera glycines
tttgtgacataaacatttatttgatttattttaccatattcacaatttgatcaaaatataggtggtcaaaagtgttgtcccatttcattttttggcacaattttgcagtccaaaaattctgaaaaaattcctgctaaggtaactttgagtgctgatcaaaaaagtcttttacagcaacttggtccgatcactccttcctggtgatctgaacaccccaatatacagtgaaaaacggaaaatttttcgaaaaaaattcctagggggttgggaaaatttttctggaaattttaagtgggcccattagaaagagtacaaaatg

SEQ ID NO: 103034 - DNA, 114 bp, Heterodera glycines
ggtgggtgaaacgggcaagaattaaacaaaatgctaaatttttaatcattaaatacccccaataattcattaaagacgcttgcgttgaacgcgtttgcttccgctttgaaaatg

SEQ ID NO: 103035 - DNA, 204 bp, Heterodera glycines
tttacaccccttcgcccctcaacagatccacgtgtaccgtcaccatttgcgggagccgcgtctgtacgagtgccccgtctgcgacttctctcactacgcctgctcttccgacgtgcgtaatcacatcctccgagcccacaaaagccaaccgacgctgttgccgcgggcgaatttgctgcgtttctcccgcgaaatcgcggaatg

SEQ ID NO: 103036 - DNA, 88 bp, Heterodera glycines
ttttcttttttattgcgagtcaaaattatggggtttattttaaaacagaatcgtaattaaacgtggtgacgccattgcccgtgagatg

SEQ ID NO: 103037 - DNA, 162 bp, Heterodera glycines
atcatttttttattattatttatttattcattcatccccccttttagtcactcctcctttttggtataaaaaatttttctaaaatttcaaagttctaaattttacaaaggtcacccattcgagtttggcaatttggttttgtctttgccattctgttaaatg

SEQ ID NO: 103038 - DNA, 414 bp, Heterodera glycines
aattataaataaataaaaatattattatgtaatgttaaaatgaataacaccaacacaacaaaacacgacatacaaattttgaattccccagaagagcctaatgaaactcttttgcatgtactgcttttttctcattatcttcttgcatttcctgtgtttttgcttttttggttcgttttaattcggtggcttaaaagtcacggtcacctctcgcccagcgaggccgagacagtaatggaagagatgaaaaatatcccccgacacccaccaatattttttgcagcaaaatgatgcaagattagagaaaactgacactgaactctctcttcagtatgacaaaatcgataatgactcatgctgatggagcattctcaaagctactcattctttttcatcattcattttacaaaaatg

SEQ ID NO: 103039 - DNA, 179 bp, Heterodera glycines
attttctcgaaagtaatcaaaaaatcactatatttttctattaacctaataaatttatgaaaataaattattttttattaaaattattttaatttgcttaaatttttaattttactttttactttattaatgaattaattaattaaattacaaattttatatagtgtgaacaaatcatg

SEQ ID NO: 103040 - DNA, 433 bp, Heterodera glycines
  unsure (1)..(433): unsure at all n locations
ttaattcgcgcataagccatacgtcatgcnaattcattcaaattacatacatacattcggacatatatgggttgtattcagtatacatttatcatgcggtttcattgattagctcaaatatgctccgcttatccatgccatttatcttacatgattctattatatatggctcctttatgtgcattagtcctgcatgcattcattcaattacgcactcattcattcaattattcactcattcattcattcatttattcattctttcattcattcacgcataacataggcattcatagagctatcaggcattcatagagccatccattcatacattttaattatcataaaatgtcagaaataagcttatctcattcagatgagatccaaaaatataccttctaagctttccaatcccgaagttcctgaccaaatg

SEQ ID NO: 103041 - DNA, 626 bp, Heterodera glycines
ttttgtcgtcaaactaattaaaattcttttttttctagttacgggcctgcccctaaattatcctgcatttttttaattaactcctagaaattggaaatttttgctgcccaattttcgtgcttttttgtcgtttttgtaattttttatgtcttttttcatatttttcgtgcctattttaggtgcttatttgaaacattttcgtgcctaaaagttcgggccctagttcatacttaacaaatctaaagagtgtttgctaggtaaattattcgttttcgcgtccgccaattcaagtccaaattttccgatttgactaataaacgactgattccaaagatcactcaatattacaaaatccctgaattttcgaaaaatatcacttcggcttcctcaaaacacataattatgccaaatgatagcgaacatttaaaatcgaaaaacaaagcaaaaaataaataaaagtcttgtgaaatgttaacgatttctttctcgtccctctaaatcttcacaataacttcttgaatgatttgtgttgcgtcattttgttgaccatcttttgcacatcgtcactttcaaaattgtatctcatgtaattggagtcgttcgttgccgcaacaattttgaaaatg

SEQ ID NO: 103042 - DNA, 549 bp, Heterodera glycines
attggcatcgaaatttcgttgataccattcaaaaatttgtggcaaaatgggaaaagtttgctgctcgagtcaaacgaatatttgaggttttgttttgccgtggttttttttatctcttccgaaaattttgacatattatcaaaagattaactcacaagcaaaaaaaaagggggaaagaatcatcggaatttaataaaatttaacatcaagaattatgaaaaatgcattttctttttttgttactttttgtttttttttattaagagaaaaaaaatgggaaaaagaggtggactaagattttatccgaaaaaaaatttgaaaccaaataattaaggaaacggagggccagaggtagaaaattattcccaattttcaaactcccttccctactagccctcccctcttttacagccccccctcttcctttcctcgctacgaaaggtccttccttaatttgaggtgcattgacgttcctttttcatttataagccaaatttacgcgaaaaacttccgaaaaatgaaaaacttagtcagaaattgagagaaatg

SEQ ID NO: 103043 - DNA, 674 bp, Heterodera glycines
attatgcaaaaaaacaagtaaaaagggtaaaaatcggattaaaaaaatattataatattgaaattataaacattaaaacaaactaaactcatagtatacataaaaaaaacatcaaacacgccacaaaaacaacaattatattacaaatatacatgtatatataaaatccaaaaattgctatatatatacataatcttatacatataaaatggaaaaatattatattatttaattaattaaagaatatgtttgttttttatattttttcctatataaaattgcttgaaaaaattgcaaaaattcaatggttttatgcacccaccgtttgtcatcaagctagccttttgtaaattttcgcgcatcttcatatggtcatggttgagctcgttgaactagaaaaataaaaaaataaaatttgattatcgaaatatatattctttaatattaattaaattaaaaaagaatgagataaaaaaaattgataatcctctcattcctttaaacattaattagaaaacaaacctgaccatgaaatggttatgctccaaatcctgggagagtttgacctgaaaatgaagttgaattatatatatatatattattattattaagtgaatttaaaagcattttactttttgcttaatttagcaaaaccctttccttgtacaggtatg

SEQ ID NO: 103044 - DNA, 357 bp, Heterodera glycines
  unsure (1)..(357): unsure at all n locations
taatttcacatctttacgttgccctcccctcacactngctcatttgtgtatttgacaccgtttcttttatctnttcgttaanaattaaaaagattgtctggaatttgtcttgcgccaaaccgctgtgccattcatttatgtaatttgacaccagtctgataataatttcgccaaaatttatttattatttgtccatttattacgaattattttgcatctatcactccaaattttgttaaaaaaaaaaatttttttattgtcccaattttgaccattttgtgttttttcaacaaaataaatatttgttcaaatttaaagaattaatttttaaaattttagacacaaaaacaaatcatg

SEQ ID NO: 103045 - DNA, 931 bp, Heterodera glycines
gcttattgcgctaaaaaccagcacacactcgaaccacggcggccagtaggtggggcaagactccgggctacggaatgcaaatttttgcaaaaaaaaaagttccacaaaggagagtaatccactttcactgtggacatgtcatagattaagtcgtcctcgggtaatatggattaaacaaaaataagaaatcacaacaaattaaatataagaatcaggtcattcgatcaataaaaccaaatttttaaatgctaaaaaccaaacatttacatagcttttacaaagatttattctattctctgagattattaaagaactaaattggtgccattctttttaggtcaacattttgctcgataatttttatagaaattactaatgcagaaatgcaaaaattaatggataaatgagtcatgtaaatgtgaacataagcaacagcagagtcagcagatgttcatttattacttcttcaatttatttaaaatatcatattttttattattttttatatataaattcactttatttgtttcaaaaatggctctattgcactttatgagtccaaaggtttttatgaatccaatcaattaacaatacctggtttttatgtatacaataattttgttcatgcgtgtacaaaccctaaatttttgatatcattcgaaagcacaaaagcgtttaggccattgtcaaaaaagttttgattaattaaatattgtgattattttcgtttgtaactttctttagctgttcgaattctctttttttctcgtattattaccttattcagactttgtgctttcgaatgataccaaaaagataggagttgttcgaacatgaacaaagctattctaaaaaacaggtattgttaattgatttccagttttaaaagctgattccaaaatgtcaatttcagccgattcaacaaataatg

SEQ ID NO: 103046 - DNA, 847 bp, Heterodera glycines
ccgaaataaagaacgcatacgtaaatatgattctttattatttgtgcgacatgattggaaaattgcaatttattatcaatatttatgcctaaatccctaattgtatccacaacatttattatatttccatcaattttatatatttctttggggtttttattccccaagtaaagtacaaaagtttttttaattgagattctgatttgccatttatttgcccattctgataaattatgcaatgctttatgcataatttctgtgtcaactctcgctttataacaaatatacaatttaacatcatcagcatataatttaattcttactcctgatggcaaagcatcaggaagatcgttaatataaatcaaaaataataaaggtccaaggacagatccctgggggactccagaggtaacttttttactggaggataaatcatccccaattttaacacaaagtcctattactcaaaaagtcctttatccacatcaaaagtttgccccttatacctattttttccaatttgtataaaagtaattcatggggcactgagtcaaatgctttttgaaaatcaatataaatacaatcaacattttttccatttattattgcctcgtaccaatcttccacaactgttattaattgactcgttgtagacctatttctaacaaaaccaaattgaaattccgaaatttttttgttttttaatagaaaattgtaaatatctttgcttaaaattctttccattaccctgcagagtgagcaggttaatgaaattggcctatagttttcgggattatttttgtcacccttcttaaaaagcggaaaaacaattgattctttccagatg

SEQ ID NO: 103047 - DNA, 238 bp, Heterodera glycines
aagcttaaaaattcaaaggcaacgcctcagcttgatgtgaggcttaatgaagtcgcgggtaaataaataataaataaccactcactttattttaacaaatttatttatttttcttttttaaatatttcaaactttattaggcaaatgcataaaatttttgcgtgcatttaacgttgagataagcacagaaaacgaatttttagcttgatttgaagcttcttggatcaattatacaatg

SEQ ID NO: 103048 - DNA, 599 bp, Heterodera glycines
gacgaagaaaacgacgccaggtgtcttcccatttacaaattaaaagggcatttttggaaaaaatatttattttttggcagaaaaaattgcaataaaatattaagtttagtttttttttctttttgaaaaatttttttaattttttctcttttgtgtcgaagcatttctccttcaaaatattgttaaatttgaatatatttttccattttgttttgtaaagcttgctgcccaaacgaattacaagtcgagcgactcgccatgtcctcaaaatgactggaaggaactcatggaacaagtgattaatttctttttaattcttgagttaatcaaaatgaataatgcaaaaggcatagaaattttcctttccttgcatttttcaattttcgagaaattcgtaccaaggcccaataatctgtgggcatgttttgcctccatgtttttaagccatgcaaaattttccgcagagcatctcatcagaggactcggtccgctcggtaaaagccatccaaaacgggctgttcagacggtactccgggcgcaagttcctggtgacctgcgcaaccgcggcaaacgaagactctgccgccggtgccgaaatg

SEQ ID NO: 103049 - DNA, 181 bp, Heterodera glycines
aagttcaaatttggagacaccacgaaaaaacagaccattttatgtgtcaaaaagtggatcatgaatttattggggattgaaatgatggatgctttcggacttttggacgacattcgacaaaaagtcaattcttcattgaatttgaatgcaatcaaaaagaaaatggtgatctcaaaagatg

SEQ ID NO: 103050 - DNA, 424 bp, Heterodera glycines
  unsure (1)..(424): unsure at all n locations
tttatgttgataaaattattgttgttaattaatgtaaaccttctaagaaagtgaagagagaaattgacatttatacacacctttattccaactaaaaagtnagnaaaantcagaaaattatcagaaaaatagcgaaaacattctgttggaaattgaatcgaaattgttggacaattcgatttgttggattttggagacggcggaaatgccaaaaatagcgaaaaatgaaaaggaaaaattggagaaaacttttgagaaaattttggagaattataaaaaaatagcatcagaaactaataattctgtgcgaaaaaattgcgaattttggaaattttggcgaaaagcggcaaaaaatttcggtttattatttttatttaatttacacaaaatttaaaataaaaattaaggaaaaaatataaaaatg

SEQ ID NO: 103051 - DNA, 756 bp, Heterodera glycines
tcactgagaaatcgattataaatatcttctaaacatctatggctttcgaatgataccatgattgtgaagtttggccaacaaagataaaagttatagctttttgaacgatgttgagacggagttggccagacggagttgacccctaccgcatccccgcgactctgacccccgcaatcccccgcccccgcgaaaagccacccccgcccacggggtccgaaccctacttttgatggtgacagtataaaacggcgcgcaaaaaaaaagtcggctccaataaatctcacgctaaaaaacccgcgtcaagtagcaacgcaaactgggcggatcccttaacaacagggctgccaagtgtcctttttttaaagatttgtccttttttggaggggccggatctttaaaatttaaaatgtcctttttttaaagattgtcctttattttaggcttccccaaactttttaaattttttgtgcttaatgatttatttcgctgatattttatttatttattttcgttttaatactattttctcttcctctctttccctctcaacttaacttttgttttttgagcattctcatccataacctgttgtcagacgcataactatttcccatttttagcttttttttacattttccaaataccccaccaaaaacgcaaaaatatttattgtgaaaattatgcaaaagaattccggcacataaagaaattcgtgttgatcggttccctgagaaattgcgttgggtctcactgatg

SEQ ID NO: 103052 - DNA, 289 bp, Heterodera glycines
attactaattgccatcatttgtcagtgtgagtaattaacgcttacttttgtttagtcgtctcaaaatttcaaacacgtggaaaatttcgtcggctaacaaactatttgagtaagtccaattaaaataatgcatgtcaatgtttttgaattttcacttcagaatctgttcgtcataccctcaatatttgattgttcccgcttcagtgtccgacgagaaactgaagcaaatgcgacttggcagaatttattaccgttttcaatttgcaaattttttatagctaaaaaaatg

SEQ ID NO: 103053 - DNA, 398 bp, Heterodera glycines
actcaattatcaaataaataaaaaaaactataaataataataatttaaaataaaattgaccaaaatattaattgcaagttattacttcgagcagaatattaaaattctatttttaaacaacattaattcaaaaaataagacaacaaaatttggaccaaattttttgtaaaaaaaaaaaaatgaaaatctaacttgccgacgaacgaccaatttggtcttcaagaaccaatcattaatctagcctttctcgaaatctcgcgttccattttctataccagatattcgggagtccaacgcaaaaaatattggatttctctctcccctaaaaggtgcccggtttcaagcagtctctgcgccgatacttcctcttcttttcaccggtcagcaacatcagcatg

SEQ ID NO: 103054 - DNA, 116 bp, Heterodera glycines
ggtcatttcaaattaaatctcttttttatccgtttttccctatttattttatttcctaattttttcttcttttccccctttttttcatttcgtttttttagctttccgatcgaatg

SEQ ID NO: 103055 - DNA, 314 bp, Heterodera glycines
  unsure (1)..(314): unsure at all n locations
cataagttttgccaatattcctgtccaatttctaccgtaaccccctcgtctctcgttgcagttccttgcccagcatccgtttgtgttcgcgccgttcnccgcccaattttatgtgggcgtccggcgcaatttgccctactttgactacggcgcgttcatccgcaaagtgagtaagaaatttaggaaaattttttggcccctcaaaatattatttttcccgattttttaccattttaaaattaaaatttttccgatttttccctaaccctccccccgtcccccgtttttgcagtcgttccccaactttcaaaatg

SEQ ID NO: 103056 - DNA, 206 bp, Heterodera glycines
agtgagtggaaaatggggggaaataaatgaaaatgaaacatttttcgaaaacgggtttgtgatctggaaatttttgctcgatttggaaaagcgtagtaaaaaattaaaaaattttgttgtccaaccaaaattcttcactcaataaatagaaaattccctccccgttttgtcagaatcgtctcgcgttggatcgctgcgtgtgcatg

SEQ ID NO: 103057 - DNA, 711 bp, Heterodera glycines
cccccccccttttttttttttttttccctttttttttttttaaaggttttttttttccccttcccccttcccctttttttccccccccttttccccccccccccttgggtttttttttcccttttttttttcccttcctttttttccccgccccctttggaattgagtccatcagaaaaaggggaggaaaataaccgtttttattggcaaaaagaactttcaattaaaataattctggattttaaccaattctgatcgattttaattttacccattttgataacctttttcgatgttaaattttcaaattatttttattattgttattgtcaaatggaaatcaaaaaaccaaataaaaattaaattcagcaggggcccccttagaattgttggccaaatccaccaaaagttggtatcattcgaaagctcttaacaagctctatcggcttcctaaaaatcacaaagatatgccgacatgtaaaaaagttataaattaaaatatgcaaaaattctgactttttggtagtattcatgttgcaacttttttataagttgttcaatcgcttataaatgccttatcaaaagcttctaaacatgtagagctttggaatgatgccaaatttataaaatttgaccaacaaagaaaaaagttataatgttttatgcagggttcccagatctgaggatttacatattttttcaacgagtatg

SEQ ID NO: 103058 - DNA, 202 bp, Heterodera glycines
tggccatcatacgttcaatgatgtgtagatcctggcaattttagcggaattaattaatcatttgtaaaattatccattgattaggaatttagatagtacagttgtttgtgattgatgagccctaattttggataatcctacccgatctaaattagacactaatttaaatcttggataaaaaaattgtcaggattgaataatg

SEQ ID NO: 103059 - DNA, 124 bp, Heterodera glycines
cgggggatatgtgaaaaattcaacatatacgcatgccacacttgcatgtggaattcagttcactcccggacaaagccgaccgacggaaggccaaaaagtggtcactctcgggccaccgactatg

SEQ ID NO: 103060 - DNA, 55 bp, Heterodera glycines
ggtaaattttgcaaaataaataatgagacactaatgatcgtttactcaaataatg

SEQ ID NO: 103061 - DNA, 525 bp, Heterodera glycines
cagcgggcactttttgattcgggtttcagaaaaaaagttatgggccgtcaaacgcaagaaaaagtgagaaatcggtccccgggactcagtcgtccgcgcagaatttttctctatagttttcccgaattctcctcaaaaagttgtaagacccttccactactttcagacccgtcccattagccgttaagctcaaattagtttttgaaacgaaactccttgtcaatataacgtatatataactagcgggtgttgcatgcgagggtggcgctggggaaagcgcttcgcgcttctcgagcttcgctacctagattagctatctggttgtgaagagattttgaatttttaaagaatttcagtgatttttaggccgcttcgcggcctcgaacgggcgcttcgcgcccgttttttaaattcgttgaactcatacgggcgcttcgcgcccgttttttagcttgttaggccgcttcgcggccttggacgggcgcgtagcgcccgttatttaaattttgaggtacaaaagtgatg

SEQ ID NO: 103062 - DNA, 1003 bp, Heterodera glycines
  unsure (1)..(1003): unsure at all n locations
taccgatgtcattgttccccctcctctccccttttgaaatccgaattattatttgggtacaaagagcacttttttactttccttttccccttctccttttgctcttttgctctgtgaggtgttttcttccctcctccctctctcctccactccttcatttattatttgattttgttcttctattttgtcatcccttgtgaacataatcatttggttttagaggatctcaaaacttttttattccaataagttattttacaataaatattttcgccgccattatcaattttaataattttgaagagggaattagcaaaattgtacattatagtgcaatcgggctcaaaaacttggttgctacccctaattcagaacatttcttaaaaaaggacagatcgcgaccctggtattaatagaaatcgaattcaacagttctttattatgtgaaccataacactaagggaccacaattattattattatctcaatccgaaataacaaacatcattcgcttcctcactttttgtcatcttctttcataatttcggttgttttgtttttgtctccataatcaactgatcacttctttttatcagtttattcttcacacaaaacaatgggagaatgtgtgtgtaagtcttcttcttctcgaaacgcatcaaaaatcaattgatttcatttccttttcgtatttttctttcgctttttcccctcccaaattttctcttaaatatattcaatcactttttgctaatttttattgactctttttgcaattacaaactcataaaaatttaaacgatcataaataaaaagttgaagggacaatttcaatgtttcataatgtttttatcctagcactattaaacaaagggctaaaacaaatcacncactttttatgggtcgtggtcattttattagatatgtatcacctataaattctatgtacttttagaaacatactaatttatttgttttttctttttatttcattaatcctatg

SEQ ID NO: 103063 - DNA, 330 bp, Heterodera glycines
ttcttacgagccccagagcgcaaagagtggcgcaaaatgtttttgttgggcaatgaatgatcgccgaaggcacgctgagcgaaagaaatttggaaaagttaaaaataaaagaaaatcctccccaatcattacatttttcgaagaacgacgagaaagtcggccaaaacacaaaaaacagacaaagaaggcgaggaaaaggccgagaagcaggccaaaaaacaattgggcgagcaaaaccaatacaaattgaaaggccggcagcgaaaaataattggtgaaagtgttagggtcaacggaagcccccaagcaaatgttagggttgtcaaaatg

SEQ ID NO: 103064 - DNA, 1003 bp, Heterodera glycines
aggaagtccgatgaggacgacgacagctgaacagagcgaagcggaaacattgccaataagcgacgatcaaacggtgccatccctaatcgaattttaccggtgaggaaaaccgaagccgtagcaatgtaaaggaaaaaaggcagagagacgccgatgttcggttggacgaggaacagaagggagcaaatgataaagatcagagcagacacttggcaaaatgagtgggaattgaggaagggcccaataatttgccaatgacaccgaaaatgtcgatgaacacgccagaatagcggtagcgtggccgtcgcgaccgttgttgctgctgcttcgactcggcggcggcggaggccaacagaacgggaccgatggaaccgccacggttccgttccaactgggcccggtcaataagaaggtggttaaatgaccgggtcaaacgaccatggttatttgacctggtcaaatgaccacgaagttggtggtaaaccgagtcaataagaaaatgaccacgaagtgccgttttgactaccaacctccgtcaaactaccatgaactatcttcttattgacccgggtcatttaactacatgcaattttggggcagattcacataaaaattttgtttttttcttctatttatgtgataatgagggatacgtggtcctattagagggataaaattaatttataattagtttattttaaagaattttaaaaaatgtttaaattggctcaaaaattaccacaattgattatcgagaaaaattattttatggatgtgtttttggttaattctttgttattttcgtaaaaattatttgtctctcgaaattttttttgtcgagttttgactacctttgtaaaaagtggttttaaaaatacttaacattaagataaattttttattttggtatcagaagaaagagcacacttcaatctataagaatcttatttttgtttatttttatctcacaattttccgtgtcaaaaggctcatggtaaatatg

SEQ ID NO: 103065 - DNA, 715 bp, Heterodera glycines
tcgtcagtttctctgtgaaactttttgcaattttttggtctccgacccaacggcggtcagcgatttgaccggcataaaagtgtgaattgttggaaaggattcccgacctatcgttttattcagtacttttttgatgcactcaacgacagcacccgtcactttctgcaaaacgccgtcctttccgatcaccgcacactttcggacacttttggcaccgaaatgtttgccatcgtcaaagagatcagtcaattagagtcgtcaattttaattacctttccttttttgttttagaaatttttggatttgttatgcatgcaaattgaaaatgatttgcgcctttcgtaccattcgcagcaaaatgtttctttggattcgatggaacgctcactttttgctgaaacatccgatggcaatattgggaacggtggcggcaccgccccacggcaccaccagcaggaggagggccaactttggcatgggcactcggaaagcgcaacttcgccaatggttgcaagcgtttcggcaaagctgctgcacttgccgcccttccatttgggcaacaaactgatcagtgtcaaaggtgggctcagttggccgtcctttcgctgatcgttcgatttggttttcgtcagcgttcgtccgatgccatttggagtccaccttctacaatttgtctgtgctcgctttgcacgattgcgacagttatcgccgcatg

SEQ ID NO: 103066 - DNA, 125 bp, Heterodera glycines
attacctctgccttaccgggaataacccgctaccgctcattaatggattgaaaatttatgaatttaaagtgcaaaactcgaagaaacattcaaagctgatttggagagactcatgtttattgatg

SEQ ID NO: 103067 - DNA, 258 bp, Heterodera glycines
atcatttttttcataaaaatagggggaaaaaatcatttatctgtttcaaattttctattccattcagcacgcagtccaaatagatgagatttaggggaagataaaaaaacaggcattttagtacgagtaaggcctatatacgaattttagggtgactcaaatatatctggggtggtttgtgccctgagggtttaaaaaatgccgaaatttcgctaaaataaaatttaaaaaaatgtaaattttatttctttaagaatg

SEQ ID NO: 103068 - DNA, 119 bp, Heterodera glycines
ttataaatttggaaaaagccaactgacttttcttttccttggggggggggagcgaggagttgttggatcacgagggatctgatagtttaaaaaaacagatttgagtaggtaaaccaatg

SEQ ID NO: 103069 - DNA, 875 bp, Heterodera glycines
gttaatgctctatttcaaaagttataagaaaaacaaaatttaaagcctcataacttttctctggtacaccaaatcgcttagcatttgcttagaaaaagcttctcattatcaagagctttcgaaagataccaagattatccaatttggttggcaaaaaccttcaaaaataattcccaaatatcgtgattttttattattttggacaaaaataaatgaaaatattcatgttgcacatcggactcgaaccaccaccctttgtccctttactatcttacaaaaaccactgagccacacatgcaaatcttttctggtacagcagctcatttcccggacgctgtgtaaagaatctattaaaaaacataatgctatgcattttctaaatttagaaacagctcatttgtttcgtctgtcaattttttctgtatcacaattaggaactgttgatcgctaggatttcaatacttttacattttgcgacaaccagaaatcgcccaaaaactggttttaactcgaaaataaacaaaatagaaatcccccattcttcatgattgctcagtggaggttcgagtccgctccacgacattaatgtattttttttgtccaaatcaaaaattaaaaaatgaaaattatttttgaaggtttttgccaaccaaattgcatactggattttagaaagatcacgatgaggaaacctttttccaagcaatggttttttgcacagtgtgtgtccagcaataaaaatggaaaaaaacccctaatagaaaaattctcaaaaattcatccctaaaaaaactaaaagtgatggacgactaaattggaatagagttttcctggccttaccaaaataatttaattttacagcattcgaatcaatg

SEQ ID NO: 103070 - DNA, 85 bp, Heterodera glycines
ttttccatgtttcagttggctttgcagcgacgtttggatggacattctcccatcttttgaccatgcccaactcggactcaaaatg

SEQ ID NO: 103071 - DNA, 1003 bp, Heterodera glycines
acgactttaaatttgtttttgtggttttttaattgtttttaagagtaagtattttaaagtccttaattttttggatttcaactcgaaaaacccatttcttaaagtcttaccaataaattaaatgaatttgaaaagataattaatagtcaataaattttctaatttaaataaattttcaattattaaaattatgattcttttatgaaattcatggcacaattaattaattttattaacaagggaacattccgagctgtcagtcggaaaatgcatataaatgatataccattggatagaggagggtcgacttctatatcggttttttaatttttcgtttgaaattaaaaaattattttctgatgaaattaaatttattttaatacaaatatatttaataaaattattaattaattattaattaattttgtaaattttttagtgatgcgtttttttgtcttcgtgtctgtcgcgcctaattaccctaattaccctccccccccggcgattgttttgtgaccgacaaataattgtaaaaattttatgatttatataaatttaaattttttaggctttaggctctaaaaagaaaaacctagaaaataggccctaataactcgaaaagtaccttaacaaccaccaaaaaacaacaacaacttgtttttcgtgtatttcagaccatagggagctcagcaaataaaaattgaagccctagtgatgaagtgtgaaaacatccaatgggacgtaattacgaaatggcatttgaaattatgatgaaattcatggcttttaattattttaatattatttattaatattttattattaagaaaatctattgatgatcagtttcacttattgatcgcctttttggcaatgcttctccacattcattaaaatgaaataaaaaattattttccgaagaaattagcttaattttaatacaaatatatatattaaaaatattaaaaacttattaattatttattatatttttttagtgatg

SEQ ID NO: 103072 - DNA, 136 bp, Heterodera glycines
ttcccttttttattttcaaatgaatataattttatttttaaatttgctttctcattgaattgccattttgtgcagtgtttcgcccccggcggcggcgctttgtgcccaaatgttttggttggttggcattcaaatg

SEQ ID NO: 103073 - DNA, 481 bp, Heterodera glycines
tgcttgtacctcttctaacagtggttgtacctagagcccggaaatttcaaatttgcggatcctgttgcaggattggaattcaaaattttttgcaggaccggatccggccggattaatcctgcaaatcctgcaatcctgcaaatcctgcatttaaaatttgccggatcctgcgcaggattgcggatttttggaaattttgaaaaaatttcaattaaatttaaaaaatttccaaaacgataaataagtgttccgatatatttttagacaaaaactggtgaaaattaatatgaaaaattgacatcaggaatagaatgaacaagcgcgtcctcatacctaatccatatgtatattataaaaacaaagtttctgtatatttggcattgtgtcttagaaattttttttaaaatcaataaaatcccgcataatcctgcacaaaaattcaaatttgcggatcctgttgcaggattggaattcaaaaatg

SEQ ID NO: 103074 - DNA, 54 bp, Heterodera glycines
aaaaaatttgtaaactttttaaactcaaaaaggcgataataaaaaacaaaaatg

SEQ ID NO: 103075 - DNA, 204 bp, Heterodera glycines
tttacaaaaattgctaaagatttttaaattttttttctttccttttgtcttataaaaacctcaaaaattgatattctaaacatttttttaccctaactttctttaaccataacaatttattttaagtttgcaactaatatagaaacacttagaggcttggggctgtcgaataaatcaaatttattcgttaaatcctaaaaaatg

SEQ ID NO: 103076 - DNA, 775 bp, Heterodera glycines
  unsure (1)..(775): unsure at all n locations
gaaaggagcaaaaatttttaaatagccaaaattttgttcggagatnaagtttaggagtgcttttttctttttgaatttttgttaagcaatttttngaaaatcctgaaaaatatgtacttttaaataatatgtagaagacaanttaataagaaattggattataaagttagtctagaagcctcaaatcatgtggaaaatgtgtattttcttgcttattntcattncgcataaaataactatttacctaaaaatccttcactgcccttgtagttttgttttatttgccaaaatcttttttcagtaatttttggtactgaattggtccagtccctgtgggtttcttttgttggcggcgaatgcattgagttgagaaggagcaattcatacccggagggcgaatttccaacaagtaattaaataaaaaacatttttaatatgattttgaatacttttttcagatgatcaccatttagaaaatgctttgaataatttgcgaaaacggcgaaggcacagtcatttaaagtaataaatagagaccgactaaaaaggaaccaaaaatcgtgaaaaaggcactataataggcaccaaaatattgcaaaaaaagattaaatatttttaaattttattttcgaataaggaaaatttttaaacctaaaatttttaccaagaaaaaaaaaattaaattttgacgatccttttttgagaaaatttttcattcttaggtgcatctttaatagaattttctggaaaaaacgccaaaaaaggcaccaaaatg

SEQ ID NO: 103077 - DNA, 1003 bp, Heterodera glycines
ctttcgtccggcctcggtgctccacagaaactggggaaaattcaatcaaagattttttatgagttgcgtttgcaaaatttgcaagaaatgtgagaatggtgaccgaagattacggtattatggtaccccaaaagcatcgtactcatgagattatcgttggtttagtggcaacaatagacacggacggtattagggtaccccaaaagcaccgtatcacctttggcatttaaaagcaatcggatttattcctaatttcaagtaattggtactattaggcgcattcggtaattttcagtttttctcatatgcccgaaaatttaaaaaaatcaacaaagggcgcgcaaaaatcagttcagtacgtgccatgatttggagaatgccacaattcgaaccaaactttttatgatagagaatgggaaaaaatcgtgttttttttgcgcgcttttgttaactttttttttgttgtaattttaaggcgtaagagtaatataagtattggcacccgacttgataaccttttttttattgaaacagaactttgttttgaatgtttttaatgggaaaaaaaaatttattaaaaaattattatgagtaacgaagaacatttattgagatgagaaaaaaatgcaaaaaaaaaatgaattttttgtgtattacataaaaggaaaaaagcataatagtggaacttgaagagatgtcaaacaaaatgcttttatgtcagtcgcttgcccaacaaatgaaaaaatattatgtccaattattagggcttcgactaacacgacaaaacatggaattcgttcgaattttgcagttttaacatgaaatggagagagtaattaaatgtggggggaggggaggggacggggaggaaatattagggctgtgcgaagctttccaaaaaaaaataatggcaatttgaaatgggatcaaaggatggaccagaggacaatgaccatgtcgagaaacaaaacaatgaggatcaatcggtcgtgccaaaaaaatg

SEQ ID NO: 103078 - DNA, 1003 bp, Heterodera glycines
ggcaaatgatggagaactgatgggacttcaattttccaagtaaaagttcaacttttaagtttttgatgggctcatttatcgagatcacataatttttcattcattttataatagcattctttgatattcattttgataaaaaaaaaattgggtttttgttttgcatttaaaaatatataacattcaaaattaattacgaatgaaaatttaatgtttaattgatttaaatttgcaaaagaagtaataaataattgatattaatttgtatgggtcttagttaataatctttccttaattattttcttgaaaagcgtgctatcagaatattaatattaaaaatttggttctgttcggttttatgcgtcccatgaatgactatcttctgtttcttaggacataacttttttcttacttggtcaatgcctatattcttggtatcaaacaatagtttaagtctacagcagcttttgattataagctttcataaacatacattaaaaatataaatttagtaaatcccattaaattttaaataaaacccgcatcattgattttctttgccagctaattaaatcactcacattaaattggaaattattattccaaagcaaaagattagcaaatctgcgtgttcaatttccaattattaaaaaatgattttgtccaattttgacattaatatgaaaatgaatcattaaaattggcattttagccaaaaattattagtttattaataatcacattttacaaaaggtcttttttgtccaaatgacaacacaatttcattaataaaatgaaccttttttgtctgtgtgggcggcttccacaaaaatttgtgtgacttttgaacttcaatgaatgaattctttataaattgtaagtgaagcatggaccgtatgacacttatattctaagaattttttttatttaataaaaaaaaaatttaactgacttttttgcatcaaaaatcatatttatattagatttaaattttgtcaacatg

SEQ ID NO: 103079 - DNA, 136 bp, Heterodera glycines
atagcttatgacattttgaattatgggcaaaaagttaatttaaaaacttttaataaaaaatgaaaaataaaatttaggaaaaaatatttttgacgaaaatattggccattttaatgcgcaagtgatttgtataatg

SEQ ID NO: 103080 - DNA, 543 bp, Heterodera glycines
aggttacctatcatttcgtcactgatcattttgtcacttagaaataatttttaaaaaatgttggcaaaatgtcacatatattttaaaatttcaattattttgccccaaatggtatgaacatgctcttagataacgaatggggtcttgtgctgctcgctgctcaaattcagcaacaatctaacgcaaattgttgtcctgatcaacatagagggatttcgcctaatacctttccctctaatgcatttcattttttaaaaattattcctcagtgacgaaatgatcggccaccaacaagaatgccattggacaatattttgtcgaaaaaatagctaaaatggccgattttacgaaatggcctagcaccatttttacccgtgcaaatttgtaagggttagaagaaactgttttatttttaaaagtaatcatgtgttaaatgtttacacttttgatcagttcgttcatttcttttcgtttttcgctttctctgcttatctgtttaaacttattattttttatcttttttgtaaagctgtgctgaaaatg

SEQ ID NO: 103081 - DNA, 323 bp, Heterodera glycines
cctaaaaattcgaaaattataaaaaaaaaattagattatttatgctttttttgaaaaatagaatttttaattcaaaattttcttaaaatgacacctttcaaaataattaaaaaaatataatataatttcatttaatcaaaatgagtataatttataaaaaataaaacattaataagtagaatttcgaaaaaatgtaaacattattttaaaaaataagtagatttgctgagtaaagctatgcaataaatcagcataaatatgggaataaaaatgaattcgtaaaagtatttctaatcattttaatgggtttattaagaaatatg

SEQ ID NO: 103082 - DNA, 758 bp, Heterodera glycines
aacaacggtggaaaaccagaaattaaactgaacaatttctggttaggctcattatttttctaaccagaacaacggtggaaaaccagaaattaaactgaacagtttctggtttggctcttttcttttgtctaatcagaacaactgtggaaaaccagaaattaaactgaacagtttctggtttggctcatttcttttgtctaatcagaacaactgtggaaacccagaaattaaactgaacatggtttcgtctcatttgttttgtattggtaactttatggttgtttttctggtcatgtttctggttttgtcttttcttttgtctaatcataacaacggtggaaaaccagaaattaaactgaacagtttctggttcggctcatttctttgttaaccagaacaacggtggaaaaccagaaattaaattgaacagtttctggtttggctcatttcttttgtctaatcagaacaactgtggaaaaccagaaattaaactgaacatggtttcgtctcatttgtttagtattggtaactttatggttgtttttctggtcatgtttctggttttgtcttttcttttgtctaatcataacaactgtggaaaaccagaaattaaactgaacagtttctggttaggctcattctttgtctaaccagaacaacggtggaaaccagaaattaaactgaacagtttctggtttggctcatttcttttgtctaatcagaacaactgtggaaacccagaaattaaactgaacatg

SEQ ID NO: 103083 - DNA, 374 bp, Heterodera glycines
agccgcggccgatattatcgcgatgggaaaatggggcgtaaaaaaatttattacaacccgcataaagcattccgtctctccagccacaaatcattttcatttccaagctctttctaatcgcaaaacaatttcccagctactacttctactgcacacagccaaaaaactttcatacataagtatccgcgcagcctaaattgcacgcttcctttcccgtattactcaccactgcgcaaatctatctcattcccactgattagtcgtaagactataagaaaagtttttggttttttttttttttttgagtgctcatttaactcattcatctaattaatctaagccaaatagtagaagtctaatacactgaaattatg

SEQ ID NO: 103084 - DNA, 817 bp, Heterodera glycines
ttttttgttgagcatcggcaaaatcatttttccataattcgctaaacaaatcgtttccattttcttttgtgcagaaaattaaattgaaattcagacaaagtaaattagataatattataatataaaacatgcggacaaattgatccaatgatgtgagggcttaaggcaaaattaaattaattaaaaaaaattacataaatatttagccaaaaaataaaaagaatttctgtcataaatttataaaaaatgttgtttaaaattaatatataattatagaaaggatttctttatatattgataaaaaactggtgttaacattaatatataattatttttaggaatgatatttatagttgctaaaaacggccaaaataattaatttttaggttctaaaaaacccaaaatagttgctaaaaatgggaaaatagttattaaaaactttcaaatttaggggtgtaaaatgttaaaatttattcaaaaaattgatcaaccaaaatagttgaaattaaatttgaaaaaataggtaaaaaactaaaaatatcatccctaattattatacatattttatgtacattttgtaaattataaacttttaaagacccgttttccaatttttaggcaatgttttgagggtttttttttgtcacttaaaacatttatttccttaatagatattataatttattagaaatattcttattgctttgcctttaagccaatcaatagcattatggagggtttaagtgagattccatgacaatttgatggtggattgaaataaataatattgtaaatttgaattattctttacagtatg

SEQ ID NO: 103085 - DNA, 314 bp, Heterodera glycines
aagtcaattaaatcagcaacacgttttaaattaaattaattattataaataatatttggacattcgcataatgttgaaaaatgaaaaacaaatgccaattggttttatatttaaggagaaatagccgcgtctattataaataaacgcatttttgatgttttgttttcacttttgctctgagttttcttatgattcgtaacgtatcgctcttcttctgaagcggtacgtttttctttttttttttaatttaataacaattaaataatgaatgttctcatttatccattttcaaattaagactcattgtgagaatg

SEQ ID NO: 103086 - DNA, 150 bp, Heterodera glycines
  unsure (1)..(150): unsure at all n locations
gaacacttgggttcccgtcccgcgcccgngtttatttaccactgacaaatgaatataattaaattttgaggcttattacttggtcacaaagtatcaattaattaatttcaatttaggaaatttgactgggaaattttcagcaaaacaatg

SEQ ID NO: 103087 - DNA, 61 bp, Heterodera glycines
ttttgccatttattaattggcccttccgttgcctcaggcgctcggtgccttcgccaaaatg

SEQ ID NO: 103088 - DNA, 580 bp, Heterodera glycines
agaagcggagggaagagagaggaagagagagaagggaagagaagagagagaaagagagagagaagggaagagagagaaagagagagagagggaggaagagagatagagagagagaggaagatagagagagaaagagagatagagagaagagagagaggaagagagagggggagagagaaagagagagggggagagagaaagagagagggggagagaggagagcgtcgactgatcggacgtagagcataagaagcatttgccgccaaccttagcagatcaccactccatctccccctcctctactctgtttgctgctgatcgtccgcttttcctctccttcagctaaaaccactcaacccccccccccctcctctctcctctgtcccataaatctctgccgtcttcttcgtctcatcgttctgccccccccccgcctccattctccgctgactgatctgtccgcccccgcacttcttttgcccgtttcttccgccgttacacactcatctcacatagtcccacaaaacatttcaccaacaaaagcagcagaagaattaccaaacggaagagcagagaaatg

SEQ ID NO: 103089 - DNA, 159 bp, Heterodera glycines
aaaaacaaattggaaatttaattcccgcccaaaccgtgacgcgcgaaaaatttaagccggggggacagagttatgattgtcgtccattcaacgaaagcacaagcctcacaccgaaaattagcttggaaccattttgggccttaccaaatcattgaaatg

SEQ ID NO: 103090 - DNA, 286 bp, Heterodera glycines
atggagggggcggaggttaagcgatgccattgtaaactatactccaattaaagtgcattccaatgcgtatttcctacagattctcgtttttgttcactcacgaaaagaaactgcaaagactgcgaaggcattgcgcgacgtttgtttggaacgcgacacaattagcaaatttttgcgagagggaagcgcgtcgacagaagttttgcgcaccgaggcggaacaagcgaagaaccttgacctgaaggacttgctgccctatggatttgccatccatcacgcggggatg

SEQ ID NO: 103091 - DNA, 1003 bp, Heterodera glycines
atttgaaaatgtcatatgctgccgataaaaaattatatttaatgaaattaattaatttttcaaattgagttgaaaagcatttgaacagagtgagtttttgaaccattcatccatcgctaaagtacaagaacaattattattatttctggggcaattaaattaaacattttcggatatttttcaataaactgagtaatatgtaattttcgcgatcggcaaaacacgcgaagccaaaattagcataaccccgtgccgaggcgttgcttaattccgcctccaaaaatgtttttgaattattaaaacaaaaatattattattttattttacttattaattattaattttttataaaatttttaactcctgcacaaaattattccaaatgtattctttttgctgaaaaaggtttttacaatttgattgaacggttgggcgagtgaaaatgaaaaacatatgggcgttcaaattagccaattagatcgctttacaatttcgtttaaaaatacaaaataaaatttccaatgccgctggcgattaacaataaattttaaaaaatatgggagttaataaccaatttgggtcgctttacaatttttgtttaaaaataaaaatgatttttagtaaaactagtcgcaaattactaaatgattgtggttgaatgaactgtataaattgcatataaaaagaggcaattgggtcattaaaaacatcaacaattaaatttttattaaataattaataagcatttcgaattttatcaaattaaaattttaccacccctaattttctctattagcataaaaatttcctttaaaatttttgggtaagacataaaaagtcgcttttccgtcacttatagagataaatttttgaagacaaaacaatattttgctatttttgggctaaaataaaaaataatttttttaaatttaattcaaaatagcgatcagttgtcgtttttttccatttaacttgggcatttttatagataaattagaaaatg

SEQ ID NO: 103092 - DNA, 78 bp, Heterodera glycines
atgtatgttttttttggataaaatgaagctattcaaacaaattaggtgacagttgcgaccacattacatgacaaaatg

SEQ ID NO: 103093 - DNA, 426 bp, Heterodera glycines
ggtttgtgacttggcttcatccattcattcaacattgcttttttggggaaaaaaaacaaatttttgaaaattgaggggttgaaaaaaatgcaaaaatttagtgtattttttctgataaaccagtgaccagaaaagttcagaaggcagcttattcatatcatatggtttagccatattttatcaagatcttttttcaattttgcatgctagtaaaaaaaagaaatggccaaaaaatgttttaaagttttttttgcaactttacgaagttttttttttgaaaatttcagtcaaataaaagcaaacttttaaggctatcaaatgatatccccacctaaaactgaatttgtcccttcgtttctaaaaaaattcccttaatacggtttttttctcactaattttcccattttttcgtccattttcagaatg

SEQ ID NO: 103094 - DNA, 169 bp, Heterodera glycines
  unsure (1)..(169): unsure at all n locations
gttggtacncaagtttgcggtaaaaaaatgagaaaaaagagatagccattttttggtcaagaattttttttgtttgcgtttcaaatatcgtaagattgtttgatagggccagacaaaagaaggcaactgttggtaccaagtttgcggtaaaaaaatgagaaaaaagatg

SEQ ID NO: 103095 - DNA, 257 bp, Heterodera glycines
ttttttaaatataacctcgattccccttcattaaaagctttttcttcaaatttctcttcaccttcaatttatccaattttcaaaaaaaaaattatcattttaaaattaaatgattgtttttatatattaaatatttgaaactatattttatccaaatcaaataaatttaatttactggtcactgtttcattaattaatatgctaatataatttaatattttagaatataattttgttaaaatattataccaaaaatg

SEQ ID NO: 103096 - DNA, 716 bp, Heterodera glycines
ttatgtctccaagtaaaactaagttatgtgaatttacgctcgtttttgttttttttaaagccatgtaaccaaaacaagaaagtaccaatattttactgttataccaattttaattcgctcacactatacaaaattattctgaaaattttttataccggcgaacttcattgtagtccattgtgcccatagaataaagtttaattgccaactataaggaattaaattagatttgcaatttacaaaaaagcaaccacttttttgattaattttcagttcggccaaaggactgcctcagccattcgtcttgccctggccaaaatcaattcgcgctttcttactacgcgtcaatggcccacttccaaccaacttaaaaagcaacattatatgaagatttgatttcacagtttcaacaagaccatatgcgaaaaggtcgctgattaactgtaattatctcaaaaaatatttttgccctttattgctttaataccttaatttgtgcataaggtattactcatcagcatatgatttaactctaattatctaaaaaatgttttaccttttactattttaaaacctctctaagcatatggttaatataaatatccatttattgcttaaatgccttatttatgcttacagtattaatcattagcttatgacttttaactctaattatctcaaatgctttatcccttttattgcttcaaggcaatatg

SEQ ID NO: 103097 - DNA, 1003 bp, Heterodera glycines
agatgatacatagagagagagagaggagagagagtgggggagagagagagagagagagggggggacgggaaaaaacagagggcggtagaagggggatgagagaaaccagcagcaagcgaggagaagcaaagtggccaattaatcattcgtcatgctttggtgcggtgacacgaaaaccgctgaaattgccacaaagaaattctaaaaataaaatgtgatccataaacagcagaaaaaaatattgaaaatgaaaagatgatcaaaaatttgacccgttaatttataaattcggttgccatggaaaaatgttaagaagggcaaagagagacgaaaacaaaacagacgaactgccaaaacgaccccaattatttttatttgtaaaagtcgtgaaaacatgcttccagggcttttcgggttcgctgatcattagggctcgaagttgtatgcactaaaaaatgccaaatatgcgcataaaatatgcactaaaaatcccccaaatatgccctaaaaaccggaaaaatgcccaaatatgcactaaccttaggggtatatttttcgcttttttaatatgcttttatatgcactaaaaaaccttcaccaaaccaaaaaattttaacgtagaaattctattttgagcccctttcttcatagcatatgcgcagaaaaaatatgcaaaatcatacaatacgaaccctactgatcatgaatctggcatccatttcttaaattccgaaccccggatccgatttcgaacaaatggtcgaaaatgaacgaattttgaatttgcgatcggaatggaccagtagctccattattaccaaatgcagtgcttgcgtatggtgttagtttgtaaaattgtatttttatgcttatcgcatgaaacaaacgaattctggtaaattctaagaaaattaatcggttttattaaagttatgtgaaaacaataacttttacaagaataaatgaatgaatttataatttcaaaaataatggcacaaaaatg

SEQ ID NO: 103098 - DNA, 203 bp, Heterodera glycines
ggtagtttttttttttggatggaacggcattcgaaaatatcaaccttcagattgacttggacactattgacattagcaatttgaatcgtcagtttctgtttcggaagaagcatgtcggaaaatccaaggcggaagttgctagtgaagcagtcaaacagatagcccctgacgtcgatataacgtttttccatgactcaattatg

SEQ ID NO: 103099 - DNA, 136 bp, Heterodera glycines
ataatcatcttctacggaaaatttttcccaaccccctagaatttttttttcgaatttactcagattttcgtattttttcacccgcaaaaaatttgtgtttaatgaattttttcttacataaagtgaatagaaaatg

SEQ ID NO: 103100 - DNA, 1003 bp, Heterodera glycines
tcatattcaaaatttatttatttatttacttgactacatttttgatttttaaaatatttatctcatttccatttttagcacctattttgggggtttataatagggttgctccccgaccccgagccccctacatccgactttttatcccccgaccccacgacactaactcggggaattgaggactcttgaaaatttttaaatttgttaaaaattcctaaaatccgaaaaactttcggcggcgcctatcggaaccgccggcctcccaaaactccaaaattttttttaccaataattggcttgaaaatcacaaaatttgacaatttttggacaaattctcttaacaaattatactcattttcaaaaaatttcccggcggcgcctatcggcagcgccggacacccccctcccccacctcagaggtgatctttcgctttttctattgataaaaatggtttattgttttttttgggaaaagatttaaaaaattcaaaaaaaccgaaacggtataccgaaaatttttcttcggtttttttgggtttcggtttttttcgggttttataccgaaaccgaccgaccgaccctcttgtccggtctctagtaaaaaccagagctgccaactgagaattttcaaaatcagcataggccgaacaaaaaaacatcttttgggatcaaaaaccagctttttggaaaatttcgcttcaaaaaaaatgatatgtaattcaaaaattattcaatttttgcatttttattttcaaatccaagaataagcacaaaacaaggaggtcgtaccaaaataaggaaaatcttagaaataaggacatttttaatttctaagatctggcatctccaaataaggacaaatcttagaaataaggacacttgggaactctggataaaattaatcatttcgctaattcaaatttacattgaaacgcagtgttattctacctaaccgttttatttaacagccccactcatttttgaccaccgccccactgagatg

SEQ ID NO: 103101 - DNA, 585 bp, Heterodera glycines
taatttacttaaatatctgtaaatcagaaaaagataatagagcaaaaacacagaacttaaataatactaaatttaccatctttagacaatttaataaaattatatataacttagaattcactcttctttaatttacctcataatcactaatgtctggcaaaattcgatttggtaatgtgcaacaagacgcaaatgcggacttttttatttggaatcataataatcagggcggtcaaaaatatgcaaatgcatatttttttaaattaatttgccttgttttttgtgcatatttgtataatatttatacgcatatttttatcattttcgtattacctaaatgccgaaaaatcaaggtacgattaactacaacaaaatactacattaaaaataagcatgtaataaatgattcaatgaatgttaataatattaataaaaattaatgcattcaaaaaatagaacataataaatttaaaaataaaaataaatcgaaaaattaaatctagttatatttctattatttttaatttgttaaaaaaatttaaaataaaaatgtcaaaaattttaaggatactgtaaaaaccaatg

SEQ ID NO: 103102 - DNA, 662 bp, Heterodera glycines
aaatactcaacaaagtttactcaaaattttaggggctttctttaactacggacaactatgaacatgcccaaaaaacaggttgttgcctgcccagttgggcatcgcccaattgtttccgtcgagggaccctttctcccccgagtatgatccccccccccccccttcaactatgttttatatgtgtgtgcaaaaatttcatctaaattattccatcataaagacacaccaaaatctttgttttcttatttctgaaatgagccagacccttggcttcgggggggggggggctgaattcaaaaatcgatttttggggtgtattttttgttttttttaatctcgaattaggatgggtgtgttttactggcttttatagtagtttttcgccaaaaatgagtatttttgccattttggactatgtttcaaaaatatggcaaaatatgatgtggtccggcagtgctaacaatgagacaccgccgggtttgttaagagttgcttaaaatattcaaaaagttacccaatttctcccatcggcggattgtttccaacgaaattttttttttaattccatatatttttcggacatggttgaaaactaatgatatttagagggtttaattaaaaactgattcatttcaaattgtccattgtttagttgggacatg

SEQ ID NO: 103103 - DNA, 315 bp, Heterodera glycines
ttaaaatactttttgtctaaagttcatgaaagagatgtgtatggagcagcgaaagagtaaaaatacaacaataattatttgttcactatggaaaacagagacaggtcgggacgggatctggcgcgggatttcagtctcaagttctcaactccttttttagaagttacaagggtagacagttcgccaaaaaagaaaaatttaaaaattgaaaaattaaaaaaataaatgtgatgatttttaattgaatttttacggagcttaaattttaaatgcctaaccgctttttgtaagcttgattttagcaaataaactatg

SEQ ID NO: 103104 - DNA, 854 bp, Heterodera glycines
aattcccccccccgaaatgaaaatttttaaaaattttccagcaaataatggaaaattttttcgaattcccccccccccaaacgaaaatttaaaaattttatagacaatttttgtaacaaatagcactcaaattttccgtaaaacggccaaaattgggtccttttttagtgacaaagtggagtttttacccagcagtgggaaaaagttttttaagcagccgccgccgacgaccattttttccaagtgtttttttttagtttttttaaaaaactcatgattaagtgatcgtaagtggagagatcgcagcttaaatagacataaatggaaaggggagaagtgtgggatcgatcgctattggctaacagaaaataaataaatgaaaagagattaaaaatgagtgtgaaattgtgcataatgcttcgtcaatttatgttaattagaatatgtcttacacctcatacccccttttagaccgtcccaggtctcagatttgaaaccagttaaaacaaaaaatgaattatgaacttttcgcctatctccattaagaaatcaatttggttgctttcggcattcgaagtaaacaaaaaaaaaaattgttgaaaatattttagaaaaatggcagatatttggtttttgggggtgtattttcaattcttatatttttcttacatatttttttcaaaaatgccaaaataagtaccaaaccctcgaaatatgtgctatgtttttttgtgccaaaaggccaaaatatgtgtttttatgtttttataagtcgctctaaattgaaaattgattcaacatatactccaaaaaccaaataaaatttaacaaatttctaaagttcaaaaaaaatg

SEQ ID NO: 103105 - DNA, 239 bp, Heterodera glycines
acatcattacaaaatcaaaaaacaacgtgggaagagagaagccaaggctgaagaaaccaaagactcaaaaattgatgtcgcaaagagggtccgcagaacgcgccgggagagatgtagaaagacaactcaatcatatcaacaatgtatcgagttccatccaaaccaaactaagcacactaagagaagtaaatcctcaaattttagaagagcctgatataaaagtgtggtttgacaaaatg

SEQ ID NO: 103106 - DNA, 118 bp, Heterodera glycines
cacccccccccccccccccgcggcggactttggcggattcatttcgctgtccatcgccaaattagtagtcactcggaagaaccaaaattttaactgaattcgccaaaattaacggatg

SEQ ID NO: 103107 - DNA, 497 bp, Heterodera glycines
tctctttcgaatctttttcaccccccccgtcccattcatcccccctcccatttcccaaatgttgggtgttttgatttctctcagtgatgagaaagtggttgggcttgtgattgtccaacccctaggtctatctctccatctgtcggaccaaaaatgatgcacaatgaccttaatcatcgggaaactgtaactacagtattacattaaataatgaacattgataatttattaaacgactaaaatgtgttcacttttgagaaacttctctgcacacaatgatcagtcactttctgacaattgtccgatgggatttcggccggagaacaaattaatcaaaaggctaataggaaaaaaatcacatttaaccgagactggctcggtgcaaactcaaaagccaaacgtgggcagaagaaccgtaatcaaatttttgagtttgaccccgaattcccttctttcgcattacagattcaaatttactaattttgccttttcagatg

SEQ ID NO: 103108 - DNA, 588 bp, Heterodera glycines
tgtgggacctattttgaaagaaatctattgtatattgaaaattttatatgaaaggaaaattgattgatttaagaaaggagtttccattttcacttgtccttattcggagggaccggaccttaaagttcaaaaatatcattttttgatgaaaaaaggcattttgaatgtttgaagcatatttcatattttaaacccaaaattttattcttgcaatttttctataggaactttgattttatcccattcaaaaactcattatattaaagtaaaatgaagcaataaaactatgtctcattttttcaaaaaatacatcatattaagaattattatattgtagaaatccgaaagatttgtctttatccaagagcaattaattcctttgtgtgtttttttgaaattttcttgcctatgtatttcccattaattggggtgtccctaaaaattaaaaatgagctgaaaagaagagaatcgtgtacgatgctaaaatgtccgaaaataacttaacagaaaattatatcaaaatggcaacttttcatgttaaaatttggataggcttaaaatgtacgcccatagtcgagagatcctatg

SEQ ID NO: 103109 - DNA, 441 bp, Heterodera glycines
tcattctaaaaaattatttgcataaagccaaatacatttcttaagcaattcttaaaatgtatgtagcatagaacctattcaaaatcaagctaataacttagaaattttttaagaggtgcagctaaaagtttcaaatgtaatcaggagaagtctttaaaggttttaaatttttttgcagataattttcaagcaaaaacaatttttttgatgtttttgaagatttttagcgcatatttttagggttttggctatattttgtgtaaaatttttttctttttttgtttagtgcttaatttagaatttttgatatagataattaagtgcttaattcacctttttggtgcttaaaaatcctgtcccaacatatgtagattattaataaaagaatttagaaaaaaacgcaagcaaaatatcattttttaattagaatttagaaaaatg

SEQ ID NO: 103110 - DNA, 611 bp, Heterodera glycines
gggttcccagatctgaggctttagcctcattttgtggtttttggacaggtcaatgaaggctaaattttcaaaaatgaggctttttgtggttttttgagaaaattttgaggctttttgtggttaaacatgtgagcagctcgtttacacccacccgattttttttctgggttaatggcaactcgtacaaaaggcaactcgtacacaataaactcgtacactgttagtacaaaggcaacccgtacaaaaatgagctcaaattttacaaaataaagccaaggctttagcctaaacctaagcccgagcaagcctaagcctaatcctaaggcctagttgccttttgtacaagttggcatgaaattttcaaaacttagagatttttcaaaaaaaattttaaaaagaggggaataataggaagggcggaatatagtgtacctaaaaaagtacaccttagatggttcaaacaaaatttgtctttttagttctgagctgattaaaaatgcatagttttttaattgccaatttaaataaattggtgaaaaattaaattaaacaaaaaaatttttggtcaaataattccatattaatccatccgtcccgcgaaaaaaaaaatg

SEQ ID NO: 103111 - DNA, 297 bp, Heterodera glycines
tctaattatagcccagtctctattaatcccgcagtctccaattatcccccagtctacgaggtgttttgaaaaataatccctctatcataatcccccagtctctaattatcccccttttctgaggaagttgaaaaataatcccccatgggctataattagagcatatacggtaaggttattttatggcacagatgcagaactttttttttttgaaatcatccgaatttatatgaacccagaatttgtacaaaaattttggccttcaattttaaggcctatcgcttcgttttggcaatg

SEQ ID NO: 103112 - DNA, 77 bp, Heterodera glycines
ttggccattgctttgtcggttcagtgccctcccttctcgaccggctgctccccccacatgatcaggtcccgccgatg

SEQ ID NO: 103113 - DNA, 362 bp, Heterodera glycines
tttagcaagaggacgggcacgccccgcctgagcttatcttctttttctttcgcgacgattccctccctttcactgcctaccgtagggattatctgatgtgcgtggaccaatgcgcggtaaaaggcgcttcgccggacgcgccgccgacactgagtgcgacgcgggagggcaacatgaactgtgcctttagactgaagtacggtgttcataattgaaaactgtgcctttagacttcactgctatatgattttatatgtacaataatatttaatttaacaaccagcctaaactaaatggttttttctcaaaaaaatatttaaattattctaaaatttttttttttgcttacatgtgcgctaatg

SEQ ID NO: 103114 - DNA, 1003 bp, Heterodera glycines
tgtaaatgatagacaagccaaaattggaaataaaattaaaatccaaaactttttatttttcgaaaaaaaattcatcgtttttaggctaaagaattttgttccaagcatccagcaatttcttaaatttaaatcaattctaagtaaaaattttaaattttgtccccatatatttttcgtgaatttccccgatgagctttttcagaatttttggcacgcaaaattttgaggtttttaaaaataaacttttatgctaaaacatatgacccacctaaaaattggtgtgaatttttcgtaaattccggcattaatcaccttattatctaaattctctgaattttttccaccataaataggctaatttcagacaaatgaatacaattcgtaaaatttttgttaattcattttagatccctaatgttctctattagccctcaaaatttcaaaaatttcgcttgactttcaaaaagttatggccagaggaggtttttcaaattttatttagggttcctccccgaccccgagctccccggtccccgaccccgatccctgacatttttgggcctattccccgtcccgacccccgacatgtcgctccccgaggtccccggcccccgactttttgccccccgactccccgacactaattcagggaatcggggaccccgagcattgttaaaatttaaaaagttaattcaacaacgaagaggggaaaggttgaaaatttatgaaattttgaacaattttcttaataaaattagttaaaaattccaaaaaactttttggcggcgcctatcagcgacgccgcccccccccccccaaaactccaattttttttttgcaaaaaattgtcccaaaattgctaaaataggtatttttaggaaaaatctgttaataaattaaaaattttcaaaaaaattttcctcgcggctcccaacagcatcgcccccatcccccttctgctgtagcccatagtttttttgaaaaagagcgccgcaaaaaaatg

SEQ ID NO: 103115 - DNA, 868 bp, Heterodera glycines
aatgaatgaaataaaacatgatggataagtgatgttgattttctttgaaatccatttggatcaatattattagctttattttaaacattttttaaaatcaatattcagcgaaattattattttattactactttttattatcaaaaattttttttatattgcagcataaaaccaaatgtttttaaaaacatatcttaaaaatgaacaattttccataagcgagaaatttagttgttttaatgcaataataaaaggggataaaaatataaaatatttttttgttttcaacattttatttgaaatttttcaacgtgaaaaacacattctctaatgatgggctcaaaaactatttattgaatatacattttaattagttaaagaatttgtccaaaaatgtcaacagttttgtgcttttgagataactttcgtgtaaaacaagctggttgtcggggaaatgcactgcttttcttcgttgtacaaatatttcaatgacggcgaagggtttggaaaatgttagtggaataaagcttaaaaaataaagaaagatcgggagaattttatgtgttttatttggtttttctagcgtaaagatgaaaaaaaaatttacaggaaattctgaaaatttccgattctttagaaaaaatacagaactccattctgaaagggagttttcatatattaaaatattagaaaaatcattcaattttttgaattataagaggtattttattttatatttttatctcttttttgaagaaagttttaaaaataaaactcaaaaatcaccaaatacaaatatatgatgttacactgaaaaaggaatgcattgaacgaacgacgggggaacattttctgctgggaaggaatg

SEQ ID NO: 103116 - DNA, 131 bp, Heterodera glycines
aataaaaagaataattcctaataaaataatatatgtgattcaatattacggaagtaagtaattcatttttattaattaacgtgtattagtattgtttaatagaatcattaaatgctgctgctgctgatatg

SEQ ID NO: 103117 - DNA, 57 bp, Heterodera glycines
tgtgagaacaatttaaaaaaaaattctgaaatttttcagagcttttttggaaaaatg

SEQ ID NO: 103118 - DNA, 87 bp, Heterodera glycines
tgcgcttcaactgtcaaatggaattgctgtttcaaaaattgcttctgctggtcataattccagccaaaatatcacagacggacaatg

SEQ ID NO: 103119 - DNA, 131 bp, Heterodera glycines
tggtcagctgtttaccattccacctgctgatgcaagcactgacctccagcgaatttcgactgaacactccctcgatgtgaacaaaacttcttaaatcctatcatcatgaaaatatttagaataagctgatg

SEQ ID NO: 103120 - DNA, 861 bp, Heterodera glycines
tctgcaaactgaaaaacggtggtggcagtagcatttatggcactaaaagtgccaaaaaagttcaatgattatttaagcgtacgatggattagaacgaataaatgcacaaattttaaaattgggaaaaaagacacattttattatcgctttattaacgacaccgacaaaaatatttgaattgaaaatagaaaaacagaaggattgccccgtgtagccttcaaaggactgattggatgcgcggaatgataaaaggggagcaaatgcaatcccaacaatcagaatgggaagggatcttccgtccacagcagttaagcggcttggcgcggcatgggccaggaaatttatttttgtggttgatttgattggatgagttagagagagcgggagtgacagagggagcgagagaggatagatgaaggggaaagaaataaggggagacgaagggagggagaaagagagagcagagagagaaagagagagaagggggaaagagtggggaaagagaattggaaagataaagggaaagggagagaggggagagagataaggggagactggggagagagaaagagagagaggaggacgagaattaagaaaatttgagaggaatggtcaagaagaatgagggatggtaaatggccatttcgatgttaaatttcaaaaatttaatgccatctttgggatcaaccttcgagattaaagcagatgcatttttggtcaacttaaaaatcatttattgtctcttaatactagtaataatataaggggagaaagaaacgcaaatgcgaatgaaccgcccaattgggcgccggaggggcggagagaaaagaaacgaccgaacgttcccccgggggaaaaatg

SEQ ID NO: 103121 - DNA, 91 bp, Heterodera glycines
caattgtacgcttggtgtagcatgattgagcagtggccttggtatatttaatatatccagattaatcccccaatgtcttttcaggcgcatg

SEQ ID NO: 103122 - DNA, 701 bp, Heterodera glycines
ataaatgtaaaccctcgacatttgaggcccaattttgagaaaagtctacggatttaaaccgtatactgtagccaacattagggtatggtcgacaaaagccatgagttacggtacaagtataatctcactaaaataatacaaatgttaattttaaaacaaaaacgatttgatttcatgagttgtttcaccgctaggactcaaaaaattctcacaaaggggctatactgtgataaattatttcaaaaattccgtaagattttgtccaaaatcttaatttttaagggccaaaatgtattctgcgacttgggcgcccagcgttgtccaagtggcagcagttgcgtttcggcactgaacgccttcggcatgatgatctgttgtcgcaatgcgcggcaatctttgccagtaaaaataaataaattcaaaagggtggttttgtaattggattccatgacaatactcttgataaacactcattgattcttcaaaaaaagtcttgacatcaaaaattaaaatggaaataaacaggcaatttcttaattttattttgaaaaatataaaaattaagacattctttttcttccaccaaaattcatgtccttgaaaacaatgatttccacatgtccttgaaagtcccaaattaacaataatccctttagcaattagaacaaattaattttttcttttttttccaaaaaataatg

SEQ ID NO: 103123 - DNA, 84 bp, Heterodera glycines
aaatgttgttgcttttgctctgattatgaaaggcgtttccccttcgaagttgttgacctttccgtgcccggccaatacaaaatg

SEQ ID NO: 103124 - DNA, 72 bp, Heterodera glycines
tgcaccgcaaacattttcaatttgaaaggcacatttataatttcaatcaaattatttaaattcaaaaaaatg

SEQ ID NO: 103125 - DNA, 193 bp, Heterodera glycines
atttgttcgcatatttttattgacttgcatataatttgttcgcatatttttattgacctgcgtaaaagcgtaaatttttttccccttaatctgtttcttataaaaattcaattgtttcaaatcttaaatattttattaattgctcaattctcactaatggcacccgaaaaatttccagccataatcaacaatg

SEQ ID NO: 103126 - DNA, 1003 bp, Heterodera glycines
  unsure (1)..(1003): unsure at all n locations
gagaattaggaaaaacgaaaggtggcgagcgaaaataaaaaaaagggaaacaaaaataaataaataaaaataaaaatttaaacggagtatgagtgaattaaaaaatttgtaatcaaaataaaaataccctattgaaaaaatcacttggttacaaaatttatatggcaaagattcggtaactcgagcaaaattctacggtattttacatataaatcctgccaaataccattcaccctagggcttggatttttaggtgcgaaaaaccccaatttagaggcctaaatagaggcgaaaaaaccacctaatagtggcgaaaatggtaaaatattggcgaaaattttaaaaaaatttgtgctttttttcaatgaaaataaattaagaccagtgtaaataacttattcaacaattttaattacaaaaaattaaatttcatttttttgaataaaaagcaaaaaaaaatttgcttaatgaaagttcgatttttcagcttatttttcatttgaagtctatattcaaagaggaaaaagtttttcaatttttttttgtccaaaatctttaaaaaattatttctattttttgcaatttttgaaaaattttcaagaagtcggtccttnatggtgcattttttaattgcatttttggtaagaaattttttaaaaatgccgaaatagtggtaaaaataagggcgatatgccaaaaatgccaaaataggtaccccctattttaggggcgacaattcaaaaatagggattcctagggacgtatagaggagccttaaaacgaagaattttcgcgctaaaaaggttttttttcgtgcttttctcattgaatttaagccgcagaaaaaataaatactaaaaaactaagaatccgggcactaattttaagtaaatattcctggctttattctagtttacgcgtccaatatcaatgagcatcctcagtttctttggccctaacttttttttccctgggtcagtgccaacattcatggcatcaaatg

SEQ ID NO: 103127 - DNA, 1003 bp, Heterodera glycines
caacaaaaaggtgtgaccatctaaactgcctattaccgaaaatctttgtggattttaaggctgatagagtttatgtagagttttataatgatgccaatattctaggattttgttgacaatgaaaaaatgtctcattccaaaaaactcgagctggcgcctaactccgaactgaaaagacccattccctgaatacttaaccgaatataaattgtaaaggaaatgaaatgaaagaaatcggatttgtataggcaaaaagtggatggttgtaaaccgcgagacgaaaaaaggtttaattgaacaccacacgactgagactgacaaaagcaaaaataggtttgccaagtcctatccgtgcaatagtcaaagcagttaaaaatgaatatacctaaaataatgagtagtatgaaattagtatgcactaaaaatgccaaatatgcactcaaaatacctcagatatgcctaaaaacccgaaaaatgcccaaatatggacgaaaatatgcttcaaaaactaccaaaaatggctttgaaccctcaaaaaatacagaaaattatgtaaaattcttaattgactttcaaaacataaaaacaatggctaaagagagttttttagagaattacaaaaattttgggttttttgtgaagcgcttttcttgtaaaaattacaaaaaatgcccgaaatacatatctctaaaaaagcaaaaatggtaaatatgcatttattctcgaaaatccctacaatatgcgtttataagcataaaaaacctccaccaaatcaaaaaaatttaacgtagaaattcccttttttattgcataaatagtaaatgtgtgatgatcaaataaccggaaaagtgcttcttttatataatggaggatagagaagaagaaaatcatactcctttttttgctaaattttttgtttcttttttggtcgtcatcattataaaaggaatgcattttctcagtttcgaccattccattcctcattcaacaacaacagataatg

SEQ ID NO: 103128 - DNA, 505 bp, Heterodera glycines
taaagcttaaaaactagattaggtacatacatattttttgaattataagaaattaggtaggtaattcgatcgatagccggtggaaaataaataaatagcctttaacttttaaattttcgtaaatagaaatgtaaaaaaatatataattttaatttatttcttcaaccatttacatatatatttaacttttaagccagattcaatttgtgaatttgatgtattctactgtaattgaccctttttcaaagtctgaccccgaaattgggatcagaaatcaatttaaactttacaaaaacaaaagctacgattggcgatccaatgttattgaccctcacaacaacagtcgtttttgttttctgcagccattgactacgtacacaccttggatattcgagaccactgatcaaaattttcattaccaacggagcaaaatttatgagcaacgagaaaaattggatgggctaagttatgcaagacaattgattcggtttagtgctatggcatg

SEQ ID NO: 103129 - DNA, 808 bp, Heterodera glycines
  unsure (1)..(808): unsure at all n locations
tcaatcaaattctttggggcgagaaaattttccttaaaggcggagatgcaaaaagaaaagcgtcacacaaaccgtagattttatacacgggaactgacatcagagaaatgaagggaaggccgaagcgacttcatttgaattccatttcgcttaaggcggggggggtcggggccattcttgcccctcggggcgcttgcccccaaatattcaaatttttcaatcgatcatctggatctgtcaccgcggcacgccagcacggcatggcagtgggaggagtcagcagcggcaccatccccaagttctcttctcatcatttgccactttcgcccactttttcaatttgtcagcagcggagacgcatcccaaattcgcttttcactagttgccattttcatccactttcatcatgccctttattgcccccggcactttcgcttttctttcaaaagagtatggggaattttcgactgggcattttgacccaaacagagcatacgacccaaattcacttgcagaactttcgtaatacatttattttgcttccattatctttgatttttttctttgtagtcaatggagaaaagagtttctggacggccgataccgatccaaaacaaccaacnccctccttcccccctgcgtgccccatcgcccagctttccaatcccggtcatcgttggtaatttaaatttcagttttttttggattttgcaaatattccgtttacaggaaatcgtccacaggatgaaaattgtttggttttccacaaatatcttgtctgattttttccattttagggcggcagatg

SEQ ID NO: 103130 - DNA, 58 bp, Heterodera glycines
tccaaagttatgcttacctgaattttttagatttttaatgctgatgaaaaaaaatatg

SEQ ID NO: 103131 - DNA, 102 bp, Heterodera glycines
ttgaaacactttccccattttacatttacatacagtaataataataattaaaaagaaattaaaaattagtgttcatttcatcaatctttcaattaaaaaatg

SEQ ID NO: 103132 - DNA, 72 bp, Heterodera glycines
ggtacataaataggctcttgtgcagtttaggcccatatactaaaaattttttacatttcagaataaaatatg

SEQ ID NO: 103133 - DNA, 345 bp, Heterodera glycines
cttaaatttattaatcaaacaaaaataaattcacacaaaccttaaatgtaattcatgtttttttcatatgtttacatatgtaaatgtaattttataattatcggaaataacaatcaatccatttaattcaaataaatgacttaaaaattgctgctttcttagaatataaatctgaattaaatcgtcaatttattatttattttgacaaaataattgtaattattaattatataaaaagtttaatgcatcgcaattttgtgtttcttttgctgtcattttgcgtaaaaacagccaaatttgactcaataaaaggcgcaaattgtgataaccaacaacaacagaatg

SEQ ID NO: 103134 - DNA, 86 bp, Heterodera glycines
aaggcaattccaattctaatccattttcctttctttcatttaggtccgtgtgagttccggttgtgccgatttgccctgtcaaaatg

SEQ ID NO: 103135 - DNA, 265 bp, Heterodera glycines
taaggaaacggttggtaaggaaacggttggtaaggaaacggtggtaaggaaacaacaccaacccatcattcgtttcatttatttgttttcgtctctctctttttcgaccttttctccctgacaatacctttccttctcattttttctctgtgacattttacaattccaaatcaaaattctttcaatgcttttttaaatttgtataattttctttttcagttcgcctatttttttttgttgtttgattaccaatctcaaaaaaatg

SEQ ID NO: 103136 - DNA, 324 bp, Heterodera glycines
atgtcgtcatgtttgtgattgtgttggtagaactactctcgatattcgcgtgttttatagtcttcgacacatccaaaagtgaacaaaatccgataattttaaacaagttttaatggagaaaatccaattttgaaaatcccggttggcgctcagttggcaaagctgggggatttttggcatgttttgttgcccgtaaattgtaaggccaggagcggaaattttttgagatgttttttttagatttttcattgtgagctttttgaattactagtagtttgaaaatcccgactccatatcgaaactctgatccttatttctaaaatg

SEQ ID NO: 103137 - DNA, 578 bp, Heterodera glycines
  unsure (1)..(578): unsure at all n locations
tttatatgatattaatataattatatctaaatgtgttatgggattatgcgnntaataatgattttttaaataaaaggattaaataaataattatacagtntaatntaacatatnttataaaaatgtattntaaccatttatttttttatttattggtttgctatatntcataaaaatttggcccaaagaggaaaaattgtcagtataatattatttgttgtttttataaatccatattcattaattattttgttagtagtttttttttcctattttttaacatgcaaaaataattataaaggtatttttccgaaattgtttattttcttctttgtcttttaattgctccattcaaattttttattaaaattactaatgattattatgttgctttagtttatgctaattaaaaataaaatcggtttattaaaaattaaaaattaaattttttaaagtttggtttttttttgtttatgaattctttggcattcgttatttttcatcttttaaatctcatgattccgagcctcatgaagatttacaaaataattaattttttgaatttttatggcataatg

SEQ ID NO: 103138 - DNA, 230 bp, Heterodera glycines
tgtaatattcttaatttgaaatttccatggctaatcattttgcttttccgttttcagcttcatttctgccgattgttggttgggagtgttcgatttgcttccgctttctcagcttggactgggaattgcattgatcagtcaccgatttgactatttcgttgacgaacatttcaaaactcgcaaatggaaattgagaccaattgtaattcgacacaaaattggagaaaatg

SEQ ID NO: 103139 - DNA, 148 bp, Heterodera glycines
gaattggacaaaattcccggccttttaatgttaattcccgtttaataaactgcttgatttgctcccaggtttcccaagcaaattttgactacgaatctgcgtcagggaatgcattttgcgatgttttccaactgtcagaccaaaaatg

SEQ ID NO: 103140 - DNA, 464 bp, Heterodera glycines
aaaatggggacaaattgagatatcgactctctctaaataaaatgtgtactgaccttgattcagaagcattgtggccttttatttttagtgttaaggtattattgataagcccaatgccacccgattgtgagccattcattgctgctgtttttgaaaccaaatatgcttatcttaataaccctgtgatataatatgattggaaacaacttaagcacagaaccaaatttttaattctgcatccaatgcatttcaatttgtaagactactttcaaagcatcctaaaccctccctagatcgattctgtcattaattagtcaattttttatattacattacaaatttgtattgaatgaattcgatgaggatcacaagcctttaaaaacattcttgtctttttgtttcacctttaaattgaaattgcctttattatacagcaattcgagtgctacaaatagttcgaaatg

SEQ ID NO: 103141 - DNA, 624 bp, Heterodera glycines
acaattttaacggtgggcggcgacatatgaatttaaataaaaataaattgataatctgaaattagtacaaataaacaataataaaggaataaaaagagaataagcggagaaataaagaaactctgcatacaaataattagacacaaatttaaaagcaaaactgccgaattaaaattaaacaaatttcaaaattcctccaacaaacacacccgattatttacagaaaagatttaaagaaaaaggtgaaagcgatagagagagagaaaagagaaaccaagaaagagagagaaaaaggaaaggagaacaaatacaaaaagaaaacaggaaaatggatttggagacaaaatttgaaacaatacaaaaaagagttaaagaacttgaagataaattattgtttaataaagccattgctttgccttctggcataaagatgccaaagtttgacggtaacagcgattttttaaattcttgaaagaatttaatttattggcaacagcatcaaactggcatggccctgactgtgtcagattgttgcctttgtttctagaaggagaagcgaaagaagtgtaccaaaatattcccgctgataaaaagaaaaattggcgggatctgacagaaagaatg

SEQ ID NO: 103142 - DNA, 692 bp, Heterodera glycines
tcagttactgtttactcagacttctcggtaaaagcgacttttattttacaaaacttttcaaaagaacaaaaattatgaattcaaagcattatttttattttaattttatcatagacgatttctattatctgaaaaatattcttttagatactgcattacagattgggattttatttggggtatgtcaaattgcccatttgattcaattatgcttattctttgtcacattctaaaaaaggtttaatatccttttttattcgctgttttaaatcaattctatttgagcccaccatgagaataagaatgaatcagttactgtttactcagagttctcggtaaaagcgacttttattttaataaaactttttcaaaagaacaaaaattatgaattcaaagcattatttttattttattttatcatagacgatttctattatctgaaaaatattcttttagatactgcattacagattgggattttatttggggtatgtcaaattgcccatttgattcaattatgcttattctttgtcacattctaaaaaaggtttaatatcattttttattcgctgttttagagtatatataatttgttgctatatcctggtcttttaatatttttgctgaactagcgaaccagcctacacaaaaagacgtctttgtcgcaatcaattctatttgagcccaccatg

SEQ ID NO: 103143 - DNA, 600 bp, Heterodera glycines
cgttggagaaagaaggaatatattgtggtgagggaattggaaatcagagttggggattggatttgaggggataattccaattcagcaccactttagttttagtcaaatattagctgctcgtttttgtaacggcagctttaaagtcaagggtaatcaaagttggggaatttatcaggaaattaaaggagaatttcataaaacataaataacgaattcaatatttcaatataaaatgaaaacataaaaacattgatatataattcgaatacaattttcgaatgagaagacaaatatgaaaaagataaaaggacaacaaataaaatatttaaatgcaaatataacgcgaaaacaatcgctatgaaaataataaataaataaataaataaaggataaatcattatttatcctacgtaagattgcgataaattttaggtgcggggaaccggccttttaggtaaaaaccaaaacctttaaaaataattttcaaaaattgtcatttttcatttttggacaaaacaaataaaacacaaaatcacttaatgcggcaggaaattttaggaattttatttgttccataaacaacgcccgccagcgtccatg

SEQ ID NO: 103144 - DNA, 153 bp, Heterodera glycines
ggtaaaataataaaaaaaatatttaaattaaaaatattatttttcccgggcattattaacgacaagatctgcggatcctgaaatcccgccagttaaaaaacaaaataaaaattgctaaatttttaaaaatttctatttttggcacgacaaatg

SEQ ID NO: 103145 - DNA, 1003 bp, Heterodera glycines
tttagtttttttaatttttaaatcaattatagtgaatttttattaaatgccccaaaaatcaaaaatttcgcatttttttcttacattttaaattttttacatatttgagaatttatcaaaatttctcgtgaaaaaataaattttttttgaaaagtatccctaaaaatacgtttttttcaaaaaagagataccaaaaattattttaaaatactaaaatgtgattatagcctatttggtatttttatgattttgcaccctttatgaagaatttttttccaaaaaataactatattaaaacatgaaaatccttttaaatgcatattaaaagagatgaaatgataaaaatttatttaaaataatattttttgataatttaaatttccacgcctttttaatttttttttaaagccaattattactaatattcctttttagaagggtaatgaagcacgcaatttgttgcctcagctgtacagtcgaattgctgagttggaacgggaaaacaatttgttgaaggatttgttgtggagagaacgcaaccccaacagtttcgcggtggcacaacagcagaaaatggtggaaaagaaattacgaaaatgaaaatgaaataatcgaattctcaaaatgcaattgtaatttttaacaattttttttactcattttttatttaattattcgtattttctcgattatttgaattcttccaaaaataggaatggaatcgtgcaaatggacaaacaatggacatggaaaatgcattcccacaacgcgcgatgagcgaagcttcggtcaattaatgctaattgataaaataattaattggcaaaaaaaacatttacacataataaaaccggaaattcttttctatttttagattccttcaatgtttaattgccaaacagttcggtcaaataatttaattttcaatggatggcctttactgaatcggaataaaaaatcaaacagaaaactgaactgaatttaaaaacgattaaaggcaatg

SEQ ID NO: 103146 - DNA, 194 bp, Heterodera glycines
tcccattgaagaccgtctcctccgatggggtactcactatatttgcattgtttctctccccccatttccatcaatagaaggatcaaattgtcgcagtaaattccttggccgctcatttggattcgctttcgttggggttaaaacaaagtaaaaatgaaacggataaaaagggagaagagagccgaaagaaaatg

SEQ ID NO: 103147 - DNA, 134 bp, Heterodera glycines
ctcaatctgtccgctgctggatggttcggtgcccttttctgatagtcctcaactgataaattaaggcgtaccaacagtgtgccgctgcctcgtgggcatttcatgcacaacagcagtattcttcggcaattatg

SEQ ID NO: 103148 - DNA, 1003 bp, Heterodera glycines
  unsure (1)..(1003): unsure at all n locations
agtgtcctttggcgagtggaaattgcgaatttgaactgcacgcagcggtcgctttgacttgcgtgttcccaaatccgtctttcctttaatgggtgttcacagaagcctacttatcagcttgtgaagccaataaagtcttttccttactgttgacgaaagcggtctacttatcgacttatcggtcagtaagaatgtgttacgggcaaaggtggacacaaatgaattgaataaaattgaatttggaattaaactgccaagtgaattgtattttaaaaataaaagcctatgctgactgcgccaatttgttgtgtcgtttatcaacaacaacaaatnataatcaataacaaataataagtcagaggagaagagagagataaatatgtgtggggtgaaagaaaatgagaaatgagaatgaatgaagtccgaagcgaggaaggagagaagacatcagtatttatgggcgatgatggtggtgacgtgccaataaacataatgccaagaaaatatgaaatggcaataatacaataaaaccttcactaaaacaaaaaaatttcaaataacaatgctatatttttgagcccctttcttcaatatgcgcagaaaaatgtgcaaaactctttcctctgcggagtaatatttcattaatttaccaaagataaagttttttgtaattccataaaattatttttcaacgttttactaaacagaaacggaaatttaaaaaatctaatttttttaaatccattatttcatttttctcgatgaaataattttttataattttataatatatgaatttataaaaattattttacaaaaatgtaaatgaaatatttgttaatcaattgcataacaattaaaaacaacgataaattgcaattaatttgataatttatactttatgaaaaatatttttccaaaattctataatattaatataatatatatttaatattataagctgaaaattcaaatttattattttgttattactaaaaaaatg

SEQ ID NO: 103149 - DNA, 225 bp, Heterodera glycines
ataaaagtaaataaattattattttaatttaaaacatttttcacaaaaaataatttaatttaaattaaaaaatttattttttattaaaaaaacaaacactcttttaaatgaattaaaacattaaaaataacccatttcgaattcgggtttcgggttgagaaaaacttcgggtttcgggtctcggggtccggttggcatcactgcttcacacgttcgcgtccaatg

SEQ ID NO: 103150 - DNA, 449 bp, Heterodera glycines
tcaaaaatatgtacaaaaagtggccaaaatatgtacataaatatgtaaaaaaaatcccgaaatatgtgtaggcataaaattgcataaaaatgacctaagtaggcctagaatcaaattttttaatattttaaaaattaatttttgatatctcttttttaccgtttttaggggtacaattaaaaaaatgaaaatttgccgaaattttgaattacttttgaggatttccaaaaatttatataaaaatcttcaaaatatccaatatgtaccaaatatgtataaaatcacgaaatatgtaaattatgtataaaaactccgaatatgtaaataaaagtcccgattcttgttcacaaaacacaaaaaaaagaagaaattgattttcctactatttagagcatagagaatccaggaaaaaaatatgtattttcataaaattagagaattcggtcatg

SEQ ID NO: 103151 - DNA, 661 bp, Heterodera glycines
tgctttcaaattaaatctgatcagatctgaatgaattccttttttgaatttattttttcaaaattaaatctgatcagatccttttgaattgctaatttcaatttattttttcaaaattaaatctgatcagatatgaattaattgctactttctatttatgctttcacaattaaatctggatctgatctgtatatgttttgataattaattaaagctaatcttaattaattgctaatttaaatttatgccaaattaaatctgatctgaattaattgctcatttcaattatgctttcaaaattaaatctgatcagatctgaatgaaatgctaatttcaatttattttttcaaaattaaatctgatcagatatgaattaattgctaatttcaatttatgctttcacaattaaatctggatctgatctgtatatgttttgataattaattaaagctaatcttaattaattgctaatctcaatttatgctaaataaatctgatctgaatgaattgctaatttaaatttatgccaaattaaatcttatctgaattaattgcttatttaaatattcaaatctgatctgatctgaatttgctaatttcaaattttttcgtaataaatttcaattttgctttcaaaaaataaaattttactgcccaaatg

SEQ ID NO: 103152 - DNA, 749 bp, Heterodera glycines
tttttagacttttttgttggaattcgagcgtgaagttaacgcaaagcacaaattacgaaaaaatttttatacgcaaatgtcccgttttttcttgcgatgtgagatcggaggtcagaggtggcaaattccttttgttgaaggcgaaaaccgatcatttcggaagactgaaaagataaagaaattattgagtggaaacttttggcaaagaaggcgtggtaagacgcgcagtagagaccggaagtttaaaactaccgagcccgggcaacacttacaattgaccgggccgcccgttcaaaaaacccgttttgccggtcggcccggcctcgtgggtttgtccaaaaaagggaaccgggcgggctggcaaaagcccgccaggccccgggcccgtcctgtccctattaagtagtacacatgaggagtcaatggcaaggcaattaaactttaaaaatggagtgtctcattgtatcgcttgactgacatttgcacctaatcggtccgaaaagggcaagagtcttagagttttttaggtattcaatttatcagtgaattggcggttaaaacgcgtaaactcttgagggcgttggggcagggacccaaagaaaaaccttaacagagtgaaattttcttgaatttgaacgatagacacaaatgtgaatagaaattgcacttaatgactgatcttcaatttccgtgcaccgactacgcaaccccttgaaaacaataaacctgcaattgcaggcactaaaatg

SEQ ID NO: 103153 - DNA, 94 bp, Heterodera glycines
aaacggtgtcaaacctatctactgcaaggcaagaccagtgccacacggggctttggacgacgtaaatgccgaaattgaccgtcttttgaaaatg

SEQ ID NO: 103154 - DNA, 1003 bp, Heterodera glycines
ctgtttattcattttatatccaattttattataattatttatttgtttagtcaattttaaaatttattaactatttaaacactattattgcatattcaatcatttattttttattcatttgttcaaatagaaatttttacataactattctatttgaaaatttcatataatttttgctttaatgaataataaatttttataacttatagatagattatttgatgctgtctatttaatgttttatgttgaaaaaagccaaaaatgaaaacaaaaaaaaaggaaaaaaaattttttaattgaccgctgatcggtcgcaattgacagtttggatcatttattatttcaactaaaaattcatttttgatcaaaaaaaaattcacaggtttctcttagttcagccagaaaattgttttgtatgccatcaatattataattgaagaaagtgctcgattaattctcagcaaaagcaaaagtaattaattgtgccgtttttgccacaaaattaatttgaattttagcgcttttcctaattacgctgcaaagtccatctaattttctatgaacaaattgaatcgaaattgatcaaaattattcaaaaaaatttttactaatttactaaaaacaaaaattcctattttgacaaaagatttatattttaaaattttttttattaaaattttattcatatatactttaataattataaaatattttttttatcggtataattttctaatagcaaacaaaaattgtaaaacattttgcctttcttccaccttcttaacaaaatcaattataataatttgtaaaattaatccagaaatttaaataaccaaaattttaataaaatttcataaaatattactccaaatatttttaagagaatggaattttatgttataatttttatattattattcataaataattcaattgaaaagaatgggaaactttgaccaacttttgaagaattatttggcaaagaatgggaaaatgaaaaatg

SEQ ID NO: 103155 - DNA, 294 bp, Heterodera glycines
  unsure (1)..(294): unsure at all n locations
tttntgcggtgcaagaaatcggaaatttttcaaaaaatatctcctataataaaaaaatttctaaatattttaataggctaacttttttaattcttaaccaagtaaaaggtatttcacaaatgtttttagtatattctcttgaaaaaattattcaattattttatcaaaatctttttttgtcatttttcattattttagaacatttttgggaaaaggagtgactatttacacgttttttacagcgcgcttttttcaaaactttttgtgaacttggaggagggtaccgggaaaatg

SEQ ID NO: 103156 - DNA, 117 bp, Heterodera glycines
agccacaagacggtggcggcgccgctcaacaaagcccaagacgacgagtgacaaagattggaatttttctggatggaaacggtactcatttttttttgttttgtttgttggcaaatg

SEQ ID NO: 103157 - DNA, 943 bp, Heterodera glycines
attttctgtggggggttgggctaattcgttgtgtttggctctgattggctgctgcttttccagaggcaaagctccgccccttgccaatgttagccgaacaaccgcagaattcattcattcattcaatcatttgttttcaaatgaaataaattttctaaataaatattcttaataaataaaataaattaggataagaattaagttagttctctgatagagccaagttcctaaggacactaaatgggattagtcggtcattagagggaagttacaatctaattagcacgactccgggtcggtcaagtccgctaattgagctccattagtactggcctgaacacaaagacattaattaggaagaataaaattgtcagcttaaggcaattagccctgtggcttaatgatccttaattggggaacaagtacaattagcttaacacctgtgggtaataaaaacgattagttgaatagcgtgtgaaaattagtgtgttgtacgtacgatctcaatgtcaaacctcgagccaattagcttacactgatggcaatgactaattaaaacattacattagccctgtggcttaatgactcttacactggggaaccgatctcaatgccaaacctcgggccaattagcttacactgatggcaatgactaattaagacattacattagccccgtggcttaatgactcttacactggggaaccgatctcaataccaaacctcgggccaattagcttacactgatggcaatgactaattaagacattacttagccccgtggcttaatgactcttacactggggaacgagtggaattagcttaacacccatgggtaattaaaaacgattagcttaattaattagtgtgtgctttggacgatatcattgccaagctttttacacttatggctaattaagagattttgttgcctttcagaatg

SEQ ID NO: 103158 - DNA, 127 bp, Heterodera glycines
ttttttagccaaattttgttgtggtgaaaaaactttttttttttttaaagagttacccccccccccattatctaacacatatttgagagactgtctctatatacaaaaaacaaaccgttcagaaatg

SEQ ID NO: 103159 - DNA, 439 bp, Heterodera glycines
gagcaatacagtttttaaagcatcgccttgttgctaatgtttggttattgggagaactgagaaaaaatttttgaattatatttttgtttatttttaattgtagaacaaatcttaagttcatcataaaaaattttttatacactctaattgtgcttgcgaataaacaactacgaattgtacagattcctttcatttattactttttttaaaattatttttatgtaatgcaaagccatttttacattgccaaaatgccatggaattgattttcgggctaatagatgccaaattttattaagacagtgaatattgtcttcgtgaaatgttatacctattcacattgaagcgctttttacacgttttggacaatgtgcatcaatcaatacccatcagatcccctaagaaagaattattctattttttttaatttctaaaaatg

SEQ ID NO: 103160 - DNA, 581 bp, Heterodera glycines
agtgggaagagttcaacgatgaaaacttgaaaatttaagagattttcgagattttttgtatccctccccccggcacagatgtttcttccgcctttatgcggtcggcagcgaataatgttctgttttttgtggtgagaaataaatttaaaaaatacaaattaattttaaatcaataatttcactgattaatttaatctgttttttaaatttttattctattttgcctagtaattttaaaattttgtaaatgagatttttttataacacattggacgaaaccgtaattttttcatgtccagaggggttagcgatgtaaaggggtaggtagatacataaattcagtaaaaccaaaaagaggccgctcaaaatttttttcttaatgtggcaccatccacatatctaagtcaaaatccataagaacgccccaattgttggcttttttggtcattttcaagtcacacgtttttgatcacttggactctgtccaggactcaattggccggcccctccaatggcacttgaccaatcatgatgatcagtattattaattataaatcatttttcagttggactggcgcatg

SEQ ID NO: 103161 - DNA, 384 bp, Heterodera glycines
ttttattttttttgtcacctttttttgaagaagcaaaaatacatcaccacaaagatatcttatataaactagagctcagactggacctgggtccaggcctggatttttcctggatccaggtccaggcccaggccatttttagacaacctggatttttctttgcaggattttcctgggtttgtgtccaggaaatcagttccagataaaatgtgaaaaaaatctaggtccaggtctttattgaaagcaatgaatttttgctataattttctcatatttaaatatttcaaatttttggaaataaaaaacttctccatatttataaataagaaagagtaaccagcaaaatttgaaaattttaagcacaaaagcgccgttggaataatg

SEQ ID NO: 103162 - DNA, 771 bp, Heterodera glycines
tgctgatttggaaaaggagtacaattcagtgagttcaattaataaattaattattaattaatgccttaaaaataacatttattaatatattattattttttactttgatgtactaaaggggaatcaaattaaggaatcaattaatcacagttaattaattaactaattaattagttcatttactcagttgtcagttgcttcgttaataattatactctttttctagtgaattataaattaatgtcccaaaattagcattattaatatattttgttttttttaattttgatattctaaataggcatcaattaaagaatcaattaatcgcagttcattaattaactaattaattagttcatttactcatgtgccagttgcttcgtcataattaattatgctctttttcgtgtgaaatataaattaaatgctccaaatagtatttttgaatatattatttttttatttctaaataggaatcaattagggaatcaattaatcgcagttcattaattaatgaattaattagttcatttattaattggtcagttgctgtgttaaatcagctcttttcctattggctaattttattcgtaatattaaaaattaaatccacttttatttatagttaaaacaaaaaatattaatatttattaaatattattaactgattttcttaaattttttataaaaatattatatttaaaataaagttccataattaaaaacattaatattcgcaatgttgtcaatatttagctcaatgaaaccatg

SEQ ID NO: 103163 - DNA, 67 bp, Heterodera glycines
tttcatatttgtccataatttaaatgctttgagtcttaagactttacacataaagaaccgattaatg

SEQ ID NO: 103164 - DNA, 79 bp, Heterodera glycines
aatattatcctaaaaatgtggtaatagaacctttttacctaatttatctcatcttaccttctcaattaatctttagatg

SEQ ID NO: 103165 - DNA, 1003 bp, Heterodera glycines
taacgtaaataaaaattggaataagtaaaaaatgaatgattaataattttatacaagcattttttcaattattattaattagtttgcatcttttttgcttttgtttttcaaaatgttcttcaattttattctttacttttatacttgattatgaattttgcatttatagtgttatggaaataaatttgcagctatacatttacaattttaaatattcttactatattaaaatttatattttttcattaaatatttgatcctaataataattttcgtataaatatgaatatattaatagtattattttgttattttgaattatgtttaaattttcatcttttagtaaaaattaaaaaaataataataattttatatcttgcaatttattgctgtaattatgtttaatttacataatataagttatttttgttaatataaagctttgtcaatttaacttgatttttagatatttatcaaaagtttcaatcccatttaaaaaatgaatccatattatagcaaaaataagaatattaatttaagcaataagtgtattgtattaatacactgtaaaaatgaaatgctttctttctatttttcataaataaataatattattgttctaaagattatatataatttaataattattgtttaacaaataatattatatctttttctttaaaattcttaacatttttctattattttgctcttttttaattgttgcatttcgaaatgttactttgtatattcgtttttctttaattagggattgtcttagccataaattgcgtttatttttataatttttaaaattctttttcgaattgaaggctgtacaatttttttttattaaaaactttatatttaatcatttttttataatttttattaaacaaatttttaattataaataatttattttccttgcgaattataagaggtatcttttcaattgtccaataaatatgttttttcacattgcctctatgtcttccaaatg

SEQ ID NO: 103166 - DNA, 89 bp, Heterodera glycines
tacaggaccagaaactcaaaatttctgggctctaaaaagaaacacatattgataaacagtaaaaaatttttttctaaattttagacatg

SEQ ID NO: 103167 - DNA, 355 bp, Heterodera glycines
tatacattgtacatattgagctggattattcttacctatcattctctatcaaatttgaaaatacgccaaagagggtgtctttttgatttaatgttaattttcttgactttttggtaatagtcaagaattaattattgctcagatttaaattttaaccaatataatttaattagtccactggtgctcttcatactgtgtctattcaattacttataatatgaactgacaatgagcttgatacagtcaagttgagactagaaataattaggctgtttataattttaaacgctccgcagaactgaaaggcgcaccgacgcattgggagggagcggacgaaaatcgggaggaaaaaatg

SEQ ID NO: 103168 - DNA, 447 bp, Heterodera glycines
aacattgggactcaacccaccaactttcaatgacattccaatcataactcaacccaccagcattccaatactgggactcaattctccggcattctaatctctgggactaaaatctccggcattccaaacactgggactcaacccaccaactttcaatgacattccaatcactgaaaatcagcccaccagcattccaatactgggactcaattctccggcattccaatctctgggactaaaatctccggcattccaaacactgggactcaacccaccaactttcaatgacattccaatctctgggactcaacccaccagcatttcaatctctgggactcaattctcaggctttccaatcgctgggactcaacccaccggcatttcaatctctgggactcaaatctccggcattccaaacactgggactcaacccaccaactttcaatg

SEQ ID NO: 103169 - DNA, 168 bp, Heterodera glycines
gaattaaaatcattacttggggcactcacctattttcggcgttttattaaaaatttcgcgcacattgctcgtccgcttcaaacattaactcaggataaatttgagggtaaaattgaagaaaattggggaaaagaacagaacgaagcgttggaaaagctaaaacaaatg

SEQ ID NO: 103170 - DNA, 139 bp, Heterodera glycines
aaaagaggcagaacgtgtgattatgcattgtgaatggaaagggtacagcgctcgctccaatagttggattcccgcaaattcaattagcgagaaaaatatataaaaagcattatttaataaaatttataaaaaaaaaatg

SEQ ID NO: 103171 - DNA, 99 bp, Heterodera glycines
cctaatttttgttagcctcctttttactgttaggttatccccgtggaagagacgtgccatgctaatttggacgaaattaagacattgttgtcagaaatg

SEQ ID NO: 103172 - DNA, 502 bp, Heterodera glycines
ttttctcgttagagatgctttctttgtttattcttacatttatttgcttgcttttttgtggtgcaatttcttggtatcatttgaaaagcttaaagttctattgaattttttaaactaaaggtctaaaaatgtagccagacgaagaattattattactaaaatagtcaaaaaggttgaatttagcgttctcactgtaagtagcgactttttcgccggtgcaaaaacccggccagtgttctccgacccggtttccttgcagtttttttttcatgttttcggttttttctaccccaatttttcagtacagtttcggtgactataaaaattaaacaaatgattattgtattttaagcagtaacaacaaaattttttttttaattttaaagaaaaaataaatcaattaaaaatctttttctgcttactttttggaatataaaaaagtttttacttcgttaacaagcacaacttacgacaaaagtgtgcaaattgttcagcaaaaatg

SEQ ID NO: 103173 - DNA, 89 bp, Heterodera glycines
atcgccacgccatcaaacgaaaaagtgaaaaactgccgacagcaaaattttgttttgtttttgctaaacctgagccaggtgcaaaaatg

SEQ ID NO: 103174 - DNA, 566 bp, Heterodera glycines
tccccccagtttgtccccccccttcctcgacaaactttttggtgccacgacccgggaacacaaacccttcacccttcaattcactttcgaccatccatcactcttctctctgccgccagccgaccctttaggctcccggcaactcaacccttcgctgtacgccgaccatcttaggcctccggcactcatcactcaactcaagtcgccagccgccccctcttaggctcccgacaaaccctcaccgagttgtcagccgcccatttcaggctttcgaccattcatcactcttctctcagccgccagccgccctttcaggctcccggctttcatcactcaactctttgtcgccagcccccctttaggcttccgacaagccctcaattgagtcgtcagccgtccttttaaggctcccggctttcaccactcaactcttatcgtcagccgtccctctcgggctctcggctaatctccactcaacccaccaaccgacagccgccttctctaggctctcgaccaaccaagcccgactcttgcgtccagccgccaatcctagactttcggaaatg

SEQ ID NO: 103175 - DNA, 165 bp, Heterodera glycines
cattggtgctttcagaatcaagagtcaattctaataattttttaaaggtgtttaaggagctagacattaacgttttatcaagggcattccaggccttgactgatctgttaacaaaagatttggaagattttttagattgtaatttaacatttaaccggaaaaatg

SEQ ID NO: 103176 - DNA, 208 bp, Heterodera glycines
taaagcgcacttttctaaccgtctactcgctcgttttccctaatcgtttggccagtctctcgcccacacgtctctccgttcgccgcccttttttggctctttcggtgccccctcgtggtcacccccccctcccggtcgttgtccatcccctttgtgcgacaagtggtgccgttagcgattcgtaatgtcttctgcacgatgccggatg

SEQ ID NO: 103177 - DNA, 310 bp, Heterodera glycines
  unsure (1)..(310): unsure at all n locations
tgaacaaatggaaaatnagggaaaaatgccgataaacttgggggcgtataaattggattggagtttgcttttacaatctgttttcagttcgtcaggaagaccgcaccaccacacaaatcagcagcctcagagttcgtcgagtgtgcaacaggacgccaggtttttttacgcctattatactatttaaacaaaatccttttcatttatgggaacgtttcactttttgcgctgaatggacttacaaaacgctttcctttggtttagggctcagcgtgccaacgcctttctgtccacaattgtgccgcggatg

SEQ ID NO: 103178 - DNA, 1003 bp, Heterodera glycines
ggcttggtaaatattacatttaccttttcgtgaggtgacattatatgcaattgttcttcctgttatataaatttgttaaccatttgttttatgtttgatttaaagttaatgacataaattttcaaaaacgaaaacattgattgcattggggggggggaagtcaatggtaatgatggcaaaagtgcagttttgtggttttgcgaaaaatataaacatttaaaaaccaaattttctatgagaaaagatgtacttcactaccctgagctcattgtcggatgaccattttttgatgttgcaatgatttttgactaatagctaaggtgcagaattgtggtctcaatgggaaaaaattgtaaaattttaaaaagcctttccgggttaaaaaatgcgctgctgaataaattttcgaagaatccaattttttgtcttatttctgatcaagtatcataaaaattaaattgaagccaagcgggctcgaaccccacatccccgtttcatatgacccctacggacagtaattaaattacaataaaatggtaaaataaaaattagacatctctagacattcaatagctcattccaatgctttttttaatctctacaacatctgtgtatgagttgcttacgactatctttttccaaaaactttttaaatcgaggtcggtttcttgtaccttaacaaggaaaaatccctcttttttaaattttgcaaaattttggcgttttgattactaaataaaaaataaatttgtttccgtccgaatttggataattttccagtttagggcccgatgcttcgagttgggggccccccaaaaaactcaaaatgtactgccgcgatttgtactattcaaaaaacttatacctaagtcattaatttgattttgaataaaaccagtaaaaagcattttataaaatttgatgatatgcttatgacgatatatttaggtatttattctcgagtataacttggattttacaatacctaattgactccaaaatg

SEQ ID NO: 103179 - DNA, 1003 bp, Heterodera glycines
cgttttcttttgattttatttttatttttttcaaattaatacaggtttttctatatgttcttatttgtaagaaatgttctgatttgggggtagtgccttattttcatctaaaagagggaaatttctgaaaaattgctaatttctaacaaaattcatataaagtcttaaaaattttccccttgcggcgccaatcggcacagccagcccccaaaaaatcctattttttcttaaaaattagccaaagatcttaaacgtttgtcctttttggacaaaatttgttaacaaattgcattcaaattttcaaaaattttttccggcgggacctctcccctcgcacattcaccatgttttttggaaatgtgccgcaaaaaatgttaaaaatctgatttagtgatcccgaatgctctgaaatttatgatatataataatagaatacatttttggttgaataaaatgtaaaaatatttgaagcaattttgcaaaatgttctatttttaactatagtcttattttttggcctttgttattttgaaaattttgagatagaaaccctggattaatagacaaaaacacccataaaaattgactattctggcataatttataatccctaaatttggtcatttttagacaatatctgtgcaattataccaaaaagaattaaatcgaggcgatacaacgaataaaggaatgtggaaccaaacacatcattcaaaaaattaatttttttgtgagattttggagctaattaaaagcaaacccccgcccccgccccgcgactctgacccccgcaatcccccgcccccgcgaaaagccacccccgcccacggggtccgaacactacaaaaaagtattgaaacttttttgtaatttttattattcacgagcagtgaacacttataacaatcacaaagctcttcacttcttcccccttcagaaatgagccgggcctgcttctacctggacaaagcgctcagtgttccaccgccgtttccccgcaatg

SEQ ID NO: 103180 - DNA, 377 bp, Heterodera glycines
ttccatatcgaaaatgattcatttccactttttccctttatttccctttcaattcgatggaatgtttcggtccgctggtgaaaagtccatttcattcattcattcgttacgttgtccattcattctcatattaatatttccgcttaatctgaactcgtttagctttgctttgctttgctttgcttccaaatgccattctctctgaaggctttgttcaaattcgccattttacaaaagaatttcatttaaacgactgacaaaactaacgactcacttttggaacattttaaaacaaattgatatttatttaacaataatatttataattggcaataaataatttttaatttttgcataatttctattcagtttaaatg

SEQ ID NO: 103181 - DNA, 771 bp, Heterodera glycines
tttatttaggccaacagtatttagcttgaattcagtaaattgttccgagacaggctttaggttaaattggagagatggagttttgatttcacagatttaattttatgaattatttttttgctctaattcaaataaaaaacaaacggaaattaatttgactgtccctctcccgctgattaaaagccgtcgcttttccgttgtatctgctactgttgattgttgatgaaggcttttcacatatcttcgttttcaccgacacacagaatttatcggttgcgtatcagcggaattggcgccggagttatgccattgaaacagtttttgcttggcattttgatgggctttttgttttttgttgtccaccggcacttttgctcgtcattttatgctgccaaattcgcgggccctcgtcatgacacattcggacaatctttggctgatgatggcaaaagtccgacgatgaatagcgattttatttttgtaagcatagcatttgttggcatttttaattgtttgtttttttaggttggtgtgttaagtgcgcaggtaaattgatttaaaaaaacaattcctgttgagttaatccatcgattataccctttttttacgtttttttgataaagcatttgcttctccccttccccacagcgttttctcgacacgcgtgcatttcaaatttggcgcagttgggcgcgccgtgtgcctggccgcgtgctgttctttgtcgccgacggcactgtgctcagtgcgcgagtgcgtgcggcgcgcatg

SEQ ID NO: 103182 - DNA, 1003 bp, Heterodera glycines
acaaaaattatataatatcagtcattggctgatgagtacaatcagcagaatcatgcttggatctgtgtggtggaaataaaattattacatattattaccatgaaaacggatttcgggaagagtttggccccaaaaaatttagcctcacaatcagaaaaaaaaaatttaaatttagcctcagaaacacttaaattgttagaaactctgatttttggggggaggggggattttggcatttaatttaagtgggccaaaatgtttgaatccgaaaaatgagtggactttttgatattgtgcgatgaaatttaagagaccaaaatatggaggctgctgacttatggcaattctcgaaatataaaagaaaatttccgatttttataggaatttttacgaaaaaactgatttttttcattagaatatttactaattctaccgtatgacaacaaataccataccttggtctcgtaaaacaaaactatgcgcaaaaatatatggtaaaaaaaaagagaagaaagcgctacgaatggacagtttttattatgcttggcgagtgtccttttgtgtagttaaacaaataaaagtggtcaattagcaaatggaaattagcaacaaaatttgaaaatattaaattgcgattaataggaggaacaataaaattagcatagaatcaatgtttgaatgaataaaataaaataaaaatgaaatttaacaaataaaatataaatttaatgagtttgactataatgcaattaattaatgaatttttcactctttggatggactttttgtttgctttgatcagcagcaaatgttttgtgtggttttggggtgatgaataaatgaaaatgaatttattatgctttatgttttacgttgggagtgttcccacagatttcgccgttaggactcaaaaacccatcaaaagaggcgccgcctaattaagccgtggaaacggcaaatttgattgattgcttattatcaaatcccggcgtttcagtccatg

SEQ ID NO: 103183 - DNA, 336 bp, Heterodera glycines
gtggggctgcgccgcgtggaagggtagacagtaaacagccgtgtgctcgctgtgcagcagcattgtgtgtgggaaaagggaagaggtgagaaaaataaagaaggaaatagtgcactgtctgactgtctggttacgcttttgaaaaatttgacccaaaaccgggacccaaactgaatgaggtaccctaaattttcccaaacatgtaaaatgtgttgagtgttcatccaaatttttcaaccaaaattccccatttctcgcttctttacaattagatttgggtaaattgcttatttctataccattattcgacttcaaacagagtttattaacgacatg

SEQ ID NO: 103184 - DNA, 106 bp, Heterodera glycines
tgcgtgtgctgcctgggtatcggccacaggccggcggagtgttggattttggaagcttggggttcttaatttttttttgtaatatatattttttctctttgcaatg

SEQ ID NO: 103185 - DNA, 280 bp, Heterodera glycines
ccaaactttgctctttttaacaccatatcaccttttaacgattgatatatttttgaaaatccgaaaaataaaaagcaaattaatttttaatttgcattttaatttcaaaatttttgattcagtagacatttttgtcgtatttgtattattaatgtacaattagcaaaacatttacgccaacaatataaaattcatggtttttaattaaaaaaattaattaattaattataattttgctaattaattgccccccccccccaatttccttcagacacttatg

SEQ ID NO: 103186 - DNA, 170 bp, Heterodera glycines
tgctgcgttaccgagtacaccataatgtactgtttgcatatggtaacaaagcaaatattaaatacgcactcaagtacccttttaaagggccaggacattgttatgtcgagtgcaaacaagagtccggcaataaaatcggaattgatgagccggctcaatatgccaagatg

SEQ ID NO: 103187 - DNA, 349 bp, Heterodera glycines
tttccatgttgccatatttacactatatttttatcacctgtgaatttttaacatttgattgaattatttttattcatttttattacggtattcattttgtatttttattttgatcaaatttatttgttgttttctttttggcaccataaagagcactcatgtgcctttggtttgctcgataaattaaataaattaaattaaattaaattaaattaaattaaaatgttcataagacaaggaaccaattctggatgaaattacagtatttaaaagggaaacattcgatggggtgaaccgtctcatatatataattttttgtttttgttttgtttgtggaatattcaaaatg

SEQ ID NO: 103188 - DNA, 382 bp, Heterodera glycines
ataatatgtatatgattccgtaatttgatccatatttcgtgattttatgttttcgagccttagtgaatgtaatggatagggcccggattcttatgtttttgcttatttttcagtggctttgtttcggtgagatttgaattttcgcccctatcggcattgttgaaaataaataaggatggatctcttgaaaattttttatgattgtggacaaaaaagaaaaaaaattatctttatattgaaccaaaatgaaaaataagacgaattttctgtaaaactttttttttgttgttttgttttttttatttaaaaaaggattctgaacaacaatgacggcgaaaatgcaacaaattctgatcattgtgagcaaacgacaacaacaatg

SEQ ID NO: 103189 - DNA, 533 bp, Heterodera glycines
gtgactcattaaatggatcggaattaaaaactgaatatcggtatctcatctcaagggatacatttttagcacaaaaaatcgcgaaataggacctaaaaaggaagaaaaaaacaaatatattttcggatcaattttcggtaaaatttttcaattagcgtgttttttctgtaaattttcgggtaatttcttaagggtgtatttttcgtttttttttttttgcatttttgttaaggatttttccgaaaaccctgaaaataggcgccaaaaattgcgaaataagcacaaataggcgcctaatctctgatttagaggcaatgctttgcgttttaatgaagaaattttgatcatggagttgagcattgaaacttttcatgatcgactgtacaagcgcattgattcctataagaatgaccaagaaatgcagaatataatccggcaattaacacaaccaatcatggaattgcatcaaggcacatattatgctaattaaacatttaattaatcatgtaaaattttaagtggcaattcatatg

SEQ ID NO: 103190 - DNA, 167 bp, Heterodera glycines
gggaatgtggcctatgattaacaaatgatatagggcaaaaatgagtgaataaaatttattattaacagtaaatactctctgaaagcgtaaaatcatgaaaaaatttataataattctgtaagctttatgattatttttttaaaaattattattttagaaattaaatg

SEQ ID NO: 103191 - DNA, 424 bp, Heterodera glycines
agtgacctttgagcgcggaaaaaccaattatgggaccgattgcctatggttgaacggcatgtttaagcgccgcaaaaaataataaaaaataaatttccaaactattcaggatttcgttttacacaccactcaggaaatcgctggagatgcacaaatcgcagttgctcagcatatataaacatcacaaacaacggcgaaaccggagctagtggaaccttgagtcaaaaagaacacaaccacctcccagcacctcagaaacaacaagtttgtataaatttaaaaccaaataattaatgctttgttaaaggcagagtcaaggcgacagaaaatcaaagaaagtgtcctggccgagccgtgtctgaagcccacacgacttttggctaaagtgaggcgatcagcaacggatgaagcctttgttgccatg

SEQ ID NO: 103192 - DNA, 193 bp, Heterodera glycines
atttatttgaatattttaggatcgaaagtaaacaaatgctgcggtgccctttgtgtttgaccgacccaaaattaattattgtaataagaaatttaattgccatgccattaatgcttctcgtgtctgttccctacaaaaggtggccgattttgcgccaattttcttcgactcgtcccaaatttatcacaaaatg

SEQ ID NO: 103193 - DNA, 56 bp, Heterodera glycines
ttgtctcctatgttgacgatcttttcgccgaatttccggccgatgacaatgccatg

SEQ ID NO: 103194 - DNA, 115 bp, Heterodera glycines
tatcaagtatgcatttattggagaagctaacggcccgtagaatagagtaaacaatttcttattctaaataacttaatatcgaatttaacgatttttaaaaaatttagcaaaaatg

SEQ ID NO: 103195 - DNA, 59 bp, Heterodera glycines
agtgagtgtttttttttttgaaccaaaccaataaaaatttcaaacaattttaaggaatg

SEQ ID NO: 103196 - DNA, 1003 bp, Heterodera glycines
  unsure (1)..(1003): unsure at all n locations
tctatgtttaatttcgtgccccctaatttaaatcttttaatgcatttttaaaaataaaagaaaaatttattgaaacgggaattagattaaaaaaagtttttcgtttttattacatataatagacaaagaaaaaatagtttccataaataaaaagagaaataaaacatatgaaaacactttcatacacaaaaaagaaattaaaaaccgtgcaagtgggaagcattgcgagattattttgtaaaaaaatatttaagcaagaatatttttaaggacaacaaaaaatcctttttaaaaaataattaaaacgcatcaaataaaaaaatattaaaaattaatttgggtctcacataaaatattgtagaaggaaattatgtttcataattaaataagttatgattacacttttaatacaatgtttgatttgttaattacaatggattaaaatagaaaaaaattaaaattgtaatcgtaatcacaattcaatgtgttacaaaatcaattatattaattcagaaagccatcttttaggaanataattaactataaaaaaatgacaatgaaacaaatctttgtatttttattgaaagaattagagaatgtttatgatgaaaatgtaaaaatatttgttcgaagaacgaacttcttagtaactttgctaaaaaaattggtaaaaaatgaaaacaaaatgtgtttaactttaaaattggacaaagaataaaaaaaaggattttctgtgaactaagaaaaaaataaaattcaaaaaaaatattacaaatgaataatttatttatttataattcttacattataatatataaacgaaaacaatatttaaatactaaaataaaaatgtctaaaacattataaatttttatcaatcaaaaaataaaaataaaagccttttacataaaccctcaattctcaaagtcgattattaaaagccgaaataatattgttttatagaaccaattataaagatttaatttttacaggaaaataaatg

SEQ ID NO: 103197 - DNA, 133 bp, Heterodera glycines
cccccccccccccccccctttccccttttttgcccaaatgtttgcctttgtgggcatttgtcgcgtcccattttcccattcaatgctcactatccatgccaaacctttgctaaaaccgcacgccttcagaatg

SEQ ID NO: 103198 - DNA, 537 bp, Heterodera glycines
atcattaggatatgattgtaatgatcggaaattgacaaaaaaaattttagaaaatttcggttttacggtctctaatcaatatatcctatagctgagcgggaccgggactggtactgaaaaaaacctacaaatgaatgcctagccccggatttgaccgggaccgagactagtcccggtgtttcccagccaaaaagtcacgggttttaacccgaaaaattccctgtaccaattttttttttacaattaccgattaccgctctactctaatataacgaacaaataattttcagattttcattggttacaccggaaaaaaacgtgggcaaaatctgccgaaacagaaatgtgttgccataaaattgtatggcaataataaaagacatttttataatggcacaaatgttttgagaaaattaaaaccatttgattcaaaaaatgagcacattgtcaacatgatggactagtaaaattcaaaatttaattagcattaaaaaataatacctaattaaatttgcaatttttagtggccaaattatg

SEQ ID NO: 103199 - DNA, 308 bp, Heterodera glycines
ttagaaagagcgcaacaacaacacaacagcaacaacaacaaataacaacggcggcagaacacaaaacaggcacggagaaaagcaaagcaaatacagcgtaacaaaaagaaagggtccccctctccacttgccaaccagggataaattactcttggcatcgtatagttttgtgccgatttgtgtggggctgaggctaaaacatgcaaattcaaatctctttctgagcaaccttttatttaaagacacattttcaaaagcgttttcttatgtttaattaaaatggaaacttgtttagtcagagcaaaatg

SEQ ID NO: 103200 - DNA, 252 bp, Heterodera glycines
tttcgctaaaaacattatgccattatattattttttaaaaaatttaattctaaaaatcaaaatttataaattttttcttccaaaagttttaattaggcttcaactccaagatttaaattcaacaagttttttttcaaattcctttgaaatccgtagaaagctatttataacaacaaaaaaaaacaggctgcttttttccatccacttttatttttctagaaaaccttacaaatatacgtttttaatattatg

SEQ ID NO: 103201 - DNA, 1003 bp, Heterodera glycines
ccataccgtttgctagagggatggccaccatccccataccgtttgctaggaaaatggacaacatccccacaaaactgaagcgtgctcaaaaagtacacttcagtaccaggcgaataacacgccagtgatggtacccatccctatgccaacggctatagtgatggtacccatccctatgctaacggctatagggatggtacccatccgtatgccaacggctatagggatggtacccatccgtatgccaacggctatagggatggtacccatccgtatgccaacggctatagggatggtacccatccgtatgccaacggctatagggatggtacccatccctataccaacggctatagggatggtacccatccctttcacgggccaaggacctgccccagcgggggatcatgtgtccattcaacaaaagtgttatgcacactaatcaccattgtacctcttctaatcactgttgtacctcttttaatcactgttgtacctcttctaatgactgttgtacctcttctaatgactgttgtacctcttctaatcacttttgtacctcttctaacaattttgtacctcttctaatcactgttgtacctcttctaatcactgttgtacctcttttaatcactattgcacctcttctaatcacagttgtatctcttctaactattatggggatagtcccatccccttaaacatttaaaaaaaaagtttcagaatgccaatttattttttatgcaaacaataagattatgtaatataaatctcagatattttttgtgtcaaattgggatatgcttttttctgttacttttagttagttaatcaatagcgttgacaaactacttcgaatattatttaattaatcaaacaaatctttagattttcatgacacctatttttgataaaattattaaaaattttgataagacatgtaagcttattcatttttgtagtttatacatttttacttacagacaaaattcctaaaaaaatg

SEQ ID NO: 103202 - DNA, 215 bp, Heterodera glycines
aaaaattcaaaaagacaattaattaaacaattaaattgacggaaagaaactacttttctgaaagatttgttgtagtgccttagatttggctttgctgttgaccgaccttaaagctcaattaattaagagtcattttctaaatttatttttttcaattagcactgtaaaatttaaacattcttctcaaatcctaatttgtttctccagttgccatg

SEQ ID NO: 103203 - DNA, 697 bp, Heterodera glycines
  unsure (1)..(697): unsure at all n locations
cggggacctctagagtctcaacagaagttttccaaaaaaaattgtcagctatctttttaaattttatgaggaaanaaanatacggggccacttctttccattaattattcgtatcctgagaaaaattccgaacttttttttttggaaaataatctctgcccaattgtggtcttaatctgggcctaattgtcatgaagatatctttaaaaaaaatttaaaaagcttatgtgaactgattatgatatgattgggatgtccaattgtccatttctaggaatgccgtgccgattgcaacccaaacatttggttcggcaacttgttgctctttcttccaattgtcgctgttcgtgcgcaaattttaaaacataatttatgaaataataaaatatgcttctggcttggtcccgccgtaaattttctgatcaaaatgcctaagagatgatgattcgggagttcaaaaaacttgtttttgttttatgtttcagacctcccagtccaagttaaaaaaagacgcatgtgcgttaattaactgccctaatgagatgatctggtctgatcacaaggattgatcggcttgattttgcaagacccgaactgatcacttttttcttgcttggggactcttgtcaagatttctatgatttaatcatttaatcattttttgccacacaaatttcagtcgttggccaatgcgatg

SEQ ID NO: 103204 - DNA, 751 bp, Heterodera glycines
tgaaaatgtggagtgtggtgtttttttttaaattccgtttggatgagaattcccaacctctctctgcttcaccagcagcaccatgttccggccattggcttgtcgtccgtctctcattcgagttgcatacatacaatttgggcaaaaggccataaataataggacagaagcgaaagagcaaacattggcgggggaggggggggggcaggggacgggggaggaattgtctgatgggcaaaatggaataaattgcacttcgaccgcaccgccgatgtgaggggactgggcaggaggggaggcgaagatgacaaatttattgttttgttcgacggtttgatggtgcaaaagtgccaaaattgggagggactgctcccccctccctcccccgaagggcaaatgccctcggggaatattgcctaagtgcaaaatgaaaaaaaaattaattctttttttttgccattggtgctgctaccgaccgattggaatgtatgctaaaaagttcgaatgccaatgttttttaaaaaagaaattattagtgtcgacatccggctcaaatatattgggttgggaaatgtcttaaaaatggtgcaagattttcaaggactaggttagagcatcactcctaaatgaaataatatgtatcacaacacacgctaaatatccttggttggcatcacaaaatgcaaacaaagttagaagcgagcacttttagccattctaactttttgccatgtttggaatgtcaaaaatg

SEQ ID NO: 103205 - DNA, 449 bp, Heterodera glycines
  unsure (1)..(449): unsure at all n locations
aaaaaattttcaataaaaaggctatttagataaatggtaatgatgttntaattgaaatgttaatgcccaaaaataagacaaataattttcctgtgcttgattattggcgctcatttgctgtgcttggaaaacagctggatcacgcgtcaattatttgatgaacttatgcatattttgtgccaggtaacaaaatggggagagagataagccaaggaaatgtcccaatatttcttttttcgcttgcttctctttcattctctcatttttgttgttgtaaatttaaaatttaaccaaattgttcatttttaagttcattttttcctaacaaataagaactcatttttaaacagattattatttgggctttattttaatttaaaatattaaaaaattacgcttttagaaaatcttcaaaaataattaagtagacaaatttatcgtgtcagatg

SEQ ID NO: 103206 - DNA, 119 bp, Heterodera glycines
  unsure (1)..(119): unsure at all n locations
aaattttaggcattttcgatctgaattggattggcacggtgcacancggcattccgcttgaccagctgacatttcgacttaatcccggcacatccgagtgcccctatttggcatggatg

SEQ ID NO: 103207 - DNA, 586 bp, Heterodera glycines
ttgttgtatttttgtggtgactttcacagcttacaattttcgtgtcttttcattctttttcaccacttcgttatgattttatcaatattttaaataattaccacattatttgttaaatgttaaaagtaaaaagagccagagaaagtaaagtataatgatattttattatatttaagattccaattacataagctgattccaaaattgattcgcgaatttttctaatacttctctttatctaatctccctctttctaatttttctctaatctctctcactctctctctctttttcccacccccccccctccctctcatacatctctcctttttctttctctttttctctctgtctctctctcttttctttttttttctccctccccctcatttatcactcctttccggtctacctcagttcggccccagcacgtttcggccacaaataaaacaattaatttttcaaataaaatttcacgcaaaaattagcaagcaaaatgacttttttaaattaatagtgttattcttatttttatatttttaattttaattcgaacataaatttaaactttttaagatttattatg

SEQ ID NO: 103208 - DNA, 1003 bp, Heterodera glycines
tgcgactaaaattttctgaaattttaaaggcaaataaaggacacttagggctatcaaatgatatcaagaatgtttaatttggatgcttctataaagagttatggtgcattaaatttatcaagatattacgtggtcgtgtttttttcgtggttgtgtaaactgaagtagagccagatatatttagtatgattagcttattattaatttttaatatagtttttagtgtattttttaagtttgtttaagcaaataatctttgagagcttaaagcatatttcggccttttatagtccatattttatggccatatttggtgttttttagtcaatataatttaaatattttaaccctaataattaatacttaaaatgcacatattttttcctggtttctccatgctctaaatagtaggaaaaacactttcttttttgtgtttgcgaacaaaaaccgggacttttatttacatatttttacatatttcggggtttttatacatatttacatattttggatttttttcatatatattttcatttttttacatattttgaaaatttataaagaaaaaataagtttgaaaatgttgcctaaaaataccaaaaaaagtaatttttatgtcattttgtggctatttcatactttacggggaatttctttcccaaaaaataccattaaaaaccattttatttgcatatttggggttttttgtacatattttgggatttttcttacatatttatgtacatatttggaccactttttgtacatatttttggcagccctattcattaaccattctcgcaataactttctgtttatatattttatttaaattacttaaactaaaaatcaatacattaaatttttgtcataaaataaagtaaaagaaatttatgtataaatttattttaatgttcgaaaccaaatttattatttgaaaccaatttaaaagttcaagacgaaaaacgcacaaaatttatgaaaaagtgaacaaattaaaatg

SEQ ID NO: 103209 - DNA, 138 bp, Heterodera glycines
aagaagcagcagccattgcgtcaattagtcgtaaagaataaaaaaaactatttaagttattaaattcgttgtgttgtgttaaaattcaatatgattggtaatcaattttattccaataaagaaattaaattaaaaatg

SEQ ID NO: 103210 - DNA, 89 bp, Heterodera glycines
ggccgatcattcgcctccattagacgtcgagtggcctcactccgctgatggaagcatgttccgtcgggaatgccgagattggcaaaatg

SEQ ID NO: 103211 - DNA, 175 bp, Heterodera glycines
atattcagtagtggaattagaagcacttgccatttgcgcttcattaaagaatttccgcccatatttggagggagctggaaggtcaacggtggttacagacaattcagcattaacatcactattccgaagaaaggacttagaaggacgattaagcagatatcagctggcaattatg

SEQ ID NO: 103212 - DNA, 168 bp, Heterodera glycines
ggttttaagggaaaatgaaaatttcaaaatgaaaaaataaatttaaaaaaaaaagttgatattcattgaaagaagccaatcgcaccaccaaaatgggaaggggtccgatcggcggtcgaccaaccgcccgcctgtgtgccacacgcaaggccaacggaggaaggcatg

SEQ ID NO: 103213 - DNA, 474 bp, Heterodera glycines
tctgaaaaattggattttgtcctgaaatcgtttgcgagaagctattttttgacactgttggttataagcattaaattgtgaaaatgtaaacgtggtaatataaatgtatttcatacagacaaattggtaaatcgcggtttatttttatataatttattaaaaaaacggtaaatgatatttatgaatgagtaaaggttaaaaacggtaaatgatttatatgaagtgaataaaggatcacccccgcttatcgaccatattgcaattatgtccagccattgattgcgcccctgccttatgcatgtggcctctcctcacgcggcggtttgccctggaagctggtcggcttgtatcgcggctcggggaatgcattcaaccgatgactttcatggcagcagttccaacaccgcaatttgcggacaatttcgggaaaaaattttaaaaaataataaaaaaaatttctgaaaatatggaatg

SEQ ID NO: 103214 - DNA, 790 bp, Heterodera glycines
tttttgactatatatttttctcctttgaattgttcacctatggcattgtgttggccattgcttttttgaatttggtggtgatttgtcccgccaaaattttacatgtcaacctgaaaagcattctgatcacccaaagtattgctttaatgctttggggtttagtacgatcaatagatattactcaaaaattcatatccaacaactcattcacgccgccaaatctgattttgacggtatattctaaacttttctgtatttttgtttaaaatcaatgtataaaaacgtaaattatagtgtattaattatattttagacaaccggaaaaagttcggccattttttaagctcgatttatactataaaataatcaatatttctttgattcctaatcaaacctgaataaattcaagttttgtatccctatttcactgttgttttcttaaaaaaggcgaagctattttttaatagcatttgaaacacaaaaattctcatgaaatttgtgtcttgaaattatgtttaattgcaataaaagaaatttattttttgcgaaacttttttctttaaggaaaatcatagcggtggccccaactcctttccataaatcgaaaattctttgaaaggaatgacattctaagttattttgcgttagttcattttaaaaattacgtaataattaaaaataaacgatcttttttcgaaataaaccgaaataaattgattaaaaattagaaataattttttttcatcaaattacatggtgatattaattcgttctattgtagaacattatg

SEQ ID NO: 103215 - DNA, 259 bp, Heterodera glycines
tctttcttcatttaactcttctggtgcattttttacaaaataatacaataattattattttatgaattcataaatttgacttttgtgattattagcccctaaaaggaacctcgggaatccaatatgtctttttcaccaaattcaacaattgccgaatttacttctgatcagggtaattaagcaataaaattcgagtaattattatagtaaaattgttgactaaggatttcaaatttaattttagcaccgtaccaaaatg

SEQ ID NO: 103216 - DNA, 150 bp, Heterodera glycines
aattttgaaaacaaagaagattcaatcaaggtttgataatccaaaattcgtttatatattgcatgttttggcctcttcttgtgttttcatgttttaataattaggcctttgaggctttttgaaattttttgagttttataaacaaaaatg

SEQ ID NO: 103217 - DNA, 338 bp, Heterodera glycines
tgtttgcgacgtttgccagagagaattagttagtggttataatattgagtttagtagtttattttttattttttttttctttcagaatattctattctttttttttatattttttttttgtcttttttttagtttttttttaattccattttttttattgattatttttattcgtagtttttttccacggttacgtttagattttttaatgatatttttttgattttttcaatcaagcacccaaaaagctggtggcatacgtcagctccgaaatcaactacgatcttttcggactgccttggattgaggctttggacgtcatcccacatgaaatcatg

SEQ ID NO: 103218 - DNA, 116 bp, Heterodera glycines
tcagacatgccctgaaataaagagacgaaacagaaaagtgcccaagtggattcacattgtcattgtttcgtgtcgggcggatgataagttgttatggccaagtccatgcctcaatg

SEQ ID NO: 103219 - DNA, 744 bp, Heterodera glycines
tattttgtaatcattaagcacataattaccgaaagcacctcttgttcggattttgccgtcctccttttttcagcccacttgataagtctggccaatgattttccctcatatcccccaaccaatgagtgttttctgttccatcatcttttggctaattctgcccatggacggcacccgatcaaatgggcggcaattgggccaactttcccaattattttggggtgccaaagtcggcaaacactgactgttttctgcgcatccccggaggggcaaaaatgctactcctttcccgggtcaagtgccatttggcagggcttggggggtttggccacttctcgagtctcgacaaaaataaataaacaataaacaacccacaaccaattaacagtgatcaacaagcggcgcaatgcttgtaccttgtacacaatcagcagaagaagcatcaatgaaaatgaaaaaaaactggatgcgcttggctgccgatttttgagcacccccccccccccggtgggggggggggaaacatgtcgagagtgagttgagtctcgacgccgctgcactttttggtccatccggcgatatataaacagcgcaaaaccaagcggaataaacacactgttcagcagcaacaattaaactgacatttcggagtcacttaattatttcaataattttttatatataatttattattaattaattaattattaaattatttttgcaagcaaaagtcaagtgaaaatg

SEQ ID NO: 103220 - DNA, 890 bp, Heterodera glycines
tgccaataatgacgacacttctctgtctttccaattcctccgctgaataacaagcaatataatttattttaataaaaattatttgtttttatgtttactgtcgaaaagtccactattttttgtgtttctgtcgaaaagtcctttactgtcgaaatgtcctttgctgtcgaaaagtccttctgtcgaaaagtcctctgtcgaaaagtccactgtcgaaaagtccggggagccgccaaaattagcgaaaaaatttttttagtggcaaagatccaaaatagtgatgaatagtggcgttaaaacgaagaatttccgagctaaaaatgttttttgtgcatttcagtcgaaacaaagccgcagaaaaaataattaaaaaactaaaaatccgttccctactaatcacactgtaaggccgcgaatggaaagactgattcttgagaccgttttgttttcatgactttcgaacaaaacttttctcccaaaaaagtggggagcataggcagtatttttcgacttcagggtttgaaattggtgcaaatgaatgtcaattcgtgatcagcagctatcctgaaaacccttgagggtaatactatcgatggtgccccccccatttttggaagaattttttttttctgaaatgtcgtggaaacatatttacggggggttttcagggtcgatcgatgatcgcgaatctgacatccattttgccctatttcaaagaaaattcaaaattttgaaaattcacttttagttcaccccctaaatccgctccctagttcactaagttattgctcacgaactgtacataaatgttgaagaattttttaagtcattgaattcacagcctttcttccatctctcttttattatttcgcgaatttttgtgtgaaatg

SEQ ID NO: 103221 - DNA, 675 bp, Heterodera glycines
  unsure (1)..(675): unsure at all n locations
agtttttctttttctcattttttatacttggaaatngggttnntagtgcgaaattaaaagagcgatttntcgtaataaatttatattttgaccgcttttaaaattttntcgttnttgtcgatattctataagttattttttataaattcgcaacttaccaacataatatagatagaaatctattaattaataaggggttttattttctataattaaatttacatattcattcaacaactgtttggcatataccccacccccgcatatgccaaacagttgtttgtcatacgtcaaagcccccatttatgaataaaattatagaaaagatattatgtggtgccaacaaaatgtatggcatttgacacatatcattttcccctttttctctgccataatcttcatttaacatactgtctattctacattgtcttcgtatcttttccgctatcctttatacaaatactattttcatacctaccccatattctcatatgactttccatattagaacagattgtgaatatgaaaaaattattattatttattgttaggggaatagtgactgagaacccattactaatgaaattttcatttttccattatttatcaaaaagtagcctcgggttcccagtcaatttttttgtataaagattaaaaaattttttatagaaaatg

SEQ ID NO: 103222 - DNA, 589 bp, Heterodera glycines
ctgcaaacaattgaagcaaaaaaatcggcattttgcgaaggcgcctttctattcgattttaatgagatacaaacatcggaactgagcagctttgaaatcaaaaagacaaaattgcatgggctgaggacgaaaagcgaacgcaaaacgggcacaatttatttggtggtggaagcgacagaaagcgtaaatggacaatttaaaaaatgaaattgatgccaattcaattattaattaattaggaataatatccatttttaggctatttccacattttaagggatttaagctagttggttttgtatgcattaaattgtttttaagatttgatcaccaagtagttagcgttcagctggctagtaggaaaggcggatttttaaaaatttattcgtttgaaaatttttaaagttttgcaggcttcggtagtccttagtccttcggacaaaactctaaactgagttagaaaaattcgactggcgatttgtgtaagattttagtgcatacaactaataggcctattaacacaagcaattaatattcaattaattaaccaatacattaatttctttcaaaatagcctatttacaaaatg

SEQ ID NO: 103223 - DNA, 138 bp, Heterodera glycines
ttctctttacaaaccattatttttatttttaaaatgattatgtttaggatttttagttttaattttaactaaatctagagtttttacataaacgttattaaaattaaatataaattagcctgcctgttaatcaaaatg

SEQ ID NO: 103224 - DNA, 684 bp, Heterodera glycines
actgaaaatattagaatcggtgtcaaacagacagtgattgggttaatttttttaatcacatggaatgaccagaacaaaacttttattttatatccgataggtgaataatgtcatgattatgaaatgttgagaaaaaaaaattggttttataggcacggattttaaggcgtttaattgctgaataagtgctggctaaaaatgtatatattagagtaaataaatcaaaaattaattattttttgtcaatagttttttaaataattcaaattatttttttgtaaacaagaaaaaataattgcaaaatgatttcgtgagactttgtatatcactaataaaaatggggtctataatttcaaatttaagttttgatccattttggataaattacgctcaacaatcagttacggcttcgttataattgtcttgtcaaatgttcaataaaaacttaaattacaaaaacctcttaggttttaaggcattcattttaaaaggaacttgcatgactgatggaccaaagtcctttctgctatgagtttgcctttttctcaatgcttcaccgctcttttcacattggaattctaacaacacatttcaaaacactgagtttataattttctaattctaagtccgtttgcttccgtcaaagtttaactcattaaaaaaaattatttattctaaacaatg

SEQ ID NO: 103225 - DNA, 372 bp, Heterodera glycines
aagaaaaatcaattaataaaattaatttttttttttatttattcggataactcaactttaattctttgaagccttccaaaaatattaattaaatttaaaattccgcattaattacttaaatttccaatttttgtaggtcggctcttgtcgacagtgacgaattcccattcgcattgaaatatttacatttatgttaaaaataaaataaaaatacccattttgatataaaaatgcatttctggcaatctttcagatttaaatcatattttggataattttgtgaatagtctatgccagggtttttgcgaatcgaaacataaaatacgaaaaagacgaaacaaaaataaatacccaaagctgaaatgcgaaatg

SEQ ID NO: 103226 - DNA, 474 bp, Heterodera glycines
gataaagaatctatttcttattcttttagagttcgagtccgttgtgcaacatgaatatttttatttatttttgtccaaaatattaaaaattgctatttttggaaattgtttttggaggtttttcccaacaaaattggacaaacttggtatcattcgaaagctcttgatgaggagaagctttttctaagcaaatgttaagtaatttgatgagttcgaaaaaagatatgaacgttcgaaaatttaaattaaagtttgaataattgtggtttttttattgctttttgcccatcacactgtcctattgccaatttttttgcctcacttttttgttgttttattacttatttcaactaccttttttgttacaagtaataaattttaagataaacgttaacaattggtattaatagttgcaattttgtcgttttttggtagagttgttttttgtcgttttttaggttagttggtattatg

SEQ ID NO: 103227 - DNA, 961 bp, Heterodera glycines
  unsure (1)..(961): unsure at all n locations
tgaaatanccttttacttgggttaagaattaaaaaatttagcctattaaaatatttagaaatttttttattatattgtatattttttgaaaattttccgatttccgacgtttttggggtcggaaatccgatttccgacacttccgaaaattttttgggcctcggaatgccatccctgataaagaccgccggaccccctgttcctagttttttgaaaaattgcaccgcaaaaaagtggttttgaaaagaaaaaaatagtcaaatttatgaaccgttaataatttgatttccgatcaactttttaccgtcggatccaatcggaaaattttagtgacacatcagcaccttttaatgcatcccgccagcccctaaaaatttatttttcagcattttttgatttttggaaattttttgaatttaattgaatttttcgaattttccaaaatcccgcaatcccgcacgggatcccgcaaattttaaatgcgggatttgcgggatttgcgggattaatcccgcgggatcccgtcccgcaaaaaaatttgagttccagtcccgcagcgggatccgcaaatttgaaatttccggtctctatacataacatatgtatgtctcaaaaaagaagagattctttacttggcatggacggtaaaaaagaaaaaaaagcggcaataaatcttttttatggataattatgggaaaaaattggcgttctgtcacatttactttttatctttatttctctcacttttacgtactatctcttcattcttaataatgtaaagaacaacatttacttcgctctatagaacttttttttcgccttacagaatttcttcatattttgcatatcgatagagaaaaaaattctgaatcgattaataaggaaatttaatgcaaaaataaggccaactttagagttattttaaccgaaataataaaattatttttttcaggaattaatg

SEQ ID NO: 103228 - DNA, 75 bp, Heterodera glycines
tttttcgagaagggtttctataaaataacaattgttgatgttttggacagtttggcatgaatttgcaacaaaatg

SEQ ID NO: 103229 - DNA, 184 bp, Heterodera glycines
cccccccccccccccctatacatggatggggcaaggccgtcttcatatgcattcaattcacttccattttaccccaatcaaaatagttatttcaaaaatgttgtttcattattttttccactttttaacgaaaaagtttaagaaaatcccaatctaagttttttttctgttcatccacgaaatg

SEQ ID NO: 103230 - DNA, 685 bp, Heterodera glycines
aactaatagtgttttaatggaatttaggagccccaaacttttcttggtttcaaaaaatggatgaaaattattatttttccaaaattcattattctttttgatttttttattagagtgtcgggtttttttagggtctcgccgggacaaaatctcgccgcaaaaatttaaaaaaaattcaaaaattgaattttttcaaggaaaaaatcttagaaaaatttattataagaaaatataagaaagaaaattattgttaagtttttcttgaaaattgcgcggccaaatttggaagttccatggcataaaaaagcaattttttctaaattttgaaagtttttacttttaatagaaaacttttggttttgtgtagcagtctctaagagattttggtcaaaaacgttttgtcaaaaacttattgtaaagatttctcattcgttttttggtgcaaaagttccctttttagggtttttgcttttttgttgaaatttattagaattttcacaacagcttagcaaaggaatagtttttttaaatattgtgtgcccaaaaaacgcgctccagttttaaataggctatgaaaataaaaaaaaactttctgaattcggcgtttttttaagggccagaggctttttgctgcaaattttttaagatttataattttcatgactttttcagcacgtgcgcaatg

SEQ ID NO: 103231 - DNA, 471 bp, Heterodera glycines
actataattatgtcaaattaagtgatcattcaattgccaattcactataattatgtcaaattaaagtgatcattcaattgccaattcactataattatgtcaaattaaagtgatcattcaattgccaattcactataattatgtcaaattaaagtgatcattcaattgccaattcactataattttgccaaattaaagtgatcactagagatgggaatttaagtcaactgactttttttttgctgatcttaaatggcctaaaaatgactttaaaatgttccacactttgtttgaagcttctaacatgcattttttgtgactttttggcgattttttatggcttttttagtccactttttggagatttttcgtgacttaaattcccagccctacacctatcacgaagcaacagatcccacattcattcactcattaattaacattcttattgtcaccaaatttgcccaaatg

SEQ ID NO: 103232 - DNA, 85 bp, Heterodera glycines
agttcgtaatttagcttatcaatttggcaaaatccattattttatgcccgattttggtcaattcgttcccttttctcaaagaatg

SEQ ID NO: 103233 - DNA, 988 bp, Heterodera glycines
atcgctgataaataaaatttttcgttgagttggaacaatggggaagaggaggggagggttggaataagttggtaaatgttttttcacagaattttgggaacacattaaaatataataaatgctcacgaataatattggtccgcatagtgcatcgactaacattatgccagcgtcaatccccctcccgtgccggcaacataagccacacaaaatagccaccaatccatccccatcccctgccggatgttggcaactaaaaccatacatctggcctatccatctgtgggtgggaggcaacttaagcctcccaatccctcctcaacccctgccgaatgttggcaactaaagccacacacccggcctatccatccgcgggtgggaagcaaagtaagcttcccaatccctcctcatccactggcaggtgttggcaactaaagccacacacccggcctatccatccgcgggtgggaagcaaagtaagcttcccaatccctcctcatccactggcaggtgttggcaactcagaccatacacacggcctaccctttcgagggtgggaagcaacgtaagcttcccaatccctcctcatccccctccggatgtaggcaacttaagcctcacatccgaccttttggggcatttgaatccaacctcttattctcaatccttcactggttgacatcatagccatataaacccatttgattttttgattttaaaaacattaatacaaaatacgtggaaaattaatgataaacaaagaaatgccaatggtcggcgggaaggttaaaaaacttctatgtaattatgggtgtgtgtgtacaaacgtccttgagtgtttcggaaaaaacgagtgacagagagcaaaaattattgcttacgtatgcaaaaaacagccaatcggacaaaaaactcttgtgaatagctcctatttaagtagctagctgctcgctgctgctattcaaaaatggagcacccctttgaaatg

SEQ ID NO: 103234 - DNA, 725 bp, Heterodera glycines
aactaattggttgaggataaaatcatttaaacatcacgggattacgagctacttaaaattttaggctttaaacattgacatagaagcggaaacttttcaaaaatctttaataatagaaaagtactaatgtgaccattaataaaaaagttccattcatcagggtcatgcatatttaatgctcaattacgttcatttcctgtttgaacagctttaaccgaacgaatgcaacaaaattgaaaagtgattaggacgtcataaagaaacacatgagtaaatgaacattagttaattattttgaattgcactaatcaaacaaagaattctgaacttagtgataattatttcaactaaaagaattggctatttaagccgaaataaaattaataatcatcaattcattaaatcgtttaacaaaagaagagcctttgaagaatatgcagccccaaactcttctctctattttagtcattcttctgcaaatattcgaagttaactcattgccggtaaatttttaatattttaattaaaattaatttaaaaacatttttgttaagctcttctcatcattttccccatctgcgaatgaaagcgaagagatttctgtcaaaaacaatgaccaaatatttggacaagaagagcacaggcaaaagaaaagggaggccataaatgagcttgtcttcaatgatggacaatcaaaaacaataaaaataataagcaaaaatatg

SEQ ID NO: 103235 - DNA, 937 bp, Heterodera glycines
atcacgaatccggcatccatttcgacatatatcgagccccgacgcgaattcgaacaaaaagtcgaaaattcaaaaaatttcaaaattcactttgatgttcgaatctatgtagaatgattattttcacgtgttcgcaatggtttctagttaacttgcttgttttaatctatttagaaacaaaaattgaattttgaaatttttttattttcgactttctgttcgaattcgagcctggggttcgaaataggtcaaaatggatgccggattcgtgatcaacgactctcgaaagccctggaagcatgttttcatgacttttgaaaacaaaaaaaattgcatcaaaaaaaggggggcaaccatcggcagtattacccaaattaaaaaaaatttcgttttattaatttttgtctaccttctgacaaaagcactatttcctctgtgtctcctactttgttggttcccatgggcagagagtaccaacaaataaattaaatatatttcgccaccagcagtgctaatttgcacaccccgaaaaaagcactggacaatttcgcgtaaaattgccaatttttgatacaaaaatctcaagattggcataaaaggatacaactctatcttcagatccttgacattttaattctcgtttatttatccaagctgtttgaaaaattgtgaccgattttttaatgatttaaggaaaaatctgtaatttttcaaaacgctcagtttcattgaaattgcgtttgcccatcgttgcctaaattcatttgaatttgtaacttttgtacaaattttttctttactttacattttgttcgtttcctctcttatctttcttccatttgctatttttgagctacccatttccttttttgctctgtcatcattttttcgtacaaattttgttttttttggccaaaaaatcatttttcaggaaatg

SEQ ID NO: 103236 - DNA, 110 bp, Heterodera glycines; identical to SEQ ID NO: 98226

SEQ ID NO: 103237 - DNA, 113 bp, Heterodera glycines
aataaaatgtatttatttgtttagattttgtttattttccatttatttttattttattatcaccaattttaaatattaaaataattttatagcctattttcaaaaaagttatg

SEQ ID NO: 103238 - DNA, 251 bp, Heterodera glycines
ggtcaattcggcacccccttttttgcttaatttgcatttccattctttcgcattggttttgtcggcttttcctttaggatcctcaacaaatccctcaaatgcttttgcacatgcagcagctcctcgccggtcttccccccaatttcgtctcggcctcgggcggtgcgtccgccggcacttcgccccctctgtcgaactgcgtcgtgtcgtgcctcggctcgtcctcgggtccctctcccgtcgaacttatg

SEQ ID NO: 103239 - DNA, 123 bp, Heterodera glycines
attgaaaattggccattttttactcaaaaactggtctttgttacaataggttataagccgcggaacacccaattgttggccatctttctgcggatgtttgtgaagatattttgtccggaaatg

SEQ ID NO: 103240 - DNA, 116 bp, Heterodera glycines
tttagttcctttttacaataattattgaatgaataaaacatatttacaaaacaacaaaataatgaattgttgagttagtaatcgacccgattcagaatgaattggccataagtatg

SEQ ID NO: 103241 - DNA, 102 bp, Heterodera glycines
gatggcatcgtcgacgatggccaaatgttgaaaaatgatcacctgaaagtgtttcctccgctcagttttcctatcggtacccaaatcactttgctgtcgatg

SEQ ID NO: 103242 - DNA, 1003 bp, Heterodera glycines
gtgcaacaaataagctcagattaattttcaaaattttcaataaaagccaatttttgcagaaattggttaaaaactcttacagaaattctattctaaaaattagggtaggacgggaccgtgaccaaaacacggacaactgagtaccaaggtcccggttttcaccagttttgaccgggaccgcgaaattcccgggttttttcccggttttccaagtctaaaattcccgggtttcaacccaaaaagtcccggtcccggttgtgcccaaaattccggtcccgacctaccctactaaaaatgttcttaattactatttttattaaaaatttttacatactctaaaaacaaaaattggtacgaaggcataaggcttaaatgttgaaacaacaacttacggtcaacaaatattttttcaatttttttttcacgcatttcaaaattattgaaaatttgcgccagcacgagtgaccacggggccgggcgccgcgcttagtgcgtgcgtcgacttggcagcgccgggccgcccgtcggactgtccgtcgagagcgaatctgtgcaacgatgcgatatacagagatctgatgacacaacaggcacgagagcattaaatggcattttgccggaagaattaaaaaaactataaggccggggaggttatttcctaaaaggtaaaataaaaattgacgaaaattttgcaattttccttattgttttcccccttcaaaatctctcacacaaatgtctcaaaaaaatttcgctattttttccaaaaacccacaaaaattggctcaaaatcgcaaaatgatggtcatttttagatgaaaatcttaaaaatttatcccggcggcgcctacagcaccgaagtttttgaattcatggcaaaatcccgactcataacgtaattccgagatttcggattcgaagattaagtgcaaagaaatgtattcaattgtttaacaaattcaaaaattgcttcttttttttttgttcagtgcccacaaacatg

SEQ ID NO: 103243 - DNA, 54 bp, Heterodera glycines
ggtaaacagaagcaattgagtaattaatgatcatcagcaaaaccaaacaggatg

SEQ ID NO: 103244 - DNA, 336 bp, Heterodera glycines
gatgtcatttggcgccacccccggaccctccaaaaatgtttgtcctcttctcacagtcagccaaaaaaatcacccagtccgcctcctgacccttcaatgtaaaattagtttcatttgcctcattttacttaggtttctatttccattaatttcaatgaaagtggtggcggtcattgcgcatcggtcatcaaaaggccgattggccgtcaaaaagtgcttttggttgaacagcagcagcaaagccaaggtgcagcgcacggttttgagaagacattgccaaattgcaactcaaaaattggacgcacaactcgggaaacgacccattcgaattcaatg

SEQ ID NO: 103245 - DNA, 275 bp, Heterodera glycines
tttgaaactaattaatgggaacgcatttttggatttattctgtttcccattaactttgaattactctctaaataacctaaatgttgttttgagttattttcgaattttagatcctaaaaatcccgtccctaatcatcataagtcctttgaatctttgttccgtgtggggcataatttaaaaaatattttttaaatttaatttttaatatttattttttgttttgattttagtcccgtgaaatttttgttttttatgggaaatatttgtcaaaatg

SEQ ID NO: 103246 - DNA, 417 bp, Heterodera glycines
  unsure (1)..(417): unsure at all n locations
gcaggtctcgtacaacgcacgttgagatatcactctgaacagtctgaatctaccatgggagngaaaggngggcattggtcttttactggaactttaaattaatggnaattngttggagnaattataagggaattctgggaattggnaattagaaanttaattgttggtgttannaggtaattanatgatatnggncatnttaaagaaatttaggaaagaatgaaatttagaggaattttgtgnnggtggaaagtcangggacgattggtagggatgggtagtagatagaaagaatgaatggtagaaaatgatcttcctttgccctaaaggtacgtcagccaaacttgcccggacagtcagctgatcacacactcccctccgctggtgtacgacctttacagggacccattcgaaatg

SEQ ID NO: 103247 - DNA, 227 bp, Heterodera glycines
aattcgtgccaccgacaaatgtgattccttcaccatttcacacatttcactccgccggacggaaatgcattgacttttttgaaaaaaatgggtcacccgtagaaaaacgtcaattagaagaaattatggcaaaatcgggagcaattcggcatgccaagacgcaagagtatactggtcctgacattcacctctttccttttttcaaattaattttaggtgatcacatg

SEQ ID NO: 103248 - DNA, 116 bp, Heterodera glycines
tttattatttataattttttaaaatgtttattttgtttgttttatttttaataaatttttcttcgagttataatagccctattctttaccctgaacgatccagggacaccgaaatg

SEQ ID NO: 103249 - DNA, 1003 bp, Heterodera glycines
atgaatctgaaggaatttttcgggggtcatcatttcctgatgagttacatacacgggactcaagtgtccaaatccagcggtactaaactatatctatccgtggctaaaacaaaatacctaattcattagttaaccgttgattttgtttttaggcgaagcctaagctttaaagtagggtagcacgagaccgagaccggtaccgataccgatccggtaattaccggttttttcaggtaccggtaccggtctcggtcccggtttttgaaaaaagtcaagtctcggtcccggtttttgagtatcggcggtaccggtactaaccggtactaaatatgcactggtaagaatggagttctgagagcaaaagaaagagagaaggttgggaaatgggaaaatatttgtattttgaataacatttcgccaaattttacagtcagtgggttgtgtgtcaagcaattgtccacctcatttatttctttcattttttgatttccatctactttttttcatttagaattaattgattaaaatgtctgatatttggaaacattacaacaaaaatttgactggtgcaatttgcaaaatctgcgcaaaaaaagtcacccgaagtgacggctctactacaggaatgtggaaacatttggaagcaaagcatcaaaaggaattttctgtgttaaaaaacacagaaaatttagggcaaatgggggaggataaggtttattgtgatttttattgtaatagagactaatttttagaaacaaaagcaaatacaatcttttttggtgacaaaaaagaatgagacggaaattgctgaagaacgcatcgtgcgaataatggtccggcaaaacaattcattctattttttcgatgacccagacttaaaggatttgtttcaaaaagcacatccgaacattgtacatcataatatatcttatacattgtgaatttatttttgaaggatcttggtgcacgagaacattttcgccgaaaagtgattcccaggatg

SEQ ID NO: 103250 - DNA, 69 bp, Heterodera glycines
tgctgattacacgaaacggtccaacagcactaccaacaactaaacttttttgtttaaacccatgttatg

SEQ ID NO: 103251 - DNA, 57 bp, Heterodera glycines
accagctcccagcgccggacacgctacggtacccagcggcgctagttgtgaacaatg

SEQ ID NO: 103252 - DNA, 404 bp, Heterodera glycines
ttcaaattaattattcaattgttgtggccactttcagtcccctcctccacattcattttccgcatacgcgcaattgtcaaaccgaatagaaatgttgtttcgttacaaaggcgtacacatcagcaaatgtgagagctttttcaacaatttgcatttcgaatgaacaaaatgtgtgtcccccgccttcgctaattgcctttggttccgtttaatcctttacaaaagcaccaatttgcataatttcacccatttggacgttaaaggactaacgcatccaaccaaataaaaataattgctcacagcttggttaatttcttgtctgaaagagtttcattttgcagtcgaaaacttttagcgccctctcaaatccattccgactttttttcctgcgcaataagcaaatg

SEQ ID NO: 103253 - DNA, 538 bp, Heterodera glycines
ataaaaaagttatagccaaaaacctaaacttttttgaatctttgtacacagataatacataagtaccaaatctggaatttagtcagtttttttattcttattctttttgttagattgacgtcccaaatgagcgaaagttggagcgcgcgcgacgctttgcggatgacgaacaacgaacacaacgaagtcgaccaatgccgtccagcagacgacaaccgttcagcaagtggacataaatagaacacaataaaatatatttttttttaaatctcataattttccgcaaatcttggtcattcctttaaaatagggttgtgtagctagtgttcatcttttaaccgaacagaaaacttgttttttggtgccaaaaaacaatgtgtaccagcagcctctatcaataactgaccgtgcacaaagccttcttaaaattttaaaccaatgagtggcatttgattcattaaatttagaaaaaaaactattttaatttaaaaatccttcgttaaataatttatttaaaagattttccgctgatgctatg

SEQ ID NO: 103254 - DNA, 583 bp, Heterodera glycines
acttgaagaattgaagaaaatgcgaaaagaaactttttttttttactatttattgttaattatataattaaaaaatgttatagaaattaataaaattttaaaatgtatcagggaagaatcttttaaaattttttaaaaatttaaacaaataataatttaaaaaaatttttttgctatcgaaattacagtaactattaccaacaaaataatgaacaattaattaatttccaataaaaaattatttaataaataaaataattcgtgattattacaaaagataataattaccaataaaataattagtaataataactaagaaaataaattgtaattaattacaaataaaaaaaatagtgattaattagcaataaaataattaggtatatcaatagaataattagcaattaataatcaattaaataattaaaatgtttatttgcctaccgatgcccattccacacgttttcgcatttgccatgccccgtgcacgctgcacgcgcacccagtcgtgaacacgtgtctgccaactgctcgcacaacgcgccctcgaactcacgcgtgcagtcgcaggtgaacaataatg

SEQ ID NO: 103255 - DNA, 1003 bp, Heterodera glycines
cgtattttctcaaaataccgatctctaattaatacattttttaaacaaaattatcaataaataaaaatagaccattcttggcataattgttaacagattaaacccaaattttcaaaaaatttttactttcgttgaaatttaaaattcaattttcatgactaaataaatcatgaaaacaatatatttcaaaatattgacaaaatatcgaaacaattaaatttcaaaattcgcttggccgagtccaaaaattcgtaaatcttattaaaaaaattggctcaaaatcgaaaatattcagcactttttgggcaaaatctgttaacagacccatgtaaattttcaaaaattttcccggcggcgcctatcggcaccgccggacccctttctcctgaaaagcctttagaaaaagcgcgccgagaaaaaaagatggtttgaaaacgaaaaaagtaatcagaaatttttgatcattttttgaataagattcacttttttcaaattgccggatccgaaaccggtttccggattgggaaaaatttaaattttcacatgttaatatttgtaaaaaccggcaaaatttcatttattaatatagaaattcgatgcaccagaaatgtcgccgccaaaaagacataatgttgccgacaaaataaaaaattttaaaattttcaagatattaaagcatacaaaaatatttatgataaaaaataaataaataaatataaacaaataaaactttattatggaaattataaaaaattttgactatatggcataaggtaaaaatttaaaaaccccgaaccccgaccccgacccgaacaatttggtcgaccccgaccccgaacgattttgttaaccccgaccccgaccccgaacttgctgaccccgacaaccccgaaccccgacttttctaaccccgacgttcgggggtgcaaccctagttttttaaatggggattttgaaaattaccgtgaatataaaagtcaatgagtataatttttagaaaatg

SEQ ID NO: 103256 - DNA, 208 bp, Heterodera glycines
gcccagattatagaagatgtttatgattagcaaaaaaaaaatgacaaaagaacaccaaattaatctccgaaaaacattttgccaaaaaattatttcataaattaaccctcccccccccccaaaaaaaaatttaatgcagtggaagcaatttttaatacaatttgagacgaaattaaaaaaaaaaaaaattttttttccatttaagatg

SEQ ID NO: 103257 - DNA, 534 bp, Heterodera glycines
agttcgatttggtgatgcctcccgtgctggccaaagtgtgcaccaaaggacccgtggaattgcaccaattgttgccctattaagcaattacgaaaatcactaatcttttcactttgcattatttgtgcttacccgcaaaaatgaacctattttattgagtgagtattaacgacaaaattttattagcagttagagtaaatttcaaattgccttttctaaagtccataattcatattgaaataaccgaattcaaatgtaaaacatggattttgagtgcttcggctttttgttcgaattcaagtcaactcaactgttcagaattgattagatcgcctttcccgcattggagtccgattagggactgtgccatgatgcaggtcgagccgatcgaagacggcatctggtgagataaacggaaacacccattcttcgacaatttcacaaatctcgagtcaaattcagattcaggacaccgctgaccgagtaagagaattggaaagttcgataaaggaactcgagaactttacagaaatg

SEQ ID NO: 103258 - DNA, 804 bp, Heterodera glycines
tttcaccacaatatttatacctaatattctaattttataaaaattaatttaaaaaataaccatgctgcaatagtagcctatcctaacaaggtgtcgttttcattttccaccgcttatggttatatatttaaggctaaaaaactaaaactaattgctaaaattataatttattgtcagattttttaaatatttttttaaaaaaaattgaaaaaagcgtacacctagctaaaaacttttttgagagtaatatttagacgtaacaattatactgttgatttacctaattatgctgaattgttaaacatttatgatcaaaagtcgcttgaaagtcgtaggttaaaaatagacttaaaactttttcatgaaataattttaggtaaaataaatttacaaaataacgaatccttttctttttccaaaaaccctgtaaaaaacgaattcactataagaatagcttattgctcaaccaatgttagatacaactcgttctttattcgaacctctcgtctctatagacttttacctaaagagacgagattactaaatcctaatgagtttgccaaacttcttgaaagatctgatcttaatttgttgatttctttgccaccccaactccaaaagtgaccaattgattgttttgatattattatttctttatttttcggcgtcacgcttttgcgtataaatgattgattgattgattaaaaaaattcaaaaattcgagccataagaacaggcccgtaaatatttaaacgagtcacgatttgcaaagtcctctataagatttctcaaattgttgcaatg

SEQ ID NO: 103259 - DNA, 76 bp, Heterodera glycines
agtgagaagagaagagaaaaaatgtgaggagaggcgggcagcgcggcgtttccattcgatcagtcaccacagaatg

SEQ ID NO: 103260 - DNA, 315 bp, Heterodera glycines
tagtttatttgctaaaatcaagcttacaaaaagcggttaggcatttaaaatttaagctccgtaaaaattcaattaaaaatcatcacatttatttttttaatttttcaatttttaaatttttcttttttggcgaactgtctacccttgtaacttctaaaaaaggagttgagaacttgagactgaaatcccgcgccagatcccgtcccgacctgtctctgttttccatagtgaacaaataattattgttgtatttttactctttcgctgctccatacacatctctttcatgaactttagacaaaaagtattttaatg

SEQ ID NO: 103261 - DNA, 1003 bp, Heterodera glycines
aatgcagtggcaagtcaaaatctcaggaacaatcgagcggtcattaactcattctcgatagttcaaaaattgcctgcccctgtcccactctgcctccactaaatcacccacctccctgtcccactctgtatccattaattaattatctcaattaatatttaatagccccccgcccttcccccagtggaaagccaagattcaattcgtgacgacggtcccgaggggttaactactaatttttattctattttaactgaataactaaaattgtatttatttattttttgttaaatttttaatatttctctcattttttctatcatttatcattcaatgaactttttttcatctcaaaatttaaatttaaaaacgaatcattttatatactatccattgtttcaatttagataccattaatcaattttaatgggattttatggaactgtaactgcaaaaaggtggaatttatactgttttttttaagttttaggtagattcagtattttcggtttttattacattattctaaggaatttcctgcaaaaataaaaaaattcgctttaatttagtttattttttgttgaaatattttttaattttaatgtatttattttttaatttaattttttggtttctttatttttgataggccatattttttaaaagaattcgattttgaatgaagaaaacataattatttcggttttaaaatgttttcattttataatttggaatttcgctacttttattatataattaaattcttggttagtctcctacacaaatccgcaataagagatttttaaaaaatatggctaattttgaaaattttttcaaataaatgatttgttaaatattgctattttttcttgttcatatattttgcaatgaaaaaaaaattaaattattgttaattaatagagaccggacttttaggcacgaaaacttctcaaataggcacctaaaataggcacgaaaaatgtgaaaaaaggcataaaaaatg

SEQ ID NO: 103262 - DNA, 68 bp, Heterodera glycines
ttgcggagaaggcaaagcaagcgtaccaagaagcgttcgaactcgccaagaacaaactccggccaatg

SEQ ID NO: 103263 - DNA, 426 bp, Heterodera glycines
gaatccgttgccaccgccaaatttaatgttttaaacagaaacactccatccctctctgcacggaattgtcctttttatgtgccttataagcatagtggtgtactattaatacccgtctccctaattttaattgctttcgatggagaggcggcgaagtggaaaaggtaattaattaattaggtacttatttgattaattaattgcctaattaattgatcggttactcgctaatcgatttctctcctttccctttccgttttgcgccgttccctcaaactgtgccgtgcccatttgctcctctcgcttacaatctcttccgttttagtcgacattaatcttggatttgtggcgtacgaaccatataagtaccaaaaattttgtggtatgttttgaagccttcggtttgctcattttacagatttaatg

SEQ ID NO: 103264 - DNA, 1003 bp, Heterodera glycines
ccattatttggagcaaaaatggttctcaaatttcttgtttaaagctgaatggcagatataggtgagagagacagcagaactccttcgcgaagaagcacacagtgatttcccaacgtcaagcaaaaacatcatcagggaagtgcgtgccgatttgccaattgaagttagcgcagcttctgctccttcaccatcaaatatgcgttggaattactaataagcagaattaggaacggtaattaatttaaataaaactaaattaaccaaaactgatcagatttgtagacatatttgattagtgaaagaatataaaattatattttttttaataaattcaatttttaaaacaaattaattaaaacatctctttaatataagaataataataaaaaacattttgatgctttcttggacaagaaaattcaaataaaagcgtgaaaccgggcataaaataccacaaaaagaccaaattatgtttaaatgtgggtttaaacctaaaaaaatataactaaaaataaacttacagtgaggcaaactagtagaaaaatatgtaaatatctattttaaacaatgtagaaaagccccatattatttctaaatgtatgcaaataaaaatcccaaaatgttcacattttatttgatttaaaaattcaaaacaatattatttcctgtgtttttaaaaatttggaccaaatctttggaattcaacaattttctttaattgtttattgttttttaaattttaaatttttctgagggcggccggcggtgccaatagacgccgccagggaaaattcaaaaaatgtatgcattttattaacagattttgtacaaaaaatgacaaaaattgccaattttttgatcaaattttagatttttttgtggagatttcaacattttttaaaaaatatttatcaaaaatttacaaaattcttgggaaattgagaaaggctttggagagggtttcaagaaaagccataagccatttcaaaaagatagaaaaatg

SEQ ID NO: 103265 - DNA, 1003 bp, Heterodera glycines
cctgatttttagacttagctcgttaagagctttcgaatgataccaaatttgttcaaaattttttatttaaatggatttttggatgatttctgaggcaaattttcgtgatttaaaccgattcaaaaacctgttcaaacgctttgccgcgcagtttttttgatggtttaggctttttcagcacctaagaaaacctataaaagtggttttgggtgtttttgagttgggagctatgataaacattttcccaatatgtatttttgtgattccgtataaaaaaattttaaataaaaattttctatgtcctgctattagttggaattgcaatttttcttttaatttgataaattaagttaaaatgaatttgcagactcaaaacaatattttatgatttcttaaatcgtcggcattaaaattttaatttataaaaatataaattttccaccatttaagcatataagaaaaaaaaagataaaattgtaattttattatgtaagcataactaattaattattacaaatttaaaatttttgcgtaatacattgaaagtcggccaaagattatgcaaatagataaaaatattagatttttattgtttttgctaaatttacccgctccattcatcagttgtgaattgaagccattatcattcttctaattttcattcgattttctcagttcttatactaataaggaagaattaataataaataaaaattttattaaaagattaatcttgaatttgatatgatgatatatttaaatttataattaattaacattatctaataattaggtatttaaaagagccctaaatatataattgctaagttttgaaattattatttacattaatgttttaccgatatcgttttattaaataaagaatgttatcatttataaaaaatgctatttaattatattttaaaaattattgatttattattttgcatttatatttattattaatttttactattgaagtttttaggtttttatcatcatg

SEQ ID NO: 103266 - DNA, 454 bp, Heterodera glycines
  unsure (1)..(454): unsure at all n locations
tcatcttggtcaaaatttcgaaacatataatattttcaaaatcaggataaaaatcaatgattttttacaaatctgatatcatattcgtgatcagaagctccggaaacccccgggttgaacttttcacagcattaaaataatttttttgggtggagcgcagantggccagtattaccccggtttacgggattcccccggctgcgacccggatttagaggcaggcatcaatttagaagcacaagtttagcattttgcagaaaaatcggtacacccttttccaagtacatatattttaaatttgaccacaatttgtgtttgtctgaattagtaatgctttttcccaaatgaggctaaactcacaaatatcgaagccatccttcagaataaacaaatggtagtgatcgattttaattcataaattcagcttaaattatatttgctacttacaaaaatg

SEQ ID NO: 103267 - DNA, 87 bp, Heterodera glycines
aaacaaataaaaatatccttttaggcaaaatattgactaccctcccgccctttgaggattatttccccgatgaattaagtgaagatg

SEQ ID NO: 103268 - DNA, 111 bp, Heterodera glycines
  unsure (1)..(111): unsure at all n locations
ggggtcaaattttaactttttttttttttttactttagactattcaaaaaagaaagtntaggcaattaaattttttcgatgctatgacattgggcaaaaactatcaaaatg

SEQ ID NO: 103269 - DNA, 79 bp, Heterodera glycines
tttttcctccttcgttcgctgccaaagatgcgcaacaattggtcgaggatggcaaaattgggcaaatgccaccgaaatg

SEQ ID NO: 103270 - DNA, 144 bp, Heterodera glycines
aattgtaattgataggaaagaccaaatttatagtttaagatccatttacatttatgcctttttggttttgaccttataatctatgtttttgataatttggatcccattttgacataggaattatcatcaattcgtccaaaaatg

SEQ ID NO: 103271 - DNA, 457 bp, Heterodera glycines
ggtagtgtagacttaacttacattatgcgaaaagtttgcaattaacacatttgagtcaattcgaatgcgaaaaatagttcaaaaattaatttttcatatatggggccaaatggtttttttggatttcgattgtttttcgggtccagtgcatttacagtgtgacacaaaaataatacgtttaccaacaaatttgggcacattgaaggttccactgtaagaattttgtgaaactgtgcaagaccaaaaaagttatgacgagattgatagtattgcctaaaaaatattatataaaacaatttcataaaaaagaataatatgtttgtaataaaatttcaaaaatgcaataaattcatttgttttattcaattttattatattaacaaaagagacttgaatatacatattaagccctgttcctaaattaaatatttttaaaaaatataggaaacatcgtatg

SEQ ID NO: 103272 - DNA, 587 bp, Heterodera glycines
atttgatatttaattttaatttaatatttaatcaatttaaatattttaaatttataaatcattgtttcaattttaatgcaatttgaatttttaaatttattgctatttattcatgtcaagtaaaatttttaaagaaatcttaataaattttactaaaaaaaaaatttaaatttgttttttttattatgcaaacaaaaagcgaatgaatttttttcaaggatcatgtgtcatccttccaaacaaaaattttaacaaaaaaatttttggcttttattagcaattagcattttcaaacggcaccacagtaaatgattttttaaatttttatttctgaaattatttgctgaatttaattttaaaattttaaaatttttatttttttaaatttctctttatttacgtttttttacaaaaaattgaatttatataatttttagaaccaatttaaaaaattttaaactaattttagaaattttccaggtgaatttggacagccaaacacgcctttccacccaagcggcattgtcggttgtgccgttgcgtgccgacatgttcatgttggcacacaaaaaaattgccaactgatg

SEQ ID NO: 103273 - DNA, 617 bp, Heterodera glycines
aaagaaaactcaaaacagagttttttaaaagaaaactaagaaaaatatttctcaataaaatttaagcgattttttggaaaaattatttgaaaaatatcggtaattcaccataaacattttcgaaaatttttttcttagttttttttcttgaaaagtctaggttagtaaaatttcggcgctttttggcatgacaacgttttgtcctgctccatatataaatatcattttcaattattcattttaactaatttttgttaagagcctcaattctgcccaaagagcgtttgctttggaagcaaaatataccgagggtaagtttcaacgagggaatatggttgcttaacagaatttttttaaatacgttttggtcaaaatctttcagcggcattggataaaagcggagcagggcggttctcccccggcatttctggcccaaaccggcgtctccccctaaaaattaaaaaaaaattcaaacaaattttcaagaaaaatcgcagtaaaaattttataattttttcgaaaaatttctgttataattttatatttttcgcaaggagggtggggggacgacgcgtgggggacacagcggggaaagatgaagtgcactcgtatacatg

SEQ ID NO: 103274 - DNA, 332 bp, Heterodera glycines
ggttatttttttagtcatcaaaatttttagcgcttgttgaaatgtggggacttcttggttgtaaatttttttaggtcgtgtaaactgcaatagtgctaaaaatcgtaaaacttttcccgaggttttcagagtcatttccgaatccctgttcagaaatataaaaatgtttttacgctaggcatcatattaaaataaattgctgtccaattgggtccccacttggcttttaaaaattttcaaaaagtgctacttttcaactaacgctcacattttaaatggaattccacgtcctcattcataatttcgtttaggactttgttcgcatcaatatg

SEQ ID NO: 103275 - DNA, 80 bp, Heterodera glycines
ggtaattcataaagctaaaattgtataaatattatatattaaaaatatatttaaatgcaggcggaattaattcggcaatg

SEQ ID NO: 103276 - DNA, 53 bp, Heterodera glycines
ggtgggcatcaactgctgacaatcgagaggattagcgaatttaatagcaaatg

SEQ ID NO: 103277 - DNA, 95 bp, Heterodera glycines
ttttaaattatttttatttaaatcaatatttttaatatctgtcaccaatttcttaatgattgtttttcgtctatcaaaacattaagcggaaaatg

SEQ ID NO: 103278 - DNA, 175 bp, Heterodera glycines
gctgagagagagagagagggaaaggaagatagtggcagagaaaaagaggacaaacgaaagtgaaggtgaacagagagagcaccaaaaacacattgtaagggccgtatccctcgtggtttgtccatgtgccaagaagttcggaaggacacccgtggggggccaaaacggagtgatg

SEQ ID NO: 103279 - DNA, 546 bp, Heterodera glycines
aaatctgatttttttgagcccggtgttcttttgaataatttttgatggccgtcatagccttaatttcaaaatggacgtattcacatgccatgtgaatgtagattagcaaaaagacattcgtcttgatatgtgaaattaattcagccaaagctcctaattagaatatgaaaatggtgatgaatttattaagcctttttacattaaatattttgccaaattgtttaataattgctcattttgattttgctcactatcacagaagtgccttactgaattaatttcgtattttatgatttcattttctttagcttcacttttctcctctatgtatgaagagattgcgatcatatttatagtcaaaaatttaatcaatttattttgtattaaattcggttaaaattacacaaatcttttatttttcttatttcttttaaaaaagactccatccaaacaatcttaaacatttttcgtaagccgaatcaaatttaagaaactcatgtaaacttttcactcatattaattctcttattaatcttgcaaaaaatg

SEQ ID NO: 103280 - DNA, 1003 bp, Heterodera glycines
atatttttttaaagcaaatattcacctggtttttgtcacacacacgggaattcatgtttacttgagatgcaaatgcacgccaaaaaggaaatcgtttagacacacaaaatgaattgtaatttcacgtttacaaaggaaatcgttttagacacacaaaaagaattgcaatttcacgtttacaaaggaaatcgttttagacacacaaaaagaattgcaatttcacgtttacgtggagtgcaaatgcatgcaaaagggaaatcgcttagacaaacaaaaagaattgtactttcacgtttacttggtaaagaaaaaaaatttaaaatgaattttcaaataatttttcgtaatcaccaaattgaaataatgactgaaggtgataatttaatagtgcttcttgctctaacaaataagctatgtcaatttcgacatacttttttttctttaatcggaaaatttacccacaactaaacgaatttattacatatagtttattaggcaaattgattaaaaaaatgctttatacaaaaatcatatcacaaatatatagcacgcaaaatttttggtgtttcacccactagccttcttagtctaaagagcttagattttgatcaggtatacctaacaattaatatcaagaacaaataaaagatataaaaatatattttatatctttaaaaagcaaaattaaaatgaattgctcacattatcaatgacaacataattcttgtaaatcaggaatttataagctaatgcattgcacaagttgatcagatcactacttaaggatgatatgaagtgatcaaaatttttagcaccaagaggaattgaaaaaagaactttttggaaaaactttataaatttttgatgttttcattcgcattaactttcttaactccgaaaaatcacatataaaattcaatattgagatgatcatccaatttaagaatttttttttgaaaattaaatccagaaaatatgacccgcaaaagacggtccgcaaatg

SEQ ID NO: 103281 - DNA, 392 bp, Heterodera glycines
tttaaagcacacttccattttctcacaccttaatcaccctatattttaagtatgtggaccaaccatgagaagccacaccaacttgaaaaatgccaacagaaattgatcagttccggaattaatgataaattgttaaaaaacaataagtcccgcgggactatttgtcgctttatctctcttttatcagttctgaggaactttaacacatcttaattttatttaaatataaaagctaagtctttgcaatttttggaacagactctcatattactcacacacttctgtctaagccctgcggagctaattaatgaattaaaaaaagaagtgagaattgataactcaaagctaaaatgctcaaaaaaaaatataacttttttttaattaaagaaatg

SEQ ID NO: 103282 - DNA, 200 bp, Heterodera glycines
  unsure (1)..(200): unsure at all n locations
tgcttttcttttcgaaaattagcgatttcttccccttccaggggacacagccccccccccccacanccacccgaccttttaagcagcaccaagaaacaaacgggaagggggaggggccaaggccaaggcacaaagaaagcccaaaagctttccaggaaaagcagaaagaggaagcacaacgcggcgcagcgcttctgatg

SEQ ID NO: 103283 - DNA, 527 bp, Heterodera glycines
tttttactggaattttaacattctttgttgttttttaaaacaataaattctttttaatttatttaaatgttcactttatttactatgaacgcggagattttcagataataataaatgaattctttaaataatcaatgttaataaataataataaaaaatttcaatgtttccaatttatttagtttttcttttgtacggtggcgggttaacggctgggcgaaattaaattattttaaattttctctgcttctttataaattgctattaaaaagaacttaattttataaacctttataatttggtttgtttttttgcagtggtgtgtttatggtaaggaccaaaacaaacatttgaaattattaaaaatcattttatcacaagaatcgtactgataaggcccgctctcttttgttaaaattgcacttttcgcgaaacgccatttttgctattttcgcgcaatgacctagcaccatttaaaccggtcggcttcgcctttttcaatcattcctccgtatgtatcagggatg

SEQ ID NO: 103284 - DNA, 81 bp, Heterodera glycines
cgtccaggctcagtgatcatcagcgatgaatggccggcgtacctgaaactggctctgcacttgccacagtacgaacacatg

SEQ ID NO: 103285 - DNA, 58 bp, Heterodera glycines
tttattcgcctcggggggggggggaggaaattagccccttgaagttggacgaaaaatg

SEQ ID NO: 103286 - DNA, 524 bp, Heterodera glycines
aaaactcaaactaaactattaccgagaattggggaattaacgaaaatttgaaagaattttgattatatcgcctaacagccagcgcacactcgactacgatggcaattacatatgtggtgcaacaagactccggaagaaagccgcgcatgtccgcatgcggttgactgattggcggggacctgattgattcgttggcgctagtttaaaagttcgatttgtttagaatttgcttggaaaaaattctcattttcaaaatctttttttaaatatcaaatttgttcaatttaattggaaatgaaacgagttaaggctgatcaaaaaaaaggcaattatcagtgtaatttttgaattaacgcaaaaaattcaacatgccaatgtaaaattcaaatttccttccgatctgccttgccgaaaattaggttgccccacaaaactcggattctaaaatccaattggagtttggtcagtccaacattttttgcttatgttttggtagcttcactcaattacaggtcaattaaatg

SEQ ID NO: 103287 - DNA, 433 bp, Heterodera glycines
agtgagtattcaaagcaaaaatacgaagttcaccttagccttgtgtattttatgagaaaaaattggcactgtgacaaaattgcgcaggaatttgaaaaatatgaacggacagaatgccaaaaatatcgaaagtattttgacgtacgaatatttgcatagagaatacgccggaatcccaacagggaagccaaaattcgtatttaaaaatattttgttgatgaaatattttcgggctttgtcaatggactagcagcgacaaatatatttcgcaattatggggatttttaaggaaatttttttattaaatgtgcttctttcttttttcattttcagtttggtttatttttatttatattctgtccgttcatattcattcaatttttttttatcaattttgttacattgccaattctttctcataaaatacaaaatg

SEQ ID NO: 103288 - DNA, 1003 bp, Heterodera glycines
gaaagttatgtctatttttttaaacatttttggttagaactttgtaaaaactcaatgaaattttctgaaattttgcaagccaagagctacagtatgattcttattctttatgttataattaagaaaagttataagtgatttttctcgaaaaatcggtaaaattggcaatttttacgaaacgacctagcaccgaaattccatcctttgataaatatattttttagctttgtgaattaataatattattatttttttctagtttttaattcaaaaaaaaatacattttaaaggaaaatgtatttttatttaattaaacaaatgagaaaatcgaaatttttttcttgaagaaagaaaattgttaaaaattttttgttttaaatgaacgagacaaaagatgctgatgatgatgaagaaccacagcacagaagaagcaaaactaagagctttaattaggccgacaaaaaagaagaattgattttccataccctcaaaaagtatgtaattgagggatttaaaaattttatacccgttattatcaaaatcgaatgtgaatgcaaataattttcaaaccccgcgagggcaatttattcaccccccttttgtgttgctgctgccgccactgctgtcaaacttcctgtcaacatcggcagcagttgaggatggcattaaaattggcggcacaaattgtgttatttcttgttgccctcctatgacaaaattttcagtttttttttaaatgtccaaacggcattaggtttaagtttgtcttaatggaaaaaaaattgttggacatttatttaagtaagccataaattttcaaatttcgcatttaaaatgtgtgtttttaaaatttcagcagattttctgataattagaggtgtctattgtattatattttgacatgacataaaaatgtaaaatcaatgcctagcgaaaaaaaatttatagcgatttttaaaatttttcaaaaaaaattgcttttctttatttcccattaaaaatg

SEQ ID NO: 103289 - DNA, 183 bp, Heterodera glycines
aaccttctttttaaacgaccatttgctatgaaaatcacggaaaaagcattaatttaaataaaattttttttttcatgttttggtaaaaccattaaaaatgtttgaaggtccaaggtttttcataaaaaggacggataatttccgatgatccaacaataagcggacggggaataatgccaaatg

SEQ ID NO: 103290 - DNA, 62 bp, Heterodera glycines
aacgatttgaatttttcaaatttcaacgagccattttaaacgctttgctttgtctcagaatg

SEQ ID NO: 103291 - DNA, 645 bp, Heterodera glycines
acaaataggacagaccgacccctggcataaaagttgatctagcgtgaattttttcaattttttttcaagtgcataaaacttacatttcttcaaagtttattgtatgtataaattttcttccagcaaatttgagccaattttagagggcgtgtaaatttacaaaaaaattcatctacacttcccaattttgttttcttcttatatttgtgtgttaggtctatttggcaaaaatttctaagaagatgtgaacaaaaaaattaattaaaccaagttagacagtgcattcattcctcatagtgatctcaaatccaagaatgatggcttgaaggaaatttttagaaaaaaatttaataggctagtaaaaaatttttcaaaatcaggacgggaaaaaaacgctcggggaatggtttttgtttgtccttctaacccttgattcgcgtcttgtttttttgagtaaattttttaaaaaataaaattttgattgtcaaaaacaaaaccaaaatttattttaaatttattcaaaaaatttttggcataatgttttttgtcaatacaaaaatcaaattcgtggatcctgctgcggctgcgggattggaagttccaatttagaaaaatcttcaaatcctttcattccctcgcaaaatg

SEQ ID NO: 103292 - DNA, 77 bp, Heterodera glycines
tgttaattgagtgtaaaaatgatcttcgtatttagccgagtaagaaatttgcggataaggaagtggtgaaagagatg

SEQ ID NO: 103293 - DNA, 839 bp, Heterodera glycines
cccacaaaagccacaaacagtgccattatggtaaagagtcttcttgggcattccttcaccccacgggactttgtccaatttcttggcccttcgtcaactctgttcgatttgccccaatcagacaacgcaacggaatttgtttgacgcatggcagtcggtcagttcaaaatgaaaaacaaccaaaaggttttcttcccgtttgacttcgttttctcttgtccagttgatgtgcagcgcccttttgtccctgctgaaaaccgccgaaggtcggctgaatatttacaatgtttttcattgaattttcttaatacaaagtgtccctatttcactaattaatcatttctaatgtcattcattttctatagttttcctctcccccccccccctctaaatatttaatttatctctcctctcattgttatttttgccacattttctcagagtgccgtccttccgactccgaagtgtcctccgtttcattgctttccgccgtcgttttgctgctttccgcactttccgcgcatccctccacttcgttcgattcgctccctccatcgcccgtttcctcgtcgtcatcctcggcgtgtcctccgacccgtctgtgcattggccgtgaacttttccaacaattctgtgccgttctccgccaatctttgcaccattcatcgtgccaatccgtccaactgaaggctcttcaagcagttcgcctcctcttcgaatgctcgtcgttgtccgcactttttgtgcgcgagttgggcaacgattgttttgccaacattcgtccatttgtggacgaagcgtcggaacgcagtgagcaaaataaacggcgtcggaaaatg

SEQ ID NO: 103294 - DNA, 582 bp, Heterodera glycines
atttatttttgtataaactcaattattgttttttttgttacaaaattgttgctaaaagcattcaataaatacatagctttgctaataggatgtgtttatactcaaaggtttcttcgcccagttttttgtttttggcgttttgctaaaattcttaaacataaagaaagaaaaaggcaaaagcataaaatgaaacggaatgcgcagataaactcccaaactattaaggaaaaagggagcgaaggacgaattgcgcagtcgtcgactttctcctcttcatcattgagctttcatcgatttccttcgtccaacgacaatttcaattgcaagtgaatgagcccattcccttctcttcgctcgatagagggcgaaattaaatgaacaattatttatatggtttctttgtggtaattgggcatttgtattccgtttttgccatttctccttacgactctgacgctctttgtttacgccaaaatataatttctttgataaaatcgaaaatttacaaacacgcttttgcttttgaaaaaggatttcaaatgtttggttgagatttaaaaaacctaaaagagaaaggaaatg

SEQ ID NO: 103295 - DNA, 165 bp, Heterodera glycines
ttaattttgggaaaactttcccccactgatttcatccggtatgagcagcaagttttgcctaaaaaggcagcggagcttggttttcaggaaaccatttcaaatttgaagtccctattttcagacacgaagtcaattttcatccgcaggttcgagtgttttcaaatg

SEQ ID NO: 103296 - DNA, 103 bp, Heterodera glycines
  unsure (1)..(103): unsure at all n locations
ttagcgatttttttatttatctagctttttcttnttgtgacattaaaaaattaaaaattaaattattatattttttaaattttttgatcatttttccaagatg

SEQ ID NO: 103297 - DNA, 159 bp, Heterodera glycines
tttggaaatatttctaaaattcatatgtccattagttctgtaataaaattatttattattttcaatgtttctaattttcgttcatttttgtaaacctttggacctttttgtccatcaaaaaataacaaaaatttcatatcgaaccgaaacaccaaaatg

SEQ ID NO: 103298 - DNA, 1003 bp, Heterodera glycines
gtcctatcaaatatggctttccaaaatgcgctaaatatcaaatcttcctcattgaccaccttatatccaaaaaaagttaatgaattttaatgatgagaaatattaggctaaaaaaaatagtacttcggttagaaaagcttggcgagcagtaaatgtcgctaaccaaaatcttaggcaaaacaatgaattctatgattaggcatcggatttattttgactcctattttttttaaacactttgacctaaacacaaaataatattttgagctttattcatgaatttttttttcctttccatgttttagatttttgtcactatttccatattgtatattcattttaaggcattttcacaaaatctcaaaaagacaccgctcaagaatttttgttgtttgtttttgtaaaatacgaccttaattgaaaattttggaaaaccatattaaatgtaaaaaatgttttctctttcacttcaaaattcctttaaaaaatgaatttttaacaaaagttttaaatttatgtaaatatatttttttttcttttcatctttaaacacaataattatagattaaaattatgtcattctataattcatgtattaaataagcatcttcattgaaaatttttttttttggtctttgaattttttttttccttccgaaaattaaaaaaaaaaaatttttttttttttacatattttcttttttttttgtgaatttcaactattttgtccatatttcggccttattttgcattttttttctcatttcttccatgttatctatattttgttttgttttttcttctctgcttatatatgtaaattagtaaaaatttataagtttgtaagggatagagttctcagaatatcattctcagaaataaaagggaatagggtcctagtgaaaattataaataatactttatcattttaattattaatatttaattaaaataaatgcacataaaaatcatcattaataacacaaaatcaatttcaggaatg

SEQ ID NO: 103299 - DNA, 448 bp, Heterodera glycines
tcattaatatacattttaaatggtcaaggagtttaattaatgattcattaacaatattaaacagagaaaaattttactttttcaattagcttgcttattattaaattaatataaagaagtcttctgtatacgcccgaatatgaacgtttccttgtcactcaacggactcgggggtactttaaaataagatatttattaaatttagcgaaattaccgtcagatttaagttaattttttttttttttttgaaattgaataatgcaaaagggtggtacgagcataaaataaggttgtggtgcggaacggtatatttttttatcaaaaatactcatatttttttggcaattaaaaaaactgatttttagttagtagttttcttttagtaaagtaccatgccagcagataaaaaaaaaagtttaattccatgagaaatttcacaacagaaatg

SEQ ID NO: 103300 - DNA, 983 bp, Heterodera glycines
tttctccactttttgctccgcattcagcaaagtattcttattttaccagcagacggcaatgtgaatgaggtcaatgaagattaaatttaatggtactcaaaaattaacttagaaaaaagtacccgtaagaaaatgggtgaaatatgcataaaatgctataaaaataagatcacctttatagattttgaaattaatttttggtattttttggtttaaaaaaataaaatttttcacaagaatttctattatttttcaaaaaatacatatttacacaaaatttacatttcttattcattactgttcattcgtctcttattataaaaaaattattttaaaagctctctaaaactaatttttggtaagagtaccaatgatagcccccctttctcgtaaatttttgaaatttaaaaataaaaatatgggtttcgaggtcgttgatcatgaaattaacttggccaaaatgaaatgaaactgctgctcgctgctcatattcagcaaaatttgacgcgaattgttgaattagtcaaagtgtatggtctcgggtcggggggctcggggtcggagagcaaccctagtttatttaataaatagagccaaaatttgcactttttcacgcggcgacgcctaaaacgatcaaatttttctcaaaaattcgtttcataattctaatttccccgttggagcggacaaaaacaaaaccattaatttttcctaaaaaaaaattcgatctaaatcacaaaattcttgtgaaaaattttattttttttaaaccaaaaaataccaaaaattaatttcaaaatctataaaggtgatcttatttttatagcattttatgcatatttcacccattttcttacgggtacttttttctaagttaatttttgagtaccattaaatttaatcttcattgacctcattcacattgccgtctgctggtaaaataagaatactttgctgaatgcggagcaaaaagtggagaaatg

SEQ ID NO: 103301 - DNA, 98 bp, Heterodera glycines
aataattaattatctaattagaattaatttacccttttaaaagattggtcgagctggaggaggtcgaacttggagtggaggcgtgcgacccgtccatg

SEQ ID NO: 103302 - DNA, 659 bp, Heterodera glycines
attaagaaaattcccgaattttaattaaagagtgcattttgctttatagattccctcccatcaatccgcttcattttttgagtcaaaattttgctggacacatttcatttttggtgatcccacaaattctttatggccactcatttttcaaatctatccaatttctttttttgcttattttatttgtaaaattatttttaggtataatttataaaatttaaatttagtttaaaacaaaaaaaactgatcactgatttgtgtgtcctgccaaaaattgtgacgcaaaagacccaattccgatcagcagcaggggcatttttcccatctttttgaaagttttaaaaaaatatttttaattaagggagtttaaaaagaaaactataaaccttttttgtcatttttaatgataaaaggataatatcatatgtaaaataatttcaattttctcattatgtacctctttaaatgagttcacaaatatttaattgagcataatatttattttgtttatttagcgcccttttagaaattttatatatttttttgttttttaaataaaaacaaatcgacaaaacaaaataaacttattttatttgtgtatcgagaaaaaaacattattattattattctttaaggtacttttttttggaaataaaatg

SEQ ID NO: 103303 - DNA, 466 bp, Heterodera glycines
tggcttttgcggttgggaaaactcagatttcatcggagatttagaatatgtaattatatcataaaatataacaaaatgattatactgtctatttgagaccggattggcacggtgaccaggcgggcttttaccgggcggcccggtcccgtcccatttttctaaattcaaataaaagattaaaatttttattttattgaaataatcaaaattccaaaaattttaaaaagccctgtcccgtcgggtgcccgttcaaattttggaccgggccctgggcgcccgtaaaacgggcttttttgaacgagctccccggtccctttcaaatgtctaagcccggtcccggtactttaaaattccggtctctactgtccatataaaaataaagaatgatatttattcctttaaaattaattatgaagattttaaagagttaaaatactatgagaaaaattgcctaatgttgcagatg

SEQ ID NO: 103304 - DNA, 74 bp, Heterodera glycines
acttaatttaaatttaattattcaaataaaaataaaaatatttatacgttaggtcagttaatatttggcaaatg

SEQ ID NO: 103305 - DNA, 922 bp, Heterodera glycines
aaaaaaattgggcacggcccgaattaaatgaagaaattttcggatgcggaagactttttaagcagcgccaaaagcattgattggaaaactgatagtgcggagagcagaaaaatctgcggagattgaaaaaatttggcacgaatgggtggacaaaaaggcattggaaaagaaggagacagatgatattttaaaattgctgatgcaatatgaaagtatttttgcgattagtgatgaagaattgacacaaaccaatctgatcaaacaccaaatcgacacaggcgaggcagaaccaattcgctgtaagatgcgttttgtgccatatgcctacagggagaaagtcgcggcaatgttacaagactatttgcaacgagatgtgatccgtccctcccattcgccgtggtcaagcccaatcgttctcgtgccaaaacgcgacggaacgttgcgattttgtgtcgacttcagagcagtaaattcggtcaccaggaaagacagttttcctttgccgaacatcgacaatacgctactaatgctgggagggcgtaaatttttcacgacccttgactttatgaccgggtattggcaaattcgtatggacgaaaattccatcgaaaaaacagcattttctaccgaatttggcctacatgagtttacggtaatgccattcggtttgtgcaacgtcgtagcaactttccaaagatttatgacgcacctttttgacggatacataaacaactttgtttttgtatatatcgacgacgtccttatcgcttccgactcatacgagcatcatttaaaacatttggtgcttgtttttgaacgaattcaggaggcgggactcaaactgaagctgtccaaaagccatttttgtgctaaagaattgccatttctcgggcatattctaactcgcgaaggaataaaaatg

SEQ ID NO: 103306 - DNA, 311 bp, Heterodera glycines
tttttaaatggggtggaatttttaaatgggtggtgacacctggtactttcccaccaatgcctgtgagcaagattcaccgagctgactccatctgccaattcctcattcagagaacttacaaattactcgtttattgttatttaattgctatctctctttggcaacccatttaccccgatcaaatgctcgagagcaggcgccgcgtagtctgtcgctactgacatataatttttcaaagaatttcctaagttctcgggtatgccagaaaactggctatctcttttttggaacaactttctagcgaacaaatg

SEQ ID NO: 103307 - DNA, 217 bp, Heterodera glycines
cccaaattttaggcccccagccacagccccttgcttccccaccttgtaagtcttggatttgtcaaataaattcaagacttcaaattaataatcaaaaattctcttaaaatttttttgaacccaattcaaaaaaggaaaaaaatttgcagtcaaaaaattattcgaatttctccaattttgtttccataatttccgaaagttattcggtatcataatg

SEQ ID NO: 103308 - DNA, 207 bp, Heterodera glycines
agaagaaagcggaggaaaaagggggaaaagcaccactcgagaattgtttttttcaaatttcattgttcccaaatgcctaaaatacataacaaattttatgtgttggttgaccatgaatatttttgtaattatggatgaagagcaattaaatgccttaataatttttttcgcaaatgactttaataatatattttcgttttccgaatg

SEQ ID NO: 103309 - DNA, 276 bp, Heterodera glycines
taaatacaaatagaattaataatttctttatttatggaaaacaatttattttgttgaaaattaggcattttcccaaattttgactattttcttaacaaattttaacaaaatttcacttattttctcagagcctaccgatttaaattttcataagattccaaaaaatttcaacaatacctttatatactcaatgttgcctagcagtaaaacggctgaaatcatgccataaattttttgttgcgaattttccgaaaatccaacagcgcccatcgcatg

SEQ ID NO: 103310 - DNA, 278 bp, Heterodera glycines
ttttttgacccttaacgaaacttttcgaaattttggaggctaatagaggacacctaggactatcgaatgaaccaagattgttggatttggttggcaaaggaaaaagttctagccaaaaacttgcgtctcatacgaaaacgatctcgaccctattaaaaaatacacaaagtatttaaaatatgtggacaaaaatggcaaatttacataatgctgatgggccaatttctaagagaaaattaaaaaatattaggccaattaaaaagttataattggtgatg

SEQ ID NO: 103311 - DNA, 939 bp, Heterodera glycines
  unsure (1)..(939): unsure at all n locations
aaacatatatgaaaaattaanaattcaaaaagccttattatataaatgtttgcttttgtcttgatttgttaaaattacatattttgtttgaaatctgtgcctgaataaaaatcattttaattaaaatttgagacagaaaaatggtcttatcttgcagctgagcttgtttcttccatggtccattcccgcactcgtttaaaaatcatttatgcactcaaatccttggctaatgactgtctgcccctatccgtaccgttagcattctcaatttttggcacttcttttggccttttttgagttttgagcacatattttgtggggttttttggcacatattacctatatatttatttggcatttttagcacatataaaatagaacccttttagtagtgatcaaatatttttcaaaacaaaatcaattgctttcaaaaatgcgaaaaattcaatttcattatcgttcttttgcttattaaacctaattaaattaattacactacaattcagaaaaataataattatatttgtgaaagaaaaagattgatattaatggcttgaaacattacataaattattatttattattaattattgatgtgcttccgcctatctcgaaataaacaaaaacgttgcataaataatatgtctattataatattattttatattttttacaaatatttgtgcgaagaaatagaatcattttaattgattatacacttccgctaacaaacgtcaaattattaaatttatagaaaatgaataaatagtctatatattattttattgattatctatttccgcctatctaaaatataaatacacaaaataacagctatgttaaatatatttccaattacctatatgtctaaaaacagtatttaatatttgttgttttccctgaaaatttcagttttttcttcacttgtttatttcaatg

SEQ ID NO: 103312 - DNA, 124 bp, Heterodera glycines
ttagtggtcaattacctgaagagctccggaaatgtttatcgatgcgtcctagaaccgttttgatctatattttcattatttttttagctcataaattgtcttgcagaagtatttaattaaaatg

SEQ ID NO: 103313 - DNA, 203 bp, Heterodera glycines
tctgtgtaacaaatcacataaaaaggatgaaaaaattgagccaggtaaaaagttaagttaaaaatttctaataaatgcaaaaagatcattccgaaatgtcttaaaaaaggaatttacaactccaacctgctcaagcagtacagtcggctgccgcgcaccgccaaaatgtacagcggaatatccatggtgcggatgatgccatg

SEQ ID NO: 103314 - DNA, 54 bp, Heterodera glycines
ttggcacaatgtccaaaccgagtagccaaagtccggcaaaatcggccaaaaatg

SEQ ID NO: 103315 - DNA, 456 bp, Heterodera glycines
tttatttgttccctttgctcccaatcgatatttgaccccgttcgccctgtcccttctttttaaataaatatttattttattcctcttcggactttggggcgtaacaattggcgacgcccgtgcagacttttgactgtgggcttattgatctgattgtggaggaagaggtttgacagcaaccgagttttgctgtgtcatcgctgaagactgcctgcatttgctattatctaggcgataataacaactttttgttgaacctgctaacagtttgacactgttagtggtgagaaattttgcgccgctgattttgtgtcttggcgacacatttcagttcatccacgcgcacccactctgtttagtagcttggcgctgctaacaattgagtggtgaacgacacgtcatttaaaacgagtactctcgagctgaggggaaagtccacgagctgtggttaagatg

SEQ ID NO: 103316 - DNA, 372 bp, Heterodera glycines
  unsure (1)..(372): unsure at all n locations
agtataaaattttttaaattattttttttaaaattatatttttatgtatatgcacatatgaattaattttaaatattattttcatatacataaaaaatttataagaaatttaattnaaataaataaataaataatattaaacaactaaaattgtatggttattttttgtaaaaatataaaatattcttatcgcgttaattttttctgcgcaaacatctcctgctgctgtgctgttctcgacaaacaatttcctagataagattttcgagtaaagttataatatgaatgacctgtggtcattcttcgtccatattatcattctcctcaatccatagttccatttttactaaattttttcttagtcaaataatg

SEQ ID NO: 103317 - DNA, 986 bp, Heterodera glycines
cagagaatttttaaatatatctaatatccaagaaattgactatctcttatttggagaaattttattcgttacaaatgctctcgagcttgataggaagggcggtgcgcaatcgccatttaatttctcagagaatttttaaatttatcttatatacaagaaaaatgactatctcttattttgagaaattttatacgttgcaaaagcgctcgagcgtgagagggagggcggtgcgcaatcgccatttaatttctcagagaatttttaaatttatctatccaagaaaaatgactatctcttattttcgaccccgacccctaaaaagctcaaaaaaggccaacatatgtgccaaaaattgaaaaaaaaactgtcaaaaaataagtgaatttatcaaaaaaatcacattttttatccatttcgctagtacaattctaatcaaaaacatttcaattctttgtgacgtaaatacttttctctccaagatttacttatttttctgtttttcatcgataaaattcaaattttgccttaaaaatgaaaaaagccattaaaaaatatcaaaaagtgcaaaaagaaaaaaaagaaaatttttgatcatttttggatatcttgccaagaatttgagtgcaaaaaagctaatttcgtaaaaaataaaaataaaatttccaaaaaatccccaaaatatgtgctaaaaaaattagtcaattaatgacatcagatgagaatgaaaatgtgatatttgtgatagttaccttaaaaaccttcataattatagttatctcatattaattactacccaattcgctgataaaaggaaaatttaataattgaattattataaaaatgttgtcaaattaatgaaataatgattaaatgtggttaatattgattgaagaaaaattaagccatgctataaaattaataattacaaaattcattgcgaaaaatatttttataaaaataattcattatatttttacaaaaaaatg

SEQ ID NO: 103318 - DNA, 275 bp, Heterodera glycines
ttttttttaaacagcgtaggaacaaaatgaaaaaacaccacaaattaggtaggtgcaataacgtaggattatgcgcagtgaagaaatacctacatatgtagtttgagatttctctcacaaattcacgccattttatactcaaaatttttccactgaaaaaagttcgttacagaagtgtataaaagggcacgattttgcttggactgatcattcatattattaattcaacacatcttcaattgcctacctacctaaatcatattttgctgataatg

SEQ ID NO: 103319 - DNA, 364 bp, Heterodera glycines
ttgtgccgcattttatgtccgagaatttccttcctttttcagaagctaccatggactatgggacattgcggaattttgatactcaattttttggaggagcagccccgctcaaaattgagcgcggcactggcaagaaaggcgagaggcgaaattgaaattttggatataagtcaatatctaatttttgtttgtttgtcaggtccggcaccgtccgtcgctgtgaagccgccgtcaaagtcaaagccctcggagaaagggaaaaaagtgccatgtcagtgttgattttcttttgagatttacataatgtatactgattttttcctcccatttagccagccatcctgactatggaacacttcaaatg

SEQ ID NO: 103320 - DNA, 146 bp, Heterodera glycines
gcgcgctctgcggtcgcttccgcacatatgcctggtcgccctttgaattctggcacacggacgtggaatgccgcaaggtcgtcgaagacccgctgcccgctttcaccaaatggcttctgaacttcgaaacggaagttctcggcatg

SEQ ID NO: 103321 - DNA, 94 bp, Heterodera glycines
caaaatgttttcatgggtgaaccatttttcgaaaatgtttttaatttattataaaaaaaacaaatttttaaattttcagacaaattcgatcatg

SEQ ID NO: 103322 - DNA, 159 bp, Heterodera glycines
ttttggtgtttcggttcgatatgaaatttttgttattttttgatggacaaaaaggtccaaaggtttacaaaaatgaacgaaaattagaaacattgaaaataataaataattttattacagaactaatggacatatgaattttagaaatatttccaaatg

SEQ ID NO: 103323 - DNA, 238 bp, Heterodera glycines
aaattttattaaatttttacgtcgtctgcttttttgaattcaatcgccctctcccaagcatttgtttatcctgctttgctaataaacctgttcccccaagtggaatatctttgaatcttcactttcaagaggaaatcagttaaaccgacgaacattcgctgacccttctcaattatttatttccatttttatatttcgtttttatcgcttaatttaagtcatttttgtgtccaaaatg

SEQ ID NO: 103324 - DNA, 140 bp, Heterodera glycines
aaataatttataggccttaaaattaattttctctgaaatttcggacaattccctgaatttcccaagtcgctaaatttttccatcaaaattaccaatctttgtttaaaatatgttaaaaattcagggaattctaaaaaatg

SEQ ID NO: 103325 - DNA, 730 bp, Heterodera glycines
acgctttcattgcggcgattacaccgacttgacgcattgcgccaactccaaaaacagtgcaaattgtccgacaaattgatacattccgttgaacaaatagcgcgagctggtgactgtttttccaatcatataataaaaatggaaaaataaataaacaaaaattattttacttacgaatcccaacgccaaaaacaaaaattgaaagaaacatttgggtttttgagcgtcatccgactaaaaaaaacatatttcgtggcttccaattttcacagcccaacactaaaaaatttgagttttttaaattgcattccttggaaaattggccttttaattgccttttttaattcaggcggtgtcggcggatgccattgatgaaaaagtgcgcggggacaaaacaccgaactgccgtgtcaaactgtgtcgattctgccaaatgtcaaaactataaattattttcggaaaaaacaaataatttaattgaattttcctattaaaattgtctccaaaggatgattggtgtgataaactgaataaaaagacctccacaaacatgatttgcttaacactttttgttattttcattttattttctatcgaaaaaatgctttctttcgacttccatgttttgcgccattaaaacatttttagacaatttgtcattgtgcaaaaaaaggataatcacagaaagcaacacccaacggaaacaacaacaaattaattgtccacaatg

SEQ ID NO: 103326 - DNA, 473 bp, Heterodera glycines
  unsure (1)..(473): unsure at all n locations
aaaagttttggagcaattactacaaaacattaaacagttgttgctctatctgcagaataatttttaaatggctgaaaaaatatgtataatatgaaaatntaataaaaataaataaaaggattttaaattcatttccaatttattcattcacaataaataaaataaaaaagttattatttatccataaaaatcataaaatagtttatttttaagttttttttaaattatatttttttgccttataaattaatggaaagaaatattttttgaatttaaataaaatttcctttttttccgttttaatttaatgctttaagtcacttgttcaaaaaatgcccaagttatttttactaattatatttataaatgcactgatttttggcaaagcgtcacaaaattgtgcttggcaggtccataaaattaaaaaataatttttaaaaaattaaaaattttttttagaattgtaacaaatg

SEQ ID NO: 103327 - DNA, 52 bp, Heterodera glycines
agaaaaaaagttaggaatatttttttaaattaaaatttcttttaaaataatg

SEQ ID NO: 103328 - DNA, 1003 bp, Heterodera glycines
cacggcactctaaaatttgctggggttggaaatgccgggcatttggggaagcaagaaaaatggccaaaactaattagcctatttttaaacgtatcttattcgaaaattattttgtaagaaaagcaggaaaaaaagaagaattatgattttgaaaaagcatagacctgtattttttggaaaaattgctagaaaattcatgtccaggaaaaacctatacccggacccaggctaataaattttaattttttgaagtttttcgtgcctaacttggacctgtctctttgtgtttctttctctctctctctcttttttctcttttctctctctctatgcatatatgtctcaaatgcggttggccacttcacaaaaagtgcaaatttgggcacttcacaaaaaaggcaaaaataaaaaataaaaacttggccttaaaaaaagcttttttatatttatgtgttttttttgttgcctaaggcactttgttgttgctcatcatttggggttatcaatcgcgaaatcttaacaaagggatttgctttaattaataaattaaatataattaaataaaaatctgttaaccaatttcgctatgttttaaaattatttttacttttatcgcttcaaagagtgccctaagcataagcttaatgcaaatttttaaattcctattatgcaaactttagataattttttggataaatatatattatattattattataaattgtaaaagtgtcagtaataaaaatttaacttacaatgcttttgcttattttaaatttaaaaaaaaaataaaataatttctcaaataaaatcgatggaaataaaaaaagaaagaatcacattcttattcacatagtcgtcataaaatattcatagacctaaccattcacattattatacatttcatttttagaataagaatttctttttaattttattatcaaagatttatatctttactttataaaaatataatttaatttaaaaaatttagataagaatg

SEQ ID NO: 103329 - DNA, 172 bp, Heterodera glycines
acacaaagtcaattaaataaggaaaataaaacaaattatcggcaaaaaaaattcatttatataaaacaaaaaaatgaatgacaaacaattccaaaatttcccccctaaatttccgttccaacaacaattcgcttcatacacatctgaactgctcgtgcaaccgttcgccatg

SEQ ID NO: 103330 - DNA, 1003 bp, Heterodera glycines
ccagtttttttggcttgaacttttgaaaaaattaataaaattttttgaaatttaccaagctaataacgcaaattaagggctatcgtatgattaaggtataagcagatgaacggcagcaaaagatcattgtgcattatgatcactttatgctttgtaaggacgggctatttaaatgccaattatttttttgcggtttcaatgaggccaaaaaagtaaattgacttacctaattaaagaataaataaaaccaactaattatatctttgtgtgttaggctggtcatgtgctgttttgacgacattgtgcagccggagattagtgcgtttatttaccgagaagggctgacaatttttgttgccgaatttgcgtgttatgcactgatttggctggtgattttatgccgaaaatcgcacggaaatttttttataaaattatttttaaacaccaaatcaaatgtttatttaggtaggaggacaacaaaaaaattggtgaagccgttgacatcgataatgtgcatcacctttttctgctacattcaggcaaaatataaaaaataacacagaaacaattgaatatttgttgaaaattaagtttttttttaaatttgttttggtgcttctagggacgtatttccatatgcgtatttgcatatttgtgcatacttcgcatagtgcatattttgtgcacatattttgcgatttattatatgtatatttttggtacacaccaattccttttaacgaaaataaattaattgtttttgtgtaaaaaaccactagaatttcaaatggctattaattaggtacggtactttttttaagaaaaatctttgacttttgaaaaatttgggcatttcagcatgaaaagacaagcattattttaataaaactttaaattttctaaattatattggtgaactttgaatttaaaataatttttcgccaaattaaaactattttaaaatgggccatttataattcaacacattttctttttcaaaatg

SEQ ID NO: 103331 - DNA, 654 bp, Heterodera glycines
aaaacttcccctctctgcgtgccattccccttcccacctgttaattaaattttgtagccaaccaaaattcaaattttggttctctccgtgccagttcccttctcgttgtcattcaaattggttctttcgctagtcttctcccttctttcaccacataccgcactgaaaatcgatcacgcttcgctaatggttccgccccttcacattttgccggaattggcgtcctttcattcgctcttcttctctcaataatcagcttttcaacaaaccgtctcctattacttcaatttattccctttttattgcttcaatttcttcctttttcaatttttcttatctctatccttttttcgtcgtgactttttctcctattgaatttatttcattttttctgctcaactttcttctcgaaaaatgtctcgcttttgccctctcgttgaaaccaaagaattgggacgtctttccgttatgaagggaaaattttgtgagtttgagatctctttaacttcagcacaagatttacaaatcttttacttgaattttaggcttttttatgccctcgaattatctcgtaattaccaactgatcgataatggaatctctaggaaggctttccgttattttatggaaacagagaaaaaacaacgtgaaatg

SEQ ID NO: 103332 - DNA, 141 bp, Heterodera glycines
tcacttatcaacgcgcatgcactagcaacgaagtcctttgcgcgaagcgctcatgtaatgcatattcttttcatctctcacaagtatactgtctacaccgatggcccataactttttttctaaaactctgatcaaaaaatg

SEQ ID NO: 103333 - DNA, 74 bp, Heterodera glycines
aggcgacttcggcaattcctgaaaataaaatcgaaaagtgtgtttagtcagtggaatgggaagcagctgaaatg

SEQ ID NO: 103334 - DNA, 1003 bp, Heterodera glycines
tttgactacaacttctttgaaacacaatgaaattttttgaaattttacagaaaaatagaggaaacttagggctatcaaaagataccaatattgtttaatttggatgcttctacaaaaagttatgggcattggtcaaaaattgatcatttttatggtgatcagttattcaaccaagtattactttctatgtacaaatcgcagacccaccattccaaaagcaattcggtagcaaattttgtgctctttccagagggcttgcccattttctctagaaaaaatttcccaactccctatggatttcgaaaatttccccgattttcagtgtcttttaagtgtccgggtcactaggaaggagtgatctaatcaagttggtgtaagagactatatttctctcataaaaatgtaatttgtttgggaaatattaaataataaatcgacattataataatggtctgcaaatctaattaataaattaaaataattatatattaattaattaaaatcatttattccgtactgaaatgacccgccccttccgatcacccatcactaatacttttttagcttcgccacactcatacttttttagcttcgccacactcatacttttttagcttcggctcaccacgggtggtcaccagcacggagccccgacttttgcggcccccgacatttgcgcctgcctatgtccaaaatcggactcaaagttgaattttttcaagccctgatagtctaaccgcattaaaattaagatatacggtcttctagtttattaggagcattaattctgttgtttcaaaattttcacgcgatcagagattgaaaaaacttaattttcaacccgattttggacaaaggcgtaaatgttgggcgtaaatgtcagagccgcaaaaacttctaacgaaaatggatattaaaataaagaaaatattatttaggaaaaagctaaaatataattatattgtttactaatattattcctcgccaataataacgctaaatg

SEQ ID NO: 103335 - DNA, 240 bp, Heterodera glycines
tttagccatacatgcaattaattcatttttgtacaggagctcattttcgggatagtgtgttaaaattcaaatttatttttaaaatatttttttattatttttttggctttcagtttttttcataattttttaaaagtgcctgtcctgcccccaattcccccccccccccccgggtcgattctcaagagttcaaaatttcgggttctacaaatttttacagaaaaaacggtagtagaaatg

SEQ ID NO: 103336 - DNA, 196 bp, Heterodera glycines
taatattcggcgaaacaatgcgcaattccttcgggattgcatatggtaacagatgtttgtaatcaatcgataattttcgacgccttttcaaaatttccttaatagggtatatcattcctttctccgtctataagcaatccctaaaagcattcattcgttcacattcatttcctacacactaaaaattcccaaaatg

SEQ ID NO: 103337 - DNA, 254 bp, Heterodera glycines
tccctttctagctcttccgggcccttcccttcccttcccttcccttcccttcccttcccttcccatcgcttttctcttggacctcttccggctcacaaatgctttctctgctcggattgaccgcctgtgaattgtaacaaatcattgccatagacaaaggcaacaaaaggagaagcgaaaggatgcgggacattgacagaaactgacggaaaaggcaaaaaaaaattgggggggggggagaagcgaaggcaatg

SEQ ID NO: 103338 - DNA, 53 bp, Heterodera glycines
gatttttaaaaccgacatttgcggatgatgattaaaaacgtcgtccgcaaatg

SEQ ID NO: 103339 - DNA, 240 bp, Heterodera glycines
  unsure (1)..(240): unsure at all n locations
gatttcaatgtgtccgtgctccatgacttcggtctcttctgggtctgctcgaaaatatggtgcatatttttatcnttgattaattacttaattatgtacattatatntatttaaattnttatgccctcattaaaatacatttatatttccatttcgtaaattggcttctccgataaagaaattgaaaaatttatggatttttttgcaatttaaattttcaaataaaaactaaatttaatg

SEQ ID NO: 103340 - DNA, 81 bp, Heterodera glycines
gcttccggcaatgtggaggagttcaaatttccgaccgaaaatgttgaacaaatttttgacggacttttcgcattggaaatg

SEQ ID NO: 103341 - DNA, 54 bp, Heterodera glycines
tttttggccgattttgccggactttggctactcggtttggacattgtgccaatg

SEQ ID NO: 103342 - DNA, 135 bp, Heterodera glycines
tttttaaacaggtcaaaaagtttaggcttatattttaccccaacaggtcgaacctagcgcactaacatcgatataatctctctaaattttgcaggccttctccattgtaaaggactaacttaacctgaaaaaatg

SEQ ID NO: 103343 - DNA, 95 bp, Heterodera glycines
ttttttatttattataaattcgttggcattttttatatatatatatatatatataaatacaattagatttcttttacagattctttaaaaaaatg

SEQ ID NO: 103344 - DNA, 223 bp, Heterodera glycines
ttcttttgtgaacatgtctgtccaatcgaagctagtggtcattaattatcccttgggaattctttttgtgcatttctgaccgagtcaaaaccaatggaatggtcattaataaccccttggacgcattttgactgtataatgcccacggaagtgtcggtaatataccactggaaatagaggtcaagctgtgagtcaatgattaattgtgacagttgtgcctatg

SEQ ID NO: 103345 - DNA, 432 bp, Heterodera glycines
aattacataatgatcagaagaaatttttgggaaaacccagtgaaatggaagaagtcctgaaacagaagagaaaggtggattaagggaaatggggaaataatgaagatttattttataaaaaaacaataataaataattttctaaaaatttagaattttttgtagcttaaaatcaatttttattttaaggtgcttttaaatttcgaagaaaattgttgggacactaacgcttgtagcgacgacctcgaaatcattggcaacgatagtttaactgtccattataaaggaattttttctggtaattcacctaaagtatttataaaaataacttttcttcaaaggttgtgggcattccgtcttcgcaaaacttccgattttgcagaatgattcttcgtccgacatttgttactatgaaatttcaattaaaaatatg

SEQ ID NO: 103346 - DNA, 757 bp, Heterodera glycines
tagtcttttgaaaggaacgcgaaagtgccgggggcaataaaagacatgttggcaatggaaagtggtcgaaactgacaaacaatgagaattgaattggggatggttctgctgctgacaaaattgaaagcggacgaaagtggcaaatgaagtaaacttgcggatggtgcggctgctgactccacccactggcatgccgtgctgcagtgccgcggtggcagataaagatgattgatggaaaaatttgaatatttgtgggcaagcgccccgagaggcaaagaatggccccgaccccccgcctcaaccgaaatggaattgaaatgaagtcgcttcggcgttcccttctttatatgattgacagttcccgtgtataaaaactgcggtaaagtggccgcaaatatttttgcatctccgcagcgctttaaattttctcgcccaagaactttgattgacagattgtgaacataaaaactattttgaccttggagcgcggatggcaccatttttggtgcgccccgcacaaaaatttcgcaacaaacgaaaattaaaaaaacgcaattgaataatcttatctgatcaaaatatgcggggagcgaatcgcggtaggggggtcagatgaaagggagggtggggggatcttgggaccaaatttgggccggaatttttcaggggggtggtgggttttggtaagggaaggggggggggaggggattttggtaagggaaggggggggggggttttggaacgggaaggggcgatg

SEQ ID NO: 103347 - DNA, 133 bp, Heterodera glycines
tgttttccggacgttatcgagaagtcgccgatcaacttttttctttgcctcatctacctgtttggagctgctggcactgcgactgcgggattttacctgtttttgagggagaaacggattcgtcgcaggaatg

SEQ ID NO: 103348 - DNA, 118 bp, Heterodera glycines
taagataaataaacaaaatgccaaatgtgccctttttagtgtgccccacccgtactcagttggcccctctcagccgtccaccgcccccgccggcgtccgtctgcggccccaagcgatg

SEQ ID NO: 103349 - DNA, 189 bp, Heterodera glycines
tctgaaataattttgttaattagaaaattatttttaaaaatttttaaatgaaaatattttatttctgaaaaatcaaatggacctgaacataatgggctatcaatttcctcaatttgctcatcggaatcttaatcaaaatcctcaaagttttcgccatcaatttcatcaaaatttgcgcaatcgtcaatg

SEQ ID NO: 103350 - DNA, 397 bp, Heterodera glycines
tttatcaaagtataaaatattatttaattaataattaccaatttgtagtattttccctttaaaaatgggaaatgccacaatatcttttcattattctccagcctacgaaaaataaattgccgtttctatgacaggtgaacacgacgaggaccgatttggcacagcaagtcatttgcccaattgcttgtgttgagtaaaaaatgcagctgtcatttgctcacagaccattcattcatttgttttcgaaaagctctatttacaaataaaattaaaaaaatagaaaaataaaatatattttggtgtattattaaattaaatttaactatcgtctccttctaattatttttaaaaatgttttaagccattttccattcgcaatattttccttttccaaatg

SEQ ID NO: 103351 - DNA, 136 bp, Heterodera glycines
caaaaaaaaaattgggtttaacgaaaaccaatgttcacggaggaccaaattaagtgaattttgtatggtacaagagaatgatggtcttggccggatcactgatctcatttcttgatgatgatgctgtgatgtcatg

SEQ ID NO: 103352 - DNA, 485 bp, Heterodera glycines
  unsure (1)..(485): unsure at all n locations
gtcaattaagtgattatgcgtgacaggggangggaatgtcagtgctacgctcagacataattgtttatttttttttaatcttcattagatttggattatgggataataaaaatgttttattttgcgttatttgttaaacaatatttttatgtcatttttcactattagctaacaatcatatggcgctgatcaaattaacctaacaaatgagcgcatttcattcatatttattattatttttttacgaaaatggtgaatagtgccaataaaatgttggcttttttttgttaaatctgctgattatctatccagtatcttgtttaatcacgtaacgccaaaaaaagagtgcataactgatctgcatttgaacatttttttaacttgtttctgttccattgtgtgctgtgcgtgtcattttatttatgttataataaataataattaaaataaatataataaaataatttaaaatatatctaaaaatg

SEQ ID NO: 103353 - DNA, 196 bp, Heterodera glycines
aaattaccatgataaaagcaacccatccactcgatggcaagaggacgaagaggcgggtggcggtgccaaagcccatcaacgcggtatcccgtgtcttcaatgtgcgcctccccgacggaccagctcgcgcattgcacttgcgccccggggtgttccagctcgaagaagcggatgtaccgctgagactcagccgatg

SEQ ID NO: 103354 - DNA, 681 bp, Heterodera glycines
tttctttagtccgttcgttcaccaattcaaatggctcaaattccattaaatcaaaaagttcaagttgaattttgtagcaggcagaagtggtggcacggagaaatggctaaacaattgggaatcgaaatcaaatgacaattaatccaaatattttaatttaaatcataaaaatgattagtcccgttgaccgctttgaaattgtcgatccattcgtagatgttttctgatccgtaatttctatatatcaatcgcttgggttggccatcttttgtcggagtgtgcaaccatttggacagcgcttggccagcagttggaattgcatttggatcatcattcccatcggggtcaccagattgtattgaagtcaactggttgagatcagtgagaattgtcggcgaagtgtggcgacgcaaattgtccaaatgttccccgtcgggaaagtccaattggcggacgtttgtcacgaaaatgggccaaatttcacggacaaaaacatcccaaatcggctgggcaacaatgtcaggtgaaagagaaaccaacaaatacaattcggtgccaattttgtcaaaaatttgctaattggcacggagaaaagcgagcacaaaatagtcaatgtacctgaaagtgacaaataaattgttgttttttttgtacatagaatatttgaatttacaaaatatg

SEQ ID NO: 103355 - DNA, 526 bp, Heterodera glycines
acattgtcaaaatatccaaataattacaaaaaaaataaataaaattaaattgaaaaaaacaattaaaaatggattaaattaaattaacttttgttttcatatttagaactgcttctgatttaaataaaacatgtaattaattactggtagaaattcaaattcttttcttttcctctgctgccttagattttgcgaaattaaaattaattaattaaattaattaaataatatttttacttttaattcgacagaaattatttttgtattcccaaaagattctctttccctttggctgctgccgctgtgttattttccgctttttgtttaccatttcgcgacgtaaacaccacactccccagtgaatatttttattatttgttatttttgcttttgcttttgcccctttttcccccggcttaaaattcgttcgtttcgctttaattttttgattttgatttttcaatttttcgtcataattcggcaatttgtcacttttggttagcttttaatattcaattttccgatg

SEQ ID NO: 103356 - DNA, 1003 bp, Heterodera glycines
ttaaaattctcaaaaattttcccggcggctcctatcggcaccgccggacgcccattttaccatatttttgaaaaatggagaccaaaatggcaaaaaatgttaattttttggtgaaaaacggcaaaaaaatttgtcaaatacaccccatattcggggtttcaaaaaacgaaaaatacaccaattattttttatttaattcttatttttttaacaaaacatttgtctaatcttccgtgtgccggattcatgatcagcgacctcgaaacccccatgaacttaatattttttatcacttagcattttctaatgacttattttccactgactcattttccgggcgccaatcttcatgatgccaaatttttcattgtccattttcggtgccctcaacaaaaaaatgttaccaactgatttgagtccaatttgcataatttcctttttttcttctttgatttatgtaattcgtaaaaagcttttttcttatttttctaaattgtacaaaatgaatttccaatatttttgtcatgcacataaaatcaatcccttcaatgttaatgatgcttttccaattcgcgtggctttggctgtccacccaccaaatccctccccaattcatttgacttttctaattaaatatttctattttcagtcattttcacattttgctttttaatattttcctttctttttttttgctatgctttataatttgctgcgcctttttctgcctttttttgtcgtttttctgtcgtttttgcctcctctaatattggggtaaactccgactcagaaaggccttcctggtaagtgcagtgcactaatcaaataatcacaaatgatcatttgccatctgccaatggcactgattaacataaaatttgtttatttaactgcttcttgtgctctcattaatgcacctataccaaagcattttcccgagagcacagattagaatttgaaggttgacggcttttggggaagggataggctggaacaatgaatg

SEQ ID NO: 103357 - DNA, 116 bp, Heterodera glycines
ttttcccttcttcggttttttgcgtccctctgtatttgcacacacacacatatatatataaatatgtagataaaaaatttcttcctccattctactaaacccccacccccaaaatg

SEQ ID NO: 103358 - DNA, 635 bp, Heterodera glycines
ttctcgtgaataagtctcctaatcagaccttgttcaaaaaaggggcggaaaaaagtcttgactcaaacttgaaaaactatttaatagtttacccaaaaatctgaaaaaatcctatttatataacttttgatattgatcaaaaaagtctcttatgccaacttgatcagatcactcctttatggtgatcgagacaccaaaaaatacattgaaaatcgggaaaattttcgaaaaaattcctagggagttagtaaaatttcccgggaatttttgaataggttcattggaaagagcacaaaattatctgccgaattaaatatacataaacaagaaataatcagctaaatttccagtcgaaatttaaaattctacaaattttatcatcttgagtcaagacttttttccgccactgtatgcttcttaaatccactctatgagaaaattaaaaagatcaatattcccattccaacacttatttcatcatcatatttcccttttctctattttcatttttctttttgtgaattttttattgaaattagacataaatgaatttattttgacaaaaattctccaaatggtaaaatggccaaactaataatgtaaaagcagtaatttccattgtacttttagcgatg

SEQ ID NO: 103359 - DNA, 264 bp, Heterodera glycines
  unsure (1)..(264): unsure at all n locations
aaaaaagcgtttccngcagctccgagtgttcgaatgcacgacnccaatggttccaccgcaaattaggcccgtccattcaaagttctgagcggaaaaaaaagtaaggacggattacaatcacaaaaatttgattggttatttaattttagaaattacgaaggcaaacaaaggaggaaaagtaagataaaatgaataaattgcataatttaacattttaattcaaaaacaggttataatgaagagaagaaaaggttagctaaaatg

SEQ ID NO: 103360 - DNA, 61 bp, Heterodera glycines
ttttattttatttttagattttcatatgttttttggcgttcgttacatcattttgctgatg

SEQ ID NO: 103361 - DNA, 254 bp, Heterodera glycines
ttgccttcgcttctcccccccccccaatttttttttgccttttccgtcagtttctgtcaatgtcccgcatcctttcgcttctccttttgttgcctttgtctatggcaatgatttgttacaattcacaggcggtcaatccgagcagagaaagcatttgtgagccggaagaggtccaagagaaaagcgatgggaagggaagggaagggaagggaagggaagggaagggaagggcccggaagagctagaaagggatg

SEQ ID NO: 103362 - DNA, 346 bp, Heterodera glycines
ttgttcaacctttgaaatttgttaaatcttttataatataattattatttttatattatacaaaataaaaaaagtaataaataatggaaaagcaaattcaggcaaaaattaagcaacattttcaattcttcataataattacacgaatctgaatcgatttccacaatcaatataacaattttttaatttaattattttcgttttaatttatgaaatatacaattaactcttttctttattatcaatttttgggattcacaaatttaaaagttggtaacaaaattaaaatattaaataaatagaataaaagataaaatatcttttttaaattttattatccaaaatg

SEQ ID NO: 103363 - DNA, 626 bp, Heterodera glycines
gcaatttcgagcatatttcatttttttacatatttagagatttgagaaatttatagaaattttttatgaaaaataaaaatttttatgaaatgtatccctaaaaatatgaaaaaaattaagcttaaaatactacaaggtgattctaagcctacttaggtcattttatggcatttttgcctatttcaccgtttgcaagaattttttttccaaaaaatgatcaattttaattacatattttcgtaggatttttgtatatatttatatattccggggttttttcttatccatattttgtaaattttattacataacattcccatccctattaataatagataacgccgcgtcgttcatttttaaaattaaactatttcttcatattttagaccaaattttaacttcttttttttggaaattttttaaagccgtcatcataagaaacacaggctaaacccaattttataaggctaaaatcaattttacatattatttaaaaaaagaataagagtagtccctgtttaattgtatttgttgtataaatatgttttttaatttttcgattcctttttttcattaaaaatatttttcctaccaatataaataaattatttgaatttaagaaaatg

SEQ ID NO: 103364 - DNA, 109 bp, Heterodera glycines
ttttcatttcctgtttattaaataaaaattcaaatttgaatttttagaaaaatataaaacttgccttaatttttttttccaatgtatttattttaatttcctcaaaatg

SEQ ID NO: 103365 - DNA, 1003 bp, Heterodera glycines
caaaaaacagtgaaaaagaaaaattatttaattttaaatacatttagatattatacaaatttaaaaatatttggaatttttagctccaagactccggttagcacaacattgactacaaagtacaactcatacatctgcgtggacagccgtgccaaaaaacaaacgacaatccccggcggacaacggtgagatagaaaaaataaggagaattttaacaatttttttggcgtacataaaatcgctgagtctaaaatgttttttaaatttttattttattttttcaaatgttttctttttaacattttgctttttttacttttaaatttgtccttttacaccccaaaaggctgaaattatgccaatattcgtcagcatttcgtactttttttcattatttgttcttttacacacctaaaggctgaaattatgccaatattcgtcagcatttcgttcttttttttcattatttgtacttttacatcccctaaaggctgaattatgccaatcttcgccaccatttcgacttttttttttcgcaatttcattttacaccccctaaaggctgaaattatgccgatattcgtcaccattggttgaaattatgccaatattcacagcattttctactttttttttcactatttgtccttttacaaacccctaaaggttcaaattatgccaaaattcgtcaccatttcgaactttttttttcaatatttttattgccacccctcttaaaggctaaaattttgccaatgtttgccgttttttttattttacacgcccaaaaggttgaaattatgccaatatttgatactattggtggtttgatcctaaacctattgcaagggtgcaggccatctgagcgccccctaaaggctgaaattatgccaatattcgtcaccatttcgaacaatttgttattttaaaccttctaaagctgattgtcttttttctaatccaaattttagacgtttatttttgcacaaaatctaaaagaatg

SEQ ID NO: 103366 - DNA, 136 bp, Heterodera glycines
tcctccaaatgttcgacctgtaccgtcttctgttcccccccacgacccgaggctctgctccttcttggactcgttctaaatccagcccgaacagttcaaccgggactggttctgctcattgctgagcaaagacatg

SEQ ID NO: 103367 - DNA, 60 bp, Heterodera glycines
tgtcataaatcaaaaacggatgaagaaaaatttgaaattgtacaaaaatttaatgaaatg

SEQ ID NO: 103368 - DNA, 348 bp, Heterodera glycines
attaaattaatccctttaaactaattgtttttcatatttgtcagagagtcggcgtcgtttgcgcgaatgcattcgtttggacgccgtcggctgttgccttcgtgcgttacgttcgttgctctctggacccaacaatgaaatgaatcgaattgccgaagacaccttggcacacacaaattttgtgcttctccgcaaaaggtgactccgtttacagtggccgaaggcggtgttgcgacaatgaaaagcctcgactgtttttttccacttcagatcgaaagttcctcctaaaggtccgtctgagtggggtcgtaccaatgttcgtctctcgtcttccgccgtctgaaaatg

SEQ ID NO: 103369 - DNA, 1003 bp, Heterodera glycines
tttaggctaaaaaatctcgaaaatagctaaatagggttgaaaaatcacttttgaagaagaaaaaaataccaaataaagctaaaatgttattaatattgtcgagaaaatacccaaaaaaaggtcattaaaaaaatttcggttcatagagatcaaacgggccgctgtaatagaggggccgctttaatagaggatttttttgaaaatgcccaattatgcaaaatatgcatatggtatcatcgtagaagcttcaaaccaagctaataacattttttgtacgtttaaggccttttatataatccataaaaaaaagcatatgcatataatacccaaccctatttatcactgagtttacactatgcaatcatttttaaaaagcggaagactttctgtcaggggccgttctgttaaagggttttaaaaactcctgaaatttattttatcatttaaaatgggtttgcatattccatataatttagttacatttgcaatgacgtttggttcgatgtgtttgagttccttagccgtgccgaactcggtaatttaatggcacagatcagcgaacggttcgatgcattggtggacaatcactattcgacgattaaatggtcggaacaattattattattttggaatttttcaacttttacatacctattctcaatttttgaggattttttaatgaatttttgaaaatgtacattaaaatcgttttttccaaaaaatgacttagaaaccaatttttttaaatagatataatcttattctaagcctaattaggtcatttttatgacagtgcttatccgtgcttttctaaaaattttcgtcaaaaaaataatatacaaaaaaacagaacccccggggctcgaactcagtaggtacggtgtttggggatttttgtacatattttttattcgagattttcttattttgagattttttagatatattttacatccctaagaataataattattaaaaacaattcatttaatgcttaaggatg

SEQ ID NO: 103370 - DNA, 306 bp, Heterodera glycines
ataaagattagtaaagaatatccgatttcgatcagaaaaatttccaatgagaacaaattacctaataaagataaaaaaatatttcgaaattaatgaatggaataggaaaattattatttatttatctaatttgtaagtgaaaaattaaattcactgcttagaataacgtggcaattttattattgacaaagatttgttaaaaaagagaatataaataccaagtgaaataataatattaaaaagctgaataaaaaattaaataaattcatttaatgcaataaattcgatttctcaaaagaaaagatg

SEQ ID NO: 103371 - DNA, 367 bp, Heterodera glycines
cccccccccccaacttagcttcacccaaaatttccaaaaaaattttcactaaaatttcgaaaaaatacacaatttgttgatgaaaatctgctaaagatggctgaaaatcgcaaaatttgtcattttttggacaaaattcgttaacaaatcggattataaattgcaaaaaggggaggtaccccttattatggggttttcgggctcgctgatcacacgaatatgacatccatttcgaccgatttcggacccgaactcgaacaaaaagtcgagaattcaaatttttcaaaattctcattgaccttaaattgattaaaacagggtaaatttagaacgaatgattgtgtatatattagtcgggtgaactatg

SEQ ID NO: 103372 - DNA, 71 bp, Heterodera glycines
ataaagggatcggaattcaattaggaaatgttgaatttaaacggcggataattacaaattaatgcaaaatg

SEQ ID NO: 103373 - DNA, 52 bp, Heterodera glycines
ttctgtttaaaatgttttgataagcctaaaaaagcacttaaaggtacaaatg

SEQ ID NO: 103374 - DNA, 127 bp, Heterodera glycines
gtaaaggtccttaaaaagtgctaagaaactattcctagaaataaatgggataattgaaagccaaaatttgttcaaaaattttttttttaaatttattaatttattttttgacattgttaaaagaatg

SEQ ID NO: 103375 - DNA, 1003 bp, Heterodera glycines
attggtcaatttttctttatttttaagatttttacttaattaatcattttttcatttttcttcgattatgattttaaaaaaataacaaaattatcaatttttagcctaaaatttccggtgcaccccaaaacgtcgtcggccgaaacgtcgtcggaagactttttgaaccataactttgttcactgtcaatcaaattaagaattgttggtgttgttcgatagctctatgtgtttattattaatttgcaaaatctcaaaaagtttggttaaggttcaaaaaagttatggccagaaggaactcaaaaacccagtaattcgaacttttttttgctctgatttttttgtgcataaataaaaatttttgaaaatttgcaggctaatagcatttttcgaatgctttcgaataataccaagaatgtttaatttggttgagaaagaaaaaagttatggtcgaaaaattcgttcgacgacgtttctgctgacgacgttttgtcctactccggccgcgtcgcgcgtttcggggccattctttttttgtttaattaagacaatttgagtgattttcaatacaattttttaaatgcatttggtgcttggttggcgctggaaaagcgttaccgaattttttttttcctaaaattgaattcgttaaatttaagctatataaatcgacgattgggatttttataatttcgcgaaatttcggtgccaaaagtgccaccgatgagaattttgcatttatgaaatttgttgagaattatctaattttttaagatttaaatttccctgctaactacgactccctccccttttcaaaaaaaaaaataattgaaaatttaacaaaattgtctattctagtagtgccactgccgaaaaatgccagcataaacccttttttccgatttcggctccccattttccatccgtctatttatatatatataatttttttatttccgttacaacaggtgttcggcggagcgtcgccctcctccgtgtcgatg

SEQ ID NO: 103376 - DNA, 298 bp, Heterodera glycines
attaggaaaaattgtataaaatgaaaatttacttcgtaattttactatgattttgaaacctaagaaaaattatattttacatttttgacgaaactttccgaactctgtctattgtgaaaatattaggctaaactatgaatggttcgtgctacgttattttaatagttcaattcatagggctgccaattttatttaaataaattttttcctggattcattatggtacaaatagaagaaaaacaatcgttgcgccaggaatctatttaaaaagtgacttttttgtgtttgacaaaaaatg

SEQ ID NO: 103377 - DNA, 1003 bp, Heterodera glycines
acagcaatatgtttcggattacaatgaagagattatccgcaaagtttgtattaagcgagccattcattttttaacgattaaaatagaaagtaaatgtttacctgtttttttctcaaaataagcaacagaaaaatgttaattctaagtagtgatgttcgagagtctcgactcgagaaaagtctcggttttttttggtctcgagtctcgggttttcagtctcggtctttgagactttcgagaccgagacttttttacacccctaatgatcggctttttgtttagaaataaatatacttttggtatatttttgcttcgttaccttaatagtgtgcgtggctcagtgggttgtgttcttggtcatgtcttcattttagcgttggatcagtacccctccaagtatttaatttttcttctaatttttcaaaattattccttttaaagtgaatctaatcaaattaaaatcataaaatattgtcatttttagtactaaatttgttcacaaattgcactcaaattttaataccctttatttttttaaattgacacaaaaactgcgaaaaaatcaaactaattttttgttttgtgcttttttgaaatgataaatattgtaccaaattgaatcaaaataaaaaaaaaccaaaaattagttaagaatagagtcaaaaaaaatttttaaacgatttttaagcgaataggaaaattttttgaaaaaagtctcgggtctcggggttttcagtctcggtctcggggtcgggtctcggggtcaagtctcggtctcgagtctcgggaaattttcggtctcgaacatcactaattctaagaaatgaacccaaactaaagggcattgtagccatttgaattgatgaacgaacgactaatgagaagctgacactgattaaggatgaatatggagacgggctgttgaagcgatgcccaattagtgaaaaggcggcgacggatcaatgggaaaatgaaaaaaattgggacgacaatttgaacaatg

SEQ ID NO: 103378 - DNA, 561 bp, Heterodera glycines
tgccgaccgcatgggctggttgcacaggtgccaatgtgatgttggcaaatcgggcctgtgaaatgtgcaatttttagtaaaattcaatttctttggcaaattttccatttttaccagggtttggcgttaaaatttaatttcacacttaaattgataaatttgaagcccaaaaattggtgtaaaagcccgaccgaaacatggaaaaagaagctaaaaatcttttaaaaatcaaataaaaaacggcaattttccaagttttcatcatttttagggggtctattgaacagtcttccaaataaaaattttagacaaaaattccaatttaatgaatttatttttgtgcaccagatccaatttctgggcgatattttactccgatttaattccaatttaagacgaactttttttttgcaccggggaatttcggattttatgaaaaaacttagtcataggccttccggactctctttttttttacactcgaaagctgattgcatctccagaaattgacaaatgtccccaacccgaatatgccgcaaaaaatgttaccaatgaaaaatg

SEQ ID NO: 103379 - DNA, 107 bp, Heterodera glycines
ttttttttgactagtctctgaatggggttatcccagttttagtatcctttttgaaaaacaacaattttaataactgatacggtagcccaacatccattgccccaatg

SEQ ID NO: 103380 - DNA, 286 bp, Heterodera glycines
acggtgctgagtcgttatataaaaaccatcaaatggaaattttcaacaaaaagctgcccataacttttgtcatagtcaaccaaattaaacattcttagtatcattcgatagccctaactttctctattagttcaactaaattccaaaaaatttggtcaaggttgagcaaagttatggcctaaagtacccaaggaaccgggttttcgaacatttttgggcataactttttttttcgagttaaaattcctttaaaatgaatttcgaatttttcacttcgcttaaaatg

SEQ ID NO: 103381 - DNA, 211 bp, Heterodera glycines
atttccttcttatatacgcgttgagaggaatttctttattttttgttagggtgttttttggtcaaaaatgggtatataaaagccaattttttgcctcctctcaacataatttgaactttcatccaaaaataatgcctttcttctccgcttccttcgccgtcctttttcccatccaacccatccaaattatttgtgttgcatttgccgtatg

SEQ ID NO: 103382 - DNA, 658 bp, Heterodera glycines
cccggatttttatgtttttacatattttttttgcggcttagttatggcgagagaagcccaaaaatagcattatctccgaacaatttttgatttagagcgacttataaaaacataaaaacacatattttggcgttttgtcacataaaatatgttagcacatattttggggtttggcacatattttgcacatattttggcatttttgagaaaaattgcaataaaaatacaagaaaattgaaaaatacaccccctaaaaatcgacttttttcctaattattaacataattttcaaattaaaaaattttttcttcgattgtagaaactaatgaaatctcgaattcattaattcgtcattggatttcgaagttctctgctggaactttcaatttatagaaatgatttatcaaaaaaagacaattttaccccaaacacttcgaaatgtatttgatttgcgttgtatgggctaaaaatgataaagaatgagatttttgggaatttttatgcaaaaacacacttattttttcaatttttaacacatattttagcacatattttggcatttttgggggtttttagcacatatttcagcattttttagcacatattttattacatatttcaggatttttagcacataaaaatccgggccctaatgatg

SEQ ID NO: 103383 - DNA, 94 bp, Heterodera glycines
ggtgtgtattgagagaggggagtagtaggcgttcaaggattttggcgattggagagagaagagagatcggacggaagttggcagggttggtatg

SEQ ID NO: 103384 - DNA, 374 bp, Heterodera glycines
  unsure (1)..(374): unsure at all n locations
tataattaaatatctctnntaattaaaactatgaaaatttctaaatagtaaaaaacattcaggatttattaaaatattgacaaaaaaaatttgtgccaaaatatttagcaaaatattgaggaaaagttaaaatttactgtattttatgaaagctcctaaaatatgaaataaaaaaatgaataaatatttttattgaatttcagttaattaaaaaaataaattaatttttaataaaattgatcaataaatatttttaaattattaaaattaattaaaattggattaatttgtcaataaatatttttagaattatttcaattatataataataataataattaattttcaattataattaattgatcagagagatg

SEQ ID NO: 103385 - DNA, 120 bp, Heterodera glycines
  unsure (1)..(120): unsure at all n locations
aattttaaatntaattcaaattattaaatatttattcattttatccccgtgcatcaattttttgactctttaattacttaaaatccattattcaattttaatcaaattcagttgcccatg

SEQ ID NO: 103386 - DNA, 315 bp, Heterodera glycines
aaaaaaaattttggatataaaattttgggccatactttaattctaactttgattagaattatgagatggcccttcgctgcgctttgctcatcaaacaaaaacggttaaaaaccgttatgagtccattctgaacatggccgaaattcactttcaaatggcaaaagcattcatacaaaaccgacaagaggaagaggtaaccgaacgaacagtcattttctgaagtcaaagcaaatttcaaatttaaacccttaggcattgcgttgcctcgaggaagtgccacaaacggagataacgcccaaaatattgttcacaatg

SEQ ID NO: 103387 - DNA, 1003 bp, Heterodera glycines
aaagccttcacttttcataaaaattttggaaaatatgaaaaaaagtattgtaaaagttatttaaaatcatcaaacataatttaaaaaaattgtttaggttaaaataaaaataatgtgacttttgaattttttttaataaaatacgtctcacatgaaagaatttcatttaaaaattttatcaattgatgtgttaatccattcattaatttaaattattatttctccaatagatttttcgatcattaataaataattataacgattttaatcaaagtaaattttaatggaacttcctgtattaaattatctttttgaactttaagtagtcagtcaattcataatcaattttgtaaaatctttattaaatgcttcataaaatcttaaacatttataaagcatcaaaaattaaacattttctattttattattttataaattgacggatgctaaatctttattaacgtgaataaatgaattaatatgaatatctaatcactttattacacaaattagatatttttgagaatatatatatgatgagtcaatgaatgtttggatgacattttcttgatattggtagtaacatttaacagaatgacatttttgttcccatacacacaaattttttcttaacctttttcatcttttaaggccaatgcaaatgaaatttgctatgcacaattacaatattcctttaatttatttattaataatttcaaatatgaattaattatttggaagtatctcggaattgatattagtttagcagtcattcataatttgtcagatcttgtttttaggtcaagggcaaaaaaggaaaattaaagcaaataccatcgcagattcaagagtcaatcaaaagtgtaattattcaattcgtaaatttttttaacctaacaaattgcatgtcttaatatccatcttttttgaataaatttgtatatgggatttaaaaaaatgatttataaaataataataattatagatttttgtttcattaatg

SEQ ID NO: 103388 - DNA, 71 bp, Heterodera glycines
ggtggggaaaggcacaaaaaaaagaaacgcgcgacatttgaggacgaactcacatttcatttggagaaatg

SEQ ID NO: 103389 - DNA, 337 bp, Heterodera glycines
ttcgaactgctcgtcgcactgtggcaagtgttcgctcggaatttcctctgtggcgaatatttaattcggcaaattgattttttcgaagcatcaaaattaaaatagaagaaaataaagcggaagcgaaatctagaaactggtaaaaaaaaaaatttacgggagcgggagtccgaaactttccgggaacggaactggaactcccgtaaaaaatgctataaatttttaacggtagacccggcgggagtaattcaaatttaatgaaacaaaaaaaaattccattctcgagtgtttcaaattagtggaaatcaaattttctaaacttggtattttccggatg

SEQ ID NO: 103390 - DNA, 287 bp, Heterodera glycines
ttttgtgagacaaaatgccaatttatttttccaattttaaaacatttaaaaatgcctttatcctgaattcggattagctaatgtgcttgccatgacaaaatatttggccaaggcttaaatattctttcccagaattttacttttactatttttactttaatattacacactgagtaccgtaatttatctaccgtatttcaatataaataaataccgtaatgaaaatctatgcgtaaaaatttttgttaagcgaatatggcctcatacagcggttcttgaggccgatg

SEQ ID NO: 103391 - DNA, 53 bp, Heterodera glycines
  unsure (1)..(53): unsure at all n locations
agtccncgggtttgtaacntcggctgaaacttgtcgccgcttacctaaaaatg

SEQ ID NO: 103392 - DNA, 616 bp, Heterodera glycines
ttatttttgttgagctttttctttgcgtttttttttagtcgttaattgtagtaatttgttttaataatgattcgtggtaattgcggatatttgtgtgctgtggaataatcttgtttgtgttttaattgtgcagtcaattgcatttattgcgaattgactgagtcggcataattggaaagaagccgaacgaattggtcaaagtccctaataataatattgtccccaatctctcctgtcctaattaaagactgttcccgtgcccctgccctaattaatctaaggcaaataagcagcgaacagcaccgaacggcgagaagtttttactatttggcgctcctggacagaacacaaggtaacaacgacatcggttcaaatttttggaggatttcggcattttatcgatctctgggggagacgataaacttttcgacttttgatattgttctctgggggagacaatcaacatcaacaatcgttctctgggggagacgaaacaaaaacgcttaaaaagaacaaacaaaaaccaattgtttgttaagttctctgggggagacaaattcggaaatttttcgacactcaagtcacctggggggtgcaaatagtcgattttgaaatg

SEQ ID NO: 103393 - DNA, 173 bp, Heterodera glycines
tgttgtacaaattgatctgccattgttgttgatgatgattttgcaagactgatttgattgtgtgagaaaatctcggcttaaatagctttcaaaagtgggcgtggcctaattttccggggagtataaaagccccggcaatttgtcagctatgtctcatttgttctgctacaatg

SEQ ID NO: 103394 - DNA, 380 bp, Heterodera glycines
tttcaggatccgaaaaaatcatcataaaaaaatttcaggattgagaaaataaaacgctaaaaggtttgagattaaaatttgcaaaagttaaattgaatttcctccacctgtcactttggtgacaggtggatgattgatgaccttcccgcggcgctgcgcggcgcgggaaaaaaacacccgcaacaatttgggaaatcggatttggtcaggcggcaacttcaaagtggtccaataggttttggttttgaaacaccccccatcgtggattttttgatggggcggcaacttcaaagggctgcacccctcccataggcacgggctcgtgcgggaaacacccgcaaccaacccgcaaccttttgacgctatatactactgtaatg

SEQ ID NO: 103395 - DNA, 172 bp, Heterodera glycines
attgttacttcccctgatcggtcacacggggttcatttatgagcgcccatctcgccaaaattatcgttataaaatgggcgtggcacctggcccgacttttttgcgtataaatacgggctcaccgggtggcatttttcatttggcgtcccttttcaaattcacaattcctatg

SEQ ID NO: 103396 - DNA, 1003 bp, Heterodera glycines
gttacggtttgctttttaaatggtggggctataacttaccgtattttctttttatccccccggggggattatttttcaacctcctcagaaagggggggggataattagacacggggggataaatggagaaggggggattatttttcgacagatttatttgggtcggggtcgttttggcgccgacgttttggcgccagcgcaagttttttgattataactttttttattgttaaccaaatttaacattcttggtatcattcgaaagcttaacgtgtttagaagctatttctaagcaattgtttcgtgattagacaattatcaaaaaagttataacctgaaataacaaaaaaaccaaaattttggaagttttttcttaataacttttttacaagctaaaaattttttttttttttgtaaggctaatagagcttatgaagggctttcgaatgataccaagcttgttagatttggtcaacaatgaaaaaagttaatcaaaaaactcgcgctggcgccaaaacgtgggcgccaaaacgacccagtcccctttatacccctgtaaattcaggcaaaatgatcgaaaagttaaaaattgaaaagcaaacgattgccaaaattctctataaaagggaccattttttaaaaaattctctcattttaatttctcccaacaaacgcctttctctatttttgaattctcttcagctgctgctccattctattttttaattcttacgctaaagcgtcgttatggttttcattgctcaaaaatgtctaaatttttgtttttcattccaccaaaaaatgttttggttatgtttttcaaaacccggcaaaatccatttgaaaaatttggacccactgactcagcgtttcttgatccggcagaggttacaaaaaccggactcgccaaccctgcttcaaaccaacttccccctttccttttttcctgacaaattttcaaataaaattaaattaatttgcttttcttttttaagcaaaaatg

SEQ ID NO: 103397 - DNA, 1003 bp, Heterodera glycines
tcggacgtttcgccaaccgggcgttgtgccaactagtttaaaaaggcgttaagttatattttcatgaattagagactaaaatgaatgaatcattggaaaataaaaaatatgaaatgaattgcaattaattcacaaagaaatgattgaaaaggagtttaaaagagaagttttcaccaaattatcattctttgcattttattgaggcaagctttttgaatttctattcgtctatcaaaactaaaaataagagttctgcaaaagtcaaaaagtcaccgcaagctggaaatcggacgagcagaacacctccagcagtaaagcactaaagtcggtaatactgcagaattgcggtcccgacgaaaaataaataaagttttggtttttgtttctactaggataaaaaatgtgctgattacgacgaacccgtgctcagaatttgcaatagcaatgattttgtctatgatttttcatcgagtacttgatttttttcaaaaaattttatgaaaattaaacgggcgtaaaaaattcatacatacatatttcttatagagcttaaaaagagcttttgcatgatctattgaatgtttgaagaagataagtttcaaattttttttttacgattttttgaaaatttaattactggcccttatgacgatggtcagggattcgaatccgcttggctgcggattaattttttacgatactttataaaaaatcatggacaaaaaacactgattttgcaaagctaagctttggttcgtgatcagcactttattattttgacttagtaggctaaacgccgatttttgcttagcaggcgaaatgtcatacagcctagtcgtgccttgagttattgtttcaattctcttcccctaggtcttctcaagaagtacgcaaaatttctgacggatttcaattgtcttttcaccgattgaacctttatttttcggcattttggttttaagtttcaaagtttcactcctccaattcgaaaaaagggaaaatg

SEQ ID NO: 103398 - DNA, 72 bp, Heterodera glycines
  unsure (1)..(72): unsure at all n locations
tttaaaaaaaatcaaanntccgtaagggcatattcttcgaccaaaaagtcctcgcaaaaacgcgatgacatg

SEQ ID NO: 103399 - DNA, 226 bp, Heterodera glycines
tttcctcctcccccgttttatttggcaattttaaggactttttcctcgacatcttcagaacagtcggagaaagcagcttcttggaactgtccaaaaaacttgaccgatttatcagcggagtgcgccgaagagcaaactgcccaaggggcacaggcggacgacgcggccaaaacaacggcggaatgggaagcgaaccagaacaaaatggggcaaaagggaaaaaatg

SEQ ID NO: 103400 - DNA, 104 bp, Heterodera glycines
ttattttttgccaaacagaaggttttcgccgtctggaaaaatatgccccgtccattctccgccacattctcagcgtcgacgatgacaaaagttcgcggaaaatg

SEQ ID NO: 103401 - DNA, 71 bp, Heterodera glycines
atcgaagtggtacgattgattcgatgcgtttgtttctgataatttcgaattgatttcagatcacttcgatg

SEQ ID NO: 103402 - DNA, 675 bp, Heterodera glycines
attattttttaatttattttgctgattttttctttttttgcgttattattaataaatttttgtctgaaaaattttatgtgtaattcttagttaacctttagttttaagtcacaccacctttttgctattattcaaactcttaacgtattcactcggctgattttaaaataattagcttcaaaatacattttcaagtacctgttgaaagtggacaacattggaattatttctgtccttagaggtccctgcgtgcctgcacataagtcccagtatcttgaatgtttgaggtccctgcgtgcctgcacacacacttccattggcgtctgttttaacctcttttcttctatgcatagagagcacaaacagtttaaaaacacacacctttttaatcgtgtgtcagcacgatctgttataacagtaaggttttgtatcaatttagtgtgcgttttataacacaatgtttttataatttttttattttccaatcctataagattttttcatctgtagttgttagcttctaactttattttattatgatttgaagtttatttatatttaataatacttttataaaacatatttatttgttgtgctttaagtacctcccattatcgaagatttttcatataatctatattttagcagcattatactctttaaataattgcgatg

SEQ ID NO: 103403 - DNA, 871 bp, Heterodera glycines
gtctgacagtaaaatacacaaaaaagataagaaaatgccatagccgacctgcccgattgtgccaaatcaagaaaaaggaaaataaaaagtgcaaatgcggtctaaaaaatcattccgttgcaaattagcttggtttggcatttttaagtgatggctgcacatttgttgagttcataagcgctttttttgccattccctcgcacaagaatgccgttctgaattatggtgcaatcggttcccttcggtgatggcattttcctttatcttcttgtgtattttactgtcggattgtccactgtccgatcaccacctctgtcggattgtcctcaatgtcggaatgtccaggcacgcaagaaaatcacattcattttctcgtgaaggttgaagttgaacaagacaaaaatggcacggcagtctcgcggagacgcgtaaagcgcttttgggcggtattgtgggacatctgttggaatatttgaccttttgtttgtgattttaaattattgttggcattatgttctcatttttgcatttttatttttcttctcattacttaattaattatatgttctgttctcactgctctccgattctaaaatttttgttcttcatctcctccgacgcttttattcgaattgtgtaatttgatttgtttggaattgatattataaagagttttccaaattcccgctccaaaagctaaaggtcccggtcccaattaaaagccacaattcttcgaccaaatccgatcatttccaacacatcggcaaagctgttgtggtggagacagtaaaggcggttgcccccaaactgatcgatagtttcctaaagaaagactgtgccgaactacgttctgattgcaattgcaaagatg

SEQ ID NO: 103404 - DNA, 622 bp, Heterodera glycines
aaaaaagttaaacaggatgaagtaaatgttgttttttacattattaagaaagatgagatagtacgtaaagtgagagaaataaagataaaaagtaaatgtgacagaacgccaattttaaccataattattagggctgggatttttgggaatcggtcgttttggcgccgccgttttggcgacgccgttttggcgccgccgttttggcgacagagtcgttttggcgccgccgttttggcgacagggtcgttttggcgccaaaaaatcagagacgcagaaataagcggcagacaagcgcctcttcaatttggtgcacaattacattccgtgaacccgaacaatgataacgatcacaattaccacattaacccaaatcaaaatcatcatatcatttttgaatttcttcgtggcgtttcgcgcaattatcatatgaacccatgaattttcttatttgtcttctttttgtttgttattgttagggccccgacttttagtgacgaaaaatcccaaaatagttaactaaaatagtgacgaaaaagtgccaaaaaagtgacaaatagtgacataatttttagccaaaaattgtgtaaaattaatttttattcactgatttcagttgcaaatg

SEQ ID NO: 103405 - DNA, 534 bp, Heterodera glycines
aaaattgccaaaatctaaaaaaaatgtacaaaatttgcaatctcatttttaaatttttcagttggcaaccctggcaatgaccaacaagcgatgtaataaaacgccattataatgatataattaaattaattaacaattaattagttaattaagtatcaaataacaatttttcaattaaattaaactcttaaatggggtttgctaaaaatatgccattatttcattctgctgcacagatttggacactttcaatggcattccttcggttgtcgtcggcgccagaaaactgagcgaggaagaacggacggaatgcgcaatttgcctatgccaaatcgatgccggcacaaaagtcaaaccgttgcccatctgtaaggtgtggtgccatttgaattgaacacattaaattaatcattttgtgccgatttagcacatgttccacaacgaatgcattgaaatgtggtaagcaaaagttattaggggaaatatagttaattaattaataaatatgctttaggatcggaggcggtcataatg

SEQ ID NO: 103406 - DNA, 357 bp, Heterodera glycines
  unsure (1)..(357): unsure at all n locations
tggaaaaagcgagttcataatgtcaagcagcagaagttgaaaagccaaaaagaaagaggtaaatctttataaggcttccctttgaaattatcagtgatgagacgtgggcaataaaacagttaaattttgcattagaatgccttaattttgcattcanaattgttttctcttaaaaatatanaaaatttattaagaagaaaaatgtaagtgaattcttatcaaattctgaggaatgatggaagtgtcaaagncaatttgtcggagggaagaggaaaaaatttttgttgaatttggcaccggaaattaaaacaaatttcattcttcaaagcgaaagacagcaaaaattcaaacaaaatg

SEQ ID NO: 103407 - DNA, 561 bp, Heterodera glycines
tttttcattggtaacattttttgcggcatattcgggttggggacatttgtcaatttctggagatgcaatcagctttcgagtgtaaaaaaaaagagagtccggaaggcctatgactaagttttttcataaaatccgaaattccccggtgcaaaaaaaaagttcgtcttaaattggaattaaatcggagtaaaatatcgcccagaaattggatctggtgcacaaaaataaattcattaaattggaatttttgtctaaaatttttatttggaagactgttcaatagaccccctaaaaatgatgaaaacttggaaaattgccgttttttatttgatttttaaaagatttttagcttctttttccatgtttcggtcgggcttttacaccaatttttgggcttcaaatttatcaatttaagtgtgaaattaaattttaacgccaaaccctggtaaaaatggaaaatttgccaaagaaattgaattttactaaaaattgcacatttcacaggcccgatttgccaacatcacattggcacctgtgcaaccagcccatgcggtcggcatg

SEQ ID NO: 103408 - DNA, 246 bp, Heterodera glycines
ggtagggaattcggcggtagggaattgggtcgatccctatttggtgttatgagcaattttgtctgacactggggcgtacccatagtgctgttataaatgacaggttttttccaccttattctttgcaactagcgccgaaaatttctagaaaacaaacaagtccgttaaattttaggaataaatttaattcggaccaaatctaattttcaaactttttacttttaaggctgttccttgtcaattatg

SEQ ID NO: 103409 - DNA, 290 bp, Heterodera glycines
aaaatattaatttttcgaaattaagtcaggcgttacttgaaaatcgaattgatttatcaataaactcagtgttcaccgttgaacagaaatataaagaatttttaaataaagttctgaaattatatgatatttttatacccaataggcctctaaaatcgataataaaacaatcgtatcctcaaaaaataagagacttattttcagagaaattacgtttgcataagcttgtaaaaaaatttcctgaaaaaagtgatctcattttaaattacaaaattatttctagggaaatg

SEQ ID NO: 103410 - DNA, 282 bp, Heterodera glycines
  unsure (1)..(282): unsure at all n locations
ttttattgccgcacaaatcgcctgagggtgagtgccgcncctcagccaaaacggtccctttttgtcgtccgctcacaccttaacgaaaaaagcaccgaacagggtccaacaacaaaaccacacggagaaacgaacgcaatgcgttattaaacccgttttatttcacaataaatacaataaaaaaggcacattttatcatggaaataaattaaaatttgaaaattaaaacaaaaaacaaacaaaaattcacgtgacaatttgaatggctgtcattgtaaaatg

SEQ ID NO: 103411 - DNA, 604 bp, Heterodera glycines
ttttcggggttgctgatcacgaatctgatattcattttgactaatttcaaataccggacccgaactcggacaaaaaaccgaaaattcaaaattatcaaaattcacttttatgttcgtatctttacagaatgaccattttttggttttgaaatggtttttgactaatgaaaacactaagaaacatgttttaagagaaatttttaaaaaatttaaaatttaattctcgaaaaatgttcggggtagggattcggaattggtcgaaatggaagccggattcgttctcagcgcctcaaaacacccctagaaaagtgttaaaaagaaatacaaaaataaagtctcaacttaaaaccgactagaaccctatttattacccattttttctgaaaccaaatgaaactgaaattatagataggtaggtaacctaatagagaattttagagttaccgattatcgaatgtacccgtctttttggatagccttaaagtcgtcatgttattttatagtcgtgtaagactgcagtagatcctccaccccttattaatcagactttttctgcttactgtcacttatcccccttctttaaagcttaatactcattttaatg

SEQ ID NO: 103412 - DNA, 218 bp, Heterodera glycines
agcattagcatgaaagagcgttgctgactttgtatataaaacaaaaagccccattgctttgtataatttccctatatatataaaaaaaaaaagaaagaaaaacttttttaattaatttaagcatttttctcccatttatcagtaatccttaccaaaaaaaaaaattaataataatgagtgctgaaacaccttccaattcggcggacatttcaaaaatg

SEQ ID NO: 103413 - DNA, 1003 bp, Heterodera glycines
acttaaacgatcaattaatctcgaaatttttgcaaatatgctttttaaacgggtgaaaaatttctacataacagcatttagtgcacctggaatggaaaatttatatttttcattcttagaaatgctcgaaaaaattcaaaaactacctaaacttattatgcatgagtatagaaaccaagcattagctatgcaaaaaatagaaattggactcaaagaaataaatatatttaaatgtcaagaagcagagaatttatcggacctttctttttcaaagataaatgaattccgagaacaagtgctaaattatagatttgacacgagaatgttgtataataaaattaagataactgcactaagccatttgtttaaacccgaaaaggaaatatttctctcgccttttagaatttctccagggaaagaacttttttacaacatgttccgtacagaacccaaaaaagaaatttttaattctacattttacaattatatttagcacaacctatcttgcgtaatttgaagatcatttacaaataatcacaccatattcttttttgaaaattttttaatttctctttagaaggaataagtaatttatttaaaaaaattttccttggttatgtgctcccaacagcgataaaaaagaaaaaaacaatcgttccgcctaatgttattccgttgaaaaaatcttacgatttttttatatgccctgaggcattttgcgcaaattaaaaattgaaggacgaaagaatgggctgatgtgaaaaaaataaaaaacatgtttgaggcgcaaaaagaagttgcgttatgggtaatataatgatgaaaaaaaacgttaaaaaagagaatagtgtaaaaaattttcattataaataacggggaataaacataactgactatcacaaaaatggcatctttgagcgtgtcccattgctctgctcacccaaacggttattttttttaatttttataattggtttaataaaataaagatgtttgcacaatg

SEQ ID NO: 103414 - DNA, 239 bp, Heterodera glycines
ggtggccaaattaaattttaaaattaatttattatcgaatattgattggtggctcattaaataaattatctatagaaatctttataatgcattaagttgataattttcgcttttcttttgagagaaattatttttaatttcataaatttgttttatttttttttgttataaatgccttaaaaatcatttttatagtgatttgctgacttttttaaataaaaaataatcgcaaaaatatg

SEQ ID NO: 103415 - DNA, 103 bp, Heterodera glycines
aaaaatgttgtaaaactgttcagtgcccgcaactattgttttggagtatctataataatatattttatactgtaattaaataaatatgttacagtgtgagatg

SEQ ID NO: 103416 - DNA, 457 bp, Heterodera glycines
ttatttttacatgctttcggatgtgaactgtctgacttttcgctgtctccactcctacacaaacacaaaaacaaaacgaaaacaatattcataaaacaaatattgctaataatttcgcaacttttaaaaaaatcattgttttgtttttcatttttttgacctgcaccaccggggaaaaaaactcaaaaaaatagagggaaaaattggcatagatccataaatttggcaaatacctttttaaacaatatggaagtttcagcaaatttttggcaaacgatttttcaaaatttgaaaaggctttcaaaaaatatgtatcaaaaattatggtaaaactaaaattcgtttttttttaatttttatttttatcccttttataaatgcgcctcatttcagagctaattaccgaatacaaaaattttgatcaaatttccgagtgcaattttttttatataaaatg

SEQ ID NO: 103417 - DNA, 1003 bp, Heterodera glycines
acatcaattctcagatgcgtgtggtcaattttgcatttattttttaacacagcgatgctccggaatcctttattgtgaggtcattgaccgtctatataaggttcgcccgatgtccgatatattattaagaattttgtcagtaatgtttaatttaattgttctcctaacgatagtcggtcaactcagtggagaaagggttactattctttctgatacaaaaacgacaaatatctcactcactatgacaaagagttcggtcaatgaaaggttgttcggcttcgatcggtcgagattatgtacgataactaggaatctgatttcatggtggagtgtatcaatccaaaatataaattcaataggaaagagcggaaccattaatatcaaactttaccgggattttagacaattaaagccccgagcatgtttttattacaacgatcatagttatttaatttttcaaaacgaaaagacaaatgaaacttcggtaacaagagggagtcaagaaatagttgtcaggaattttcccggtggcgaccttagatttgatcatatgatggtcgacttttcgtaatcagagacgatcgaatagacgagattgacattagatcaatcgagaatttatggacacatcataatggcaccgaaattattactagaccgatcggatcaataccgtcttcatttaccgatttcctaataattgagggacaaatttatctgattaataaaaataaaatatacaaagatcgatttgactcaaatgagatacttcccaaatatgtgtcagacgcgaatagtgaattctttaattttgtcatgttcaaagaatttgagaaaattaaagatttttgtcaatttttgatttggtagtggtcataatttgtatatctgttctcagaattttgaaattaaagagaaaaggcaaaaattcatcatatagtggtgaagtaatgtatataaggaattgcaacgaagatgagaatgcctatctgtgttcaaaatg

SEQ ID NO: 103418 - DNA, 181 bp, Heterodera glycines
ttccccctaattacccccttaggctggtttgaccggtgaggcggcattgacccccgactgtctggtgaacattgagcagtccggcaccaacgattactggggcatccttcacgcgttcccaattaatgaagttcttcgagcacgcatttacgacttggaggccatgctaagagcagtgatg

SEQ ID NO: 103419 - DNA, 1003 bp, Heterodera glycines
gttttttttgatttgcctcttcaatttctccccgggaaaagcaatttcaaggttgtaaaacccgaatccaaagcaatactggagaattaggggtccatcaatgaatttcctggtgaaacaaagctttttcctccaagagaaaccacattttaaggcttttcagggtcgaaaaatccgtgacaatattggagaatcggggaggggtccacccaccgaaaaagcattttttatttgtctgaaaatttctaaaatgatacatttgaaatggtgccaatgccttcaatgttcatatttccaaatttcattcccacgatcatttgcttgaccctttgaaaattgtttccaaatatgtacagctaccaaattcgtaagattttgttgtttgactttggaaaagcgcaaatttgctccttaattaacgattaacctaaacttgtcctcatttttttcttctccattttgctcctttcttcactttctctttgtctttttgttttctctagcatccattttttccttttctctctcgcggttctttctcgtctaggtatctctttgttttttctctttcctctatttttctcttttcgttatgactctcacttactctgtttctcactctctatttgtctcactcacttcttctcagacgcaatttttctctattttcttcattctttctttttcctttttttcccttccttttccattaggttacctattttcctctttctccttctcttgtctttcttttccactgccatacatttcaattgattttcgcgtttgtctgctcacttctttcgttccctttcttctattgtcccattccttcgtcggccattactttttaaaataaaatctttaaatttaattctttattttcaatgcatttctcgacattttctttgtacaattacctaaaaatttgtcggatttctttgttttattcattcaatttgtttttagcaaaatagaaaattgcaaaagtttcctaatcatg

SEQ ID NO: 103420 - DNA, 147 bp, Heterodera glycines
ttttgtcaaacaaaaaactgacggcaaagcctaatgaaagaattaattagcaacggaaattttgagcaaaaaatgccatttttttggatgaacaaaaaccaaatggccttgggcaaaatgagcagaagcgcctgagccatcagaatg

SEQ ID NO: 103421 - DNA, 499 bp, Heterodera glycines
atcggattgtgctcccgtgttcgggcttgtggaccaatccaagcaagcgattttcaactcgccgagcgtcttctgatcgaacttgccccaagtggactgtaccgatttggccaagcaaagccccgaggtacgccttcgcactgacgaacagggattgatcccccttgagaccagactcggcaactgtacagcaagtgatgactggaaaagcccaattctgcttccggaccagtcaccgatcactctgctgataattcgagatcgtcatgagaagatgcgacactcagaagtagaagccacgctcacttcattcctggagaaattttggtgccataaagccaggggcacagtgaccagagaggtcaaaaaatgccttcgttgccgacgaatccaaggcccggcatttgctctgccagccatgccatccctgcccactgaccgtgttgtgcgatctgcaccctttgagcatgtcggcattgactacttgggccctacaatg

SEQ ID NO: 103422 - DNA, 1003 bp, Heterodera glycines
gtcagtccgcaaatgtagcgacacgaatgagaaagaaatcaaaaaagtcaaaaacacgaaattttggtactttcaattagccgccgggctccaaaatttcaaacttttcttaaaaaatggcctaaaaaacgtaagaaagagacgaaaataaacaaatggcaaatggaaaaaataataatgaaaagtggtggaggaagagcaaccatttttatactaatttttacaggatatacagtttaggccccataaatttttttttgttaaaaggcataaaaaacaattttccgtgggtttttggggtcgctgatcacgaatctgacatccattccgaccaatttcaaacccctaacccgaattcgaacaaaggtcgaaaattcaaaattttcacatttctcatttttagactctaaattgataaactgctaataaaatgcaacaatccataaattctacaaagttaaacacgtaatatatataaaataaagtaaagttcaacacaatcaaatacagcaaagtcccaaaatcgacaatatggagatgttagatcaattttcgcatgggtacaattcagcaacttgggaccaaaaatgttgaaaaacggcgtcataatcgccaaaatgcttccgccacaaatgttcagacatgtaccgtatttgctctaattatagcccagtctctattaatttcgcagtctccaattatccccccccctttctgaggagttcgaaaaataatcccccatgggctataattagagcaaatacggtatgtacgtgtcgtacaatgcacgtgaatcaccaaagcgacgcttcgctatattcttcagtttctgccacatactttcgactgattgtgtatgggaccccgtgttaggattgacgaagttttcactgtgattcacagtgtagtgttggtatctattttcgaataatatacgccatcctatccattactctacccctgctggggaaggttaggaatccccccatacgctctccacatg

SEQ ID NO: 103423 - DNA, 429 bp, Heterodera glycines
ggtaattttttttgggtaccatttgcagcatactgtacataaatgattacagtatgaccggtctttccgtaataccgcccccgccgctcaaaaaatgtcatgattccgacaaatactcaattttctaggatatttttagacatagtctacataaaatttctatttttttcaagaaaaaattagaaaatatatctaggatttagggaaaagccaataaaagtctaaagcatagacaaaatcttgagtttttcgacttttgctctatttattaatataattgaggattagcgcctaaactctccctgatcagtattttgatttgtcgtgccgggcgactgtataacgaaaagtaccgtatggaggggaacatataaagggaaagtaccatatgatacatgggttttttttctcaggttcctctttaccatg

SEQ ID NO: 103424 - DNA, 64 bp, Heterodera glycines
tttgcgaataattgattataattaattaaaattaattaatttgcatttactccttcaaaaaatg

SEQ ID NO: 103425 - DNA, 499 bp, Heterodera glycines
aaaaaaaaatttttgcagcaattaggccaaacacacttataattaattaggtagtcgtaaattgtgattacaaaaaattatgacattaaatgttacttttctatgccttttgcctacatatatggctttttctcaaaattggcactcttctttaagtttttcgatttggtgcgctacgcttaaattttagtataagaatgcccgtttctccttttcctcctcctcattccattcattcatcattcgcctgatttttgcggttattttgttgctgcaaatttcttcagaaatatgaaccaacgtttaaggaaaatgtaaaagtattttttgatcaaaaacttttcggtaattttgcagtttagtgctttagtgggcccgacgaaaaaccacagcggggggggcttttgatttgaaattttaaattgttttaaaaataatgttttaagctaataatataaacccgtcgaaaactgtcattaataatttgctcaacaaaatg

SEQ ID NO: 103426 - DNA, 284 bp, Heterodera glycines
ggtatggaaagaaaaaatagttatttctgggactttttcagaaatcagaaataattctccaatgtggcccaaattttaggcccccagccacagccccttgcttctcccagttttaagtcttggatttgtcaaataaattcaagacttcaaattaataatcaaaaattctcttaaaatttttttgaacccaattcaaaaaaggaaaaaaatttgcagtcaaaaaattattcgaatttctccaattttgtttccataatttccgaaagttattcggtatcataatg

SEQ ID NO: 103427 - DNA, 96 bp, Heterodera glycines
ttaaaaaaataataatttgcctaaatgaaagatattgtaataaattttaatttaaatattttggatgcaattataaaaatataaggcctaaatatg

SEQ ID NO: 103428 - DNA, 286 bp, Heterodera glycines
ggtcaatcggaaatcaaaaaaaaaaaaaatttcgagggttccccccccccttcctcaaaagttggactttcaatcaaataaatgcaaattaacaatttaatttaaaatttctaagattttttgtgaataattggcctaaattttcaaaaaaaattttatattaaaaaaagtttaaggaaaaaccaaaacattgtttaaaaattttcttgaaattttctttgaacacataacaaattgtataaataaataaatgataataattcaggtgagtttcgcaaccaacatg

SEQ ID NO: 103429 - DNA, 253 bp, Heterodera glycines
aatatgtgagtgagcaaaaacattttcaaaaaaaaaatcatagctttaattgaattgctaattgctatcaaattagtaattttggatacaaatttctaagtaaattagcccaattggctaagtgttttttctgcgccatagaattccttaattcaattttcaactttttttttagcaaattcccttcaaaacgcgcatcagtgagccgctcagaaatggacaaacggtgcacgcagtgggaaagatcaaaatg

SEQ ID NO: 103430 - DNA, 155 bp, Heterodera glycines
agtgagtgggtggtgttgatgatgaaatcgttgttaccatgcatctaattcgggtccctggattcggctcggaattggtcgaaacggataccggaaaataattatatttttgcttgctctgaaaataatggtgtttccccatttgtgcagatatg

SEQ ID NO: 103431 - DNA, 440 bp, Heterodera glycines
ttgggtcataagccaataatttacggtcccgctccagagtccagtagtcgtattcctcataaagattcagaccctcggatcaaacacgatccattttataagggaaacatgaaccaattttttaccaaaaactaaaactttaatcaataaaaatataaagaagaaaatattcgaagattccgagggtgatgaaaaaattggaaaaaagataaagcccttgaaagaatataaaattccatggcgttttgggatggtggccctatgaatttgtgagatgttaactacggtgcaaaattcttaacccaaaaaagtaatctttttaataaaaattttcccgttttagcgatattttgacagtttgtgatcaaaaaaataggaaaaaataaccaaataaaaagaaactgatatgagaagcgctgatcacacaactgatcattatg

SEQ ID NO: 103432 - DNA, 181 bp, Heterodera glycines
ataaatattttttcagaaagtgctctaaagcgcacccatttttatttacatgttagtttaggcactctgatgctttttctatcaaaaagggagatggagaaaaatttttttaaaaatttttccttatattttggttatatcgttttgcttttggtggggtgcttggaacagtggaatcatg

SEQ ID NO: 103433 - DNA, 188 bp, Heterodera glycines
cgttggcctggaaaaaacatccttgggaagattctctcagctttatgaagaaatttttgcgtaagaaatctggtgaaatgaatccaaaaaattacatataataataagaataataatttaatttaattatattaaatcgtattcattcaaataacacagcaataacaaatgattcttttacagatatg

SEQ ID NO: 103434 - DNA, 721 bp, Heterodera glycines
actttattttaaaataaccctttcacaaatttagatctattattaatttaaattattttctttccttgacaatcggaactgaataatttcatgaggtttgattgggttttttaagtaaattttctgatttatattttcttgaaattttaacttaactttttcaattttattaattcaaaaaatgtaaaatgttttttagcttataaagaagttcttttttttaaatattatttgtttaataaagttatatgatcgcgaagatcgcgacgaatttatttaatggaatttaatagttacggtatttatttatttaaaattattcacattttaaatttattgagtttcattttttataattttattacaatgtttactttttaagatcggtattttggtactgttacttatttgcatttctttcattttgataaagataaatgtgaaattttaaagcaaaattgaacatttaaagttcgttaataatggtataattttcatttttctgttatttaataaagcttttatttgtattacaaaattatagagatttattaaatattttgaaataatctcgcagtctccacttaaatagtctgctttttttgttttaattgtgaactaatttaaatataaattaattaaagggctattgctttctttacaattgcttattttgttataacctatttatttgtttattttattttttggtttaaaaatg

SEQ ID NO: 103435 - DNA, 238 bp, Heterodera glycines
  unsure (1)..(238): unsure at all n locations
tcccgaaaaacgaaaaaagcagcgggaaagtacagtaacgctttttcttcctattcgagatccaaaaaaatttctcagttatanaatgttaccaaaaactgacaaaaaattgcnactggcagtctcttattcttttggaaagacataaaaagccaagaaacaattgttaaaggagtaaattttgaaaaatgtcatgattttaaaagaaaaattgatattcttatgaaaagaaaaaatg

SEQ ID NO: 103436 - DNA, 52 bp, Heterodera glycines
attattttgggaaataaaaatcttgatcttgcttaaggcaagaagatttatg

SEQ ID NO: 103437 - DNA, 65 bp, Heterodera glycines
tctctgtcgttggtgcgattgaagtggtcgtcgaggatggcacaacatcggaggcggaggacatg

SEQ ID NO: 103438 - DNA, 1003 bp, Heterodera glycines
acaaaaaaagcgtttttaaagcagaaaaaagtcgtcgtaaatgaggaaaatgatcaggggaaataaaaaaatattggaaaaaatccattccggtgaaaaatacaagccatttgaataaatattaaccatttttcattgcatataataaaaattttaaatgtccttgaatttcatgaattttccccactatgtccttgcaaatcggcatacccgtccttggaagccgaccttggacgatggcagccctgagttagaacaattaatggtaatagtaccgatggtagtaccccttttttgaaaaaaagttaattttaaaagtcccaagaacaactttctaggggttttcggaatcgctgagcacgaatttggcacccgtttagaccaatttcgaaccccggacccgaattcgaacaaaaattcgaaaattcaaatttttaaaattcaatttatccgacaaaatcgattcatttgcacgaaggaacagcggaatgagcctattcacatggataaaactcagacttgcgaccaaaaattataaaacacgttttcaagatcaccaaagcgctgactccaaataaattcaggaaaatgtgtcgtaggcttacgaaacgaatcgaaacgacttacacaccgtttcaaaaaacgagatgtgtaccaataaatagagagtgccagagaaaaacattatctttttttctctaattttttgtctccttttggtgtactatctaatatttttattattaggaaaaacaacattccttctctccatataactttttttaatccatacaatctgcaccaaattttgcatatcgatagagaaaaaaataacacattcagtaatacatccattttatattttatacactctttcatgagatatattaagatttgtaataaaaaattattttgtgatttaatggcaaaattaaagcgaaatataaaaacagaggcggtgaaacagcggtggaaaaagcaagaggagcgaaggaccaaaatg

SEQ ID NO: 103439 - DNA, 656 bp, Heterodera glycines
tactcgctccattcaagccaaagaaatagaccaagtgacggaagccaaaataatgatcttttgatttttaaataataatgataatttcgatgattataatgataatttcgataattcaatttttgtaatgataatttcaataattgtaatgataattcgatatttaattgtttgcagttaattcataataaatgttttttaataaaatcatttttttaattttggtcatctcacaacttttcgcccctaatctccattacctcccaaaccccataaaaaaggcaaaaatttgttatgtttgcatagcaaggaaaatgccgagcgcggaagcaatttgacctttagctcattcctctcttgatttaacgccggctccgcactgcaatggatgtgcttatttattgccttgttgggataattggcggtaacctaaaaagaaatttaccggccaacagttcaagcactttaatcgtcccaatattcccctaaatgcgcatcgcagaaatatgagatgtcgagaaaaatgtgatagactgttggtgggtggggttaagatcgtcatttattcggtgagcccattttggcatcttcttttcccttttttttatctgttaaattttaaattttttagcaattaaattaattctgaaaaaatg

SEQ ID NO: 103440 - DNA, 252 bp, Heterodera glycines
ttcggctgtttcttctaagtcatcgttttcgcttgcgtcagaattcgtcgtcgccggaagggaaatattgtggcggaggcgatgctccccttttgtgggttgttcttcattttgttcagttactggttgaagttgggcaagatgaaggacgacgacggcgagaaaaattaggagaaataattgaacattggagaggagaggaaaaggaggacgaagggccatggcaaaaaaaaaaaagccggatcacggatg

SEQ ID NO: 103441 - DNA, 565 bp, Heterodera glycines
taaatcgcgaaatatggaaaatatggatatagaactccatactagaagctgcaaaccaagctaaaaatatgtttttcgtgcgtttcaggcctcccacaaccaggaaaaaatatggatttccatataattccgaaccctacttataaagagtctcgattgggatgacattgatgggcgaacaaaatgatcagaggataagagagagaaagagagagaaataagaaattaagtatatcagtcatttaaaaaataaaacgatgacttaagtccgcaatttgcgagaaagcaaatggcaattattttcaatatttattgaaattttttaaaatttttttctcatttgtcagtgacgaaacgatcagtgacaaaatgatcgtccaccgttttttagttcaaaaaatttataaatatggcatagtgtttgtttattttttaaattttattttaataatgatattttccgagtcatgtcctcatgtctgacaatgtgacaataaataaatttcaataatatcaattttcaggggtaacaaaaaattaaatacataaaaaattgtctaaaatg

SEQ ID NO: 103442 - DNA, 867 bp, Heterodera glycines
ttcttcatatgattagatattccaaagatttctctattatttatttaagtttcaaaaaattttattgagtttcaaaaaagatagggacaaaattagtaagtttaaattttttgaatttttggttataaattttcaaatttttgttagatcttgtgaatttatacttttgttatagtaaatggttttttgggtcaataactattttcaatgtcatctgttcaatttttcatatacttgtgcttaaatattcacaattatttcatttttaaatgatttttgttatttattattgtcagtttatattctaatttttgtaattacaaaattatgaaataagagttttattacaatttttttttgtacaaacttcatttattccagctttatatgtgctatgtatttagttttattatatttatattttaattatattctacgtaaatatttatttgaatttttttttaattgtcaaccttttcaaattttataattaatttaagaaacatcatttttttatctgagcattcttaaataaattgttaattgttagtttttttattttttatttgtctgatcacatttcatacatacatattcaaaattcaaataaatctcttgtcatggcaatttcattttgtttaattatgtatataatctgtctttttttaatttttttttaagattacataaaaaatttattaaaatgacaaaaataattattagataaattttgaattgcattaggaaaaacaatttgtcacttacaatacaatttttgaatccttttgggcttaagaaacagaaatatttctttttataagttatttatttagcattgaaattaattttttagagggctaattcatg

SEQ ID NO: 103443 - DNA, 109 bp, Heterodera glycines
ggtaacattctgaaaagacccaaggaattgatgccagctggtttgtggctttgtcttttttggctttaaagttggtttcatataaaatttagttgctggaaaagtaatg

SEQ ID NO: 103444 - DNA, 363 bp, Heterodera glycines
tttggtcgtttgccatcgtcgtaaggcattaaaggcaattaattaatgaattgttgccgaaagatacatgctcaaaagaattattgataggatgaagctggctggctccatgttgctcatcattctgccggcatttattatgataatgtccgcgcctgttgtgtccattttccaccctaccgtaaccaatgcgttcggttcccgcgttggcaatgattacggtagacaagataaaggtcaaacagcaacaagatttttttttcattttgaaatttagccctaaatctcagcaaccgacgagcatcggcaacgggtgtccgacgagctgcggaaagtcgccaaaatattgacggagtgccgatg

SEQ ID NO: 103445 - DNA, 74 bp, Heterodera glycines
ttttttgccaacattcctggtctgttgacaacgattgggccccgcccgtgcgaacggaacgcacgcgcggaatg

SEQ ID NO: 103446 - DNA, 546 bp, Heterodera glycines
aaaatccagagactttaaaaacgttgtggtaagacatgaaacggtccaaaatgctagagacatcaaataaattttcctctctagtaccattcaaatcaaaagaagaaaatatatggcgtttacgcctcaatatcatttagtcaatctctcatatcatcaatcaatcattgttaattgctcaataaaaaaacaggcatccatccatcattttcttagactgccagtcgcgttggccgtgctctgtacttcatgtaggagctataacttggatgcaacggattacggggggggggcctgtgttatgaaaatacggtaattttcaaaaaattccccttaaaaaatctgtcgaaatccgttcaaaaacagggccaaccggcgctggagtattacaccaccgtatcacgagaagattttggcgagaagaaagtggcggctgcggcgagcggcggcgacagcgacgcttggagcggcgtcacggcggccgagcgagcggcgagaaatgtgggcggcagcgagccgaacctgttgcaaagcgagttggacatg

SEQ ID NO: 103447 - DNA, 759 bp, Heterodera glycines
gcaaaaaagcgcaaaactcgctctgacctatatataaaagctgattgaccaattttattctccataaatattttcaagctctaactttataaaaaatgttaaattctcaaccgttcagtaataaagacatttgtttcaaattgccttgcggtataattatttccgggccatcctcatcgggcaaaacggaattcctactaaaatttattgctgagtgcaatgaactgatcgcacctagtcctatttctattctgtactgttttggtgagatgaattcggcggttccgccactgcaaaaggcgggagttgaggtgtattcgggcgtgccctcggaggagctgattaggcgccttcccaaaccgatgctgctcattctcgatgatctgatgttgtcaatagaggagcgctatctgtccgatttgttcaccaaaaaatcgcatcaccatcagtttgcggttgtgttcatcactcagaatttgtttgagcggaagatcaaggtggctcgcctttcggcgcagtatttggtgctaatgcgcgcgcccaactcactgctgtccattcgaaatattggagttcagctttttccgcgtcaactcgattttttccttgacgcctaccgcaaggcgaccgcccgcccctatggctatttgctaatcgatatgcacgcatcatctgatccagcgcttcgcctccgcaccaacatatttaaagaggagcaggaggaggacgagggaacagttgtgttcatccccaaaaatg

SEQ ID NO: 103448 - DNA, 1003 bp, Heterodera glycines
tttgtttaacaaaaattaaattaatccttatgaaataataagtcctttgtgataaacaaaaaatgctttctctaattattttcatctccataattaacattaaattactcttctaccaaacataattaaagttgctgttgtccatattgtgtggtggtgccattccccacataattcattcattcattcattcattgtgccatcccccgccaccctccgccccacgccgagccgccgctttccggcacacggaattggaattaatatttgcacacaaaaggcactcactcactcattccacgcgggaaagggtggcgcgtgggtggatgatgaaaagtcaaaaaattccattagcagcaaaatgagagggagaggaaaagggtcaaccgaagcgaacccaacccaattttgaggagaaaagcgaagcatttccttatgaataaatgcacattcaaatctgatatgaattttcaaaaataatttaagtaaaacagaagcaaacaaaaaaaattaataaataggctaaaaatattaatcataaggctaaaataataatataattgagctaaaaatattaattattaggctaaattttttattacgtaattttaaaattttttgaatattaatttaattcttaactgtttactcatttccacaacattttttttttgattactttaaattttgttatcatttcatacaatcaaatctaaacaaatttattattatcttcagtccttttttcctttttgattttttttgtctcaaatatttttctgttttttttatttttgccaatattttttatttttgcattaattatttgattgttttcctctatttttaagggatttctgtcggaaaaggttcttccgtcggcatttctgggaacagtgattgcgtcaacagcaccaattgtcagcagccgttgtcgagcggcggacgtcggccaaaactttcggagaaaatgaaatcattgtcattggactgcgcagaaatg

SEQ ID NO: 103449 - DNA, 53 bp, Heterodera glycines
catctccggcgggtcggtcacaaaatcctttgaagcaaaattgcatcagaatg

SEQ ID NO: 103450 - DNA, 239 bp, Heterodera glycines
  unsure (1)..(239): unsure at all n locations
ccccccccccccaaaaaaaaattaaaaataatcgaaaatatttggagtttgaggagcaaaagatgtcgtcgttgatagacgatcgtatgaaaattgggtgttggacgaccctcccccttcncctctgacattgttctacttacgagggccgaattaggccgaccctttacaaatatatgatcaataccttatctattgtcggaactttttagtttttttctgaatatggtgacattatg

SEQ ID NO: 103451 - DNA, 362 bp, Heterodera glycines
tcccttcccttccaagccctgagggccctaattacggacgcgtaagaaggtctcctggaattaattcccctattagcactgggtaatgggacttcacggctttattaaagtaagcgtcagttcatttgtattttcatggttttgtgccgttttaaatctgttgactttttaaattcggttttgaaagatacaaacaaataggtattcattcttcaattccattttcgtgactataaaaatgttttgtttttcgatttttctctcatttatcagaaagaaaaaaacgttttcaacgcaattattattctgccctttgtgacaacattcgaaataaggcaaattgttctaattgccacgaaatg

SEQ ID NO: 103452 - DNA, 300 bp, Heterodera glycines
tggcgagtgagcgcacttaaagcaaaaaaaggggggataaagaagggattggcattggttggactcacagacgaatttgaccatccgagtcgagccaaatgttctcggcacaaacgctccttcagagagaagagcaaacgcataaaaggaaacaaagcgaagggaagggaataatgacctgtgaatgaccccgcgcgagtggaggtgttcgagtgcgtttagcgtcgccctgagaatgacacgaagcgccgactcgggcaaaccctcggaataaaatgcactgagcaaatgggcacaatg

SEQ ID NO: 103453 - DNA, 403 bp, Heterodera glycines
atgtatttaaagtgatttattatttattatttataattttttaaaatgtttattttgtttgttttatttttaataaatttttcttcgagttataatagccctattctttaccctgaacgatccagggacagcgaaatgactgacatttattataaaatagcctcctttgaccattcctacttgaataaaattaatcaatctgaattattctcaatgattgatgaaattgttgaaaattttcaactttgtaatgtagaagaaacgaggtcattatcgagatgggtatactgtatgctactagttttgctatggatagcaattgttatgacaggaatttttctctattttaattccttgattcgaaatttatgtaagcttatgcatatatgtagagacggaaatg

SEQ ID NO: 103454 - DNA, 761 bp, Heterodera glycines
tgttgggctgtgatccgaattggaatttttccttgaaagaaatcaaattaaaacaaatctcgccagcagtaaaactgtattttatgcattgggaaattaaattgaggcacggaattccgattcccgaaatttttgataaaaagtcggatattttcggaaattttttgagtttttttcaaaaaaacttgaatttttgaacaaattctgttaataaattgcctgaatttcaatttttcccggcggcgcctatcagctctgccggaccctaaaaatcaataattttgccctaaattcataattttcttaaaaattgctcaaattcgttaaattagtcatttctttaacaaaatctgtttccgaaaattttttggggcctcagaatgccatcccttgtaccaatgagtaataaaactctttttctgggattctttttctagattttatctttttaatatttatgtattttgagtaataaaaaaagttttttcaaaatttcgattgctcgcgacactaaaatttaattgcaaattgaattcttttgcgatgtccataattttgattttactagctcttgtaataacggctcaatcaaatatatttaaaataataaaacatttcataccgcaaaattataatggcccatcgtaaaattgccatccttttggaacaaaaaccaggcaactttggacactgacaatgagagagaaaaataaaggaaaaaaggcatacagtaataaggaattgggaaacggtagaaaatg

SEQ ID NO: 103455 - DNA, 394 bp, Heterodera glycines
caaatcacaggaaaacccaaaaattcacaggcggttccttgataaaaattctttttttttcaattagccaaaaaacccataaaataataacgcgtctctgtcctaactaagtgatttgcccaaatcaaaacttgattaattgtaaattatttgacataaaataatttctaaattattactatataataaaaaaaaagcaaatttattttaatctttttattatccttctgtattgttggaaacattataaagaaaatgtgcagtgatttgattcgaattgatttattgtaaaaattattgcattaattattatttagaaaataacggcataatttctgtccataatttatccccttaaaagaaatattattattaaaataaattaaataaaatg

SEQ ID NO: 103456 - DNA, 117 bp, Heterodera glycines
agccaccgagacacaatatcatcagcctaaattttttaaatgtactaacaataagtactatttttcatctcaaaaggatcacccgcttcgcagcgaccgtgtcgaaaacgagcaatg

SEQ ID NO: 103457 - DNA, 287 bp, Heterodera glycines
ccatggatggcacctttatctaagcctcgctcggcatgggtcgtcccaccaactccagcttattttgatgtgctcgacttttccaaatatatcaccaagacacggttggccaccgatgaggaagccgaatgggaatttgacgcatattacaaaggcataaatttgccaacagccaaatttgaggtgttcaagagagtgtcagagtttatatacttaaaatggttctcttttaaataaaggaacgtgttgccgaaagtctggcacttcatttggaaagagaagaaatg

SEQ ID NO: 103458 - DNA, 665 bp, Heterodera glycines
gttattcataaattgagttacctttaaatgtcgaaaataggtatatatattttcatcaatttaccaaaatatgggtatctcaacattacaagtgcccgatctgtcattctgttagctcatctcgaatccctaaccagaattcgaattttttagaaaatataatcattgtttttttgttgttacaaatattgctagtaccgagttaacacgattaggccccacccaaagagttttctggggctaaaattattttcagtatgtttttttaaattatgatcgccgaggcgaaaacaggaatttgttaggttttgcaccaaaaaatgacaatcttttgccatgcgagatcaatttttcgataaaaatattatattgggctccggcggtgtcgataagtgtcgacgggaaaatttttgggattttatgataagaaaaacattcaaaatttaaaaaatttgtccttttctttaaaatttttatttttgggggaggacaatgtcgaccctgcttctgaatcctttcatattgctgctacaactcaatcattccacagcaatatttgcaataaaatgttaaatcttaaaaaatattcaatttcaagattgagcaaatgccagtcaacatctcagattatctcttggttatttacataatcaaaaaaatatatg

SEQ ID NO: 103459 - DNA, 130 bp, Heterodera glycines
aaattttaatttaatggattgaaaaatattggaaaacgaaagcttaagcacccttcttcggccttgctcaagtgccattggcttggcctgcctcgtcgacttcgagccgatcaccacttcagtcggcatg

SEQ ID NO: 103460 - DNA, 704 bp, Heterodera glycines
agcaaaattttcactaaaaattaataaattttcgtttatttgttttttttctatttaaatgatttttaatatcgcattagttctattaaaatttaataatattaataaattttgaaaaatttatccattaatttgggaaagtttatgtccatattttttaaattcaatgtttatatttcgcaattttatccttataattttacgctctactcatcacattcccacccattttcaggtcattattttgccgttttttatgctccactccaaccctcttcataaatatgggaatcagcagcacagaatcatcttcatttagtcattctaattgtccttttccattaagttgatttttgattattttaattgaaacattttataaaatgaatttcgaaaaaatctaattatttttgttatttgtgtgccattgtgtatttattctgcccatttaaaaaatgaattccaacttttttaagctaacgaacactaagtaacacaagcaacgagaaaattaagtgaaaatttagaaaattgaaaatttaaacttacctataatcataaagggatttgcaaaaacattttgaatttatggaatttatttttaatatcttatttctggtttaattatttttcttggatttaaatttatcctttttagttgtcttaaacattttcggtataatcactaactttacctacatatg

SEQ ID NO: 103461 - DNA, 321 bp, Heterodera glycines
aaaaaagctaaaaatgggaaatagttatgcgtctgaccactggttatggatgagaatgctcaaaaaaagggaaagagaggaagagaaaatagtattaaaacgaaaataaataaataaaatatcagcgaaataaatcattaagcacaaaaaatttaaaaagtttggggaagcctaaaataaaggacaatctttaaaaaaaggacattttaacttttaaagatccggcccctccaaaaaaggacaaatctttaaaaaaagaacacttggcagccctgcatttattgcattttgatttttccaattatttctgttttacagatg

SEQ ID NO: 103462 - DNA, 796 bp, Heterodera glycines
ttttattttaaagatttgtttaaagctaaattataagaaaaaaatttatgccgattgatcaattcaattagtaacaatgtgattaaactcacaaaaattttaactgtttaaatcaaggttgtgcaaaattattgtcatcttttcgagactcgacctatgagagtcgaaaccgagactacaaaaaatgccaacaaatttctgttgtttcgagtgtagttgggaacaaaaataagtttttaaaagtgtccaaaaaaagattttggttcacattcaaagaaataaaaaattttgtcatcgcggtagtggcgagtaatcccaataaattctgagcaaattgttaccaaaattaacactaacttttaacaaatacaaattttccaaaaacttctccccccactcgctcactgcttatgatgggcctaggggttaagcctgagactattgcatttcaattaatgcttcaattctcatgtgttttaaataatctgaaattataaaatagagggttggcaattataatttattcccaaaaaatgaaaaaaaaatttttccttttattttaatggttaaactcagaagatgggaaaactgaattcaatattttgtacttaatgggaaaagcaattaacagtaaattatttcattcatttatgtatgggaaataattgttagcgaaaaatttatgaaaagtcacatttgtttaaagaatagcgcctttaaatgtgggaaatcagtgtgaaatttgataaatggggaaagtgaccgaaattaaaaaatgaaattaattttaataatg

SEQ ID NO: 103463 - DNA, 990 bp, Heterodera glycines
  unsure (1)..(990): unsure at all n locations
caggcagagcctgagatgcggaaaggcgcatccctcccccaaaaggctgcccccctttttctacactttattgaccagaagttaaagaaaagccaagggaaattggtgagtgatcaaaaaggtgaagtgatcaacaactgactcaaatcccaaatctctcnccttaaatctgatcagagcagttgagttaatgggcgggggtgaggaaaatggcaacattggtggcggaagcactagagaaagagaaatgaacgagcgagcgagagagagaatggagaggaaagagagtcgaaaatcgccgcataatattctctgctctctgcttaacgccgcccccggcgttcaattcaattatatttaaatgttgtggaaaatggtgcgtaaattgaaaatgcaatttagtgaagaataatgaataagaaaagattggaagattttgggacagatgtgcagcagcgaaccgtcatttttgttcatccaactttttcgtcatttttcatctttttggcttttccttctctcaaaatttttgtagatttaaattccgaataaatggctgctgcatttctgacgtccgttgttttggtgtttggaattttgattgttagttttataggtttttaaaaattaattaatgataatgaaactttgcttttatttctttaaataataaaattattttgtaaatacccgtaatgataccaaatttgttcaaatttttttaacattcaatttactagtataagttttttttctcaacctgatttttctcgtttcattatgtgattgatgcatgggattatttataaagctggatttgcaatcattaatttattatttgaattttctcatttattactattttgtaattactcatttaattttaatagcataattatttatattttttgtctctttaaaatataaatttcaatttaattgtacggtattttatgataacttttattttttcttttatttcaaaatatg

SEQ ID NO: 103464 - DNA, 66 bp, Heterodera glycines
ggtaaaggacattttttaaattgaactttgattttttcttttccagctaaacgcaacttggagatg

SEQ ID NO: 103465 - DNA, 64 bp, Heterodera glycines
atttattagtatatacttacctaacagtttaaagtaccatttattttttagccttgcgaaaatg

SEQ ID NO: 103466 - DNA, 461 bp, Heterodera glycines
aattggacagtggcgccgaagttttgctggtctccgaaggcgattggattgccaatggcatgccaaaattgtaaacttgttctggactacacgcgtacggaggatagccaatcaaagtccttggtttcttcaattcaaaattaaagtttacttgtggagagaaaccactacggacttgtatgcggtcaaggacaagacaaagaatctgtgtggacgtgattagattcaaaagctacagatcgacttgaaaaatacgtggaattagaatggtgcaacaaattcgagacacaaaatccggaacgaagtgctccaaaatcacgccgaaatcttcagggaaagacttggccgctgtacacggcacatcacgttaaaatttaaaatggatgtagagccaaaaagatgcaagcaggtcccgtgccattcgcgttgcatcccgaggtgtagaaggttaaaaaccaatg

SEQ ID NO: 103467 - DNA, 140 bp, Heterodera glycines
  unsure (1)..(140): unsure at all n locations
cttcttctctttgattttgattaaacctttntnaattaggtaacttcaattcggcttttgattatgtaaatcagttttttacactttgtacatgaatgaattaattattcattttgctcaaatattgaaggtggcaaatg

SEQ ID NO: 103468 - DNA, 877 bp, Heterodera glycines
ttaaattatttattttaatttaatttaattttaattttaatagtaaataaacataaaaatttgcctttctctgtcaaaatgatacaatggaataactaatcaaattgaatttcttcattaattccaaatttaaaatgatcattttcacgacattaattaacataaaatatttattcatttaattcagagtaaaaatttttgctaattatttattttcatttggcataaatcagttgatcgaacagtaattttaattaataaattgccacttccaattaccattatcaattaattaagtaaactaattaataatcaaaaactcctccagggtcattcagtcctttgccgggggcggcggtgaatggtcgccaaaacgcataaaaataacatttccctcccccgccacggcaaacagacactttttacgttgtaaatttacactcgcaatacaaaaaccatcgcccctgggctcatcctgccacaacaacaacaacaacaacaaattggaagaggaattgaaggccgttgggttggggagaagagaaattatccaaggcgacggcggggggggggggggcaaaagtgaattttggtggagttttgcgtaaaatcatttgtatatttgccgtgttttttattttaaattgtattatttttaatttattttgtctacgcaaagagcggcgaacgaaacggtcagtcattagtcgctaattgactcattaacaattaattaccccttttaataattgtctttcctcaaatttacaattagtccacagcacagtcacttttcagcttccgttctgctgatgtttcaccacactttttgcacccttttaatcctcacactttttgcccttttcattggcaaatg

SEQ ID NO: 103469 - DNA, 80 bp, Heterodera glycines
atgacaaacttataaaaacaaacaaacaaataaataacaattgtcattaaaatgaagaaaagccatattattcggtgatg

SEQ ID NO: 103470 - DNA, 76 bp, Heterodera glycines; identical to SEQ ID NO: 101492

SEQ ID NO: 103471 - DNA, 709 bp, Heterodera glycines
cctaaaaatgatttaaataaacggaacatctgaaaaccacaaatattgaaataaaagatcattaaatccttttcagacgaaaaaaacgaaatttgaagtttctactttttgttcgaattcgggttcgaggtcgaaattgggcgaaatggatgccagaatcgtgatcagaaaccccgaaaacccctagaaacttgctttgaacgactttttaaagttttaaaatttaccccaaaaataggggctaccatcatcttaactattaccgttttaagaatcaaaaatccaaaatttgatcatttcccccaaaaaatgcttttttcacccgttacgcctaaaatctaaaaaattttgtccaaaaagcaaaaaagcctcggatttccaccaccttttttcagtttacggacggtactcagtcggtgaattcactcagaaaagcgaatgcaatttgaaaatttaattgttcgtaaatgtgtttgttaattattacattagattttaaaatccatggatgaattccggggaaatatgctaaaatgagaacactcaacaaacaaattcgattcgtaatagtgttaattaatgtgcaaattaccagttgtgttgcggtgagatcaaatttcttggtttttaaatattttgcataatagggcgtttaaataaaaataaatttgaaaatcaatttgactgaaattctttccatcaaaggatg

SEQ ID NO: 103472 - DNA, 330 bp, Heterodera glycines
caaagaacatgcagcaataagcctgcaaaatcagaacatgcagcaataagcctgcaaaatctaataagtggaaaatacatgagtatagaatttatttttagaaagtgtccacagacttttggaaaaatatatttgcaatttatcaacaattttgagaagtgagttagaaatgataaacttcacgattcaaaccaattttcgttgctctaattaaccgggataaaaacattcgaatcaattaaatagcttctgagataataaggtttatcataaaatttcaattaaaaataaaccctcaattattggtatgaacgatactttccaaacatg

SEQ ID NO: 103473 - DNA, 366 bp, Heterodera glycines
gatgtctcggtcttgagaaattcaagataaatccttctaaaaagcatggggggcatccaggaaaatttatgatgaagctgatgacaaaaaaacaatcattggccattacaatttgccaaaaatggcgctaatttaaaatggaaacaaatgcgtaaaatgtgtgctaattgcacatttgtttcccggctttagcgccatggtgaaatttatacaaaaaaaaacaggttggccaattggtcattgaacaaatttttgttgtttgattttaggcggggaaaaaattttatttatggaaatttgtaatcccaaaaaattatggcttttaaaattttctaaaatgcagagggtgagtcagggccaaaaatg

SEQ ID NO: 103474 - DNA, 118 bp, Heterodera glycines
  unsure (1)..(118): unsure at all n locations
tgctagtcatgattattaaattaagttttcacnatatgtaacattaattaagtgtatatttttttttcaaatatagatttttgtttatttatggatttagttttttaaatatcaaatg

SEQ ID NO: 103475 - DNA, 1003 bp, Heterodera glycines
tgaccgacgtagctgaattgcgcgatttggtgttggacaaacgcaaggagtacattttgtgcagcaatgcattttcgctttacggtgtccagaaatttatgtccgatgaggacaggaggaaattcgaccaggaaacgggttagtcagaaaagaaatcgaaatatttctctattaaaaaaacaacgcaatttaatttttatttaattgggtttgatttttcgcctgaatggatttttaacaaaaaaaaaactttttttctgctcatcattttactctcaaaaaatgaccaattttgccttttaattaggagccgccgtgaaaatttttgaaaatttgaggcaattttttaatagattttgtcaaaattacctaatcacattaacgctttttggatgtgtttttaaaccaaattttccgccaagtttataaaatttcaaaaaattctagcagtttgcttgttttttttccaaatacatccttggaaaaaagaactttcaattccaattagcgaggctcaaatccaaggacgtcattggcaaccaataacgaatgacagccttgcgaaaagttaaaatcttaacggtaaaagcctcatttccagatttggcctttagacattgcaccaaattgatcaagagtcttgaggcacaaattgaatctgatcgcactttgcgtccatccgaccaattaaagcatctgcttgccgtgatgaatttgctcaatgtttatttgaaagaagtgctttctatcgttacgcaattaaggtaaccgaaagttttctgttcaaaatggcacatttaatatatttttctccataaagcaaaaactagttcaggaggtttttgattacttttttttacaagttcctaatccgaactcgaacaaaaggtggaaaaaaagttggctctatgctaaataattcctcgaatttttaagggcaattcatgtgcgaaaatcacgccaaattcgtcgtatttgccggttggccaatctcgttgaaatg

SEQ ID NO: 103476 - DNA, 781 bp, Heterodera glycines
tttttagtaaataagagaatatgtattaattctttaataatttttatataaaattattaagtttattctgaatatttttactcggaaggatatattaacatttggacgaagaaaaagatgcaaaattatattggtttatttataatgaaaaataggcgaacaatattagcgaccaacaaaaaataaaaatatatttcatgatcattttctattgatccattcatcctttcagctgcaaatttgcaaaacaacttattgacttcttgttttccatgaaaagaagcaaaatatatatatatatgtaaataaaaatttcgtggtagaaagttggtggtatagcaaaagaagttagttcatggttaaaaaacggtgactggtggttgctccagcagaaaatttactatcttcttttgctaccgtttttctcgtatttcgtggtcaaatgaccaggtcaaataaccatagttaaatgacctcgtcaaataaccaccttcttttgctacggccccagatgttttttcaattatttacctcttctgggattggatatatttattatagatgttttttaaaggtttaaatttggtactgaaacgtccctttccactgggactgaaatggcgggggtgaaatgcaacccccaaaatcttggtgagtagctacttatagcaaatgatattaaagagaaattgttgttgaaaaagaaagaaaatgaacaacaaatccacccaaataatgaatcagaacatcaatcaaatcattgatatggatgaaaaagatg

SEQ ID NO: 103477 - DNA, 73 bp, Heterodera glycines
tgtgagtttcctttttaattttttttgttcagaaatctgttttgccaaggtgtcactgtacccgttctgcatg

SEQ ID NO: 103478 - DNA, 129 bp, Heterodera glycines
gtgattaaaagagattcaacagtgattagaagaggtacaaaagtgatttaaaggtggtacaacagtgattaaaagaggtacaaaagtgataaaagaggtacaaaagtgattagaagaggtacaacaatg

SEQ ID NO: 103479 - DNA, 421 bp, Heterodera glycines
attcccaaaaatcgtcattttttaattttttgcacaaaaataaataaaaatattcatgttgcacaacggactcgaacttcccccctttgttcctttactatcttacaaaaatcactgagccacacatgcaaatttttttggaactgggaggccaaaattgaaacggtgtgtattattaaagttattatgtaataagcattttatgaaaatgtgagcacaaaaatcagatgtttaagattgcgataaattttaggtggggggaaccggcattttaggtaaaaaccaaaacctttaaaaataattttcaaaaattgtaatttttcatttttggacaaaacaaataaaacacaaaatcacttaatgcggcaggaaattttaggaattttatttgttccataaccaacgcccgccagcgtccatg

SEQ ID NO: 103480 - DNA, 320 bp, Heterodera glycines
agcttttaattccaaaattgttgtttgttcgttttgtttcactcaataaacaaattgtcttagcatttacatctttcactagttgatttatcattttcaatttgattcttttggcttgtatgtatttatctgtatgcattaaaggcgtttatttttgaatttttatgatggccaaactggtggttgaacaggcaattgatgcgagcgagaagtttttgatccggaatgtatcaatatctttttagaagaaatttggtgaaaaaaatatttaggttgtcactggaaaaagtgtcgaactttgcggctgctgttccaaaatg

SEQ ID NO: 103481 - DNA, 84 bp, Heterodera glycines
ggtgaaaaagcaaccgaaaaataaaattcaatttttcttttttcattttaagaccatctcaaagcggaatacattaaaattatg

SEQ ID NO: 103482 - DNA, 589 bp, Heterodera glycines
ttttcacctcactttcatctttttcacattttcgaaaaatttgatggtttgaaacgagttaaattgcttagcattcgcttagaaaaagattcaccttttcaaaactttttttagataccaattttgtttagtttagttggaaatgaagaaagttacggctgatcaaaataaacaatcaaaaatgtcagtgatcagtgtgtttgaattagcgcgcaaaaaattacgccaaatgtgctatttggcgttatgagcaattttgtctgacactgggcttgacccatagtgaccgcttctacgctttctcttattgctcattcattcttagatttccacatttacttattttttgaaattatattttttaacccaattctacttaataaattttaccaagaaacacatgacaaaaaaacacatatcttttatctatggatttaaatgaaaaatattctgtattgtaaaaaaaaatactatatctaaagaatattataactctgaatttcatattcgtggaaagaaataatcaagaattttaaatttattaaagcaaattttaattttttaatagaaatttcatattagctcaatg

SEQ ID NO: 103483 - DNA, 534 bp, Heterodera glycines
ataaatttatttaattaaaataattaattacaagtattaaaaacttcccgtttccatttagtggtcaactttcgtgatccacccgagcgcccgttgaccatttccgcacacatgcgtgcgcgatcggtaagacattccattgttaaatttgtaaaacattttgctttttcgttaggttcaatgagtgattgaacgatggattggtggatcgaaggatggatggatggatggatgaatgaatgaatgaattaattaaattaaaaggaaaataattatttaaataaccgtaaacttaattttttttttaaacaataaaaaacattctgttctgtaaagaatttaaagtggtactgtaattgactgattaaatttattacacaattaaatagtcatgttaaaaggtaacttaaaatggtaattaaatgggcggagtttattttataggcaactgtatataagcataacattttcaccccgcacaatcccgaaatcattcctagaaatttcaaaataaaattaacatttccaaatatg

SEQ ID NO: 103484 - DNA, 158 bp, Heterodera glycines
ggtttgaataaaatatcaaaagcccaataatttgttgtctggtctcaggtcatcaaacttccgccgaatcgtggggcactggtcgcgcagtggcgcgtattccgcgcgtccgtggcggtggcacccaccgctctggccaaggagcgttcggcaacatg

SEQ ID NO: 103485 - DNA, 97 bp, Heterodera glycines
aaaaaaagtgtgtataagaatggaaaatttattcatattcattcaaatattcaaagcataattaataattaattagttaataattaatttagtgatg

SEQ ID NO: 103486 - DNA, 539 bp, Heterodera glycines
gcatcggaattttaattaatttttatataagaaaaaatttaaaaagtgtaaaaaatagtttaaaaaataggaaaaaaatgcgcggccgcgatgcgcgatacgcgattcgcggcatttttttttgcgcggtcgcggccgcgggatttttctgtgcgcgctccacccctgctttctacgagttgccactgaccctcacctctactatattaaaaagttcatcaaaggcaaatagataaatttaaaaagttttgatttttgcactattttgtgtattaggcatcttttttacttcaattatttgcctttcatcattttctttatcccttttaatcctcaatgggtattgcaaattcagttaattattttttcgaatttgccacattcaaaaaagcagtttttcccataattaatatagaaacataaattagtccatttcatcagttaattatttttcctaatttgccacattcaaataagcaattttttccgataattaatatcgaaacacaattacttaagatcatttcaattacccaatg

SEQ ID NO: 103487 - DNA, 551 bp, Heterodera glycines
  unsure (1)..(551): unsure at all n locations
tgcaggtcacatggaattaaaaatgaaataaaattntgtggatgaaaatggttaattttctgggacgtttctgagacgacagttttaagggcggcgttgaaatcccctccccctaaaatttgtctttcgtcattcgtaattttgatatgattggccactgattatgtaaataaagatttatatgtcgagcataaaattaagaaaagcttaaagtgcgaaatagaattaaaattttttaattttaatatataaattacttctcaatgaataaaagcattttatttaaatattctttgcatttatttcaattagtttttataattttgggattttatttattttaattttaatttcggttaataaagctgcaagattaaacggtaaaattttttttttaaattttgattttgattttatttttaaactagtttactttaattaaaattcgacaattttagatcaattaattcaaatctttagatagggagtgttattaattatatattttcctaagtatttgtttttccatttattgaaactcttgtcgaatg

SEQ ID NO: 103488 - DNA, 169 bp, Heterodera glycines
aatgacaaaatgaaaatgatcagaaaaagagagaaattgttgaaaaattcaaccaaattaaagagaaaatcaagcaaaaagagagaaaatattcaacaaaagaatggcaccaaatttatgaagaaattgggaagaaaattggagttaatcgtagagtaattgaaaaatg

SEQ ID NO: 103489 - DNA, 564 bp, Heterodera glycines
aatttaaaattatttacatttttatgaaaagatcattctgctgaaggagtgatctgctgatcaacttggtgtaattgacttatttgttcagccaaaagttaggccctagcaggaattattttcagttttttaccatagcttagctccgagaagaatttttttttttttaaagttttaatcatatatttttgagcacctaatttatgagcaaacattttcaaaattaatgaacaattcgtagagctgtggaaaggcagtgagtttggatgctttcgaaagctcagggatagggctaaatttaagtgaagaaagttttttgctatattcaattttaacaattttacgcaactttttcttcagcgacaatgtttaaccgtatataatttgttacatactgtatcattgtgattcgaaatcctttcatttgaattcaaattaagtgctaaaaattttggcattatgtttgcatttattcaaattttaaaattttacttcttcaaagttccgccgaataggaaagtttcattccggtttcagcggtttttgcattttcattttaccatg

SEQ ID NO: 103490 - DNA, 163 bp, Heterodera glycines
ttttggtgaataaaattaagaatgatttggaaaaagacgcgggcattcaaaaatgtgccggttttatacttttgaaatcggataggctccgcccacttttcagctcgacaagttcatccgctcaaaaccaaaaatcattttaataatttcttaaataaaaatg

SEQ ID NO: 103491 - DNA, 271 bp, Heterodera glycines
  unsure (1)..(271): unsure at all n locations
ataaatgtgatttttcnaataatttcttttttaaattttcattactancagtaaaaagataagcaagatcctctntaaaagggattaaaattacttttgataaaaatggcatgaaactaataaattctttcaaaaaatttccgtctattttttcaaatttcatgaaactgctgtgtaaaaggggactctaaaagttaattttttaaaataacttttattttttgtttattcttttattgtaaaaaactaataacttttaaggttaaatatg

SEQ ID NO: 103492 - DNA, 148 bp, Heterodera glycines
gttgctcaaatcaacgcgtatgtgagcgtgctaatttaagcctcaccaaagaacagcttaaatgcctgattttttgtgatttcactaagggatgagcaccacgatttgaggcagaaatgtcttaaaatgattgaagctgagaaaaatg

SEQ ID NO: 103493 - DNA, 835 bp, Heterodera glycines
cgatcagcaaatgtcaaaatttcaaatattttcattctttaatgtaaatttcaaattaaagaaagcaataaaaaggactctgatagtgtgataaagtgataggattaagtgaaagatgtgagtttaattacttcaattcatttaatttgtatttgatgaataaatatttttcgcagataatttaacgttgggtgctttttcttattttgaatttttaggggtttttctttctttttttttgccccaatttggaaaaattttcgagattttgttgagaaatatgcaaaaaaaaagaagaaaaaataataccatcttatccgatcagcaaactttgtgaagaaacggcacagaaaaagccaagaaatgaatgaatcatccattcacgtacacaaatgtgtaaattcattcataaaacaaacaaaaatggagttgaaaagggaaagaatgaagaaagaaagcatttgtctccataaaagtgtttagccatgagatttaggcacacatttggcgaaaagtctttcactattaaatgccaaaatcagtcgacaaaatgcaacccttattttattatttaaataatttttattaaaattatttatttttactgttcttggtgtggtaatgttgtgcaaatttttagtcatttcatactttggcatttttctattgtaaaaacagaaacattttgcgcaatgctttttcctcaattctttctttcatttttgttcattttgttattagcggacggaatggcgcaacaatcgaacaaagtgacagggccaaggcaacaatttatcattcaattaattaattatttttaatttgatttcaaatg

SEQ ID NO: 103494 - DNA, 146 bp, Heterodera glycines
aaaagaagaagcaaaaaaaattgggggagggagaaaaagaagagaaggataaaagcagcggagggattgggtacgaactgcgctatttgggctacacaacggagaaggacggcgagcaattgctggagtcgttgcaggacgagatg

SEQ ID NO: 103495 - DNA, 120 bp, Heterodera glycines
tatcgggccaggacgttttcgtacgagtgagtatggaaaaaattgcattcaaataatttgttaattttttttaattacttttaatgttttgacagttaagcttttattaactacaaaatg

SEQ ID NO: 103496 - DNA, 69 bp, Heterodera glycines
tgacttgtaagaagaagttcaaaattcagcgcacatttcagggaacactcgcgaaaacttaagaaaatg

SEQ ID NO: 103497 - DNA, 735 bp, Heterodera glycines
atattatttataattatttttttattaatttatatacccccccgttttttttctctcctgtctaacagttaaagttaatgattttttcttgaattttttcctttcgatttgtacaaattgagcattttcattttccctccccccattcattcatttgctgctgcatttcatgtggtgtgatgatgacggacagcagcagaacatttcacattcatttaacttaatcattcattttgatcggaaaatgaaaataatctttgccccgctactaaaaaatcttaaaaattttctataaaaaagttgcaaaatttcagttaaaacaaatatttaaaatttctttaaaatgcatataataattattattaatttttcattagtaatttctttcaaataaaaaaagaagaatttttagggtccggcgctgccgagaggcgcaaccagcaagaaaaaaaaattgaaattgttaccatttttaacagattatcacccaaaaaaaatcgctaagttttgataaatttagcaaaattttcggataaatgatgagataggcctagaaatagtatcaacaaggaaaatcgaaattttcagctaaaatactattttcccttaaaaattaggggtgccgatgggtcttctcatccatccctatttgttctattgccaccctaaaaattttctacacaatttttcgagaaaaaattatttttattttttttttttttgcagattcaaatg

SEQ ID NO: 103498 - DNA, 365 bp, Heterodera glycines
cgatttttcaaaaaaaaattgtaaaaattttttccccggtcgatttttgtaattttttgtgtgcgctgtttttctccttaaaaaagatatttaatttttttaccatttgtcaaatttatgaagctaaacaaacaccgccaaaaagcgcaatttaattatttaagaaataagggttgtaatttcataaaactaacagctgctgcattttcatttcttattcaaattaaattactttttgccaccaaattaaaaattaattattaaatggaatactaaaaaattttcggagaaccgatggacagacagaaaatcataaacatttccgattcaaaaaaattaattaaattttaaggtgaacgaacatg

SEQ ID NO: 103499 - DNA, 228 bp, Heterodera glycines
agtgaattaaaaaaaataaatttaacaatatgaactaactacaatttaagtgaaacaaataaatgattctaaaaaaataaaaatattcaaatatacgagtaaatttaaaaaatgaaaaatatccaagcaaaaacagttttgcttacaattagcacataaatagactgttatttcattcccaaagtcaaaattattagctgcgaggcgatattgtattgctctaagatg

SEQ ID NO: 103500 - DNA, 373 bp, Heterodera glycines
atacttgatatcattcggtagccctaagagttttctattttcatggaaaatattaaaaaaaaaatttgttataaatttaaaaaaagatataacctcagaactcaaaaaaaaaaaaaattcatttgatagtttttgacggtgctgggacgttagtcaaaaaccatcaaatggaaaatttttgacagaaaattattcataacttcgcctaaaatgaacaaaattttaaaattttgttatctttcgtatgcttatatttcgggcggcaccgatccaaatctcggcaccggtccgaatctccctccaacctttggctttgaattcttttcctattccatctaatcgccccgtcccctaaaggtttaaaaaaattatg

SEQ ID NO: 103501 - DNA, 972 bp, Heterodera glycines
tacttttccattatggtacaccccgaaacttcttttcattatatttttttagacctattttaagcgctgaaaaatccggcattgtttatttaatttaatttacaagatttctggtttttatgaaaaatttagcaaaatatttttaaaattttgggtgagattttcgttttaagaaaaattaaataattgcagctatataaattccttttggaatttccgtcctattagaataaattaaattaatggacttattatatagtaaaaaaatatattataaaaattttaaaaaacgaaagccaaaacttaaaatatgaatgagaaaagcagtaaaaatttttaaattaaacatgtatggtttttataatgaaaagtgaattttctaattaataaatattttattattaatatgaaaattttctttaataatatttaaatttattactttacttaattgattttataaaattaatcgataaaagacatgagaaaaatcaagggtttgatttgatgggtttttgactaacgccctttttgatggtttttgactaacgtcatagcacccgccagaccccttgttctcaaaattttaccttgaaaaagcgcgacgcagaaaatttttattgattttttctttcgaatagaaaattttcatatcgatttttgaacaattaatttgtccatcaaatgcatggccaaacattttgccgtcagaattggcgttgtcggcttagaaatgaattgtccctatccaatcccaaacaaattcagcaaatcggaagagttcagatacccgccatgagatgttgatagaattggtgtaagtaaatttaataaaacacaaaaatttggaataaatttttattgtttcaaaaaggggtaaactgaaaaggcatttgaaattttgttcagattgatgactctggcgatatgaaaatcattcaaaagcgtattgagtcgtcgcccaaaaaaatg

SEQ ID NO: 103502 - DNA, 197 bp, Heterodera glycines
agtctgtagaacttttttagtcaataaattcattctctggactaactggtgtgggtcgaaccaactaaatgaactaggcatagggagtattgaataccaaagtatggtgtcagattctgcttctcgggagagcgtggagttcctggttttttgtttggacaatataaaaatagaaaaagtttatctctatttagatg

SEQ ID NO: 103503 - DNA, 160 bp, Heterodera glycines
tctttaacagattttcactgaaaattggcaatttttaaggtcaaattttgaaaattttaggggaaatgttgggagccctgaactgaagtcattaaaattaaaaaataaaagttgttttaaaattaaattttaatttattctttcaatttcagattttatg

SEQ ID NO: 103504 - DNA, 1003 bp, Heterodera glycines
atgtaatgtaatgtaatgtaatgtaatgtaatgtaatgtaatgtaatgtaatgtaatgtaatgtaatgtaatgtaatgtaatgtaatgtaatgtaatgtaatgtaatgtaatgtaatgtaatgtaatgtaatgtaatgtaatgtaatgtaatgtaatgtaatgtaatgtaatgtaatgtaatgtaatgtaatgtaatgtaatgtaatgtaatgtaatgtaatgtaatgtaatgtaatgtaatgtaatgtaatgtaatgaaatgaaatgaaatgaaatgaaatgaaatgatgttaattcctacctaatgggagcgccgtgcggactagaaccccaaagcatttaatcaaaagcgttaaccactatgctacggcgctcccattcgctaattattatttctaatatttatattcaaaaattaatttaaatatatatttttttaattacaaattaaaataaagcgtcaaaaatacttgcgcaatggattagagccctattcagaccaaaataacgagttcgaacaaaatgtcgaaaagtcgaacattgttcgaactcttcaaaaatgatcaggaagacatttccagacaggggttcctccaagggggtcaaatgttgttatttttgctccaaaacgacgtttagacccacttttaggagttcgaacaaatttcattaaccatttccggtcacagaacatttctaagacctcaaaagagactttaaatgtttgtacagtgactgggaaccctgggttattgaaaataacgagttcgaacaaaaagtcgaaaagtcgaacattgttcgaactagttattttcgctcacagagcacttgtaagacctcagaaaagagtttaaagacttgtaaattgattgacagctctggattgctgaaaataacgagttcgaacaaaaggtcgaaaagtcgaacattgttcgaactcttcaaaaatgatcaggaagacatttccagacaggcggttcctccaaggggggggtcgaaatg

SEQ ID NO: 103505 - DNA, 219 bp, Heterodera glycines
cttattcttttgtgtccatattccctgcaccaatctttgctgatcgccccgagccaaacaaagaaagataacatctgtatgaccatttctacaatgaaaagacgacaaattgacaaaagaaacaaaaatttggagaactaaagtggatgggaagagggggggggggttaagcgatcgggccatactccgctggtcatttttccgaatattcgcgccatg

SEQ ID NO: 103506 - DNA, 991 bp, Heterodera glycines
ttgtggatttctttctgcttcccgtttgcatcctgaaaacagatcttatgaacgtggtgatgttttgttagtcgttcaaaaagatcgaagatatattcggttttaaaatcttcctgtataagcatttcaccgccgctaatggaaaatgtcaaggggaacaatgccgataataaatcgttatcttaacgcagcttttaaaaagttacataattttcaaaaccttccgataacatctccaaaatttcatccaaaattagggcaaatgaggcccctccggctgctccgatgagagtggataatacggtttttgcagttttaagggtttttaaggaatttaataacattacggggttgcaacagcaagaagaaagagagtaaagaaacaaaaaaataataattttcattttgactatgaggagtgtgatttttgcagctaatcagattacttaaataatgattgattggtcacagttatatttggtgtagaaactgttacaataaaagaaacctaacggcttgaatataattggtgtgactatttgcgcggtgattgtgacaaagcaaatcagcaacatttctctcattagtgtgactggtttccgataaaaaccagaaatcgtcgattgcgcaaaaaactgtgactgtttttcgctgttatatgagcggaagaattatcactgttaattcacagatttaacattcttcccaagattcatttttgctccctttcctgtcccccccccctcctctccccgccaaaagggagaacacggcacggcattccctccggcattatcctgccaaatcctgaataattacatttattgtctgtatgcacttaatatttttattgacttatatttgccttactttttttacataccgaaattttcctaatttagaattataattttctatttaatattggtcacctaaattaagtcaaaataaatgataactaaaataaatagtatttttaagaattaaaatg

SEQ ID NO: 103507 - DNA, 840 bp, Heterodera glycines
acactattcaagaatttcgacagtgtttttaccaagataaatttgtttattttgagtacactgttgtttttaatgtatattgttaattcgctagaatacatttgatgaaatgcttttagttttctttttctttagcattatgacaataatccgtgattttttgtgccgttcgtcgtaccaatcgttggctcatttgtgccgtaatcaaattcgcgtttattctgtagaaagggagggggcgggcacggcttcgggcattgaacacgcgctcaaattcaacaaagcgggagcagtgcacaaaaaagagttgaaggattacaaatgcgtcgaatatcttcaccaaaataattattccttttatgacaaggaggtgggaaaattacaaaaaatataacggtcaaaatatactaacttaagccttcattgaaaaaaaatacatattcgggttcgaaataatttaatgccatattcatgatcagcgctctctaaaacccttaaagcatcacaaaactgctcaaaaccccctttttgtctctttttgtgggaagtaaagccgatgattaccaaaatgacataaattcctttttaagtgtgagctgcagcaatttcgcgtggtgcaaccgacgaacaaattgcctgacaccgaaccgaagttcaaatcatcttaaaccgattgatttcatgaaaaattttgttttttaattaggaaaataaaataaaactaaaggcaaaattgagagattgttcaattaaacagttaatttaacaaatattttatttttaatatatttttgttagttaaaattttaattacacttgtataatccaactcaaaagatg

SEQ ID NO: 103508 - DNA, 57 bp, Heterodera glycines
aagcagcgagagttggagctgctaaaagagctgaagccgtggcgtggaggctacatg

SEQ ID NO: 103509 - DNA, 449 bp, Heterodera glycines
gacgacgacaacgacttccgccgaaattctttcggaagattttctgagaaaaggttataaagagttaattgatggaaatgatgtgaaaagggaatggggaagaggaaaattcgaaggggaaaagtggattgaaatttgaaaatttttatgaaaagatcgatgaattgaagagatttattcgatggtgatgagtatgaagtggtaaaaaatgagaaatgaaagtgaatattaaagagatgagaaaaaagttgatggattgaaatgagacggaataacgcaaatgcgaattgaaattgggggaataaaaatcgaaaaaatatttcgacttttccgaaccgaccaaagcctgcattttcaggaattttcgtggcaatgctccgcaactttctcctcaaaaattctcaccaaatgcgagtcacagacaacaccaaattgatgtacagacaatg

SEQ ID NO: 103510 - DNA, 374 bp, Heterodera glycines
gcagggatggcattccgaggccccaaaaattttcggaaatcgaattccgtgccatccctggtctcatggtattatagttgtcctaataactaagagaaaaacttttttttgttaggtattcaataaactttttaatttttaactataaatttcgttgttaaacctaaggttatcatgacaactcatacacaggcaactcgaacaatggcttattgttagactaggcctaagtttaggcttttgtaatttttttttcttatattagttgaatttctgttgacatcaataagtgtgcttagagttgcttttgcacttctcttttatatgcaaccacgcgaaaacggccacgcgaaaacggccctcacgcgaaaatg

SEQ ID NO: 103511 - DNA, 208 bp, Heterodera glycines
tgatggtgctaggtcgtttcataaatccgccaaatcgttattttgtaaatccgcaaatgagcgttccataaatcagttttataaaccctccaaatgtgcgtttacaaatccgctaatttcattaaattagattgctatttaaatgtcttaaatggcttgttttccattgtaattttggcccaggaacgaacgaatgaactccaaaatg

SEQ ID NO: 103512 - DNA, 97 bp, Heterodera glycines
aaattatacatataaattcaaaaattaggctgatgatgctctatttgttgaatttgccaaaggattagcgacgaaatttgagaagttttttaagatg

SEQ ID NO: 103513 - DNA, 54 bp, Heterodera glycines
tgggctttcgaagagagtgacatttctgtcgccattttgctgaatctggtgatg

SEQ ID NO: 103514 - DNA, 422 bp, Heterodera glycines
ttgatgtatatttttctgatgattacaaaataaattaagattataaatgcctttattctatcataaaattaaaaaaacaaacaataaatgtattttttaaatgcaaaatatgtatataacaattcaaatggttataaaaataacaataaattatatgctttcgtatttttcttctgcgcatatgctatgaagaaggtggctcaaaaatagctatttacgttaaaatttatgatttggtaaagttttttaaggtataaacgcatattctgggtatattcgagaaaaattttgaacttatttaaagaattttggaaaagatttaatttattaaaaggtttattgttagcatattataaaaaagtttaattagaaatggcacatatatttttaaaagtcaaaattatttgcaatttttagagatg

SEQ ID NO: 103515 - DNA, 271 bp, Heterodera glycines
ggctaaaatctacttaaaaaattttcatttttcctataaaaatcagcggcgaagggacaatcaatcaataaacaattaattaattaattaatcaatcgacggacactttcatttgattcattgtcattaatcacagtttcacaataactaaatacttttatttaaaacacaaaccatttttattgacgtatttgaatttatcctaaattttgtggtttatttgtgcttttccattctattattgtccattaaaaagtgtatgtccgtaatg

SEQ ID NO: 103516 - DNA, 546 bp, Heterodera glycines
ttgtctctaaaaaaaatgatagcttgtttattcaattattggcttatttagcacaccatatcacacgtaaattatgttatagataaagcagcatgattggatttatcagtcaacactaaaaaattaaatttgcaattttgaaatttgcaaaacataacgccaaacatgtcaataacaaaaaaacaattgtcttaggcttaggcttggcttaggcttctttaaaacgtagctgtaccggacctatacttttgctttcctttctctatttttttctctttagctttatctgtttcatattttgttttgcttttcctacttaattaaaaattttatttccaaataagtttttattttccatttattttctctgtcaattttgcggccacaaagtctctgtcactcactaatttttttcaatttttaatacttttaaattgtcaaattcatttttagcttgtctttcactgtcgggtattaattgattgtttccttctgtgttgccattttcatttttgctctgcttttctctctgtctctgtgtgaatg

SEQ ID NO: 103517 - DNA, 1003 bp, Heterodera glycines
gaccatcgccgcgggggtggctttttcctccacggcaccgtccccctccccttcctccttttttgcctctttttgcccctccccgccctctccgctcattttatgctattgccaccactttcctaaataaaaaatgcacggatgaggcgaataggaataaacgaatcctcgacaaagccgtgggcaatacgtcaaacagaaataaatggcttcgctcggggcaaccgattcattccaatggcaccaaatttggtcctaagggatacaattaattaattacttttcaatagcacattatctctatacaatttgttttgattctgtgttatttgtctcgctgataaattggccatccaaaggagctcatttttgtcctctgttgtcgccattggtcggctctcgaattttccttcagccgagaaatgtatcgggtaagaaaaatgccgagtaattggccctaatcggtcgcgcaattctaatttggaattccacgctaatggcacctccggggggggggggaaggggagcagtgccatcattcgcattctaaaagcggtgttttctgcttcgtcgattttgttaaccgtgaaacgtcaggcattcgtcccctgccctcctctcctcccattgtttctccctcccccgcccttcgtcgcctccctccctttctttaatctttgcgttaatccgctgattgcgcactcattggcactaatccgtggcattttgccccagggcaaaccttgttcagttggccgattattctttattggtttcatcgtcataatccacgttaaatttacatttgtcggctctctctccgctttccccccccccctcctttttattattaaatattcccatttttataactttttattttccaaatcctctcaagtttttctccgttgctgaagaggccgtcagcagcacttcctcctccgtttcgccccattcgatttgtcctcttccctccgcgccgctttttccctttcccaaaatg

SEQ ID NO: 103518 - DNA, 382 bp, Heterodera glycines
taagtatcaaacgtaattgtatagctggcacaagaagtgatggcacaaataaatttctaaacaaaaatggaaacgaaaattgaaatattttataaaaaaatgtaagcagcacaacacctccttgaaactgttgacccaatcgacgtttctttctacgctatttcggcataattggcataacagtcgcttcggttggccatttggtgtcggcgtgtgcacccatttggacaacgcttggccagcagaagttgcatttggatcatcgaaatcatcaatcaccgcggcgggaaacaggtggccggaactgattgaattcaattgatcaagcaagatcagtgagaattgttgatgaaatgagacgacgcaaattgtccaaatgatg

SEQ ID NO: 103519 - DNA, 114 bp, Heterodera glycines
atttgcaacgccactaaatgacccgggcagacagccgttattgttgcgaaattggggggggggacggcatttgaaccgattgatttgagggttgccatccgaaaaggcgaaatg

SEQ ID NO: 103520 - DNA, 330 bp, Heterodera glycines
ataactcagtttgttgataagccattttgttatcattcgtgatggattacccgagaataaatgagcgtgaactcaaatttcccattccctccgggattgttgtcagcgggccctcctcttcgggtaagacgcagttggtccttcgcctgttggcacacgccaacgagatgtttgatcccccgccgaaggtgataggtaagtccccaatgccacgagtaatgagcagtccccttgggtttagtttgggcttacggtgagtactcctcgcagatacccgagctcgagaggcagggggtagtcccgcacgcaggcccaccctccgaagaaatg

SEQ ID NO: 103521 - DNA, 94 bp, Heterodera glycines
tttcaagcgacctattattgccatttttggattttaagcaattattttaagtaatatttttggtaattaattaattttttttatttaggaaatg

SEQ ID NO: 103522 - DNA, 69 bp, Heterodera glycines
aattaaatcattttttaatgttaattaattttctaataaaagtttgaaagaaatttcggcaaaaaaatg

SEQ ID NO: 103523 - DNA, 503 bp, Heterodera glycines
ttaaaatcataaagcaaaagtcatttttttaaattttctttcaaatttaaaaatcaataaaacgcttttttgaggcgcgctttttccaaaaaaactttttgggaagagggggcaggcggcgccggcaggcgccgccgggaaaatttttgaaaatttgattaaaatttgttgacagattttcaccaaaaaatcatcaaattttgtgatttttgtatcatttttctaatgagaaataagagttttggcgcgccgctgagaacagtttttcatcaaattaccaaattttgcgattttgggccattttctaagaaaaaataggagttttgggggcccggcggtgcccataggcgccgccggggaaaaaattggaaattttggtcatttataaacgggttttcactgaaaattagccaatttataggtaaaattttgaaaaattttatgggaatttaatccaattcttaggggtgtaaaagtcgcatttcgcgccaaaaagcgaaatg

SEQ ID NO: 103524 - DNA, 145 bp, Heterodera glycines
tttgatgatgattttgcaagaatgatttgattgtgtgagaaaatctcggcttaaatagctttcaaaagtgggcgtggcctaattttctgggagtataaaagccccggcaatttgtcagctatgtctcatttgttctgctacaatg

SEQ ID NO: 103525 - DNA, 882 bp, Heterodera glycines
tgacggcataagccgcgtcagcgtgccgcgcctctccccaatatttggaaccgtcattttttgtttttgatgttcaaatttgtctattttgtgacggcagaaattttgagattattgtttttgctgtcctccggcatcccgtttttaattgatctgtgaattgtaaatagcgatcaatacaaaacgtagaaagggcacgatcaatacaattggaaaagcatgcttgttcaatgtgttagtcaaattgaagggccgttgctggccatttttgggaaaatttgaaaagtggcgaaaaacagttcgccaaaatttttgaaaaatacacatctaataaaattacagcaagttttcgagttttttgatcagaaattcgaatgcctcacggcagcagggatatgtgtgttgccttcaaaaaataggcaatcgaaaacggtattccgacggctaacaataaaacatttgggcaaatttttaaaaaagaagctaataaaattttaaaaaaatcgccagaaccaagaagaatcatacggaaaacagaaagttttccggaaaaacacaagccaattcagaaattattttcctgataatacaaaccaaaacataaatagttgtccggaaaatcacaaaccaaatcaggaatttatttgcggaaaatttaaaaaaaaaacatttgagttttgtgtaaaacacaaataaaaatgttaaaaacaatctttggaaatataaatcagaaatgtgaattttgtttttgtttatacaaaaccaaaaacagcaaaatgtttccggaaaaactcacagcaaaaaagaaattttatccggaaagctcaaggcaaaacacaggattttatttagagcataaaacaaaatccaagaatagaaatg

SEQ ID NO: 103526 - DNA, 272 bp, Heterodera glycines
tgacacatgggaaaagaaggtgaagtcaagagaaattctaagtgttagatttttacggagaataaaaaatttaaatatgaataagtgtgtttttaaggcaatttcgtcaaaaggatcgatttaaaacattgacggaatgatttcgatgggacatttgaacaaacatttgatgaagttggttttgtgcccaatttttgatgatgaatacaaatttgcaagcaaaaaccgcttttcattcctttgccaatgtttgcttattaatttctctgatg

SEQ ID NO: 103527 - DNA, 531 bp, Heterodera glycines
ttttatcccactaaaattgggccaaataccccacaaacaagaggaaaaaaaataaatttttataagaattttcctcaaaaatgcaagtggtcaaataacccgagatagataagaacatagttattatgtataattaacataaagtatcagtgaagcatattttcatattcaaaaagtataaattcaaagttattttttgaattttatgtttttttcttctttttcaatcatttttctgtttttctgtaaagatgttttgcttttgcatgcaaaaattctttttaataaatagaattttaataaatttaaaaattgtgttttcttagttacaaatgcaatgatttggcggcggcaaagcgcatattgccaaattgggcgctcgaattcaacaaagacatatcgcaaaagcattacacattcattagcgacaaatttgcatcagaaagcggcgacatcaaagcaaattattcaaaatggtttagcgccaacaaattagcagacgaatgcgaactgtcgcacgcatttcgtatg

SEQ ID NO: 103528 - DNA, 110 bp, Heterodera glycines
attttcctatcgtatttcattaaattttccaaaaatttttcccggcgtcgcctatcggcaccgccgggccccaattgaaccattattttttgaaaattagagccaaaatg

SEQ ID NO: 103529 - DNA, 348 bp, Heterodera glycines
tctgtaaaaaatcaataaattggcttgggtttcactgtgtgtttgaattggcgccctgttgtatctttctctaacaactactctctcgtctatgtgtttgtggatgggcgtggcctatcgcttaaaagggacagcccgtctggaggtcgctgcgcgctaacacccctctcactatcaatcaataattacgtgttttttcgcaggttcattttatgcttttaacaattataatcataaactatttcttaatcgtaatggccccgagaaaaatcaatgatcaattggtgtttgagaacaaaagtaatcattttttgagttttttataataattttaaatttaaagaaatg

SEQ ID NO: 103530 - DNA, 162 bp, Heterodera glycines
gcacaactttttttaaagaatttttttgaatataaattaaaaaaacacaatcatgatttgaaatatctgccgttattgataatgagtttactatttatcaggcaagagataaatcccattagaaaagtctttaaggtagttatagttgataatgtaaaaatg

SEQ ID NO: 103531 - DNA, 160 bp, Heterodera glycines
tgatgtccatcatgcactttgttctgttggatgtgcgcaacgcgtcaatgctctccccgtttttgcctccaccaaactctcggtgcattccgcgttggcctacccatttgcaacaccaaatttcaaccggcaatcctcgacatcctcaacagcacccatg

SEQ ID NO: 103532 - DNA, 112 bp, Heterodera glycines
tattgttctggtgctgatcattccgactctttcccaggtgtgggtaaccaaaagtttgccgtgccgccatctgtcgtcaaaatcaccgcagcgaaaatcgtcccgagcaatg

SEQ ID NO: 103533 - DNA, 169 bp, Heterodera glycines
agagacaaaattttcttggtttttagcaggccggttttatgtcgctagaccaaagtgatcaatattttgtctaaatcttcgctaacgagtcacctaagctcttcaagctcattaaaaaatttctaagccttttttattggagactagagctaggaaaattataaaaatg

SEQ ID NO: 103534 - DNA, 219 bp, Heterodera glycines
  unsure (1)..(219): unsure at all n locations
tgaatatttaaggcgaatgaatatttaaggctaatgaatatttaaggcgaatgaatatttaaggcgaatgaatatntaaggcgaatgaatatntaaggcgaatgaatatntaaggcgaatgaatatntaaggcgttcttttgttttttaaaagcatagatattttaatttttatttaatattttcaaatttttcatatgtactgactattttttggatg

SEQ ID NO: 103535 - DNA, 194 bp, Heterodera glycines
aacggagtatttttgtttttactgtattttctttttcaaaaatatttttataaaaaattgattaaaaattgtaaaagcatttttctaaatattttatttatgaaataaattgtacaaaaatttacatttaaaatagaaattttaatttactagctttggatttccaggccaagctgaaaaaacgtcacgacatg

SEQ ID NO: 103536 - DNA, 216 bp, Heterodera glycines
tctcatgcaaccgttgcaattcggtatgaacggcatgtatgcgccagtcgcttggcctcagcaaccgatgatggcttatccaccaccaaattttcaaatgttttgtccgccaaattttgttccgcaaatgccggttcaaaattttgtgccatttatgaataatttggcaccaaatgcatttcaaccaaaattcctcaaaacgcaattcaaccaatg

SEQ ID NO: 103537 - DNA, 526 bp, Heterodera glycines
ggttcgtttttaaaattaagatccccgacaccaatcctagatttttcaagatttccagttttgaaatacgagtccttttttcatttttttttggcatcttgctctcgggttatcgtttttggaaaatgaaactaaattttaaaaatcttgaaattattcgatagccctaaatgttttctattatcctgtaaaatttcaaaaaaaaaaattcgttaattttcaaaaagttatgacctgtgaaattcaaatttttttttgtgttgaacatttttggtcataactttcttgaaatttaaagaaattttttgaaattttttaagatcatagaaaacaagttttttagggctaacaaaatgctatcaagaatttatcaatttgattgcttttgttaaatcaaaatttccataattatttttgcgtcaggcatttccatcaaaatgcccccctcaaattgactttttgccttaaaattttttacaaattttagaaaaacgacaaaagacccttcgacatatacagcaaaatg

SEQ ID NO: 103538 - DNA, 490 bp, Heterodera glycines
atgaattgtgaaaaattttaatttgtcataataaatttcataatattttgatttatatacgtataaaattaattaaattattattagatggccggatttggatttatatgtgctaaaaacccaataatgtgagaaattatgtgttaaaacgaaaaccataaagttttaaaataggccatttcattccgtcaaatattattttgcttttttgtgccaagtaaagaaaaattgaaaattttttagtcgatgaaaatttttttaaaaattaatttttcttaacaaattttaaattttttggccatatgcaaaaaatgcgataaaacttacaaaatataattatatgtgcaaaatgcataaaatatgctttttttattcggtaaaaggggattcgtaaaccggtaacagtttttcattgtggttttgcgaaaaaacaaaatttgtatatcctaaaaatggtaaagatattgatgcaacaatttcggaaataatg

SEQ ID NO: 103539 - DNA, 108 bp, Heterodera glycines
actgaatatgttaagagtcagtccaatcaaaaaaaatattagagtttaagggcaaaattttttggcgattgtgtaaatttactgttttttggtaccgatgccaaaatg

SEQ ID NO: 103540 - DNA, 427 bp, Heterodera glycines
tctcaccataacaataaagaattttcttaggcggtggttcaattaaattcttatgatgttttaaaaaccgtaatagccaacgggtcttaccactcccggtagcccctgagagaattagagtgaacggaccgcgaaacatttttaattcctcttatttatttgacctatttatattttcatagggaacatgtttcgcgcatttggggcatagccagaaattatcaaaaaatgatgtaccgaaatgcaaaagactgtggcttttacatctcttacaaatctcgtaatgacaggggcagtaatgacaacacttaattttatgtggacagttcattttttcaatttaattttatttttggttgctatttatagaaggggtatataaagggagtgaaaggaccatttgattggtacattgtatcaaaaaatg

SEQ ID NO: 103541 - DNA, 1003 bp, Heterodera glycines
ttccatacgacctctgctcgataaagcatggagataatatggcatcatcataattagggatgccaaaaatatgcacatgcatattttttcctggactgcgggatgcctgaaacgcacgaaaaacatgtttttagcttgatttgaagcttctaggatgactttccatgtgcatattttgcatatttgtgcatatttcgcgatttatgtgcatattttatgtgcatattttggcgtttttccaaaaaacctctaatagatcggcccccgacagacaaattggcctttttgacctcaaaaaccggaaaattttccaaaaaaataattttttagcaaaattttcacgaaaaatattgaataaataaattttctcaaaaaatggttaatttaggtcaaaaataagcaaaattttgcttttcaggttgatttttcgcaaaagatgagtaaatttttgctttatcatgtttttttctcctaaaatgatttttaataccacatttagccatttttgaagattttactttatgtttaacaaatttgaagaaattttgagaaattacaccctcaattggaaaattttatgtgcatatttttcacttatatgcatatttcacgatttttggtgcatattttagcgcatattttacgattttatgtgcatatttttggcatccctaatcataataaaaccgagctaagattcgcactcagcacttttttccgggcggtgccgcggtgccggttctttttaaaaggaaaaaagctgaaaattttactggcgcaagctaggatttttcaaaaaaaaaatttggaaagtgaaaattaataattttttgaaattttttaacaacaccaaaatatggaaaatgaaaaaaatatggtaatttaaaatatcatttttctaattttttctttttttactgaatttgttctgaatttgagttacgaatccccccggcggccttcaaccgaaattgaaatcatgcaacggaagtgggacattatg

SEQ ID NO: 103542 - DNA, 377 bp, Heterodera glycines
actgttattaaatgctaattaacaacgatgagtaataatcattaagattcgaattggcgctgctgcgttcgttcggcaacttttcgaattatctcgcaaaacaacgtgtctaagaattccattgggacattgtgtgattatgtttttgacaacaaattgaccaatttgggattcactaatttcgtttcgtttgcggtaagtgccaattcaaacaaatatttaaatttgacattcgtggaccagccaatattgaagttcatttatttatttgcctggtgtaaagaaatcataacaaaataaattaatttctaaaacataaccaattgacgacgcataaacaaaaattaaattagatgatttaaattaaggaattgatg

SEQ ID NO: 103543 - DNA, 816 bp, Heterodera glycines
tttttctcattaaattttgccaccttttatttaaggcttttaatttttcaaaatttggctctattttttggataatttcctttgttttattgaatatccgcatgcattctccgggattattttgatcatattcgaatttgttttcctcaatttttgttttgatcgtttctatttccctttttaatacgcgattaaggaggggtattttgctacgaagcgtaccggacatagtttgtattttaaaaattcaaaataattaactaagtacccttttatggttatttagtggataatcactatcgagtcgaattttaattgttttatcactggttaaataatttttattaaaatttaatgatcacagaattaataattgttatcacaaatttaaaaatttgatcacagaattttatttgtttttgttaattatttgctcctttttttcataaaattctttcaatatattctccgtatgttttgggcgaagtttcgttaatttgtattccgtttgtgtttttaattttataagttcagtcagtgtagtgcttttcgccacttgtttctttttcgtgttggctttggtcgtcggagtaattgaattaggagtcgctctgtccacttaattatttaaattagtgatgggtttgctgtagggtttattatgacttttaattatgtttggctttttatggtgtcctttttcggttttttgattgggtttggtgatccgtgtgtgtgtgtgtgtgttttttttttaaattgggtttgtcaacccttgattttgtatgtgcttggtgacccttatacttccggatg

SEQ ID NO: 103544 - DNA, 364 bp, Heterodera glycines
cccccccccccccccccccctctcgccttaacggggagggcatcggtacccatccattccatcaatgctcaaaaggttcttctgttcgttcgtcccctcctcttccatcatccgcacttcttcttccgacagtttcttcattcattcatctcttctccttttccccgtcgtccatcgcttttactttccgaaaaatgtccataaatgaaaagtgcagatgattttgtctccgctttatccttttggcactttgtccatttgtttcattttgtcacaatgttttgccaaattcttaatccccattaattttccgtttcttaggcttttcctccgattgttttgtgctttcttctccctgccaatg

SEQ ID NO: 103545 - DNA, 220 bp, Heterodera glycines
aacgctttaaacagacattggacgacatttaaatgatgtgtaaaatgacaaaatttctacaatttattcatttttttaaaataaagcatttcactaaccaataaccgaagaaattgttgttttcgctgctttttcgctacacatttcaattcgtttgttttcatttgcttttcccattatgccttcagaatattcccgatgattggcaaataacaaaatg

SEQ ID NO: 103546 - DNA, 300 bp, Heterodera glycines
ttgctgaggggtgttaatgtatctgcaacatcaggagggacggacgtgcccgagggtatatataccaatgaaattttccattctcttcaaaacaaacgagttgctgaaatccaaattgaaattcagaacgcatttggacgatacgtaaagtttaactggggtacttgcatcatcacgctacatttcaggcgtaaacttttttgatcaacaccgaaaaaaatgacgcacataccttttaatcccgactctgtagattgggcgccttttttggcactacagcaagaggggaagggcgaaatg

SEQ ID NO: 103547 - DNA, 295 bp, Heterodera glycines
tgccggattctgttgattggattttttgcatatgtacataattaaaattccaaattcggcgcaaaattttcttaaaaatcgttaaataaagtattaactttgaagaaaaccaagtaaaagtcaaaattttccattttggcttatttgaaataaatttcttattttttgaaagtttaaatgaccaattagttaaatgtctgaactgagctaattaataggatgattgactaattatgaaatgccatactgaaacttgcctggaggcaagtaacaaatgcttggataatgggaaatg

SEQ ID NO: 103548 - DNA, 1001 bp, Heterodera glycines
ttcaatgagtaattttatagtaaatcagaaactattaccttattatcaaaaatataatttaggaaatgctacttaatatgatagatttattttatgaaaaaaaacttatggctgatgaaacggcataaaatcgcaaaaaaataaatagttgtttccatttcaaacaatgctttaagaaaaatataaattagaccaaccaaataaaccgtaaatcagtttttcgattatggaaactaattcttcagaccatgattataagtaattgagaacgaatgtaaaaagtaaatattttcctagttaactaaaatttcaccgcacttaattaattaattttttattaaatagttttcaaccaatgtgcaaaattttaccttttgtgacagagcttgactttactttcgtaggttttttttatgatgtcgtacagtaacggatacattgccaggctttacagtagattttacccaattaattcgaagcaaaataaagaattgaaaatacaattaagatactgcataaaaaagctgtttttcattttttaattatctttaaatattcaaatgaccgtagattcaacctcttttttaattaaattaaaattttaattcgagtttcaaaacctaacggcaaaatgaaataaattatgttttgttaattattacaatgggccaacaaatttaagatggcattgctttaaaaaggagacttaaagccaaaagtgattctattgattctaattaaatttatttatttaaatttattaagatagcgatattaatatcgattcttatgaagcagaaacaagcgcaaaacggcaacactttatataatgtaaaaacaacccaggatttattggcaattttgtgtgttatcaaatgattaaattcagcaacagactgtggtaaaataacaaatggaaataatttatttgaaataaaatattataaaaaaacatactttttcgtgaacctactcttttcttgaaactttgagacaaaatg

SEQ ID NO: 103549 - DNA, 1003 bp, Heterodera glycines
gaaggtccaaaataagtacatacctatttctaaggtcgactaagtgcgataaaaagcaaaaatttcgaatgtgtttttcgtgcatttttcggagttaaagccgcagaaaaatgatgtttcattccttcgctattctccgttgtccttttctctccctctccctcgctgttcagtcattttcctctgtcttctttcgcctccactctttcccttcctccgtttgcctttcctttttctcttttctgttgacacaatcctttgccttctttcctttgctgccgcctgttttctttgttgctgttgccaacggcaaattctttctcccctttccctttctctccactcttttcccctcctctcttcctctcccctttcatcattcacggggttattatcattctctttcccttcctcttttccactcgtttttattaattttttgggccattttgattttatctattgctcaatttccaatgcatttgttttatatcgtacaatacaaacagcagaaaaggcgtcactgctcactatcattgccatcgacaaccgcactttgccagcacataacagccatcaaaaaattccattgccaattgaatgtattgacaaaattgaactgcattacacgcttatcattgtggttgaaggatcataataaattcataagctttcctaaatatcattattatttatacagttgtgggtttttgggtaggaaaagcagtttttcattttttacgagatttgttaaattaatgtgtaacacccccaaagtgtatgatgaccaagacgtacgttggagttcagtgagaatgagtgtgtggtggtgtctctgttcgttatggtctccgtccccatttatgtgcatcaaagaactcgcaagtttttgttcaaaaaaataccgaaatacaacaacgggaaaggaatcaaaatttcaaatttttctcacctaccgcgcgttatttgcgcaaaatacgaaattttcagccccaaatgaatg

SEQ ID NO: 103550 - DNA, 132 bp, Heterodera glycines
acattatggaaaaaaatcgatgcgataatttccatttttaaacacaatttggaaatatcaagttaaattgagagaagtttttctctcaaatttccttactatttttctcttctctgcccgccgctaaaaatg

SEQ ID NO: 103551 - DNA, 110 bp, Heterodera glycines
tttttaaattcgcataatcattttcaattagtgctgcaaaatttaaattaatttttaaccgattattttattatttttttttatttttgcgtttttaagcaccgaaaatg

SEQ ID NO: 103552 - DNA, 352 bp, Heterodera glycines
ttcagacctgctgatttaggggagaaaaaacatgatgtgagaaagtatgggaagcagcttgtttttcctccgaaaaacaataacattttctttttgaaaaatctcaattcgataaatttatagttttttttaatggaaggcgtagtgcagctgtgaaaacaaatggcgttactggaaaagtggtagaatttgatttttttagttttctcgcgttttcagggtcactgatcaaaagaatattaggaaattttttaattggggcgaaccttaccaccagcccgcctccagaaaatctaaaatcaatctaattgtaagctgaagaccccccccccccccaattttttgcaatatg

SEQ ID NO: 103553 - DNA, 213 bp, Heterodera glycines
ttagcagggggcgggcaaaaggacaagcaaaggagcagcaacagcagaagcaaaagcagtgtcccaccaacgacaccttttgacagaatgccaaaattgcatttaaaaatatatttttggccaaaaaataaatttgaaaataatttaggaacggcggcagagaaagcggcggccaaaaagcgcaactcgtcaaccgccagcaaaaagaaaatg

SEQ ID NO: 103554 - DNA, 427 bp, Heterodera glycines
  unsure (1)..(427): unsure at all n locations
tggctgcattcaacaagcaatgtttgtaaaaaatggaatttaaaattttcaaaaaatgtttgaattcggttcggcgtccgaaattgagcctaaagaagaccagattcgtgctaagcacctcggattaccccctgaaanaacattttctcaaaacttatttaaaaaaagttttcgggaccaattctttaccattgcccattaaaatactataaaaatccgcaaatgatgaatttttttcgctttccgcacgtttttcttacaaacccttgtaacaaattgataattgctacttgttttatatgttgccaaaaatgggatggggtgggcattctcttaaatcaccatcaaattcaatgactttttcattacatttccatcccttagacttccatttgacttttgaccattttctccgtctttccttatg

SEQ ID NO: 103555 - DNA, 518 bp, Heterodera glycines
aagcatcagagagccttatttaacttttaattaacatttggtgcgtttcagagcacgttctaaaaaatatttatgaattaattttgcaaaataataaataagtaatgaaaaagtcagaatttcgaaaaattttaaaaacaacaagcgttggcattttttcaggttaagttagtcctttacaatggagaaggcctgcaaaatttggagagattatatcgattttagtgcgctaggttcgatgaaactttttaaaatataagcctaaactttttggcctgtttaaaaaggaattaaaaatttttaaaatatttattcatctcccttttgatagaaaaagcatcagagagccttatttaacttttaattaacatttggtgcgtttcagagcactttctgaaaaaatacttatgaattaattttgcaaaaaataaataagtaatgaaaaagtcagaatttcgaaaaattttaaaaacaacaagcgttggcattttttcaggttaagttagtcctttacaatg

SEQ ID NO: 103556 - DNA, 420 bp, Heterodera glycines
tattatttgtctagcgaaatttttattaatttttcttctcctaacatattaattaataattattgaacttaaaaatggtagtaggcgaaaagcttaaaatttagtgtggttgatgtcattcatggccatggccatagtcaattagtgtcgagccaaatttttttgtaagcgcattggcgaaagaaaaaatttaaatttttaatttattttaacatcttttcattcaattcagaatcaattgaaaaaataggattttcgatttttgtgttcgagttcgggttagggattggtaaaaattggtcagattcatgatctgaatactctcgactccagataatattttcatgatttttaaacataaactttttgtcaaaacaaaatgtccacttagaattcaaacttcatttgatggtggcaatg

SEQ ID NO: 103557 - DNA, 422 bp, Heterodera glycines
atttagcaagaagaaattggtggtcgacgggagacggacgaagaaaacaatggagaaaacaattcgattttgaatagacacagttcgataaaggtttttattcgtttttacaggaaataaaatttttttttaatttttgagcttcattaaaaactgtgttatcatttcacttatatttatttgctttaaaaacctcaaaatacagttacagcgtgcatgggactcgaacctgagaccccccccccttttggtgactaactcacagaccactaagacgaaaaatccagcatatttgtacttggagcccaaaattgggccgctgtgtgtaaggttcaaaattctgctgggtttactttgtttcattactcaaaattttgtttttttttctcaaaattcttgaaatattttctgttaaggaaatg

SEQ ID NO: 103558 - DNA, 709 bp, Heterodera glycines
cgcatgacaaattcgtcacgcttttgtctttgtctctttttgctgtaccttggcgtttacaaattcgttttaagaattattccttcccactcaattctttcgtccttattgctaggtcgacaattggtccgtgggcgtccttctatacgaatttctctcgggcagacctccgtttgatctcgaaaaacacgtggacactttgaacaccatcagaaaggtggggaaaatgaatttgagtgaccgtactcttttaaaaacttttttttttctgattttccattgcgcaattaaatttgggcaacggtttagagatcattggtgccgataattttctttttatttcgggaatattactaggggtaatctgaagcgctgagcacgaattggccgttggtcaatttcggacccagaatccggattcaaactttttcgtcaaaccataaaacaatatctttttatacaatgtttaaatgccatgcatttacaaagaaaacaaatttgaacggcattcttaaaaagggaatctttgagggtgcttttcactaatcagaaacttcgaatgaataagtgagtgcacaacatattcaggtggcctatcaattcgcgagttcgtttcccgtcggcgccagagacattgtgagcaaagtaaggaaggaatgaattggaaggactaaaaaccacgaggagaaggaccttttccaaaccaatg

SEQ ID NO: 103559 - DNA, 515 bp, Heterodera glycines
ttaattttttcaggatttttttaaacattttttcgggatcttcgttttctgggcatttaaaataaaaagttgtcacgagctcttttatcccaaattttttattttcgtttgtgtgactctccacttcttcgaaacattttcccaaattagcactgtttttgaaataatttttggtatttttcgagcggcggatatcttttgaaatttcttggaaaatttctttgaccaaatttgattaatttaaaatattaaatgaaataaacattaatagaaaattatcaaaacaaaaattattaataatatccaaagggcaaaacattaaagtgatcgtcaataattccttttttctgcaccggcgtacgcttccacctttatcttcaaaaacatccgcacatatcctttgaacagttgactgtcaaactgctcaaaatgataggcccgatagaagcctgtgacccgatatcccagctctaaagccttccgtaactcaattgatgtgaacgttcccaaaaatg

SEQ ID NO: 103560 - DNA, 538 bp, Heterodera glycines
  unsure (1)..(538): unsure at all n locations
actattaattaattttanctataacnttaataaaataatttgtttcagcggctacgaggttttatacttcatgcattaagagtgaaaatcagtaaaatgctaatattcaaaaacaaaaattcaaaaattataaattaaaaatttattattattgcaaaattaatcattgacatctctcttttaatattgttaaaatttatataaaaacatttgctgaaaaaatccaaatattaatacaaaattcgatttatataaaacattaattttaatgattttttaaattaaacaaatattaacttgcaaaagattttttaatcaaaataattataaattaaatttttggcttgggttggcaaagaaaaaatgctgctttaaaaattattctattttaatattttataaattattatcatgttcaattaagacagcttaattttttcatttatatgctttggagtttattttaaaacgaaaaagaaattgaaaataaagcaaattaatatttatatatcctttatagtacgctgcagggaaaatg

SEQ ID NO: 103561 - DNA, 336 bp, Heterodera glycines
gtaatactgtgctttgtcccccccccccttttcgaaaattttttatgatttcaaaagtctaaaacattttcccaatggttttcggggtcattgatcatgcatccggcacccatttcgactaattcggaatcccggcttcgaattcgacaaaaagtcgaaaattcaaaattttcgaatttcctctttttagtctaaaaatttccaaaaaattgcgttaagttgaaaaaaaaaactttttttgaattattctggtctaacttttttgaaccttaacgaaatttttcagaattcggcaggattaatgtaaaatccgcccatttcagattatgaaatatg

SEQ ID NO: 103562 - DNA, 378 bp, Heterodera glycines
tgccatgatgaatgcccctctcaagctgctgtggcgagagaaaacttccctttggcacacggaaacggtattttcggccgtcgtgcaggtgaacaatcacatattgtcggtctgatgtacccagctttgcccaacttaagccaaaaatcggacccaatagccatgattttcgcccacctgtttgggtaaattatgcctgacagtccaaccatccacccgaccccatcgaacaccaacttctttggcaagtgcactttgaatttgtttgttttatttccaacaaagccaggcgtgttgctcggcaaaattacaaagaaagagtttgtcatttgatcaacaagtataaattcttcaaaatgagatcgtccttatatcatg

SEQ ID NO: 103563 - DNA, 294 bp, Heterodera glycines
ttgattctgtattccgctatgataccgtatcgttttcccgtctctaccaattctcttttactccaactgcaatcaaaaattgtttgactgtgtgactttgatttctcataatctgttgtttcttttttttacacataattgttttgtattcttttgacgattaattttttttatctgactttctttttatgttaatattttcgccaacagttgcatttcaatcactttttgtttttcattcgcaattcgtttgccttatattcgatttgtttgtttttagggtctcaaaaaatg

SEQ ID NO: 103564 - DNA, 833 bp, Heterodera glycines
ttaatctaaaagcaattctgataataaaagagaaaaaaaaatttttgaaaaaatttgacccaaaaccgggatccaaactgaatgagtaccttttccgcctggtttggggtgtctatgatgacttttactagtataatgcctatttttgactttttgtgcttaatgcctatttttgtgcctattcgccatttttggcgcttttttcaggattttcggaaaaattcttaactaaaatgaaaattacacccctaagaatcgatccgaaaaattttcacaaaaattgatccccaaaattcaattatttttttcttaataaaaatttttgaaaaaaatgtccttattcgataaaactttaaaacaacaattgaaatataagcaaaattaagttttttgattaagtcgtttttacgtgatttgctacctaaatagtgttaataagaaaaaaattttttgcctatttttgtgcctattcgtggatttttgtgtctatttaatgcctattttgcgattttttatgcctttttaggtgcctatttcgcgattttttgtaccaaaaaatggaagccctaattatgaatgatcaaaatcaaaatgaacagcataaaaaagcattgaccaatattttgaattagcgcgcaaaggcaactcgtacaattaaaaaataaagcataggctcaagaaagcctaagtttcggcctaaacctaggcgtaagtctaagcctatgtacgagttgctttttgtacgaattgtcataacacctgaaaaattaatattagactaatccttagatttggcgttttttactattgaatgctcagaaattgctcaaatg

SEQ ID NO: 103565 - DNA, 302 bp, Heterodera glycines
tttgtacggcgactttctctttgagctgttctcaaaattgttttacccggcagaggcaaatgggcccaaagggacggccaatgataaaatggcgcactatcagcaacagcagccccttaataaggtggtccccccggcccttccctttggtgtatttggtgagggtaaacaaaatggaattggaaagagaagggaaaggcggcgaagggacggacattttgcagcgaaacttcgatttaccaatttattcagcagattgagggggggggggggaagtgttgtttggtcaattcaccacgatg

SEQ ID NO: 103566 - DNA, 930 bp, Heterodera glycines
ctctgcccatcttttttaattattattttaaaaaatgaatttgaacttttgaagccctcaaaactaataataaaaaggttcccatgcttgtgattatgaatatttgatgtttccaaatttggcattttatgccaattttagcacaatttttgttggcggaaattttcgctctgcaacgataattctttgttattcaattattgcgtgtgaagcatgaagaaaattgggattggacatataattacccactctgttggccatatgactaaaggccctccactaaaaatggacgcaaaaattctcaagattttttttttgctggggtgagcatgactattataaaacacgtaatttttagttcacttttttgtgccgttatcttattaaaagcctaattaaggaaataaaaatttaggggtataaaaactttggcgttacctttcaaagtcgtatattttgaattttcttaaaaaatttggacccttctggttttatcattttttttttttggaaataatatatagtcatgagaacttatttctggctttatttgtttctgatcatgaatgtgacatctattttagcctgtttaaccaatttccgacttcctaatttaatttgaaaaaataaataaatcgaaaattagaatttacaatttttgttcatgttacgctttagtgattagaaacagatcaaaatagatgtcagattcgtgatcagggactcaaaaaatcaatcctctgggaacaagcaattatatggcttttcaagagcgcccgaattattaattttttaaataattgtgtttttataataaaattttttttaattttacattaaaaattggaaatctatgcaaacaattctctttggtaatttaatttggtatttccaatttaattaaatttgtttgttttttagattaaaatg

SEQ ID NO: 103567 - DNA, 236 bp, Heterodera glycines
  unsure (1)..(236): unsure at all n locations
aaaaacttcaaaaaaattttcaaaaaacgtcattttnttatttattttttaattgattgacaaaaaataagtaagaatgttactgccgtggagcggattcgaacctccacctttttccctttacttcttacaaaaaccactgaaccacacttacaagcgcttttttcgctggtgtggttttgtttatttttattttttttgcaaatttgtttttttaagtcgattaattcacaatg

SEQ ID NO: 103568 - DNA, 116 bp, Heterodera glycines
ttttcagggctagttgattcggcaggtgagttgttacacactccttagcggattccgacttccatggccaccgtcctgctgtctatatcaaccaacaccttttatgaggtctaatg

SEQ ID NO: 103569 - DNA, 119 bp, Heterodera glycines
tttgtttaatagttaagagattattattattatttctgtaaagctttattgtgtatatataatattttttaaacatggataatataagataaaccgttttgcaaaaaaaaaaaaaaatg

SEQ ID NO: 103570 - DNA, 419 bp, Heterodera glycines
agcaccgaagaagaagaagaaacagcagacagaaagcacgatcaaaaaacatcatttccaccgtttcgcctatcgcttcttgattttttaaatttgttttttatttatttaatttcacttctcagatggttttcgtcttgttccttaaataccaaaaaaatcccttcctccaatcaccgccattttttttgatgctcctttgaacatcaccattatttattctgcgatgcacttacgaattagtgttggaagaatttgacgaattgttcacttctgtcagaatttgataaacacacaaacaaaagggaaattagtgacgtaaactgttagtattattcaattattaagtatttaatctgttgcttaatgatgcgtgaaacagcctttgttaaaaactagcaatgaaattaaaaagaatg

SEQ ID NO: 103571 - DNA, 609 bp, Heterodera glycines
gttgcgtaatgcataaagtgccaaaaattcaaaaaaacctcccttgatcaagacagagaaaatttatttattcttagaacataattaatagcttagaaaaattttaatggaaaagtaatttttataatagctttatgaaaatttaaaattttttttgaaatagagaatatttattatatatttaaattgttgccaaatttcattaaaaacaataaattaaaaatatattttggtttagaaaattatttttcatttcattatgatttagatgaattcattgtaacattctcagagacaaaaaaaaaccaaattattaattcattatcctaacccaatgcttgattataaacaataaaagcctaagacaagaaagcgttaataatacggcatccaacgctggtaaacaaaaaaaaaaacaatgtttggcgtaaagtaaaattgaaacgcagttttaaggaaaattttttttttaatttctttaattgtattcgttcgaaaaaataagagatactttattagtctaattatcataattttcagtatgagaaattttcctttttttagtcagacaaaaaaaaatttgtaaatttttttccagattgaaaaatg

SEQ ID NO: 103572 - DNA, 104 bp, Heterodera glycines
cctgaacagagagacgctcttaaattctcaaaatcgctgcacctccgcggtaataactcggtgtaagcgtccgaaagcgttcttggcccgccgtgtcccaaatg

SEQ ID NO: 103573 - DNA, 169 bp, Heterodera glycines
ttaataaatatatttgttcgatcaaaattcactaataaagtgtgaaatataattgaagtattgggaaatccaataaaattaatttaatttaaataaaataaatatttaaattaattcttattgactatctgaaaagagagtcaataaagtggtgccacgaccaaacatg

SEQ ID NO: 103574 - DNA, 874 bp, Heterodera glycines
tcttttaaaaaaacaagaaataataaaaaacaagaaaataatacaaaaacaaagaaaatataaaaaaataaaatgaaaacacaaaaaataaagtattgtgtttgtccaactaaatgtattatagcaaatatttttgagtatttaaattattttatataaatagatttttcattagaatttgtgatgtatttgtgtggactcaatgtctgctaccttcacgtggttgagtctggaaacagaattaatttcctatcatttaagtgaggcatttaaacaatggccaaagcagaaaatttttttttctttttcattggggcgcaaatgtggcacaaccccttgggcccccgctaaaaaagggttttgactcattagtgttaaagaggaggaaattccggtcataaaaagccaatgcatttgtgtatttttcttgtttctgctgctgtgtaatttctaactcatcaagaatagtgatcggagaagcgatcagaaaatgggaagttgccgccgctttctccgcgcagtcgccgtccctccgtctgatcgatgcgtcgccggcttcgcgcgatttgccgctaaactcgcgccgagttgccgacattgatattttctttgccgaatttgggcacggcgacagcgaaagtttcgatggcactggcggactggtggcccattcggcctacccaccgctgggcattgtccatttcgacgccagcgaacgatggcaaattggccaaggggcggagacaggtaaatgggccaaaggcaaaaggaacaagcggatgaatcatcatttgtgatcggaaaaacaggagaacgggggaggagcaatggcattggtggaggacgacaaaagcatcagccgaggggacaaatg

SEQ ID NO: 103575 - DNA, 918 bp, Heterodera glycines
tatatgtgatttaaattatccttttttctgtttaaaaaagttttgttatttattattacatatggtaccaaattatattcatatgcatgttttttttaatacaggggccaatttcggtttttgtactcagaatttaacaaaaaaaatttgattttttatgtagtaaaaataataaaatattttacgatttaaacagaaataaataaatgattttttaattaaattttcaactttaaaaataaaataaattttgaaaaaaattcgttttcgcgtttcgcttttttgttttcttttttgggcgtttcgcttttcgcttttcgcctttcgttctgtatttttagtttcgcacagccttgatatatttttttcctgaacaagcaagggttctgaaacacataaaaaacatgtttttagcttgggtgacattttagtccttctttcggaaattttaatagaaaatttcaaatattacccccaattttgaaaaattgtggtggatatttgtattttatggtgaatgtttttgcgcatgttttacaaatgaatataatttggaaccctatttattaccatattgttttgttttttgacacgacgcggtttttaatttttttaaattattttttagtcaattattattgtctatataattcaatggtttgaacgaagcaagattttggaaacgcttctaattcagggaaaaattccagcaaagagtatgaaaggggtttaacgctccctacaaaagctgattagaagggttcaaagctccctacaaaagctgatgagaatggttcaaagctccctacaaaagcggttgaaaaggttcgaagctcctttcaaaagcggttagataactctctaaacaaagaattgaaacattttgtaataaatttggatgattcagacgaagatatg

SEQ ID NO: 103576 - DNA, 673 bp, Heterodera glycines
ttataaaataaggtatgaattatgagatttgtattaaaataattaatatattattaaatcgtatacaaatttatatttaaatagtgttattagggtttattaaatgagtagtataagggtcagcaatggaagcaaatgctgggaaataggaactgaggtaattgaattctaagagcagagcgctgcggaggctttttggttagaagaggggagctggacgttgcaggagttgcaaatgaatggaagaaaggggcttttcgctgggaatggtcgggtatttatacccacactagtgagctagaagtacattttaattaaattctgaggttatatttggacatagcggtgtgaacattattaaattttgggccgtgtcgtgtttcctacatgaaatagatttaatgaacaaaccaaagtgtttacggtttaccttgatttaattaaaagcacggttttaagtgttcgaaggttccgcatctaaatttaattagaaatgcacaaacagaacggattcacatttatttaattatatggacagcgacagcaaactaaaaagagttataattaaatgaatctaatattattacatttattttacaccgacagttttaaatgaattttaatttttaggtaatatttaatatacaaataaaaaattgatagaccatgcatg

SEQ ID NO: 103577 - DNA, 1003 bp, Heterodera glycines
taaatttaaattaaattttttaaaaaattaaaaaattttttttgaatttttaaaatttccctgttggtcccggttcccggtcccgaagaaaaatcgaggtcccagtcctggcttctcaggtcccggcaagtcccggtcccggttttgcctaaaattcccggtcccattgcactctagtaaaaacccacgaaatgtccagaaaaaaattaaagtataacaattcgtaaaataagtctattttagggttttcggagtcggtgaacttattttccggatttttataaaattgttgctgcaaatgccttcaaaaattttgtaagtttattttttctttttgccgacatttcgcattttgttcgacttttaccagagttgggatatgaaattttcaaaccaattttgaaatattaacccagttttggccaattggggacagaaaaggcataaattaattttacaattttcacacataaattattttttgtggcggcaggacgttaagcgacgaaatgttgatgaatttgacgagattttgcgcaatatcgctgcctttatgccacctgtctgactcttttcatgatttaattgaattttaaatatttttctaaaatcatagatattttgtcaaatctatgattaaaagtcatcagatgttaaaataaatatcatattcgtgatcagcgaagttggaaaccccaaattacgaattttggaatttttttgaggggggggggcgacataacccggaagtaccaaaattcatttaacaacaatttattttgttgcaaaaaacttaattgttaattgggtaaaaatgcgctaacaattaactgagtttttttttcgaattcgggtccgtggctcggaattggaaaaatccaagttcagcttcgtgatcaacacccttgaaaaccccctgaaaatgatttcaggacaatgttgacctgctgaaaaagggagtggtcagaaaggcgaaaaacaaacagcgaaagaagcgaaaatg

SEQ ID NO: 103578 - DNA, 227 bp, Heterodera glycines
actttaaaataaagttgtatggcatttgtattgtaatatagaaataaacttctataagaacatcgttctgcattccgaacgccggacccgaactcgaacaaaaaatcgaaagtcaaaattttcgaaattagtgtttttcttcaaatcggtttaaatacacagaaacaaactgaaatacatcaatcctgcaataggagatcatttatgccgtttttgaacaaaaaatg

SEQ ID NO: 103579 - DNA, 790 bp, Heterodera glycines
tggaattattcaaaagaccaaattttgggattttgagacaattgtgtaagaaagcagaggagttttagggatccgatggtggcgccaccggggaaacattttggcgattttgttaataaatttgcaccaaagattaatactaattttgaaaaaacggaaaaattcaaaattcgctatggtcaatttatatggtaggatgaacattattatagaatgcgttaacataaaaataaatgaataattcatgatcagcgcctaaatcacctttcaaaaaacaattaaattttcatgggagtcaaaaaacccataaatgaccatttattttaaaaaatttcattctaagaatgaaaaattaaaccattatattcgaaaagggatgagatttatctttttccatctaaaagtccttatccatgcatatgtacaaatcaacaaattcaaatgaatttgctttgttctcctcatcgtttttcgggtcataattttgccgcaattattttgttattttgtgccctcccgcataagaaagtgaagctcatcagcagcagaaaatcctttacattgcaaatctttttttacaattatacaatgagtaatgttcatttttaaataatacataataacttaagctaataataaaatgtaaattatcgtttaaaaattaaaatgttaaacatctttttttttctttaaattgacttacgctctgaaaacaaaattttctttttaccgattttggcatttgaattgataaaattacgagtttggcaattgctttatcattacaatg

SEQ ID NO: 103580 - DNA, 173 bp, Heterodera glycines
ggttgcttgttctgctgatcagtgccaatgaggggattgttggttcatctccgctgatcagtgccggtgtcggcggcagatttggtcaatgatgccaaaacgcaaccgagcgagattgaccaaaaaagccctgattcaaatccattttttgcaggggcctcgaaggcgcaatg

SEQ ID NO: 103581 - DNA, 114 bp, Heterodera glycines
gaaacaacaggaaaagagctggtaaaagtgtgtctttccagccgggctgtgtgccgtacttttgaaaagaaagtgaattacgctgtgtgcgcataaaaaggaaaagagaaaatg

SEQ ID NO: 103582 - DNA, 447 bp, Heterodera glycines
ttacggtgagccaaaaaaggagatcacttttttggcactttgtccgtctaattggccccaaatttacgcaaaatcaaagtaccgagcccacaaaattggctcggaattcgagaccgggactgggtccgaaattgaaacagtccgatccggtgagtcggcacaaaattccactacttaaaaaaggccgagactcaagaccctagaagatccccactaccatcggcataatttcatgtaccttttttcctcttgcagacgattgccgtgattttggtggccctttctctgtcgttgggcccaaaaattgatcagctcggtgagtctgatcagaaatctcaaaactgatgtgaaattggctaatgtttaagtcagcgaatcgttggagtccagccagctgagctccgctgaacttctgttggggggaccgaaacggacaacggccgaatg

SEQ ID NO: 103583 - DNA, 269 bp, Heterodera glycines
taatcctcccctaaggcgttgactctctgtccgccttgctcaatcggcgcgtctctcctcctcaccaccactctctgtcgccctccgccgctctttccgggggtgccgcgtccattcagttgcgccgtgccacatgcggtgaactggacaagtcaaagcgcggcgaacttggccacagcattttctatgtggatgagcccgactcgccgtccgcggatggaccgaacgcgtcgcattcgttagccgcgactccttcctccgacgaaatg

SEQ ID NO: 103584 - DNA, 412 bp, Heterodera glycines
ttccgagaccccgaaaattttcggaaatcagatacaaccgggaataaatgttagaaatttcaagaaaaaaatcatagaaaaatttttcttaggattctaagaaaaaaaaaactttcaaaaaattttccaacaatttttcaaaatttaatgatgaattactaagttttctcaaaaaaatttccaaaaaatcgttggaaaattttttcttcgaatcagaaatttgttggaaaaaactgatttttccattttttgttttttccttaaacatttttttttcatttccatgttctgtgtgttgttgtttgtagcgcttttcccgaccaatttccgtttccgcgatgtgctgctgttcgccatgcatttgtggaccaccggcggggcccaacaacaataccgggcacagcacatgatg

SEQ ID NO: 103585 - DNA, 133 bp, Heterodera glycines
tggcaaagctgagagagctttcaattccgcgattgatcaaaatcgccacgattaccaactgatcagaacagcgatcatacggcaattagacgatacggatgcaaaacaattgacggcgtttggccaaccgatg

SEQ ID NO: 103586 - DNA, 127 bp, Heterodera glycines
tttttaaattttcccaacaaatttttttaaaagctttcgtttttaagggacattttccatcagcgtcactatagaagcggctttaccgcctcatttcccattcatttgccttacaattgccacgatg

SEQ ID NO: 103587 - DNA, 383 bp, Heterodera glycines
  unsure (1)..(383): unsure at all n locations
acaaataaacatcaaatttnaggggtgtaaaatgacaaacttcctaagtgaacaaacttatgccaaatcgtagttatattattttttaaaatcaaaatttgccaagaaaattaataaattttggagacaaatttttgagaaaatttttcatttattagtagggatgcgatttttggattttaactgcgcgcctaaagtgtatataaaagcaacctgcttcattcacattcacttttgccaacaccaccaactgttcactcgtaatttctgaggcatgtgttttttttttgttgcaatgtttgactttttttcattttacagaaaccgacagttttgctcacgttcaacaacagcgccattctcagcaacatcgcacaaaaatg

SEQ ID NO: 103588 - DNA, 1003 bp, Heterodera glycines
accgggatcccttccgaccattttaccaatcacgcgggatcccgcgggattgaagtcatgataatttttccaaaaatctccattttttaattaatatcttgaattttaaattaaaaaatattgtcatttgctaatttttcttaaaaaatccgtaaaaatcccaaaaatttccacagatctccaaaattccaattaaattttcaaagtttaacgtaaaagttggtcattttgtgacttttatttttttcaaaaaagaattatcaaaaatttttttaattcctaaaatattattttaaaacttttaggtaatattatgacacaacaatttctaagaattttgtgaaaaaattagattagaaattgttgtctacgtatttttccttcggtgcatatctgcagcgccggactctaaaatccttattttactgaaaattttgctcaaaatcgcttaaaaattttggtttttttggacaaaatctgttaaaaatcgcatccaaaattacaaaaatttttcccggcggcgcctatcggcgccgtcggcctccacctggttccctaaagtttttgaaaaaatctcagcaaaaaaatcataaaaatctgatttttggctccgatgcacttaacgatttgctaattttcctcaaattgttaaaactgatcataggaggcgaaaatataaaaatttatattaattaaattgtaaaaaacaatttaaagctatgttgttaaatgttctaatcctaaaatctgattttttaggcatgatattcgaattttgaaaattttctaaaaacctgatataattcccattcctatttttcttcaatgggattgatcaattataaatattagagaagcattataacaaaacttgacacaaaacgtaaaaaaaattgagcttttgcaaatcccgataatcccgcgggatcccgaaaaaaaaatcttcgggattgatcgggatcgggattcggtcgggatccgtcccgatcgtttttacgaaatg

SEQ ID NO: 103589 - DNA, 830 bp, Heterodera glycines
aaagggaaaagggaataattcagggcccaaagtgcgcctgaatcgataattagctttgcaccatcgaatattacatataaattagccctatcaaatttcccttagggcctcagataatgactatctctttttcgaccacaatagtaccgatcaaagcgaaaatgagttaattcaggcagcaatgagcgcctgaatctctaaatatcttggcactttggaatgttgcatacaaattagccctcttaaattttccttcgggccccagaaaaaggctatctctttgtcggccacatcatgttccgatcgaagagaaaatggctcaatcgaggtgtcaaagaatgatctaatttccacaatcggggcgcaaatgttcagtcacctctcggggaagcttctttcttcttcttctctatctcactagggttgtctattttttatgagttattttttttaatattttcatataacaaattaaccaatcattcgccacatttttacaagcaaaatcaaaattgtaatgtgcgtgtaaattgatgcaacagcagcaggaaacggaaatgagtttggttgtccacgctttttgtcatttgaacatttatataaaaatgctgcaaagtgatgatgatttgtttattatatttattttttaattaaataaaatgaatttccaaatttgcttgcttctttctgtgcttctttcttatgcaatttgtggaaaaaatggcaatattttaatttaaaaattgtttattattcttttaaagcaaataaatttagacaaaaagaaggcaacagtcaacaatgataacaataaatctgtcccaacaatg

SEQ ID NO: 103590 - DNA, 285 bp, Heterodera glycines
cctagaaatggaaaactttcacgaagattcaatctcttaaattttattttttaaataaatttttactaagttgattgggtatttgattgggttgtgcaaaaaccaaaaaacaattttctataaatcgaaacaaagtattgtttgcttattttgatcggtcatagcgccttactgacatttgcggactgatatttggggacaatttcgggaaaattgagtccaaaaaaataaggtaatgttagatggatattattgagtttcagattttaattcaagcataaaatg

SEQ ID NO: 103591 - DNA, 1003 bp, Heterodera glycines
aaaattttcttaagtaaatcaaaaaatttaaaaaaaatttaataaacttcttattgaaattttgagcattttgacgttccgtaaaatattatctatttatttcgaatttataaaaaatattattttattttaataattaactaaattataaattctttcgtgaaaatatttctacaggttcccgtataaaaccaatttcaatcatcaattaatttaataaaagcaagcaatcagaatcaatttgtctttttttccatttttaggttcaattttgcgttttaatttgattaatgtctcaaattcgttttcatttttgacaatgttgagaaaaataataaaaataaattcaaaaattaattcatcatatgatcaattaacctgttgaggcaataatgatgaacatttaaagcgctatttgcgcaaaaaaagggcaaaaagtgggcaataaaatgggcaataaattttacgtcttcaatcaatatttattaaggaaattatttttcaataaaaaacaaacagaaaatgtgcataaaatggcaaaaaaaaaattttgaaaatgaggattttactttgccaaataaagaaattaaaactgaaaataacccaaaatgacaaaaacgtagcaatgtataaaataattaataatttattcaattagcacaataatcaaaaaaaactttaaaaaaatatttccgggtatttgtatataaataataataatttttttttattaaatcggctcaattaatacaaattttgaaaaattaaaaaataaataattatttttaaaagatattcatcaaaaattgatgttgctgttctcgtctttcttattccttttctttatttgtaataaacattgtgtcggtctttatgacccagaaatatacataccacaggttactttttagttgccaaatttttaataattttaattaaattaaaattattttataaatgtttttatttataaaattagaattttttacttttttagactatg

SEQ ID NO: 103592 - DNA, 958 bp, Heterodera glycines
ataaattttgtcaccatctcttctctctccccccatcctttggtttaccgtattatttccccctcccccgccgcctaacactttaatggttacattttgcgtttgcgcaattcaccgatggctgagaggggtggggtgggggggagtgtttgcggcgtccgtctgttgtgcatgtttagtgcgcgaaagggaacagagaaagataggggggggggaagggattcggttgcatgattatcggggggggggggaacgattggtcgcgttttgttgtggcggagtgagtgaatttgggggaggtaataaccgctgttgtaacagcagtgttcattgtcattatgtgggcttttattgtgaatgctctctctctctctctctctctctctttcttttcttctctcctctcctattctctctctctctctatttctttctttctctctctccctcactttcgctgcgtttgttttgccttttcttttgttcattttttcaaagttatgtgtggtgtgatatgtttcttttcctttctgctgagtctgttgcggcgtttggaatttaatgcaaaacgctttttcaattttttccagaatttttttgaatctatgaataatttgatgatttaattttatgtacaatatgtacctgtatatgggtttcatttgcctataatcgttttgtgaagaatcaacaaaatttagtgaagagagagagagaggcgagaaaccggttgtacgcattttcattcgtccggtaataaatgcgcaaaaagaagaagaagagacccatcccttcaattttttatcacattttgttggaacgagcaaaatatgagcagggcaaaaattgaaatatttttaaatttagttttggcagatgaggggaccaataaacaaaaaccattacgcttaattgattaattagtgttttgttgctcagattggctaacatcagcatg

SEQ ID NO: 103593 - DNA, 303 bp, Heterodera glycines
ttcatcgaacctggttctttctattctctttcaaatcctcccccattttttttacagcttaactaggccctattaagcttatttccagaaaatctcgcatgaattctcatttttaaattttttatagatttttaaatgtttgcattttttttggcttaccaaaacttcatcgaacctggttctttctattctctttcaaatcgccccaaattttttttacagcttaactaggccctattaagcttatttccagaaaatctcgcatgaattctcatttttaaattttttatagatttttaaatg

SEQ ID NO: 103594 - DNA, 87 bp, Heterodera glycines
cagcattcatctcttctccattggctgtttattgcatgatgagcactactcatcccttgcccgccttatgatcagaaagataaaatg

SEQ ID NO: 103595 - DNA, 198 bp, Heterodera glycines
ttgaatgacgcgcatcaaattttgtttgcaattccaccatcattttagataagcatttttctgacgataaacttctgttttttgttaagcttttacacgtaaatttgtatcccattgataacaattttgtttctttttttggtttaatttttccacttttttgtgattttgatacttgttgagtacactttggacatg

SEQ ID NO: 103596 - DNA, 1003 bp, Heterodera glycines
taaaaaatttaatcaaattccaaaaaatacaacaaggaaaattattattattttttagtctttttggtcatattttttgatataaaattaaatttttgatgaaaagtcggaaattttcggaaatttttttaaattttttttttcaaaaaattagtaatttttgtacaatttctgttaataaattgaactgaaattttcaaaaaatttcccggcggcgcctatcggcaccgcccgaccctaaaaaacattaattttcttgcgaaatttgctcaaaatcgcgtacgtacattaagaagcggcgaaatatttatttgtttttttcatatttcttaaaaattcccccctccaatgactttggcagttcataaagttgtttatttacatattccaatcgaatgttttggctgcgatccgtccccacatgaatatttaattcggcaattcattcataatgggatcattcatcagtcagcttcatcatcatcacctttttgtatgtatcagcaccatcattttgtatttgtattgctattattcacataatttcataatcatatttggatcaatttttatttgcttaccaaaaaatctgttttgctttttcaatggttttggatttagttttaccaaaagctgggccgtgtcggcggataccaaaaagttgtgaattgtaaaaataataattcaaatttggattaaaaaatatccacaattttctactttggatatttttcaaaacaaattatttttcgaataaattaaacacccgaaatttttgttttagggtaaggttcaaaaaatttaccaaaatattgaaataccaaaattttatttaaatatttaatcaatggaccaaaatatttttgacatagagtttttcatgcattttccaaaaatataattcaacaatagcgttttaaaattcttaatccaatctttttaaaccccccttaatatgggaagaatcaaaaaacattccaaattacgcttaattgcaataatg

SEQ ID NO: 103597 - DNA, 249 bp, Heterodera glycines
attgcgtctcccttaaattgcacaatctttttaattttaattgtttagagcgttattttatgcgcttttatttttcattttaatgattttttttgcttattttataattgtttaagcctgttatttgctgccttttgccttgctttaaagagctaccaaattttattggtaagaattcatttcccaaaaagagtgtgcctatacactttaactttattacagactttgtcctcaaactgttacaaaatg

SEQ ID NO: 103598 - DNA, 91 bp, Heterodera glycines
tgttttcttatatttttctttaggcgaaagtggggtcgggaaatccagcctaatcgcgcgatttgtagatgataaatttgacccggacatg

SEQ ID NO: 103599 - DNA, 56 bp, Heterodera glycines
aatggactggcgaaaaagccaatttggggcatttaaaaataattaaagagtaaatg

SEQ ID NO: 103600 - DNA, 265 bp, Heterodera glycines
  unsure (1)..(265): unsure at all n locations
aaaaacataaaaattttataaaatganttcgnnaattatttntataaaaaatatcgnacactaaattttcaaacggtaccgacaaaaaactggtaatttctgtgttctaatattttttaaagttttntaattaatttacaaacctaaataataatatttattgcgcctctgatatttgcgcctatgcttaaaagcagtctcaaaacttttttttaatagaaaaataaagcaattgttattattaaataaattgtttgaataaatg

SEQ ID NO: 103601 - DNA, 334 bp, Heterodera glycines
tagaaaattttaaagtttaataatttaaattacatataatttcattatcactttcatttacatacactaagaggttaattttcgttaaattttataaattttaatataatatttgaaattttgagagagagaattttaacatttacttagctgtaatccttctgagattttacgaaaattttctgaactttaaaattcgccagctcatcaatattaaatttcgtcaatttttttaatttaaaggtgtacaaacaaatttcattatgcaactaaaagcctttcatttttatataaaattgcttaagctcattaaattaaacaaattttcagaatg

SEQ ID NO: 103602 - DNA, 312 bp, Heterodera glycines
ggtcataggtttcaaacaattccctatatactgaaagtcaaactggtaaatttttgtaaaaaggggccttggaatggaaaaaatttggttgaaaaatcggttttttttttaattttttcaacttttttttattctttttaaagacattttgccaaataaaaagttttttgattctttccttctgtaaccgtgggacggagcggcgaattacatattttctttcatctttccctaccaccgtcacgtcacgttgtccattgacaatttttcagctttttattgagttttcgttaaattttcatcttcgacatg

SEQ ID NO: 103603 - DNA, 164 bp, Heterodera glycines
aatgatgcgttgtttatgacgaaaacgcaggcgcatgcgaccatgccgcggaacaccacgtctcgcataaagtgcagtcgctgatccgcgtcatcaaccctgacgacaggctttgcctggcgcgtgccgtccttctgggtctgagagaccgagagacgagaatg

SEQ ID NO: 103604 - DNA, 268 bp, Heterodera glycines
ggcccggtgaattgctgtggtggaatgcctccaaaaaattgcgaatgctgctgcggttgctgtggttgaacactaccagcaacgggcccagtgaattgctgtggcggaatgcctccaaaaaattgcgaatgctgctgcggttgctgtggttgtacactaccagcaccaccaccagcaatgggcccgggaaattgctgtggcggttgcacgcccccgccagcagcaacatgctgtactgatggtggtggcgcagtgaattgatgtgatg

SEQ ID NO: 103605 - DNA, 152 bp, Heterodera glycines
tcctcatattgttttggctgttcatttactcgctcattttcttcctttggttatggcggaataacaataatttgtcatcatccgtcaattgggcacagccgagggcaaagcgtacaatttttgccgattatcaatgcccaaatcagcaaatg

SEQ ID NO: 103606 - DNA, 70 bp, Heterodera glycines
ggaaattccccgggtttttggggcctcgttttgcgaaccctctttttttatcatccttatactatacatg

SEQ ID NO: 103607 - DNA, 836 bp, Heterodera glycines
cgttttgccgaagttgagttggaaccgtgctgacaaaaggttggattgttgtttttggaaaacagagaatattcgctccacatccctttgtttaaggttttcgtataatttttgtttcaatcaaaagcttcaactcatagacattttcaacagacaaaacaaagttcgaaaaactcagttttcatacttttacgggttaggaattcaaaattgggcaaaatgggtatggtattcgtgatcagcgacccctaaaacaactgaaaacaaattttcaagttttttggtcaaaaaaattattatttttttttttgcaaaaagagggttcccctttgattttgaaaaaactcaaaaaatgcaactttttcttttctccattggggtattccagggttttttttctacaaattgctgatttcgggctttcccgtgattggctctggaggcgttcatttttaatttacttcttttagcaaagcctccggcggtggctgacattgacgtttgtttgttggttgttttttgccgctcaatgtgatctcctccgacttttggacttcaaaatttttgccccgttttgtgggaaattggattatttacattgttttttctttgttgctttgccagtgactttttttgtttgatgcgcaaacgaccacattattttgcacaattacttcttataaatgtatttcttttactatatgtagaacataaaaatgaaagacatacctatttatgtatttattatactataaataataattataaaatcttaacaaaaatatatatgatgatttccatgcacaatttttgacatttttcagctgtccaaaatg

SEQ ID NO: 103608 - DNA, 441 bp, Heterodera glycines
ataataagataaaaatagattaaatgatcacggatttttagtgtaaatcttctgcttaataaattgtagaggtgcgggaaatgatcagattagaaaattttggcagaatggcaatagagttaattaaaaatcaccattttggtgaatttttggaaatttttcacatttaaaaaatattagaatataaagatgcaaaagattaaaacgaacaaaaaattttcaaaaatatttaaattgactttttcgaaaaaagtgaaaaattttagccataaaactaactattacaaatagcacataaatactatcgtaaaaacgaaactacctatattcagaatgagaatgaaaatgaagaccggtctcggaatttattagcagaaccatcaaaagcgaaatccaagcaacaaatagtgccaacaaaagagtcattaacagaaaataatg

SEQ ID NO: 103609 - DNA, 246 bp, Heterodera glycines
attgcatcatttgtaagccgatttttttgctgctaattcaattctccatcaaattgcatcatctatcccctgctttttatgagaagcttaaatccaaataaaaacgaaattaaaaaatatttaatcacaaattttattgtttggttattcaattttccttaaatttcttcttaattattctttaaaaatataaaataaatttcgatcgaaattcagcaaatttaaattcaaaatatttaaaaaatg

SEQ ID NO: 103610 - DNA, 90 bp, Heterodera glycines
cgtcagcaggtgaaccagcagccatttcaaaatgcacagcaacaggcggtcctacaccaggcgggcctgagtggacttgaatatgcgatg

SEQ ID NO: 103611 - DNA, 217 bp, Heterodera glycines
tggacgtgtctcgtgcgtccaatcccagtcttcctcctcaaattcgtctgccatcgtccctaacttttccggcaaccaattgcagtcgaatgcgaatcatttgctcggcctgaatgactcgtggctaaccgtcggcggagggaaaagtatcgccgcgggtggcggcgaatcggcaaacagtggcggaagcattgacggaggattcggggaaagtatg

SEQ ID NO: 103612 - DNA, 362 bp, Heterodera glycines
tgaggcgggccacgccaaaataacgtggcgcaacagcccaaggaaatttttaaaggtttgttcaagcatggatgtccgggtgcacttcatcaccccccccccccccgtttcgttttcattccccaaaaatttaaaaaaatgttggttgaacaattttttagaaaatttttgaaaaactaagcaattcatctaaattttgaacaaatggaaaatttaaatgcattttccgttattttctcatataaaatatttggggttcttgaaaaaatccctttttgattaagatgaaaattttgagctcgagagaaggctggacgatgcatagcgggccagaccccgagacttacacgcggagggaaatg

SEQ ID NO: 103613 - DNA, 87 bp, Heterodera glycines
attttgccaaatgtcctccaccatcaggtcagacatgacaaaaaacgaggtcagctgaattacgcaagagtttacagaggcaaaatg

SEQ ID NO: 103614 - DNA, 114 bp, Heterodera glycines
ttttggaagtggaggtcagcgggggggggggggggagaataattcaaaaattaattggaaattcaaaaatgattcatcactttttcaaaggaattgcgcagtaacaaatggatg

SEQ ID NO: 103615 - DNA, 354 bp, Heterodera glycines
aattttatttttgggacaaaaaaatgaaaatttccaaagttgtacaaatgtaaaataaaaaaaatgagcaaaaaacagaaaaaaattgcaaaaaaaaatacaaaaatcgaaggtcaattgaattaactctaaataaatgtgcaaagctttgatgttatgatgttcagaatattattatgaatttcaaagaagaaaataattaatgtattagttttgaattctaccaccaatttaaaaaaatcgctgaaaaattttggctaatttcaaacgaacagattttgtaagaatttggcttaacattaaacagaatttcgaaaatccgacaatttccctatagtaagaagctaaactatg

SEQ ID NO: 103616 - DNA, 89 bp, Heterodera glycines
ggtatgtagtaagcgtggcgtacagaagccccgaaatgaaggcatccctcggcactttgtaggggcggtacgatgtgcatctgctgatg

SEQ ID NO: 103617 - DNA, 64 bp, Heterodera glycines
tcggcaagacgacggccaagtcttgggactcgaatggaatgcggagacagacgacctacgaatg

SEQ ID NO: 103618 - DNA, 897 bp, Heterodera glycines
agttttgtacaaaataatccaaatcctagaagattttgatttaataacccgaaataaagaacgcatacgtaaatatgcattctttattatttgtgcgacatgattggaaaattgcaatttattatcaatatttatgcctaaatccctaattgtatccacaacatttattatatttccatcaattttatatatttctttggggtttttgttccctaaatgaagtacaaaagtttttttaattgagattctgatttgccatttatttgcccattcggataaattatgcaatgctttatgcataatttctgtgtcagctctcgctttataacaaatatacaatttaacatcatcagcatataatttaattctcactcctgatggcaaagcatcaggaagatcgttaatatagatcaaaaataataaagggcccaggacagagccctgggggacgccagagcaaacttttttattcgaggataaagcctcctcaattttaacacgaaaagtcctattactcaaaaaatcctttatccaaattaaaagtttgccccttataccaattttttccaatttgtataaaagtaattcatggggcactgagtcaaatgctttttgaaagtcaatataaatacagtcaacattttttccatttataattgcctcataccaatcttccacaactgttattaattgactcgttgtagacctatttctaacaaaaccaaattggtattccgaaatttttttgttttttagtagaaaattgtaaaatgtctgcttaaaattctttccattaccctgcaaagtgagcaggttaatgaaattggcctatagttttcgggattatttttgtcaccctttttaaaaagcggaaaaacaattgattccttccagatg

SEQ ID NO: 103619 - DNA, 181 bp, Heterodera glycines
ttcacggtcaaatgggaatcgttccgcttcctcccccaagtcgggaagagagccaggagggcgaaagttccatcagcggcaggtggaaagccaaacccacctgatcacggctgggtttcaacagaacgatcagtcaaaccctccgccaagagagggggagattgttcaatccatggggatg

SEQ ID NO: 103620 - DNA, 405 bp, Heterodera glycines
ttcaattatttaaaaaattaattccctcccaaatttctcttcgtcagcaatttgtaccgctccaattcgttgctgttgcggcgcaatgcgttgatgcattatttgaacgaaatttcggcaagtgtggccacagtggaagtgttcagcctgtccctgttctccattatcaccatccgatttgattatgcgcgtcagtaattaaattatgcatttattattattatttttatacggattaaagtgtcagtaagtcacagctttaaatcccggcttttccggtcctagtgaatttcggtcttcccaattcatacgacattttaccaaaacttttcctgcttcaactaactaaagggctttttcaatttaataaattatattttattttcagatttttacaatgcaatg

SEQ ID NO: 103621 - DNA, 781 bp, Heterodera glycines
aaaaattaaaaaaaaaattttgaaaatgtatccctaaaaaatggaatttttttcaaaaaatgatatatcaaaaattaatttttgaaatactacaatgtgattctaagcctattttggtcatttttatggcattttatgcctctgtttcactttttatgaaaaattttcatccaaaaaataaccgtttaaaaaattttatttacatattttagtacatacttgggggtttttgtacatatttcatacatattttagcattttttatacatattttatttacatagaatgatatgtttcgaaacaaaaaaaatttttttttttttgtaaaggaattggaatgctaggttttaatgaatcatacatttatgattaaataaaaagtttttcaattatatgaaagcatttcttataccgcttattcattcttttgaagaaaacaaaacaatttgtgcatggtattaaaagcataaaaaatgacgttagttttacatttgttgatttaaaatattaaatttatttataaaatatttttataaaaaggtttcaagtaaccatttttaaattttaataaaatttatatttttatggcaatttaatgagaaataaaattagatattttcaaagattgaaataaaattttcaaaagataaagaaattttacaaaaaagaacgcatttaatcttggaaatattaattattttatttctatttatttattttattttaaatataaagaaataattataactttttttaatgtaattaaatttcagtgaaaatg

SEQ ID NO: 103622 - DNA, 159 bp, Heterodera glycines
gagcaggaagagacgcagttggacccgaaagcgttggaggatgaacagaacgaacagcagcagcaaacagaggagcgggacacccagcaacaggacagcaatgagaccggggaccatgaaaaaggttggggagtacagcagcagcaacaacagagcatg

SEQ ID NO: 103623 - DNA, 171 bp, Heterodera glycines
catggaagttgacccgacaccttcaacatcagccgcaagcagcagtggacttataaacacgctgatggtcatcagcatgttcgcgctgatatccttcagccaacagcagcggcaccgttacgcattcatcgagcctcattgagccaaaatgcacaaagattccttcaaatg

SEQ ID NO: 103624 - DNA, 826 bp, Heterodera glycines
attttgggtttactttactatgctggcccatgaaaacatgcagtttttccggtgccaaatttttgtgaattttcattcggcgcgtcataagcggattgtttggtggcaaatgcaaacaaattttgtgttattcgaatgcgctcggcgggttcgacatttccaaatgtatcaacaaagggtctatctccactctctggcgaggtatggccagccaaagcagagtggggcataaacaagaattttttaatctttggtatttcctctattttgtgcctgctctacatttatgtcttgtgccaatatgcctattgcaacagaaatttattcagctttcccgacaaattgttgagataattattctagacgatttttttatatctcaatgcttaactatcgcatttttgtttggcaactggtagaaattggcagtgaaaaaaagtttgtttgtaactatttacaataaaaatttatgtagcatttctaaaaaggatgtaaaaataagttcttgcgtaatatttttatattgtgtgttgaagaatttgagtctgcttctgatgcaagtggaaaatttttcagcttttctcgaaaagttttttcccagaaaaaggatgggacaaataaaaaactaaacatctctcatgacaatttaaattcccttacattttgggtttactttactatgctggcccatgaaaaaatgcagtttttccggtgccaaatttttgtgaattttcattcggcgcgtcataagcggattgtttggtggcaaatgcaaacaaattttgtgttattcgaatgcactaggcgggctcgacatttccaaatg

SEQ ID NO: 103625 - DNA, 904 bp, Heterodera glycines
aagcccaaagcccgttctgaaaagcaccgacctcaccaaagtgggtgaacagagagataatgagagagagaagcccaaagccagcgctgaaaagcaccggcctcacaaaagtgggtgggcagagaaagagagagagaaagccaaaagccagcgctaaaaagcaccggcctcacaagtggatgggcagagaaagagagagagagagaagcccaaagccagcgctgaaaagcaccggcctcacaagtggatgggcagagaaagagagagaatgagagagagaagcccaaagccagcgctgaaaagcaccggcctcatcaaagtgggtgggcagagagagaatgagagagagaagcccaaagccagcgctgaaaagcaccggcctcatcaaagtgggtgggcagagagagaatgagagagagaagcccaaagccagcgctgaaaagcaccggcctcaccaaagtggatgggcaataaattttaaaatttgtcgagaaaattcgtatgaaaggaaattatgaaagggagaaaaaagcggaaaatttaaaaccatacaaattgaaaatgaattaataaaaagaaaattttaaaaaaaacaaagaataaaagttgtaaaataggacaggaggaaatttttcaacaaataaatttaaatgaataagtacattgggaattggaggcgtaatatgcccctagtaaaagattaataaaatatgtgtgtgtgtgggagaaattgtgacagaatttgcttgaggtcaaactaagtcaaatcaaacagaaatatggggtgggacgaattggatagaaattaagtagaatattttaaaaatgtatagctcattttatgtctttatttaattaagttggattaatttaaatataaaaaaattttttgatttaaaaaatg

SEQ ID NO: 103626 - DNA, 144 bp, Heterodera glycines
gagattcaaaaagtggtgttaaacatatgcaccactgaaaatggggtatggtacataaaagtcaactgtaactcgggtttgaaccgatattttgcttaatgattgatatcattcgaaagccctttaaaaatgctacaaaaaatg

SEQ ID NO: 103627 - DNA, 776 bp, Heterodera glycines
tgagttgggttaccccaaattttctcttacttttcttgtatttataattctagaaacaataaactgtagtagagccgaaaaaacacaatacatataagtcaaaatacacaatcaattaaaaaacagttaggctatttttgcgaaaattattttaaaaaatcaggactctattttaggaaaaacggtataaaacaaaaaatgtttttcttttaaaaaatgtgtaggtagtatgtattccaaagcgaaattaatgaaaaagaagagagaaacgacgccagagtgtaggcttttctctgcacctatatctctctgcccgtgatgcattcgaccttgcaaaattacattcctaacttgcctatttaatcaattgattgtgagactaatcttccttcagcttattcaggtcttcaaaaccggcataagctgcaagggagcgagaatgtacaggaggagcggagccagacaaagggtctgcggcccgtggttaatattttgcctattcgttagcacgcgttcccatccctttctgattaatgctaaaatacccaacattaatacatattttggtccttcttttaagattgagtacaatcattcaacagatttcattcttatcgtgtgtgattttagattttaacgttctattttcatctttggatttaccgctgatcgaatcgcaaaagggaattgtttggtgcttcgttttgtttcggttcgatcggcactgggtttataaataaaagttctttttcagttgtcttcagtttattgagatg

SEQ ID NO: 103628 - DNA, 791 bp, Heterodera glycines
  unsure (1)..(791): unsure at all n locations
agaaggagtcaangcagcggaacaacaagcnggacagtgaaataggagggcagtgagttttgtcccggccaaaaattcgttggacaggacacatatattttctttggcgttttgtttgttgtttgttcaaaaaagacatggcaattaattgtatttcgggcattgaattgaatattattaaaaccaaccaaatcatatattattgtgtattacctattcccattcgttttgttcgccgcgtcctttcacaattcattcattcatcgtttttttttgttgccatttctcgccgttttttgttatttatttctcttttggtctttcgttcgtttgctcttttgtcgtctgtctgtctgtctgtcattcattcaattcatttattgattcaaccattgcatctcagttttgtttgtttgtgtgttcagttctgtttcacactgcgcctctccttgcaataaaaagtgcacttttatgaaaccaaacttaatcaaatttgtccaaaagtctcccattattttctgtatggtccattttctcctcaatgtatgtaccaaatcaacaaatccaatgcgcttttcatacccattttttgccattttgcattcgtttttttccaccgggggcatttccaatcggatttaaatttgcatttgtttttcattcatttttgatcaggtcagtgcgtgtcttacacttacttttttaagaagaaagttattgctaaaattttgcacatgaattttgagaatttccaaaagtactaagaaatttaaaattaaaaaagtaatatg

SEQ ID NO: 103629 - DNA, 199 bp, Heterodera glycines
actcgccgacgccgactcgccgatggtcgactcgccgacgccaactcgccgatggttgactcgccgacgccgactcgccgatggtcgactcgccgacgccaactcgccgatggttgactcgccgacgccgactcgccgatggtcgactcgccgacgccaactcgccgatggttgactcgccgacgccgactcgccgatg

SEQ ID NO: 103630 - DNA, 77 bp, Heterodera glycines
ttttgaccaattgcattcttctcaaaggtttctttccccctttacttttctattttttcattttcaggtccacaatg

SEQ ID NO: 103631 - DNA, 220 bp, Heterodera glycines
ttttttctaaaattgattttgattattttattttatgaaaactgaaaacaataagatttgatcgaaaatgaaagaaaatggccacccaaaaaaaaatcgggcatgacccctctcctgagcgatgatttgggccatttttggagagccaaaaacgcgcataggtcaccccctacacgtgtttttaaccttccggcccaaagccatcacattggagggcatg

SEQ ID NO: 103632 - DNA, 198 bp, Heterodera glycines
aaaggctcgctaagagcattattaataaatgaagaataattagagtgtattttttattatttgccgggaaggacttatttgtggtggactccaagaggcatcggataatctgttatcacgttctcaatttaatttgacatttaatttatttatcacgaaaattaaatcccccctttccccgcattttcagctgtgatg

SEQ ID NO: 103633 - DNA, 249 bp, Heterodera glycines
tgttcagccggtttggagcagataatggactcggaaattcggttccattttttgattgatttgtattccttttattttcctgcaaacgacatgcgtaaaactgggatttttttttcaaatttttttgtaacactaaccaagtggttcctaatagtattattattttttctccaatagattggactggattttgctgttgagtcgggtggccgcaatttgtcggccggccagcgccagttggtgtgcatg

SEQ ID NO: 103634 - DNA, 416 bp, Heterodera glycines
tttttctggttgagggaacaaattttcgaaaatttttcaatttgcagaacccttgtgcacctcgggaaaatccaaaaattttcaaaagtcccttttttcttctttctcaaactaaatatgaaatttaggcagagccattgtcaccgaatgacctggatgagctagaggagcgtgtcaacgattttaaatcttttttgtctgcccaggagcgaatgcgcgtgtttctctcaaagaagcccaaggcacatcttttgttgagccattttgttcccttcgctcgcgagcacaaatttcttggccttttagatgaacagggttgtggtgaaaaatgttttctatcccattaatctgaatttaaacgtgacgaggcgctccattcagtttggcgccgacttgagcaactgtggaagtgtatg

SEQ ID NO: 103635 - DNA, 285 bp, Heterodera glycines
gttcagaacaaattggtctcggcagagtcaagtgtctcctcctatccgttgaatttttcaaatgaaatgaatgctcggcgctccaattctccccccgtgccgccccttcctttagcccctcctccgcgtcgtgccaacaaccaacatggcaatttatgttgcaacaatcacaacgatatcctcgtcgacattttcggacaaaacaacgcacacgttcttcctgcagtgaatgccaatgaaatattcgacgacgaattcgacccgcgagcggacgagaaaaaaatg

SEQ ID NO: 103636 - DNA, 334 bp, Heterodera glycines
ccagaaaatgcgacaccaagaaaatccgacaccagaaaatccgacaccggcggaaaatgcgacaccgtagaatttttttaaaaaacggaaaatccgacaccgggaaaatacgacacctaaattaaatttttaaaattatttttaatttaaaaaatgaaaatgaactacttattttccttaaaatcgaacattgagctataaaaataatttaaaatgatttaagtaatataatataaaatgaactatgattagttcaagacaattctcatgaccctttagtaaagtggacagcagataatacaaaaaattcttatcagtttccgatttgcatatg

SEQ ID NO: 103637 - DNA, 274 bp, Heterodera glycines
aaaatcaaaaaagtgtttgaaaaattcaattaattgcttgggaacatctaaaaatatctaatttacaataataatttgtttttaaatatatttaatcattttttgaaaacttgaaaaaatatcggtcacttgaaataataaattctaaaattttgtccaggaaaatccaggttttttcctgttttgcctggacctggacctggattttttttcacatttgacctggacctggatttcctggacaaaaatccaaaatccaggttgtcaaaaaatg

SEQ ID NO: 103638 - DNA, 1003 bp, Heterodera glycines
attctccgaaaaatttttcaaatttcttcctaaatttggattggcgtactatgtttaagcaaaattttttcaattttggcattataatttctttcttgctgttaattttggttaattattgcttgagatgaattttaaaaaatgtctaattttgaaattttatggcataatgtcaatatttatctgattttattcgcaacccaaaatctgattttttgagcccgattttctgattttgaaaaattttcgatcgaagccctgattgtaggcccacttttcaaaggctattcggtaggttttcccgcccctaccacctatgaatttttcaaacattttccccattctcagaattgtaagtgcaaaggaattaaaatcacaaattatcaaaattcaattggtgttaacatttgtggtatcactcgatagacaattaattatagttcttaattacatctcacagttatgagtttttcccatttgtttttcgatttgtaaaatattttttttaatttgatacttaaataaatttatcaaacgaaaaatgttgcaaaataactaatgaaatttatacatttgcacagaaaacaggaaattatactgcacacacattaatattcttttttaaaaatattttttgcaaaacataaaacaatattaattattggcaacgtgtaattattgttttgccagcaaaataattgtgcaaacgatacatttattttacatctttattattattatttttattatcattttctgacaaatgacaatgaaagaagcaaaacgaaaaagcctctctctattttttcttttatttttaattgttttaatttcttcaaatttcgttttttgtgggaaaaacaaaagggtaaataaagtgagcaacgataaggtgaagcaacctgaaaaaataacaaaacaaaaaatagtggcaaaagagcgaagccaaagcattgaaaatgcggcaaaattaacgcatcaatgcccaaaaaaggaaaaaatg

SEQ ID NO: 103639 - DNA, 461 bp, Heterodera glycines
tataatattttcttatctctttttctttcttttatttctatcacagagaataaaatgatgggaaattctttgtggtaaaataaatttttttagtttaatgcaactgaaaataaaaggtttcaagccacaaaatcatctttatttgatcatttgacaaattacccaataaaatatgtacatagtttgtttgttttctgtccttgttttgtattttatatttttctgcctttttaaggcgaattaacggagaatgattttgccattaattttattcattcaccattttcgtaaaatgaatttcaataaaaataaattttatttaaaaaaaaataattattttattctttttcataaaaatggttttaataaaatttattattttattttcaattaactaattatttttttttatttaggaaattgctttattttaccacagaaaaaaagcaaacaaagaaatg

SEQ ID NO: 103640 - DNA, 227 bp, Heterodera glycines
ttttgtatatgccgtctctaatatcaatttgagttgggctggcaaaagtctacacaaattatatttggtgccatattaaattatatagcaagcgtgttggttccaaaatagttgtctgagctcgggttttgcagaatcattggttttatctatggtattcttcaagtacatctttaaaatgttttaaagcagattaaacttcatttctatccattcttttcaaaatg

SEQ ID NO: 103641 - DNA, 728 bp, Heterodera glycines
tttctgtaaaatattccggctttatttcctctatccgtattttgagagatttgacacttctaacttttttaaaacgatcgaatcttgataaatttggtatcatccgaaagctcttgacgagctgtctaaaaggcagtgaataaattttcttgtgtgttttaatctcaatgtttatcaatattcaacacttttggtatggaaatcaaatgccttagtagggaattggcggtagggaattggctggtagggaattggctggtagggaattggctggtagggaattggctggtagggaattgacggtagggaattggctggtagggaattgacggtagggaattggctcgatcccacagatacaaacccttttttaaataatgaacatcacgccaaaattttcataaaaataaaaatgtaaaactgaaattctgctaaattactttctgcatttgtagattcctctttttgtctgtacaactgcgccactaactttgattttttttagttcgaaataccaacttatctcacaaatggctaaacaaaagggtgaaaagaaaggaaaaagtgcgctcaacaaagtggtcactcgggaatataccatccatttgcacaaacgcatccacggaatgtgaggctgagattatttaagcaattatcccttagatgattagaaagggagtggagaaataggagaaagcatctcatattccgtcttcctaatgaaaatg

SEQ ID NO: 103642 - DNA, 1003 bp, Heterodera glycines
gctacttttagtgacgaaaaatatcgaaatagttaactaaaatagtgagtaaaaatgccaaaatagtggcaaaaaatccgaaatagtgacatattttcagccaaaattttgtcaagagaaaaaaatttgggggaagattttttaagaaaattttccaattctcagtggtattttttgaaaaatttttaagtcgattcttaggagtgtattttttgggtttattgcatttttgttaaggaattttccaaaaatttcgaaatagtgaaaaaaagaaatgcgtttttgagctcttttcttcaaaacaatcgagcaagaaaaaagaagttaaataactaaaagtagcgaccctagtgataaagcagcacacaaaaaaagttatctcttaaaaccgcaaaaaatgtagaattttcgaagttttttgttcactatctttcgttacagttcgacaatttagttcgttagcttagcccttaagtttctctctattttaatgaaaattttcaaaaaatgagaccaattaaaaaaaattatggacgagaatcgtaaaaaaattttcatccatattattcaaaacataatcaaattttatgggctattaaatgacaccaaaaaattataattttgtcaactttttcaaaagttatgacgattttttgtcgaaaataacgtacgcagtgtatgtttttatgtgcattttacaatacatatttattttaacatttttttctcatctttttcgggtgtctcttcttcttctgacttctctgctgaccagagctggccgtgatcacgggaatcacggggtttttggtgtgccgtgatctcggatcacggattttttctatttttccgtgattttcatccgtaattggcattttatataggggaatttttattgagacgaaaatatgaaattgatgggaaaagagaaaatttttgagaaaaaaattaaataaataaatcatttctgttaaaaattaagacatgtatatgtagcttaatg

SEQ ID NO: 103643 - DNA, 193 bp, Heterodera glycines
agtcgaatcaatcggcttcgtctctacggccaattctttgtagtagtctttggcctagtcgatgttaacccggataaatatttagaaagggaaagagagagagaccattttgttattatcagtgattatatgttttcttcgtacaattcacccaaaatagtttttccaagcgttcacagttgaaacgacaatg

SEQ ID NO: 103644 - DNA, 1003 bp, Heterodera glycines
tcaagacttaaaattttatgagtttaaacaaaattagacgggttctaaaattttatgagtttaaacaaaattagacgggttctaaaattttatgagtttaaacaaaattagacgggttcttgttatttcggggccaactaatctgggtattcagatctaagtccaaacagaaactaaatacatgtttaactatgcgtttaaacaaccgtaagaattgactaaataataagattgaacaggtttccatagataaattttttaattttcaataacatagaaatttttgagcacaagggttgttaaaatttactaaattttaatgatttatataacattttatatatttattttgttttatttttttaaatccctccctctggtgcccaaacttcatgttgccaccctgactccccaagcctaaaaaaagttttttgaaaaatgccgcaaaaaaagccgtttgaatcacgaatgcactgaaaattacgatttgcttattcatttgttccccaaatttcgatcagaatcctcgcctaccggcaccgtcggaccctcatgtttcccaagttttttttttgtaaaaagtgtgcaaaaagcgtttttaacagcaaaaaacgctgtcactttaatgttgagacttctgagacttctacgcaaaaattccctttgatctacctcatttttaatgtgtttttgatttatttggattcttttcatttaaatttctcgatttccgagtcgagaaatttctcggtttttggatctcttatcgtttccggggttatttctcggttcccagtaaaaatcacttctcgcacatccctactttttgtccttttcatgcattttagatgcctttttttcgtgtctcttttaggtggctatttaaaaaaggtcgttttaaatccaaaattacttgagaattgggttttcttttgctcattgcttttgtaaaaatttcgtaaaaccattactctttttaagccaattattctgttcaaaaatg

SEQ ID NO: 103645 - DNA, 563 bp, Heterodera glycines
tttttctgcaattatctgtaaaaatttgtgtgtgctttaaatgtgaaaagtgtgtcaaagaaaataaaaatatataggtaataattcattttgaaatgggaactttatacgttttttgtggcatattttaataatatttattgaaaataattaagcgaaaagtttaaattgttagtaagcagcaattaggaggacaaaaaattacaacacaaaaattaaattatggcgaaagaaaaattgcgtaaaaatataataaaatgaaagtaaagcttcgtggaatggaaaataaaatcaaaaagtcacagaataacaaggaaaaaatatattatacaacatttcggaaaaagcctgacattagcctggggaaaaatttcgattattgcagccataatttttggaaaattaccaaggaaaacccaaaaattcggggaacaaaaaagttttcgggttgacccatcaaaattttttttccttggttaacgacatgttcagagcaatgccaataaaaaaagttttttgtctccgatcagccgtcagtatgcaactcggccaacggcataatg

SEQ ID NO: 103646 - DNA, 209 bp, Heterodera glycines
  unsure (1)..(209): unsure at all n locations
aggaaaagaattccgaaaaggtgccaatttacccattgaaaaaggtgctattggcatggatgcccaagctgctttcccgatgatgcggcaattgtgggcggaggagaaacagccggggccctcagggcccgggacgccaaaacgaacccggntacattgcgcgggagtttgaggtcgaagtcgtttgggagtgccacttgaacgcaatg

SEQ ID NO: 103647 - DNA, 66 bp, Heterodera glycines
aaaaaatattatgaaacaaaaaaatcgatttttcaagtgtcgttttggggtactcaaacatttatg

SEQ ID NO: 103648 - DNA, 1003 bp, Heterodera glycines
tttgctaaaatttctctttgttgtacagtacgagttgagaaaaacagtacgagttgggtgatcgcaattattattgaaaatgaaggattaaaaaaactctaatttaatttttattttaaaacttatgaatcattttctaattttgacttggtcaatgcccttgttggaattgaaagccatttattttttctgtaaaatattcttaaacaaatttctacgttacatttttaaattagaattttttaaaagcattaacgaaaataccgtttttaccataccatttatagagagtttcacgtttggctcttatttatcaaaacacattcacgtttgtttatccgtcaattatcaaaaaaacttaaccaaaaggtccgacttttaccgtaaccgttccctaaaaagttatattcatttctttttataaaatcaattcgtatagtaaactaaaattctttttgtaaaatcattttataatttattccacttttttgccacttccgttcatctctgggaaagcgatttctttttttgatcactgctttagtggacaaattactcacaaaatgggcaaaacagaggtgaatcaccgtcactcgttgggaaaagcagaaaattccgatgttaacaaatgaacaaaattatggggctaccagctaccagcagcagttggggatgggcaaaatggtgactcaccacttttggcattggaattcaaaaagccaatttctgtgtaaaaaaccagtggacaatttgctgggaaattggggcggagccgccgcaagcggacggacggatggacggacggccatcgacggatcggtcggctttaagcccaaactccgcccaaaatgagctgcataaatagccgctgataggcccagcaaaatcataccgcttcagctcacttcagaaaaatcactaaacgatttcaaatccctttaggaaaattattcaattcttcaactcccttttatccccaaatccgaaccataaaactccaatg

SEQ ID NO: 103649 - DNA, 891 bp, Heterodera glycines
tagccaaataattaatgtagaacaattttcttttagtacattctgttgttttcgattatagggaaaccaaaggcattaaaaacgggtcaaacgattacttcaaagaaaaattaattcagtggttttccagtgctgccagaggggaaattcttgttttttaaaaattggttagaaaattttatacctaaattatcggactattttaatttcggttatacttttctcattcgaagttttgttcatttttcccttgcaattattttaggttctcttccgtttggtgtacaatttgaatttgccctgtgcgtttgagcgtcaactgagtgcactgctcgacgttcttcccccgccgctgttcaccgattatggcgcacaacggctgggcgccgcaattccgatgatcgacaaaaagtacataattaatcaaacagacaaaaacgaatttttatcttctaaatccttcgaggattaaaaaaaaactgaaaaaatcggaatttcaaaaaaaaaaaacttaaagaatattaggaaaatccattttgtatgaacttttcttatatctattcctggctaattaaaataaacccagtgaactgctccaactccttctctccgtccccaccggcagtcaggggccaaagggtggcaaccgctctgtcggtttcatcacctttctgcgctatgcgtttggtcaaacgcaacacgaacgcggcaccaacgcggaaaacattgaaattttgaaggaccgacggcgaacggtaatttggcaatggtaaggcacggaattgccacggcattttggacaaaaataaatatgtagccacaaaatgggaacggagggcctgcaatttggtccattaacaaatgccaaatgttctcttcaggcttccaatg

SEQ ID NO: 103650 - DNA, 323 bp, Heterodera glycines
  unsure (1)..(323): unsure at all n locations
tttaaatagtaaaaaataataattaaaaaaanaattttttctaatgcaaaatttattntaacattgcatttttcgctgattaatctctcccacaaaatcagtgtgcgtcgccacattgaatcaatcaatgattagaacgagcatttctgtgaagcttacctttccaataagccctttaattctacaaaatatattcatttttaaaaattaaatttttatatttatgctaatttttaatttaatgccaaattttgaattaaatttttatattttatactaatacagtaaacttccaatcgtttctacaacaaattgcccaaatg

SEQ ID NO: 103651 - DNA, 240 bp, Heterodera glycines
ttttcaaaataatacattgaatacaattgttttcattttactttgaaccaactttaattgaacttcacgtccaattaattgaccaactctcggtttttagaccttttttttcttgattgaaaaatttatttggacccgtaaagcgctggaaacatccaacaatgcaccgcttttttgcttgaagcgctcaaaagtgacgacgagtcccaagggcatttgcagactcgtctgctggaaatg

SEQ ID NO: 103652 - DNA, 348 bp, Heterodera glycines
aaaaaaaaataaaaacgaaaaggactcagatttcggaaagattttttaggagcaagttagctcggcgctcatatcagcgtaagttagtcctttgccggggagtatcccggtaaagttgggtatgcttgtgctcaattagcaaaaaatatgagtgatcaagctctcactaaaaggttatgcttaaacttgttcccaaagttaaaaagcaatgaaaacatgtttgaaattttatccgcctcccttagcgatagaaaagcatcagagaatgttcttattttgtaaataaaatttggtgggtttcagagccctttctgaaaaaatatttatgaattaattttgcaaaaaatg

SEQ ID NO: 103653 - DNA, 184 bp, Heterodera glycines
ttttcataaaatcgcatcacatcatctctatcccctttttacataacaaatgatgactaattagtcatatttcgaaatttaaaagaattatgttaaaaaataatttagcttagacagacaaatatttcaattctcccaattttataaagcaagtaaaatgtttcttcttttcttattatcaatg

SEQ ID NO: 103654 - DNA, 331 bp, Heterodera glycines
tctcgtcgcttcttgcgacaacaacacttaattgtcttggccaattggatgtcgttttttgaaagcaaatagcgggaaaaaagtgaatggggaggaggaggagggaatgggtaacacttggttaaattttacataggtatacacaccatccgaaaaaacgagatgtgtaccaataaatagagagtgccagagaaaaacaatatctgtttttctctaattttttgtctccttttggtgtactttgggattaaatttggaaggtgctaatttttcaagagatgaagcgttgcatgccgtgtggcggcgacttgagcagctttggaagacgatg

SEQ ID NO: 103655 - DNA, 277 bp, Heterodera glycines
  unsure (1)..(277): unsure at all n locations
tttttgagcaatgataaaaatcttgtgaaaactatgtttaatttaagaaataaaactaattagtaattaccttaataatntaatntaattgatcatctatagaaataatcatntaattcttttaaaaattattttctttcataattttttaaataaattaacacaaaacatttaattcacttttttagcgatttaaattaattttcatatgattttgataaaatctgatgtttaaaaataaattttgctgacggattgtccgggagtcggcaaaatg

SEQ ID NO: 103656 - DNA, 110 bp, Heterodera glycines
aaaattccattgcttttcgctgtcatctgtttattcgaaattcaggttgttaataatcccaaaataatttttttctgaattttttaaattttaacaggtctttgcacatg

SEQ ID NO: 103657 - DNA, 562 bp, Heterodera glycines
aataaattttaaaaaatccaccaaaaaataacattaaaaattttcagcaaaaaaagcctagtaattttttcctttttttttatcagccaaagaaaaataatttgtatttttttgatgaactaatgaaaatgattaatgcttttttggcttcaaaagtttttttttcttcaaaacattttgatttgtttagataaaattttttatgcctttctgaaaattgcgtaaattatatctactaaaaatagtaaatttttcttttcttctttttctgtcaattctattatattattggaacgcaattattttgaattatttattgttaacataaaatgaaaaaaacactgcaaaaaacaaatatcccccccccccccccccctccctttggtaatcccttcctattgaatcggtcggtcgcattttcattttaccatgaatcatgcagaatcgctccactattagaagggggggggaatgtggactgaaccagttgggtttacaaaaaacgatttatttgcatgttttattggttttatttgtaaagttttgaatacatattagtatg

SEQ ID NO: 103658 - DNA, 60 bp, Heterodera glycines
taagatgacttttttctaaaatatttgattttagaatttttcttttattattgtacaatg

SEQ ID NO: 103659 - DNA, 280 bp, Heterodera glycines
tatatgctgatgatgttaaattgtatatttgttataaagcaagagccgacacaggaattatgcataaagcattgcataatttatccgaatgggcaaataaatggcaaatcagaatctcaattcaaaaaacttttgtacttcacttggggaataaaaaccccaaagaaatataaaattgatggaaatataataaatgttgtggatacaattagggatttgggcatcaatattgataataaattgcaattttgcaatcatgtcacacaaataataaagaatg

SEQ ID NO: 103660 - DNA, 124 bp, Heterodera glycines
aaagtgcaatgtttgtggtgccaaaatgcgtataaatagtcaaagaatggcaccaaaaaaaccattggaattatttaattaaaaaaaacaattaattaccgccaattgtccattagaagaaatg

SEQ ID NO: 103661 - DNA, 436 bp, Heterodera glycines
atttattcaaaaataaaaataaccaaaagaagggcattgctgccgcttacacttgaggtggaaatacgacaggtcaaatgggtagtagtgatagaagacaattaacattggtgatgaaaaaaatgaggtcaatgggcagttgtgatatgagttgaaatttaatttaaagaagcggaaaagtcgacctccagcaaagggaaattggtttttataacaatttgagtaaaaaattttttgtgggaaatttttaagaaatttgtagtagaaataaatggaaaaatgaaatgaatttcaataaaattaaaatgaaaataatgcaaagaagtttttatgtgagaaaaagaaaaaaaacattgaacgatttgatgaatttaaaagtttatatggccaaggcaaacagaaagaatttgtgaaggaattgggcatttctgaaatg

SEQ ID NO: 103662 - DNA, 309 bp, Heterodera glycines
ttttcattttcatttcccttttcattgagttaatatcggcaaaagtgccgaaggaaacgatcactgtgccatccctggaattgtccacgatcgctttaaaacaaaaaatttgttttgtttttttttgtactttttttatgaaatatttttaaataaaagtattttagttttttaataatttcataaaaatacttttttttcttatgatttttaaaattgaatatatgaaaacattgaaattatcgaaatagaccttctctattttctaaattataattaaccaaattgattaaattaattaattaaatg

SEQ ID NO: 103663 - DNA, 436 bp, Heterodera glycines
ttatttcgtaatgtgcacgtgactttttttttgttccaactatttcgcaatatgcgcattatttgggtcacctgtcaataaaaatgattgatgtctttcaaaataatgaatctccagacgattttttttacatttttgaataaaatggtcaaagctgtcaagaaaaatgattgatgaccctctaataaagtagacccagacagtcacgtgactagacccctcccctttttatccatttcgtacacccggccaaatcgcaaatcattcaactaaatagttggatttcattaaactcccttccgctctaatttattttactccgctctatttttctacattttatttcaaatctactgctattttcctccgtcaatttcttttcaaattcctctgctttttaattctgcttcaatttcgcattttggtttttaaaatg

SEQ ID NO: 103664 - DNA, 201 bp, Heterodera glycines
attttttcatatttacaaacatggaaagagaaattatatttcgtctttttaaatcaattatttcatcataaaagcaagacaatcgaaattcatttctaatttatacttaaaaaatatatttttttataaattttactttaaaaaaataatatcctaagctgaaatcaaaattatcattttatgatttattactaaaaaatg

SEQ ID NO: 103665 - DNA, 288 bp, Heterodera glycines
aaaaaatcccctccccctgataaatttttgtaattttcaacaatatttgattaaattatggcattaggtcaataaaatgtaaatttttttctcatggttgagaattttgaaattttaggcataaagtcactatttttcttaaaaaaggagcccaaaatcgcaaaaaaaaatgttggaaaaaatccattctggcgaaaaatacaagccatttttataaatattaaccgtttttcattgcagaaaataattattttatgtccttggatttcatgaattttccccactatg

SEQ ID NO: 103666 - DNA, 111 bp, Heterodera glycines
agtgatctgacaattttgaaaggctgcctcatgtatggcgaaagagtggtcattccgaggatttttcaggccaaaattctccgattatttcacaaaggccaccccggaatg

SEQ ID NO: 103667 - DNA, 242 bp, Heterodera glycines
gaaaaacaggaagccgagaaaaaggtgatctttaagctggaaaattggcgcaattcaattaattttttcctgattaattaatagattttttagtttaattttcaaaaaaattttaaaaattcagtattttatgcttttcaagattttttaacgaaaatctcctgggtgtttaccgctgtgaagtagcgttgcataaaactgggctcccaataaatggcacaaaatattttaataccataatg

SEQ ID NO: 103668 - DNA, 458 bp, Heterodera glycines
ggggggggggtgggggggggggggggggggggggtttaaaaaaaaaaaaaaaataaaaaaaataaagggggggtttttaaaaaaaagaagaggttaatatttttttttttttaaaatttgggttttttataagtggtttaggggattttttaggaaaaaaaagggggaaataagggaatttttgagaaaatttaaaaagggagaatggtaaaaaatttggtaaattttaaaaccattaaaagtttccaggatttggagacaaaagattcttgagttataagacacaagtggctaatgagtgaaaaattccaaattggaggacccttcattattaagaaaaagaaatttcatcgggacgggggtaaaaaaaaaatcaaaaatttacaattggaggctgtttgtaatataaatttagcaaaaaataacgaaaatatttttaaaaatttatttttaagatg

SEQ ID NO: 103669 - DNA, 226 bp, Heterodera glycines
tcgcctgttaaatttgaaatttattttgttttattttttaaataactattttttattttccctttattttcatttttgaatattcaaattcggcattaactaacactgaaggttcttttcgttatccagttggccatatattttttaagagctcagcagcaatttttcaaccattatccaaacaaaacaatttttttaaaattatttcaataatcattttaagatg

SEQ ID NO: 103670 - DNA, 298 bp, Heterodera glycines
acgcgtcgcccgcttcagcagtgcgcgagacggcttccgcccttcctcgatgatctgaatttcgaagatttcatttgaaattttgattttaaatgttacaaaaccttaccggaacaagcgatcgtcggaatgcctggcgaatgtaccgcaacggggaggaggagaaggtggaggacgcgcagctggtcttcttcttcggcactccggtcacggtgctcgcccgctggcaatacgcgacggcgccgttcctccgcggcactgtgccgttttggccattgcacagcgactcgccgtcatg

SEQ ID NO: 103671 - DNA, 120 bp, Heterodera glycines
ttattcctatgttctttcgggcttttcttgccatttaatttttgtttatttttttttatctatttttgctaatttgaatattttccattcattccagtggaagcgccgaattcgccgatg

SEQ ID NO: 103672 - DNA, 583 bp, Heterodera glycines
  unsure (1)..(583): unsure at all n locations
ggaattaaagtcactaaaaatcttcaaaaagtcgactaaaaaagtcataaaaaatcgccaaaaagtcacaaaaaagtcataaaatacgcaaaaaagtcacgaaaaatgaaaaaagtcctgaataatttatagaataacattntaatcgtaatttttaggcacataattttataaataggtacctaaaataggcatagaaaagagattcttccaacaattaagaaaaaattcatccatgtttcattgtctttttatcgatccaaattttatttttctgaattttctttgtatttttcggcattttcttcgctaaaattcaaattttgccccaaaaagtcaaaaaaaatcacgaaaaaattcgcaaaaaatcaaaaaagtcataaaatcctaaaaagtataaaaaaagtcacaaaaaatgcatgttagaggcttcagacaaagtttagaacactttttaagtcattttaaggccatttagagtcagcaaaaaaaaaagtcatttgacttaaattcccagccctatttattattattcctttttttaatttttgaatatttttcttcaaaatttatcactaaaatg

SEQ ID NO: 103673 - DNA, 193 bp, Heterodera glycines
cgtttaaactgactaatccggtcctggtaaggcgcccatatggattcaatttcaaaccgtttttttaattcaatttttggttacaatttttttttaattttttaccgacttcttcgaccattgaaaatttgactaacaattgaaattcttttatttttaaacaatttttagaatttattttggtaatactatg

SEQ ID NO: 103674 - DNA, 1003 bp, Heterodera glycines
ataccctggctatgatgtgagaaggattgaaataattaaaaacggaatttgtgaattgacacctggtctgactcacgatgatgtgctaattaggactttaagtccatcagaatttacaccccaacatgacggaattaactgtggcgtatttgttttgctttactctgaggcctacttaaataattgttcactgaaatttccaaacctaaacattaattttgaaaggcacagaattttatggcacttggcactgctgataaatagtgataatgtggaatatgtccgtcagaacacttcaagtcttcattccttgcctttttataatgtggagtctattactgaacaaacatgcccgagagatggagctgggacctttatttgcattgaacccgatattgacagaactcctgacgttcgtttgagaccacattcagcgagtattatgagtactgcaacccgccgatcgctccgactaaaaagcataaatactgagctgtcgtctgttgataatcttaatattacttcaaaaactcctcttaatgatcttactcgtcgttgtcatataaagcaccagggaattccttgtgcggatgtgcgtgcaaagcacactactgagtattatgattctggaaatattggtgataaaatatgtgaacactgtcattctcttttattaaatagtgaagcagataaaaaacacgggaaaatttcttcgagtttttgttgtaatcacggttcggttgttttgccctcttatgaagagcacccaccaacacttaaaagatttttggcagggcaagatccggaatctaatgaatttttatcccaccaaaatgtatataactccttgctggcgtttgcatcagtttctgttggatatcatgaatcatcccttggtggtgacaaatgctatttattgaatggagaattcacacgaaaaattgggttattacctggaaaattcgctccgtcttttgcacaattgtatattcttgaccctatg

SEQ ID NO: 103675 - DNA, 171 bp, Heterodera glycines
gtgccatttgtaattactataactaatctaataattaattgtctattccgtagatatggtgtcggggagcagcgacgattttgcacggagtgcgggcattaagtgagtgaagcatttgactgattagcaatgctaatgattgtggtactgatcaggtacacgtacacaatg

SEQ ID NO: 103676 - DNA, 121 bp, Heterodera glycines
ggtttaatttgttgggccaaaaatgccaatcaaatgaaaccaaacgaccgatcagttgccaacaaatgagacgcgacttgatctgagttatgtgccgtgctttgaacgattttctgaaatg

SEQ ID NO: 103677 - DNA, 71 bp, Heterodera glycines
aggaactagacattgggaaatggggagagacaattaaaaacgctaattactcaattaatgccctaatgatg

SEQ ID NO: 103678 - DNA, 238 bp, Heterodera glycines
aacaaaagctccaaatccactcgatcaattaaaaattaaaaatgaggataaacccgcaaaatgccgttaaatatcattttaccatagaaaaatacaactttttgtttactaccgtatctcattttttcaaaaaaaaaatatatattctgtatcattgtcgtatattctccagcagcaaccctttcaaaattctcattttccacgccgtttttcaatatttttggctcatttgccaatg

SEQ ID NO: 103679 - DNA, 476 bp, Heterodera glycines
tgtttctggaggtgtccaatgcatacatgaaaaaggggcgggcgtcgactccccccccccccccctcgctcgcaaagagggcagccgaggggtggggaaggttcatagcgaatttttgaaaaatatgtgtatttcttaataaaactgttatattcctggcggcgcctatcggcactgccggaccccctctccccaaaaagtttttttaagaaaaaacgcgccgcaaaaggttttgaaaaccaaaaaaaggtcatcaaaaggtgcgtttggaccccttcgcaaaattcaccgctgcccttcccacccctttatatatggcccagtggggtatccacccacagctggttaacaaatttttcttaaagaacaacattcatgaaaactatgcccattctctgcaattgctttccgcggctgttgctcaatgtaagcgctacggttgcgaaaggtttgccaatttgtcgctgtttgacatg

SEQ ID NO: 103680 - DNA, 243 bp, Heterodera glycines
ttgatgttggcaaataaatgaagaaatcaccgaaaatggaaaaaataaaaatttatgaatgaaaaaatgaaaaaaaaaattcgtcaacaaaaaaatcagtcgatgtcttttccactctctctgtctgtttggccaacttttaatcaaatatttcgaaataaaatttggcatcggagcatataaaaagcatttgaaaatgccgaaaaatatatcatttttcatttaaattatcctcccaaaatg

SEQ ID NO: 103681 - DNA, 873 bp, Heterodera glycines
ttttggtcgtggcagcccctccgtccagcagcaccaccaacgggtcggtagcagttcgtacaatggcgtttcatacaacttcaaacgggaatggccataacttttttgttcgttcgttaatttcttcaaaattggtatcattcgaaaactctacgtgtttagaagatattagtaagcaaaagctaagcgattcagcatcaaaagttatgattaataagacttaaaaattcaagaaaatcctaattttttgtaaactacacttcccccccccccccccctcatcattttccattttgctttgcccccccccccccttctctctcccttcccatcacatacgcagagaatgaaacgcctttcacaacattggggggaggaccgaaatactacatatgtaaaagcaacaaaatgaaaaaaattgttttcgtttatatcaaaacccgcagggttttacagatttagatgtaagtatatacatataggcaaaagagcagaatagtggtcccgatggaaaaatagtaaaattttaaaaagcatttttctcaggggcagaaaaacactctgattacgaatcagaactcagattaaaaaaaatcatgattttgtctatgacttttttaaaaaaaccatagaaattcaaaaacccaaaaaaatcgactaaactatcaaatgcggaaaaatctggcactgacgccaaacacccagaaaatgccggggtttagcgcgttcccggctaattcatgaaatcctggcccaacacatgtaaagcattttccaaaaatgcccatccaatgaccatcgatgccaaaaaggcgcttttcggtgcaacaattgcaaaaagctgattgtgaaaacaacaattatttaaatatg

SEQ ID NO: 103682 - DNA, 256 bp, Heterodera glycines
ttcttgtgcctgcgtctcttactgtcgggaaaatatagtacacagagcgggactgaaaattttggagttagagggagaaaattcagaactgaccgcagcaaatgattcaaacataaaaattgttgggaaaataaaagcgaaaattcgaattgaagactcagtgacgggtaaatttggagaatgggaagcgacactgcttgtttcacccgacaagcactgtcctggaccagtattgcttggtttaccttttcttatg

SEQ ID NO: 103683 - DNA, 977 bp, Heterodera glycines
taatagcgaataaatatcataaatcgaattaatcaatacatttaattggctaaattcattaaaaaataattcgttaataataagttgaatagattgacaaaaaattgttaccgattttttagccggaaatgttatttgtttataaattactcatttccggtcataattcactgtcgtcagaagcgatttgtatatatataattcaataaaattgaatgtgttaattattagtaataaatttctgttttttttatttgttgtttaaaccctaaaaaaatgtttatttttcgcagttataaatagtgcttatggttttaaattttcacctagtttttttcctgagcttcctatggcatgtaccttaaatgcatatgaaaaattctctcaaaaatctacataaatttattttcttgacaaggattttttcttttttaaattatatataaatctcaataagatttatttggcataattttgttgattttttgaatgaaattttgtttccttttacaccccaaaatttgaaactttttagcacttattttctcgtttttagaaactattttggggttttttagaacctaaaaacgaacttggttttttttttttgaatttttattttttaaatttttttcgccagtttttagcatctaaaaatataagccctagttataaatgtaataaaagtttctatttctcagttattgatccaatatatatttttaaaaatatattttaatgactcatttccgatagtaattcagtgtttcgtcataaagtgttttgtatataattttataaaattgtatgtgttaattattattaatgaatttatactttttatgagatctaaatcctacaaaattcttctttttaagcagttaaaaatcttgtaaaaatttcataactttttcaggcaccaaaataattatttatttatttttttttgtccccaaattcaatataaaaaaaagatg

SEQ ID NO: 103684 - DNA, 536 bp, Heterodera glycines
actcgaacaataataaaatttaaaatatataggatgatatcctcattggcatcttacccacgagggtaaccttggtacaggaagcataaaattcgaaaattgtatggatggtatcctcatgggcatcttgccaatgagggtattattggtacaggaagcctatcaattctttgtccatgtacagctcatgtgatgaacggtagcgctgatctgagtccggattcgtgatcatcgacctcgagaacccttaacacttattttcattaatttttgaaacacatttataggcatctgaaaatgtatgtaaaaagtaccctgtaaactgtataagttcctcattggtataatagtaaaatcgatgagaatagctattgtcttggatgaggctgggttatcccatccattcattctttccacttactgggtattttaaagccatttatcatgtcttgtttatacagttatcacctgttattgccaatgataaatgagcttaaacgaaaaattaatattttttttatataaaatataaaatg

SEQ ID NO: 103685 - DNA, 293 bp, Heterodera glycines
ggaattccattgccaattccgcaaaaaccgttgccattcaaatcatcggaaaacggatcaacatcttgtaagatatggccaaatgtaaaagtttttagccaacacttcccattcattttcacagatacatcgaccgaaatatcatcacttttcttcaccattttcgtcctctttttgccgcctgtcaaatcattttgtgcatcaacacggacagtgatcgcaattgcatctcggagctcattttgcgcaacatttggccaattctcgggaaaaaaatccatagcattgaaatg

SEQ ID NO: 103686 - DNA, 1003 bp, Heterodera glycines
aggtcaaaataatggtgacagaaaataatttcctcggtctgttttggtttctgaccacaaaatctgttttttagctgtaggcatttgtgaaaaagatattcttatgcttaggaatcattaataatgtttcaattttaaactaaaaaagtatatttttaatatacctttaaaatgaatttattaataaatttttcatttcaaataaaaatctacaaacaattttgtgggtgctatttaacgggtcagtgacagtttgtacaaatggcagttggtaatttcaggtttttctaaagaaataaaaaaatcacttttatgatcgttacgggctagggttaattgtaagctgaagaacagcagaaggaggacgtgcgcagcagggatggcacggaattccgacttccgaaaaatttttgaccctcggaattccgatttccgaaaatttttggggcctcggaattccgactggtgcgaaaaatttttggccctcggaattccatccctggtacagaccaaaaaatgagaaggaaaagggtacataaaatgtcgagaaaaatacgaaaaatgttcagggatatttcgaaggatttgtcaggtagcaaaattcgaagaaagcgacgaaaagaattggcgaatggataataatgaaaaatgacaccactcttatactaatttcaactttcgcctgtgcactttttcagtttagtgggcccgttttttcatccaaaaaatcatataaaagacaaggaaaaataacaatgactctttaaagcacacatattatttatgttttctcgtaatttgccgagcccaatattagtgcattcattcgaccaatttcaaactcggacctaacttcgaacaaaaagtcgaaactctcaaatttttcgagtttcgcattatttgtttgatgtttggtgatcccccctcatcccctgttttgtgaatgcaacaaacaaattttgaatggctactgcttgcgggggagaaaaagcattcgcatatg

SEQ ID NO: 103687 - DNA, 55 bp, Heterodera glycines
agagctatctgacagaacagctctcctttgcttcctcgccagatcgctcgctatg

SEQ ID NO: 103688 - DNA, 505 bp, Heterodera glycines
atcggctccttttctgcgcgtatatgcatttaaactacaaatggagattgatgattgcttccaagggcagggttcttaaaatgccaaaattggaaacttattcatatgtaaatccaaaagaaatctagccaaaaaagtagtgctttgttgttgtttggataagagatttagattatttatcaaaataagagacagacccaggaattttgtaaccaaaaatgggcctagccatggcacccaaccattaaattgtcggttgcttacgtagaaatgacacatgtaaattattttttgctttttactgccggatgcataaatatattgccacgagaaaaaaaaaatgtttttatttacatatttattaaggctgaagcaacaattcagcgaatgattttaataatattttaatttttgaaatataagttattattttaataattataaaaatcgtgtgtttcttttcttatttcgttttttcagatatttaagtggtaaattgataatg

SEQ ID NO: 103689 - DNA, 1003 bp, Heterodera glycines
aaaaacagtgaaaagtaattatggcattttttcaacagtttaattttaatgagaatggacgaaagacaacatttttagccggaaatagattgttttgacgtttttaacgttaatatccataaatgtaaaaaatatttttttaatttcataaataaaatatttacgaatatgtttttttaactatttcaatattttgagaatatttcggcaattttaacaaaaatacaataaaacataaatttaacgaaaaccatttcccaaatcgcacccaattgtccccttttacaaatatggcctttggggttttttcgtaaatatttatttaaatgtttcggaatttttcataaatatttataaatctcagcttcagtgataagcaaataaaaattgccgaataaattaatttaagaataattacaactgaataattcatttttatttttgcgaaaaataatattcattttaatatgccataaaatcaatttttctattgattgcttttttatatatataaaaaaagttatctacgagaatgaagcgtgcaaaccaattacatgttcgctgaaaaataaggctaatatacaaggattcctttttatgtaagaaaaaaagcaaatatgtaaataaaaaatgtaaaaactatgtatgaattatgtacaaaaacccaggaatatgtacgaaacaaaattttaaaatggttattttttggaaaaaaattattcataaagggtgaaacaggcacaaaatgcataaaaatgacctaactaggcctagaacgaattaaagttcaatataaaaaatgaaaatatgtacgaaatattgcgaaagtttggatttttgtcgtgctgctgttgatgttgcggcggccgaactggcgatggcgtaccctccgatggagtgtagatgacaagatgtttacgctgctgttgttttggcgcaggagtacgatgtccttgttgcggtggccccaacgggtgctgatgcaaagttgcgtttggcgatg

SEQ ID NO: 103690 - DNA, 329 bp, Heterodera glycines
ttattgtaatgcacagcctggtgcgtgagtgtttggattggggaccgaagggtgaagccgttccctgggtgtgtttgctcacttttttcaaagggaactctaagaattctgatatgccttcaaatctatcaaaagagttgcatactttctttttatcatttctctttattttctattttacacttgtatttttcatttgaatgtttattcagaaataaaattgaaaaatgtgtcattactaatattaaaaggtataaattaaccaaacaaaaaggtatttaaggagagaaatagtcagggttttgtaactcaatttggaaattagaatg

SEQ ID NO: 103691 - DNA, 57 bp, Heterodera glycines
  unsure (1)..(57): unsure at all n locations
ggtggcacatatcgtgaacatntcataatcaattaaatttggatttcaggacaaatg

SEQ ID NO: 103692 - DNA, 437 bp, Heterodera glycines
  unsure (1)..(437): unsure at all n locations
taaagaatccttttttcctagtgttctgatattttttattgtaaaatatgtacaaaaattntaattctaacttttcggttctaattgttatattttttataatttctgctaaatttaaagtattttctacaatggataaatttaaaaaataaattaaactgtatatatttcgaaatttataattttcatatttttttttcaattaaatttaaattaacaaatataaatctaaaatataattattttttattattaattttcaacatttaattatgaaagccgtttagtagaattttaaatgagcgatttacactttaaatctttaaatttgtttcattacagcaaatattgttttttttaaatatatttattgtgaatcttagaatattaatttatctattttgcacttgctataatggttatatttgagcataatg

SEQ ID NO: 103693 - DNA, 303 bp, Heterodera glycines
gatatttgaaatgctaacgaaaaaaattcttgccgaaaaaatggctatctcttttttctcttggggatttgaccgcaaacttggtaccaacatttgccttctctagtctggctctaccaaacactcacacgatatttgaaatgctaacgaaaaaaattcttgccgaaaaaatggctatctcttttttctcttggggatttgaccgcaaacttggtaccaacattttccttctctagtctggctctaccaaacactcacacgatatttgaaatgctaacgaaaaaaattcttgcccaaaaaatg

SEQ ID NO: 103694 - DNA, 91 bp, Heterodera glycines
ctgtgacaaattcccaattatcgaaggcatttcgcccctccccactggcagccccgccccgagcaatgggacgagggacgactgaagcatg

SEQ ID NO: 103695 - DNA, 183 bp, Heterodera glycines
ggggacctctagagtcaaaatctaattcaatttgcgacttttatggaagttaatttccgcagtccactcattttttaatttaggtcattggcataacttcacttttgaaatttttcttaacaaaaagcaatttaaaccatttgaaaatgaataaaaatgttttcagctgatttggatacaatg

SEQ ID NO: 103696 - DNA, 255 bp, Heterodera glycines
ggtacgccaaaaaaattttcatggaatttttaaatcttacaattaaacttttcgagatttttttaaaactcttactaaaaaatatttttttttttgggcggcgatcgaattctcgttttttttaattcaatggtttgtgttcgttttaataatgcaaaaaatgatctacaaatgcaccaccactccctttccattttttggattcaaaaattcttttacgattattttaaattttcagaattccaattggaaatg

SEQ ID NO: 103697 - DNA, 1003 bp, Heterodera glycines
gagatttttggctaattttttaagaaaaaataggtttttggggggccggcggtgccgataggccgcctggcgaattttgaaatttaagctcgatttctaacagatgtttacaaaaaaaaataagatttttacgataaatttttgtttttttaatatattaaattatcatgatttactcaagcaaaattggaactcagatttgtaacatattttcttgaggcacatttttccaaaaaaaaaaaaaaaacttggtgaatgtgcgagcgtagaggtccggcggtgccgataggcgccgccgggaatgttaatagattttgtccaaaaaatgataggtttttgcaatttttagagaatttttttaataagatttacgaatttttgggccctgcgatgccgataggcagcgccaggcgaattttaaaattaaaaaaataaattaaaaaagaaacggtcaacctgaatcgaactcacgacagaaagtaatgtcaaggttgattcactaaccactacaccacactacactccaatgaccaataataaaattaactttaattcataaaaaaattgtcaaaatggttaaaaaaatcaaaattgtataaattttttgccttttatcaatgaatatgtcattcttaggggtgcattttcacccccgcgcccccgcgggggtgaaggtcgtgggggcgggggatggcgggggtcagagtcgcgggggcgggggtgaggccaaaaaacctgtcccgcccccgtcgggggcgggggtgacgggggcggggtccgaaccctacaaaaaagcatttagcagtgtaaattttgaattagcgcgcaaaaaattacgccaattacatggcgaaatgtataattcctttttttcatttaaatttttaaaatgatgacaaaattactttgaaagtttagctgtttatttaaaattccctttcaattaaaattcttattctttgacaattcacaattttttgttttttcaagcttcagcaaaatg

SEQ ID NO: 103698 - DNA, 103 bp, Heterodera glycines
ttttgcgctacccaatctttgaaaagttttacacaatcaatctgcaaaaattggaccattttggccacattcagaaaagagggaattttatctttggaaaatg

SEQ ID NO: 103699 - DNA, 1003 bp, Heterodera glycines
agtgtccaaagttatgttatagctggaatatttcagattcttcgtccgcaaaagttttcggaaattagacaaaaaaaaaaaaaatcagaattccgcgtctaaatgaaaaaaatattcccttttgctttttgtttttgtaaaatttccactttgaatttttcccccggttttacccgcatttggagcaccgccttcgctgcgctttccctccccccggcccttctccgtcgtcgttcttcaatttgagcacatagccccgctcgatgagttggaaacggcgcgacaaattcaacttcaaaacggtattaatttagaaattaaattttgaaaaaaattcggtacttctaggttttgtcaccctcccacttgaattttttttccaataattttttctaggctaatttttaattctgatcactagggatgggatttttaagcgcgaaaaagtccaaaataaggccttaaataagtacgaaaaaatcgcgaaataagtgcgaaaataagctcgaaaaaattccaaatttaggggtataattttttaaattgatatgaaaataatttcaaattaaggcaaacaattttattcattgattacagttgcaaataattaaatatattcgaaatttttgaatacacttttctagaattaataaaatttgaaaaaccaaaacttggttaaaaaaaaattacaaaaatttcggccgagataaaaacaaaatttagtggaaattttttgaaaatttttaaccaagttgccaagaaatgtgatcgcgtcaaaaaatttttttattgtatttttgttaaaaaatttgtgaattttcatgaaaaatttaaaatcgcgaaataagaacgaaaataagcataaaacgctaaaacaagtgcaaaacttattttaagggcgaacatccaaaataagcaaaacacgttatggctaaaaataaaggtcagattcgtgatcaaaattagcctagaaaaaatattagaaaaaaaatttcaggggatg

SEQ ID NO: 103700 - DNA, 476 bp, Heterodera glycines
ttacgtcatcataatcatctgatgaaatttgcttgtaaattttaagcaaaatctgtggctataaaagagaacagcttggccagtgagcagcaccaattcatgcaaccatttcccattttctgttttgaataataataactgtatttatagggattggattttttaggcaaaaaaaaaggcacaaaattgaaaatcggcagaattttttcatggaataatttttttagtcaaaatgacaaagaagctgaaataaatttcgttttttttctctgaaaatgagggaagtttttttttaaatgaaaatacataagaattaattgagatgaatattttttaaaaaacttctttctattcacatgcgacaattttttttttttttgtaaatttttataggtctattttttgtaaagaaattttccaaaaatccaaaatcctaaccacaaacaccatctccatcattacaaccaccaaaaatg

SEQ ID NO: 103701 - DNA, 362 bp, Heterodera glycines
ggtgtgtacaaagggcagggacgtattcagagcgagttgatgactcgcccctacaaggaattcctcgttcacggacaataattgcaatgtccgatcccaatcacggcaaattttcaccggtttaccaacccctttcggggaaggacaagcacgctgattttgccagtgtagcgcgcgtgcagccccggacatctaagggcatcacagacctgttattgctcaatttcgtgcggctgaacaccgaaaatccctctaagaagttgtgcccacagaagcaatgagccaactatttagtaggctagagtctcgctcgttatcggaataaaccagacaaatcgctccacgaactaagaacggccatg

SEQ ID NO: 103702 - DNA, 767 bp, Heterodera glycines
catcaacaattattttcttcaacatttaattcgcccattttctctgtttaaaagggattgatcagtttttttttgtccggcgattcaataaatttataaatttctaaaaaattataagaaaactttaattttaattttgagttaagtttgttgaaaaaattcaaagttgtactttaaaaatgataaagcaaaaatttaaatgtaaaaaagcaattttttctttcaaaattattattaattccactaattgagagattcaattaaatttttgagccaatttttcaaaaattaaggatatttaaaataatggatgcttttgtaattgattttttcagatttcgcgctgagccaaataaaatacaaatctttaaaaaaagacatattgctcccctgctggaaataaaacaaataattatgtaataaaagctattaattaatttattttattttatttatttaatcggattcaacgttcatcacatttgatgagctaatcattttaagctgtgcaaacattttgaaattgcaatttcattttacgaatgttcaaacaaaacggaaatgcgtcatttcaacggcaatttaaacttgaaaatcacatggaaaagaaaaacggaggacaaaaaaaatggaaataaaagcgcagagaattagcggacactttcatcagcttaattaagcattaattggaactcaatcagaagaaaggcaattccctcaccacattttgacatttgagaagcattgaaagtattaaaataaaaatg

SEQ ID NO: 103703 - DNA, 217 bp, Heterodera glycines
tagaaaaataaaaaactaaaatggaaataatatttaatatgaatataattttaatattattgacgagaaacgcataatttatatttttgtattgactaaataattaatttcctgttacaacgcatcaaataatcagcagacatccgagtaaattacatatttttttcaaatatatgcaaattaatgtcagaccattgtgcgattagacctgaaaatg

SEQ ID NO: 103704 - DNA, 444 bp, Heterodera glycines
gaaagaggcaaatttgtgcagtgaaaggcctctgctttcgaatcgatgaccaatgacgaccatccaatttttgtttgacattcttccattctgttagttaggtttttcttttgttgttggctttgtttgtgttcttccttttcaattcgagcataaaattcctaattttaaaaaaatactttttttactccgttacaaaaaaaactcctaatattaattgagatgttgatttatttttggaacgtgagtgaattaaaaattcttttcaacattccgatgttttggtcttccaattttgcacttctctcccgtcgtctggcaaacgttcggtccaaatttgggttttaattacatttgccttttagccgtcatgctccaatttttcgaccaatcttcgctttttcaatgttggcgcatcccttttcggtaggaaacgtgccgatg

SEQ ID NO: 103705 - DNA, 122 bp, Heterodera glycines
ttttcccttcttcggttttttgcgtccctctgtatttgcacacacacacacacatatatatatataaatatgtagataaaaaatttcttcctccattctactaaacccccacccccaaaatg

SEQ ID NO: 103706 - DNA, 464 bp, Heterodera glycines
ccgcttggatttgcctttgtctccgttcgttcgtttcttttcccctttttcctttttccccccttttttccttttttccattttcccatttgattcctttcagtgccattctcctttcgctgcccactcattgtcaaaactttctccttcatttgacggtgtacgaactttgcgaggaacaaatgccaaaaagtgcggcaaactttgggcacccccaggcgatgcttttgcattttccgcctgaattttgtgtgcgtcttctgctgttaattgaggacgacaaaatcttcagaaaaatgttgaacagactcactcaaaaaagcatcggccatttgattggccaagtgagtacggcactcgcctcagccgacgatcaccaaacggtgcctttcacaaagccttcctcgtaaatgtgctttttatcctcttaggcttcggttttgccaaggctttttgtccttatg

SEQ ID NO: 103707 - DNA, 1003 bp, Heterodera glycines
aaaaatcctgacgaattgtccactgactgattttccaatgacgtactgtatgtccattactgacggattgtccatttactaacggattcttcttcactgcagaattgtcattccacgaccatctcttcgtcaaatttcattcaattgcacccccccccccccccctcccttgtccatatcatttgaaaaacggcaattcgaacgatcctttgtgcaattagtgacgtcgcagtggaacaaatggctgaatttcggcttttgatcttagccaaaggcgcctggcggagaacttaggggctgattgggatcaacaaatagaacggagagaaattaagtgacaaatcacaaggaacaatgacaaatcacgagagttaatgaattggccaattcagtgatgaaaataaaagaaagttgagcaactaattttgttaattacgaggaaaatgttgcaaaataaaagtcacaatggaaaatgatgataattaattatgaagaaaaatgtgattaaaagaaatgaaaggtgttctattttatccctaggccaagtacctactgccgactggcactgatcacaattcattcgaccgttattgctctaataaattttttttttctctgcggcatacaaaatataataattgaattttattatcataaattcacatttgataattaaataactaaacgtagccaataatgataatacattacttttactaaatttaatatttttattcatagcaaattaaaaactctctctctctctctccgtgctgaaaaccgacaaaacaacgtgaattgacgtgtgcagactcaagaacgacgaaacgacgaacaaattggtggcatttgcagtgttgctgacgaagtaaatttatttgaattttgcctataaaaaatatataaaaataaaataaatagaacaaaaaataaaaaatctcttgtgactcattgggtacggtaattacagtatacaataaaagttgttttaatccgagaaatg

SEQ ID NO: 103708 - DNA, 295 bp, Heterodera glycines
ttcaaaaattaaattagaaacggagaaaagtttctaaaatgaataataattaagataaattgacggacggaaaggcgataagaatcttcacaaaatgtcaattttagtgatcggtaaatgagaaaaacaaaattagggagggaggagaattggagatcaaaaaaacacgaaaagaggatcaattaagaagttgaaaaagaattgctgttctgagaaaattaaacattgccattttcaaataaattccccaaatttccaggaaattaatttgtttgccgtgacctcttccaaaatg

SEQ ID NO: 103709 - DNA, 290 bp, Heterodera glycines
attaaatagcaagggtacgaataaatgaagtatagtcaaaaccgtgggggttgttggacaacaaaccggaacagcttacccaattttacacgcattattattcgatgttaggtgaaaaaaaatttttgtgtgtggttgggaagattcagcctttttaggccggaagcaaaaacacgcaacggaaaaaaattttttgtagtgcctgttaaggacagaatttttaaaaaaagccgtcccgggctgattattttagaagtaaaacaacatggtcgacgaatgagcgtgaaatg

SEQ ID NO: 103710 - DNA, 663 bp, Heterodera glycines
ctcatatgaaaggccgattcataccgagaaatgcgaccatttcccccccccccttcccccccccccccccacctgatagtcctcgttccacaccggacttttggtcttgggcctcgtcaccgttttgccaacgtggtactcatcgcagtcgacattcacatacgcatccaccaattggctgtccgggtcgtccgactggttgaatctgaggggttaagggagcgatcaacggatgaagtgattgcgataaatcagagcctttggagtgggagtgatggatgtactatatccctcccccccccccttttagattttcctttttttagaaaaaaaggattggcttttaatcagaatgtttctgaacattttgttcccctttttaccttttcgaccattctgtgggctgaaggtcgcgcgcttcgaccacccgaattttggccgttccgttgaacaaaaccatcgctttttcggcctccgtttggccttttcccccgtcggtccctttgtcctttggccttttgctgttgtgaggtgatcagctgatcaatggaggctaatccccgcattcaatgagcagagaaaaggcgtaagacaacggacgaaagggcggaggaaaagcgacgaaagagcgaaaggaaaggaagcgaaggacgagaggaaatg

SEQ ID NO: 103711 - DNA, 249 bp, Heterodera glycines
agtcagaaaggcttgataatttaaaaatgtttaaaaatattcttgttaactgttcttttaggcatttatgtgtccatttaaaatttacttattttaaccagcgatgtgattctaatctttcatcgaattgtatttaataacgttttttcaacaaatttattcatttaacttgcttgataaaaatagaaataataataataataatactttagattatatcaatatttttgaacattatcgccaaaaatg

SEQ ID NO: 103712 - DNA, 382 bp, Heterodera glycines
agaataatttcctttttcattttgacatttatccgccccccaagaaaaagtgaagctgaagtttctaagaatctaggcctaagcaagcctaagcaaaggcctatatgcctagggtctaggcctaagcttaaaggcaaaggcctaagcccgaagccagtgttaataaaatacatacgtaatttttatcaaggaaaaaaaaataaatttggcgatcaatgaaaaaatttgtcaattttcttaggggtgtatttttgaaaattttttgagccatttcttaagggtatattttttgtgttttattgcattttggataagattttttctatttattattttaaaaattttcaattacataaaaaacaaaatgcaggtgtttttgatg

SEQ ID NO: 103713 - DNA, 449 bp, Heterodera glycines
tccctgaaaatcttgtgaatgagcattgggaaatatacgaaaaccaaatgaatgaaaaatatgtgcagttttggttcttcggggagagttttgaagtgttcattaataactcaagcgacaaaattattttgggaatggacatacaatttttaattggagagagatggactttaaaagtctttgatgataccgaaacgtattgggaaaaattattttgggaggaaaatcaatttgtggagattcaaagaatacctgagatttgggttacacacaaagaaaatgcagaagaaaatgaaaatgacatttttaattacagtataaatgtaataacaaaaaattttttgagtattacggatgtgaatttggcaaatgataacattcaaaacgaaataaataacagaaataacaatataaacaccaaaatggaacttaaaaacaatttagaaatg

SEQ ID NO: 103714 - DNA, 1003 bp, Heterodera glycines
aaatcgaaaattgtgaaaattcgttaagtgatttgtttatttgacactgttgcagcactcttccctttcttcattgatttgtttattttttcatctttaagggctactgtaattattttggattaaaataatgatgcaaaaaattattcaaaaatcataaattacatttggataaaaaaaaaacattcaaaagccaaagggttagaaaaaataaatgtgcatcaaagtataaacattcattgagtaaataaataattttaattatttgcaaattaattagaacattttttaaaatttaataaataaatattatttaaatatacggccccccatttctttttcgctttaagtcaaaaattgggaaattccgttaattgatttgtttatttgacccccttcccttctcgccacccgaactcgcaatttcccttatccctcgctgcaacccttcctcgccactctcgctgccgagcaatttctcgccatttttctcgttgcaatgtactctcgccacactctcgcccccctgccactcgctgctgcctactctcgcccccctgccactcgctgctgcctgctctcgccccccctttccccgctgatgacgtcattttttccctttatgagagcaaattaatgtttatcatccattgccaatgtggccgagtggttagtgcgtcaggctggccgccccctctggggttcggatccgcttggtgcggggaatttttggagaattttaaatgaatttaaattcaacgtctttgacctttaagacgtttaaaataatttaaaattaaataaatttaattaaaataatttgcataaagtcgcgcagtcaaaaaagtcgcgcacccccctgcaataggtttgggtttgcaagaaaaaagtcgcgcaataggtttgggtttgcaagaaaaactcgcgcaataggtttgggtttgcaaaaaaaagtcgcgcaataggttttggcttcagtactgaaaagtctggcgctcagatg

SEQ ID NO: 103715 - DNA, 844 bp, Heterodera glycines
  unsure (1)..(844): unsure at all n locations
cagaataaaccttttttcttattttatttattagctcaattttagacttttgctcgcaaataaaattaaaatgtatggtatatcattaacatgtgtttcgatgttatttttattgnaaaaatatgtatgacaaaaataataaacacaaataattgtaattatttcattttattaataaatcttgacaaaatgttcgaataactaaaattaaattttatgctgtgccattatgctttacatatttaatttatgtttccattattctggctgttgtaatttttttaaagtaaattattttaattttctctttactttctttaccgtgctttacttttttattgattataatccatttaaataaatattttctgacacttacggctgatggaggaagcaatgacaaatataagaatttgcgcgaaaacttaaatatgaattaaattttaaaaaaacttttctgaaaataacaatgtataatttttcgggtcactgatcacgatttatttatgccaatttctgatttataattacttgtttaatgatgccattttgactttgactaaaatttatttattttcacacataaatttaatttgtttatatatattagattattactcacaaaattaaaatttattttcaaaattttaaaaagtattattaatattattcacaaaaaatgaataagaatttatttgttggaaattatttgttaatgtttgatgaataaatctggatttttgcccaaattttcttaataaaattaatttaattttcttatataaattcatttttcagaaatttattttgttatttcgtttataaatttaaatatcaggcaatg

SEQ ID NO: 103716 - DNA, 216 bp, Heterodera glycines
tttccgtagtgccaattattaacctaaaaatgaattaattctctgaggcataattatcacttcacttttacaataatgtgcttccgatcaaaagcagaaaactataattagtctcaaaaatgaaagagtacgccaatttcttataattttctggcaaaattcatttttttacaaattaatagattaaatttattctcacttttccttcgttcgatg

SEQ ID NO: 103717 - DNA, 288 bp, Heterodera glycines
cttctattatcttagtgaaattgtttttgtttttgttaggtactttgcaaaggccctgtttttgtacaaagtcactatttggacgtgttaactgaacgcgaagaattgggtcactcccacaaatttgttcaatttacaactgttaaggtgagcaattttatgctttttcaaaaattgtgctgcgaatgatttattatttgtcttttctccaattgatttttttaaaagattttcgacctgttcaaatgctacgagtgttggaaggccacacatttggagcgaattatg

SEQ ID NO: 103718 - DNA, 408 bp, Heterodera glycines
atttcccatcaaaagcgaacggaaactaagaaaattcttttgatttggcattaaaatgatgaccaaaattcaagtatttatagcataaatttctttgtttagccaagcatatattcaaatcattcccaaatatcccctcacttatttcaacacagcaatcagtgcacattttcgtggcttatgtcacactcaaaaaagactggctctagggccaccagtcaagagagggatgaagaaataaacataacaatcattgaccgaaatttttggaatggtaaaacgtcggtaaaggttcccgatttggaaagagcccacatagaagttctacgcctagaggaagctgtaaatagatcatttagaattgtaaatcgaagggcatatgcaaacacaagggccttaaataaaatg

SEQ ID NO: 103719 - DNA, 64 bp, Heterodera glycines
ggtggggacgtaaattaaaaatatacccatggatatgtatttccagtggaaatgcgtggacatg

SEQ ID NO: 103720 - DNA, 677 bp, Heterodera glycines
  unsure (1)..(677): unsure at all n locations
aagtacagctgcacattgtctgcnnaaggcaatgaatgcaaaaaatacatttaaaaaaacattggtccgatcgccaattggtcggcacccggggnaaattaaccaaaaaaattccgccaattttggggctttttcagtgaactttaataagcgctggaaagccgacgacaacttttgtaaatgctcgtaaaatttttagtgttaagaaaaatttcagggcattcaacttttgtgatttctcaaaaatgtaccgaacttaaaaattggacggaatcgcaaattttctcaaacaaaaaagccaaaaaaaattgatgtttatgttaaaatacatataaaaaatttaaatttcttatagaattcaataaggcaacattttgcaaaaaaattgcatttttttaaatcgaagaactccactctaatattgttctgtatagtgttcacccaactcactttgtccttggaaattgcctccttcaacacctttttggccaacttccgatcatggcgaaatcgggtgtggaaacgggccaatttcagcgcccaaaatgaagcaattttgcgcgatgtgccggccgcctcttggattagccgctcgtacttggccaccagtgcggaatagtcgggactccttttttggggaagaaaaattataaaatttgaaaatgtcataaaaaatg

SEQ ID NO: 103721 - DNA, 127 bp, Heterodera glycines
tgaaacggaagagtgccatttgactggttttggcgagaaagaagccaaacgctacgtgagcaatgttgtccgcgtaggatttctgggagtcaacggagacccatatatatgcgcactcaatgaaatg

SEQ ID NO: 103722 - DNA, 1003 bp, Heterodera glycines
taaattatgatttattatttagcaaatatttttatatcagacttactttagcttggcttgatgcttctaagatatattttatttcttattttttaggttttctatttcgatattttcacacaaccattttcattaagaaattcaaaaaacacctccaaagaccaaaaacatttaagaaataaacccctaacaataagacctaataatttttaaaaactcgaaaaattgtgcaaatatttttcaaaattcctatttaaaataaactacatttaaaaattattttttctcaatgagaaaaaattattttaatgaattaacaatttgatataacaaaaatttagggattttatataattttgattttcgagaattaaaataatttttctcgtctattcataaaaatttaatagtttaaatttttctaaaatctggactcaatttttgagaaaaaaacatgtttttgtcatttatctttatttaataaaatacataaaaaattgtttacatttcttttttcataataattttattggatttgcatgttttgaattttatttgacttttcgcctttaatttctcggcgcttctttggttcaaaaatgacaagaagcattcattcttttatgctttctcataaaaagtggaatttcaaaattttggatttttttcacattccaccaaatattattgaaatttttgtttgcacacgcataagttttttaaaaatcacagaaatttttcaatattttaacatttgttcagctcaccaattgacaattaattagcactctttgggtggtaatgagcctttaaaaggccgaaaaagcgcagtttcaatcacattaaacaataattaaaaatattattaatttattttactaaaaatgattttcattttgctgcccgtcttttccatgctaattggtaataattaataatttgaatgggaaattaatttaaaaatttagacaaaatgccaatttaccttttaggccgtaccatg

SEQ ID NO: 103723 - DNA, 118 bp, Heterodera glycines
tttttaatacaaataataaaaaaaattggaaaatttttacgctttggaatccgtaaaaataatgaaatgattttgctttcacttatttggttgatggaaaacgagaaaaatcgcaatg

SEQ ID NO: 103724 - DNA, 93 bp, Heterodera glycines
  unsure (1)..(93): unsure at all n locations
agagcatttgtatgtgtataaaattatcaaaaaaagagatatccattttctgggatancctctaaatataaaaatcctctgtgaaataaaatg

SEQ ID NO: 103725 - DNA, 311 bp, Heterodera glycines
ttcgagagcccttcaaatttttttataatttttcaaaattttaattacatttagccaagtttaattttctttctttttttttttgtttgtttcacataaatcctttaaatccttcattttctatactttacaaatttcgtccttatctcacctatacattgtttttttttttgtttgttttttttgctgatgagaaaatacccacaaatttccataattaatagagatgtttcttgttgttagctttaatttatttgatttactttaaatccaacaaaaaaacaacttctttttttagtcctaggaatatg

SEQ ID NO: 103726 - DNA, 78 bp, Heterodera glycines
agtgatgtgtttgggttctccaaccctttttatttacatttgcaataaatatttttatttttttagaccttggggatg

SEQ ID NO: 103727 - DNA, 1001 bp, Heterodera glycines
atccgatccatggcttatatacattttccctttatcttttgtagttgaagagaaaagcgccggagggaattgattattgggccgagatgaagctggcgcccgaatagttttgttttgttattattattatttattgttcttttgcttcattcttttgcttcgtttttttctttggtaaatttgattgtttttttgtgtcttgaatttcgcctttttctgtcatatacgaaagagcagcccaagtttaaaaaatttgtagtgaaaaaagttgtttgactctacgcccatatccaagaatatcaaaatattaaattttccaactttttgccaatttcttcattaaaaatttgggtgaaagggactttgaaatttttgttggcctaattaataatttacttaaatttaaaacgttttgcattcgtttttctgtctgggttcattgccacctgtgtagaagaaaattcaattacctatatttatttttgcaaaaaattacaagcatttaccgtatgctccacctcatttctgccgcttctctgctgcattctttgtctgatcatggtaaaagaatgagacaagtttgggcccctccattttattcaatctgtccatcactttctttatatttagtaaattttgaaaaaaatatttattttccccgccaaatgaggtggaggaaatgtgaaggatttcgttatttcggatcacgcgcaattcaatcttttatatttgacgttcttttaccattttctgactactagtttaaaaatagttttaacaattttgaggacccataacacgcgtcggttcggcttcatccttgattttttagacttagctcgtcaggagctttcgaatgataccaaatttgttcgaaaatttttatttaaaatgtttcatggttgttggactaattttaggcggccaattctatacacagctgagaaaacaccaaattattttttaaattgattccattttagatgaatgttcaaggcatg

SEQ ID NO: 103728 - DNA, 226 bp, Heterodera glycines
cctaaaataattaatttaattatgttatttttatggacagttaattgctttcaaatatttatttttccattttactcgattctttttgaacattttttatgcaaaggcacaacagtacaaatttgatggagcttttgtctcaacaatcggcaaagtcggcggcgccggtcgatggcccacaaaaactttggcaccaaatcaatgacgaaaacggcaccgaagcatg

SEQ ID NO: 103729 - DNA, 269 bp, Heterodera glycines
ttccgatcggaggttccttcaaaatgcttcggatggattcctttccctctgattcagaagggagtgaaaaatcagtccgaaatgctcctccgttcgtccatttcctcaactcttccggttcgttgttaccttacgccgtcctttcgctgaacaatgaaaggcctttgctcacaaagttcgattcgttcgttttgaattttgtcgttatttccatttcaagtgttcacgcttcttattaagagcacctgaacaaattgaaatgaaaaatg

SEQ ID NO: 103730 - DNA, 543 bp, Heterodera glycines
tcttccgctctctctcttggtctctctctttgtctctctctctctctccctctgtctctctctatcatcctgtgttccctttttcccaattacttcctcctcttcctcctcctcttccgaccttccctcttcctctctgtcttccacaatgcttttttgtctgaagatgctcttccgcttcttccccttctgtttttccccgtgctcttttttgtccgctttctcttctgctgcgtctgttttttccaattttctttccgttaaaatttccttttcaattttttgctgttttgaaatttgcaaaaaaaggcgttttaaattgagaaagaaaagaaattcggccgacttttccacgaaaataattgccaaaaagaaagtgacgactgccgaattgggaacaaatcgggcggagtgaaaacaatcgacggatggggcggagagagcggcggaattcggcggcgaacggaagggagggaaatccgccccgggggacgacgaattgggcaggggggcgaacagcgggggaattagcaggcaaaaatg

SEQ ID NO: 103731 - DNA, 153 bp, Heterodera glycines
aaaaaatttattttaaatttaaaattttaaggcacaaatgaagcagacaaaaatggcaaggaaaagagaataaaacatggcaaaagtgcaagtttaatcaacttaatggccgacaaatttaaacttttccgcgctaattcaaattcaaaaatg

SEQ ID NO: 103732 - DNA, 77 bp, Heterodera glycines
tggcatcggaagatgggctaatgctttaatccatcaaccccaattttaagagaccatcttcaactacgcgaagaatg

SEQ ID NO: 103733 - DNA, 391 bp, Heterodera glycines
ctctctctctctctctctctctcgctcgctcacacacactctctcacactgtccctctctctctcactctctctcactctctctcagtttcacacagatatagagacctctacatacacgtacagacacctgtatatacagattgccccacactcgcactattctcccctccctttcactctccgcaccaccgctctccatcagtgtgtatctgtctcgcactcgctcacacacactctcactctctctctctctttcacacatacactctcatttttttatgtatgtgtatatatatatatatatatatatatatatatatatatatatatatatatatatatatatataatgtttaggtttgataaatttttatttattgatagccatg

SEQ ID NO: 103734 - DNA, 98 bp, Heterodera glycines
aagagaaaaagaaagaccaaacggaaaggaaaaggaagcctcatggaagaggaaaaggaagaggaagagaaaaaggaagattaaagaaagaggaaatg

SEQ ID NO: 103735 - DNA, 92 bp, Heterodera glycines
atcgaggcaaggggatgataggcttggccgttcatttttctttggcaaaacacaattaaaaaaaacattttaaagtcaattgaaaattgatg

SEQ ID NO: 103736 - DNA, 608 bp, Heterodera glycines
actgatattgttggtgccttttgcagcttttccttatggagtttcgtctactctttccccgcatttttctgctgtgtcccttcaccgccgctgggcattcccccgatcgaatttggcacaggaaaaacggcaaaaagaacgaaaaaattataggaaaacgccattaaagcagtagcagagaatgtttaaaaatttgaatcgactaaattaattttattgcatatttataaatttatttatttcaattaaattccccaataatttagttttttgcttacgtaaaaaataatgacgcaaatgacaattattaattagtagtattgttatttgtcagcaatattattatgcataaattcatatttgtataataacaatggcatattagaagtgaatatgaatttacgaaaaataatatatccatttctgggtatttcccctggtgctaaagccatcatttgtgaaggctaaaaagtctgcatttttatttgctaaataataatcaaaacttagcttaaaataatccaatttatcaacctttttagacgcactaattttgtccctaactttttttaaactcaataaatttttttttaatttaacagaatatg

SEQ ID NO: 103737 - DNA, 538 bp, Heterodera glycines
gtttcgcacttttggttcaaaaccgacgtaaatacatataaagaaacaaattaaaagccatcaatgatgttttttgatgaggttttacgaaatttttgcctttattccgcctagttaaatttgttatttttaaatttttcacgtaaaatttcacgtaactcacgtaaaatacgttatagctaaaaataagtgtcagattcgtgatcagcataaaaaattaggctagaaaaaatacttagaaaaaaattttcaggggggtggcaaaacccggaagtaccataagtgattgattgagtgagtaaatcatttggtttttcattttgtttctcccatcgtcgcccctttttttattaatgtattttattaaagttagggttagtaaacaacaattttccttttttaaaaaaggacaaatgaatagtaaatcgagcagagctgtcaagctgtaatttaattttacatttattgttttaaattgattcatttgttttccatcattaggcactccgttgggccgacgaaaagtgctgtcaaaatg

SEQ ID NO: 103738 - DNA, 92 bp, Heterodera glycines
tgcgaaagtaaagccgctatttttcgagacaaacggatactttcaaagtgcatttatatctaaaaaagagttaggaaatattagcacgaatg

SEQ ID NO: 103739 - DNA, 374 bp, Heterodera glycines
  unsure (1)..(374): unsure at all n locations
gatcaatgtgccacaaaatgcaccagaaatgagtaataaaactattttctttatgaatgatatgatgtttttcttctcctgaagttacaaaaataatancaaattcatttccatattatttacgcttataaacaacatatggcagattaagataaagatcttttaggccaaaccaaaaatttttgtttagtaatttattttgtttattttcatttttatttacaacagtgtccaattttgtggtgtccaatttaccgggagccaataattattgcggggaattatatggataaataaattttatggagttttaaaaaactgaatttcttattcacttcgtaatttcagaatgacttgaaattttgcaggaaatg

SEQ ID NO: 103740 - DNA, 153 bp, Heterodera glycines
taaagttttgtgtgtttcagagcactttctgaaaaaatacttatgaattaattttgcaaaaaataaataattaatgaaaaagtcagaatttcgaaaaattttaaaaacaacaagcgttggcattttttcaggttaagttagtcctttacaatg

SEQ ID NO: 103741 - DNA, 131 bp, Heterodera glycines
tcattaatcagtcaatgaatgtttggctatacaaaatttaaattaaaagaaacaatttaaattcttacacatttttgtgaattatttagtcggcgattaatggcaaaatcaatgggcttggtgccgccatg

SEQ ID NO: 103742 - DNA, 128 bp, Heterodera glycines
acatattagattcccgaggttcctttacggactaataatcacaaaagtcaaatttatgaattcataaaataataattcttgtattattttgtaaaaaatgcactagaagagttaaatgaagaaagatg

SEQ ID NO: 103743 - DNA, 563 bp, Heterodera glycines
  unsure (1)..(563): unsure at all n locations
atttttaaatctggtgaaatttaaagtgaattanatactccaaattaaataataaaattaacaaaataaattaattnatggaattttttgtaaattagtaagattttttaatataaattatcattttttatagacaaacattctgcttcccttcattgcaagaacgacaacaataattcatcacaacaaattggcacatcaacaacaacgaaaccatccacaaattatgccattcaaaaggcacaatttttttaattgtgatttttcttttcatgggctaaaaaattctaaaactaacatttttaagcagataatcattaataataactaaaattctcatttttcaaatttttctttagtaaatttctcgggcatccagaaagaaattgcttggattgaaaactctttttttattccaatgaaattataatattttgatttaacaaataacttcattggtgtttcattaatttttgactcaaaaatgtaagaaatgacaaaattattgccaaaatcttatggaattagcttaatatgctttataatattaaaatgcccaaatg

SEQ ID NO: 103744 - DNA, 118 bp, Heterodera glycines
cttgcagcgtggaacagcaagttgtccagtgtgcggaccacatcggaccgttgccttttgccaacgaccgttcaatggcacggctgtcgacaacaaagttgtaactgacaaaccaatg

SEQ ID NO: 103745 - DNA, 114 bp, Heterodera glycines
acgagatgaattggctgctgaatgcctaggcctccgccgttggcacggacttttcgcaggaacaaatcaatgccgcaaagggcggcgtaatggacatagaaagtgccaaatatg

SEQ ID NO: 103746 - DNA, 145 bp, Heterodera glycines
  unsure (1)..(145): unsure at all n locations
tcttctacgttttttaaaaaataaaattgattttatatccaactttcgaaaatatttttatttaataaattaaaattacaaactctttncgtggaatatgcatttatttttgaataagttattaatcatttttcaggaccagatg

SEQ ID NO: 103747 - DNA, 1003 bp, Heterodera glycines
tttggggttttaaggcagggttcggatctgtccttatttgtaagatttgcccttatttcggctattgttcttattttgttcttatttcttaaatatattcataatttggaaatttatggccaaatgttcttattttacctataaattttaaaaaatttccaggcggcgcctatcggcgccaccggacgcccctgtccaacctccaaaatttttaaaaaaatatcgcaaaaaaagccttttacatttaaaaatggtcgccaattgtctcaaaatcgcaaaaattgataatttttgatgaaaatctgttaacaaatcaaagaaataacaaaaattttttgtgtcggcgcctatcggcaccgccggacccactcccctcccccgttctccaaaatttcttagaaaaatgtgccgtaaaaaatttgttaaaaattttattttttttagataaaaattgcactaaatttgctatttttctccccaaaattgttaaaaataatcatgggaggtgaaaaatataatatttgatacatttttgatcgaataaattgtaaaaatatctgatttgaagcaattttgcgaaatgttcttatttttgaccatgaaatcttgttttttggccttaatgttcttattttgaaaaattttcgatccgaaccctggtaaattttacacccataaaaatgaagctttttaatgcctattttccatttttagttattttttcttcatcatccatacattaattactctcttttcttttgatatgaaattttccaagaaattatttagttatatttattaagcaaataatctaaaaaatcaaagaatgtcctgcatttacataacgtgtcctaattttgaaaaagccaataaacaggcgaaaatttttctaatttacgtcatcaaatttatggattatttttaataatatattcaaaacattaaacaaattctgccaaattgtgcattttatttgaaaaattagtaatattttaaaagaatg

SEQ ID NO: 103748 - DNA, 638 bp, Heterodera glycines
atattttttaagaaaatcaaataattcatttttatattttatttcaaataaatattcctcgtatgataaaaaattttttataaatacgtgttaatttatttaaatagtatttgttaattaaatattttatggcttatctttggacttcctcattcaccaacagagtttccgattaaaaaatgcttttttcgtccccgccaaacgggaaatttttcttcgcgttcccgcaaagtctcgtatttccgcaaagcggaaaaattttcaaagaacaaaatttaaatattaatttatttattttaaattcagaaatttgctgcagaattgttgtcacgatgaaaataagtttaaaatttatttttgtttttttctggtgtaaaaaatatgtgaattatacgaaaaattcatcatgcttaaaaagcacacatacctcctacctatatctgcatatatgttatagagaacaagagctttcggatgagctattgatatttaatgtagttgggggcattggaattttttagagcataccacgtaacatcgtagttattactgttcgttctttgtttaatgacaaatctttttagcaaattgatcgtaaaacataagaatagacaaataatctatcatcgagaattatg

SEQ ID NO: 103749 - DNA, 225 bp, Heterodera glycines
agctaatcaccatcaatcgtccgcaatgacgttaaactagcctaagccatcaacaactgtccgaaacgctaatcacccggctgccacaagtccgcaatgacgttaaactagcaaagcatcaattgtccgcaatgacgttaaactagcaaagcaccggccaccaaacaaccattgtccgaaaagacgctaaactagcaatccatccgacggtcagggtccgaaatg

SEQ ID NO: 103750 - DNA, 246 bp, Heterodera glycines
aacaaaaaatggcagaaaggttaaaaatttatatcatcctttataatttttaaattttctataaaaaaatattttgttcatttggttagatgaaaaaaaaaatttttttttgtccaaatttttttttcgcacttcttatttaactaactaattctgattttcataaattctcgaaaaatgttaatgaaatttctcgttaatattagtaaattaaattttcatgtgtttaatttggggtaaaatatg

SEQ ID NO: 103751 - DNA, 465 bp, Heterodera glycines
atcccctcccatctgttctcatttttcaatttatttttgacatacaaacatcatttcttataaaataaaaaatttccatctcttcccccctaagagcggccccctcccactgatgggaaaatcaatttgagattaaaataataaaattaaaaaatcgacgcgaaaattcaaatttgaatttagcgccaaaaattgtaacaaaagtacatgggtcactacttaaataaatcgatgaaatggtcaatgaaaataaaaataatttttaagaaaccgaaattttaaatttattttaaaaaataaaccaaattacctccgacaccatacaagaaataaagctgaacagaactcggtaaattagtcatagtaactcaaacttatcttttcgtcagttgcagcgtggaaatgttgagtcaactgaaagaaacttaataaagataaacaattaaacagatttgataaaagatg

SEQ ID NO: 103752 - DNA, 58 bp, Heterodera glycines
  unsure (1)..(58): unsure at all n locations
aaattattattttgcgcaaaattgtccctctaaaatttatttttnagaaaaaataatg

SEQ ID NO: 103753 - DNA, 369 bp, Heterodera glycines
tccgtatgggacgggcctcgtttctcctctgcccaccgagaattttttttttcaatttttcaaatttattgttagaaataaattttcatgaataaaatgttagaaattttttttataagaaaattctaagaaaaaaaaacttcaaaaaaatttgagcgattttttggaattttttttgaaaaatctataattcgtccataaaaataatttttcgaaaattttggaatggaattcacttaacttatttgctttaaggccagttcattgaatgctcgtcggcatccgccccctccgcctttatttctctcaaggccgcaaaatccgttaaatccgttggcgctgctatccaccgccaaatggaccaatatg

SEQ ID NO: 103754 - DNA, 281 bp, Heterodera glycines
caaacctgctcaaattgattgccgaagtgcttcgcagttatccaaaggtggctgttcctattttcatcgagcaatccctcggcgaccaatcggttcttcgctggatcatcgaacgtttcctcctatccgctcccgtcaacgatttgtccgacaccgcccactgggccaaagccgtggtcagcgagctcgtctcaaattcgtcaggtcagcgcatcaccgatcatgtcgtgagcaacatcaaatcacttctcatcgaatgtggcgactttgactgtgcgatg

SEQ ID NO: 103755 - DNA, 516 bp, Heterodera glycines
gcgccaccgggaaaaattggaaattttgaccattttaaaacagattttcactgaaaagtggcaatttataggtcaaattttgaaattttaggggaattttggaggccggcggatatcaatagtgccgctataaatttgaaaaattgggagtttttggtagcaattttacataaaaatggctatttttgctgattttttccaaaaatcagtaaatcatgatctcaaaaaataaatcatcattgagcagttgaatcaatttttccttgttttcgacaaatataattttaaaattatctccaaagtttttgttaccactttttatctccaatttttgggctacaaaaccttccattttaaaaatatggaaaaacaaatgtcaactctttattatttacttaaattgcttattatgaaaattttagcacattgtccgaccatcattcatcagttccagccttaaaattgatcgtcgaatggagttcgtcagttcgtcatgaatttcagcgagttccgatg

SEQ ID NO: 103756 - DNA, 240 bp, Heterodera glycines
atcgtcataaagccaatatgccggagattaagagttcaagcttggaatgaaaagaagacctgatgtatctgattgtagtgtagaaacgattgatcaaatatgataatattaaggatcatgatttcagataaatataactgtaatcatcaaatttcaaccatttagggtattattaccctgttaatacttctaagaatcaactgaatccgatgttctgtaattaatatattcagcgacatg

SEQ ID NO: 103757 - DNA, 399 bp, Heterodera glycines
tcttcacagcaaaataataagacaaagaggcgacaataagcaaagcaaaaggaaaattcgcattttataaaaattaattaattattttaattgctcgtttattgaaaatttctaaaaaaaataacaaagacaaattgctgattaaaaatataattttttgcgtaaaaagaagtgtgtattttcctaattgaggtttttattccattatttgtacagtttgaaacatttattctcagagttttacccaaaattggccattttgaatacgggaaaacgtgaccattgttaattaataaaaataataagtttaatgagtttgtcggcgccattttctttcaatttatagcaaattcaaagtgaccaaaacttgatttgtgtaaaacaagtaattaaaaaatg

SEQ ID NO: 103758 - DNA, 700 bp, Heterodera glycines
aaaaatatccagcgaatttttatcatattttttcgtcggtacaccaatttattatgattgccccctttttgatggcttttttataacgactagagctcggcctggacctggatccaggcctggatttttcctggacctgtattttcctggatttttgtacaggaaatccaggtccaggtccaggcttttttcaaaataccgagctctaataacgacatagcaccgggctgggttacctatgttcggacttgagtaaagtaagtgatttttgctgtattattttttcatgtttattaagcatttaaatgaatttcaatttagaattaattaaaattaatttttagtaaaaataagaatttaaaaaagaataattccatttatcccccggggggataaatagagacgggaggattatttttcaacctcttcagaaaggggggcataattggagacagcgggattaatggagacagggccttaattagagaatatacggtaatttaaaagttttggcttggcatatccccttttggagataacaaaaaatcagcacaaatgcacttaaatgggccaacattttttgtgggaatgatacatatagcacagggatggcattccgaggccccaaaaattttttggaagtcggaattccgtgtcatccctggtcgtaaaataatgccaatttcagtgtgatcccatg

SEQ ID NO: 103759 - DNA, 102 bp, Heterodera glycines
tttattagcccctcttactgttgaattgagtttaatttttttttggaaaatgtgccaaataaattattaaaaaattctattttcccccctggcacataaatg

SEQ ID NO: 103760 - DNA, 69 bp, Heterodera glycines
attttggctaacgagaatttggcggcggactttaactacgccgaagttgttgaagcgacgcaaaagatg

SEQ ID NO: 103761 - DNA, 78 bp, Heterodera glycines
aaaacgctaccgaacaaaatatgagcaaaattgaagccatttcgtgtgctaattgtttaaaagaaaaggccgaaaatg

SEQ ID NO: 103762 - DNA, 147 bp, Heterodera glycines
aaaatccgaaggtgtcggaacaaatgccaccattggctgtagccaatatttattacattagcattgccgaacagtttaattgaagttatcaaaaatcttaacgaaatttcgaaaagtttttggtggcaaaaaggtgaaaaagaaatg

SEQ ID NO: 103763 - DNA, 440 bp, Heterodera glycines
tgaccagcagcagcggtggcggcgccggcgatggaggcacggcagcgccggtggcatcggcaaatccgcacgacccaaagcgggtgagaaaagggcaatggtagggaattgccacaagccaaatttaatgaacacattcactgaagagaaccgataaaagcctttgttgcaataaaaaaaatggcatttgatatttttaaaattaaaattgacaacatttttaatatagtgcagtattttcagttgcttctcaaatgtgcgcacttcttcaaatcgctgtcacgttttaaaccaaactcttctcaggaacaacaccaacaagtgctgcaactgttgagagtgagataatttagccttaacactgaagttattgaatcgagaaataatttgaaatattttaatttgattacttttgtcaggagggcgtcacaagtgaaatg

SEQ ID NO: 103764 - DNA, 86 bp, Heterodera glycines
ttgtggtgttccgctgcttcgagggaatgtcccacgtgggggcgccgttcgcaaaatgcgaggaaagcggcaaatggagcgcaatg

SEQ ID NO: 103765 - DNA, 299 bp, Heterodera glycines
tggttgttgatgatgattttgcaagaatgatttgattgtgtgagaaaatctcggcttaaatagctttcaaaagtgggcgtggcctaattttctgggagtataaaagccccagcaatttgtcagctatgtctcatttgttctgctacaatggtccttgtcatcgaattttgtgcccaaattctcggctgttccccgaaatcactccgcgacaagctcaatcatcctgaggaccgagtgaaggcactgaaggagctggtcggaaaaaggttcggacgacataccaggaccggaatggaatg

SEQ ID NO: 103766 - DNA, 354 bp, Heterodera glycines
cgtaaatgaagccaaatggagtacatgcagggcacgtacagcacctaattgatcccaattaataaaattaattaattaacttatttatttatttatttgaaagaaattgcttgtaccgtgttctggtttacccgttacagtagcccaagtaatgctcaatacggtaactaattttcaacccaattacataataaatggcgcacaatacgcagatggcgattgactcgggcacaaattgccttttctccaacggaatggcgtcgatgtccaacccagtgcaattgtaaagcctttcgtactccgcgtgacggaacagaaacagttccattgggtcgctttgaaaagaaatgaatg

SEQ ID NO: 103767 - DNA, 627 bp, Heterodera glycines
tcatcggacattggaaatttggtcggtgccataatttgcgaaaaaaatgagaattatacaaaattttgaatatttaaatcttggaattaatggttgtcggattttctttttaattacttaattaaatacacatcaaaaaccacttacatgtatttttataattttcaaaaaaaacacaaaattttttttaataaaaaatttttttttcttattcaagacccacgccgttgccttttgtcgtattgtttctgctgcccacccgcgcaagttggttttggtcgcgtccggttgagaacagcgtgcacttctcggtaaatgagcaaataaaaacgaaaatttcattcaaaaacttgtttttgacttatcatgaaaaatgggtccaaaaaaatcaattatttaaatcttggacagaattttgagaataattaatgtcctgttttgccaagtagcgccggtgtataaaattagtttttttttttcaaaatttaattttattattttttttttgttccaatagctttgcatcggcccacccttcccgaacgtgacacttgacaaaaaacggagtatttttcggatgccaaacggatcatcgattacgtgttggtctacgaggagaaggaaatg

SEQ ID NO: 103768 - DNA, 228 bp, Heterodera glycines
tgtgcgcgcccaactcactgctgtccattcgaaatattgaagttcagctttttccacgtcaactcgattttttccttgacgcctaccgcaaggcgaccgcccgcccctatggctatttgctaatcgatatgcacgcatcatctgatccatcgcttcgcctccgcaccaacatatttaaagaggagcaggaggaggacgagggaacagttgtgttcattcccaaaaatg

SEQ ID NO: 103769 - DNA, 1003 bp, Heterodera glycines
cgtcccccgtgaaatttgcccctcgccacttatagatagcattttactttttggtttttgttttttcaaaaaaaggcaaatttaatcccaaggaaaccaaaaatattgaagatttaataagccacattaatatatgtagatatagtttaaaaatcttttggattattttaaaatttgaacaatgccaagaatgtttaatttggttttgcctaggaaaaaaattttgataataggttgggctagtcaattaaaataagattttgaggaatttggaagcttttggcaagaacaattaccaactcatttgtcagacaaaaaatttctcgaaatcgtcaattgggttgttagagatttcataaacccgtcaaaatgaaagtttattagagaaaacaaaagtttcatacatttctaaatttttcattcttgatggtacacaattggcacaccaaaagttttaaatttaaaatattagtccgaattttgcagaaaatcttacttttttcatgataaggcctaccagtatgcaaaattttagttttcaatttttaaaattaaaaattcaaattctattcatcatctattcccttatggactcccttctgttttctcttttaccatttttgcattagcgtcaaaattattgtgcaaaaatataattattttattatatttataagacaccaaaaaacagaggtaacaaaattaattaaataatcaattgaagcaattttttttttgcaaaatttgcaagagtaagcttttttgtttgagtaaattcatctcatacatatgtaaataaacgaatctgaattaaaataattttttttttgttatttaaaacgcaccaatttgaattggtttaaaaattaaatttcataaaatgtttaaaacattccagcaatacactcaaaaacgcttttaagataccattggatttattaaagaaaaccaacaaaagcattcaacaccaaaaaaaccagttacaataacaaagcccaaaatg

SEQ ID NO: 103770 - DNA, 270 bp, Heterodera glycines
aatggcacgccaggcctctcaatgatggcaaaatgacaagcctggctgaagatggcacttccatcccccgcccccccatatttattttgtcgttgaattttgaatttgccaaaggtggtgacggaggaggagcagcaacagaagccccagcggttgcaggagcagtggtttttcgtgggcagcagcgagtgcgacctgaccgacttggagcagacgcgggcgcttttccgccgcgttcggccgacgcacgtggtcaatttggcggcaatg

SEQ ID NO: 103771 - DNA, 77 bp, Heterodera glycines
aacatttgctataggttcaaaatgctgtcgcccaattgttgcgccaacaatttcccaccagcgcgcctggaattatg

SEQ ID NO: 103772 - DNA, 59 bp, Heterodera glycines
tgctttttaaagtttaaaaagtttcccatttttcttttttatatttaacccccaaaatg

SEQ ID NO: 103773 - DNA, 112 bp, Heterodera glycines
tgtaaatataattttaattaaaaataaaaagtttaataaaaattaaaattcgaaataagaaataaagacctgtcgctcgtgccgtcttgacaagtgtttgttggaaggcatg

SEQ ID NO: 103774 - DNA, 458 bp, Heterodera glycines
aatcgcaactctatttttacatcaatcgtttcaaccttgtgttcggcagcagcagcaaagcgacggggggacgacgatatttcaattgcattgaacgcggcgggtcgaccaaatgtccctatcggatgatgtacatgttggaaaggtggaggacaaacacattcaatctttaaaccaggaaaccaagcattttttttcttggtttagacaggtactctaccaaaccggggaacataaccattcgttctcactgttacgaaggcgaaagccgaccaaaatcaacataaagggactgcttccaacacccgaaaaagtgagtcgatgacaagtaaaaacaaaaaggtttattcttcaaaagggaggtgatttcgagttgctgtctcttgccactgatgtcgcacaattggccgaagaattgggcttggaattccgcgaggaaaggtccgtcgtcaccaatg

SEQ ID NO: 103775 - DNA, 282 bp, Heterodera glycines
cgtaggttatttatttttatgcaaaatcgttttaatgtttagggtggttttttactttttccgacttgtggagagtgtgcacgtaagtctaaaccggattttgttagggcagaatgtttcaagaagtgcagacactcagcagaaagacggggtttagttggggttttcacttctattgaactccgaaaagcgttagaactcggctacaaaataacgaaattttatcgagcataccattatgagaattttgacacaaatcttttcaaaaattatgtaagaatg

SEQ ID NO: 103776 - DNA, 102 bp, Heterodera glycines
gatgccggacgtatcattccattgggaagcggcgagagcgtgccaaagaggacattgagagccaacgacaaaggcttgaggaagagcggcgaaattgtgatg

SEQ ID NO: 103777 - DNA, 800 bp, Heterodera glycines
  unsure (1)..(800): unsure at all n locations
atcaaaaataaatacataaaatagggttgcgattntatgaaaaaatcggtaatggagcgggattgtggtgcaaaattcaattttttttcctccgttgaattacgaacaaaattgttgaaatttgtaaagtcgtttcggtttgatatgtacaatatttcaaatttctaaaagaaattttcaaacgtcgagctgaaatttcaccaataatctattcgataaaacaaattttctctaagttttaccattgaattgggcaaaaatttttccgtgtcaaaggatgaaaaatgggaaaaaatacggcgcgaggtatgaagaagtggacaacaaaccattctttttaattacaaaattaccatatttggggaggttgccctcaaaattctcaaactaaaagttttgaaagttaaccgaaacccgaatttttatttataaaaatgaaccaagatattcacaaaattgaaatttgacacaaatctgttacgaaatccgccaaaaattcataatatttcctcgccatcgaccaaaaattcctttagaattttgtgttttgaaagtttaacaataatagaccgcacaaaaaatcaccgataaaatttttggaaaattcggaaattgcgctaatgtaaatgttattattttagattaaaattttcattatgaatgctaatgttgtgcaatatttttgcaagtaaaaataatttttcaacaaaaacgctaaaatcctttaattaagcagtccgctgtgcacttcccactcaattcgttacggaatttgacccgacacatccgcagccagcatg

SEQ ID NO: 103778 - DNA, 565 bp, Heterodera glycines
ctgattttggacataggcgtaatgtctgaacacttgccaatatttggcacacaaaaataaggtgtttgattttaaaaataatttaaaaaaattaggggggggggtataaaaaatagaaatattcatttcaacattttagatatcatagtgataattaaaaaataaattggttctaaagactcaaaatatcatctattacctatcttaaagctatggaatctgaaattgtaagaaattacaaaattttgataagaattcactgaaaaatcataatgaaaatactgagagaattaattattttaaaattactaaaagctcggccttaatcaaaatcccatttctcaatcccgactatttctaaatattggtctaccagtgacagaacaaaataggtgctcgatcgtttcgtaaaagtgccgctagacatttcatcaaaatgccaattttgtgatatctttgcaaaaaagcatactaattaaataatttattttatcgacagaaaataagatttaattttcaaaaaattcgaattgaacccgcatgcaaatactattggttactcatg

SEQ ID NO: 103779 - DNA, 165 bp, Heterodera glycines
aaccatttatttatttgttttgcgagtttacaattagatacatttttaaaaactttttttgtcatttaatttgtttgttatggtcaatcaaagcccatgttcaacttcgacacgattctctaatcatttttattataaatatttttaattgataaataagaaatg

SEQ ID NO: 103780 - DNA, 67 bp, Heterodera glycines
ttaattaattattctctcactttgtcttccactttaatactttcggcttctccccttccctcgcatg

SEQ ID NO: 103781 - DNA, 501 bp, Heterodera glycines
caataataatcaaagttaaagatttaatcagtaaaaaaagtttttaaaaagtcatccataggcttattgttaaaaaaatactcgacctaagacgataatattaaaattatgtagatttaattgctaaaccatttgatccttaaatatcaaatgcacgaaaaaagtcccctaaaaatagctataataaataaactgcagaaaatctgagactaacattaaatatacaacaaaaattgattacaatttgaatatgaaaatatcgtttattattgacaaattaaaatcttaaaaaatggatattaatttgagcttatatatatatatatatatatatatatttctacaaattttagtttgcaatatcaatattgaaataagacaagaagataatcaatccttcagcttaagtaaaaatcttttaataaaaagaaaatataaacaaaaaaattcacttggatttgtaaaataaaaagaaaattatttattcagcaaaactgaatg

SEQ ID NO: 103782 - DNA, 244 bp, Heterodera glycines
tttcctacaatttaaaaggtattatcaaaggaaaattgtgaataaacagaaaacaacgaaagtaatacgatgaaacgaatgacaaaaaaggggaaaaagaaattctgtaggatatttctgtgacaacaaaatacacaacaataattttgtcaggactaaacgaaagttcatcacaacgaaaagccaaatttgaaaaagcgttgccttattaatatgccctcaaattttctttgtccgacaaatg

SEQ ID NO: 103783 - DNA, 88 bp, Heterodera glycines
ctatcatcagagtcataataataacaataataattataattatcatctgctaattgggaatcgatcatccaccgccaccatcaaaatg

SEQ ID NO: 103784 - DNA, 521 bp, Heterodera glycines
cccttatttaaggccttagtttggactttttcgcgcttaaaaatccgttccctagtcatcattttgcaaaatattctcctctgttgcggttccctttttcttccaatccgtcgtcattttatgccaaaatgtttccgcgccttccgtttttgtcaatgggttttcgcctcccattggcaacaatttaagacgaacaaaattcaaaaattttttggataaaatgtggttttctgtttctttcatccaaagtacaatccgtaaaaaataggaaaccctaaaaatccaggctttatccaacgcaattaattcttctgctatttgtgtgacatcattcggaactcggccaaaattgtgctaattgccacaaaaatgaacagacggtaaaaggattttaaaagccaaacaaattagtcatttatttaactaacaataaactgttttcccacttcagttggatttgcaacgacgtttggatggacattttcccctcttttgaccgtcctcaactcggcctcaaaatg

SEQ ID NO: 103785 - DNA, 93 bp, Heterodera glycines
tttttgcagcactgctcactccaattttgatcgatttggcacgctcagctataaattcgggcttcaaatctgaaaattaatcattttatcatg

SEQ ID NO: 103786 - DNA, 132 bp, Heterodera glycines
attaataatcaaaattctcttaaaattttttgacccaaattcaaaaaaggaaaaaaatttgcagtcaaaaaattattcgaatttctccaattttgtttccataatttccgaaagttattcggtatcataatg

SEQ ID NO: 103787 - DNA, 1003 bp, Heterodera glycines
tgcacaaatccgaccaatttcagtcctgaacagctactcacgcgaaaacggccccgaccgattcttagggggtctaaaaattttagctctatttgtaataaattgtttgaaatttgccggaaattccctgagaaatttaatgatttttttaaaatcgttaatgggatttggggaacaagctgtgctcctgcaaaacccacgccacaacataaattttttgcctatgtaatcgaatgaatgcatttttctttcgaaaattgtgtagttttcaggattttgacggggatttacgacatccattagcaatattagcaccggcaaaatcaaaaagtgccgatttgctgctgttcctccctcttttctgcttcattctctcctcctttttgcgccgaatttttccttttcctctctttctcttccgtctctcctccttccccactgctattttcatccttttcctcctcttccctcgtttctccatttttgctaccaacaaatgttggatttggttgacaaagaaaatttctaaccttttacttaaaagcaatcaaatttttaattccttatatcattcgatagttctagatgttttctattagcctacagaatttcaaaaagtttcgttaagtttcaagaaagttatgagctaaaatgttgtaaaaaacttgggtttttgagcttctcaagttataacttttttgaaacttaacgaaactttttgaaattttataggctaataaaaaacggtttggcctttttatgtcaaaatgtttccgcgccttccgtttttgtcaatgatttttcgcctcccattggccattggcaacaatttaagacgaacaaaattcaaaaattgttggataaaatgtgattttcgttagaatttttggttttccgcttttctcattatataaaaataaagtttccaacgcaattaattcttctgctatttgtgtgacatcattcggaactcgtccaaattgtgctaattgccacaaaaatg

SEQ ID NO: 103788 - DNA, 142 bp, Heterodera glycines
tgtacggatgtccccgcctcggctgacaaaatcacattgggttaacaaataactattttggatttcatttataatttgtttttagctgcttttaaatcggtgctgaatcgaacaaatttcaaattttattgcaaagcgaatg

SEQ ID NO: 103789 - DNA, 425 bp, Heterodera glycines
tctgagaacaaattcaatggatgtagtacgtgcaaatgctatcacagcaaacagaagaactgtttttaagtgcaacatcctatgctctttgccatattagcatttagttcatgccaattattttgtagaattgtaaaaataggctgttgttggggccttcagcaagcctaataaaaaatttaaataattacgaattaatttgttttggcttttaaaaaaatattttggcttgtattttttaatttgttgatgtgtgcttctttagttttgtgtgtctgcggtagggccgaaacacactttttttcttattttttgttttcttttggaagagcaccgcactgacgaggcccactcttccattagaaatttttataacaaaaaaaatttttttcatttaattttttctcaggaattgtccgcaaatg

SEQ ID NO: 103790 - DNA, 70 bp, Heterodera glycines
agtcagtggacatgatccgtgctttgagcacatattcaaacgtgtcggctacgtgccatggaagctgatg

SEQ ID NO: 103791 - DNA, 233 bp, Heterodera glycines
aaggcgccgaaaaaattaaggaatttttcaagcgttttgacgctaataccgctgaatggtccaatgcaaaacgcattacctcattagaatcaaaactctttggtcgggctgagagagcttttaagtctgcgtgttccaccgaaccgtaccgatatgagtccataaaaagagaaatgttttggcagttggaagaaacggatgcccgtgaatggagtgcttttgatcagataatg

SEQ ID NO: 103792 - DNA, 165 bp, Heterodera glycines
ttccttgtttatactatggattcgcacggaattccgagttgctacatttttgtgaccggaattccgactttcagaaaatttttaggactcggaattctgatttcccttttcagaaaaatttttgtgccactgagtgcttgcaatccctggtttgtaccaaaaatg

SEQ ID NO: 103793 - DNA, 484 bp, Heterodera glycines
ttgtgcacgacaaaagacaaagaaaataattgtgtggtgaatgatatgaaaacaaaaattttgccctttatatacacctcatattttcaattcactcaacagttcgaccgaccgcctttttgttagtttgagcactgctatttaagcggcaaaattttggaaagtttcctactaatttttaaataatcaaaaatcaaagtttgaaaatcaaggattttatgcataaaatttttgtcacttttgtggcactttttcgacactattttagttaactatttcgggatttttcgtcactaaaagtcgcggccctagtaataattggcattttgtttttatgccaaaaatttattggcgattttttctcgttttttactgtccatgatccgttggatccaggtgcagaccgagctgtagtgattttgaacctgacggacggctctttgttaaatctgttttatttagaattatataatccgtgcacatg

SEQ ID NO: 103794 - DNA, 337 bp, Heterodera glycines
aaaataaaaataataaaaagcagctaattatgacatatttaataaaaatcattttataaaatatatacattagatttaaagagccgttaattattgacatttttttatttatactatttcttctttgcttttatccaagtaaattctaaatttttatgatcaatatattaaaaatttacatccaatacaaaagtaactggcacaaaaaaatcatccacaacccaaaaagaatttagaaggcttatataatgggatttgttaaatgatgaattatacctaacaaaaaaaaagtaatttacaaattatttttagcatttttaaatatttcgatataatg

SEQ ID NO: 103795 - DNA, 541 bp, Heterodera glycines
aagctcacagttgacccactcgcgcacccattcagatttggatttaattttaggcaatcaatttttttccgaagggatattcaaatcggaaaatatttgacgaaaaatggcaaaatatgcaaaaaatctgaaaatatgcacaaaaaatggcaaaatatgcaaaaaattctaaaaatatgcacaaaaaatggcaaaataagcaaaaaatctgaaaatatgcacaaaaaatggcaaaatatgcagaaaaacccaaatatgcaaataaaagtccagacttttatacgcaaacacaaaaaagaaagtgtttttcctactatttagagcatggaaaagccaggaaaaaaatatgcatttgcatatttttggcagccctgctcattggaaagaaaatacttaaagaattaaaaattttggaaaaaatcaagtacttgatgaaagtcatatataaaatttttggttactttacggtaaagtattaccccgcgcctgttcttaatttaattgtaatatgtacacaaataatggcttattgtgcacaatg

SEQ ID NO: 103796 - DNA, 626 bp, Heterodera glycines
tttgtcgattaagagcaattagtaattcgggaacggtgttcttcgccgagaacctaccaaaatatgttaatgatgcggagaaaaatttttctattttttttataattcgcaaaatttatttaaacttcaaatatttaaattttaaacccacttttgatttttaaattttcccagcaaaaaatgaattttttgaaatagtttacccttaattgactgtcggtcgagagcagagagattatctaataacaaccaaaaattcagaattatttactccgagaggataaaacaactaaaattaaaaatcatgccccatccaatataggacggacagctcgctctctccgatagacattaaaagaatttttttatttattaaatttcttacccaaaaattaataaatttattacaaaaattttgaattttttttcaaaaattttattttccataatccaagaaaaggctctcaaaaaattaattttctttgtaattatgtattctatttttgttttataaaaatatattcgaaaattcatttcaaacaaatttaaaaaataaaatatttcatttgccagaaaattcctggcaagtcttttaataattaaaactcttcgaaattcatgacatg

SEQ ID NO: 103797 - DNA, 184 bp, Heterodera glycines
aaatcacacaaaaacaatcattgtaccatcaaactcaattttctgatcaagcttaggctaacataattctttaacacataagagtggagctacagtatcgacccttttctcaacgttatagggtcgttacggtaacagcggtgctctgctgtccctccggccacagccgttggcccacggaatg

SEQ ID NO: 103798 - DNA, 147 bp, Heterodera glycines
cgcgtttaatcgatcaaattcagttttgagggggtcttatttgtggctaatttgctttgcaatttgtgcccaaccacaaaaaacacctgttgctgctgttgttgttgctgcgcaactgatgccgtcccgggcgataaatatgccatg

SEQ ID NO: 103799 - DNA, 716 bp, Heterodera glycines
gggccaattggggcccggtttcacatttgaaaaaaggcagaccaaaggccgggaaaatgaaacaattcgccaattaaattcagccgggagcgttggacgaagcttggggtttttttccattcaatgggaagagcattgttgaaattggggcgttttctttttccaaaattgaataaagaatgatttcgatttcttgctgggaataattttggtgcgcaagtgggcgtggccaaagtgcactcattgtacacacggtcattttaccgattcattttaaaaattttcacttttcttgcacatgtgctgttttcctctcctcttcctcacttgtcttgtgctttatggggaccatattatttaattgggaattttggggaccgtctaataaaattaatatttttgctgttaaccagggcggtagctataattacaaaaagcaccgtttatcctggcagcaatttgccttttagggcttgaggtcgttcgcgtgacttgactaatttcccgagtcgtttaggtgccctgtcgtcttgtgcttcatgggtggcggtgtgctgctcttcaggccatagttggtttatattttttgactattttccatgcccaaatatttattattcattcaccattttacgtcattttccatgccggcgctcgcatataaataccgagattttactcattcctcctcactccattctcagattaaaaaaatg

SEQ ID NO: 103800 - DNA, 315 bp, Heterodera glycines
gaaatcacgccgctagaaattttttttaatttcaaaaaattaagtaatttatcatagaatgccaaaaaaaaattgctgaaaatttttctaaattttttttcttctaattgtagtttattactatcttaaggaggggggcggctgtaattgatgcgctgaaggcgcgaggagttcacacttggaccgtaatttttaaatattttgctagacacttttttgctatgctccccaaacaattgccacaaaaaatcacaaaaaaggaaacttttttgaaaacttttgtactcaattttcagaaaaacattttgaaaaatg

SEQ ID NO: 103801 - DNA, 87 bp, Heterodera glycines
actttttcgttcggagaccgctcatgctatggacatttccttgtttccaaagacggatccaagaatttgctcggattggacatgatg

SEQ ID NO: 103802 - DNA, 118 bp, Heterodera glycines
atagatttttgaagggtttttcttcaaataaagttgacgtggtcaagcggaatggataaaagtcatcccataaaaagtcactgttttattttctctgaagcattccaccgaaacgatg

SEQ ID NO: 103803 - DNA, 460 bp, Heterodera glycines
  unsure (1)..(460): unsure at all n locations
cagaatttgcatattttaatttatactttttacnatgtcggtaaatcttnatgtttttggaaagccgatagagcttgttaagagcttncgaatgataccaactttattggatttggtcaacaaaaaaaaaagttataattgcgatattagagacgaaaaatttcgaaaatatgtagttaatcttgaaaatcggcaaattttaaattttcttgcatgagggtcgatttcgagtacataggtaggtgccaataagtactaatccaagacccgggactggtcccggtcccggtcaaaaccgggacctcggtactcagtttaatgaaaatacatcaaatcggattattgttcgggcatttttctccccccatccgttcatccgttttcaaatctctcacttttattttagtaggtatataaaaaggtcgaaaagacatttttgatgcagaatagcgaaaaaatg

SEQ ID NO: 103804 - DNA, 109 bp, Heterodera glycines
ttttttttttaaaaaaaggggaagaaaaaatatttttaaaaatttttaaattccctttttaaacaggcccaaaaagttttgggtttaacttttttttttcagaaaaatg

SEQ ID NO: 103805 - DNA, 104 bp, Heterodera glycines
tttcgccgctctgaacggcatcatttacgtggccgagttgattttgtcccaccaattggccgacattgtccgtccttgatcaattaatattgtaatataaaatg

SEQ ID NO: 103806 - DNA, 95 bp, Heterodera glycines
tgatttgctcacagatttcccaagcaaattttgactacgaatctgcgtcagtgaatgcattttgcgatgtttttccaactgtcaaaccaaaaatg

SEQ ID NO: 103807 - DNA, 712 bp, Heterodera glycines
  unsure (1)..(712): unsure at all n locations
agtgtccataaatttctataaaattggctgaagaaactcctcgaggngtgataatttaaaaaattatcacgtcatttacctttaaattttttatcaatttcaaaacatatgagaaaaatttttgaaccctttgttaccaagaaaaaccattttatagaacagtcgaaatcattaatttatatgattttttttattatcactaaaagtctcaaaaacaacaaattaaactaaggatttatggacattgataaaaacggcacacgaaaaactcattcttcattgtcaggctaattgtagactaaaagcaaaaagtaaaagtttgaattctaaattttttgttcaaattcaaagcccgtaaagaatcgcaaaaatttggcagtttttaatgaaaatatgttaacaaattgcactgaattttcaaaaaaaatttctggcgacacctagcggcaccaccggacgccgcaaaaaaaaaaggtcgtcaatttcatggctggaccatttcgcaaaaattttggttgacccccccccctttttttcatgtatgttggtggaattgtcatgtaactttgtgtttcccctttaatagttgttgcttggtgagctcaaaacagaattggatgcgttcaacagcagaaccaccggcagaacggagaatggcactgttaagccatcgctgatttgcgggaaggaggaggaagagacggagcaaatg

SEQ ID NO: 103808 - DNA, 674 bp, Heterodera glycines
gataatcatcgatggcacgactttcctattttgttaaacactgcggagttcgcttttcgcctctggcgccaaattcgctcaatggcattcgaattcagcagaacgacaattggcatttgctctgatcagtcaaatgttcccaacgagtgatcactcgtcgcttcgcctttttcgataattaatcacttcaaattcacttcatcattttatcaaattctctcattttttgtccattggtcaattaaaatcaaattttataaaagaaaagttcgttttttaatgtctttttttctttttggaaagtcactttttcaggtcgccctttcctcctaagtgtgcgccttttgccttttatttgctcacttttaagtgaattctaagcccaaaaaagaagtgtttaaattgtcattttaatttgtgaatttccatttttgaattattttcttttaatttttatttttttttctcatttttaagttttcggcattctgctggaattccgaaaatgttatgagtatcccccctccctcttccccattcccttttatttgtttatattttcgtccgttttttctccgttcatttccccccccccatttttaattcgtttattttgctaattattttatttttattcgctaatattctaaattgtgcctatttttcgtcaaatg

SEQ ID NO: 103809 - DNA, 1003 bp, Heterodera glycines
caaaaagcagaaattttttgggatacattttcaaacaaaaataaattctcaaaaatcctctaaatatgtaaaaaaaatgaaaatatgtacgaaaaatgcgaaatatgtataaaaatatatacatatgtaatatgtataaaaaccccgaaatatgtaaaatacgtaaataaaagtcccaacgtttgttcacaaacacacaaaaaaaattctttttcctactattcagagcatggagaagccaggaaaaagaaaaacatgtatttacataaaaaaggaagcccgatcagacaaattttagggcattttaatatttctaaaaaattgatcaatgcgcgtaaaaattggacaaagttccttaggggcatggtgatgtaatgacttttgcttgagagcacattcttcccttctgcagctgattgtgagaccgttccatcacattaatttaattactttcgttgattgatcactctgtcattcgttgtcccccggcgggcgatggcgagaagcccacacggaaaatacggcgctgaaaaattgggtgctaatcattcattcattcattgatcatgttatgctaattatcataattttgttgcaaaattttattgtaatttttgcgtattttaatcaatgccttttgtggtgatcaaaagctgatcaaattcttgcactgattctaatatttcgcgatgaggaactatgctaatcataatacctttttgctgataaaattatcgtaaaatggtcaaaaaaactgatcaaataatttcaattatcgtataattcacaaatgatcaatagtaaactcaatagtacacatttttgtgaaagccgaacaattcaggattaaaaaataacatcactttcttttgatttccattttcaattaaggaattgcgggcattttgcatttttatttaccgatttcctgttttcaaaataatctgactgatcagtttgcaatttttagcatttttcgggcatagagaaggccgccaaaatg

SEQ ID NO: 103810 - DNA, 293 bp, Heterodera glycines
aaaaaaagttttgacctgagaaggtttaaaaacccaatttttttttaccatttttagtcatagcttttttgaatcttatgggaaatttttgaaaattttgtagggtaatagaaaacccttaggcctatcgaatgatatcaagaattaaaaatttagatgcttttgagcaaaattatatcaaaaaatattttcatttgatggttttttgactaacgtcatagcaccgtttaatttcatttttaatttacatttttcatcataatttttttttcttcagcaatatattgtaaatg

SEQ ID NO: 103811 - DNA, 1003 bp, Heterodera glycines
aatgcaataaataatggacgttttctttttattgtgatcactgtaaattttgaaattgtttcactttctcctacgacaaattttgcaattaaaactttcagcaataatttaaagcaaaaaataaaaaacaaattttgggatagaaaaagaaatattaaaattgatataaattattatgagaaaaaaggcccataaaacacagctcgttcatgcctcctcggttgtcaagcggcgaagacaatgtatgatcaactgttttgaataataaatatcttcgaataaaatatctatcggttttttgaattgtccttggttggagatagacaatccgaacattaaaattgttgtagaattttaattataatgactcattagtgttaattaaatttggcataatgtcttgtttcgcgttttttctcacttaaaattgtattctttgttttttttcttctatctttcataccaattttattatctggtaatttttattgttttgtgccgtccaatttcttttgactttaaaattgatattcgtcaaattgtttctcatcgatatttgtcttttggaattaaagtgtttggatttgacagtggcctactctgtgtttggtataattgcgtccctgtcttaagtcagtagcaaaagtacaatttggcgctcccgaggaaacaggtacaaaagcggcgatttttaaagagtttgagggtgagatcgggaataaaaaattttttcggacgggttttaatttggagtgtattaagtatcagtccggaccggacgatatttaagttgtgaagtggaaattgactattccggatcggaaagttaaaaaaagcgacaaaaaactccagcgcaccgaaaaatttattgtttatcagaaaatttgagttcgggccgaacctttttttctgtctacatcgccgtataaactattgacaccgggtcggtgcttagtttttctccgtcttctcgccgaatttttacatttgacttcgctggatg

SEQ ID NO: 103812 - DNA, 1003 bp, Heterodera glycines
tatttttattcttattttttgtttttaaatatacgctctctcccgacattcgtgcgacgcgaaattgagtgatatgagcatgcttatcaaaataaagaaaatttttaacttttggtataataaaattttaatttaaaaatgaatttacgaaaaatcattttagaacatatttatttatttgttctttaataataatctatagtatccaatatgattgatgtccaattttactttaatattggatttatttaatatgaattgattatttatattttacatttttgtaattcaaattgagctcgttcttttcccatttaagacaattgctattcaaatttaagtcccctaaaattagattggtcaattattttcatacttttgataatatataaagtgcgattgggaggtctataggtttaatgtgagaatcctttagatatttctgaatatttgataattttctggtaatataaatttaacattgaaaaattattatttaaacgtgatcggtcaaagtttggttttaggtattggtaaaattacatgttttcaaatattaatgaaaatattaaacattgagtagcatcttttaatattttatttatttaatttttgatttcaaataatttaggcaaacatgatattaaatttatacaaacttccacagattagattttatattgctccacgacagcagattaattaatcgttttatttatagctatgtgcttgccaatattattttaaatgtccacaaatctctccctcgtgatgaaatatcactctctctagataaatatctctctctctatcgctgcgatttgttttccttttggtatttttaattttttaggcttattttatgcattggttttaagtagattttatcaactaattaataaaactgaggaggaaacaatttcaatgaatcaatttcgaaaaataattgcgaattagatttgatgaagtaacaaaattaatgctggacgcaaaaattaatatg

SEQ ID NO: 103813 - DNA, 591 bp, Heterodera glycines
tttcgctctgtccgttccagctgtcactttccctctatcctttctcacattatcgtttctctatccttttgcgcactgtatcttttcccagtgcccttcctgttgtctatttcctctctaaccctttccgctctcccattttgtcctatctcttttacagtcatttattatacttttactctcctcatcatcgaatattattaatgttcgcaaaacaattaaaaaattgttattaaacaaataaaaaataaaaataaaattcaaaataaaattcaaaataaaaataaaattaattaaagagattaaaatcataataaaattaattaaagtaaattaaattaaaaataaattaatattaaagttaaattaaataaaaataaattataaaattaaataaattataactaaattcaatttgttcgactataaataggaaaaattttctcccattattcatttaaaatgttttttccaacaatcaaaaattgcgttgctgttgtagacaccaaaacaactctcgatattgaaaaaatttatttaatatcaccctccactaaatataatccacgtaaaattcatgctgtaattatg

SEQ ID NO: 103814 - DNA, 55 bp, Heterodera glycines
ctgcctccctccccaaaatattttaaaaaatcacagatattttgtccagtctatg

SEQ ID NO: 103815 - DNA, 250 bp, Heterodera glycines
tggcgcagagcggtttcaccactctctccgctccaaccaaacgaacgtttccgcgctgaccaattcgacgatggacagtttggcccagtccaaaaacttctctctgtatacttacaacggggacaagtgcattgtttgcacgtttgggtcaacgacagccgccgcgccattgtctgtcgcagaaatggccgagtgccgagcggtgaattggcggaggggggggggataccgaatccccaacttttgcatg

SEQ ID NO: 103816 - DNA, 487 bp, Heterodera glycines
  unsure (1)..(487): unsure at all n locations
acacaccttaccattttaaaatacacntcgagccaaaactacattgacctgtcaaagtgttaccttttgaccgaatttcgaatgcgaaaattgacaccaccaaatggtgaatggggacatttggatgctaatgatcaggttgtaccgatacaactgattggacacacgttcatacgagacatgaaaattgcaataaacggtcgtgaaattttcaattcaaattcactgatggcatacaaaacttatctttctcatgaactttcgcaatcacttgaagctaagtttcgcatttaactgctgccggatacgaccgtgaggatgttagcaatctacaaaacacaaattccgaagggttcaaaagtagaagacaacgctatttgggaggtcgaacagcacaatacattgcaaaaattgatgccgatcttttcaatgtacctcaagtcttatggacggcttggctcttgacttggcgaaaaaattggaaatg

SEQ ID NO: 103817 - DNA, 182 bp, Heterodera glycines
atcactggaactcggactgcagtttccaaagggaagtgatttgcaataaatgcgggagaaaagggcatattgcgaaaatttgccgtaatcagaacaacactccccaacattcaggctttaaatattcccgcacaggctcaaataagcaaaatgccaacatcgtcgactgcctgcacatcatg

SEQ ID NO: 103818 - DNA, 1003 bp, Heterodera glycines
gcaccggcaccccaggaagaagcacaaacggccgagcctttgactgtcagttcggataaacctgctcagatcccatccaacgacactcctgagttgccccagccgattaaggtcatgatcggaaacaggggaaaagggggtgggccggtcaaaaccatttacattcgcaatgacgacatttggcgttcttcggcccccgggtcccatccccctattttccaacagccgcgccgtctgacgaaacgctccttttactcacgcacattccacgtacctcacacaccacacaaacgaaaacgctatggagtcagcccgatcaagcactatcagaatggtcctcgggtggtacgcaaattcaaccccgaacgtgtgactttcgtggaaaaagaaggaatgaagcggtccaccgcagtgccgattccgttaaatcagatcaagtttccaaatggccctccctgttccccaattttccccaaatcacctttcgcacatgtgccattttttatggcggcgggagtgtcgcgttttacgaaataattaagccttctttccacccctccccccccctacactttacaacgcctcctcgcccggtcaatgatgcctttgcttatccaccctctcccccttcccccacataaagcctttaaaagggattgttccctgctcctttttacttattccctttctgttccctattcgtgcaatttccgctttttccattgcgtcccatcgcttttcaccgttgcatttcttagccaatttaaagagtgatcgagaaatagtgatttgttgaattttcgtgtgaacaatttttgagtcctattcaagagtctggaaaggttaaaatcgcattgggcaaatccccgccaatcgcgacacaacggccgggaaaatacccctaattcccactattttccccttcctttttttgtctattttccgtaaatttgttttcccctaatttgtcttttttttattttgtttttcacgttttccaatg

SEQ ID NO: 103819 - DNA, 1003 bp, Heterodera glycines
aaatgaaataaaattgcgcccaaggcaaaaataagcaaattttctttaaaaatttttgtctttgttttaaagaatttttttataaaactgttttaatcttttatttgggggccctcttttgaccaaattttcttcaaaaaattacattaaccatacttatttctttgaagtatttgagataagctaatcacgaatttaaaaccgagaatgattgtgacagcttcggtgtgtgttggcttaagcctgttttttgcaccataggagggcttttttttaaattttaaaaaattgttaaactccgctctgattcatgccccaagctgcgcataaaaatttatctttacttgaaactttaatatggaagcctgtcaatcttattattaatcatttctgacagcagttttagataaattttaagcgcagcttgggtcgtttatttaaggatgaaatcacagcctaatttaagaataattttagtttttttttaataattaaagtgcaaaactttccgatgcccaatctttccactgtgaatccttaaatgtcgcccattgtcttgcaccaatttttttgtaaatatttttggtcccactgatttaaatttatataatttagagcacatttaattctctataacgaacctaattattaacttttaatggagcatggatatttcggcacgttgttcttaataccaatataatgcctgtttttagttaaactcatgaaatcaaattacattaaaggatttttttcttaatttaaatttgtttaaaacgattttctatatcttgcttttacatttttaatttacaaaatttttgcatacatggattataattttatataaattaataaagccttcattttttgctgacgtaagttgcttttgccacttttgcaaatgtcacatgatgttccatgcaaaattggcagttctttctttttacaaatatcattttgaaaataaaattattatttttattatttttctttaaaaatg

SEQ ID NO: 103820 - DNA, 231 bp, Heterodera glycines
agttatataaatggattcgtttaaaagcattctaatccttaattccttcagtggttggaggagacaattttttctcgcgtcgaaaatcggaaccaccaagtgtactcaacgtgcaaccaggagccgaacttcttggtggaaaattggctgctaatccccgccatcgaacgaggcgaagcgttacgactgtatttggacttcaacttcaccatcgtcagatgtgcggcaatg

SEQ ID NO: 103821 - DNA, 92 bp, Heterodera glycines
  unsure (1)..(92): unsure at all n locations
taattttttaatataattttttttttattaattttaccattaataataaataaatggctggngttgaattggaatcttcttttgccacaatg

SEQ ID NO: 103822 - DNA, 231 bp, Heterodera glycines
  unsure (1)..(231): unsure at all n locations
ggacaagtaatttaggcgaagaattcagcgatctctactgggggtcnngngatattgngnngatgggggggtcacctatccttgcggcctctacaagcgcaggctaangnccccgncgacggcgccnacaacaaaggnggcancgccttttcaaggcttgagccgactcctgagcttcaagagctgatcatctatttcattaacacgtggatcgggcctcgccgaatcatg

SEQ ID NO: 103823 - DNA, 471 bp, Heterodera glycines
ggaggaggacaaagttgggaagggaaagcaaaacgaaaagtgaaattataccccggcgggggaggagaagcaaattgggattgaaaatggagaaagtgccgaaaggcattggcaacacattatgtaattaccaagaaaggaaatgcaattggcaaatttgaatggcatttaatagggcgcaaatgacaggtaaaattcacaaaacaattttaattaccaattatttcaaatgaaaaatcgcaacattttccaaaacgatgcgattttcgtttttgatctgctgatgaaaattgcgcatataaaatacccttgtcgattgctgataatcgcgcaaaaaagtcttgcgaaaagcgagacgatattcggtgctaaaaagagatgatgaaaccaagaatgcctaattagcattggcattggcacctgcaggcacaaagcaccggcgcactgcttgtgtaagcgaacacaaaaatg

SEQ ID NO: 103824 - DNA, 1003 bp, Heterodera glycines
ggaaaaatttgaaattttgacattttttattcactgaaaatttgccattttaaaaatgccttatgcgtttttaattaattctatactaaaataattaagaaataaaaaagcacataaattattaatgaataaaaaaataatataaagttttttgactatatggtataaggcaaaaattgaaaaaccccgaaccccgaccccgaaccccgaacgcgacccccgacgcttccaaccccgacaaccccgaaccccgaattttccaaccccgacgtcgggggcccaaccctattataaatccaccggaaaggaaaaaattagtctagtgtagggttgcacgggaccgggaattttgacaaaaaccgggaaagggacttatcgggaccagaaaagtcgggaccgggaccaaccggaattttcaaaaagaaaattttttttgaaaaaaaattgaaaaattctaaaaattttaatctcaaattcataaaagttcgaagtcttttattatatgcaaaatacaacgattaacattttattatttaatatttataggcatactcagaaacacaacatcaaatgttatgggtgggtgccgggctgaacctaaacctattaaagggtttctaaacctattgattaataaaaataaataaaaattattaataaattaaataaaaataaatcaaaagcttgtttgaagaaagcatttacaaatatttatgaagaaagtcaattagagaaaattcaacaaaatgcagcaaaattcattgatttggcctttcttattattcaaatagcttctctaatatttcatattcattgacatatattattatttttctcccactttttaatattttttaaagttttacatccataattcgcataaaaagcaaataattttgaaaagcgtaaaattgaactttcctagcaaattcaattgaatctttttttgccaattaaaatttatttttcatcagagatatcactttgtaatttcaacaaaatg

SEQ ID NO: 103825 - DNA, 443 bp, Heterodera glycines
ggtattttcctgcaaaatttcaaattctgacactacgaaatgaacaggataatcaacgtttttaattcgtgaaagttatattatataaatccgagctctactaattatgcgctattgccaattaaattaataattcacaaaaattgcggtctgccgaaagctgcaaatttcataatttagttgtacggtgccaaaaagttttccttttttacatttatgttttccaatattttcctattcatttaatttacatatttttgctcaatttcctttcattgctctccgtaatttgctcttcccaaaaacaattttctcatcactggtgattcattttcattcattcatcggccaaaatgtccttttccaaatttggtagccctcttccccccaattattcaatcactttttgactttcatttagaattcagtatttttgttgaatg

SEQ ID NO: 103826 - DNA, 236 bp, Heterodera glycines
  unsure (1)..(236): unsure at all n locations
agaatttttttataaaaaatttcttaggtttgcacctttttttaaaaaaatttttacggggggggggaatgaagtgcacccggctggggttcncctcaaaaattttttggttacgagcctggccttggcttatcagtcggtcattcattcgtctttgatcagttgcgattcggctttggccctgctgtgtgtgtctctttgttttcaacgcattattttcccattttaagcgcatg

SEQ ID NO: 103827 - DNA, 122 bp, Heterodera glycines
cgtaattccatgatactgtatttattctactataacccctgaggggttgaaaatataattttaatttttttgtaaattttgacttctcaatttcccaacttttagccaaaaatgtgctgatg

SEQ ID NO: 103828 - DNA, 673 bp, Heterodera glycines
agaagcagctaatggaattggggcaccaggaggagtggcgactgaagcaggaatttctgttggggcgacagacggcggcgatggaaaacattgtcatccaactgagacagataaaggagaagctcaaatgattaactgaccttcgggctccgaattggcatttcgccgtgccacaaatccacgaaattcgcttaaatgtcaaattgccactaataatttatcacaacaaatttgccttatgccagtcacttcattagcatcagatgcattcagcttgtttaattgaatgactcactgacaattagtaaggcgtttgtccctccctcgtgccatcttttccctcgagtgcttttgctaatcatcccgacttttcgcttgctcctctgctggtgattgttgtgctgataatatggcgatgctgctcccttccgcatcattaatcacttctgatttgacatcctttcatttgctaattactccccccccccattcgttacgcctcaattccttctttggcgtgtccccccttagaccctttcattaagatcattatcccaggctaattgacgacgcattgattatatctgaagaagcgtcccccacccctctataaaagaaagcgagtaaagtatgaaaattgatatttgaaaacattcccgaagtgtgaaaaatg

SEQ ID NO: 103829 - DNA, 763 bp, Heterodera glycines
tacgttaggtgcctatttgaaaattttggtgcctaaaaattcaggccctaatcatcactattagtgtcaattttctagcacgtccaccatactacaaataactgttatgtgtataacaatgaacggattttttttgagcaaagaatcattcaatcattgtgcatactaatcgatttaattatgattgatccgtttcttgcacaccgtctatgttttagggggtccatatcgttttggcgccgacgttttggcgccaagctataataaaaaaagaaaaacacccaaatttaaaaattttgtaaaacaacaaaaaaaacgtatttttcgcgaaggtaatactgccgatggttggttgccccccttttttgaagaaaatttttttgttttcaaaagtcatgaaaacatgcttccaatggttttcagggtcgctgctcacgaatcagtcatccatttcgaccaattcggaacccggagccgaaattcgaacaaaaaatcgaaaataaaaaatttcaaaattctctttttgtttctaaaatagattaaaacaaccaaaacgttttggcgccgatgttttgacgccatgtagggggggggggggtagaaatgatgaaatcgttataatttttctgacgaagtctattaaagagccggatttaattcttcatttactctttttcgctttggcttatgttctcttaattttgtatttaggtaatgaatcgtcaaattgatacgaagaaacaaaagcctaaaataacgcatg

SEQ ID NO: 103830 - DNA, 52 bp, Heterodera glycines
gaaggtaaaagcgtgagcttaatttaaagaaaataattaaaattaaaaaatg

SEQ ID NO: 103831 - DNA, 139 bp, Heterodera glycines
  unsure (1)..(139): unsure at all n locations
ttcgggaatgaaattacatanttaattagctaagggtcgaagaataaatgcatttaaaattaaattttcacttttttcgatttttaaaaaatttcatctctaacatttaaaaatttttcagcatcttagataaaatatg

SEQ ID NO: 103832 - DNA, 188 bp, Heterodera glycines
tctccaatatagaggacgcgagacgactgacaaagtggcgttttgggggaccaaatgaaattttgtaaggggcccagccatgtaaatagttgggggggggtattgaggaaggcataaataaatggtatttggacatttacccatcgattaattaaattaattattttttatatcatcaggagccaatg

SEQ ID NO: 103833 - DNA, 248 bp, Heterodera glycines
tttggaccaatcagcagccgcggaagaagtgggacctcccccctttatcatatgaaaaaataacaatgcggaatatggattcggttctttcaattttgccataaaattttaaaaaaatcctctaaatttttattaaattaattttctttacaattgattttttgaattactttcgtttaatttttataattttttggggcagaaaaatgtgcggaaaaaaagggatgggggagaacatagtaaaaatg

SEQ ID NO: 103834 - DNA, 251 bp, Heterodera glycines
cgtgtcgttgtcgatggagtcggtgagcagcagcaatcagatgtaatagtgcagagaatagaattaagaatgtgacgagaatgaaatttctctcaatttcacgcctttttatattcaaatttcccactgaaaaaaagtgcaacagaaaatgaatataaaagggggaattttcgtccatttgcacacttgctgctgacacaacacccaatcaacgaacgaacgacttcagtgcgcccaacaacaacacaatg

SEQ ID NO: 103835 - DNA, 110 bp, Heterodera glycines; identical to SEQ ID NO: 98226

SEQ ID NO: 103836 - DNA, 120 bp, Heterodera glycines
gtttagggggagtggttcagggtggcaaaacccgattcgtgtggcatcagttaaatatttgatcgtttattttttataggagcttaaagacgcatattcaacttcaatttagttcctatg

SEQ ID NO: 103837 - DNA, 1003 bp, Heterodera glycines
atgttaaaacatatgcttttatttgctgaacgaattatacaattaaatcgtttacattctttttttcgacaaaattgtcttaaatcaattggaactataactattccgctgacaatcgcgatattcgtgattctgcttttcattgaagtcagcagggattccttttttatgtaaatacatatttttcctggattctccatagcctaattagtaggaaaaacactttcttttttgtgtttgcgaacaaaaatcgggacttttatttacatattttgggatttttctacatattacatatgtacatatttttatacatattttggacttttcgccattttttcgtacatattttgcaatttttgaagattttttaaggaaatttttattaaatgccccaaaaaatccaaaatttagcaatttttcgtacattttttcatattttgagaatttatagaaatttagattttttttgagaaatatacctctaaaaaatcaattttttcaaaaacagataccaaaaattaatttttaaagtactaaaatgtgattctaggcctatttgggtcatttttattgcattttatgcctatttcaccctttacgaagaatttttccaaaaaaagtaaccgttaaaaaaaaatttatttacatattttcgtacatatttgggagtttttgtacatatttcacacatattttaacattttttatacatattttatttacatatttcgcgatttttcttacataaaaaaggaatccctggaagtcagacatctaattcgtaattggcaattttgttatgttgcgttacgattcgccaaataaacttttgaattttgttttgttgggttcgtccgtgttctgtgccgttctccactttccctttcttgccgcccccattctattcatttgttgttttttttctcccatttcttatgttttctgttttaagtgtttttttctttttgccatgatcattgtttgttttttgcagagaatg

SEQ ID NO: 103838 - DNA, 250 bp, Heterodera glycines
  unsure (1)..(250): unsure at all n locations
ttttttcaaaaatatataaaaaagataaatatgtttgnnaaggatnntagaaaaaataaataagtcttactttacacttgttttttntagattttcaaatttatctaaaatttttattattttctaaaaaataattcaaagattntaagaaaagttattggcaccaatttaaaaatctgaaacaaaattaaatcattaaaaattttttgcttaacaggtcaaatcgttccgcacttcgctcaccgaaatg

SEQ ID NO: 103839 - DNA, 413 bp, Heterodera glycines
aaaaaaattcttgccgaaaaaatggctatctctttttctcctggggatttgaccgcaaacttggtaccaacatttgccttctctagtctggctctaccaaacactcacacgatatttgaaatgctaacgaaaaaaattcttgccgaaaaaatggctatctcttttttctcctggggatttgaccgcaaacttggtaccaacatttgccttctctagtctggctctaccaaacactcacacgatatttgaaatgctaacgaaaaaaattcttgccgaaaaaatggctatctcttttttctcttggggatttgaccgcaaacttggtaccaacatttgccttctctagtctggctctaccaaacactcacacgatatttgaaatgctaacgaaaaaaattcttgccgaaaaaatg

SEQ ID NO: 103840 - DNA, 241 bp, Heterodera glycines
ccgttgcactgcttgaactttgggcccagtttctcccacgcgtgcagcccttttatgcgctcaattgcaacgctgacccaatgctgcttcgcttgatggcctctcatcagtctgttgggttcagctgctcatccggcgcagaaatgctcaatgtgaaattcaattagttttcatttataatgctgagaaataacccaaatcgaaaattttttataaattttttgccaggctctccattatg

SEQ ID NO: 103841 - DNA, 315 bp, Heterodera glycines
tcgatgttgtacgtaaccaacgctttttgaatatgattttttattgccatgaaaacttttattaatgaaaaaataattctgccttcttctttaaaagaagaaattgaaattaacacacaacatagggaggacttgaacctgggacccctcttttggtgactaactcacagaccactaagacgaaaaatccagcataattgtacttggagcccaaaattgggccgctgtgttaaaaacccaaattcaaattaaatgattgtcaaatcctcattttccaaaaaaatcctcattgacctatcaaaaagccacaaaatg

SEQ ID NO: 103842 - DNA, 705 bp, Heterodera glycines
  unsure (1)..(705): unsure at all n locations
catcaaaaatntcggaagtcggaattccgaccccaaaaatgtcggaaaccggaagtctttccgtgccatacctggtgcctatcgacatctgcgagaaattttatgaaatttaatgcgatttgttaacagattttgtctaaaattgaccaaatgacgcagtttttgactcaatttctacaggattattaagtaaaagcctatccggcggtgccgataggcgccgccgggaaaatttcacaaattttgaatgaaatttgcgatgaaaaatgagtcaactttaattaaatttattatttaatttatttaaaaatatttggcattctcttagaaaaattttcaaaaaaatcaataaaatcccgcataatcccgcacaaaaaatcaaatttgcggatcccgctgcgggattggaactcaaaattctttgcggggcgggatcccgcaggattaatcccttgcggactgggatcccgcaaaatcccgcgcgggatcccgtcccgcgccggtctctagcagcgaccgctgcctgtgcaggaaattggctttttccgaaaatgtcggactcgcaagaccggtgccgttcttacaattagccccttaaaatgtaaaaatgtatatccaattagtgattaatttttttcatggacacggctactttcgaaaggacatccagaaaatttcatgaataaagatctcacttttcagatg

SEQ ID NO: 103843 - DNA, 138 bp, Heterodera glycines
taattttttatttaatattaatatattaaagtttaaaaaaaattaataatataaataaattaaaactaatttttgtcaaaagatggatatctaaaaatatttttattaaattatatataaaattcagtttcaataatg

SEQ ID NO: 103844 - DNA, 78 bp, Heterodera glycines
atttgcaaataattttggtgataattaattaattttcccgcattaattagtctgctgatttgctacaagagcaaaatg

SEQ ID NO: 103845 - DNA, 1003 bp, Heterodera glycines
ataaaaaaaatctggacaaatccttgaaattaagacaaaaacggtccaagcaattccagcaatatatattgaaaaagcgcgtcagtttggacccttctgtgtaaggccagcgccaatggtcatggatttgttatgtgtattcgaaattggcaaaagtttttcattctttgggcagcttgacaacaatgacaaggtaaagtaaaattttaaaaaatttataataccgtatttcttgaaatagagccccagggggttttatctttaactcaactcaaaaaaggggggggggggtatttcaggggaggctttattcacgggagctctaattcatggcgagaggtggggaggggctttatttcgcaatccctcccaaaaaagagagtctttatttcatggggtgtctgattcagggaggggggctctatttctaaacccttcaaaagggtttgttattagtagttgaaattggcaaaatttttccattctttgatcagtttgacatcaatgacaaggtacagcaaaataaaaaaaaaataattttcaaccacctcaaaaggggggctttatttcatgggctgtctgattcagggaggggtgcactatttctagacccttcaaagggagtctttatttcaggggggtctaattcggggagggctctatttctcaacccccctcaaagggaggggggctttattttaggggggactaattcggggagggctctattcctcaacctccctcaaagggagggggctttattttaggggggactaattcggggagggatatattcctcaacctccctcaaagggagggggggggctttatttcagggggctctaataggggagggctctatttctcaacccccctcaatgggagggggggggctttattttaggggcgggctatattataggaaatataatatttatttaattaattttcattgttattaattcacattgaaaagattgccctgtgcagtaatattgcgatg

SEQ ID NO: 103846 - DNA, 901 bp, Heterodera glycines
aaattcatattaaatgccaaaaaccaaaaatctttctctttttattttttcccatgcctgcgggccggacaaaagaattgcttgcaagaaattgctaatgacctttctgctattgagtttgaacgttcaaatcgtagagtcccctcaagaaaatcaaattaaaggaatttcagtggacaaagaaatttgtgaccatttttgtgcccatccatgccagccgactaatttaatttttccaaccgaagagagaaatgcaactttgggttggacttgtgtacacctaaagccaaaaattgtccctcaaagttggtcctcatttttctcgaaaaatgcttggacaattggcggcatcatttttactattgccggcatttccttttgtgtaattcgcgcatatttgtggtcaattgaacccgattcaattgaaattaatgtttgaaatttcttttcaaaatttgcaatttccccgcttttgactgcgtttttaattaattccatatgaccaaagttttgcagtgcccccccccattttttttctctccgtgccaaatatggcagccgacggaaagcaattcatctcccgtcccctctcccgttttttgctcttccccgtcgcgacattagctttttgcggcgatgaatctcccctgccgctcgggagaaaaacgttttttgcctttttttttcccattagctcgccgctgttgtaacatttgaaaaaataaattgcattttttgctgtaacgcccatcgtccactcggacccgtcgttatttaaggccggctcatccttcagaaaagccatttcttgtcttcattctcatttttcctccgctccttcatttttttcatttttccatttcctttttcaattttcaatttttctttttttttttagatg

SEQ ID NO: 103847 - DNA, 63 bp, Heterodera glycines
aaaagctacaaatcaaaaactgatgaacaaaaacgcgaaattgtacaaaaattcattgaaatg

SEQ ID NO: 103848 - DNA, 396 bp, Heterodera glycines
aaatgccaaacattatgctaatttatcaaaattaaaaagattctgaggatttccccaaaagcctcaaaaatcctcaaatttctcaaaaagccacaaaaatcctcatttccaaaaaatcctcattgacctatcaaaaagccacaaaatgaggataaatcctcagatctggcaaccctgttcatagctgttctaaataaattaatttgctataggccgtaaatgtcctgcaaaattcgaaaattttggttatgattcaaaaaataaaagccaaaaaactttggattttagccttaattttttgaaatttttcgaaattctgcaatgccgggctaaaatgcgtgcattttcattcagttggccggcaaatttcttctgctacaccagccatttgtgatg

SEQ ID NO: 103849 - DNA, 442 bp, Heterodera glycines
tcattctaaaaaattatttgcataaagccaaatacatttcttaagcaattcttaaaatgtatgtagcatagaacctattcaaaatcaagctaataacttagaaattttttaagaggtgcagctaaaagtttcaaatgtaatcaggagaagtctttaaagcttttaaatttttttgcagatttttcaagcaaaaacaattttttttgatgtttttgaagatttttagcgcatatttttagggttttggctatattttgtgtaaaatttttttctttttttgtttagtgcttaattttggaatttttgatatagataattaagtgcttaattcacctttttggtgcttaaaaatcctgtcccaacatatgtagattattaataaaagaatttagaaaaaaaacgcaagcaaaatatcattttttaattaaaatttagaaaaatg

SEQ ID NO: 103850 - DNA, 736 bp, Heterodera glycines
cattttgtaaatttctgtcattggatacgctcacaatcaggtaagcacaaaaaataaacaaagttttttagtttgctaataaaagttaaaatttatttgcctttttatacctgcatgttcgagaaatttagtgtctttttaatgcctattttgcgattattattattattatttttttgccttttacctaagtgcgtgttttgtaattttcgtgcttaaaaatgccatccctaatacaaattggttaattcgataatttatgttttgagttgggtaaactaggaaaaaaattttaagacgaataaaatatatttaaaaattatagaaaaaaattcttggtatcattcaatggcccttcaggttttctatctacataaaatgtttcaaaaaagatatgagcaaatattgtaaaaaaaaaatattcgtccaaaactttttttttaatacatgaccaaattttttggaattttgcaagaaaatagagaagcttaagggctatcgaatgttattaaaatgtttaatttggctgaaaggacaaaagttgatacgattttttgtcgaaatgcgagtcggggcattacaaattggccttgtacgagttgggtttttacccaatttgtaaacctcaaaaagaaaaatagggcctagatatggttatatattatggaaagagtttttcttttacatataacctcaaaaataatggaatattttcagcttccggcgacacatgatg

SEQ ID NO: 103851 - DNA, 333 bp, Heterodera glycines
agaaagtgaaagagaaagtggaaaaggaatagaaagttttaagagaaagtggaaaaggaatagaaaatttaagagaaagtggagaatagaaagtttaagagaaagtggaaaaggaatagaaagtttaagagaaagtggaaaaggaacaggaagtggaaaaggaatagaaagtttaagagaaagtggaaaaggaatagaaagtttaagagaaagtggaaaaggaatagaaagtttaagagaaagtggaaaaggaatagaaagtttaagagaaagtggaaaaggaacaggaagtggaagagaaaatggaagagacagaaagtggaagagaaaatg

SEQ ID NO: 103852 - DNA, 207 bp, Heterodera glycines
agggttgatttgctgaaaagttagatcatatgcgatgctcggcgttgtccactcaccaaggtacaaaatctatgaattttgtaccatgtcatttaaaaaaaaatacaaaaattcgttttttctcccgtattttaggttggctgtgtgtccggttgtgtcaacgagaagcagttgaacaagctgaagaggccgtccaccagttccatg

SEQ ID NO: 103853 - DNA, 63 bp, Heterodera glycines
tcttggtaagctttccatccacaaaaacacgtttaaactttttgatattcagaagagtgcatg

SEQ ID NO: 103854 - DNA, 613 bp, Heterodera glycines
cgtataaatataaaatctctacaaaaatatttatttaatcttgttcaataattttaataataacttttaacgaaggctttgaacggagcaaactacagaatttagtcgcagattaatgcttcttcaacaaaatgggcacccaaattcattttaaagtttttttaaaggcataatgccaaaattaatcatttatgaacttcaaattttttaaaccaaatttcccgtgggtcaattgagctaaaaattttgcttaacgaaatttttggaaattactcattcaggctaatagagaacacataatgctgtcgacagattcattcagtttgaatattatgaaaagagataatcagaaaatacggccgtcacccagcatttccaccgacaaaaattcatctttgtttaacttcatatttataatgcgtaaaacaaaatataagaccaaaatgaatggtcaagatcgagtccgttatccaaaaaatacggctgttaattcgcctttttgactttaagcatttgacatgagtttctctgtttggttgtatttgcttttgtttgatcattatggcaattttaaccatttatttgtcttttcagcatatcaaatattataatg

SEQ ID NO: 103855 - DNA, 566 bp, Heterodera glycines
ggaaaaaaggccaaaaaaggtacaaaatgccaaaaaaggcattataggcacaatataattcaacgcataagcctcaaacaaagcggaaaatgtgttttttatgcttaataaatctggaactagtgcgcagaaaaaaaggcatatgcctcaaaatgcggtctctatctataagttaacttaaaagcagaataattttataccttcatatctttcaacatgtatttttgttaaatttttatttttgtcaaatttttgataattttaaggatttataaaacacatcttcacatggtccaagccgaatggcgtggtgaacatgttgattttataaaaccgttcatacaagagcaaaattcctgaaattttatgtgattatgctttaaagcatgaaaatttagtggaaattttaaacaatttagaatgttgcactgaaaaacaatgataatatacttaaaatccctaagttttagaagtcccggtcggttgcggctctaattgctatgaagctaaaaaaatggataagtcctaaaatttgtatccccaaaaaataatttcaggaaaaaatg

SEQ ID NO: 103856 - DNA, 1003 bp, Heterodera glycines
actgatcggaaatgctcaatatgtgttgttggatcgatgcggttggttggcaacgaaagtgcgatggccgaagacgacaaaacattcgaattgatcgctccaattcattgactttgccgacatatggtgcccctgctgctggcctcaatgttctccatctgttaagattgaaaaatagaaaaatttgaaattatgaccaaattcgttaattatttttaaatatttgaaaattttgaattttattttttctataaactttgtcaatttcggacaatcaataaactttcattttcaatattttgaaaaaattataattaatcactttattaagcagtaagaattacaacattaagcacgtaataaatagggcttcgatttttaggtttttacatatttttttcctgagctccccgtggcctgaaacgcacgaaaaacatgtttttttgggctgttgttaagctacttttcgagttattagcacctattttctaggtttttatttttagcacctaaaaaacctaaaaaaaattttaaaaacttattttcacctattttggcattttgcccaaaatttgttaacaaaaatgaaataaaaaggaaaaacagacccctaagaatcgaccgaaaatttttttcaaaaaatatacccctaagaatcgactcgaaaattttcaaaaatatacctatgaaaaaagaaaaatttctcaaaaatcatctccaaaatttatttgtttattttcttggcgagaattttttattttgaaaattatctatctcattaatgatttggcataatatttttgctttttgaagaaaattttcgattttacaccccaaattcggaactttttggcacctattttcccatttttagcacctattttgggggttttttagaacctaaaacctacttattttggcagtttttagcacctaaaaatcgaagccctaattataaaggaggaaaaacttataatatctatgtttagctacaattcaaatg

SEQ ID NO: 103857 - DNA, 1003 bp, Heterodera glycines
tcgcatccccgtcttaataatgggcccattgatcagcagaaaagaaatgattatttgtgtctgatcattttgaatcacactattgatggatgtgaattgattagttgctcattttctctttgaaatgattacttttaccgttatttaaatgattattttgtcgatttttcctttgatttttgaccaaaaatcgcaaaatattgacataaaatggcaaaaatatggataaaatttttccaattgaggtgtaatttctcaatttttctttagtttcgctaaatgtaatgtaaaactttaaaaaatggctaaatgatattaaaaatatacttttaatatgacttataattagggcgtgtaattatatggaaatccatttttttcctggattattggaggcctgaaacgcacgaaaaacatgtttttagcttggtttgaagcttctaggatggatttctatatccattttttccatatttcgggatttatgtccatattttgggatttttccaaaaaacctctattagaacggcccccagcagctaaatttgcctttttgagcctaaaaaccggaaaattttacaaaaaattattttttcgctaaattttctcgagaatattgaataaattcaaattttcttagaaattaataaatttatgtcaatataagcaaaaaaaccaaaatttcgctttcaggttgatttttcgctaaaaataagtaaattttagcttatcgtgttttttttcttctaaaatgatttttaataccatatttagccatttttgaaggttttactttatatttaacaaatttaaagaacttttgggaaattataccctcaattggaaaaatttatgtccatatttttgccattttatgtccatatttcgcgatttttggtccatattttatggccatatttcgcaattttatattcatataattacacgccctatttataattagcctaattcatacatttttaagccaaattaattttcaatg

SEQ ID NO: 103858 - DNA, 173 bp, Heterodera glycines
cgccaagcatttcgctttggcaaagctgatcattttggatcggcaccaaaaaaggcatcaccttggagtggacaccactctgacagaattcttgagtgaattctggatgccaagtgcccgtttaaatgttaaacggactcttcgggactgtctccattgtcgccgaatgaatg

SEQ ID NO: 103859 - DNA, 264 bp, Heterodera glycines
ttactacttcaacgccttctgctacaaaatcaaccacaattttgacgacttttccaaagaatgaaaaattgttgagcgaaaacacgccagtctcctctcttctacctcctctgattcagctttgcaaagaccgtgcggaaggggataatttttatcaacaagcaatctgttggggtcttctcgttctctatttaatgctgattgttagcttactgttacaacaattttgctcatttctttggataaagacaaggcattgaaatg

SEQ ID NO: 103860 - DNA, 1003 bp, Heterodera glycines
gctcataattgaacaaaaaaaaaaatcggatttgggcggaaaacacgaaaaattttagtcttggccataaaatttgttttagccagtgtgatgctttgaaaatcaggtggctcgggtgaaaaaccaaggcattttagctgatttatggacaaaagatttggccaaaaatgatatgtgacaacaatttggaagcattttaagggtttcattttgaaagtttgtagtccatgcttggcattttttaaaaaattcaaacgaaatttgtcaaaaaaaaagtttaaaaaatgtagagattttttaattcaatcgaaacccccaacgaattgaaattttctcgcgttttttttctcagggtttttggttaaatttaaccgttaaaaaaaatgtgcaaaccgaaaacatcagtgcgacagttggcgattgttgttgttgttgatatttttggcggcgtcgacctgggctcttaaactgaggaaaaattgacggtgtgtaaaaaagcaaagctgattttaagaaaaatggagcatatattgggggtattgaactaacacatgatctatggaaatctattgaattctaaagaaaaagaaagtatgtgatatattgcgtttatatagcatcggaagacatattttgtgctagaaaaagcagagcgtcgcggtggaaacgtcgccgggacataatgacgtcgcaaaaataaattaaaaaatttcaagaaaactcaaaagtattttagctttttgaaaatctaagtgttaataaaaaataaatttgctgaatttccggaaaaaacccaaaacttgaaaatttttttttaatttccttgataatttttttttcattttttctaaaattaaaaaaaaaattttgcggcgacgttttgtcctgctccggtttttgggccatttaacaaagaaaatggcaaaaaaaaagttttttgtacctccgggagagtgaattcgaatgtgcgcactgtgccacacttttgtcggtcctcacaatg

SEQ ID NO: 103861 - DNA, 881 bp, Heterodera glycines
atttttgaacaaatttgcatttaattatttattaatttaaatttcatttcatttctctattttattattcatccatatctttcatcctttgcttttgcgatcactttataagtcgttggagacaagaagaaaataagcgatagggaatttcacagtttaacaaaaagcggaaaatgtccgtgagcggaaaaaagggggaaagatggaaaaattaaaaatctgttctcattcgcttaactttttaatccgttcaacatcttctctctccgattaaaaattatttattaatttcgaattttcgcaccgtaataaatatttgtcaccgggacattatttgaaggttacggtaggggaaaatttggtgctaaaatttgtttcaccgggaaacgggagattggtccaccggggactttttgaaaacaaaatctgaaaaatcaaggggctcaccaggaattaagaagtgattggcaaactctaatttgttccaccaaacaaaggctgattgattgattcattgtttgattcttctactgtcattggacgaactgacaaaagagaacagcggacgaagagcggacttcgacacgtggcgacccattggccattgcgaaccgaattgtcaaaggtggacagattcaaatttttgttaaaatttgaaaaagctagttggctagcaaaaattttaaaatgagttcgccaatattggatataattcaagggctagtcaatcgattagaggttgagttaaccaaagaaattccgataaatcctggtcaaaatgccaccccaaatacaatccaaagacatttgtacagagcaaaaaatgcttgtgatgagttaagcgaaattttggaagaaattcagagaaagcgcgtaaaatg

SEQ ID NO: 103862 - DNA, 129 bp, Heterodera glycines
attttttattttgaataaatattttaaatgttgtcttttatttattgttggtattttttgctcttaatattttttcatttatgaaatgtataaaagaaattaaaagaataaaaaataaaataaaacatg

SEQ ID NO: 103863 - DNA, 103 bp, Heterodera glycines
  unsure (1)..(103): unsure at all n locations
aaaagggagggaggggacagtttagaaaacggataaataaaacaacnaaattgataattgttcagattccgaaacagtttttcacatttcaacggacgggatg

SEQ ID NO: 103864 - DNA, 238 bp, Heterodera glycines
ttatttatttgatctatttatatgttcatagggaacatgtttcgcgcatttggggcatagccagaaatcatcaaaaaatgatgtaccgaaatgcaaaagactgtggcttttacatctcttacaaatctcgtaatgacaaggacagtaatgacaacatttaattttatgcgggcagttcatttttcaattttgttttatttttgtttgctatttatagaaggggtatataaaggggatg

SEQ ID NO: 103865 - DNA, 303 bp, Heterodera glycines
tacgttaaagggggtttgtcggaaaaaaaatttttgcgaaggggggtctgccgccgcgatgaccttttttttacttttcaaaccgttttaggcgcgctttttgcaaaaataaaattcaggaacaggggggggggtcggcggtgccgataggctccggcaggaaaatttttatgacattttgggtgttatttgataacagattttcaccaaaaatagtctaaaaattttttgaatttttaatggtgttaataaatttttaactgtgttttttgatgtaatttagctctttcattgtttcagatg

SEQ ID NO: 103866 - DNA, 610 bp, Heterodera glycines
acacctctctcctccctcttctcttcctctcaccccctctcttccctcttctcttcctctcaccccctctcttccctctctctctctttccctcccccctcctcctccctcttctcttcccctcacacctctctcctccctcttctcttcctctcacccactctcttccctctctctcttcccctcaccccctctcttccaaattctcccaatgttccaacttactttgtcagggaaatttcccgtttctgtgcaaatccgccaattttgcgcaactcactgaaaagagacgaaaggggcgggcaaaggcaaccgatcgaccaaaacattgagggaattcaatgcagttttaggggaggagaggggagagactgctgctaaaaagacggagacgaaaggacacaaaaagggagagagaaaggcgatggaccattcattctaaggaaggaaagtgagagggggagagaatcgatgcgatttaaatgaatttcaatttgatccattattttaattcaacccttcttccccttttatgttttcttctcgttttcttggcatttgtccttttgtcttttcctccgcctccgtcttcttctgctgatttttgatg

SEQ ID NO: 103867 - DNA, 742 bp, Heterodera glycines
atctctgctcatccgccacccaaagcctttttgactctgccgaattgcctatttttgatttattttgatctcttgacttttcattctcaacagggacgttgatatttcaaaggggggggtgtgatatttggataattatttaaattagtgctatattgtgtggcattttgtctcttttaatttagttattttcttttctcagtttttggaccattatgttttatgtttttggttgtcttctcatcttctcattaattttattgttttgtgctaaatataatttggattctatttttggccaccaattgactgagtttggaattttggaaagtcgaaccaaaagtgaattgttttcaaaaggagtcgaattatccctaattgctttccattgacattgccgcaccgacatctcatttcgcaccagaaaagtacgacatggcgctcctggacaagggtgagcagagtttgttcgattaatttctattaatttggtggtgcaacaacaattcggggactattagcaattgtccacaccacaaattcgacagagaaataaaggagtcatcaattgacgcgcctgttactcattcttgtagaagagtaacaaaccatcaaaaaaactacaaaatcgccatcgtcccatcgcccaacatttgtgcactttcttgtagaagtgtacaagaaaaagcagcagcaagcattcttgtagaaacttgcaaattcttctcttctcttcacaatg

SEQ ID NO: 103868 - DNA, 769 bp, Heterodera glycines
tttaataaagcggcaatgataaaactaagaaaaagtgcttaaacagattttttattaaaaaatattaaaaagttattttgcagtttttaagaggcattgtgttgagtaaaattcaaatattgactatgtccagagaatctgtttttttcgttattaaaaaaattagttaaatcatttcctttagcctaaatgttttccaatttatcttttttttaatgacggaagcaacaaaaatttacaacagactcagtgcttttcaaaagtttcgcatcaatttgaactgccatttgcgtcgcgtccggtcgaattggttgtatcagctttcgacggcgctggtcttcgttaccgccttaaaccatgccagcatttacctcacttacgggcccgaccacccgcgatgcatgcaacagtaaattgaccaattttttgcatcggaattctgtcttatggcatcgttatgcttttctttgcaaatgatgcttttaagcaactacgatgagattaaaaaatggatgtcctgttaaaattctacaaatttttgaaaaagaatgagcattttaattggtttaattcgaaaatgatttttagagaatcagtttgttcaaacccggtgcatattcatggtaggcccgacaccagaaaaaaagcgggaaactcgatgattttttttaaacttttctggccaacaattccaaaagctttttgttttgctatttcaaaatttgccctgctccagtgccctccctgatcaaatatttcccttcagatg

SEQ ID NO: 103869 - DNA, 416 bp, Heterodera glycines
ttattcgtcacactttttcagaatatgtataagcattagagtacaaaaatattccaaaaaatatatataggtattgccgtttctgcaatttgttatctaacggcaaatcttaattggcattaaaacggccacaaaaaaggaaaggaaagaaacaaatttaaaaaggttatcttccgctattgcggaagaagcccttccacacgtaaattactcgcgaaatttgccaataaaatcgaccgagcaccgtttttttggggtgaatttatttaccgtatttcctaaaatacaaccccccccccctaaattaaccccctgaaacaaagccccctcccttgagggaaaaataaagcccctgggggggtactattttaggaaatacggtatttactgtggtggcactcattcattttaaaatg

SEQ ID NO: 103870 - DNA, 161 bp, Heterodera glycines
ttcatcatgcttttcctctccctacagtttacagggatggctatgtgtgcatcagtattctccacccgccgggcgacggaccgtttggcattgagagagcggcagaacgttggcagcctgtgcacacggtggagtccatcgtcatctcagtccaatcaatg

SEQ ID NO: 103871 - DNA, 587 bp, Heterodera glycines
ggtgtgaaatggaaaatggactataaaaaataaataataattaattgataaaatgatagcacgacaaataacaaataaacaattcgataggcaccgtaaaaagccaaattccgaaaaatcactcattttttgtaaaaatggcttaatgctaatttgcaggaaaggcaattggatttacgctatcaatttgagaagtttaaaaaacaatcaatacttattttaaataatttaacggtcatatgcccaaaaccaaaaatgctcaaaaaatggcggaattggtttaaaacagctcaaatgaaaaaattgcgcattttccatttttccatggaataaaaattgtttgaaagtggacacttcagtacctctttttttaaacattaaacatgccaatcggtccctaatttgcatttaaacatctttatgggcagccattacttttgagtttgggccctatgaccgatattttccaatttttgtaaaaatcggcaagcaaatttaatttaattgtctcgtctgtttttgtttttaattttaaaattgaacagaattcacttcaaactcaaaatggaattatgcagcacacaatg

SEQ ID NO: 103872 - DNA, 58 bp, Heterodera glycines
ttttaaaatacatttttttgtaaaatttcaccattttttgcaatttcagctgagaatg

SEQ ID NO: 103873 - DNA, 1003 bp, Heterodera glycines
tgagtagagagagtggcaaatgggagaaggaggtgagaagaggaaaggagagagactgcaaaaagggggagggaaacgtgatggaaagtgtgaagaagagagaagtggcaaatggaagagggattgaagagaggaaaggagaacgacggcaaaggggggagggaaaagtgataggaagaggaagaaaaagcgtgtcatggcacttcttacaaaggcagttcgtacaataaagttcctacaaatttcttttcagttttcaattaaaactgtattttttcaaaaaaacatgaaatttttacatattgatttcaaattttttaaaaaaataacattttttattgaaaaagaaattcattctgattttaatttaaaaaatctgtctttattgaaaaatatttaaaaaaatttgtaagaaatgctattgtatgaactgccatgaccctgtcaaattggggggggggtgaaagaggggagtaaaatgatggcaaatgtgagggaaagggaagagtggcaaatgggagagggaggtgaagagaggaagggagaaagacggcaaaaaggggagggaaaatgatggaaagagtgaggaagagtgaagtggcaaatgggagaaggaggaaatggcaaatgggaaaaggaggtgaggagaggaaaggagaaagtcgacaaaagggggaggagaacgtcgtaggaagaggaagaagatgtgtgtcatggcacttcgtacaaaggcacttcgtgcatagagttcctacaaatttcttttcagttttcaattaaaactgtattttttcaaaaaaaacatgaaatttttccatattgatttcaaattttgaaaaaaaataacatttttttattaaaaaagaaattcagtctgattttaatttaaaaaatctgtctttattgaaaaatatttaaaaaaatttgtaagaaatgctattgtacgaactgccatgaccccgtcaaattggggggggggggagtgaaagaggggaggaaaatg

SEQ ID NO: 103874 - DNA, 348 bp, Heterodera glycines
aataaatttactaataaaaattttaataaatcaattatcatttaatttgtaagcgtttcatttccctttaatcacagtgaactgttaaaatcgctgaacaaaaatttggcgcatcgtctgaactttgagaaaatcacaagcagaaaggaaaaggaacgctggataatgctgcaccaaaaattggagaatttacggctcgaaaacattgacaaccgatggatgcacagaacgggcacaaaactgtcgcacagttaccaaaactttgtgcgcgactttcgcaaatggaaagccaaaggcacactttaccatccgataagggacggaattcgaaaggttcggcacgacatg

SEQ ID NO: 103875 - DNA, 62 bp, Heterodera glycines
aataatgcaaaaataataataaaaatatttactttttaccattttattttcaggaaaaaatg

SEQ ID NO: 103876 - DNA, 172 bp, Heterodera glycines
tgatttttaaatggccggacattttaaaaattcaaccaaatgaattgaggagctgaaaggattttgtgaggaattggaggtgcggaattaagtaatgaaaaattctaagctgttaatttaggttgaatttgaacgcttgaatcgacatgggccgacaagatggacatcaatg

SEQ ID NO: 103877 - DNA, 270 bp, Heterodera glycines
ccttaacaaatgcctttgcccatgccatgccaatggccaaacgaagtaagccatgggagaaagagagagagagagagagaggaaatgtgccaagaatggccaattgaatttggtggtgccgtttctttccccacttccaagtgaccttctgctggtcgggccactgaacacttactgacccgcgtcatatggcagacccaaagtttgcgcttggtcgtcgccaattggttggaaattgttccatcggatggccgggatattgctgtaatg

SEQ ID NO: 103878 - DNA, 534 bp, Heterodera glycines
tgttcgaacaaaccctatctttttggtatcattcgaaagcacaaattctaacgaagctaaaatatataaaatcgcagcgttcaggcaattaccaaaaaagatttgattaatttaattaattgttgtttatttttgtttataactttctttaaatgttagatttctcttggtttctcttactgttacattattcagtttatactttcgaatgataccaaaaagatagggtttgttcgaacatgaacaaagttattgtataaaaacccgggattgtcaattgattggactcataaaagtcgattggactcataaactgcaatagagccaaaatccgttccctaatcatgacacataaacaaaaagatacaaaaacattcatcaatcccttttcatggctataaaaatgtttgttttttcgctttgtcttgcatttgaaaaaaaaataaaaatttctaacgcaattaattattctgctctttgttgtgtgatatcattcggaactcggccaaaattgtgctaattgccacaaaaatg

SEQ ID NO: 103879 - DNA, 373 bp, Heterodera glycines
cccccccccccccccccccccccccccccggggggggggtggttttttttttcgcggggggggggaaggggcgcccccccttttttggaaaacccctttttctttttttcgttttcacaaaaaaaagggggaacaaaaaaggggggtcccggccccccttttttttttttttttttccggggattttttttccccaagaaaagaaatactctttttcttaaataatgatgatgatgctgctcactttccctccccgcctccctttgtccctccctttcccctcattttcttaccgcccataatttgttttggcatttaattgcgccacaaaagcattaccaaatcaatcgccagccaaagtatcggccgaatg

SEQ ID NO: 103880 - DNA, 91 bp, Heterodera glycines
agttggtaaattagtgggttccttttcgggccacaaattgaagttgttgggaagtttcaagtgtgacgttctgttcagaggagtcacaatg

SEQ ID NO: 103881 - DNA, 908 bp, Heterodera glycines
aggcatgggtaaagggaaagagaaaggaagagagagagtgtgagagcgggcaaagggataggcattgattgcccgtaaaagcgaagtgaatgtgaattgggagtgatttgggggccatttaaatatggaatagggaaagagataaaaaattggggcaaaaagtgaatattgttaatttacaattaatatgggctgatcactacaaattgggggagcaacgtactttggagggaaaatttggcgaacaaacgtgttcggtctttgaaccgactcaataaaatgtttatttgtaaaacaaataaattaaacaatttaaataaaaatgggcgaagtcggtggcgcgaataaataatggaggagaacaaatatttaggcgaagtgaaataagtgcataaaaagcaactgaatgaatgaggggaaaggacatgagacataataaatcaatagtgtcttacattaataaaggaagacacaacaattagagagtggggaaaataagaggaaaagaaagagacaaatgcaaagggaaaataaatgcaattgtgaactcactgctcctttttaatcgttttaattgatggaactgatgaagatttttttgattatttgtggaaaaacctgaaaccatatatttttaaaaaatcgctaaattctcagatttttttcttaaaaatgaattatttcaatagaatatagaagaaataaatgaaatcgaaattttaaataaatttaatttgatgaaaaaggaattgcgcaaagaaattttttattaaaatttaacaatgtttcaatttgaaagtgaaattgcaaaaaaattgggcacaagtcgctggaaaatttataaattgaaaaaaaaattggaaaaaaaaagagagaagagaacggaggaaagtgaagaaacaaaaatg

SEQ ID NO: 103882 - DNA, 174 bp, Heterodera glycines
tttttttctgctctaaaattgcccttttccgacccaaaaaatttccggttcggccaaaatttttgtggggtgaaattgtgccaaatttttttggcatttttgcgatggtcagaatggcatttgggacacgagaaaaaatgaaccgctgctgaactttgctggcccgaaaaaatg

SEQ ID NO: 103883 - DNA, 65 bp, Heterodera glycines
ctccatttatcccagtctataattatcccccagtctttgagggggttgaaaaataatcccccatg

SEQ ID NO: 103884 - DNA, 233 bp, Heterodera glycines
tcataccttttaattatacgccatttaagaaccattaaacgtatttttggtttaccccttgaacccagctctagccttcgaaaaaaatattctataaaattcgaaaaaatgaggcccaaaatttcggaaattggaattccgaccccactcaaattgtttagcattttcttcgtgccaatgccatttcttccgtcagttacgaaattcatttttatgttcgcgtgccgtcaatg

SEQ ID NO: 103885 - DNA, 114 bp, Heterodera glycines
agagaaagagattgagattaagcccggggtatcgagcaccatggaattgacgacgacggagtcgagaatagagaccgagaattgaccttagactcggtcgaacatcgagaaatg

SEQ ID NO: 103886 - DNA, 349 bp, Heterodera glycines
tttaatcattgttttgatgaagaaaatgaataaattccaaattttcattttgatcatttagtttaatttttatcacaatttcattattttcttttttgtcccatccgtcaccaaatatatcatcaaaatttggtcgaattttgcaggaataaattttataaataaagaaaattataataaatattaaataccataaaaacattttcaatttgaaaatttgtataaagacttccaataatattataaagcttatttttttcattttgttggcatcaatgtaaaatcgaaggtgtcctgatttttcagatacctatgccctgaattagaagtcaacaactttcaaaaaatg

SEQ ID NO: 103887 - DNA, 94 bp, Heterodera glycines
cctctaatattttttgaattagtcattaaaaattatatttttaaagtcgtccctttgctataaatagggcaacgactacaaattcagaaaaatg

SEQ ID NO: 103888 - DNA, 1003 bp, Heterodera glycines
tatgaaattgaaaaaattaataaatttgattctatttattactttttggcactgatataattaaaggtcttaaaatccaaatttaagtttttaattggtattcccgataaaatgtgaaaacattcttcgtttggcaataaatttaattggaattcacaattaatttgaataaagataattagttaggttgagtgtcaacaattgaactccaatcgaaattatgtcccatttttattttagtttgataattgttaatttaccttttaaactttcagtaaaatactaaattaagtgccaatttttccatttctcggcttgcatttttgttgttgttgtaaaattcccaaaatattatgccaaaaaaatgactcatacatatcattttcataaaatctggcaaataatgcttaaatctttagtcaattatcttaacaaagtttaataaatattaaattttctttttacatttgcttcctccagtattattactattattattattattttttaaataacattcaatttttcataatttagatatgatcgcactaatattattttttctgtacactctttattcattgatgaatgattcacactcattttttttgttcaaagcgattttcattagctaaaaaggagcaaatgtataatctttcgcttttgaattgtaataacgtaataacacatcaatgctttttcttcatattatttttatgtgctttcttcctcgtttcgctgtttcaaacagaacaatgtattaaataaaataattcgttacttaattataattatttcattattcaaaaagaatttaggaaagtgccgttggagttgacgaaatttggtcctatcaaagttaaatatgaacttcatgggaattgttcaaggtttttaattggagcaatttaagaacaaattaaacgatttagtcagatataattgttaattccataattaagtttttcattgtgctacagaagcacattgtttggcaagaatg

SEQ ID NO: 103889 - DNA, 1003 bp, Heterodera glycines
attattaatttttaatcgctaaaggaaatggaacaattacgcgtcgaaagcacaatttcattaggaaatgggtctgtctggaaagttttccatgaatgaatatcattgtttggaaattttcagcttctgaaattttacaatatatgtgccaaaattgttgtatgattaaatatattattttaaatatttttttaggttgctaaaattcaattagaatttaaattgatattaagtcaaactaaaacctaacaaatagaaacaaataaaaagaaatttgatcattaaaataagatttttaaaatcatatgaacgacacataaacaaaaaaacaaaaacggacaattggaggcaattattgaaaattcgttatcttcagttaattaaaaaaaatttaagtcgttttgttgaaaaaattattaacccatccaaaaaaatgtctttcttaggaaccttaaaattattactttttcatacaattttattttttttctattcttttcttatgaattatttcaaataattctcagaatcgattaaaattataaaaattataatgataaccttcatcatgggactaagtgcattcataaaataaatgtaaaaatggatgctcactcttttgatatgaatattaataaaagacatttttcattttattaaattattatgccttttttaatattactaaaaatttataaatccttaatttatgaaagttttgcgccatgtattagtgcattaattatatatttggattctttatgattaaagaggccatggttttttgaactttttcattattacattcttataagttaaccaaagatataaatgaatgaatttatttgctaagtaaaactaaattattccggcagactgtagggcaaaattttgtgtaggcaaaaactggcactccttattttaatcgtttttccaaaaacaataattaaaatttgacttcaactttaagttatttataatattagttgctttaatcaaaatg

SEQ ID NO: 103890 - DNA, 426 bp, Heterodera glycines
tttcacatacattttcagatgcctataaatgtgttccctcacttagtgaaaataagttttaaggggtattgggggtccctgatcacgaatacagcacccatttttgttaatttcgaacccctgatccgaactcgaacaaaaataaaattagaaaatttgtatggataatatcctcatgggcatcttgccaatgaggatattattggtacaggaagcctataaattctttgtccttgtacagctcatgtagtgaacggtagcgctgaactgagcacgtattcgtgatcagctaccctaaaaaccccttaaaacttattttcattgatttcaaaaacacatttataggcatttgaaaagtatgttaaaagtacgccctgaactagaaaagtactcttttcatatttattttaggtgcctattcaaatg

SEQ ID NO: 103891 - DNA, 215 bp, Heterodera glycines
ttgtgaccacctgtcacagctgcacaattgcatcgcgcaaatgtcaaattcttcatcccaaacacattgcggcacgcctttgacagtttcctccgattggtccttcttctttctgtgcttttccgaggaatgcttcttcaaagttactaaacatttaaaaaccaattagtccgttaattgataggcaattataatcattattaaacagaataatg

SEQ ID NO: 103892 - DNA, 104 bp, Heterodera glycines
gacaatacgggtaaatattatattccctttgaaagactcttgagctgttgaggttccaacgtgggctgttgcgtcacattggcagaaagggaatcctgcaaatg

SEQ ID NO: 103893 - DNA, 116 bp, Heterodera glycines
tggccgcacacgacggcacaattccaaagctggaactccaagcactgactctcggagtcaaggcagtcaaattcatccaagcgcaaatcaaatttgccgatcatcaagtcatcatg

SEQ ID NO: 103894 - DNA, 1003 bp, Heterodera glycines
atcgggaaattttaattaggggacactaaaattaaaaaatctcatttttgaaggattaaattaaaaatttacgaaattgccccgaggcgtagggatggggcagaggactgggtgatttgtaaggtatgctttggcatggcaatggtagggtgcgtttttggtggaatacggtagtgccgccattcatttcggctttactatacggtattgttttttggtgaccgcgctcatttggccttctccacggtggtggtgcggaacacataagtggtggaggggtggcgggcgttcgtttgctgctgcaggggactcaaaatgtcggcgcccgcttcgtcccgcgcttcaatggcctcctcgcgcacgcgttgccaaatgacgaacggaaatggggagaattaaaatttgcaaatttaaaaatggggttggggttagcagaaagcgacaactggaccatggcccctagggcccggaatttcgaaaaactcggaccatgacccggattttcgagtcggacatggacagtatttcggacagaaagtcctgtaggactctaaaatgataaccaaattccttcaattcaacaaaaaccaggcaggcagtcgtccagaaagttgtccccaactaaagtatccgataaaatcatttacagtatccggtatataaaaatcattttttgatgcctaattagtccagaatcgccaaaaatttccttattttttaacttattttaattaaaaaaagtggcaccaaaagggcacagtggaaaaatgaaagcacaaaagggacggtgtgatttgaggagaacaatccgatgccaaaatgggcccaactgttcagcgcacaaatgaccacttggcactgaaaggcgtgaagcaattagtcagccaaattacgctcgatattgaacaaattttagcatttttaggaatccgcgagtccaaagactctcgtgaaaaattaaccgaccatcgatcagtggtcgaaagtcgaaattttcaatatg

SEQ ID NO: 103895 - DNA, 614 bp, Heterodera glycines
gtgatatacttaatttcttatttctctttttctctctctcatcctctgatcattgttcgtccatcaatgtcatcccgggggcggtccttcttttcactaatcgagactctttataagtgttcatccgcctcttgtctctctctcagtcttgcccggggctcccgctcatcagtctctgttcccgagaccgaatcgggttggggggtcgcccattgtatcctgaacattggacaccagaataaagactgtgctgttggtcattggaagagtaagacattggcacttagaccttttgggcacccccttgtccccatctccattcagcagaaaaaagacaaatggcaacaagcggaagggacaaagtgccgaaaacacacattagcaaaaaaaaaaaattggacaatgaaaatttgaataattctctgtaatttcaaatttatcttttatttctaatttttcacccataaaatctgttcaaacatttggaaactttctgccattaattcatttgcttgcgtaataattgatgggatttttgtcgaattgttcagcttttaaccgttaattttatttccaatttttctcttcaatttatttcaattactttgaaaatg

SEQ ID NO: 103896 - DNA, 953 bp, Heterodera glycines
tgcacaaatctatgtagctgaaaatttgaaacaatatttgtatagttaataaattgatgaacttctgaaagaaagcaccaacccatggtagggggccggaatattggacgggtgcacttcattcccccccccgtcgtttcccccccgcccccgaaaaattttttttttttaattttcaaacctagaaatttttcataaaaaaattcttaggaaattttttagtcagaaaatttcaagaaaaaaagttttataaaaaaatttcagcgattttttggaaaatttttgaaaaaacttagtagttcatcatgaaatttcgaaaaaatcgctgaaaagccttttaaaaaatttgtttttcttgaaattttcttaataagaaatttcctaagaagttttttatgaggaatgaaaatataaattgggcaacaacaatgggtttatttaaaattacacaacacacaccctcccctccccgggggcgtgccgaaaaaatgacttcattcatcccttctataacaagcaaaacgatgttcatgctcaaatgaaaagctaaattatcatcaccatcaccatcatttagtgttttccacccccgggcacactgtttgtgtgtatgggagggggaggggggggggggggtgggttgacttgaagtcggctggtggcacgtctcaatctgcaaatttgttggatttagaggacgaatgcaccagtccattggaagagccgatgtgtaaggtggcgataattcaccattttcggaaaccagctagagcccagactggatcccgaccctaaaatatgaaccaagagaccaagacttccaaaaaattggaatttgaatcccggtaattatatcccagcctaattcccagtcccggcatttttaaaagtctgggttctaaaacaaacatggattttttttgggtatgaaaacccatcaatttttagaaatg

SEQ ID NO: 103897 - DNA, 75 bp, Heterodera glycines
caatcatatcttagtaaagaacaaataaaaaacgctcatgtgaccaaattgtctcaatttccgggccaagcgatg

SEQ ID NO: 103898 - DNA, 543 bp, Heterodera glycines
tttttacacaccgagtcaattttgagcccctagttcaaaaagtaaatgcatatgtggcgaaatggtttttgtaagatagtaaagggacaaagggtggtggttcgagtccgttgtgcaacacgaatatttttatttatttttgtccaaaatattaaaaaatgacgaattttgggaattatttttgaagctttttcccaaccaaattggacaatcttagtatcattcgaaagctctttatgaggagaagctttttctaagcaactgctaagcaattggattgattaggaaaaagatatgagggttcgaaattttattttttgaataactttttagaacaacatttaagctataaaaacaaacagagaaaacgatgcagaatttttttctctgtcgctatgcaaaatttgaagcgcatttaacataggacaaaaaaactaaacatagaaatgtaaattccgtttttctctattaacacagataaagaaatagtacgccaaaaagagatatgtttttttctctgcactctctctttattgacacatg

SEQ ID NO: 103899 - DNA, 654 bp, Heterodera glycines
aagaaaacaatcccaaaactagtgacaaaataattgccaataaattgacaattggcttttcaactttgcaacaatggaaaaaggcttcattttcgaattgaatgatttggtaaaatatgtttacaattgaatttatttctttttatttttcattccgtcacttttattataaataaattcgctgattccaattttcagtgccgttttttttttggttattattctatggtttcacaaatttttagattattttgagtattttaaaattggtttttgaaaaaaataaatgataattgcatttaaaaaatttcacttcacttttttatttttattattataataaatttttatcgaaagaattgatttttatttgaaattaaatgaagaaattaatgataatgtgaggtataattgagaattttcaaacacaactaatcaaacaaatttatgaatgtcatttatgctggattttaatagaagttttggaggaaaatcatttcgggggattccgaatgtcccatggattcctaagaaaaatggtttcctttttacaaaataagcccggtgccgagttatgacgtgccaaattttatagttttttatgtataaaaaaaaatttgcatgtattttatctatttcaaagcttttaaaatg

SEQ ID NO: 103900 - DNA, 221 bp, Heterodera glycines
gctaaatattgtgggttgggtcgtctggttggctcgcgctaaatatcgtaattaaaaagtataattggctaaatcgaatttgacctttgactcagtgaaattgaaatgatggtgtgggttgggtcctccgggtgactcgcgctaaatatcgtaaataaaaagtataattggctaaatcgaatttgtacctttgactcagtgaaattaatttttttagcatg

SEQ ID NO: 103901 - DNA, 125 bp, Heterodera glycines
attcaaccaggtgccaagtcatatctacctatctcaatgaaatccatttttcttccctaggctcccgatgtctcgtgaaataagccgttcaaggagcgaattcgacacttctacaatatttgatg

SEQ ID NO: 103902 - DNA, 340 bp, Heterodera glycines
actcattttcctggctaattgccccacaaatttaggccatcaaaaatttgattgatgtcagccaaaagaaagcttctgacctcaatgcaactgatgtgcagaaggccgaggcgggaatttccattgaagtggccgaagccgcgctcagagccatcagcgaaaaataaagacaattgttgacgtatgaaaaatagatggtattgctgtttattgtcgtaatagttttataaatctaatggaaattcccttttctttcatttctcatttgttttttttttcaacaaattatttttgcttgaaatatttgaactttttttcacaaattaatttcgtagcaatg

SEQ ID NO: 103903 - DNA, 326 bp, Heterodera glycines
ggtgcttaccattaacaaattaatattcttttccctattttatcgacacgtattttgaaaaaaaagtcaaaaactcgacaaaattttgttaatttttcgttcataaattctgtgcttactaattaatatttttaaagttttcccctcttaggcttttgtctcggcttcatcttctgcaaatttcattgctgtcatttggtcgtcttctgctgactccgttttgccatttgatcagaccaacgaattgactcgtgaacaattggcattgaaaaggatcaagaaaagcgatcgttttctgctgatccgttgcccaattgtgcgagatg

SEQ ID NO: 103904 - DNA, 119 bp, Heterodera glycines
atgttagcgttccccgaaatctccatcccctctgctgaagtggtgtaaattggcaaatgggcaccatcgtagtcaatacttaagaatcatttttcttattcgatattcagagagagatg

SEQ ID NO: 103905 - DNA, 1003 bp, Heterodera glycines
aaataggagcgaaaatgttggactaaaaatgttaggtgtaaaataaaaaaaaaccatgtttttatgaaaataaattgaaaagtgcttgctattgatttttatagaagtagaaaatcagaattattacaaaaatcaaaaataacaacaaaaaaattgtatgcagatatcttaatgaaaaatggtccgcgatacagtttcttattgaatatggcatatgatataatgaggaataattcaatagacatgtttaaattcatcgccctcccctttcctcattagggatgtgtcaaaactttccaggaagtcgagtccgagaaaaagaattcgaattctgtatccaacccaggcttcaattaacgaatcctaaccatgtaattttataaaaaagcaaattgattattcaatgagtgccatgtcaactactattagcacaaggaaaaaattaattttataattaattttattattaatttaattggattcaatgaaaaaaacattggaacaaattccatggatttcatatttaatttaatctgaaaatttgctatattcgaatagatatttttatttggttacctttttaattgatattgaaaatagtaataaggaaaatagaaaacaaaaataaataaatttagcgacaaaaaatatttaaaaatatgacaatttgaatcgagatttaaattaatattacgatagtgaagctaaattattatttatttttaatattgctatctattttttaaaataatctcaaatataattaacctaaatcaattttcatttttattagtcattaaaattgttgtcgttgataaagattagagacaccattttttgcctatttcggggtttttgtgcttaatgcctatttgcctatttttgtgcctatttcgccatttttggcgcctttttcaggattttcggaaaaaactttaacaaaaatgcaataaaaacgaaaaatacactactaagaatagacccgaaatattttcagaaaatg

SEQ ID NO: 103906 - DNA, 157 bp, Heterodera glycines
atttatacactattttctttcttcttttcagtttctctgtttattattgtgtttttaacgaaaatttctattgctccccatatattttcattataaaaatatataaaatccatccatcacaccatagcaatttttaaaatataattcgatatcaatg

SEQ ID NO: 103907 - DNA, 63 bp, Heterodera glycines
ggtttttaacaaaattttgttaaaaattagcaaaatgtttagtatggtgtgttcacgttcatg

SEQ ID NO: 103908 - DNA, 781 bp, Heterodera glycines
aaatttctttaacatattcataacaacaatttcaacggcgtaaatcattttcaaaatggagagaataaatttgatcactttaacttgtcaaaagcaaaacatgcaatgatcaaaaacatttatatattcaatgttttatcaaatttgacttccattttcatttttgcttattcataaatattttaaataaaaataataatcatttatttttggtaaatgctttacaaatattttttgttggcattttgtttgctgcttgtgcaacgaataaatgcttaccaatgcggcacatttcaagaaaagatcaaatattatcataaatcagcacatttgcccaaacaagaccttcaacctcaagtaaaattgtttattcgttaatatcagcaatcatcacaaatcctaaatttgaaaatattaatatttttattagaagaggagaaaaatatttcacatttgccatgttttgagaaaaatggcttaattggtgggcaatttttttttgaaattgcctattaaacatttatcagtcgcctcttttaaactacttttagaattttgaaaatttaagaaaataaaaagattctggcatttttgagaattttattacatataaaaacgcttcataatatacgaaagcataagaaagcataataatttgattaagcagactccgatcgaaaaattactatatttttaccatagttgaattaactctgtcccacccttatttttctcccattaagatcagccacggtaatccggtaaagtcaaacaacaaatg

SEQ ID NO: 103909 - DNA, 132 bp, Heterodera glycines
tttctacaatgaaaagacgacaaattgacaaaagaaacaaatttttggagaactaaagtggatggggaaggggggggggtttagcgatcgggccatactccgctggttatttctccgaatattcgcgccatg

SEQ ID NO: 103910 - DNA, 138 bp, Heterodera glycines
attagtgaaaaataaaatcaatttaaattgtccatatttaaattttgtgaattatctcgttctaatttcaaattaatttaaaaaggtaacaaaacttggtggttatgtgcggtgccaatattttattccattgcaatg

SEQ ID NO: 103911 - DNA, 246 bp, Heterodera glycines
attacatgctgtagaatggattcgcgctgccagcgccttcacaatactatggtgacgtgcctgtgctacaagacaatgcggatgaaattgaggaaatggacactgttcaacaacgattggctagcaggaggaaactaaaaaagcacgatgatgatgatgattggcaagacaaaaaatacaaaaatttactataaacctccccctgctcgccggcccccgtctcgtccagcaaaaattgaaccaatg

SEQ ID NO: 103912 - DNA, 55 bp, Heterodera glycines
ttgccttttaagcgccccctcgggatgggaggagccctatcggagagataaaatg

SEQ ID NO: 103913 - DNA, 293 bp, Heterodera glycines
actgaccaaagagtgacggatgataaatgacacagtgaccgatggatggtcgattggggcggacccgtggcgattaaaggagattttttttgtttctttgttatcgttaccagcacaaccatttttgtttgagactttctcgatttgtttgtttgctgaaaatttttgcgtttgcattttctttaattatccattcgttttaatcgttcattattttcaatatgcattcattctttttcctattaattttttttataacgcttgtcaattaattgcttacaattttgccgatg

SEQ ID NO: 103914 - DNA, 339 bp, Heterodera glycines
aatttctatagttaagaagtaattatcctcagtaatcgttggttaaattccgttggatttgcttcaactttttttttcattttagtacaattttctccgcgagaagttcgaattttttcgaggtccctacgacggctggaaaaattctgtgcgtcacaatttgtccatgcaagattatttctacaaattgccaaaggatgagcatggcaaagttggaaagggttggtccgcctaacgaattaaattaattagttccaattaattagcgtaataatttcaataaaactttttcaaatttttggccaccattggacatatggcaaagattggtttcaaatg

SEQ ID NO: 103915 - DNA, 61 bp, Heterodera glycines
aatgagagtgccaaggtccaatgcgctgtacatctttctgatgcgtgcgcccagcgatatg

SEQ ID NO: 103916 - DNA, 115 bp, Heterodera glycines
tttctccaaccgatggccgatttttcagtggccaaagtaattgttaattaattgccgcaaattataacaaacgaaccaaaatgccgataatttttagtcgcaccaaagacaaatg

SEQ ID NO: 103917 - DNA, 324 bp, Heterodera glycines
attttcaatgaaaaccaatcaaattgatatttttaacttttttaattgaatgatataaattgatttaaaaaaatatatacaattgttgcgatttgaaatcaatttatttgcacacagaggtggagccgtcccgggtggagcagttggtcaagggagacaaggcggacatgttgctgtaccaaccgcagtttgcggagcgtggcgtcagttttgggagcagtggtggctcaacagtcggtgctagcgttacggcaattgtcaaattggtgccccatttttttgggatttttgttaggcaaattaaaattttttttgtaggaaatg

SEQ ID NO: 103918 - DNA, 126 bp, Heterodera glycines
tctgaaaaaatacttatgaattaattttgcaaaaaataaataattaatgaaaaagtcagaatttcgaaaaattttaaaaacaacaagcgttggcattttttcaggttaagttagtcctttacaatg

SEQ ID NO: 103919 - DNA, 52 bp, Heterodera glycines
tgtaagtgaccccgaggaattcactgaataaaaataaggcaaaattcagatg

SEQ ID NO: 103920 - DNA, 126 bp, Heterodera glycines
tgccgcctttcgctcccacgcgcaccacaaaaagaccctttttcatttcggacccttccggcactttggaacaacttcggcccggcattttcgcctgttcgttttccccggttaattctcaaaatg

SEQ ID NO: 103921 - DNA, 109 bp, Heterodera glycines
agattttcactggtaccccctccaagacctacctcactaaataaaattcatcgcgaaatttttctgaaaatccacaaaattttacaattttttgtggaaaacaaaaatg

SEQ ID NO: 103922 - DNA, 190 bp, Heterodera glycines
tttttaatttgcctatgcttttggtttccgattaaaattatttggattaattgccatttaatttcggtttccaattgtttagccatttctccgtgccaccacttctgcctgcttcaaaattcgacttaaactttttgaatcaaccgaaattggggcatttgaattggtgaacgagcggaccaacgaaatg

SEQ ID NO: 103923 - DNA, 247 bp, Heterodera glycines
aaaaggcgtgtttcattttttattcattaagaatttaatctaatatataatatatatttatacaaggaaattaaaacaaaaagaaatatttggataaatatttgtaaaatgcacttaattaagttttaccaaattctatttcatcgaatacaaaatcaaaattgcacaacaatctgttaagattaatttgccaaattggaatttgccttataatgtttatatgaaaaatgaaaaggaattaaaaatg

SEQ ID NO: 103924 - DNA, 237 bp, Heterodera glycines
ttggtttgtggtaaaaggcaaaaaccctatgggaggaaaatataaattaaattatttttagaatcctttgactgtcgctcggggcgatgacgaatttccaggaaatgaaatagaagaaaaggcgcttttcgaagaggacgaagcagccaaaattgaactggcgaaatgcgaagaagcaaacaaaaggccgcgcaaaaactttgacactaacttttaaatttcacaatttttaggatg

SEQ ID NO: 103925 - DNA, 387 bp, Heterodera glycines
accagaaaaacgaatacaatccatttatttaaactgaaattttatgggtttctattttaaacatgcatttgcgcttttaaaaatgacagaatatcgcatgaaaatgaattattttgttttgtccattgtcaggttgtggtcggagtccgttctttgcctcaaattcgcttcaaacgcaacactttgcttcttccggatgcgataaaagttttaagatttattgttaacacataatgaaatcatttatttgttcccaagggcgagtggcgtcgagacgcgagccgagctgaatatttggctgcggaggagttggacaattggcttgtgctctgtgctcgtcagaatacgaatctcgtcaaagattttgtgcggcgtatgtgcgaaatg

SEQ ID NO: 103926 - DNA, 162 bp, Heterodera glycines
ggttttgattttaagcgatacaaaaaagactcggctcccaaaattggaaaaataaggcgaaaaaatataaataaacttcaatcgtcagtcgggccaccaatggttgtaaagaccaaaaataaacgtctgcgtgttgactcattaggaacctattaaaaaatg

SEQ ID NO: 103927 - DNA, 642 bp, Heterodera glycines
aaaagataaaatatgcgaaaatgcgaaagcgaaattttttctacaactttttaatagttaaaagcataaagcaaaaatcattttttaaattttattccaaatttaaaaatcaataaaaattagggggtgtgtattttacaaaatttttagccgttttcgccaaaaaattactatttttgttattttgttctctatttttcaaaatatggtaaaataggggtccggcggtgccggcaggcgccgccgggaaaatttttgaaaatttgattaaaatttgttgacagattttcactaaaaaatgatcaaattttgtgatttttatcatttttctaatgagaaataagagttttggggcgccgctgaaaacagtttttcatcaaattaccaaattttgcgattttgggccattttctaagaaaaaataggagttttgggggcgcggcggtgccgataggcgccgccggggaaaaaaattggaaattttgatcatttataaacagtttttcactgaaaattagccaatttataggtaaaattttgaaaaattttatgggaatttaatccaattcttaggggtgtaaaagtcgcatttcgcgccaaaaagcgaaatgcgaaaagcgaaatgcgaaacgccaaaaaatg

SEQ ID NO: 103928 - DNA, 778 bp, Heterodera glycines
tttttgcttaattacaaaaatttattattttttaactaataaaaatttttcctttttttcattggaataatacgataaaatcatttgatggacatatttatgatttgctgaataaatgattgaaaatgagaatgggatgggatgcatttttgtgatgattcaatgcgaaaacggattaattaatgcataaatattccaataaatagaaaataatatgttaatttaacaactaaataaatgaacaattttattataaatttatatgattttaaatatttttaaatcagttttaaaaaatggaagtcccggtcccgatcaaaaccgggacttaggtactcagttgtcccatttttttcagtaccaggtcccagtcccgttctactcttaaaactttgttcataaacaaccaaattttaattttttgcttctcaatttggctttaaaaatctaaattttatagcggttaaattgtcggaatttgcttaaattaaattgttttttagttgtatttggatttaaataatatccgtcctagctggtcactaattggatgcgcattttcttatggaatcatcgctacacagctgtaaatcaactcgtactacagcacatcaaaatcaaccgcctggaatacgctgatcaccacatgaaagctaagtgattgttaaatgtttaaaaaccgaatcattgtaaatatttgtatgaatttattgatttaattatgaagataatattttgtttgaaaaattactatattttttaatcaaattttagcatg

SEQ ID NO: 103929 - DNA, 1003 bp, Heterodera glycines
tagaaatgtttagaaaaattgaatttttagaattaaaattgtcggtgatttttatttgttaaaaatattgaaaaaataaaacgcaattctttgaacaataaaaaaaattgctttatatttatcatgggattaattatcaataaatattaaattttaaacaaacttcatttttacacgaaaatatatattaaacacaccgtttcagttttggcctcccagttccaaaaagatttgcatgtgtggctcagtggtttttgtaagatagtaaagggacaaagggtggtggttcgagtccgttgtgcaacatgaatatttttatttatttttgtccaaaatattaaaaaatgacgaattttgggaattatttttgaagggttttcccaaccaaattggacaatcatggtatcattcgaaagctcttgatgaggagaagctttttctaagcaaatgttaagcgatttaacgatttagaaaaaagataagagcgttcgaaaatttgttttttggataactttttagtaagccttatttttgcaaaaatctcctatattattcgatgcagaaaatttttctctatcggtatgcaaaatttaaagaacatctgtaagggagaaaaaaaagttctatagagcgaagtaaattcggttttctctattaacagagataaagaaatagtacgccaaaaaaaagagatgtttttttctctgcactctctatttattggttcatgtctcgttttttgaaacggtgtgtaaagtaatcaaaaaaaaatcatgatttttgatgattttaagccgaatattgcagccttgtgaaattaagatttttaacaaaagtttcaaaaaatttgtaagaaatacagtaattggggctgtacagtaatttaacggaatttcttatcctgtattaccattattggaagattaatataatcagaattttccgagaccaaaagcatttttatccctcccccctgtttaggccaattcttcctgacccaatg

SEQ ID NO: 103930 - DNA, 845 bp, Heterodera glycines
taatgatagcttctaaacacgttgagctttcgttgaaacaaattttgaagaaactaaatgacgaacaaaaaaattatggccattcccatttgaaattgtacgaactgccttgacaccgaaaatcccggtcccgtggcttttgaaaaatcattgattttatctaggatttttcgttaagtaattgatttttcaaacaaaaattaaagaaaattattcagacttctcgaggttttttgggtcgtttatcacgaatatggcatttattttggcttatttagaaccacggacccgaattcgaacaaaatatcggaaattaattaaaaaattcattttaacttctaaaatagattaaaacaagccaaaattaatcagaaaaccatcacctaaaaataatcattctgctcagattcgaacccgcccccgcggggacgggggcgggggtttgctttgaattaggtccaaaaatctcacaaaaaaatattttttaagaatgatttctttggctccacttcctttatttgttgatcgcctcgatactatttcttttgacataaattgcacagatttcgactaaaaagtaaccaaaatttaggggttggggtcatttccctaccgccaattccctaccagccatttccctaccgccatttccctactaaggcatttgggccatttccctaccaaaaatttggcgctatattaaaagtgggtctttatgaaacaaaaggggggacccttttgttttgcaaaatttttttaagataaaaaaccatgataattttttatccggagttttaaaggtcgctaatcacgaatctgacatgtattttattaggttcatcatg

SEQ ID NO: 103931 - DNA, 310 bp, Heterodera glycines
accaagcctaaggaggcctctaaaaattttttgaaatttcaattaatcactatttgggtattagaatttttcagttttgacatttttaggcccgctggtccatcattcattatattttcaaacttggaaaatttttggcttttttgtcagtctaatgaaattttttgaaaattttcatctgctgggagccctggcctaatgccaaatttgtaccattagtgaatatttaagcctcgtagcctcgctttggcataatttgcacaaaattgacccttacaaattagggcctacccctctctcattatcaatg

SEQ ID NO: 103932 - DNA, 195 bp, Heterodera glycines
  unsure (1)..(195): unsure at all n locations
tatgaccaaagaaagtggcgatggacgcttaatgtgcatnagtgccaaaagcatccctnntagtacatcgaccacagtgtcgtcgcatttctccgttccaataagcaagcttttgaccgaggcaccaacttggatttgtcaataatacattccatcgacgaaactgctaaacacaagcagatttgggatgttatg

SEQ ID NO: 103933 - DNA, 617 bp, Heterodera glycines
tccttttattgactccctttccctcaccaaatcactcacccggcttcagaaaggcgaacaaacacccgccaccgccggcaccggcgggaaaagtttccggcggtacagtcggtccatcctccaccaaaaaattttggaaaaatatgtaatgcggtaaaaaaaattgaaaatttgttagtagatctcacaaattaaggagttttagaaaattttaaatttagaatttttgatagttttaaaaaaaaggttgattggttaaattttgagatgatttttgttttctaaattgaaggcaaacaattttattcccgccccgttttattccggcagtttgaaatacaaattccgcccggcccgattatgttccgtaaaaatacgaaccaaaaatttctgattaattaataattaggtgttcgttaaaagagaattctcgtctcttttcttgacttttagcgcgtctcgttctcgtttttttctacattttctcttgtcttgtattttctttttcttttctcaatatccctgttgttagttttctcatatttatttttcattgaaaccaaagcattgtctaaaattggcttgtataataatccttttatttagcggcaataatg

SEQ ID NO: 103934 - DNA, 334 bp, Heterodera glycines
ttattttgattaaaattttttcgacaaatgctcctcccactccacgacaacaaatatcttaattaatatattaaaataatttaataaaagtattgactaggaatcaaccatctttgaaaaagcttgctggacttgaccttttcatgcttgacttggtcctgcaggaaaacctaggcttaagaaaaacgagagaaaccaacagggcctgggccaggcttgccaaagcctctatcctaacatttagcttgcttttcttggaatacggtttaaaactgacataaaaaagtcttttttttcgaaattttaaaaaatatgtccataatctttcgttatg

SEQ ID NO: 103935 - DNA, 229 bp, Heterodera glycines
ttaaggggttaatgagggataatgaggggagggagaggcgggacaaaaccaataaaaatgatagagacgataagtattatggaatggaaaataaaacagaatcaaagacaagaacggcggaccatttgcacttcttaaggagcgaagaaattccgtgctaatgattgggttaactttgtttaatggcaccgatggaaaagtgatttggtaagtgatttgtgggcaaatg

SEQ ID NO: 103936 - DNA, 164 bp, Heterodera glycines
ttttggaaaaaattggtgaaatgaatttgagttttggccagatgaaatatgttggttgggagtgggtgtgcctcctcggcaaagtttggagtaggcgtggcatcccttttccggatataaaagtgaaacccatccacatctgactttcattttctcctgcaatg

SEQ ID NO: 103937 - DNA, 590 bp, Heterodera glycines
ggaggacaacggacagtagcagaagagccacccggaagcggattcgtgttgagtatcctattgtatatatgcatatgtatttttgtatcatgttttgtgccgcatttatgatcatctccacacatttgatgtacctattgatgtatttgtatgtgctatgtatatttcgttcacatatgtctgaatgaattgtgtttaaagaatgaaagtgttcttgtgactataaataagacgaattttgagtaaaaattgagttaaattattttctatatacagtgtgtaaatttagaatagggacgactgttttttcgggagtttgacttgtcggaaaaccgatttcgaggcccccacaaaaaagaaatgtgaaaaatgaattttcataaaaattcttcagtttttcaactttgtctgcggcgattgttggcttttggtgttcgattttcttgcgcctgctcagctcggcctcgaaattgcactgatcaaccgccgtttttgacttttacgtggacgaacacttcaaaacgcgcaaatggaaattgggcggaatacgaatttggcacaaaattggagagaatggcaccaaacaaatg

SEQ ID NO: 103938 - DNA, 440 bp, Heterodera glycines
ttgttgggatgctatcgtggccgagctttcgacatattgaaacttttaccccctggaggtgtcgggttttcggtgaaattcggcaacactagttaccgggtttccgtttacgttttgtcggaaaatcgcttttttcatcatatttatgccggaatgttcagcttagtgggcgaggctctccagctgggcccctaccatgaccaacgggtggtggacgtggcacgacgcgagttggccgaggcgtaccaattggacgagcgcagcgtaagccgatggcattgaaattttcctagggctcactcaagttacgagacattgagaattgatcccccgagacttgagaaaacccgaaactttctcatcgatattcgtgttcgagaacagaacacaatcatttttatttgccgcaacaaaatgaatgatttttgtcgcgtcagatg

SEQ ID NO: 103939 - DNA, 148 bp, Heterodera glycines
atgtttatgtaaatcccataagttgtcctatatgtaaacgagttgagtttaagggttaattctgtctccaacagcgcaatccaaggcaattaccttgacgagggagtcctcggagtgaaaggtaatgtttattatccaaataattatg

SEQ ID NO: 103940 - DNA, 966 bp, Heterodera glycines
atggtgtaaattattagaagagatgatgtaaccgtaccacttgattggttggctcattcacatacataactaataattatatttactttcaaaatgtaatttttattatattatcttacattaaaaatatctatttttatttatgataatggttcttttgtatattataaataagaatatacatatataaatttatttcataaaggtatttgtctattttagagctaatatcattctgcatatctttttttaaacaattttacaatctcatgagttgtcttttttattctttttttgcttttttatttatattttttaaagaaatataactgcttaaaataaatcatttaaaaattaggatagtattgcttttaaatgaggacattctgttgcaaatttttattttatacattaatcctttttgaaggagtattttattaatattttttaaatttaaattaaactattttaatatctttcaaaaaactcttattattcatttaaattgataataattttttggttgtttataattatatgtaattttttatatattaaaatttaaataaaccattattttatggcctctttttattttggcattttttttcttgtattgagagggtccaaagatttattaaatttcttccatattttatttaatctgttttttttcaaaataacttaatattttattaaagtgtcgaatatagttttgtcattgtggaccacgagtgctgcgaggctaaagctgtacgagtacatggagcaggtctacaagaaggaggggtgtaaactgctctattgtgacacaggtgaaaaggaataaaaagaaaataaacaccaaaattttagattctctagcttttgctcatcggaaggggcgctgtccgttggtggaggggaaatttttggggtaaaacataatttttgaaaattttctataaacatttgtttagtgagatg

SEQ ID NO: 103941 - DNA, 344 bp, Heterodera glycines
aacactgtgctaatttgtgagtttaaatgaataaatttaaatatggtacagaaatattatgccatagggacggacatttcgcaaaattcaaaaaaaaatttctgcattaaattttcgaaaatctgcctgtttataaaagttgacgaccatcaaatgggtggctttcaggctggaaaaaaggagatattaaaaaagaaatgtaaatatttgtaaatttcttaaaatttcgcaaattatgcctaattttgctgcagaacattgtgaaaataatgccccgagttaggcaaatacgattggcgattcatgcatgtttttaatccatacaggcacagtctctagcaatg

SEQ ID NO: 103942 - DNA, 92 bp, Heterodera glycines
cagtacggtatcattgccatgaaggtcaaattaaaattagaaaattaatacatttttaaaatttatttcagagaaaaattcttagccaaatg

SEQ ID NO: 103943 - DNA, 316 bp, Heterodera glycines
ataaatattctaaatatgaaaaccaaaataagactaaaactgattatttaaaaaaaatagtaaaaaataaagggattaaaagtagagtgccacgggaccgggacctggtagcggacaactgagtaccaaggtctcggttttgaccgggaccgggactagtcccggttttcccagccaaaaattcccggtttttcaacccgaaaaggtcacggtcccgggtttgcccaaaattcccggtcccgtggcactctaattaaaagggattttttggaaaaatgtccaaataagcacaaaaaagcataaatcgcgaaatatg

SEQ ID NO: 103944 - DNA, 1003 bp, Heterodera glycines
caatagaataaaatacataaataaaataaaaatgcaaattaatataatttaattgctaaaaaatgctagaaaatcgaaaaactgaactgacaaaaaaatcggacccaaaaatggtcgtagtttaaaaaaaaaatttaatatccacaaaatttacaaaaatgattagtggtactgtatttaaaaaaacagattctacggaaaatttaaatatgctgtatcgggaacactaaatttcagtaactaccgtttaagcctaaacaatcaaattatcacactaccgtatatctctcattttgaaaaatactatctttagcattacaatatgttgcgatcaaatcttctatcgcccatgatgacatcacaaattccatttttagtagcgccgattttccgttattttcccttcgacgcacacattttgttattttgtatatttatttttgcatttttttttgcgtcatcacaacgccacactttcgttgttcccactccgcccgcgcggggactcgtttttctgatcggaaaaatgagacaattcctgcgactctgatcggacacaattaaaaatttgttcttcatccgtctgattggccgacgaatttttcattgtgtccactcactgtccgtcctccatcagttactctaccagcgaaccacacactttccatggacgaacaataacaaattaattggccataattaggtggacgtcactggacaaaaaattgggagtgtgtcccgatcggtataaattgggacgaaatgtgacgatagaacagaaccacaaacccacaaaaatttggaatattaaataaatttaaatatatttatttacccccccccctcaaaaataataataaataaaaatatattttaaataattttaaatttagaaaattaaaaaaacaaaatttaaaaaataaaatgcaattgctcttcacattcccaattctgttggtcattctgtttgcaaacattgaccagaaccaacattttgctgatg

SEQ ID NO: 103945 - DNA, 191 bp, Heterodera glycines
attataattaaatttataccattatatttcaagataaatttaaaaagaacaaataaaaatttgtcatttttgttctaattttttgcataaatatcttttgtcatttatggcaaaaaatgcaaaaaaaagggtaaacaaaaggaatggcatgaaatttcatactaaaattgaaaaaagaataaaataaaatg

SEQ ID NO: 103946 - DNA, 55 bp, Heterodera glycines
ggtgattaatttttattattttaaataattttattttttacaatattttaaaatg

SEQ ID NO: 103947 - DNA, 872 bp, Heterodera glycines
ccattttgtacgatgcttttttagtcaacctcccccccccccccaccccctccccattcggattcttatacatatataaacacaaacacacacataatacaccctacacccccacccccactgactcatcctctaatgttactttgaaaaaaggggagaaaaaagagtgggggggggaatgagtgaggttgaggttgaatggcgaattttttttttcatagatgaaacatttttttaactacatataaaattaaccgttttaaaaagaaattgctatgtaaaaaagagatgcatttggcagcaaatttgtcttcgttttatgtttgaattttttttttctaaaaataaaatttagtttttggcaaattgtggcactcaacaggggtggcgcggaatttcgattcccaacaagttttgggcattggatcagagatttccgagaaattttgggacctcggaattatatatgtattctccattcttcctctttatttaattatttgacagtaacacttttcgctcttccctatcaattaccaaataaacgctaatcacttttttacgtagaaccaaaatgtcccctccgttccatcaatccaagttctcgtgatcacaataattctatgtattcattcgtcatttattcgggaatgaaactgtccacttcgtccctattttctcccccgcaatattacacatttttaaatttctgaaattttgtttgtttaattcaaattttaatttcctcgtgtatttagaggccagagatacctacaattataatctaggccattctatagcatatatacatatatataattgtatatacctaattatcttcaacacgcttttgttgcccttgccagtaaatg

SEQ ID NO: 103948 - DNA, 151 bp, Heterodera glycines
tgtatgttggggcgcacaaaggtagtcactgtaactgtattacagtattcttagattatattttttatttgacataaattgcgcggattttgttggagaagggagcaaaagtgcggagcaagaacaatgctggatggagcgctataaaatg

SEQ ID NO: 103949 - DNA, 862 bp, Heterodera glycines
tattaacttagcgccaaaatgtttgtgattttgacccataattataataattgtttacttttgttttcacatgcgacaattttcaaaaattaatctgagaatatatgcttgataataatgaaaacggattgtgattatgaaaaaactgtgtgaatttgtttaaaaaaaatttatcaggcaaattgtgttggccatcaaattttggtaagtaaagcctacaaatttaatttttttgagttattaatttcattcatattgcaaaaaaatttacctattttttcttacaaaaatggacgacctaaaaatacggtgggggtcgtttgagtgtggccattttctctcttttgtacggtgttatggcgttactcaaaaaagcatcaaacaaattttttttttttttttgcccataactttgctaaaaacaacaaatttttcaacttaatatcaattgatagcactcagtgttctctattagcctctaataaatttcaaaaaattttaatagtttcagaaagttgtgtttataattaaatattacttttagtcaaaattttccatttgatggtttttgagttacaactcaacacttttcttcccaatggttcgcttttactgtcatttacactctttccatttacctatttatctatccattggtttcctttttcaatgatttcttttgcataaaaacgttactactgaatgataatttagactctatataaatgcgaactggatttttttctggagcagcaacaacaaattatttgaaaggaaacagaacaaagcgtgaactttggctaggccgaagcttatgcttgcttaggcctgggcttacgcttaggctttatcttgcaaaatg

SEQ ID NO: 103950 - DNA, 201 bp, Heterodera glycines
gcgctcaaattcatggattggtacgccaaaaagaacggggtgagcatccagacggcacactcgccaggcggagagaaaaaaattggccagtacactgtggacggatacatcgcggcgaccgacaccgtgattgaggtcaacggctgccattggcacgcgcacgacaatccacgtcaccgttttcagccccaaacaatgatg

SEQ ID NO: 103951 - DNA, 99 bp, Heterodera glycines
ggtatttccttgataatatttcaccttcatattttgggtactttttgcttttaagttcgtactgtttttgcgaatgtggctacaaaatacgacctgatg

SEQ ID NO: 103952 - DNA, 571 bp, Heterodera glycines
aaatgccgtgatggttggacgcataaatttaaagaagtccaaaaagcaacagtttcaattcacaagtgatttacaagggattacagctttattgtccgaatacattcatacaatatatacatatttatgtacacataatttgggtgttgcattgaaattcgttttgtgaaatttttaattcgggcggcttacaggtcggccagcgcaacatttggatggtccgacattgctcaattgtcgtcgttttcgttgtacacagagaagggatgattgatgaagatgaattgccgataattaatgaatgatgaaaataatggcaaccaaatgaattttttgtgccttttatatatgaatttatccgaaaaatttgactcttccgactaaaaaatttgctatttaaggcccacacattttgcttatccacgttcattccgttcattcattccatccacttaattattcgtcctcctccaccgccacttaaatcgtcagtttatttaggtaattaattgttttgttatgtgcattttcattgtgctaattgccccccccccccatttttcagcgaatg

SEQ ID NO: 103953 - DNA, 157 bp, Heterodera glycines
gttaaaaaattctttggaattactaacggaagtacaaaaatatttggtcaaaattcgggcaataaaaacataaaagtttagcctcttttataaattattattttcgatacttttttttgccatgggaattattgtaaaagattttcattaagaaatg

SEQ ID NO: 103954 - DNA, 1003 bp, Heterodera glycines
ttcgcctaacaagaaaaagcattgaaacgaaaggacaattcattgtccagcagttgttttttcttttcaattcacttcatatgtttgtttgtttctcatataaaacgcaatcgaacgaagcctaatggaatcaacaatagcaaagcaatttttcaccaaattccttaaagtttcaaaaaaaagaattataattttattatatgcatttaaaaactttttccataacattctttagcgataaatattaaatatacagtgtgacaaataagtcttgcaccacctatgcttttgatgtaacttttaaaaattcaactaaaaatgaccaaaatatattcaaaatatgcacaacagattagggaatattgctacataatagtttatcccatctttcgagagtcataacatagagacaaaaatgtgccaaaaaaattttcaggtggcacgcaactcccgaatcaatattttggcataatcctagttaatttcttctatttgtctacagtgaatccatcttcattttatgcacaaaaatttccaaactaactaatttttttatcaatttcgcccgcacaattgccatcaagaaaataaataaatatattttggagacgaatttttgagaaattttcctttcttaggggtatatttttgaaaaattttggtcaattttaggaatttatttttttgaaatttttgggaccgattcttagggggtgtattttttgtttttattgcatttttgctataaatttctggaaaaaggccaaaataggtgctaaagttcgaaaaatgccaaaataggtgctaccccccgttttaggtgtttttaggtgctaaaaagttgctctaaatcaacaattgttcggagaaaagtgtttttcgtgcttctctcatcaagtactagccgtaaaaaataggtaaaaacttaaaaatccggtctctagtaatcaccatcgttttcatgcttatttttaaagaactaatgtttttttagatgaaaatg

SEQ ID NO: 103955 - DNA, 69 bp, Heterodera glycines
aaggagacaacacgtcaattgagccccgtttccattttacccattcttaaagcgttgaatgccaaaatg

SEQ ID NO: 103956 - DNA, 312 bp, Heterodera glycines
ttccgcccactgttcttcgcattggtgtcgcttgtcctttttggcctaggcatagtggcaatgctttgctctgtgtacttatataaagtgagcgagcgtaacgcgtggccacaaaaattctttcccggcaaaattgtgaccaaaaaattgcttttaaatcaaaatccgatggattttttgatcaaattgagatttggcttttgtcactgttgagtttctgtgttcgcgagtttgtcaaaatatgtttcattaacaattacgtgattatgtcatttaccttatttcgttttcagttcaccgtctattttcatg

SEQ ID NO: 103957 - DNA, 1003 bp, Heterodera glycines
ggaattttcgatatcgagcatcactaaatattaaccaagctcccttatccccgtcgggtaactcttgttggtgagcggggtccgtcagaatgacaagtcggggatggttctaggtcgtttctaaaatccggtattttagcgaattttcgacaaaacatgccataactttgcttaagcgcaatcaaattttcccggcagcgccaatcggcaccgccggacgtgaaattctgttaataaaatgcatttaaattttcaaattttttcactgcggcgcctaccgacatcgccggcccgctgttcccaaaaaagcgtgccgcaaatttttattcatttttttttaattggaataaatttttgcaaaattgctgattttggattctaaatgctgatattgaagatttgcactaagtagcactgtttttaattgttttaacaatttaaaacgtcgttttttcaaaaaaaatcgtaattttggggcaaaatcttagttttaacctcgtttgtccctattttgaaaatacatttttggagccctgcgtaataaacttgctggattcgtctggacaattcactttattttaaaatcagcaacaacaacaacaaaaaaggaggagaggtcggcgcaaaaacaaaaaccaaataaaactatgaaagtgcactgacaaacgaatggaataagcctaatattttttagaaaaaaaaaattaaaaattgtcgtcgtaaaaatttttgaaaattgctgaaaattatttatataatatttgtacaatttttaagagcctgttacactttgttcgtgcaccacaaagagtctttaaaatggtttcacgcatttacattccgaaaaccacttcaaaaaactttgacaatatataaaagataataattaaagaatatttaattaattctcaaaaatgaatttaattttttttttacattaattcatttttgaacatttaatctgattttcaatgcttttattcaggattttttttcgggaatg

SEQ ID NO: 103958 - DNA, 1003 bp, Heterodera glycines
tttgtttatagaaaaaaataataataaattaaaagaaatgatcttttaacgaacttttctcataatcctgggaattttcttgctacttttaatatttttaagtgactatgtgccgtgaaatttcggtgtaagaaacgaactgcacgacctggaaaataatcaacattgatcagaaattgaacaataaataatacaagtttatttaaataatttctataaaattaaactagacacattaatttattaaataattaataataaattcaaaatataatagtatatattaataggtttattttgataaatttaaagtaggatattaaaatttaaacattctcgctgatcacgtccgcagtggaataaatataaattgtgtaaagaaatcagtgtacaaaagtgtaaagaattaaacaatcattgagtaattattcactattaaaataactgttaatataattatattaatttaaaaatctacaaatatcaaaaagtaaaacaaattttatttaaaaaactagttaataaatattcataaagacattcttaagatttttacaatataaattcggattgagaaataaaaaaaaccaaaatttactttaatataatattcaaaaaccaaaaataattttaggttaaatcaatttgaacctaaaagatcaaaaaagtttctcgtaattaaactaatttctttttcctaaaataacaatgccacagatgaaaccattaattctattatacaattaaagaattaaattttgaagtttaataaatatccgttgataaatatttgccaagagattgagcatcttaattcgaccgtgaagaaaaaattaataatttaaataataaaatgaaataaaaacaaatcctctttatgtttaataaaagattatattttttatttggcaaacggtagtccaaagaaaattaaaattctttccattgcattatattttttcaagacttggcgtcgagaatttctggtcaaaaacaatgcatg

SEQ ID NO: 103959 - DNA, 56 bp, Heterodera glycines
tcttcaaaattaacaacaacgacaactattgcctcttttatgctctggaattaatg

SEQ ID NO: 103960 - DNA, 582 bp, Heterodera glycines
  unsure (1)..(582): unsure at all n locations
ggttatggtgtaaatatgattttataataggggccgaaatttcactttttcacccagcgacacctaaaccaacaattcatcttatgtcaaaatcgcaaattttgtcattgtgtaaatctgtaaaaaattgcactcaaatttcaaaattttcccggcggcgcctacgagcacagccggagaaaaacccgttgataaatcaacaaaaaatttacgatggtgtccagggatggcgttcctaggaccctcaaattttaggaaatcagaattccgtgccatcncaggtggtgtctatcggcatcaccttacggttccttaaaaatttttacgacgaagcgcaaaaaaaaagtaaaaagttttttggagattttttaatttctcgaaatttttcgaaatttccaaaatccctgggatgccgcagattttaaatgcgggacttgcgggattaatctcacgggatcacgtcccgctaaaaatttctgagttccaatcacgcagcgggatccgcaaacttgaatttccagtctctaatatttataatttccctcttgaaagattattttattttattatatttttaagatg

SEQ ID NO: 103961 - DNA, 538 bp, Heterodera glycines
acccatagtgaatatagagaccggaaatttcaaatttgcggatcctgttgcaggattggaattcaaaattttttacaggacaggatccggcaggattaatcctgcaaatcctgcatttaaaatctgcaggatcctgcgcaggattgcggattttaggaaatttaaaaaaattctgtattaataaaagtctttcaaagtataaaaaagtattcaatatatttttaaaccaaaaaatgatgaagatgaaaaataaataacgtttttttgcttacactccaagcaatcgactgaatcttctttaatgcgtttaaaaagaccgatttgccaaattgggtggctcataataatagcttaaattaaagtaaaataatttttatttaaatttctttgcaaaaaagccataatccattatgtatagggatgggatttttaggcacaaaaaatcgcgaaataggcacttaaaaaggcagtaaatcctaaaataggcacgaaaatagtaaaaaaaatttggttctagtcgggttttacgcgtcccatg

SEQ ID NO: 103962 - DNA, 1003 bp, Heterodera glycines
aatttttttccgaaatcctttcgtcttgtcactgttagaatcttaatattttcagaatcgctacgtacagttaaaatttcaactcgatcggttcatgggaactaacaaaaaataaggtgtccttatattaatgtaacacattaatcacttccatttttcttttagatattctttttaaatgaaataataaaattttgaacaaataaaaaaattgatcgaaaaatttgctgaaaattaatttaaaaaaatttatggaattaattagaaaaaaatagtattaaattaatcatatttagtattatttaaattgaaataagaatccgccgctggtcgcaatgttcgaaaatggtcccttaataaactgaccgcaaatgaccgattttcatcaggcaggtcatattataatgtcacttcccccccccccctccaattatttgtcctttttttgcataaataccctttcttcccattcattttgtcttttgaccatacttttccctctccgcttctgtgacctttcggcgtaacagaagcacatctccacacattccaattcatccatcgccggagggaatcgggggcaaatcccgtgggatcatcggatgaaagggcggaggatggacgatggatgagtctccctttcatccccctcccctttccttcctttcttttagtcatacgtttcttcccctccggcgctgaccatcccccaacatattttgcttttgctttcacctccctctctctctactctctccctccctctcccttttcacactgtctctccaatgcgcaattcgtccgattcgatcctttgtcgtctttcgctcacgacgtcaccgatcgaatgaccagcaaatttccgttgatttctcgaagcatgttcaattcatgctcagataaaaaatgggaaaatgaaattggagattttcttccctttgtgttgcgcattctgtccacttattagctaaaattatcccatttagccttacatcgcaaaatg

SEQ ID NO: 103963 - DNA, 912 bp, Heterodera glycines
ttgtctccaatcactgctcgtctccattgcgataattcaattagaaattgtttcggcagtttgttcgatgatcttcaaaattcttgtgaaggtttcggctcttccgtcgttcttgtcggttgtccgaaaatggagaacatctgtcattctcatcatgtttcgtttagggccattacggtttctttttggttcgtacatttcggtcagatgaaatcgacttcgccattgttatgcaaattttctttgctgacaaatcgtctcttttcgcttcaaaatctcatcaaactttttctttgaatgggacgttcgccagtgccaataaattgaaggacggagaaaaggtgggcgaaataaaaaatgagaagattagtctgtccaaatgtcaagtggaaaactagcgggcttagattagaccaataaagggtggttttgagacttggaacgtaatttgcctatttttgtttattttcagtttttttccttgaatattttttgaattagtgcaaaaatcccgactgaataacgaaatcccggttccggactcgaatctcggtagctcaatggtcacggaagcgtggagacgcgggttcgacttccatccaatgaccaacattttacccatttcttgtttgttaaaatgtaaaagcatagcttaaggtatttttacatccgctctctgaaaatgctttaaatcggtgtgaatcagttgtgattaatcctttggataacggcgactgggaaaaaattgtaagttttttggaaatttcaaaatgtttctatgaaaaggggaattatatgccttcatttgcagctatttaaaggtgtcttcaaccgaacaaatagaagaactcctcctcggacagctccgcgtaattcagacgaatatgcgaatttgtgtccattttaaaaatg

SEQ ID NO: 103964 - DNA, 97 bp, Heterodera glycines
acttcggcacacggccgatctgttgcgacaacagtacggcgcgttggttttggtgataaccgccggcggtctcgcgacggcggaggaccgcgcaatg

SEQ ID NO: 103965 - DNA, 500 bp, Heterodera glycines
cgaataagaaaatcaatttcagttaaatttcatcatttgcctttacaggtttaaaaacatgtttttcgtgcgtttcaggcttcccgcattccaggaaaaaaatatgcatgtgcatatttttggcatccctagtgatcaacaacaccgaaaactcccgggaatatacctacctattcacatttttatgtaacaatttttttttgcaaaacaaacgaggaatcgttgcgttgaaatcgttgaaatttcactctctgcaaattgcatgaaaatggcatttttggtgcatatgtaggtaaatgtgtatttctacggtcctcataatcacaatgtgaattcgtcccttaaactgaatgcagcgcactaaaattgtcgcgctaaccccccccccccccccaccctaccgcatcccccactcacgctaaaatattaatcaaaaaaacgcgcacaacaaaaattgggaaacccctgcgctcaaaattcatcacatttacagatttatg

SEQ ID NO: 103966 - DNA, 132 bp, Heterodera glycines
gacattttccatacatttggacctgttaaaaaaatataaatttatcacattttgcgtgaataatgcacaattatggacatgaaacttttttattggaatgtaatttcgaaattaaatgctctttgaaagatg

SEQ ID NO: 103967 - DNA, 833 bp, Heterodera glycines
aaatggattggcaaatttaataatataaacactgatttgtttttcttaatttttttatctccaaaatatcaaacaaaggattatggacggtaaattactcggaaatgtgagaaaaagcactgatttttctttttgcaaaaaagaaataaaagtcgaaaaataatttatatattaaaaatagtaaaatttttgattttattttatacaaaacaaacaataattaccaatgaatgcgagctgctgaaaaaaagtgatatttattgaaaaatttgtggcgacggacaaaaagtaatttcctattttgaattgtattcttttgtacaataaaatgtattgcaaaagatttaacaaaaaaaaagtaaaaaaagagagttttctttttgaaaaatataaataattttactttatagtttttatagtaaaaaatccctttttaaaaagtataaaaaacaattaaaaatattttctcaaaaaaatatttttaaaataatttaaaatgttctaaaacagaacaataacatattattattataaaatttttggcctttttcggccgaagacatttttaacaagaaagaatacaattatacaaaaaaatatttaaagaatatttattattaaaattttttttttacaaaatagcgaagtctgtaaattcacgtgaaagcaaataagaaaatccatcaatttccgcaaaaaaagattttttgatgtttttgtctataaaagccacgtctatgaaggaaataagaaaaaaggatggatatttaagcgaacagaaaaactaacaatattatttaaaatatttttattcattaaataattttaccatg

SEQ ID NO: 103968 - DNA, 408 bp, Heterodera glycines
tttttttttttgctttgcccattgaatttttgcgggggacggaatttttgacttttgctgctgaccaaaaagaaaaaatttaaaaaaaaaaattcatttttgcaaattttccaattttcattgattattccttaaaatttaatccgacaattaaccaaatttgcccgaagcaaaatagtgattgcatggcattaaatgttaaagattattccaccctttcctttctttcaattacttttgatgaaataatataactggtgaacaattggagacaattaaaaatcaattcatttgttcctaaatgacatcaattgattttctttagcattttaataaagtttaaattaaatatattaatttattttatatgaccaccataacaaaaagtgaaaagcacaaaacaaaatg

SEQ ID NO: 103969 - DNA, 287 bp, Heterodera glycines
tcacggccattaattttgggctccaagcgcaaataagtttattatttacttagtaatcagaacgccaaaactgcaaaacttaaaatttattggggattttcccttgtaaaaatgcaagagccgatctcgagttagaaaagaaactttcaaaaaacaaaagagaattcgatagaaaagaccaaaaaattcacttaggcaaaatttcaataaaattggtcaataggaaaaaaattttttcaaggacaacaaaatcaaatttatttgcaacatttttagcataaaaaatg

SEQ ID NO: 103970 - DNA, 482 bp, Heterodera glycines
aagagcagtttatagcaagattttggtgaaaatgcttccaaattgagtacatgcacggcacatacagaatctatggcaatttttggtattttattgttatgttaccagaaatgtgtcggaaggtcgtttccaatttctagtttcctgcatttgggtcggaaatccgatttctaattgtcgaatttatcaaggcaaagtcttcaattttcggcaatttgttggcattggcatgtttccaaaattttgggccgtctgaattccgattgccgaattttttgagaaaaattggaaattttcgacaatttattggaaattggcaaaatcacaactaaactttcaaattttttatcggcggtgcttttcggcgccatgaccaaaatgccaattttaacattgttgcagttgattactcacataataaatggcgcacagtacgcatttggcaattccgccgaccacaaattgccgtcgtcgctccaatg

SEQ ID NO: 103971 - DNA, 139 bp, Heterodera glycines
ccattacggtggagagggtgaagattatggcaatgatttcacaagcttccgccgcctgtcgactcgaacgaaaaaggtgatcactgatcatgatcagggaagaagagatttgagaccgttggcaaaaacgatcaaaatg

SEQ ID NO: 103972 - DNA, 157 bp, Heterodera glycines
aaataataaatttgttaaagatttgacgacaatagggtagagactaatggaaattgggcattgcgccagagtttcatattttagtaaaattttaaaaacttcggtttgaataagttcggttaacaatcatttccaactgtttttgctcgtttagatg

SEQ ID NO: 103973 - DNA, 1003 bp, Heterodera glycines
ccccaaatgatggcatagaggggcagggcgatttctgctgttttcctcttttttcaatttgggatgccattgaaaattcaattaaattcgcttaaaaaatttaaaatagaaaatttaaaatcggaaaccggaccagtgatgccatggaatttggttcactgtttaaattcacgatttgaaaatatcttttggcgccatgaaaacattttgccaaattaggtagtggagagagagatttagatgaattctgccgatgacaaaaaatgaataaaagtgtatcttgaaaaattgggccctcctaacccattgaaacatttttattcgtttattattaatttattaaataacgcaaaatggaaaaaaatgcatttgccacattttttccattacttctttgaaatttgcccctatttggcactcgaaatcgcatctgtatgttgccagttagagcacatcttttgtatcagtcacagattaaacataaatgcataagccatttggtggtcattaaaaagacataaaagtttcgtcggatgcaagagcagaggggcagaaaactttttcacagattttgagacgatttttctataaaaaaattacccaacttcgcctagggcaaaagaaatggacaattaattggtcagtcaaatcggcaaaaattgatgaacaaagggaagggcacaaaacgttgacatttgctacctgcaaaaaataaattaaaaaatgtttatattttaaaataaaatttcagaatctcttcaaagtttatgtaatacattgttgtaatgtaattttattattctttcttaatgaagtgattattaaaattttatgttaaagttttattgctgctaatttttgccggttttcggttctgtttcgattcggttaaaccaccgtccactaccgtagttgctagtgaagtagtagacaattttatttcctttaatttcctattttttgatttaggataaggcaaattgtgctaattgcctcaaaaatg

SEQ ID NO: 103974 - DNA, 191 bp, Heterodera glycines
ctttgatggccgggtggtgctctctctctaatgaattagtcttttttgctactgctcttaatgtgttcggcacttcgtttcctcctatttggcttttcgaccttttcatttgaatttcgccccccccccctcctttaaaaaatacaattagttaattacttcttagggttcgtcctacgttagctcaaatg

SEQ ID NO: 103975 - DNA, 122 bp, Heterodera glycines
tcaattttgacggtcatttatttgattggtcgtctcctttgtcaccaaattcaattgattttgttgaaaaggtataaaattcgataaaaattaaattaattaattaatattttttcagtatg

SEQ ID NO: 103976 - DNA, 55 bp, Heterodera glycines
  unsure (1)..(55): unsure at all n locations
tatgcgtgaataagagctgtgaactaattttgggaaactgacgntttcaaagatg

SEQ ID NO: 103977 - DNA, 829 bp, Heterodera glycines
tctcaattcaaaagaaatccttttttgaaaaaatgataattgtttaattaaatacagttatttggattagcatttatttgtcggtatcccttttcctgggctactagtggcctaaaacgcacgaaaaacaggtttttttttgtggttgttaagctacttttcgaataattagggcctattttctaggttattatttttagagcctaaaattatacaaattttgaaaaaatatattttgacatatttggcgttttgccctgctaagaaaatgcaaatgcaataaaaacaaccgtcattttacaccccctaaatttgaggctttttagttcctattttccattttttagtgcctatttgggagtttttagagcctaaaatattagcactagcccagactactttcagccgcctgggtgttttcattataaatttttgaaattcttcaaacttctgatgaagttttgtttgtcttacatctaattaattggacgccaaagtcgataggatgtttaagggcaacccttggaagctttctttatttagcctaatttgatataacgaatatcaatggaacatggaagcttgccgcttcaactcattattttattcgttttaacgttgcaaatttcaactcagtcgccagaaatttcagtgccttctgatgttcaaattttgtcagcagtccgaaacgtagatttgaccactcaaattgtcaaggcattttgttattaaaaaatatttaaaattttatatattaattcaggttaaaactgactttgagttgaaaaatggaagaaacgaggaattgagcagttttgtacatgccatg

SEQ ID NO: 103978 - DNA, 114 bp, Heterodera glycines
atgggaaatgaatgaatgaatttgaaaataaatgacgaggcttgcaattaatgtgccgtaccatttttggcacaataaaaacacagaactgaaggtttccggcgtgtacacatg

SEQ ID NO: 103979 - DNA, 976 bp, Heterodera glycines
tttttagggatgcattttcaaattttttttttttcacaaaaaattttatgaattctcaaaatatgaaaaaaaatgaaaatgtgtacgaaaaattgcaatttttttggggaatctaaaaattttccttaaaaaatcttcaaaaattgcaaaatatgtacaaaaaatgcgaaaaagtccaaaatatgtataaaaatatgtacatatgtaatatgtagaaaaactccgaaatatgtaaaaatatgtaaataaaagtcccgatttttgttcgcaaacacaaaaaagaaagtgtttttcctactaattaggctatggagaatccaggaaaaaatatgtatttacataaaattagcagccctagttatgggtgtcgaagcgatggcatttttggcagcagtggtcccaatcggccatatacaaagccaactccgccggcaatgttatcactggcattttccactagacgtggtcagatgtggtgcttatttggagcattttcacgaagaatggacgacgaacgagcaattttttttactaaataattaactttattatttgttttcaagtgcaaaaaattatagtaaaataagggcgtttttttaaatataagataaccaaaaaaatttttaaaaattcatccatttaagcaataatcaacattaatcgaaatcacttattttcaaaatttttaaagaaaaatgagaaaaatcaattatttaatattttagtttataaaattccttacttttaatgtgagctctttttggagcattttgtcaaattcgttctttttcagaggacctgactggatttttgaaaattaagtttcttctacaattctttgtctgcgaaatctgtttccttaaagtcaagagttttcttagagaattgccgggcttaataaaattctttcttttcatttacttctaaaacaaaataaaaatattatcaaattttaggcacttttaaaaaaaccatg

SEQ ID NO: 103980 - DNA, 531 bp, Heterodera glycines
ttattaatgattaattgtttttctcttccatcggaaattctactttttttatctacaattttccatttattattattcagaaaccaaaaattgagatttaaatttaaaatcatagacttgcaaaaatttctgaatcttcatacatcttatttttagtgaggaaatttttaagtaattaatcaaatccatttttgcaaaataatttagaaatatcattatttatttatttataaattattatttttctttcattcaaaattttttacatctttatctgtaaattccatattttcaatttttaatttattttttatctataaaccataaactgagattatataccaaaatcaaagactctcctaaatttttctaaattcttttttgtggtaggtttattttatcgggaaattttcggtgaatattcaaaacattttttaaatggcttaaaaaaaagtcatttttaatatatttttcgtattaattactgtttttaattaatttttattatttaataaccatcagtttaccatg

SEQ ID NO: 103981 - DNA, 323 bp, Heterodera glycines
tgcttaagacattgtgtgttaaaaaaaaagattcaaaaaattcgtccgcaaatgtcgccgtttctgctgatgatgatgacgcatcgcttaaatgacctcactttattcattttaattcttttaaatttaaattccttcgggcataacatttagtttccaaatgaaaacttaaatcgaaaaatgacagtgaaaaatagcaatgagactataattcttttatgatattttatgaaaatacctattcatttttatatgaattttgaagaaaataaagcccatttaagtgccgaaaactgtcttaataatttgccaacaacaaaatg

SEQ ID NO: 103982 - DNA, 332 bp, Heterodera glycines
ttttctgataatcttcattaatattaaccgaaatgctctgtacttttcttaccccttctaaaagtcgtccaaaccatatatttacccctgaggcttcgagatttcttatcttaactttttcagcttcttgaatggctctatgagatgagtagtaaaaatctatacattcattatgtaatgtgccggtatacgtaaacactgtgtcatttgttaataaaacagtgttcaattgctgtttttcaatcagtagaaaggcatcaacaggggggagggggtacgggcgggggcaggaaacgaactgttcccgctaaacgtgttccatttttagcatg

SEQ ID NO: 103983 - DNA, 1003 bp, Heterodera glycines
tgttgtgatgatttccctttcatcattttgtcccaaatttctctcctccccccgttaaattggctcaattttcttttcccgcgcgccctcgggcaattaaattttgcacaaaatccaaaaaaaaaaaattttagtggccgattttgcgggaacggacgcgctgatctttcgccggaatgtgtccgagccggtggagacgtctgaccgctcactgttgcgcacccagcgaggcaatccgctgatgctggaccggccccaatttgtgggcagtttgcagacggaccaagtcagtcccggattttttttttttgaaattatcggcaaaacttagcattttatgattggcactcgctcggattattgggaagccaattattggcatttataacaaattttagataacttaagaattggcattttgagatttcggggcattaatgggattagcataacttggcattttttagaaagtttttacatttattttggagatttaaatctgggttgccacctgttaaaaaatttcatatatatccgttcatttttatcttttgattccatcgattgaatatttcggcatcaatgaataaaaaaacaaaattttcggcatttttgctggtgtcatcgattaaacacaaaatttccggcattttcggtggtaccgtcgattaaacacaaatttttggacattttcataggtgtcatcgattaaacacaaaattttcggcactttcgctgatataatcgattgaaaaaacccaaaaatttcggcatttcgctgatgccatcgattgccttttttgtaacggtccccccccccgacccatcacatagctgtgcaacattggcacaaaaagtgctcatgtacaacattttgacttatactcattacctcctccatttgtccctccccccaaggtcttccccctccccccattttcgtcgttaatcgctgtcatttcctccgcttctcccctcggaggacgaaaggggtgacaaaatg

SEQ ID NO: 103984 - DNA, 133 bp, Heterodera glycines
ggtgaaaccgacacaagatttttggtacttttcggttttggggcctagatttgattttatttttattttttttaaaacaaaagacgcacagaatttgtgcgagttcatctggcgctatgatgccaaaaaaatg

SEQ ID NO: 103985 - DNA, 63 bp, Heterodera glycines
cacaaatgggtcacagtcccgcggtggacgacagatttgagactttacaatgctaagcaaatg

SEQ ID NO: 103986 - DNA, 179 bp, Heterodera glycines
ttctcagtgtcaacattcatcctccggcattttgccatttaaaagcactttcaaacgcaagctttattttaaagtattcttaaaattccttaaatacctcaactgcaagcagtaaattgagcagcaacatacaacacacaccaatcgcaggaacattaagcagtacaataagcaccatg

SEQ ID NO: 103987 - DNA, 167 bp, Heterodera glycines
aatgaccgacccgaaattttgtgtattttcgttgttttttatgaatgaatagtcactgattttacactttattcctattttcattcgggcttttcttgccatttaatttttgtttatttatatatatatatttttgctaatttgaatattttccattcattccaatg

SEQ ID NO: 103988 - DNA, 134 bp, Heterodera glycines
gaaaatgaaaaaaacaaattcggcgtgacatggaaacaaattaaatacgaaattcaactattaatatataatagatagaaccaattaagcaattggtgagaaaatgttaattaattgttgttcagcatgcaatg

SEQ ID NO: 103989 - DNA, 151 bp, Heterodera glycines
aaaactcaaaaagggtaattctttttttataaattcaaaaatcatttaagtgaaagtgtcatatttgtttttgcactactctttttaaaataatcaaaataggacggaaatttatttgtttttattttcagcatttgtatcttaacgaatg

SEQ ID NO: 103990 - DNA, 357 bp, Heterodera glycines
aaccaaaaaggaacggcggaaaaggaagaaaaaagtggagaattatgtaaaaaaagagaaagtgagaccaaaaaagccgaaccggaagcaaaagaccgaaaaacggatgaggaaggacttgtacaagcaaaaatggagaaagagaaaagtacggtggaggatgtgttgtctttaggagatgaagaagaagactctccttatgaagcagcgaaggtattcgagatggggacgtccttttttgagagcgcgggggtgcgagtgaattcacgtcgggaacttgaggaattgacaaaatcccgaaatgaagcaaaaataaaagccaaaaatgagttagagccgccggcgctgttagacatg

SEQ ID NO: 103991 - DNA, 363 bp, Heterodera glycines
tttgcccgagttgaaagttggccgaccgcaacagcagcaaagcgcggccggcgcatcggccggcggcgatggtaaggggaaaaagtgggagacggacggaggaggacaaggagatgaacacatgaccaaacttggttgggcatttaggacacgaacggcacgccggggaaaaaatgccatcgctaaaaatatccaattggagaaatcttctttttattcttttttgtctactcatcagattttacggtttgtgaaaaaattcgtcaaaaatgaaaaacaaatccgagttggaaaaatgaggagataattagacaaatagacacgaattctttccttttttgttgttgttacagattgaaaatg

SEQ ID NO: 103992 - DNA, 370 bp, Heterodera glycines
cctaaaacagtaaatatattggagaaaataaccacctcaaaaaggttgctgaataacaaacaaattaggaaaattttgcgtctctcaagagcaatcatggcccaatttgagtgaaaacacattctattgagggctcccatttgcgctatttctacgatttgtgtatttgaaaaaataaataaattttaccggcagttttcagcacagcagaaccctcaaaaaggaggaaagcaagaagcaaaattcaaatacacaaacccgaattaaagccaagcaaagaaagccaaataattatttattttcaatattaattcattgttttaagtattaaaattaatactttcttcaaatcctcgactcgtacaaaatg

SEQ ID NO: 103993 - DNA, 267 bp, Heterodera glycines
ggcaacagcaaaatgtcttaaattttccataaaatgtcccgattttaaaaatagccaataacaagcgaaaaattttctaattaacgtcatcaaatttatatagttaatcattttaaaatatattcaatattaataattctgccaaattgagttgaaaaattcgtaacatttttgctattattataatataatccaaaatataaatcattttttaattgcattgaaaatattattttagatcctttcagactgtcattacagaaaatg

SEQ ID NO: 103994 - DNA, 223 bp, Heterodera glycines
tttcagttttcgccagtggcgttgatccgctccatatccgtccatcatttaaaagatatcctttcaaataggcattaaaaatatttacatacgtacaacattttttaatgctttgcagggcaaatttaattaataactaacgtaattaattttgttaatatttcgcacaaaaattaattaatatagtgtccgggctctactgatcaaggatgaaattacgatg

SEQ ID NO: 103995 - DNA, 331 bp, Heterodera glycines
tcttttgctttacgttgatatcactccaaattcccccctgcctttgggggaattatgccttctctgtccatgtgtatatttattgcttacaacgcaggcaatttactttaaaaataccataatgttatatttgtctatttctctcgctcctacaatattttcaccttttttctttggtgttacctttgccgtaattcagttactattgattattttttgcctataaaagccgcttcaaaaacaagaaaattattcattatcaactgcttgctgtgctttgtttaattgagcttcagcttcactcctcctctccgaattcgctgataaaatg

SEQ ID NO: 103996 - DNA, 58 bp, Heterodera glycines
tctttttccccttacggtcggcgtccgtcggatcaatcgatggaacgacgagcgaatg

SEQ ID NO: 103997 - DNA, 292 bp, Heterodera glycines
agaaaatcccatatgaaacatttgaaaaattgaaatccgagtctattccttatttctcttaaattaaaagcaaataatttttaagaaattgaaaacagtctcataataaaaatgatttgaaatttcgaaaattttcggcaaatcacgcgatgccgaaaactcagaaaaacgatattataattgtaatatttaaataatttccctaaaaattaaggctttaccgcaagtttttgggcaacaaaaaccggtgatcgtgttcagcatgagttctttattagaaccatccaaaatg

SEQ ID NO: 103998 - DNA, 193 bp, Heterodera glycines
tttcggcaatgtttgtcgctttgtaaataaaaatttgatcttttttaaataatatttattatttttagtaatatatttatatgataatattcatatcatattattaatacacgggatgtctattttaacattaatcgtaccactaatttttttaatgcttttgctgattaatgacaaattatgtgccggaatg

SEQ ID NO: 103999 - DNA, 119 bp, Heterodera glycines
  unsure (1)..(119): unsure at all n locations
tggngcgtttcctaaaactcgccaagtaacacatagagaatgctattgctcctgcaataggcgcccatgaaattgaaaaatggatcaataatttggatctagcagcagtcaccaaaatg

SEQ ID NO: 104000 - DNA, 90 bp, Heterodera glycines
tcctgaaaagggcacaacatttagtcatttaaaaaaattatacaaaaaataaaaaactgacgggaacaattttaattgtacagcaggatg

SEQ ID NO: 104001 - DNA, 101 bp, Heterodera glycines
ttggcggaggggagggcgaattaattgaccgaatcccgtaaatcctcccaccccattttggtcatcaccatcgggaacaccagcgcagactttccgtaatg

SEQ ID NO: 104002 - DNA, 70 bp, Heterodera glycines
atacattgccaaagtcaacggccaattttacgaaattgacacaccggacatcgaaattgaaattcagatg

SEQ ID NO: 104003 - DNA, 70 bp, Heterodera glycines
ccaatgcctgattaaaattcgtaataacgacaaccacttctgccttttctacgcactgcaggcaacaatg

SEQ ID NO: 104004 - DNA, 149 bp, Heterodera glycines
ttgaagcagaacgaatgaagcatggctgataaattgccgggtcttttatactcccggaaaattagaccacgcccacttttgaaagctatttaagccaagattttctcgcacaatcaaatcagtcttactaaacatcatcatcaaaaatg

SEQ ID NO: 104005 - DNA, 986 bp, Heterodera glycines
aagatgaataccttggaaattgataaaattttatcgacaagcccactcacaaaacagacttatatcggctgttttgcggctgaccagataccaaatatggaaatggtaaaatttccaaattgtctggtaatgaatattgacccaatcacctctaaaggatcacattgggtttgtgcttacagtccttctccgtcacacattgaatactatgactcgttgggcatttggccaccacctagcatacacattgcaaattatttgtcaagattcaaacaaattcgttatagtataattctacttcaatctcccaattcaagtgtgtgtggtcgtcatgtgctcttctttttgtttaatagatgtctgggaactccctttgaaaagattgtaagatttttgcattttggaaaaacaacacctgacacacttgtcagttcttttgttacaagaataataaatataaatagttgaaaaaatatagttttttcacaaaaatgcatgtcgattttgatccccaccaagtggattggtctacattctcgcacgaatttattcaatatggaggttacaatatttttcgtggtgtaccatatcagcgcggtgctggtatcggttcagtatttagaagcttaatgagatttcttttaccgatagggaaacaaattggatcgtcaattgcacgtcaggggcttgaaagcgggaatcgagtgttaacaaatgtattagaaggtaaagatttgaaggagtctctcgtcagcgagggtaaaacaggacttaaaaaccttttggaaacggcagcaaataacattgaaaaccaaaaaggacagggatttgattttaaaaaatacaagaaagaaaccataccacggtatggaaaaattagaagaaaaaatataaataagctccaatcttcaattggaccacctatggttgttaagaccaaaaacaaacgtttacgtgttgactcattgggagcttactaaaaaatg

SEQ ID NO: 104006 - DNA, 328 bp, Heterodera glycines
attgtactacaatatgttgttggtcgacactcagaaatgattttatgcgttcaatgctaataaacaaatgctttgtttaattgcgtctcccttaaattgcacaatctttttaattttaattgtttagagcgttattttatgcgcttttatttttcattttaatgattttttttgcttattttataattgtttaagcctgttatttgctgccttttgccttgctttaaagagctaccaaattttattggtaagaattcatttcccaaaaagagtgtgcctatacactttaactttattacagactttgtcctcaaactgttacaaaatg

SEQ ID NO: 104007 - DNA, 241 bp, Heterodera glycines
  unsure (1)..(241): unsure at all n locations
gatccataaattgngcaaatacctttttaaacaatatggaagtttcagcaaatttttggcaaacgatttttcaaaatttgaaaaggctttcaaaaaatatcaaaaattatggtaaaactaaaattcgtttttttaaatttttatttttatcccttttataaatgcgcctcatttcagagctaattaccgaagacaaaaattttgatcaaatttccgagtgcaatttttttaatataaaatg

SEQ ID NO: 104008 - DNA, 290 bp, Heterodera glycines
tttttgcctgtgcttttgccgcttctccgaccaaaggtccgctgtcagtgaacgcaacgtaagatggcgtcatacgctttcctcaatttacaaaatgaaaaaatttggttaggcccttcaggggaatgggagaaactcctgaacctcccgtaatgaaaaaaagattaggaaattgggtaggccatctcccaaccctcgaaacgaaaaaaaaagaaatttattgaaagaaattttgaaaatataaagaaattaaaacatattcggcactgcctttgttttactcaaaaatg

SEQ ID NO: 104009 - DNA, 437 bp, Heterodera glycines
aataggtattgaatgctttaattttagactgggtgaaatttctgaccgtaatttttaggggtttttgtctttggcaaggaatatcaatattaaaatacaatgctgaatggtctgaaaaaacaatactatcctttagttcaattgaagagactaaatcaagggttgtaaaaagacaaagatcaagaattgaatttcctcttcttggacctataatattagtgtttagtgaaaatttattaaaaaaatcaagaaaagttattcctagactggtatgaggtactggaagattgttgacccaagttatatctttgctgccaatgttaaaagtctcctatgataatagtattgtttgctatatatttttctaggagtaaaaaaaagagattttgtaagtttcaattacagatcaattttctgtttaaacataacgaaaaatg

SEQ ID NO: 104010 - DNA, 64 bp, Heterodera glycines
actccaatttaaaagttttcaaaaccgaaatacttgtttgttttttaggtttctgtttagcatg

SEQ ID NO: 104011 - DNA, 480 bp, Heterodera glycines
ttaatttcggcttttataaatgttgaaaccttgaaattgggtgaatttgtgctagggcgaacctaaaaaaatatcacaatattcatatttaaatttaattattatgacaatttatttcacaataataaaacataattttgctcaaactaatcaataaaataattttggtatttttgcgatagttgctcgtgccctctattatcttgaaaaaaatataagttaaaatttaaaaacttgttaatcaaaaactccgaaatacatatcaattatttgccctaacttttttgaaagtaaataaaaattaacagaataatagagaattcttcgagatatctattataagactttagagctattttataaaaaaaaataatttttaattcaattccttttaaaatacgcttttgtccatgtgttcagtgtgttcatttgtcagggtttccctgctgtcccggcagtcagcagctcgtttccctcatg

SEQ ID NO: 104012 - DNA, 340 bp, Heterodera glycines
gtaatttgaataaatcgtcaagagtgaaatttttatttttgaaaatttctggccaaaaaagcggtcccaaacccaatgagtacctaattaggtagacgcatatgtaagtaaagcattatttacctaatttgtaagtaagcagtggctgtttcaaaaaagccaaattagtgaaaacctgcagagcgacaacacgccaaattatgtatttctaagaattcaaaattttgcttgttacaaaaaaaaagtacatacggaggaattttcttaaagaagcacaaatttgtattttttttttagaatctacgcatttatttctttttttgatccagataagctaatg

SEQ ID NO: 104013 - DNA, 93 bp, Heterodera glycines
tgtaagtgatggggcggggggggggggtgtggctgtgctaactctcacaactctcccccgcttgtaaaggtgtcgctgtacccgttcgtgatg

SEQ ID NO: 104014 - DNA, 159 bp, Heterodera glycines
aaaattttatttatttattttttaattaatttaatttattgcgaagaaatagttgtaatatttaaaaaatatggtattttcttggcaatttcagctatttgttgtttaagtaacaattttaaaagtttgccctattttttaattgccaaattcgacatg

SEQ ID NO: 104015 - DNA, 588 bp, Heterodera glycines
  unsure (1)..(588): unsure at all n locations
tcaaatgtgagttgnaattttcatgtatttataagcaaaagggctgggctgctctgcttgacagtcgaattttttcgnagtctcgaaaaatttccngctcgagaccgacaatctcngagcagccggctaatacgtatggtaaactttagtcgttctctgcccatggccagttttatgatggattttttgctcaaaacttgaaaatcttttggcagagtttgtgaaattgcgaaaatttttctagcgatttttttttaattttatgatgaattaataagtttttttctaaatttttgaaaaaatcactgaaaaattttaaaaaatcttaagttttccttcaaaacattttcagatttaaaaattaatttgatgggtgcacctcaaaatattgccgccttttcaaactgagaaatttttctagaaaaaaaaattttcgaaaatttttataagaaaatttgaagaaaaaaattattgaaaattattttggaaattttttcaaaaaaaaactgtaatttatcagaaaatttatgcggcgatattttgtcccgtccccaatgtgatgggggaggggacgtgactgaatatatg

SEQ ID NO: 104016 - DNA, 960 bp, Heterodera glycines
catttttacccaataacaattatgaagcattattttatcaaaaaataatagttgttgcatgaattagagcttttacccaaaaaaaaaaatctaatcttgaaattttttttttcaatttttgttcgaaagcgggtcaggggttcggaattgggcaaatccgagttcaaatgcgtaatcagcacccttgaaaacccctaaaaacttgttttagcccaaaattaaaaaaaaataaaaattagggacccccattcttcaggattgcccaatttgctaccattcaattaattttcgtacattatttacacttccattttctgttttttcagattccccactttgtttttacattttgtgatcagctcacatgcattttgctgacctgtccctaagtgaacgggaaaaagcgctgagtgttcgctatttgcaggagcgtgatgcgatgtttgaggtttggaatcaaatcggggcggggcattattaaccgggtcttaaagccagggctgccgaatgtgaggcttagcctcattttgtacttttttaagaggccgatgaggcaaaattaccaaaaaactttgaggcttttgtattttttttgagtttttcttaggcgcttcgtgttttttgggaaaaatccttcaaaagtgtcattatttggtcgaattccatttaacaaatcgtctaaaaacgcaaaaagaaactttttttttgcataaaaattgttacatagtcagtcaacttaatgtttagaaattcaatatttttgaaaataatttgacaaaaaaagagccaatttttttttaactatgtgttttgagtcccccccccccccgaattttgtgatgaattttttctttaaagctaacaatgcatacgtattacatcagttacctgaaaatgtgaagaaattaaaattagaaatcaatgattaggattaatgagttataatctgtgaccgaaatg

SEQ ID NO: 104017 - DNA, 231 bp, Heterodera glycines
cgccagatgcccaaatagggggtcaagtaacacatttaattagttgtagatcaaaatttgactataaataaggaaattgtacgagcgagattcattcactcactcatttattaataaataaaatattattattattatttccgtttcgcaaattttcactaacgtctcaacaacgtaatttaatttaatattttttaattaatcaactaaaaatccgcccgtttagctatg

SEQ ID NO: 104018 - DNA, 496 bp, Heterodera glycines
tttctctgccctattctaaacagagaagtgaaagagagagaacgcagagagtgttgccacaggagagaaaaagcgagaacagagaagcaaagacaaaagtgtgcacgttagaagtggaagcagaaaagcgagacagttctacgcaaaacccctcgggcgaggacgaaaagcgaccgaatcattgcgaaaggacgaacgcaacgcaaggcatagagaaaataaaaaggagagagagagagagaaggtgagagatagagatagagagtgaagaggaaaaggcagacaacgcagaagagataaagcaaacggaaaggagagaaaaaaaacggccattccttctgctgctgctactgttactggcgagacgaaacgggccaaaccaagttcaaagtgccaatgtgacgacggcggtttttgttcaatgctaatcagctaattgctcactaattaccccaaataacaaaactatgcttctcccaacaatggcccccaaatg

SEQ ID NO: 104019 - DNA, 99 bp, Heterodera glycines
ggtcttttatatttagatatttacacttttgaattgcttttttgctgcttttaaaattacttttaaacatgaaaaaattgtcaggcatggaaacggatg

SEQ ID NO: 104020 - DNA, 127 bp, Heterodera glycines
attactcattaggcattaattgatgagcatttaatttaaggattttatattttaaaagcattcattcatttggcaggtgcattttatgcgcaaggtttggttggatgtcgtgccgggtcaagacatg

SEQ ID NO: 104021 - DNA, 421 bp, Heterodera glycines
ttggagtgccggttccgcggtcgctgcagaattttggggagtcgccgttgccaaatgccgcaggcggcaccgcgttgggcgtcggcgatacggtgaaacgcgagatggcgccagtgatggcattacccgcagaagagggagcagtgacggcagcagagcgaggcttggtgaagagatcgatgggagacgaacgagcggaaccctttgggaaaaatgggtaaagcaaatgcaaagacagaatttcggaaatttattttctgtttttggcatgcaacccaaatttgcaacataaaaaataccaaaccgtttcgaaacagaccaaaaagaaaattttttaggaaatgtcaaaaacttagcgacgaaaaatttcctgcgcaccgaaaattggatgtgtactgagtcggcggcgcggaacagaatg

SEQ ID NO: 104022 - DNA, 299 bp, Heterodera glycines
taataggtacctcaatcgtagagaacatccgaaataagcattacagaataaggcacataaatatttatagataaataaataattcttaataaataaattttcggcctgagggcatttttgtgccgtcacatcccccccgcgtctttttttatcggcagcggcgcgattttggacagaaaattttttcttttttttcgaaaaattttacgtaaaattgatttaaatgcaaagttttcaaaaattcgtaaattttctcaacaaatttaagacaaaattgaaataatgctcgtttcaaaatg

SEQ ID NO: 104023 - DNA, 830 bp, Heterodera glycines
  unsure (1)..(830): unsure at all n locations
aggaaacatcgtccgaatgattgataattatcttacaaagtacataaagcaacttctgaaaaattatgcacatctgaaaatttatcggcaattntcgcttctctctccagctcacagatcagagttttttgattgtttccgacttgggaattgacaatgtaaataaagcggaagaaatgtttgacaaagtgtcactgtcccttccaacaatagcaaaatcaatgcttttgacattgacaatgaaagtacattgtgggcagcgagcggtcggagctcacaaagaaacgattgcttttgtttgatgaaagaaaagtgagttgtggagaatgggaggaaaaaggccgtgatgaccaacgcccgggggatgggcgatgaaagcggcgggtgaagcagagggaaactgagagacggggaaaagggtccatagccaacaaacactcttttctcctctttttctttctcacctcctgccacattttccgctctcttttcctttctctctctcacacaaatgtaaaatgaaatcggtcgggaaatgaaagccaatttacccggtgtgatcaaacgtcgaatacgaacaattgcaaaagtttttcttcattttttgaataagattaggataggtaaaatacctatttctgctgctggtttcattttcctttttctgcgcttcactcactgtgcaggaaaagcctagttcctattacttcctttttttcttttttataattcactttggcgtactatttcttcccatttactgatgaaaagacagaatttattccgttcgaatgcataccttatataatttttacttcattttcagaatg

SEQ ID NO: 104024 - DNA, 162 bp, Heterodera glycines
cgccgggaccgggactggcaaaaccgggacctgaatttcagttttttcaaaaaccgggacgggactgagaccgagaccgagacctgaaaacccggaaattcccgtcccggtcaatataagtaataattttatataattaatcctacttttttcagtgacatg

SEQ ID NO: 104025 - DNA, 182 bp, Heterodera glycines
aaaaatttttacatttcaaaaaaagaagccaaactataggttttcggggtcgctgatcgcgaatgcggcttccatttcgaccaattccaaatcccggacgcgaatttgaacaaaaaggcatttttcaaggaatgaacggctcgtcgaggttctgagccgtgcccggacctggtcacaatatg

SEQ ID NO: 104026 - DNA, 183 bp, Heterodera glycines
aattttcatgtcaaatcaccaaaaaatcatataaatttttacaaaaaaagtttttgctttttccggttggtagaaaatttttataaaaaaataaacaattttaatttcttacaaacagttaaaggggatgttaattatttaaaaggtctaagctgttgtttaattaatattcgttctataatg

SEQ ID NO: 104027 - DNA, 217 bp, Heterodera glycines
  unsure (1)..(217): unsure at all n locations
aattaaaaacgtgcataaattgtntgaaatgttctggtttttattaaactaacaataaggcttttcaaagtctaataaggctttttctttttattctttttgtaaatagaaaaaaagtttttctcatttattattactttttaaaaccaaatcacaattattaaaatttataatatttttattgtttatttatttatttaagttgagtggtaaaatg

SEQ ID NO: 104028 - DNA, 191 bp, Heterodera glycines
ccaaaattttcattttttcaattaaaaaaaaattaattttttgcattagggcgcccgaggttaaagcttgggctcaagcggtggccgatttggggcgccaaatttgcacaatcgggacagtgactacaaagcggaacggagcgcggaacatttccgcatgcaaatcattgagccaaaagtgatttcacatg

SEQ ID NO: 104029 - DNA, 153 bp, Heterodera glycines
gcaaaaagaaccggcgaaaactgaaaattacggctttccctatgattttcattcaattttgcattatgaagctgtgaaaacaagcgggtcagttattttaaaggtataaatgaaaagaaaataatttggcaatgaatcagctattacgacatg

SEQ ID NO: 104030 - DNA, 610 bp, Heterodera glycines
ttttttttttagttaacatatttccgagatttttccgtcactaaaaaagtaggcgactctacttttgatgatgatgcagggctggatggagtcggagatgggaacgaattgttcatttattagccccttttactgttgaattgagtttcattttttttttggaaaatgtgccaaaaaaattatttaaaaaattctatttatcccccctggcacataaatggagactggtatattatttttcaacctcctcagaaagggggtatataattggaggccggcagattaatggagactggcatataaaaagagtatatacggtaacccaaaatcggtcatttcgcctactgacatttcgcctactttcatttcgcctaccaagccaaaaaccttcatttcgcctactaattagtaggcgaaatgaatgtttttggcttagtaggcgaaatgtcagtaggcgagatgtcggtaggcgaaatgtcagtacattttgcatatcgatagagaaagaaattaggaacaaaatgtaagggtttttaagagcaaaaaaagggttaactaaaaagttataacggtttctcttctaaaattcttattttttaaattttagatg

SEQ ID NO: 104031 - DNA, 101 bp, Heterodera glycines
acaatatttttttacagagcaaaaaagccgaaagtgaacaattgcgtgccgagttggccaaaccaaagcagcgatgggacgacgacgacaacaacaacatg

SEQ ID NO: 104032 - DNA, 1003 bp, Heterodera glycines
tctttttatgtccaaaaatcggaaaagaatttgtacgatttactcggagttaaatctgatgcttcacaatacgacatcaaaagtgcttacttttcaaagtgcaaaacggtattattttgggcaaagtgagttcgcatcttttgttaattggggattctctttgtgttgttgatttttagaccctttttttttgtccctgtaaattgagtttggcttctaaaaccgactttcttgaaacttttctcgtgaactcgttctgtcaattatttccttattttgtttaattttctaaaggtttaaatcttttagctccatcctgacatgaaatgtgatggtgctacaaaaaacgattttttggagctaaaacaagcttatgatgtgctgaggagacccgccgagaggcgaaggtattgtattgattggccatccatccaattcaatccttttttgccaaattgcacagatacgacaactctttgctcctccatgttaaacagatggacaattacgccaaatacaacaacggttacggaagaggacaacaccacagccaaaacggagaagcatttgacgggtgcttttttcgattcatttccttaaatcttctggctagactcatctcctttcaaaatatcaaattttgggcgacttaaaacttttaatttttcggtttactgaatttatactttggataggttcaattggtttttttgatacattttgctaaatcccgtgcatttctatggtgtgcctcactttggtgcttatttgttagtccaaatgaatccatctttcccatttaagcttttctacccacaaatggcgttctccgctggccaatgacgacattcattttgtgttcgctatttttatgtttggccttgtgttcgtttttctgttttactttgctcaatggtctctctcccctccgttttctaatttattttcaatttctctccaaaggtttgccattcgtcgtcagaacaaagagttagcagcgatg

SEQ ID NO: 104033 - DNA, 376 bp, Heterodera glycines
atagatttttcaatatttttctaaaaacgtgatagggaaaaatgtcgacggcaaaaaaattatcaccgggaacaccaattctatcactcaaaaaatcacaatttaataaacgttttgaaaatttttttttgctcacatggtataccaagtaagcataatttacagctttattatttaaaaaaaaaattcggtgccaacacattcccagtttttcggtggtaagggacaaatgggcgacagcccagcggttttttgggggaataattcctttgatagttatccaattttgaatagaaaatttaaaaaaaaattaccaagagtctgagtcggtcggacaaatttatgacatacggacccattaaatcggggaaaaatg

SEQ ID NO: 104034 - DNA, 298 bp, Heterodera glycines
aaaatattattttgaataaatgggatttaatgaattcattatgaataattatattcacaaaaatgtaaaaaataaatctacttttcataaattaaatttttagatatgggataatataaatttgcttttattacaaagtcccatccttggccaaatatttgagcaaaatttgtcattaattttctatttttttcacaaattgataaaattttgtcattagaattgtttctaaatttttagccaaaataaaagtattgaataataaaaatcataaatattatttattttttaagagatg

SEQ ID NO: 104035 - DNA, 178 bp, Heterodera glycines
tctccctcggctggtgcgtctcacagatttggccaaggataaattcaaaatcagtccgaccgatttggaatttatcaaatcttgagagattttggcttccatttttcactcaaatgccctccctcctctgctctcagctcacccaccaaatcggcttcaccttttgttaccccaaatg

SEQ ID NO: 104036 - DNA, 117 bp, Heterodera glycines
ggtggtccgctatattttcttaattgtgtatgttttactaattttgtttaggcatttctccgtgccaccacttctgtcagttacaaaattcgatttaatttatttttggaaccaatg

SEQ ID NO: 104037 - DNA, 72 bp, Heterodera glycines
tttttaaataatttatttggaaaaataatttataattttgtaagatacacgagaacagcaccaccaattatg

SEQ ID NO: 104038 - DNA, 66 bp, Heterodera glycines
gaggaggaagatgaaatcagcgaagatgatgatgataaagaccacaattatccattattagtcatg

SEQ ID NO: 104039 - DNA, 69 bp, Heterodera glycines
ggtggcaaaaaaatagcaattataagtgaaatttgacaattataaactaaaaatctgtttaaaaaaatg

SEQ ID NO: 104040 - DNA, 1003 bp, Heterodera glycines
  unsure (1)..(1003): unsure at all n locations
aaaatagaatttaaagttaaaataaaatacataattatttttatctttgttacaattaaccatagctaaactgtttattccaattaatattcaaatggacaaataaaattttttttaaaatgtgaaaaattattcaaaaaacgaaataaagggcataaagtgatcagattatcacttttcataattattttaaaaattttagagagatttttcagcaaccgaaaaaattttaattgcattttcaaattgatttaaataaataaatattaaatttatttttaagattcaacaaatggaggaataaataataaaacataaaaaaggaaaaagtaaagaaataaaacaaagttgttaaaggaagttttaaagttcaacattccaagaaattaaccaattanaattttataagatataataaataattgaaaatatatttaattatttacagtgaaaattatttatgcataattttaataattgacagcaatatttgtgataaaattgatttaatgcattaacttaaagcaataaagtcttaaataaatctattttttgttctattaattaaccaatggaggtaaaagttaattgaatttgtaattttaacataaagttattactttaattcttaaaactaaatccctaaaattttggacaagcttcctaatattgttatgaattaacgaaaaattttaaaaataattagttaaaacagcgtaaatgattaaaaccaaatcgaattttaatgaaataataaacaaaaaattacacatataatcgtcacagtaaattgtcactaatgcgtgagatcagacacgaattttaagaaaataagaaaattaaaataaattatagcttcattaaaaatattcatttaaaaataaaattaacaatattgtaaaataaattaatgtaaaaaggaaaataaaatttgatgaagattaatatatatttataaattgtacaaaatgatttactaaataatttatgaataaaaggaatg

SEQ ID NO: 104041 - DNA, 1003 bp, Heterodera glycines
aatatgcaaatgcatattttttcctggcttctccatgctctgaatagtaggaaaaacactttcttttttgtgtttgcgcactcttaggaaaaaatttttgattgcctaaaattaaatccaaatttgaatggatgcgcgagtggatcaacagtgagcttcactgtcgaaaaccttgtgaaatttttgatttgcaattgcaaaaaaaccgataaaattatgaggaataaaatttttaaattaatttgcacccctaattttcggggtccggacaatccgtcagtggtcaatccgtcagtgaaggacaattcgtcagtaatggacaatccgtcagcaaattttttttgagcaatgatcaaaaaccttgcgaaaataattgttaaatataataaatgtaaattttttatagcttcttaacatttctagttacttcatgcttcaattaattgccatatcgagaataatcaattaattctttttaaattcataatttttttaaaataacacaaattattaattcaggattttagcgacttaaattaattttcacatgattacaaacaaagctgggtgttttaaaataaatttgcttatagattagttactgacggattgtccgggagcctaattttcaagtttttttttgttcatatttggtgcattttcaggagatattttggcaacacttcgttcatattttttgcagtcctgctaataagatttagaataatgttttaagaattaaaaaaaataatttttgataattcttttttggaaaaagtcacaaaatggccaaattttgcgtcaaattttgagaattttagtgaaattttggagacccgtaaatttttttggcatttttaagggattttttaagaaaaattagcaaattacaatattttttaattaaaaattcaagatcttaattataaaatggagacttttcgaaaaattatcgtgagttcaatcccgcgggattggtaaatggtcgggagggatcccgatg

SEQ ID NO: 104042 - DNA, 356 bp, Heterodera glycines
tttgcactgtggtgagtgttttgaaattttgataacaatttctctctcttttgtaaaattaaaaaaataagtggttctcatcgaccaaattcaatttgaaaatgtgggtaaaaccaatttcaaaacatttaaggaagaaattaacacgaaggatccgatagtggcggtagcgccgccagtttttaagaatttttgtgtaaatttttaaatggaaaaacccgacgatgcacagacggcaccttgtaaaaatttagaattatttaatagaacaccaaaaagtcaaaattttccatgaaatatataatgagcaaaattccaatttaaaatatttttaattttcaaatacagtacggatg

SEQ ID NO: 104043 - DNA, 73 bp, Heterodera glycines
  unsure (1)..(73): unsure at all n locations
gcaaatttaaaatggaaataaacgatgaatgcnncaagttcggcttcagttgcacttgcgcaaattgncgatg

SEQ ID NO: 104044 - DNA, 1003 bp, Heterodera glycines
ttataaaaacagactttagtgttactgtacaccatataaacaacaatttgtacgcgccgatcttgtacttgatgtaatcccaatgacaaatcacacaggagttgacatagcggaagaaattggaaatacacttcggacaaatggattaaacccagaaaaagttatttgtttggttcgcgacaacgcaaaaaacatgataagggccactgatattttgaacatgaataggttttacctaattctggttttttaattactattttttaagctttcaatgtgtgtgccattttcttcatctggttatgggagacgtattgcgactgcctgagttggctggactcattttcaaaattcggtcttgggttaccttttttcgtacaagtaaaggcctgccctgtccttgctaataggtcaaaaatcaataaatatattaattattttataatttaaggctttccggcaatactgtgcgcaaaattttgattgtgaaggccaatttggacgcacttttactggcaccaacgcatgaattagaatcagatgatgaaaatgaagaaaagacgatttttgagttcttaaaattttatttacgtgcatttaaaaagaaaaatttgattttttgttaaaaattttagttgatcactacccgatcggggtccccgacccccgacaattgagctcccccccgacccgacccccgacatgtcgtcccccgaggtccccggcccccgacattttgccccccgagggctcggggctgaaccctagttaaaagcgccgccgcaataattccaagaaaaacatattctaaaattttcagttacataggctaattcgaaaaaagtttaatgatgaaaattacaaaaaaaagagaaaaaaaaagcattttttaatgtaattgatgaaattttgtgggttttcccatagtaacttgtgaaaatttaaatttttaccaacccggactcccgggcccggcaaagtgccgaaagactctggcaaaatg

SEQ ID NO: 104045 - DNA, 570 bp, Heterodera glycines
aaagcggcgcttaaaaaataaagaaaaaaatgggttgaattcatttggggataaattcagaaaaaatttccaatggctgtggtcgacacaaacattaataattcagtaggagaaagtcattttataataattgggttaaaaaccaaacgagtatattcagctgtatgccgagttcaaagatgctcgtccgagtcgccttctcatcggttgtgccctccctttgagaagtgtcgccgcctgcgaaatacttttcaatttttgcgttatttttgcgacaattcgctcaaagtccgcatttatattttaaattccgtttcaattattctaatcctttttttggggctttgaatggcactgccaattttctgctggcactttgctctttcttcgaactgctccatcagcatggccattttctgtttgtgttcgtcgctttttcgggcttaaatttcatcgaatatcaaacggccgcacttttcgcggcactttccgtctttggaatgggtgggacaaatttaaaagtgaaaatcaaaaatcgtgccaattttaggtggcattgccatttcaatg

SEQ ID NO: 104046 - DNA, 441 bp, Heterodera glycines
ttttatgagtctaatcaattaaccatacctttacaataattttgttcatgtcaaacaaaccctatattttttgttatcagccaaaagcactaataataagtctgaataaggtaataataccataaaacataagcatgctaacctttaaaaaggtacaaacaaaaataatcaagaattgctaattaatcatatatcgtttttgacaattgcctaaacacttagatttgtataattagcttttttttagactttgtgcgttaaactgataccaaaaatcctatgatttgttcaatatgaaacaaaaagttctgattcaagaaactcaggatgacagttgatttgactcgtaaagtgcaatagaacctaataaaatccttcgattgtaatttggcaataaattctcaatttgtcagttttaatacgtcggaattgggcgcaatg

SEQ ID NO: 104047 - DNA, 550 bp, Heterodera glycines
attttattttaaaaaataaatgttttttcatatttaaaaaatcagtgaattatcgatttgcaaattaatgccaataaaacgaaaaaaaatgggcaataaataagtaatattattatttttttcattatttgtaaaaatgaatttgttgtatttaatatttattatatatttctttgtttttgtaattgaatccggcaaaatccgacccaaattttgatgaaatatttggcaacggatgggacaaaaaagaaagtgaacaaacagtgaaaattgaacaaaatgaacgaaatgagaactcacaatcagcagcagttgatcaaatgggtgaagaaatgggaaatgaccgaaatgatcaaatgaaaaatgatcacaaaaagagagaaataattaaaaaatttgaagcaattaaagaaaagttgaaggaaaaaataaaatacaaaaggaaagattatgacaaaattgagagaaaaattgcaaaattattaggaacaaatctgcaattaatacaaaaatggaaaaatgaattgaattaaatataattaaaaagatg

SEQ ID NO: 104048 - DNA, 176 bp, Heterodera glycines
agacgcggttttcttcaatttcgacatccaatagtctctaggcgggtgaggagccactctgcgtggttaattgctgatcatcggacgagtcaaagccaatggacgccacccaactgtagcaagtgcttgacgcagtttttgcacgatttgccggaaatgcggcacctgcaaacatg

SEQ ID NO: 104049 - DNA, 468 bp, Heterodera glycines
ccttctctagtctgggctctaccaaacactcacatcccccctgaaatgcaaacgaaaaaaattcttgccgaaaaaatgtttatctcttttttctcctggggatttgaccgcaaacttggtaccaacatttgccttctctagtctggctctaccaaacactcacacgatatttgaaatgctaacgaaaaaaattcttgccgaaaaaatggctatctcttttttctcctggggatttgaccgcaaacttggtaccaacatttgccttctctagtctggctctaccaaacactcacacgatatttgaaatgctaacgaaaaaaattcttgccgaaaaaatggctatctcttttttctcctggggatttgaccgcaaacttggtaccaacatttgccttctctagtctggctctaccaaacactcacacgatatttgaaatgctaacgaaaaaaattcttgcccaaaaaatg

SEQ ID NO: 104050 - DNA, 996 bp, Heterodera glycines
ggataacagccaatgccaatcaatttaagattgtctaatgcaatagataaataaaaaattttgacagaaattgcttaatttagagttaaatttcttaaaataagatcaaccctaaaaaataggagcaaattccttatataagggcaaaaactgcttccctgcagaatttgaagatatcataaaagccatagaattgtaatatttagagtactcctcgagaagttaaagaaaaaccaaagaaaaagggaagtttgcgtcgcttaatgtcatcattaaaattgtcaaaaaataaaaaaggtactcattttaacgaatttgtccaaaggcatgagaagtcagtgccgcgtgaacacattaaacacttggttgaggttctcaactaattatcattaacaattaaataattttttacaattagcttatttaatttaatgatcaaaattattcaagcagttttcacgttaagttcacatttggtaaaccctggccctcagggagacaaaagcggtcataggaggttgggaggagggtggggaaaatctgacaaatttgtcgtggatggctggataaatttaaaaaatgactcggaacaacccctccgggaagtaaattttcatctaaaaatagaaaaaactttctaaagcaaaaaatcttagaaactcatttaaaccctctcatataatttgggacataacagactacattcgcaattgcccgcaccggttcggggcttaaccttagttcatagtactttcataaaattacgtttgatttgaattataatttcgtgatttgtattcaacgcatgaaatagcgaaaacaaaaatttagaaaatcaaaaggtgtacaataagaggagagaagactttttgcaaagatgttcgaatttttgaatttaataatttataaaccatatttaatttaaaaacaacaataaacgggattttttaatttaataaataggctcgtcgttcattggatcttcattctccaatg

SEQ ID NO: 104051 - DNA, 556 bp, Heterodera glycines
ttccgactaatttagaatctcggacccaaattcgaacgaaaactcgaaaattcaaatttttagtttttaagcccgctttttttgtggaatgttcgaattatatttctgaaaaagtctttcattcttatttaatttaccccaccacatcaaagcaatcttgccgatacaaaaaaaaaatcagcatcaaattctaaaggattatgtatggtacggtaccaacccgctttttttcgaaataaaaatcattatgccaaatttgtttaaaaaatattttttttataattttgtcattaaaacggcgtctaaacagcaatatgcctcaagcagttttccttcctctgttctttcttatctgctcatttattcattcattctgaggtcattcgataagattgttttgattgcagtttcttttacccaatataaaatgaaggaaaagtaatagaattttcatgaagttgtgaaatgtttttcctttacattcattcttaaaattaaaccttttctgatttcattctttttagcttatcaatttttaccctttccacttaaaatg

SEQ ID NO: 104052 - DNA, 955 bp, Heterodera glycines
  unsure (1)..(955): unsure at all n locations
atcccacacaaatanagggcaaaaccaaaatacacaatttttaggctaatttaaggcgcttgacaaatgaatacgagtctaagaccatttttttgcacagtttcgatacttgaaatctcccaaacatgtatatattttttaatgttttactataatttgtgaatgtatctttttgaaactctagcgaaattaatcggttttataaaatgcaattctataaattgcttagaaaaatatttatattttacttttcgctaatttttcatgactttttgtcgttttttttttgattttctaatcgaatcgtctttttggtcattttcctctaataaattcccatcctaataatgcttagccgatccttaaatttgaatctttattaatatattatttatcaactgattggttttcagcgattttttggaaaaaatagtagttaatcataaaattctgaaaaaatcgccatattaaaaaaaaattttttttttgtttggaattagcttatgaaaaaattcctacgcatttgaaaaatttgtgtgggaaattatttataaaaattttcggaggtgggggggggggaggacctgcgccgcaactgattgtgagcatgttggcaatgttcctttttgcatttaaaattaattttgtgctaattgacttggtttcaaagctctctattgagttttttagttattaaatccaaccttaaggaagcaaacaaaaaattgcaatatttggattaacagcgaattcaaattgtcattcgtttcaaattgtcattcgtttcaaattgtcattcgtttcaaattgtcattcgtttcaaattgtcattcgtttcaaattgtcattcgtttcaaattgtcattcgtttcaaattgtcattcgtttcaaattgtcatctcccaaaaatcaatcgatggcaaagagaacggcggcgaatttttcccctcccatg

SEQ ID NO: 104053 - DNA, 331 bp, Heterodera glycines
gttcgaggtgcgaataggatcgaaatggatatcagaatcggattcatcgacccagaaaaccctagaaacgcctttttcgcaccaaaaaaaatgaatttttttttttcaaaaaggtgtgataccatctaaactattacccaaaatttgtttaaccaattgacgagtgatcactgtttgacttttccagtttttatacaaatttagtgaataaatctcattgtcagaacatgaacagatcattatacatagctattagttgcaatcgcatttttatatttgcatttttattgcatttcgctaatttataacgttcttttttattgcactaatg

SEQ ID NO: 104054 - DNA, 78 bp, Heterodera glycines
actgaaaaaaattattataaaaatttatatttcgctctttttccattcacagaggctggcaatgagaaggcgccaatg

SEQ ID NO: 104055 - DNA, 849 bp, Heterodera glycines
  unsure (1)..(849): unsure at all n locations
aaatcgattaatgcgatctcaggtaattatgctaacaccggtaattactatcagttttactgagaatccgggaagcaaccgataaagggtttaaatttgataccacaaaattttgtggtaatgtatttaatgtttaaatttcttaaaaataccattttcggaataagtattntaaggaaataaaaaagaacgcttgtcaaaatttggcatcttttcatctgaatttaaatctgaaccaagaattctcacaaacccaaaaactcattttacaaaagtgaggttcaaaagaatccacaacagttatttttgaaatcaattattacctaaattgcctctaaatcaagcaattgccttttggggcttgttttttgaacgcactattgtaaaacaaaattgttgtttactccggactcggaatcaaagttttaattcccaacattttttgccaaaattgtgttttaacgttaaaattgataaatagatgctaattagtgcgctaaatctcttttatcttaaccgcgtggtaaattttgtggcatgatcactctgaatgattgttgaaactttgatccaccacatttgtgactttgccttggcaattttcctattttgacttttcctcactttttcccccattaattaagaggcgtcaactttcttttcgttgctggtcattatccgctttatgttaccgacggcgaccgtagctttacttgtgccgaacgcttcaatgaattgttgagtgttcacaaggtcggtgcctatttgtcgggccatgagcacaatttgaagcatttggtgaccaaatttggtgtccaagtgtttgtggcgggtgccggctcacgaatg

SEQ ID NO: 104056 - DNA, 503 bp, Heterodera glycines
tattttagcctttgtctaaaagttggaataatatttttgattgatattatattaaaataatattattattaaatttcgttttttgcccatttttttgtcaatttttgcaaaaaaagaggaaataaaatttgttgtatgaacagttttttatcgttaggttaggctaggcttggtttaggcttaggcttatttattaagtttttcaaaagttctagccaaaaaatgaaaaaattgtcataacttttgaaaaacttaatataattttttgaaatttggcaggctaatagcgcaattcaagggctatcgtatgataccaagattgtgcaatttggttgcgtctgagaaaagttatgagtggatttagtcaaaaatttagcaaattttgcactttttgtccttcgaccaccacggggctacacatttatcaaagcgacaattttcactcaaaatccgaactgcttcatcggccatttctccaattcaattaattcactttcaccatg

SEQ ID NO: 104057 - DNA, 208 bp, Heterodera glycines
tttcagcaagaatgaaagttataacgactaatttcacttttatatacgatcaaaagatggacgacgccccatcatttagttccttaatagccccgcccactctcacctaaataattcacctgactaaaaaccgcaatcctttttaatttctctcttcaaacccaaaatcatccttaacaaaaagaccaaaattattttatacaaaatg

SEQ ID NO: 104058 - DNA, 407 bp, Heterodera glycines
gctccctaaaaacaacaaaatgattgactcattcccgcctcaatgccatttcaatgccaatagttcctccacatcattaaaaaatgatcaccttcccattgtgccattcatccaatcaccgccccttcgtctcctccgcttcttataaatgagtgccgtctctctccgtgtgccatttagcacattccgcgccctctctcactccctctctctccgccattctctctctctctctctcactctctctccctctgtccgaatgtctctttttctcttccactctgttctgctcttcatttttcttcagcttaattcttcactcatcagaggtccgtttctccattcattcttccgtcgttcatttgcttctcctccctctcccctcatcagctgattacgtgactatg

SEQ ID NO: 104059 - DNA, 242 bp, Heterodera glycines
ttcaaaaacggtgacactgttctcgtgttgattacggaaggtctggcaagcctaattggttgaaggcaaaatagtcgatggtaaaggtctaatttggaaggtcaaaattccacttttgaatattactgtcactcgacatgtaaaccaaatgcgttcttttgtcccttaccaaacagagacaactttttcggccgatttagttgaccaggttcctcaacagaaaagtccttgccatcacaatg

SEQ ID NO: 104060 - DNA, 127 bp, Heterodera glycines
aaaatatcaagatcttgatgataactgctcatttgtttcgcgctagaggccatttttcgcatagtctgggaaattatcaacaactattaatttttcttaattatacgatcatggcaagcaaagcatg

SEQ ID NO: 104061 - DNA, 296 bp, Heterodera glycines
ggtcttgaatgatataatttttttattgaatctttattttgccataatgaagtttgccccgcccctttttttgaaaaaatttccatatgaaacaagttccctgagggtttttcaggtccctgatcacgaatccagaatcaatttcgaccaattcctaatcccggacccaaattcgaacagaaatatctaatttcgcttctttggtctaaaaaggctaataatatttatttcaaaataagtattaccatcgtttatgttatttggcgcacttttgaatctgacattccaaaacaatg

SEQ ID NO: 104062 - DNA, 329 bp, Heterodera glycines
gggggggggtttacaggaagttatagtgttttcgccaaaaaaagaccttctttttttttgccttgtgacccattttttacaaatttgggtgtgatttttgaattgcttaaaatttcaagaaatttacccatttcaacccccccccccacccctggctatgcccttgggctgacttgtgcgtctgctttttatggatctttttccacatattttagccttttcccgacttcaaagcgttgtgttggcccgattgggtgccccgggaacactactgggacatcctggccatctccagcttctgccactcgttcgccccgctgctgatcatg

SEQ ID NO: 104063 - DNA, 129 bp, Heterodera glycines
attgttgaatgcgcttacccaggtttgccgcccatctttatcagcgattttgcgataaagcacttaattcgtgctcttgaaaaccctgaaatttcggtgggattggaaatagctcgccgtccaggcatg

SEQ ID NO: 104064 - DNA, 266 bp, Heterodera glycines
  unsure (1)..(266): unsure at all n locations
ttatttctgggactttttcagaaatcagaattaanttctcctatggtggcccaaattttaggcccccagccacagccccttgcttctcccagttttaagtcttggatttgtcaaataaattcaagacttcaaattaataatcaaaaattctcttaaaatttttttgaacccaattcaaaaaaggaaaaaaatttgcagtcaaaaaattattcgaatttctccaattttgtttccataatttccgaaagttattcggtatcataatg

SEQ ID NO: 104065 - DNA, 236 bp, Heterodera glycines
gcagtttgtctcattgtttttattctttcatcattcccctaattaatgcctacaaatttttctttttatttttttaagtttcgtttatttgaattgtatgttatagtttttgaaaagcatttatcttcatataaactgataaatcgttttgtttttaacatcattgtctggttcattcctaattatctctcaaaattgaaaattttatcttacatgaagttcaaggcattaaaatg

SEQ ID NO: 104066 - DNA, 874 bp, Heterodera glycines
cctagaagattttgatttaataacccgaaataaagaacgcatacgtaaatatgcattctttattatttgtgtgacatgattggaaaattgcaatttattatcaatatttatgcctaaatccctaattgtatccacaacatttattatatttccatcaattttatatatttctttggggtttttattccccaaatgaagtacaaaagtttttttaattgagattctgatctgccatttatttgcccattctgataaattatgcaatgctttatgcataatttctgtttcggttcttgctttataacaaatatacaatttaacatcatcagcatataattttattttcactcctgatggcaaagcatcaggaagatcgttaatataaatcaaaaataataaaggtccaaggacagagagccctgggggacgccagagccaacttttttactggaggataaatcatccccaattttaacacgaaaagtcctattactcaaaaagtcctttatccacatcaaaagtttgccccttatacctattttttccaatttgtataaaagtaattcatggggcactgagtcaaatgctttttgaaaatcaatataaatacagtcaacatttttttcatttattattgcctcgtaccaatcttccacaactgttattagttgactcgttgtagacctatttctaacaaaacaaattgaaattccgaaatttttttgttttttaatagaaaattgtaaatatttttgcttaaaattctttccataaccctgcagagtgagcaggttaatgaaattggcctatagttttcgggattatttttgtcaccctttttaaaagcggaaaaacaattgattctttccagatg

SEQ ID NO: 104067 - DNA, 1003 bp, Heterodera glycines
agttaatctctgccgtatttgtcggcctatccttttggcgctgtgtttgtccaaattcttagctttcccctgcccgagtggccttttgcttccggccggtagagagaggtcaatggcgaattggcggaggtgggcctccccgggggttaagggctcggggataagggctgatctctcacctttgtgttccgcccccttcccctccgggccctccttttttgcttaattcacatacaatattttggcctttattttttattttttgccaatttataaatggcccatcgcaaaattcggtcaatcaacggcttaatgtttttggaacaagtaattgaaagtgagctgagtgccattgtttttttgttgcaattgccaggcctttgcgttctgcgccgtttttgttgctgtgcaaagtgccaccgtaccactcgttgaacaaacgctaccgtaccagcagatgttgggccatccaatccatggcgaaagatgcgacccaaaaacggacggacaaatgtttccgattggcgacgctttagcgagtgacaaattcctttactgccatcgcgaaaaaaggtgaaggcaaactgagcaatgccttctgtttgggcatttgtccattcaattgaccgtttggcaccgaaaagaaaaggacgaccgaaatgactcatccaaaaaaggataattgccccatttaaattattccaattaaaaaagaaatgccttcatttccgacagagtttatgacattggtttttgcgttggcaattcgttcgatccgataaagcgaaaatgcattgccaaaacaacaacaattcacgtggaggaaggcgaaacgacgacaaacggagcacaagtgacaacaaaaggggattattcagcagcaaaaggcattttaaaattaatttattaatttatttattattttcccaaagtgccgacatttttgaaaatattttccaaagccacaaaacatcggaaagtcccctcgtcggaacaaaaaatg

SEQ ID NO: 104068 - DNA, 88 bp, Heterodera glycines
tctctttcgctctccacttcctccccctccttcctattggctctcttcctcttcctcctcccctcagtgctgtcccttcactgctatg

SEQ ID NO: 104069 - DNA, 104 bp, Heterodera glycines
tctgaagaaaaatccaaaaaatatatccaattattaattaaattaattaattacgcacataaatttcatcaccgtgtgctcatagtcgtcagggtttacagatg

SEQ ID NO: 104070 - DNA, 411 bp, Heterodera glycines
tgccatcaccttctcacctgtcaatcacattttcgtagccagccaaaattcaaatttgggttctctcgcgtgccatccttctctgctggcgttcaaattgcttctttcgccggtcttttcccttctttcaccacacacaccactgaaaatcgatcacactcttccgctaattactccgccccttcgcatttgtgctggaattggcgtcctttcattcactcttctactctctcaaaaattcagccagctttttcaaccaaccttctcgcccagctaatttcttttttattgtcttcaatttcctaatttaattcgtcctttttcaattcttcttctctctatctgtttttttgtcctgacatttcgtcttctatttattcccttttcttcaacttttttttgctgaaaatg

SEQ ID NO: 104071 - DNA, 67 bp, Heterodera glycines
ggcaaaacaaacagtaaaagaaattgaaaaacgatgtttatattttataggaattccttgtgacatg

SEQ ID NO: 104072 - DNA, 308 bp, Heterodera glycines
tttaatctggtcgcgtattggagcatcccgtgaggggtcttttgcactctgtcccccccccccctcctccctttcccttttctctgctcatttttatttacgcccctccggcgaacaaaacattggtgaaagagatttccttccgtgcactgtccccttccccccccccccccgacaaatgcccataaaaaattgggcactcttcgaattggccgccaattgtcccgccaaaattggggtaacagaatttgaaccattccaagagaattttcagttttttttattttattcttttcttgccaaaaatg

SEQ ID NO: 104073 - DNA, 485 bp, Heterodera glycines
agatagaaaattgtcctaaaaagagatagccattgttatgagaattaattcacaatttgcgcatttcttagggtaatggaaaaaatttagaagagctctctccggatcggattagcatcggggttaggcgatagaaaattctcttaacaagagatatccatttttctgagaattaattcacaatttccgcacatcttacggtaatggaaaaaattttgaagaggctctcaggatcggattagcatcgcggttgcgagatagaaaatcgtcataaaaagcgatagcctggtttgggcgatttcgtgcccagaaagtcgagctcgggacctcaatttccgtccgggaccgcgagaaaagccgagaccgggtaatttgtggttttagtccgtttaaaaaagaaaaaataataacttttaagtagaaatattttttattaattaaatttcaattggaataatttaaagaaaatagaaaaaaagtatatg

SEQ ID NO: 104074 - DNA, 499 bp, Heterodera glycines
ggcattttttttgctacttttttttgtacattattgtgtaacagtaccgataggtcacaaaagttagtccagtacatgttttggggtcatttgttcaaatatggacaataccccaacccgaaccttaattcgaacaaaaaggataaccaaattaatttgttttaaattgcaaagaaaagagagttaattctatactaatccattttgactattttttgaatgtttaaattgttttcctggccaaaaatgagaaaactcgaaaattttggattttctgtttttgttcgaattcagaggctcgtcggggggtttgaaattgtacgaaatgaaatttacatttctatgcgactaaaaaataccaaaaaaacacttaaagcaattaaaacttgaccactaaaaacagacaaattgtcaatcgccaccaacgcgtgaatcgcacactgccgtttatttcacaacaaacacgggcaaccagcagttgatcatctacggtgggatg

SEQ ID NO: 104075 - DNA, 198 bp, Heterodera glycines
gcgtttgatattgtcagagccttgattattccgcttgatcacttttttcctcaatttaatcagttttttatattaatatttgggttatttttttggtcactggttttttgtccaatgatcatcttgaaacattattccattcaccatgagaaataaataattacaatgctttcaccgtttccccccaattaagcgatg

SEQ ID NO: 104076 - DNA, 89 bp, Heterodera glycines
gtacatactaaataaagtacatttttgaccattgaaagtagtgctttatattgccattcttcaaattaaacttttgctaaaattccatg

SEQ ID NO: 104077 - DNA, 437 bp, Heterodera glycines
tgtcagaatttttcacaattaacctttaatttttacgctaaaaaaaaaatttttttaagcacaacgtctttcatatacacttaggcacacatttaagaggaaaaatcatagcataattaaaaacaaaacaaattttaagattttaaataagtatattattatattgcatcttgttgttggtgatcaacttttttatcgcaaaaaaatcaggaattgattaattaacatttcattagacggcgccaaactgtttccctcttgcgcctgtgctaatgtgggtgagctttttgatccgaaaagaacccctggctaccactgcgcgcctccttgtagcaacccgaaatgcaatacggcagttgtttgtggatctgcctttctttcagtaatcctaatttatatattgtataaatatatatatatatatttatagttcaatg

SEQ ID NO: 104078 - DNA, 1003 bp, Heterodera glycines
gggaaaggccgtcaatggtcagagagatggaaaaaagcaactttaaaatgtagaaaatcttcacattttatcttaatgggttttttaataaattaatagggatgcgatttttaggtaagaaaaatcccagaataggtacttaaatcgcatccctataaattaatattttaacagaaaacgggaaaatagccataaaaatcacaaataaaaatgtattatttaaagaaaaattttcattttcttctttctttaataaaatcaaaagttttttttatcaccgttccccggtttacgaatccccgtccgggggttcccggtttagtcatccccgctgtccccgttctcctgtttgaccggggatctcccgccccccccccgcggtaacgaccctagtctgttctgtattggtgacatttcttcatgtaattttctaaatattacatgcattaacaatttttcttttcattaaatttaattcattttttattattaaattcacaaattgtgaaaaattatagtaaagcaatgatttgttacttattacctttattattatattttttttgttgttaaaatagattcttttcatcttttctataaattgccactttcatatttaaaattattgatgtgttgattttaattatttatgaaaatgagttggctaatatttattacttttcaatttaaaaggtgagcagatggaaaagcaaatgaacaatttcgtaatgttttattttaaagaaatgttaaaaaagaagcattacaaaacacatacctttccatttatttcttgtgaaattcaaaaaattattgaataattcacaaatatttaaataatatttatcaaattctgttatgcatacacacattaattaatttattgaagactcttaataaaaaaattgttaaatttataaagcccatcctaaaagaatcatttaataaaaattttcatttgaaatataaaatttacttttatatacaatatttttagaaaatg

SEQ ID NO: 104079 - DNA, 311 bp, Heterodera glycines
atatatttcaatcgttcttgacctttgatgggtttattttattatgccattttaagagcaccattttttgaaattatttttgtcaaaatgatcgatcagtcgcattgaaatactgtaagggacaaaccgccgggagaggagtgacgggagggtttgctgaccgcgtgggttccattcccaccctgccatacagtactcttgctcatatgctcttcccacccacccccaacaatcgtaccccttattaccgtatcctatgattgattgtccatttcatctgtgtaaatccccccccccccctcccaaagatg

SEQ ID NO: 104080 - DNA, 280 bp, Heterodera glycines
aagataatccataaaacaacaccgaatttagcctcccaaaatttcaaaacttatttcgaaaaaatatcaaagcaacaaaagaaatctgttgcaaattgcaaaaacaccaacaaataagcgtacagctaatgcattgtctattttgcaagaaaaccattcgtttttgtatctcacaaaaaatggaatttctgctgattttatcttacttaagcaaagctaatagaaaaaaagaaagaaaacgaatcggaggggagagagcacagaagaaaaggacaaaatg

SEQ ID NO: 104081 - DNA, 229 bp, Heterodera glycines
tctaaatgactgacagggaagtgaatgataaggggcgtggcataggagggcatactgtggatggatttcgaaatcctcccgtctggaggtccctgcgtgctctcagttgagtgggagtggcctattcccacgtgacaccccccgccctctccgtcacgtcacatacagtacccccacacttttccttctcattttcatcttaacacacaaaaaatattcctcgaaaatg

SEQ ID NO: 104082 - DNA, 115 bp, Heterodera glycines
agtgagaggggagcgcgaaaactagtgcagcagtcaggcggatcactttttgcccctttgttggcccccattctgattgaggctgcccgatacctgctttcgcgcagcaataatg

SEQ ID NO: 104083 - DNA, 62 bp, Heterodera glycines
tttttaacagattttcactgaaatttttgacattttacactcaagaatattttttcaaaatg

SEQ ID NO: 104084 - DNA, 943 bp, Heterodera glycines
tgatacatttgaaaatgtagagctcggctagcgcattcgaataacacaaaatttgttttcatttgcccccaaacaatccgcttatgacgggccgaaagaaaattcacaaaaatttggcaccggaaaaactccatttttttatgggccagcataataaagtaaacccaaaatgtaagtgaatttaaattggtcatgtgagatgtttagttttttatttgacccatccgttttctgggaaaaaacttttcgagaaaagctgaaaaattttccaattgcatcagaagcagactcaaattcttcaacaacataatgtaaaaaatattacgcaagaaattatttttacatcctttttagaaatgctgcataaatttttattgtaaatagtagagatcggctacgggccgggcccgtatacgggtttttacgggcccgtaacccgtaacccgtatttttttcggtcgatacgggtttttacgggttaagggttttacgggtttttagcccgtaagcccgtaacccgtatcgatgtcaaacccgtaacccttacccttacccgtacaattacgacacgggttttacgggttaattttttacgtttttaaggttaaattgagtaaatttttaaattttgtgtagtcaattcgccaaacaatttatttctctacttgaaactgtaacagaatgtgatttacatggacaaaaaggtgattaattttgtaactgccacgaacacttcgttcaaagcgattgaccatcccactttccattcattgctcgcgcctcaacaaattaaagtttttgatggtttaaagctttgtaaatttttatgtttagggagagagctattacagaaagcaaattcttcctgatgtgtataagcaagtgcggaagaaaatcaaaaacgaattagaagaatgtgaatggctttcattcacaactgatg

SEQ ID NO: 104085 - DNA, 98 bp, Heterodera glycines
atgatcatttacaatcattaagaaaaacatttgaacgctttcgcttgtacaacctgaaattaattcccaaaaagtgctcttttgcatcaaaatcaatg

SEQ ID NO: 104086 - DNA, 144 bp, Heterodera glycines
ccattgggaacaaccacaattctgctgccgtattaccccttttttttgtcttttttattttccgttatgttttaataatgctcatttgtcattattattatattacatatacattatttcaggcagaaggaattacgtttcatg

SEQ ID NO: 104087 - DNA, 1003 bp, Heterodera glycines
ccctcagttagagtatacaattttaaagttcttaatataaaatggaatatatttaaaaaatttccggttttttcgtttggtacgaaaatggtatttttttcgtttcgtgtttcgttttcgtgtcgaatgccctttttcgtttcgttttcgtatacgaaaattttttttgtgattttcgcacatccctgttcccaaactaaacatttaaaaatttcttacttcgatttttgccttttcgcgattttggtgccttatcatgcctttttcagtattttttgaaaatgttaataatattaataaaaagcaataaaaatcaaaaattacccctaagaagcgttcttaatttttttttttttaaatttagcaagacctttcattttaaaccgatactttcgtgacttacttctcacaattaaaatgcgggagtttgtcgagtgcaaaattttaattgtttaaccacaatctttgtagcaataattattaattcattaaacgataattacttttgtcccacattttgtcacgaaatgaaatgcgggagaattgtcctgcccaagtttatcccttcagtaaatgcttggcaacactttttatcttgtcaacattttcttttcctagcaatttctttaattaaaagataaatttttatttataattaatataactagggttataagttgtatgcactaaaaaatgccaaatatgcggataaaatatgcactaaaaatcctccaaatatggcctaaaaacccgaaaaatgcccaaatatgcactaaaatatgccttaaaattactcaaaatggcttttaaccctcaaaaaaatgccaaaattatgtataaatacagaatcgactttaaaaacatcaaaacaaaggctaatgagcgtttttagataattccaaaaaaatttgattttctaaatttatatatgcaatttcgaatttttaaaatttttatcatttctaaaaaaattgccaaaatatgctctaaaaacgcaaaaatg

SEQ ID NO: 104088 - DNA, 474 bp, Heterodera glycines
actgaaaacgattttatgatgccccaggagcttaaattgctatattgagtttagatttagcattgtcatcccgtttttagtgcattcataatttaaatggactaaatgaagttttatttatgtaccctactaagcctaaaattacataaactttgatttttgtttggctcggctttatctgctcgagaatttggctaaaaaatggttggtattggtgtctcggtcgattttgtttttttttgtcccgagtcgagtttcgttctcctgcttcaagagtaagcgtcgccgggtgattttttgtgccataacttggtccataagtaaaaaaataattttatgatgccaggagacttaaatagttttaatttaagtttaatttagcattgtcattcattcttcccgtttttagtgtgttcataatttaagtgtgaattctacatatttgtttaaattgaatgtctgttttaacgaatg

SEQ ID NO: 104089 - DNA, 92 bp, Heterodera glycines
aaaaaattttactttaagtctgaaaatgggtcaattacgcagacaaaaattttctcggtttaaaaaaaataatttttatttttaagatcatg

SEQ ID NO: 104090 - DNA, 455 bp, Heterodera glycines
ggtaagccttttctgacccaagggggtcaatggcttaatggtctgtattaaagggctcctgatgtcccttttacagacagggaaaagattaagactcttttcttaatctttattcaatttacacaattacaatttaatgcaaattgtttggacagaaaactgtccggctgacttaatcaaaaattgatcagtgaagaaaatggagaatgggccggacttttataccctcacaaatcaatgggggcggggccaggcacgtgaaaaatgtgcacaagcaaagggaaaaattccctcaaaaatgatgactcataataaaaatgaagagagaaaaagagatgagtcataaaaaagaggagcgagcgaatgggaaaattgatcgacgaaaaaggatcaaaaaataaaggaaatttcaaagaaatttgtgtcgcttcggcgacagttatgtaacaattatg

SEQ ID NO: 104091 - DNA, 191 bp, Heterodera glycines
atgattattattaaaattgctagcatttatttatatttgtaataaaatattgttcaattaaataaatttctataagtaaaattaatttaataaaattcttttttatttgaaaaaacatcagaagtgtttcctttaattaaatcattaaataaaattcagaataacgaacctcaaattggtgcctaagaatg

SEQ ID NO: 104092 - DNA, 1003 bp, Heterodera glycines
ataatttcatttacaattgaaatatttaaagttttaacgtgtttcgctacctaaaaagcgttaataaaaaattttatttgcctatttttgtgcctatttaatgcctattttgcgatttttttctgcctttttaggtgcctatttcgcgattttttgtgcctaaaaatcgcatccctactaatcaataattatctctaactctaacaaaaatattttttcaattaatttgccataattttatatttacaaattcttatttttcttcagtgatcggtattatttttttggagttatgttttttattcactttatcatttaaatttattaaaatattttatttaactttattcaatctaaatttgaatttgtttaataaattctcgatctgtattttgattttgtttaatttttttcgcgcagtacggatgagcgagacggaccacgaaacgtcggaggaggaacggagcggtaatctgtgccgactcgtccaaactcaaagccacgattttggttgtttatttgtcggatctggctatattaaattttgatctgtagaaaaactattatcgtgtagcttttttggtttttattattttttcattttaaaatgttattttaatgtttttcacaattaattaccaattgaattttttacattaaaaattttttaaggctgcacaacatgatgaagcatatttataaataaaaatagtaatttattgcaagataattagaataaatgtgctgtttttaaatgttaatataatcagttatttatatatttaaatagaatagcaaatattaaatgtaaattatttattatttaaatatttatattttggctcaaagtttccagcaaatatttttatgagtttgtttttaatggcatgtcattttaattatgaatttttgttcttataatcaaatagtagttagtatttcattatgtagacatacttatttaaactaaatcatgcgacatttgcggagcagataaaaaatg

SEQ ID NO: 104093 - DNA, 833 bp, Heterodera glycines
aactcacatgacgtcctgcgggtctcacttctctccttttcttcaatcagcacggtatgtctttcggtcataatttttattattaattagttgggtaattttccttttttgacccctatcatttaagcactttattttctttcattttctctgcactcacaagcttttcgatttcacccctccttagcttccggtgttcgcaccatttacactgtgattccttgactgcaatggcagaaagtgggatgattctgaaaaggtggcacgcctcaaggcatgccttgatggtgaaccaagacgtatctttgataatttaatgcctgcccacaaagcaacttcttcggaagccattcaaaaaatcaaggaaaaccttgacactccacaaaataaagaactcacctatcaggcactaagcatgtgtaaacaaagggaaggagaatctgtagatgagtttagtgcacgactgattcctctaattgaggccaccacggcggaccttacaactaatgctagtgaggaggtactctgtcgagcatttttggaaaaattgaatccaaatctcaaatttctcactcgaaccctgagtgggcccgtcagaagggattttcaaatattgagaatgaatgcacgggaagcagaaatgatgcatagagagattcctaaatctattccagcacctcttttcccaatttcggaacaacaaaatccgagattcaacaacaccgagccgccgaaccacccggaaggcaactttagaacatgggctcccacaggctctaacagagagcctataagtcccagacagaggaaccggaacaattgggataacaatg

SEQ ID NO: 104094 - DNA, 119 bp, Heterodera glycines
ttttttttttttgcaaaacggtttatcttatattatccatgtttaaaaaatattatatatacacaataaagctttacagaaataataataataataatctcttaactattaaacaaatg

SEQ ID NO: 104095 - DNA, 616 bp, Heterodera glycines
aataaaattgcattttccaaaaataatttcgaaatgccaaactattgcataattaggacaggtaattaattatatggtaaataagcaagaaatatggtcatcaattacggatcaaaaatcgcgaaatatggatacaaaattgcaaaaataaggacataaatttttccaaattgatgagaaaattctaaatcttcactttattaaattttaataaaaaaacgctctaaaatgggtgaattgatattaaaaataattcccaaagaaaaactacaaacaaagttaaatttattaattttacgaaaaaaggagccaaacgaattttcttcatttttagttatattttttatcaaaaataatatttgaaggcattcttatgataatttttgaaagaaatatttgtttttcatgaaaattttggtcataggtgaatataaaaataaatgggaaataaggaaaaacatggaaaatattttatagaattccatcgaaaaaataattttgaaaaactagaataaaaaatgtcattcttagttctatatatgcctatcataaaaaaaactgttataattgaattctttttaattttgcttcattaatttattttccaaccagcatg

SEQ ID NO: 104096 - DNA, 593 bp, Heterodera glycines
tttctttttaagcattaatctctcttttcccagcctaatgtttccatttaatctttcctatgttttccattctgtccttttcctttgtcgcttttgatgtttaacaacagactgctatcccatccctctctctcgatgttctcgaccacacccctcacaaacgatataaaagcgatcaaatccatttatttgtcaggtcttttaactcattctcattttgggtcaggttccctgcctgccatttctttgctttaaaatttgaatcacttactcacaatttgccttgcttttgcttaaataaatttccttttaacttgttgtgaattgaataagttttgggtacgaatcacttagggacatagcactttttggtgccacgacccgggagtaagccgtcagtgctcccctgattcgtagaagaaatcggactggtcaaagtttagtacttccagtgccgaaattcatttgagctggtcaaagttaagtacttccagccggagatccaaaaaaaacagaaaactgatcaaatttcagtgagctgatcaacttgtgtagtttcagccgggcttagtgccaaagaaaaaaaaaacatg

SEQ ID NO: 104097 - DNA, 400 bp, Heterodera glycines
aacaaatgaaagcaactaaaaatgccttcaaattcattttacgttatccttccttccaacacaagtgttgatggaaaccgaacaaactccttccgggtgcgtctgcctcgcaaaatccaattcaattccgagtgggaagtgggtttggcggtcattgtttatccacattcatggccctccattgggacggtggaagaacaatttgtgcaggttgattggcagaccggaagcacagtgcacattgccgtccccactacaaatattaaaaatcctgatgatctgagtaaaagtttgtacaggctgttgggcgagggaagcgaaccgttggcaaaaaaagcgcgtaccgctcagttggcattcaacaattccgcctcggttgctcgccaatgggccaaggatg

SEQ ID NO: 104098 - DNA, 578 bp, Heterodera glycines
aaaaagaaaagaaggaagacgtcttcagaccatttcgactttttccctgtaaacgatgtactcttgtaatttcccattgatttccaacttttacacttgtcaaattttctttaatcaaggaatgacattcaaattagttctgcataaaacaatttctttctacgaattcgaaacaaatacagtattttatttattctgcctaaaattacaatttctttatttattgttagtaaatgtttttcgtttacctccgtttagtctccgcttatgttttctcatcagtgtgtcctaaaggcatctctcttttctcgacgacaatttatacgattctcaaactctgaggtggaatccctttttgtccctttttcctgtatgtttcttatcttttaaattccgcagttgaggcgttcgacgcgtttatttcgtcatttccatgccttacctccctctggtgttccagttaatgtaagcgaccaagttaagcttacaataagattttaatttgcaaaacatgggttcggattaattgttctttcggattgtgattatgtttaattgaagattgttttctttttatg

SEQ ID NO: 104099 - DNA, 493 bp, Heterodera glycines
aggtggcggaagtgcctctgatctgcaccccgatcagaacagagctcatcgagtcgggagcagtacccgacagcgacatgaggactatcacacagacaacacaaccgcagctgttgatcgggattcgaaaattctgggatttcgtgaccggctttcggaaaacggaaagggcacgtacattgtcgacacggtgtttgggccaatcgtgtgcggcgaacggttccaagtgagtagcggggcaactcccgctccgtccgtgttcatgacattgccatgcggagaagatgaacgcgatcaaatgccgccgatcagagcagttgaacaattttggtcattggaagcaatcgggataagagacgacccgacagacgacgcggatgcgcaagcagtgatacaattcgaacgatcagtgcgccaactcaacgacgggcgctactccattcgattgccatggcgggagtgccaccccgctttgcccaccaatttcagcatg

SEQ ID NO: 104100 - DNA, 81 bp, Heterodera glycines
gctaaaatttttgttaattaattattcggtaactttagcaaattgttatatgatacaggcttccttaaaattctgaaaatg

SEQ ID NO: 104101 - DNA, 296 bp, Heterodera glycines
acgtgcccattttcagccgaccacttccaaactcagtgacgtgcccgatgaggagggcgaccgtttgccttccggcgaactgatcgaggtggaggggacgcggctgaaaatatccaaaaaactgtacaaatgcgcggaaaaggagcgaaaagaagcactgaggtggcataattttgaacgaactgccgaattgggagagaaattccaatttccacagattgcacattccacgcaaagcattggagcggccgttgaagaaaaaaaaattgctgaaaagtgcaggcaaaaaaacgatg

SEQ ID NO: 104102 - DNA, 184 bp, Heterodera glycines
gagtgcatggaaggtaagctccatttttgaggccatgtacattccaggtattaaccaggaatagcgcggtcatggttatggtattgagccaggacatgcggaccttgttcatcattttcacaaggtttcgatcccgtggcaaaatataggaaaaatggcctcgtgcctatgatttcaagccatg

SEQ ID NO: 104103 - DNA, 91 bp, Heterodera glycines
aacacattgaccacattttgtgctgaagggcacgaaaaatgccctccttttcaatgccaaattgggtgccatttttgctgaagtggcaatg

SEQ ID NO: 104104 - DNA, 232 bp, Heterodera glycines
aacccctccacaaaatttggaaaaattacacgtgggccaatttaatttttaaaatttttcaattattttcgtaatacaattaatttaaatttgttttctacatttctacatagggggaatataggggaataaagagaaaataaacccttgttagatgattagacaaggtgtggttaatgtttatgcagcagggactcatgcaaatgctcatgaacatagacttagccaaatg

SEQ ID NO: 104105 - DNA, 363 bp, Heterodera glycines
ggattagaaatgggaactttttcaaaatttaaaaaaatgaggataaaggattcaattaaattataaacattcccctggcggggaagcgccgtttggggcctcattttactaaaatttgaccagaaaaatggcaaaaaatttggtttttttttttgtcataaatgcaatgcatatccatgattttcttccgtggagttgacactattagaacggtccctgtgattaatcagctattatgggttcgaatcaattccttgttctgtcaagacaaagagttatcgtgcatcccatgtgactgtgatcgtcatcagcatatagtggcccagcaaattgcttgacatagatatttttacagaaaaaatg

SEQ ID NO: 104106 - DNA, 202 bp, Heterodera glycines
gtagagaaagaaatgagacgacttgtatttccgatttgttgattaaagttgttgtgttacccgggttttctttgaaaatgtttatattcggtttcacaaaccacggcgacagcttttttaatagcgtattgttttttcaatcagcttaaccaacttgaaacagggtatacacgcttcatcaatctttcgaaggtcaaatatg

SEQ ID NO: 104107 - DNA, 216 bp, Heterodera glycines
  unsure (1)..(216): unsure at all n locations
taaaaaaaaattgtacatatctntattactttgaaagaaagttaaaataatgnatagaattaatgaaaacaaattgagggaatactaaaaatttatctgattaataaatntaaattatttttattattatgccgccaaattcaatactattttatagtactattaaaaaataaaatattcaaaaaatgcctattttcagttaaatgccataatatg

SEQ ID NO: 104108 - DNA, 861 bp, Heterodera glycines
tttgcagcaaaccggcaggctctgatctgaccgacgatgatggatgctggtgtcctcggacgaacaatttacttttttttgatcgatcagtcccccccccccctctctcaactaaatgatataattacgacgattcgattcgattttttctcactttttcattgatttggttgtgtatgtatgtgttgtttcctttttcacacccaaaggcaattttccctttccatgtgtgcgcaatgaacatagagtttgcaattttcaaatttgttggacaaaaaacgcagtttcatttcggagggttttcatggctgtcctttgaatgtcccgacaaattctttacaaaaatgggggattttgagcgtgtttaattacaaaagtgcttaattaggccgtacaaatggttgaaaaccactcatttttgatgattatgttttaacaaataaacctagacctttaggcgctcccttcccgagtttttgtgcttttgagtcctgccaaaaatggaaaatgcctgtccggtggccgtaactacctatattttttttctctgaatcatgctcattatttggatgggtattcatttgtatgctccgttttctattcggttgtattgctgaagttttttttttgtctggcgatttgctcaataaattaaaacatgtatataattcatggaaacaataatagggtttgtcgcctttcgatttaccatttttcatcttcttatttttatttaatttttcataaattctcctatttagcaacttcatcaaatccaaataattaattaactaattaattaaagctgcctaattaattgtttgtctcaattgattgtcccgcccaaaaagcaacaaaatg

SEQ ID NO: 104109 - DNA, 675 bp, Heterodera glycines
  unsure (1)..(675): unsure at all n locations
ctttatttatggtctgtaatttntgtgaacaaatataatgacaatttatttttaattaataaattaatcgctcgtaaaattaaaaaatattattattattttatcaaattaaatacatgtgattaacaaaagcatttaatattatttccaccaacattaatcgcgtttttgcttatgcaattaaccatcttaaaaaaaattttcatatttgttttattaaatcatcaataacgagatttgggcaaatgtcttaattctttgctgcgattacttaatacattgaaataaatataaaaaacgcaattttagcttggtatggggtttataggataactattataatgcctattttgctattttttcttttttttttttgcctaattaccaaattgtcaatttaaattcccagcctaaatttatgattttcaaaatctcataaacttaaaaaaacttatttacctcttttaaattttttcaagcctagtttgattgtccatttaatgtctttttgagattttttgttcctgttcatttgcctatattgcgtgttatttgtacctaaaaataagttcatgtcaggcttttccacaattatggtcctgactatttttattaaaaaattaattcattaatatagttaatgaaaataattttttcagtatttttatcagaatg

SEQ ID NO: 104110 - DNA, 1003 bp, Heterodera glycines
  unsure (1)..(1003): unsure at all n locations
ttaaattacaaaaataaatttgtgtttaattttcaaattttactttatttaaaattaataataataaattcgttattttcaatacgaacatcttttatttggtatataattttcattatataatttttaattttcccttgaataaatttttactaagtttctttcaagaatttttccaaaaatcactgaaaaattgtttaatttttttttgaaattttcctataataaattttctaaaaaatttttaatttttaactaattttatttatttttttctacctttattaaacaagcaaaaataacccatcttttcacacttttctgcacaaatacaatcgtaaaagttgaagcaacattacatattatgtgtcatgtcattattattatataattgcagcgccgaaagcattgcgcgtaatcgtcgcgcgcgcacgcgcgatttgtcacaccaccaaattccattttccaattttctattcaaatataatttgttcgaaaaaatcccaaaattttccatggtaatatggatctaggggatgattaagttatttctgagcaaaaaatcatcgaaatatataaacataaaatatgcgaaaaaatctcaaaaaatatcggaaaatttattcccgagagaaagagagtcgagagcgaggggatcagctcattttccctctgacaaaaatataaaactttaagttttctcaagttttttgagttttattcctgtaaaaacttaaaatatttcaaaaaaatttatttttaatttattttttgattatttttaatgtttttgtcaaaattcagatattttattaaatcatatggccaacattgtccctcatgatgaggttgatgaagaatatcatcgtgaaacgagcgaaaattcccggccaaattacacagcagtgatgacaattgggccanatgagacaaatgaggaggacaaaatgacgacaaatgatgtggacaaaaggacgacagatgagacggagaaggataaatg

SEQ ID NO: 104111 - DNA, 149 bp, Heterodera glycines
cagcagcagcacgggcgaaggagaggaacgaagcggaagtgaggacggactgtcgaggagaagcggaggggcggacgaacgcgcggcacagagcgtcggcagcagtcggaagcacttcacagcggacaggggaagcgggcggcaaaatg

SEQ ID NO: 104112 - DNA, 68 bp, Heterodera glycines
ataaaattttctaagcgactaatattagcatttttccacgcactttggacgcccataaatcaatgatg

SEQ ID NO: 104113 - DNA, 162 bp, Heterodera glycines
agttaaattaaaaaaaaattaaattaaaatttttatttaaaagaaaatgattaattaattacccattaaatttgctttttgtcttaatgggttttcgtttcagttttcccggccggcattcttcagcccgtcttttacaacaaacattttccacgctcaatg

SEQ ID NO: 104114 - DNA, 415 bp, Heterodera glycines
tcccccgtcgcccccaccgtcgggcgcggcacgcaatttcaatcagcttagcggcgcccgctcaaagtgcgtaatgtgacacaaaactgatctgaaacagagtgctcaatagtgctgtcttggttctttttgtgatcagactcttccaatgatgatcaattgttttcatgagcctgatcactcatagggacaataatagcctcaagcgttgatcaacagatcaccctgttttgtgacccttatccaacttgggtctgatcaaatcaacttttggtgccgttgtaggcgattcgactcggctgctgccgttcccggcgagttccactcggtgcagaatgcaatcgccgtcgctgtgctggtgcggctccaccagtggtgctgccggctgttctggctcaccattgtgtgcctgatg

SEQ ID NO: 104115 - DNA, 103 bp, Heterodera glycines
taaaaataaataaatacaaataaataataaattaaatatcatttataataataaaaagaataaattaaatattttggtaaaattaaaatattgttctgcaatg

SEQ ID NO: 104116 - DNA, 806 bp, Heterodera glycines
tctttcgtctatttctctgtctgctttgctctctttctttctctatttctttctctgaattctctgtctcttcttgtcaattctctatctgcattgctctctttttttctctgagtttctctgtcttatttccttaaaatttctttgtttcttttcttctgttctctctctttcttgtctatttctctgctttgtttctttttcttttccctcttctctttctcctacgccattttataaaatgtgctttggttggtgttttgttgtgaataaaacaaatatcaaactgaaaaagcagtagcagcagaagaactgacagacacatgcacaaaccctttcttttttgacaccgatttttattattttaaaaatatttatttatttttattattatccataaatacactaacccaaagaagtcttgcctcaaacatataaaattgttcaatgcttaatactagggctataattacatagaaatgctattttgagcccctttcttcatagcatatgcgcagaaaaatatgcaaaagcatagaatttatagtcctaattattacataataaaagtcagaattatcgttgtaaatattttagatgtctttttcaaatacccaaaagaagaattcccatattttttttaatgactgagttttggattccgaattgaatgatttgtcaaaagttacgcgcaaaaagtctttcgcaaaattaaaataattcatgcttactttctgtattatatgtatatatttttttgtcattttagcacaattttgtttaacaataaattttttgaaaaaatg

SEQ ID NO: 104117 - DNA, 920 bp, Heterodera glycines
ttcccatgattttttggtgagaattcatcgactcccctagcatccgtttcaaataattgaagcatcttttttccttataaaagtgcccagtaatgcaaaaaaaggttagtgtcgtcatgtgccaccacctccccccccccctctccgaacggcaccgtgcaaagtttgtgacgaataaatgtaaccgaatccaccgccgacctttgccgccccccacgccccctattgtccctattttgggcacaagtaaatattgtaattttaaatgcgttttttcttttgttcgcgactgtaaaaatgccaaaaaaacctttaactgatctttatccattcactagcagaattgcaaaacaaatttcatttcaatgatttttaggcattaatcttcagtttgcaatccaaatatgtacttaagaaaattgtccattttctatataatgcaactaattcgcttttggctactgtatttattttaacagagattatttttatatttttttatattattattttaggaaagcattttaatttttttttcatttgttgtggctaaaatggcagtgcttttcaacggcaacaattttcggctttcgtgtaaatccgccgggtgccgctgctgctggatgacatttttgtgcgcaacaattttaagcattttttttgcttcaaatcgtgcggaagggtgtgttttaaatttaaattcataaaattttcttgaatttttgtacaattcttaatatttgttaagagagggtatgcttggtaaaattttcagctttatagggccatggaaatagctgaaaaacaacccaaaaaaaccctggcgctataattttgttacatactgtatttattatcattgtcccaccatttcctcacctttctttgagtaccgttgcctttttgtcaggttcatcatg

SEQ ID NO: 104118 - DNA, 262 bp, Heterodera glycines
cctgcttaatttgttttgttatgcctttggcattgccaatttctctcactttttgtgttcaacaactgttcaatttactcatgtcaatctcttcttttcgatctgttcttttggctatgtctcaatgctctccattttttcctcttctttcgacggacggacaaattaataaattgttttattttgggataacatttaattattcatttggatattaatgttttgtagattttgtataatttcatcaaatctttgagaaatg

SEQ ID NO: 104119 - DNA, 620 bp, Heterodera glycines
atcgcaaaaaccatttgaaagaaaacgaaatacgacgatcgacgagaccaaaaattaaatgatgttcatttaagcaaatttctaatttactttggaataaaaaaattatgatttagtttaaaatgacgggttaatgtaaatgcaaattaagttggaaaattttttgggcactgaattatttcctagggatttgaaaattcattaattttattcaaaatggatacccaattaattataattaaaataattcgaatgatgatgcaaattaagttggaaaattttttgggcattgaattatttcctagggatttgaaaattcattaattttattccaaatggatacccaattaattataattaaaataattcgaatgatgtcattgaaaaagaacaaggaaaaggaacctgaggtgatgtcattttaacttttctattttgtgtgctgtgctgggcattttattattcattcgttcctccgcctttgccttatcattttgttcatttcattccttttcgcgtaaacaaaaattttcaatttattattgctgagcaagtgggtatttaagcggggtttccttttgcaattaattaattgtaattaattgatcgtctccccaatg

SEQ ID NO: 104120 - DNA, 715 bp, Heterodera glycines
agttatttgccaaatttaaatttaaatttaattgattaattaaataattactaatatgcgcctaatgaagatgcaattaacaactgttgcgtggcgcatgacaagtaaaaaaaaaagaataattaattaaatttatttttgtttttaagctgctatggagaccaaaagggccttaagaattgtgatgacacattctgcaactgtttagaagtaaaattaaatttatcctttttaaaatatttaattttataaaataataaatttaaagaatatattctctttacaaaacaaaatttatttgattttgtcttttcagttgtcataatttttttgtttcactaaaattttttagtttatgataatataattagagatcggggccccgctgggattttgtcaggcctcccggccctgatcccgctttttttttgtcaaatcactggaaccggcagtcccggaaaaaacgggagtctaggtcccggaatcccgccccgctccattttccaactctcgttcccggcaaattaaaattccgggctctaaatataatataaaattttcacaatttttattaaaaaaaacttctaatttaatcagcggaaaaacagatagggatgtgccatagataacttacccttatggatgtatttgttggattccaaaaaattcaaattctaccggattaaaaaccaataaaattaattatattttaatg

SEQ ID NO: 104121 - DNA, 71 bp, Heterodera glycines
cgtgtgaaataagattttgagattgaaattatggtcagtttcatttgagggatggcataaatggtggaatg

SEQ ID NO: 104122 - DNA, 74 bp, Heterodera glycines
attttcagagtttttgaaaggacgggaacgggtacatcactgcgcaagagttcaggcacttcatgaccaccatg

SEQ ID NO: 104123 - DNA, 306 bp, Heterodera glycines
ggtaattaggtttggatttccttcccattttgtggaatttgaaattttttcggtattcctattttgcgtatctttcgaatttttgaaaaaataaattcattaatatttttcagagagtgctctgaaacacaccaaactttatttacaggttaattaaggcaccctgatgcttttactatcaaaaagggcgatgaataaaaattctaaaaatttttaattgctttttaaacgagcgaaaaactttaggcttagcttttttagtgaaaattcaaacaatcatagtttttcgcgttctgttcagaaatg

SEQ ID NO: 104124 - DNA, 1003 bp, Heterodera glycines
attatcgggcgccactggaagcggtaaaacccaatggcttatgagactgttgaagcatcataacgaaatgattaacccacctcccgaaaaagttttatattgttattccgaaatgaacgattcggtcattgatttgattaagcgtggcatagaaactcataatgggattcccgatcagacattaatcaacagtcaacctaagcctctcctacttgtgctggacgaccttatgctgaacataaacaatgattttttagaccttttgtttacgcgcggttcgcataattggaacgtaaacgtaattttcgtaactcagagcctgtatgggcgaaatattcggacagcaagagcgaacagtcattaccttgtgctgacacgtaacccatccggacagcttcaggtacggacagtcggatctcaactgtttccaaagcgtttaaatttttttatggaatcatataatgacgcaacaaataaaccgtttagctatttggttataaatatgcatccaaatgcaccggaaactgaacgtcttactagtaaaatatttccagacgagcatagagtaatctatttaccgagcgaataatgtatgcgcgctaaccgccgcattgtctatataaagaaatgaatatagaaaaaaaactaaaatgtatcaatttagtccttacgttagggaaaatacagatttcttaaaaaagcttgcggccaccaggtctgataaacgaaaaaacgatctattgcagggagcatccgcagaacaaatacttgcccttgtggaaatttgcgcaaatattttaaaatttaattttcgtctaaatccgagccagaggcgacggttgtcacaatacgcggactattacagggccatagcacgcgctcgcagtgagaactcagctcggcaaaaacttcaacaagggagcggaattgcccttggtgctattcttgtgcctgttctcagtgtcttagcccaacatttgcttgaaaaaataacagcataatg

SEQ ID NO: 104125 - DNA, 186 bp, Heterodera glycines
tatgtattaagtagaagacgccgaaaaagttgtagtttatagggccatagaaaattttaaattttagacaatgaaattttcggctcagtataactgaaaaaaaaaattgaaagtgtagtttatatatagggccatagattttttagatttaagacaaaaaatttcagcatttttattagagaaatg

SEQ ID NO: 104126 - DNA, 1003 bp, Heterodera glycines
agtgaaaaaaaatttcaaaagtttcctctttgcaactagcgccgaaatgttcatacaacaacgatttgaacttagacaaagtgatgatgtaaaaaaggagagcttttccaaacaattgggtctcggatatgcttaacacttccacaaacgactaaacaatgacaacggtacatcaaggaacaaaatgtggtgcgaatccttgacgaggccgcctatgaatcggacgaaggattggcaaaccctggtcggactcgtttgcagggctttgtggtggggcttcacatccgtggaaatggagagtgattaagaagctaatgatacagattaaaaactgaactatgattttatacttcactttctatgtttctttggacttttataaatatttctttgcttttttaggctaaatttcattagcattataaatagctaaatataaattaatttagaatatatatttgatgaaattcattgtcgaaagatccattttaggttagtaggcgagatattcagtagtcgaaatgtccagtaggcaaacgtccgattttgggttagtagacgaaatgtcgaataggcgaaatgtcagtaggcgagatgtccagtaggcgaaatgtccgcacaccaaaaattttatcaagattttaatttatttgagaataaaacagagcggttggcgccgcaaagcggcgcccccaaggcgctgttattttatatttgaataattatccattgagtcatattaaacttcataatttatgcagttgaattttcaaaaggccttactgtgtatccgatagacaaataaaattttgaatttttttgaactacagtaggaacaaaattgagcaaacattggtttgacgggaagggacattaaaccaaatttatttataaattttataggcaagtgttttcgaatttttaaacattttcggaagcaaaataattttttttatttgcatcactaattatcgaaatttagaataatcagtgcaacaaaatg

SEQ ID NO: 104127 - DNA, 110 bp, Heterodera glycines
ccgcatttacggtcagatttatcatagaatgaatttggctttgaatccagaagatggcgatgatcctacttatgggcagattttcatcgtagatactagaaaatgcaatg

SEQ ID NO: 104128 - DNA, 245 bp, Heterodera glycines
ttttccttaaaatcgaacattgcagctataaaatataattcccttatgatttaagtaatataatataaaatgaactatgattagttcaaggcaattctcatgaccctttagtaaagtggacagcagataatacaaaaaattcttatcagtttccgatttgcatatggacgagaattttcatcatcggcaattaattccctcaaaatatttaccacccacccattctcctgtcgatttctgcaatg

SEQ ID NO: 104129 - DNA, 142 bp, Heterodera glycines
ggtggtcgagaacagtgaataaataaccaattaaatggagcggcaattagctaattgaaggatgacagtcgcgcacacgtggcaagaccttcgaattgaaagcatcggaacgtcggaagacgcgcgcgggagggaagacatg

SEQ ID NO: 104130 - DNA, 851 bp, Heterodera glycines
aatttttattaagaaaaaaattttgaaaaaggaaagtttctgaatattgggcattctattttaaaaattttcaaaaaatcaatgcaggatcctgctgaatcctgcataaaaatcaaattggcaggtcctgttgcaggattggaattcaaaatttttacaggacaggatccggcaggattaatcctgcaaatcctgtaaatcctgtattttccaaaatatgcaggattgcggactgggatcctgcaaaatcctgcgcaggatcctgtcctgcgccgctctctacttaaaacaacaaaatctttttcttaatcaaaaaaatttttttgtcctagaattagggaaaacgtgttagcggtcttaaatttcgcatctgatcaattccgaatttctaatcccgaactgaaccggaagatcgaaatttcaaattcatttacttacaaaagtgcctcacttttgagttttatcaaaaaccaaagggggatagaccattttattttgcaaatttttttgtaaaaaatatgtagtcatgaaaacttgtcccttgggcttttaggttctctgatcacgaatctggcatcaatttttaccaattcctaatacctaactgaattcaacaaaaagtcgaaaattcaaatttttcgaattccttattaatgttcgttcgggttaaggattaagaattggtcaaaatcgatgtcagattcgtgatcagggaccccaaaaatacattatcagaggacttgtaaagtgataattatattttagtttcatattattttatttctgtctgtcaattttaaaatttctttttttttcaagattgccacttcttttgctgaccattgaaaatg

SEQ ID NO: 104131 - DNA, 115 bp, Heterodera glycines
aaaaattgagaggaaaattggaaaattattaggagcaaatcggcaattaatacaaaaatggaaaaaagaattaaatctaaataaaaataaaataaaaaaggaattttatgagatg

SEQ ID NO: 104132 - DNA, 283 bp, Heterodera glycines
atgggagaaaatttttcctatttatagtcgaacaaattgaatttagttataatttatttaattttataatttatttttatttaatttaactttaatattaatttatttttaatttaatttactttaatttattttattatgattttaatctctttaattaattttatttttattttgaattttatttttatttttattttttatttgtttaataacaattttttaattgttttgcgaacattaataatattcgatgatgaggagagtaaaagtataataaatg

SEQ ID NO: 104133 - DNA, 184 bp, Heterodera glycines
ttttaatgactaccaaactcgtccaatcacaaaatcagacgtcaccgattaccaattccctattctgctctaccaccatgacaaacattttgatggcatcaaaactttgtcaaaattttggaacaaacgttactattgcctctcctgtgaatcagcattcagcaataaaccacaacattcaatg

SEQ ID NO: 104134 - DNA, 179 bp, Heterodera glycines
aaaaataaaattgatttttaatttttatttcgatttttattttattaagcaattaagggttgggaaattttaaatgaaaaagggtgaaaaaatagattgtattaagaattttaattatattggtaaattaactttattaattaagctataacaatttcgaactctttgaacacaaaatg

SEQ ID NO: 104135 - DNA, 646 bp, Heterodera glycines
ttttgggagggaaatcggaagaatcaaaggccaatcattgccaaaagcagcagcagaacgaacaatgggacgaagtcactgatttaaaaatgagaggaaaagcggcaacggacacagaaaaacagggaaaaagtggcaaaagcacttttgttaacgacgagaacaaaacgagtccaaacacgggcattaatcagaagcaaagcgcattgaaaagaacaattgtattcaacgataaatggaaatgaaaatggcacaatttttgcctagcaacgaaaagaaattaacgagtgaaaaagtggcaaaaatgtcgaaatgaaaaaggggaaaaaataaaacagaaaagggcagttaaataaaataatgattttgtgaatggaatcagtgaaaaagtgatttaaaaccaaaaaatgaagccaatgcaaaataaactttgatgaagcattgtttgccattgtggagatggcttttgcgcaaatgagctcactaattggcaccctttcgtccgtccccctgcgtggcaattaaccgcgaattgtgctgtaatcccccccccccacttttccgacttattttaccttttccgcgctcaagccccccccccccccccaattgtccattctcccgttgaatttttcctcaccaaatg

SEQ ID NO: 104136 - DNA, 485 bp, Heterodera glycines
aaaatccaggctcctcgagactggatccagggctggactgggattttttgaaattgttttaaaaagcaaacaaatgcttgaaaaaatcaattatttgctagaagcatctaaaatatctaaatataataataatgtgtttttaaatttatttaatctgtttttgaaaacttgaaaaaacatcggtcacttgaaaaaataaattctaaaatttcgtccaggaaaatccaggtttttcctgttttgcctggagttttattccgtattattcatcggttgggtcccctttttggaagaaaaattctttttatattcatgcttgtttagtatgatagttaatttgttatcttaaaaattttctttgcaaaaaatgaagggttttttctaaatataattatgtgatagtacaaattttaattattataataaatctatacattgaacttatttattttttaatttacattttttttatatttatagaaatg

SEQ ID NO: 104137 - DNA, 75 bp, Heterodera glycines
cttggaaaaatggtcaaaaataaatgggttagaaatttcaactgaaaaattttatatttagggaaaaataatatg

SEQ ID NO: 104138 - DNA, 118 bp, Heterodera glycines
gctgaaatgacggaaacaatttaaacaaacaatttgggagggatggatagacttaggaaaaatttgaaaaacataaaagatcaattttcttaaaaaaattttcaggataagacaaatg

SEQ ID NO: 104139 - DNA, 94 bp, Heterodera glycines
tgttggccggatgctgttcaatgccttcgtgttgtggtgtttggcaccgcgtgcattcggcacggcactttcactccgtgtcaaattcaaaatg

SEQ ID NO: 104140 - DNA, 116 bp, Heterodera glycines
gaaaaaacctcaaagcctcatttcaaaaaaaaacctcattgacctatcaaaataccacaaaatgaggctaaagcctcacatctgggagccctggttatatgtatgttttagctatg

SEQ ID NO: 104141 - DNA, 102 bp, Heterodera glycines
  unsure (1)..(102): unsure at all n locations
tacacggaaagaaataatagttagtcctttgtgaaatttntagaaatctatccgtcaaatcgctttnnggaattntaatgagtaaatcagtaaccgtaaatg

SEQ ID NO: 104142 - DNA, 1003 bp, Heterodera glycines
ttatacatattaactacttattatataagataaaaactattgaacagcatttaagcttgacaaaatgttctttgaattttcatcatttttcgtattttttcaattatccatcacatttctttaaataattatttaaacatttttgtttcgattttatgtatttacaatttgctttttctacaggaaatttttatgatggtttcatatagagactttttgtgcctttttcagtgccattttgcgctttttggtgccttaattgtgagctcaagccataactttagggccggcggtgctgataagagccgccgggaaattttgtaattttaatgctatttgttagcagattttgtctaaaaataccaaattttgaaattttgggctaattttttaagaaaagatagctttttggggggtcggcggtgccgataggcgcagccggaggaaaattttaagaatttttaatcaattttgttaaaaaaatggccaactgatttgtcaaaaaagtcggtcgattgtttcggttttttaattatttcggtcgaacggtttcggttaaaaaaccgaaaaaaccgaaaccgaaaaaaaccgaaaaactcaaaaatttctcggtcggtttttttcggttaaaaaccgaaaccgaaaatcgactttcttatgcaattgctttttagcagttttattctaaaagattttctctgcaattttattttttacaatttatttatgtttgcccgtatttacctcttttttcattaatgtaatgtattattcaattttataaaaacatattttgccaaatatttggcataaataatcgttaataaaaaaaatatgtttacgtttttacaatattgaatgcgtggcatttgtcggtctgatgtaagcaaatgcaatggcataatttgcagcatatttaagtcaaaaataaagatttaatttttaataattttacaaaaaaagaatattttttaataaaaaccattaagcaactaacataatg

SEQ ID NO: 104143 - DNA, 728 bp, Heterodera glycines
ttatgggtattttaaggctacagaattgaagcatcattctgaggagggggggggggggggggaagcgttaggtccggatccgggtgaagtaaatgatttttctatattattttttcatgtttataaaacatttaaacgaatttcaatttagaattaattaatttttataatattgaaaaagaaatattttttcgaaaaaaataaaaaattttatttatcccccgggcagataaatagagacggggagattatttttcaagctagttcgaaatggtaaataattgaagacgggcagattaatggagacgaacatataattagagaaaatacggtaattgaaattctatttttgtgttttggaaaaacagaaacaaaatttttagacaaccaacaaaaggtcactcaatttcttttgtgaataactggttaatttttgtagtgagaaaaagtttattgaatttgcctgccgttcttcgtagtattaattttatcttttggttattcagccgcatgccgaaattattaaattagagacaaaacgccacaattggcgcgcaacagttttagacaaaatctctttttttgggttacatctttttcttgcagagaattttaaattactttttttaaatgcttaaatttcagctaaaaaattaactgatgaagaaaagaaaagaattgcgattaaatttattaaattaaaagatcattttgagaataaaaaaatg

SEQ ID NO: 104144 - DNA, 1003 bp, Heterodera glycines
tataaattcgagacgcgcatataaaaaatgaattttgaataatttaatttaagtcagagccgagttaaaaagagaaacttctttttggcgacatattttataaatttagtaccaatcaaaagcattaagatttgttaaactatttctaaacgattaagcaaatcacaaaaagtttaaagcttgaatactgtgcaaaaggttataattttaacttttaactattttgcatctatgccaatcattctgagttttgattagctaaacgcttgtcaagaagttttgactgataccaagtttaatggatttgatcaagaaatcaaaaacaatgattcttaagtttttcttacagacaatgaatgattagtgatgcccaaatttaccttattgcactcgtcactacatagggagactacttcaattatcgattgattggcttcgcagctttttttctctagctttttttttctcttgcctatatgtagtctctaaccgcaattaatttttatttatttttgaaatattttttaaatttaaatattttgattatttttatttattttttaaatttaaattttattaaattaaaagaaaaattcaaaaactgtggaatcgaacctttggttcaggccgaagccttaaccactcggccatgtagcactggggaaaaaggaagttaaatttgtttatgtttgttacccgataaacggtgagaattgaatgaaaggaaatagtatgtctttcatagaaaaaaaggatggatggaaaagcggccattatttttgtaacattctttattttcagcaaataaatttttatttttaaataattttattcgcaactaaaaaaatgttttttgttcgatggaggcggagtgtctccctgtccaaacaattttcttctgctgctaaagcattcgcacatttcacttttaaaattgcaggtgttaaccccataaatttcatttcttattcaatttaagtttttattttttatagaaaaaatg

SEQ ID NO: 104145 - DNA, 1003 bp, Heterodera glycines
cgtgatcagcaagcaaccccaaaacccattaaaaacatgttttcacgactttttaaaacaaaaaatttctgccaaaagtgggggaaccacctaactattaccttttcgttttcactagggatgggaatttaagtctaatgactttttttttgctgactctaaatgaccttaaaatgacttcaaaagtgttctacacaaaaaccccgaaataggcaaaaataggcattataaaagtcatcgtacgcacccaagaccaagcggaaagggcttttttcgtgcttatctattcgtattaagtgcgaaaaaattttaggcatttgcctaaaaaaagaatccctattaattacatttggctaattttcaggacttttttggatttatttagtgcttttttggcattttttgtgactttttggcatttttatgactttttcgtgactttttggcgcgatttttcaacttttttgagatttttcgtgacttaaattctcatccctagttttcacatatatcggcttagaaaaaatttttttttaaaatttttttcagggggtgacaaaacctacaaataccgaatttttttcttttcacacactttttgcctgaaaatcctaagaccagtcaaaagatcttttttaggcatatcttaagtaaaattaatttttggatttatacatatacataattccaacaatattaaagtttgaaatattcaataaattttgaatttgaacagtcgcagcggtgagaatcgttttttgatgaaaagggatggccaccagaactttattattttatgtgttattatttatttgttcagtaagccaatttaatttctgtcaaaattcattgaaaagttatgaggagaaaatattattaaaatttaatcaaatttattcagctttaatttttcaatggaaaacggacggaatggcctttataagccgaaaaaattaacagaagaaaaccataaattacaacttaaatcaagcaaaatcaaatg

SEQ ID NO: 104146 - DNA, 246 bp, Heterodera glycines
accacacggcattgatccatgacaaataaacattttttcaatgaaaatccttatttttaatggtttatgccatgtttctgttttttttgcgacttgcgctcctacaaacttcgttttgagatgatttcctcggtcacttttcgtttttccaatgccatctcctcccccgtcacttttccgccgttggcattttgcccctttgtcaaccattttcgacatatttcaaaacttcccaacgatggaatg

SEQ ID NO: 104147 - DNA, 75 bp, Heterodera glycines
ggtgcgttggaatggcccaattcccggcaaaggcaccccccccccccacaggacgacttttcctcgcccggaatg

SEQ ID NO: 104148 - DNA, 410 bp, Heterodera glycines
tgtctgtttaattaatttaacacaaaaaatacaattgaaccgttgaataaaaacttgaggacatcaccggtggtgccgcgtttatgtcgtcgattttaaaagttacgttccattggaaagagcccaaaaaagcacatccctttcccgattctgttgtactaaaggttaaaagggatgatttatatatatatatatatatattgaatttaatttaaattgaaaaatcatttaattaaattaatgatccccttggcacagattcctggcccaaaatacaattctttggtggcacaaaatgggagggaagaacaaacggacaacgcaatggaagaagaaagctccgattatctgatcaaagcgcacaccgtaaagtagcaactattggcaattaaggtgccattttcagaatg

SEQ ID NO: 104149 - DNA, 409 bp, Heterodera glycines
  unsure (1)..(409): unsure at all n locations
gacatttgcgcctttatccaaaatcgggttcaaacttaagtttttcaatccatgatcgcctaaatagctntaaaaaagcgattgaaaatgattgtatccgatcatttgatcaccaataaatttttgaaaaataataaaattttcaaacaacacaattaaaaattaatgttcctaataaactagaagacaatagtgttttcttaattttaatgctgtttaagctatcagggcttgaaaaaattcaactttgaatccgattttggacataggcgcaaatatcggggctcctcactcacaaagtgtttttcaaatttcgggtggaaaatcaggcagaggtaaaaagaggggcattagtgaatattaaaacgaaatttcccgatgtacgatattcccttctaatgaacctatg

SEQ ID NO: 104150 - DNA, 238 bp, Heterodera glycines
ttggtattcaaaaagccaatttctgtgtaaaaaagcagcggacaatttgctgggaaattgaggcggggccgccgcaaacggacggtcggacggacggacggccatcgacggacggtcggctttaagccgaaactccgcccaaaatgagcagcataaatagcagattatggctccagcaaaatcataaccgacttcaaatccttcaatccaaaagcgaaccaatcaaaaattccaaatg

SEQ ID NO: 104151 - DNA, 429 bp, Heterodera glycines
atttaattgttttatttgttatttaataaagggtattttattttattttttggttttaccaagtatttgaattttaaaaatttttgcttggcgcccaaacgagctggcgcccaaacgattgcgcccaaacgtgagcgcccaaacgggtgggtcccaaaagtcgcgatattacaaatcagctcgccagctgttgattttaaaaaaactgaaactttggcctcaaaacggaaaagtaccctttttattagtgtcgccctgaaaaaatgatggaccatgcgaactgttggttcggggtgagggacactatagtctggacagtatagtctgagccaagtttagagtatcataacttttttctcagcgagccaaattttataatctaggcatcattctatagcactatatgtttagtcgatggcaaagagaatg

SEQ ID NO: 104152 - DNA, 59 bp, Heterodera glycines
ggagagaagaatttatgagtttttattctttacccaaatcatttttattataaaaaatg

SEQ ID NO: 104153 - DNA, 332 bp, Heterodera glycines
tgtgggtgtttaatgaatgcccctgggggcaattattggaaatttaaattagaattttatagcgaaatcaattcgtagaaaatttacaattttcatgaaaatttgcttcaatcagttgtgttttagattaaataaaattggaaattttcactaattcatgaaaaaaaagttatatgaaagcaatgtgacgtcgggaaaagatttttgcgatttttgcgcaaaaaattggctaattttgcaaatatgcgccgaattttgaattttcaaatttttttttttaaaattctctccgttttccccattttgtcagttattttgtgtccattctgatg

SEQ ID NO: 104154 - DNA, 529 bp, Heterodera glycines
tgccccccgtcaaaataggggtggggggatgcttatgcaagcgaaaggacaaacaaaacgatcaaattgctttagggggaaggaagggcatttgcttgatgcctcttttttgattgcacaattccctcctcggcgcccgtcggtcaccattttcacttaacatgctttgcttttgcgattagcggctaacacgcgcggcgcattgaagcggagttttgaggcttttttttttacaaataatgaatggaattttcgaaatgttttcccaaaaaattttttttttcgctttcccatttttgtcgaaaaacacgagaaaaaaagcgaattctcatgtttggcgtaagttccaaaatttacttagccggctttcatgtcattgaaaaaaatttttttttttgttttgcatttcttatttttggggtttccttttccgaagttatccaaaaaaaaatgccaataaatcatcaaaaaaaaaatcccatttcagtagtttcgttgttcaccaattatgagttcaataacggcaatg

SEQ ID NO: 104155 - DNA, 205 bp, Heterodera glycines
aggctattgctgaaatggtaatttcacctaaattttcaaaaattgtaggacagaaaggaaaacatattaaatcacaaacgcaaaaagatgaacaaaatgatgaaaacggtaaaaaatatttttaggaccaataactcttagattaatttaaaatttacaaattaaaatttattattacgaggaaccaataattttagaaaaaatg

SEQ ID NO: 104156 - DNA, 725 bp, Heterodera glycines
gttatggcagaaatagtacttattttcatacaactttttcttaagttgaccaatttttttttaatttggcaggctaatagagaaaaagctgggctttgaatgataccaagaatgtaaatttggttgattttaagcaaagttataccatgttttgtcggaaaaattgcaaaaatggcggattttacgaaacgtcccagcacggagaaaaggaaaagcaaagtccttttcaataccaattgaatcgaagaaaatttggaaattgatttaaattttaaatcgtttggccctaattttaacaattttattcagcgccgaaccaagcaacaaacaaaacggagaacggagttgcgcacggggatgaaaaaaagaatacgagtattttagaagaaaatgcttaatataatataatttaattattttaatttaaaataaaataaatataaatttgttaataaactttgaataaatataatcattttaaaaaaaaatcaattttaatacgaaaaaatttcgtactctccaattaaataaaatcaaactgataaaaaatgattatttttaggggccaggttatatgcacattcgctgtttttaaattttttaaaatattttttgaaaaatttcttgttttttaaatttgcattagatttttgttgtgatatgcaaaaaaatatcttcaattgacactttgaaaacttaaaattttttgtatgccctgataaatg

SEQ ID NO: 104157 - DNA, 128 bp, Heterodera glycines
ttccttttcactccactctcagattaaaaaaaaaatggacaatcatccccgaaaacgctcctctaacttttccattgatcatattctctccgcgcccaaaaagccccgtcaaggcttcctgatcaatg

SEQ ID NO: 104158 - DNA, 1003 bp, Heterodera glycines
atacttactgtatatataacgataccgtaattttcaaaagtaaggatttagcagggaatggaaaatgccaatttaacaaattgcacccataattgtactttctgaataagttgtttatgatgaaaagagtttagagcatgagaatgaacaatagggctacgtttttgaatctaatcaccaaaatgtcatttaataagtaacagatcaattttcaaacttatctttcaatcactcaaaaaacaggtggctgttaacattatggatttgttgttggagagttgtcgtcgtgcgcccagttggacagtgttggtggacaattgtctacagatggtcaaacatttggtgagaataaacgaaaaaacaaattcaatttaggaagataaaattgggaaaatgaaattgcatgtttttatgtttatgacccaaaaatggccaaattggctctttaaaaagaatataatctgtgatcacatttagggaagttttaaaaagccaataaattttgctgatttgactagtattatttgtatttaaaagactggctccagtctgctttttttattattattttttaaataattcataaaaaataaataaccgagaacaagaaatgtttttagatgaccaaaaaatcctctaacaaatgcaacataaagcaaaaataactgaaaaagatgctagaatgataaactttgaaaaaaacaaccatcttaaataaattaaaataagatattttttgcttgtttttttcatttaaccagtttttgctgatccgtttcgaggtcatcgcggccaaaaaagccgaaaattggcaatagtaaatcgaccatgctctacatggtgtgatcatttttacagggttttaatatggtcatttcgctggtggagggcggttacaattccattaattttaaatttaatttttttggcgcataactaactgtgcttttttgctaaggtgtgtgcagacggtgacgagcccgaataccgtctagaaacaatg

SEQ ID NO: 104159 - DNA, 282 bp, Heterodera glycines
ggtaagaaatgtcggaaaaaaatgaatagttgaaaaatctttggcactttaaggaatatgttcaccaattatccggttggccacccgaccgtggtgcagtttgacaaggacgtggaatggaggcgtccagaggacgttgttggcgacgacggcatccgccttgagggcatcatcaagtgcttcgtagtgccgccccgccactgccactacgatatcccggtccttccgtaccggctcaacaaccgcacgctgtttcccctctgccggacgtgttccgaaatg

SEQ ID NO: 104160 - DNA, 897 bp, Heterodera glycines
aatcagggctcagatctgtcctgatttatcagatttgtcctgatttgaagggtccaaatctgataaaattaaaatgtcctgatttgtcagatttgtcctgatttggagggagtgacccaactttgtcctgatttcttaaataaacttacaattttgaaattttatggcataatgtcactattttatcaataaaatataagatttatgacaaaatttggttatttttttaataaaaatctgttaacaaatcgattaaaaatcgcaaaaaattttccggcggcgcctatcggcaccgccggaccccctgtccatcctccaaaattttttgaaaaaatgcgacgcaaaaaaagcgtttttaaagcaaaaaagtcgtcgcttgacttttaatttatgcaaaattggccttttttggtgaaaatctgttaacaaatcagaattaaattacaaaaaatttttccgggggcgcctatcggcaccgccggaccccctcccctctcacttcccaaaagttttttggaaaaatgcgccgcaaaaaattgttaaaaatctgatttttttttatcccgaatgcactaaaattttatgattttttgaaattttatggcagaatgtcactattttatcaagaaaatataaattaaataaataaatttatgcaaaaataaaataacaaaaaatttttcccaaaaattgttaaaatcgttaatgggagacaaaaatatactatttgatacatttttgatcgaataaattgtaaaaataactgatttgaagcaattttgcgaaatgttcttatttttgaccctaaaatcttattttttggccttgatgttcttattttgaaaaattttcgatacgagccctgtttattaacagaactctgaatacatatcaatg

SEQ ID NO: 104161 - DNA, 1003 bp, Heterodera glycines
tcccgagggccaaaattaaaaattttcgaaattttttaaaaattaaaaaatttgtaaaacgtaaaataatactcatattcatgctctgcactataaaaccggttagaaaaatggttttcacccctttttgactcgcaaaaaaaatttccgagatttgaggggttgaacaatacagtgcccctctctggtagaatgccccctccaattaaatgcccttttttggaggcgttgaacaatagaatgcccgggcattcaaatagcggatttacggtagctatttccttgcggtgagtccggaaacagagttaatttaaaaaatattattatttttttcttgcaatggaattaacgctgcctaaagcagacgtagatttgtttaattttggacataaattaaattaacatttatattgaatcttcaacaaagttttaaatttttcatgctgtaatttgctgaattcgagatttccattctaaattgagcattaatttttgtgctttttggcatttggtgtgataaacaataaattgttccatatttttttattccccataattaccgatttttaaaattatactcttttttggattaaacattcgaagaaatgaagctaatgaaaaatcaacatataatatattcaaactgtgcaaatataatttaaaaaatttttaaatgctattttaagataattattaccattgatttattcatttaattgcataagttgtccataattgtgtgatgcttgcctcccctaccatacccatttatggaaatctcaataattcatattataaaatttatctcataaacaatttgaaatgggaaaattatcctttttcaaaaatagcattcaaatttttgttcgtaaacatttaaatcccaattttaatcaacaacacattttattggtaaataaattgaacattatttaaactcacctaaaagttattcaactcaattgggattttttatgaaataatttttatttaggaaaaaatg

SEQ ID NO: 104162 - DNA, 86 bp, Heterodera glycines
  unsure (1)..(86): unsure at all n locations
gtcgtcatcnnccattaaatcaatgcccacaacgtggccattattcttaataaattaagttntctgccttcgaaatacgtcggatg

SEQ ID NO: 104163 - DNA, 497 bp, Heterodera glycines
atataacttttgaaaaaaattaatgcttttttgagaggttagtttatttttgcataaaaattgcaatgattaaagagaaaaatttcaaacaaatttcctgccgtttaagccacagattccctaaataactttatgcccaaaaatacagtatgacagcgatacaattagacaaataataatatgtatcaaagggtgtgaactatgaatagattaataaaaatataccaaaaattataaagaaaatgcttttttgaaataaaaaaatgttttttttttaaatcgaatgaatctttttttaagttttagtttaattaaaaaaaaagtctgtactatcgaaaaatgccaagatattcttgaatttgaataccttaccttttttttggaaaaagcaaatgttagtgaaatataagacgaatagaaaattcgcgcgccaccatttgggcgccataaaataaaaattgtagaaattacaaatttttcagcgcatcgcccaaatg

SEQ ID NO: 104164 - DNA, 430 bp, Heterodera glycines
aatgaagtaagacaccgaattgtctctcattttttctttagtttgaagaaataaaaaaaaatttgaaaattactgattacgggaaatacggcatttttgaccccgtcatgacggattatggaatccataattaagaaaatcgccgtaattacgggtttccgtaattgaaaatccagttacacccagcatgctcggtagcttaatggtagagcttcccacggattgtgtggtcgattgggttcaattcccacagaagttgccaattatttatttgcatttctgttattgtaaaggaaaaaatgggaataatcagtgaatgattttgactggtcggtggacaatttgtgttggaattgatcaccaccactttttggcattccgacacatttgattttgtcatttttatgtgcatcataataataaaataatg

SEQ ID NO: 104165 - DNA, 1000 bp, Heterodera glycines
tttttgatagaactttttatataaatgcaaaattgaaaaaatctgttcgaggaaaaaaccgaatagaatcaatatataattttctattagcctgctatttcaaaagcttcgtttgtttcaaaatcaaattccaatacatataggtaagctaattattttttatatcattactagggatagattttaggggtttgcttaatggtcagaaacgaacgaaaaacaatggtacttttctagaatacgggccagatccgcatccgctttcagactccaaaaaaagagtcttacccaccaagaaaacgacccacgcgaaaacgacccccgaccctaaaaagctcaaaaaggccaacgatatgtgccgaaaaattgaaaaaaaactgtcgaaaaaataagtgaatttatcgaaaaaatcacgttttttatccgtttcgctagtacgattctaatcaaaaacatttcaattctttgtgacgtaaatatttttctcgcttcaaatatttatttatttttctgttttcattgataaaattcaaattttgccttaaaaattaaaaaagccattaaaacggtcaaaaagtgcaaaaagaaaaaaaagaaaatttttgaacatttttggatatcttgccaagaatttgagtgcaaaaaagctactttcgtaaaaaataaaaataaaatttccaaaaaatccccaaaatatgtgctaaaaaaattagtgaattaatacatcagatgagaacgaaaatgtgatatttgtgatagttaccttaaaaacctccataattatagttatctgatattaattactacccaattcgctgataaaaggaaaatttaataattgaattattataaaaatgttgtcaaattaatgaaataatgattaaatgtggttaatattgattgaagaaaaattaagccatgctataaaattaataattacaaaattcattgcgaaaaatatttttataaaaataattcattatatttttacaaaaaaatg

SEQ ID NO: 104166 - DNA, 699 bp, Heterodera glycines
ccataacacgctttcattcaaaacaaaaatgaacaaattcttacttcggaaaaaagattttgaaaaggagaatctttttctccgtgaatgctaagcaatttgacatctcagaaaaaagttgtgggaattccaaatttttattacgttataactcaagtcctaggaagatgatttcaaccaaaatgcgaaaactaatcatttttctattggttctaaatgtccaaagtgaatttttacccgtataaccaaaattataggaatttgcaaatttgatgttttttaatgtgttagagacatgaaaatagtacgccaaaatgagaggaaaagaaatgcaaaaattttaatcactccataactttttagttaaccctttttttgttcttaaaaacccttaaattttgttcgtaatttttttctctatcaatatgcaaaatttgaagaaaatctgtaaggcggaaaaaaagttctatagagcgaagtgaatgttgttttttacataattaaaatgaagagatagtacgccaaagtgagagaaataaagataaaaagtgaatgtgacagaacgccaattttttcccataattatccataaaaaagatttattgccgcttttttttcttttttaccgtccatgctacgacttaaacccgctgaggtatgggtagatactgtattttatgaaagttctttatcgaaatg

SEQ ID NO: 104167 - DNA, 96 bp, Heterodera glycines
ctgtttttcttcttcctttcctgctgttattcttttccatttatttttttgattttcttttgcttccttttaatgatattttggaaagtgcaaatg

SEQ ID NO: 104168 - DNA, 273 bp, Heterodera glycines
aataacagaaaataaaatatcccagtataaatattagccatataagaaaactaaaattctccctattgtaacagttacaaaaatggattgatcttaccatttccaagccgtcgtacggtatccctaatggcgccgctaccgtccgaaatgtttgcacactaaataaaacgaacaaaaaaaagaacaccaacagatcaacaaattctgctgttggtagtgcttcacgcaaaaaagcaatgttcaaaatttcgctggttacggtagaggacgatg

SEQ ID NO: 104169 - DNA, 633 bp, Heterodera glycines
  unsure (1)..(633): unsure at all n locations
gaattggatgatgagggttataaaaataatntaataaactttttgctaagatacggttacggtttcattcgaatttgtgttcaaataccgagatttttttggcactttgtatttaaaaatctgaagcggattaattcaattttttttctttatattcttagtttgcataataaggaacattttcatttttttgttaattttcctgtccaacgggaaatgcatttgtacctcagttaaaaattttattttttatttcatttttaaacattcagacactcgagtgtcggcaatataacttcacctcaatgagccaatgaaaatgcccaggaatttatttcttattcaaatttgggaaggaacatttttaaattcgctaaaaaatttatataaggaaattaaaaataataatttataaatataatggcactaaacattcgatcacataaaaagagttaagtcacaaacaaacctaaacaaagccatctatcataaatataatggaaaaaattagagttgaaaaaatgattgtttggtctgccgccatccaaaacctttatttaatgacgaaataagacaacaacaaaacgataaactaaaaagcataagatgttatcaaaaaaattttagaaaatg

SEQ ID NO: 104170 - DNA, 899 bp, Heterodera glycines
aaaaaatttgagaaaaatggcgagacacctctttgtagttgttgatccaatcaatttttggtggatccaaataatcactgcaaacaatctcttcggttgaccatcagttgtcggagtgtgcaaccatttggacaattttatttacatatttggtacatattttggggttttcttacaaatttcgggatttttttttacatatttatgtacatattttgaacactttttgtacatatttctagggttgtaaattatatggattaacatattttttcttcgtatatgctatgaacagggaacggatttatatgtgccaaaaaacccccaaaatatgtgctaaaaacaccaaaaaaggccaaaatatgtgccaaaaactgaaaaaaactacttaataaatacgtgaattttgcataaaagtctcattttttacccatttcgctagcaaaatgcttattttcggatttttcgctaaaatttgaattttgccataaaaatgaaaagatcattaaaatggtcaaaaaatgaaaaaaaaaataaaaaattttgaaaaattttttgggcatttggccaagaattttgctgccaaaaaagacatttttgtttaaaaaaatcaaattttttcaaagaattgccaaaatatatgacaaaaactgccgaaaccccaaaatatgtttttattcccaaaaagtccaaaatatgtttaggaaaataggtaaaaatgctatttttgagcttttcatgcgatagcatgtaccttctctaaattttgtgttctttttgcgctctctcatttttcctaattgtctatgctttaagttaacacagtttttttgccctttgtgacacacaaattaaattgaaaaaattggtgagacctgtgctgattgaaccacaaaatg

SEQ ID NO: 104171 - DNA, 340 bp, Heterodera glycines
  unsure (1)..(340): unsure at all n locations
tttttgcaatttgggtccttttttcaagcctttttcagcattttaggaaaaaaatagaaaattttaaaattttttgcaattttttcttatcatatttcactgcaattccaaaaaaaatttttcncagcggcaataaattgcaaaaattcaaattagaaaaaatttttattaaattgtaagagcaagagaattaacaatctttagaaaaaaaaacattaaagcaaacacaattcctaagacgaatcagtttttttttgatgaattgatgttttcaataatttgttcaataaaaaattcgataaatcaaaataataattactttttcagaatctaaaaaatg

SEQ ID NO: 104172 - DNA, 114 bp, Heterodera glycines
ttttcccttcttcggttttttgcgtccctctgtatttgcacacacacatatatatataaatatgtagataaaaaatttcttcctccattctactaaacccccacccccaaaatg

SEQ ID NO: 104173 - DNA, 673 bp, Heterodera glycines
agtgagtgagcaaaagaaatgggcaaaatgtgtgtcaataattgcgatcaaattagacacgcattcgatcgatcggacaacttggtgccctttcccctgtccgtcccaatcgagaatttctcgaggaatttcagattaccccctgatttagaggtttattctcatttttgggtgatcggggtgggacagggatggcattccgaggcgtcacaaaaattttcgtaaatcggaattccgaggcgcaaaaattttttcggaaatcatacttccgtgccattcctaatccctattaggggaaatattaaatctaaatttttttgttcaaaattgtttgtaccgtagcctcatacagtacattttagtaacattgctcttctcctatgtaatctgaattttttaattaattaaattgtgaaattattaatttcctttttctttcatggaactgttggatttgttcaacgaacgttcgctggtgtgggaagacgaggaaaaggtgaggaggcaatttgtggcgcaaaaagagatgagattagtcattttcaccgcgcacaccttaaaacaaaacaaaaaaggatcaaattacgaaatgactaatttttgcaatttttctaaaaataattttttttttttcatttttaaaataaaaatttttctttaatttcttaagatg

SEQ ID NO: 104174 - DNA, 55 bp, Heterodera glycines
attgtccatcctttctttctagtcgccaccaaattgtccccccccccaaaaaatg

SEQ ID NO: 104175 - DNA, 346 bp, Heterodera glycines
agttcggcacggatcgagaccgggatagaccatgggaaagagcagctcgagctctacaagaaggtatggaaagaaaaaatagttatttctgggactttttcagaaatcagaattaattctccaatgtggcccaaattttaggcccccagccacagccccttgcttctcccagttttaagtcttggatttgtcaaataaattcaagacttcaaattaataatcaaaaattctcttaaaatttttttgaacccaattcaaaaaaggaaaaaaatttgcagtcaaaaaattattcgaatttctccaattttgtttccataatttccgaaagttattcggtatcataatg

SEQ ID NO: 104176 - DNA, 325 bp, Heterodera glycines
atattggattgggtgtgaccgtgtttggcaactacaaccttttccgcttgaagatgatccggaattgggtgcttatggacgagtggacgcatggattcgaaatcgaattcaaaacaatggattacaggggaggtctgcaagtttcccacaggaaatgtggaatatgagtgaaaggtgaaagtggaaatagaattttaagaaacaaaaatttagagttgagcaaaatttaatgaggacaaataacagcatcgaggggtggcatcgctctttcaatagccaattccgcttccttcatccgccattaagttattttgtcaaaaaaatg

SEQ ID NO: 104177 - DNA, 69 bp, Heterodera glycines
tgtcggcactttcttttcaagttttttgccttccaatcaaatccccagtttttttcagatcttcaaatg

SEQ ID NO: 104178 - DNA, 247 bp, Heterodera glycines
ggtgcgctcattggggagggattgagacagcatttgctaaagatagacccattattggattcaaaattcgagactttcatcgagagtggccggccaccactcattttcttaaaccccctcccaacatcgttccgccccgtttagtctcttcgccgactgttacgtcgcttcgggcagtgccgattgtaccgtggtgctttggcacttcagccaacacttgggcctactcgtcggggattacaatatg

SEQ ID NO: 104179 - DNA, 275 bp, Heterodera glycines
tcttttgcatattgtaacaaattttgtcccctttccaatggccttactaaaattttccaaaaaaatttcctaaccccctaggaatttttttctaaaattttcccgattttcagtgtattttagggtgtcccgatcactatgaaggagtgatctgatcaagttgctgtaaaagacttttttggtcagcatcaaaagttagaacggcaggaattttttcagaatttttggccaacaaaatattgacgcattcattgataaagtgaaaaaaaattatg

SEQ ID NO: 104180 - DNA, 212 bp, Heterodera glycines
  unsure (1)..(212): unsure at all n locations
tttttaaataaatcaaaaatggtatacaagaaatggcaatatgtatcaatcaccattgacatcaacatgtgcacatcattgcattgtatttatttaccacatgtctattggacattcatttccaaattatttacgaattcttgactacaattcaccancccgatttatttgtaactgtgatgcttaataaaataattgaaaattaaagtatg

SEQ ID NO: 104181 - DNA, 132 bp, Heterodera glycines
  unsure (1)..(132): unsure at all n locations
caatgtcaaaagtcaattggtgaagtncaatgagcgatttcttttggaaatcttcaaaaattggaaactgttgcttttccgattgacaattacacggatgggcgcagtgacgggaattttttagaggatatg

SEQ ID NO: 104182 - DNA, 112 bp, Heterodera glycines
tttcgttacataattgttggcctatctaattttactttattttcttccccagcaatatcttggtcagaaattcttgcccactattctcgccttcaccgccgacgccaaaatg

SEQ ID NO: 104183 - DNA, 82 bp, Heterodera glycines
tcgttacggctgcgaaccaacatatttaaggacgagcagcagggtgaagacgaaggaacagttgtattcattcccaaaaatg

SEQ ID NO: 104184 - DNA, 222 bp, Heterodera glycines
attctgggcaattcaaaaactataaaataaaagaaataatgtttctagccgaggcgttaaataaagcattcggtttttggtggaacgaagcggtgacaattggcatcccggaaaatttggtggtcggcgcaaacaattttgagccgattgggcactttactcaggtgctttcttacgcttagactgaatgtttaaaatccatggccattgttttttcagatg

SEQ ID NO: 104185 - DNA, 338 bp, Heterodera glycines
ttgtttcttctcgcccaaacttacactttcttcctcctctttttggctttgtttttgtccgcgcaaaatcggagcatcaaacgaaattataaggcaaatttgggaggaattgttttatttaaatgcaaatttggcgttcttattaaggaggccaaatggctgtttatcacttctctcatttgttcgctaattcttatcgcttgggcggtgtttcacactttggttttaattatataattaattaatcaaacttgaatttggctatattaaattaattaataaaattatttaattaataaaataattttttgctttttaaggtcagtgttcagcacatg

SEQ ID NO: 104186 - DNA, 165 bp, Heterodera glycines
tgccctttcgaattgtaatgtcacaattggatgcattagaagttctatagagcgaagtgaatgttgttattcctaataatagaaatattagatagtacgccaaaaggagacaaaaaattagagaaaaaaagatagacaaggaattgtccaataaagattataatg

SEQ ID NO: 104187 - DNA, 162 bp, Heterodera glycines
tcctgttttcgattaaccttattagtatttatttttactgattgtttgttctatacatcattatgcttccggtattagtattttagaaaataagttgcacaaaatttgatttttgaaaatcataattaattaaattcaatttaacgcatccttcagaaaatg

SEQ ID NO: 104188 - DNA, 779 bp, Heterodera glycines
  unsure (1)..(779): unsure at all n locations
gcatgcnnctgcaggtgaagcaaaatttaaaattttaaaatttatcgtatttacttctctaaactaataatgttaatttatttattttctatgacgctatcctgtttttaattttcactctaaaaaaatttttttaggatagaacaggcgacaaaaacattgaaaaccttttatgaatcaaatacaaatcaaagaaccttataaagaaatattattttttttaaacatgaatatataaattattataaaataaccgatctagccacagaataggtgtgctatttcatgacttgttttttttgaggcgtatgaacattttctttttcatcaaaaaatatttttataaatatttatttttatttaatgtatttacatgaccccccggaaataaatgttttgttcattatatttctataccaacccataattccatctaatttataaatgtcttttcttttcactacaatatattaaaagacaaaaattcatttatagtggaaactaattgtgtaaatcttacagggtttcttattttcagaaagtattaacttttgaaaaaaaattcttaaatttacacaaatgcttaaaatagtacaaaaaaagtaaatttttttctcaaatatattttaaaattctgatcaaaatacactttttaaaaatggacccaaaaatttgaagttttttgcctttcatgactaaaagctgtaacaaagtgaactatttatatttttattatttaactcataaaataaccgattttatagtatcggattaatatg

SEQ ID NO: 104189 - DNA, 107 bp, Heterodera glycines
gattggacgtcgaagacaaaccctttttcccgcatctttctaagcgtccggagaactacggtcaacacatctacccaacccctgacgactatttggccaacggaatg

SEQ ID NO: 104190 - DNA, 567 bp, Heterodera glycines
aactttcatttgaattgacactttgtcagaaattcaacagctcccaaatctccgccatcgcttcggcaattaacagaagtcgtccctttgtcgcaatccatgggccaccggggacaggcaaaaccaaagtcattgccgaaatcgttttgcaggtccaattcactcataagcgaatgctatctgaaataaatttagcatgtcaaaaagggcaaaaatgtgttggtctgtgccccgtcgcataaggcagtcgatgtaataatttgcgctgaatgtccttttcaatccctccgtttcagaatgcaatggaggcgtgcaaaatgaatgggttggacaattttgtacgtttgggggaagaggcggacgacggcgcactgagcgaatatcgaattgggaaattggcacaaaaccacgccgaatacgaacgcattgagaaggacattcggaactcacgagaaatcaaaagccaaagggactttctggacaagtcgcggctttgtaattccatttgaaactttcgccttcagtgaccgacacattcgccgttttcattcgcttttgaggaaaatg

SEQ ID NO: 104191 - DNA, 148 bp, Heterodera glycines
ttgcttcgtagtgaattttgaaagcgattcaaaatacactttattggaatcctcaaacttgggtaattaaaccgaagggggaaatgggggaacggcacaaaatggggggaaaaatgggggacggcacagaaatggggacggcacaatg

SEQ ID NO: 104192 - DNA, 237 bp, Heterodera glycines
tcaattcttagacatttaaaatgctttcaatccaaaattatatttttgaaagccaataattattacgtacaactctcagtttttttctgttaaagcgcttctgctggtggcacaaacagctgctctccaaacggacccctccgcgtcggacattgattacgaaatcgttttgccggttgcgtcgttgccgtcgctggactcgccccgggggacgacgttaaattggcaggacgaatg

SEQ ID NO: 104193 - DNA, 420 bp, Heterodera glycines
tttttaacaaaaaatatttgaagacacgaaagcgaagaaacactccaaaacaacaatcaattagatgaaatgaaaaatgccttttttggtgagggaaagacatacataagagaaattggcaaaatcttttgtctctttgtacagctttaacagtatgaaaatttaaaatttggcaaaaaacattatgccataaaaattcaatccaaattttggagtaaatttttttttgccgttagccctaaaaatttttcacagctaggtaattaagtggaaccaaaacaaaattgacatcatcgtcgaaatcttttcttcatttttagcggctatctttatgcttttgtgaaccaattttcctaatcattcctcagcgattaaattattatttttttaaagaaaacgggttaattaatttctcaaatg

SEQ ID NO: 104194 - DNA, 89 bp, Heterodera glycines
ttatgcgtaattttcttaagcacactttcttcacaatcaattttttttagaaaaacgccttactttcttttatttaaatctgagaaatg

SEQ ID NO: 104195 - DNA, 203 bp, Heterodera glycines
aatggacaatacaatgaaagtccgtttgttaaattgtgataattaaaattgtggatcgaattaaaagaaatcgtcatttatgtccaataaaatcagcgttttaatggcttaaaatttcgctcgttttttaatgttaattcttaccttttattttgtattttttattttatctgttttttatctgcagtgaatggccatcaatg

SEQ ID NO: 104196 - DNA, 737 bp, Heterodera glycines
aaagcaaaatttactatatttcataaaaatttgccaaagatggttaaaaaatttaaattgtataattttttatcttttatcccaacaattgctttccatttgatggtttttataactaccatttataaaatataaaaaatataattttattttaacaaataataaaaatttaaaaatttgaaattgcatataaattttgaaaatcaaatttttttgcaattgagcaaaaaatgctcctcagccattgttttggtgtttttaaagtcaaattgtttttaaagtcaattctgtatttttacacaatttttggtattttttcactttataaggcattttttagtgtatatttggacattttcgggtttttagggcatttttgggggataaatctttaattatttattattaggggttccttttttaggaacgaaaaaccgcttaataggtacctaaaacgtagaaaaaaaccgaaaaaagcattacagaataaggcacataaatatttttaaataaataaataaatgctgtggactgctcttcggcctgagggaattttagtgccgtcgcctccccccgcgtctttttttatcggcagcggcgcgattttggacagaaaattttttcttttttttcgaaaaattttacgtaaaattgatttaaatgcaaagttttcaaaaattagtaaatttatctcaacaaatttaagacaaaattgaaataatgctcgtttcaaaatg

SEQ ID NO: 104197 - DNA, 856 bp, Heterodera glycines
agatgcatgccatgctgcatggatcattttcagtacacatgtgtcaacgattggaaggaggtcatttttaattgcaaatttcacactttaaaaaaaatcatttgtcattttttgattatttaacaattttttttgtctatttattattttattttgtgcggcacgcgcacggtttttttaaaacgatccccccccccccccccccccctcctacaaaaaattaagaaaaatttcttatggtttgaaaaatatttaaagaaattccgataactaagtttaattttttcaagtttatgaaaaactttttcgaaaaaaattttaaatgagtatttagaattttttaaagaaaaaatttttttaataaaattcaacaatttaacatttctttgtttgatttctatgaaattttatttttcatttaataatttattaatttaaattttcggatccgctgcgcaattgaaactcaaaatttttgctaggccgaatatgattaacccacaaatccgcatttaaactacggaatcccgcgcagggattacgggattttgaaatattgaataaattttacattcttattcagcttagaataatcctttgttttttataaatttcccatcaaaaggttgaggcaatgtttccgaccacaaccacaactacgaccacaacaactacaacgctggccccagttcatccgaccgctgtttgtgaacataagcaatttaaaggggtgttagtgcgcttataaattccgccaatcgtcggaaaatcaaaaataattcacaactttacttgagaaagatcacaccaacaaaaagagtcacaatacaaatatggtaatacaatttaggtgatg

SEQ ID NO: 104198 - DNA, 148 bp, Heterodera glycines
  unsure (1)..(148): unsure at all n locations
attgccattagctggactgtagagttctaaaataggctttaaaaggggcttatttctgaataaagatttattcctttttatttcggcattacccgaacatttcattaaaatatcttnttatgtggtactattaaaaatttgaaaaatg

SEQ ID NO: 104199 - DNA, 460 bp, Heterodera glycines
ttttgaagttgggaaaagcgaaaaatgaagggaaaatacgaaaggcaaagagcaaaagccaatgcaagccaaaagtgaaaagtctgctgaaggaaccgccaattcggtggtgggagatgaacagcgaaaggcgaccggatccaatgcaaagccgacgattggtcgccagccccacaatttcccctcggggggcggagggtggtcaccgccgcttccatccgcccgatcaatgcgccgatgggctgcaaattgcacattttgtggaaagcgacagaaacttgaccataattaatttgaaaagcagcaacttttgaacatcttcgctttataccaaataaataatttataaaaaataaataaattcggtaaatgaaaacgaatgtcaaatgaattcattttaaaggtcttcatgcaaatcattgcccaacgaaacaaaatgccaattttcagtgccaaaatg

SEQ ID NO: 104200 - DNA, 405 bp, Heterodera glycines
tctcctcctctcacttgtcttgtgctttatgggggccgtatcatttaattgggattttggggaccgtataattaaaataaatattttttgctgttaaccagggcggtagcttaaattacaaaaagctccgtttatcctggcagcaatttgccttttagggcttgaggtctttcgcttgacttgactaatttcccgagtcgtttaggtgccctgtcgtcttgtgcttcatgggtggcggtgtgctgctcttcaggccatagtttgtttaagttttttgactattttccatgcccaaatatttattattcattcacgatttcacgccatttccatgccggcgctcgcatataaataccgagattttactcattcctcctcactccactctcagattaaaaaaaaatg

SEQ ID NO: 104201 - DNA, 149 bp, Heterodera glycines
gcatcgacaaaaattggattttgactctgtttaaaaagtgaaaaaaattaattgttttttttgtttttggaggttgaaaaattttcgtaaataaattttaaaaatacttttacaattaaaagaataatagactaattttattctgtatg

SEQ ID NO: 104202 - DNA, 173 bp, Heterodera glycines
aaaaggggaagcggactcattcttcggattgccgccatttgtataataaaatgtaatcgcttttttctgtctttcatttacataattattttatcgacaatggtttttctattccattacatttattttttacgtattcactttgcttggatcgatttagcagcgtgaggatg

SEQ ID NO: 104203 - DNA, 516 bp, Heterodera glycines
tttcccaatgtcaccgataggtttcgtgaacaatcaccaagtaatcactcccttatcagcaaactcttcattcaaattcgttttatatgtaacaaaatcatgggacacctaatgaattattgccaaattagcaaattagccgtctttcttcgtcccatttcacaatgtcaccgataggctgatcagccagcgctcagctgccccaccattcctccttatcagcaacactcaaattggagaaaagtcataggaatttaattaattaattaattgctaattgaaagggcttattagcaaaatggcggcttatcgccatgattgaatgtgttgagatgagagggagtcaaatgacatcagataattgctaagcaagcaaaaatttgtgaccactttagggggtatttaagcaaagcgatcggaacggttgggatcattctatggaaacaaattcgccattaacataattaccaaaccgacccccaacccatcgtataacaaacacaaattgccaaaatg

SEQ ID NO: 104204 - DNA, 93 bp, Heterodera glycines
cccaatgcccaacagaaaactgttgatgacattggcagtgttgttcggctttccgaacacaacgtaaattctctccaatattggaagaaaatg

SEQ ID NO: 104205 - DNA, 275 bp, Heterodera glycines
ttcagtcaaatcaacagtcaacttccgcaattccactacgaccccgaggcagataaaacattctcactttggtgggatcgttttggacaatttgtcgaaaaggacggtaaggatttgaccggcgacaacagcaagttcttcctaagaagccagccgaaatcgaatttcagcttacaatttccactcttaagtcactttttggcgacactaaatcaatttttgtcaggcacttcgaatgctttcagctgtcgtgtggcccctcacaaaatgtcatg

SEQ ID NO: 104206 - DNA, 59 bp, Heterodera glycines
cgtactttttttttattaaaaatgtttcatgttaatcattcattcactgttaggagatg

SEQ ID NO: 104207 - DNA, 703 bp, Heterodera glycines
ctcaaaattacgacttttttggaatttcatgttataacttttttggtaattgtctaatcgcgaagcaatagcttagaaatatcttctaaacatgttaagctttcgattgataccaagcttgctgaatttggttaacaacaaaaaaagttataacccaaaaacttgggctggcgccaaaacgtcggcgccaaaacgatacggacccataatgcgcaccggtgccacggttatagtaattccttggccgtatacctatttcatgccagaaaccacagatttgctgaaaatattagttttacatgtagagagcttcaagaatgaaaaatcctagatctgggttccatgttggacctttacttaaattttctggacaaaaataaaaggaaattccatgtcaatggaaaaatcaaaaccttgatccatgctaagctctagttcatatagatagagctcgacattttgaaaaaagcctgtacttgtacctatacctgtatttcccgaatggcctgtacctgtattttctgtacaaaagtacaggaaaatacaggttgaaaaacttgcctgtacctggatccaggaaaaacacaggcctggatcctggtacaggtcgagctctacatataggtagtttttaattttgctgtcatcatttcaagataaaaaaacggactaaaaaaacattttcttaattcgccctcgaatg

SEQ ID NO: 104208 - DNA, 295 bp, Heterodera glycines
atcaatgtggaaattaggaaaaattttcgaaattctttctgatagaactgttaaattaaaaataggaaaccgaatggcggaaagacccacaaaattattatatcccttagaaatagaggatgaaggcgaagaatagctataattttagataatttaattaaatattatataatctattaataaaatcaaatttatttatttatttaaaatatatttttaaaaaaaatatattgatactttaattttaaataataatatttttactcattattcatatcattattctgacagaatg

SEQ ID NO: 104209 - DNA, 92 bp, Heterodera glycines
ggtaaacatttataataaaagcatttttatcacttaatttcccttaggttgttcaaaatgtgtcttcccaagcgcagtacacagtcagaatg

SEQ ID NO: 104210 - DNA, 441 bp, Heterodera glycines
gaagaatggaagtgcgaaaaacgaatgaaaatatatctttaaagtaattaaaaatgatttttaaattgtttaattttacaaaaataaatttatttgatgaattaaaaaatgaattttattttaaaatgtttaagaattgagaaaaaagaaattgaaatattttgcttataattaaagttgttagaatttgaaaattgttttttgttatctatgaacccgattactattattatgtttaaaaatttaaataagaaatttttacattgaaattttattttgaattatgattattattattatattatttttctcatttgtatcattgccaaataatagcgaaaatctattacattattttattgattataaaatgagcagaaattaagcaataaaataacattaaaaatatttaaaaaaaaaaatttcaaaatagtaaaaatg

SEQ ID NO: 104211 - DNA, 508 bp, Heterodera glycines
taatatagccacaatttatcattttttgtttcccattcatcatatttcgttaaactcaaatttatttttaaaaaaattctcgatttttttcttgggacggagttggcgggacggagttggctcgggacggagttgccctgggacggagttggcgggacggagttgcatgggacggagttggcgggaccccttcataggttttaccgcttcgccaactggagtcggggtcgttttggcgcccacgttttggcgccgacgttttggcgcccacgttttggcgccagggtcgttttggcgccgacgttttggcgcccacgttttggcgcccacgttttggcgcccacgttttggcgccaaaatgtagagaaagggcgaaattgtatatttttttgttttttcttggagtggggcaaagtctataaaaggagcaccttcctagtagatttagtattttttttattttcattcttcaaataacgcatttttgttttttcttgtttaggaaatg

SEQ ID NO: 104212 - DNA, 283 bp, Heterodera glycines
tgtatgaggcaatcgaaaaaaagctcgtaaaagaatatatgtaaaacaataggtagatactgtgtgaaatttttttgtttatctacatttaccatactgtaagtaaaggattcgttttttaaggactagctaggcattgtcttttgtcttattggtattgtagttttcagtacaaaaattcttatgcaatttctttctgtgcattaaataataaatttaaaaaatatcaatttaagtttcgtatacaatacatataagctaaacaaagaaaaagctttcaatg

SEQ ID NO: 104213 - DNA, 88 bp, Heterodera glycines
tctaaaaaattatattcattttttcttatttaaaatagggtttaaagtttttgcagcacccaattaaaattccaggtcaatcattatg

SEQ ID NO: 104214 - DNA, 372 bp, Heterodera glycines
aatggcacgcaaattctttttgatctgagaaaagttatggatgatgcctttgtattgtttgggcgctttttctctcgtttcatcattattgttttatcactttttgttgttctcaaactttcaactttttgtgctgacgaatacttttcccaccaattttcacatgattaaagagcttatcgataaaaatgattttcaatttaattgatcgtcaaccttcattgtttattttgatttgtgaattcggtttttcatgttaaaaatggtatttagcaaaagaaaattgcaacggatagattagcaccatttgttaacattgtcaatttgctgtttctgaataaagcggtggacaattggcatttagtgcccatg

SEQ ID NO: 104215 - DNA, 308 bp, Heterodera glycines
agagaggcgtaattttggcgtcgtttggacggatagtttttttttgtgggcacccggacccgacatatccgtacatatacaaggggtttcttgagacagggggagtggaccgtaacgaaggtagagaggaaattgcgcctagaagtccttaaaaaatacgatcaaaacgcgcaaaataaaaggaggtttgaatagcaaaagaagggtctccgtcggagaagatttggaccttcgtatgtaatatcggttccgagataccccccaaagacactctttgtatatgtatggacggacatatccggaaaatg

SEQ ID NO: 104216 - DNA, 231 bp, Heterodera glycines
atttttttttaattttctaaccctagaaattttttgagaaattactgaaaataggtttggaaaattttttgcggggtgagtgaacgtattgtaaccgataatccaaaaccacaacattgggctcagaaaatcagattttgggatgagaaacccagaacttttacagattttgtcctaaaattgtccaagttttgcgattttgagttttgtaacttttcaaataatgaaatg

SEQ ID NO: 104217 - DNA, 1003 bp, Heterodera glycines
tagacctgtacctggttccaggcctggtttttttgcagatacaggtcagaccattttttggcaatctgggtttttcctggaccttgattttcctagatttttatccatgaaatcaagttccaagttttttttatagtactgaactttagttttataattgaatttccgttccggtaaaacgtcatttttaattccgatttcttactgtatttatgtatcatttacacaggaaaattatcgttggacctatcccttgctggtgttttcattgctcactcccgttattctggtgtccatgattttgcaagaccgccgaacagccgcaaaatacggttcacataatgaccggtcctattatcaagtactgtccaattatgtaaattgaaagataatggtgatatgtaatcatattctattgtatttaaatgttaaatatttatttgttatttgatttcaatcgaacgtgttgaaatgaattcctttatttctcagtgttttgtttaaaattcattgtttcacattttgtttaatttacctaactgctttgcgatgacaaaactttgtttgtttgttatttgtttgatgatttcgcttttttcctgactgcgctttgctccattattgattccctccctccccctttttaatattcacttttctcccttttcccaccatttgtcccatacgcattcatttattcctcgtactgctgatgatttcgtttaccacaatcacaccaatgaatatcgttttgacagaaaggtcgccgccgttaataaaatagtcaaagtgtgattcgataaagacaacacaatccatcccatccctttttccattttacgggtttttgtgcaacgtccacaaagggtgagcaaaatatttaattgatcaaagccgagaatttattttttttttgattgaaagaaagcaattgcttttagtgttaacatcggatttgttttgttgctgcgagttgtaatcaagcgactttcttacgctgatg

SEQ ID NO: 104218 - DNA, 767 bp, Heterodera glycines
ttcacaaaacacggtgccgtccggttaatactaatgtacggcgggacgcaagtcattttcaaattttttaaatttttcaatttttgacatcacttctcgccaattttctccatttgtagtagacatagcctgacgccattgataccattttgtagagctcatcgagatgtacaaaaagccgctggtaccggcaagcttagcttgggttggccatcgacaggggggggcgaggctgagggtcctccggcagatgtgcccgacccataacgggctccaagtgaatggattaagaaccggacccggcctgggagatagcccttaaaaaactgaacaaaaaattgttcttaaccgggccggtccgggttccggatcaggcacttttggtgcccgaaagtggtgcgataggcttccggaaaatgaccaatcaatcactgagttttttgtggatcgcccacactgagtttttttgtggatcgactcagcacgaaaaataaggcctttttaaaaataatttcaatattcatatggattaaaaaatgttcatcaaattttcattgaaagatgaaaaaagctagcatgaatttaattactaagccaaataatgaatttataatttttctaaatttaattaatatttttttaaatgccataggatctcttctacaggcttttgcctttgcctgatttattcgaatggcacaatgccgcaattttccttcaacatcgaacgatggattttcaatcattaaattctctgcttcaaaatg

SEQ ID NO: 104219 - DNA, 288 bp, Heterodera glycines
tgccgggataaagcaatgaataacccccgcccctccccctccccctctgccccaacaaacacacaattggtggcatttcagggcattgggggaacgaacaccgcccgccatttaatccccggcaaactgtgcttctccaaaggaaggtttattataaaaatggcacaatcacttaaaaaaacactccatcatttctaaagaatctaattgggtaaaaaatggagacatttgtatttgaaaagttgcgtttttatctgaaaaatgtagatttaaaaaaatcccaaaatg

SEQ ID NO: 104220 - DNA, 96 bp, Heterodera glycines
tttcatttccaaccagttctccttttcattcggcggcgaatggacaggcttaccagccggcacagccgttgatgcaaatggtggtgccacctaatg

SEQ ID NO: 104221 - DNA, 1003 bp, Heterodera glycines
tgtgttggtgaagtgcgatgagtgcggtaaaatggtgaacaaaaggaggggaagatacagtacagtaatcactaaggaggtcacatcgatggaccgatcgctcctacggtaggacaccaaaacggtagccattggcgtttgatcattcattccaaaaagcctttgttagctgatcagtcggcgctgtttcttctgttccttctgatcattttgccagttcacttttcatcagtttatcacccgcttaatcagtgctaaatcaattcaatttgtgtacccaaagtttcccttacctccaaatctctttctctctctgcccttccctcctttgtccatcagtacatttggtgccattttgtgagttgtgccgtttgtgttggtgatatggtacacgtgccaatcggaataattacccaaggagaaatgggaaaaatgaaaagggacggagggggggaggagagatcgtcgagcggaagtcaattttgcagtcacatttctaaaaaaggaatgaattcggagcatggaacgaaagtaaagccatgggaatggcaaaagggaggagaaaagtggcattttgagaaatggaacaccttaaatatgggaaaccaaacaaacacataaacaaagagaggaaaaagggggaaatttgggagaaaaagtgccgaggaatggggaaaagccatggggagagggaagacaagcaaaacgaaaggggaggggggagagaatgctatggggaatgaagctgcaataggcagacgaaccagcgaatgcaatgggaggggggggggggctttgattatgaaccggtttgggatggaatgcgaatgttttgttccctcccatgggcgcaaatggggggaaaggggggggagtacttgtgtaatcggtcattgggaaaagaagagaaaggaagagtggtgagggaaggggggaggggagtggtgtggaagaatgcggaagaggaagagccgctgatagagaagcataggaaagaaagatg

SEQ ID NO: 104222 - DNA, 1003 bp, Heterodera glycines
caatccctggatttcttgccttttaataaatgcccgatcaatagcaaataaaatagctgatttagaacatttagctaaaaaatacaatccgtctataatcctaatcaatgagacctggttaaactccagaaatacggtagaagcggaacttacaataaattgtcaataccaaattgtttatgcaaaccgaacagaaaaaaagggcggaggatcggcaattctattaaaaacattgatcccttatcagacacttttctctgggacaaaattccaatgcgaaattatacacattaaattactttttaaaaaaccaattcaaattataaatatatatcgtccaccgaattgtaccgttcagaatactaaaaagctattcaaatttatttcggatcaaagcgattccgaaaatatcatataatgtggggattttaacatcccaaacattttatgggatgaaaataaggtaaaacatataaatgatcctatgtcaaatatgctgattgagtttatgaaccaaaaacaattgaaacagcatgttaaagaaccgaccagagaaaatacgattttagacttagtaatgactagtgaatcagaattaattaatgaattaattgtattggaacatttttcaacttccgatcataaaatggtcggatttcaaataaaagaaaaattccggcgtaataatcccagtgtttatagaagagattttaaaaatattaatttttcgaaattaagtcgggcgattcttgaaaatcgtattgatttatcaataaactcagtgtacaccgttgatcaaaaatataaagaattcttaaataaagtactgaaattatatgatacttttataccaaatagacctctaaaatcgataataaaacaatcgtatcctcaaaaaataagagatttattttcagagaaattacgtttgcataagcttgtaagaaaatttcctgaaaaaagtgaaatcattttaaattacaaaattatttctagggaaatg

SEQ ID NO: 104223 - DNA, 1003 bp, Heterodera glycines
tgttttgggtggagaaatgctttttgcttttacttcccataaattggtttcaggacattggacttaaacatcgaggcttattcgcttctgctttacgccgaggggttgtacaaagcacagagatacgggttggaagggatcggcacagcttgggttgggttaggggggaaatgaagtgcacccatcgatggcacaagtttcgttgaccggagagtgccattgtaaatcgtcgtcttttcacaaatgcgatgccattagcttccagattttgttgtttagtgaatctggcgaattggatggctttccgctcctttttgtgccgggtaatgccggttcggggcgacaagtgcgttcattgggctcactgctgcagaacaaaacggagaggctgggaacgcacttccatttcgacacatttgcactcgacttcaacggagtaacagcaaatgagcgggcaattaattgaggcaattagttaattgcaatattttggttgaaggaaatgaccgcgctgaacttcgattacatcgaaagtcaagcgcagtttctggccgattccgttgggcacattttgtcgctgtattcgccgcacaaacagcccaaaattgtgctcattggccattctatgggcggaattgtcatccaaaaaatgttggcggacaatgccaacagatggagcaaacatattgcatttgtactcacttttgccactcccttctcacagccgcgtaagaacaaaatgagtggggggtgggcgagagaatggcatcagacaaatgccactgattgaggggcgggagagaaatgccactgattgaggggcgggagagaaatgccactgattgaggggcgggagagaaatgccactgattgaggggcgggagagaaatgccactgattgaggggcgggagagaaatgccactgattgaggggcgggagagaaatgccactgattgaggggcgggagagaaatgccactgattgagaggcgggagagaaatg

SEQ ID NO: 104224 - DNA, 309 bp, Heterodera glycines
tcaaaattgaagtgcccatacctcagccggtataagtcttttagacatgcgtttttttgaatattgtagagaattttgtgctctataaaatgggcctactcaaaatttccagaaaaattttcccaacccctagaaattttttttgaaatttacccctcgttcccagccaaaatgggctgatcagatcaccatgaaggagtgatctgatcaacttggtgttgctaccttttttgatcagcatccaaagttatgcttaagcagctgaaaccgagaagaatcgaatttgatatcgaatatacctaaattatg

SEQ ID NO: 104225 - DNA, 312 bp, Heterodera glycines
  unsure (1)..(312): unsure at all n locations
ttttttttttacaaaattatctcnaagaatatttatttttaatttaattatttttaaatgtttatnnttgtttcaataattctcgtttttagtctatattttatggccatttttgtaattttataccatattttttgaaccctaaccattaaattttgataatccaatgaataatttttactttaattaattcactaattttcatcatttaaagtaggcaaaaatcacaaaaaaataagtaaatttaactcgcaaagtttaaaaaatattttgtaaatataattaaataatttttgcccttattaagcaatg

SEQ ID NO: 104226 - DNA, 320 bp, Heterodera glycines
gtaaggagttcggaataaagcacacttttacgccgccattccatcctcaatccaacggacaagtcgaacgtttcgttgacactttcaaaagggcgatgatgaagtgcaaaggcgacaagaacagccttgaaaaagtgctgctctcctacagatcaacaccaaattctgccatcgacggatattcgccagatcaattgttccttggacggaaactgcgcaccaaattggcacttgtccacccaaaaggacaaattgatcagtcggaaaaatttgaaaaaggtaagttcaaacagcatcaaaaggactactctgccaaaatg

SEQ ID NO: 104227 - DNA, 249 bp, Heterodera glycines
  unsure (1)..(249): unsure at all n locations
atttttcattctaatgatattttaaaattaatatattatnttgccattctctcatgccatccttttttacattaaaaaatatatattttttgcaattttcagtggttgggctttattctcgcccaaatttgccgatggttccacccattcttgggacagaaatcttccgaaagggatggacgcacattggggggccgaatgaagaagttggcacgtggtctggtgaaggatggcattggcgacaaaatg

SEQ ID NO: 104228 - DNA, 229 bp, Heterodera glycines
ttttcgaggaatatttttgtgtgttaagatgaaaatgagaagggaaaagtgtgggggtactgtatgtaacgtgacggagagggcggggggtgtcacgtgggaataggccactcccactcaactgagagcacgcagggacctccagacgggaggatttcgaaatccatccacagtatgccctcctatgccacgccccttatcattcacttccctgtcagtcatttagatg

SEQ ID NO: 104229 - DNA, 64 bp, Heterodera glycines
gctgaaggagcagggacaaacgatcagctttctacgactgcaggtccgcaacagagacgcaatg

SEQ ID NO: 104230 - DNA, 997 bp, Heterodera glycines
  unsure (1)..(997): unsure at all n locations
tcataaaaaaatgtattttttcaggaaataatctgcgcaattaaatttgatcatntaatacaccaaataagtgtacaaatccgtgggatcatttctcggtaaaacagagagaggaattttcgcgcattaattatttataaattttgaatatagtaaatttattaattagctaatttttgatttttttggcattggctttactcaaaaactcaaaattcttagaaacgataaaattccaaaatccgttttaaaaatttggattcatataataaaataatagtaattaaaatggtttagagtaatgattcgattgatcagttttttcgagattctcaaccaaattggacgaataaaggaaaagaatttggtgacgaaaatgaacgcggatttgtgatgagtgaagtgaagagaaaaacgacacattgtactccaataaagagaattgtgttgtattgcattgtttgtacatgtgacctttcccataaaatgggtttgaagtacaattttttttgtctaaaattgttttttattttcaaattttgaaaaaaaaatttaaattaattttaagatttaatggaaatgcctaaattttttatagtttaatttacgtattatttattttatgctatgtaatatgaatgaagttggttatatttcattttaataatcaaaaaaataaataattgtttaataagtgaatttcaaattccgctttgggataaataataaaaaataaacaattaaaaaaatttaaatatgctattctccatctttggcttgacttttcgatgttttgtcgccacaaaatttgggtcattccgccataatttttgtggatttatttcgctggtgtcagccgcgcaatgtacacgataattgtggtgaagatgatccgtcgccggatatatccagtccccttatatatttcacccaatagactgatggaataagggggaaaataaaaaaattaaatcggaattaaaatatttcagtcatg

SEQ ID NO: 104231 - DNA, 430 bp, Heterodera glycines
tttcgtgcttaaatatttgaattttgatacatatttctcattctagtgcttaaaatttcggttcttttatcatctcttttcctcatttaattattatacttgtaatcaaaaatgaatgctattaaatcctgaatttttggtcttttccccttgaaatatggttgaggccacaaattagtcgtggacataagaatataaattcaccaatttaattttattatgttggcattctgaattgctttgcacggctatccaccttttgagtacatatttttctttctctggctcttttttctttaacaccccctaccatttcgtctttttatcattaactctctcttttctttatatttttcaatttatccatatcccatccatctaatcatgctaaacaaacagtactaaaatctgtcccaattgtttagaaatg

SEQ ID NO: 104232 - DNA, 137 bp, Heterodera glycines
ttccctggctttatgtaaatggtcaacgagtgatcagtttgtttgaataatttaaatttcaaaattcaaaccaaaaaatcgtaattttaccaaaagtaattagaaaaattttcttttaaggatgcctagataaaatg

SEQ ID NO: 104233 - DNA, 450 bp, Heterodera glycines
ttttttaagaattttttgtcataaacgacaaatggcgctcgatgtttgatgcggaggctcaagaagtagacgaggagacatgtcggaaggcatggagaaggaatagaaagatgatgcttttagcaccgacgaccagggtgcgtttatttggggtttaaaaaggtgttaatttaaaaaaaaaccgatttagttacagttttgggcattaaatattttcaaaaaggctaaattgtttttgaattttaaatttattaaagccttttacccaaaaaattagaattttgaaaagaaattaaaagtttttaaaaagcgtatttgttattatgttattttagacatttcataaaaaaagtctaaattgtttttaaactgaatttatttaaaaaaaattttttttacgtttattaagaaacttttgtcataagcgaaaatttgccctggcccttgatg

SEQ ID NO: 104234 - DNA, 308 bp, Heterodera glycines
  unsure (1)..(308): unsure at all n locations
atcatcaaaatgtcggtgaattcaagggcatgagattgattgnaaattaaccatatggtgaatagggtcacaaatccattaacttatagactataaaaccgaaaattgtgagccgtatattcattcgttcattcgtaatattaaatntaattttatttagatcaatnttattcaaataatttcgcaaatgtctaagcaatgtaaaaattttcaataatagatgtatgaataatttttttctctctagctcaagctgtgtttgagcgctcaccaactcctgactctgagctcaacgaattatcggcatg

SEQ ID NO: 104235 - DNA, 1003 bp, Heterodera glycines
ttttaaaatttttattactttttttgttttccaaaccatcttttttcacggcgctcttttctaaagacttttagggagaaagggtacggcgtcctgcggtgccgataggcgccgccgggaaaattttgaaaatttggttagatctgttaacagattttgtccaaaatatgctaaatttttgcgattttgagccaattttttaataaggtttatgaatttttgggccggtgataccgataggcagcgccaggcaaattttggaattaagctctattttctaggatttttcaccaaaaaaatttatgaatttcggtaaattttgtttttttcgatatgtatttgtcaaaatatgccaagattggtcgatttctatgagtatttaaaaaaatcattttgtcacaaagaaaataattaaagaaaaaaacgtcaaacggtattgaactcacgacagaaagtaatgtcagtgtgatgcactaacctctacaccacattccaaatgtccgaaattgagcaaatcttctttatttaataaaaatttggcaaaatggttaaaacattcaaatttcgtctaagttttttgcattttctcccacgaaaatgccattcttaggggtgtatatttaaccccgaccccgatcggggttaagggtcggggttcggggttgtcggggtatgaagagtcgggttttccccgaaaatgaccaaaaatgtcggggttcgggggcgggctcaggggcccaaccctaataaaaatgaagaaaacacagatttttttggtcgttttcgagagtgagaaatagggcgtcggaaattgtttgttttcgtttttgtttttgttttcgttttgtttttttttcttcactatcggcagtaattatatagctgtaagtttttcgtaagttcggcattcgacaaaaaaacgaagggtcaaaatcgattcatttctaattgattcccagtgtacactggaaatggcgcaaatgacgcgtttggcgacggaatg

SEQ ID NO: 104236 - DNA, 145 bp, Heterodera glycines
cgttaatcatttttttattgcccaaatatttttttcaataaaggatagaaataaattattttattaaccaaattattttagcattgaaaatttatgtatttccttttatttttgttacttttagtttttcttcaatttaaaaatg

SEQ ID NO: 104237 - DNA, 581 bp, Heterodera glycines
attaaaaataattttttttggggtggagccccggattctccagtattaccgtatattgataatatccattttccttttatgacgatttttgaaattaaaaatggttttatgacataaaaaatgcaagaagtattaaaatgtgtttacgatcggcgggtacggagcatttactcaatgaatggacagaaaagaaaaataattaagaaaaagtaaaggaatccaacaaaaaattatggcagaaaaaccttaaaattttttgaaaaatcgttggcacttaaattcggtcattccctaattgtctcccctcccccccccctgagggcaaaagcagtgctgcttcctttttatcaattatcatttgtgccttcatcaattcattaattaattactctgttcaattgaggattgattgattatcttcgacaataatttttgttgagttactgaccaaaattgccccattctctcctcaccaattcattgattgaatgcctttcattcattaattaatgtaatacattttttttattattttataattgttgatacaaattccgaattattaaaaactttttaacatg

SEQ ID NO: 104238 - DNA, 701 bp, Heterodera glycines
  unsure (1)..(701): unsure at all n locations
ttaagtgaattaaagctttaaaaatagcaaaaaatcgggagaantttatgagattatnntggtntataaatgtcaaaaagaaaaanagtattccagaatttctggaaaaattcgaattttcagaaaaaaattcataactcggttctgaaaagtcatactctaaaagtaaaatactacaaaaatccgcaattttttgctctattatataaattttatttcacatttttatcacttttttgaaaaatgttataaaaataaaagtgattttgggattccagaccaaaggggggtgaccaggatttttgagtggaaaatttttttcaccaaaaatcttccaaaaacatgtcattagtggttatttgggccgctgatcacgaatacgtgatcagatttcaattgttacatcgttaagaccttagaatccctgtgtgattggggattctgaggcatcattttgagggggcggggggcaagttcgaatccgggcggtgtacattattttctatttattttttgcttattttaatgcttttaattaatttaaaatattttgttgagttaataaataaaaaattatatttaaattaatttttttttgataaataaattttataagtttaaattaattatttttttaattgatagaatttcatctatttttttaattaaatttgttaaaaaatattttcaaattattaatg

SEQ ID NO: 104239 - DNA, 123 bp, Heterodera glycines
tgtgaaacaaatcgatttttatttatttcaaaaattaattgaattgaaatttaggacattggcattggcaccgttttcaatgacatcaaagcagaaaaattcaatgaaaatttggccaaaatg

SEQ ID NO: 104240 - DNA, 97 bp, Heterodera glycines
tatttgattaaaaaagctatttttaatagtagaaaaatcatttttaattaaaaagtttttaaaatgttaataattaaattattaatttaaaaaaatg

SEQ ID NO: 104241 - DNA, 178 bp, Heterodera glycines
ttccttccataatttctgtgtcaatctcttttccaattgtccattgtacgtcttttgttttgtctttgtccttccattggtttctttttttgctttgtttgtccaattttccatttgtttcgtcccttcttctaaacctcgtacatattctgctgtgcttcagcacctcctattaatg

SEQ ID NO: 104242 - DNA, 726 bp, Heterodera glycines
tttgtggcacgtttttctgtcaatgtaattaatggaattgcacctgtcaataataggcaattaggaatttactaatgatattagggattcactctgaacatggccatattgttttgtttttgtttatttcttcttccgtccgcgaataatcacatcgacgacatgaacgacgggtgacaaaatttcgaaaggaacagctgagagaatgaaaaatgtagtgaaagcgacagcattaactaacttgggacagttccaacatgtagaagccatgggaaaggaacttacgactttttttggtgcaaaagcatccgctgaacaaaagttttggaacagtgaaagaatgaatgtaaaaacagaattagaattaaacaaaatgagtaatgaacatacgcaaaagaaaggaagttgaaataaaccgttcggagaataattccgtcgtctgacagacacagtgaggagacaatcggacaattcgattgaaaattctcaataaatgaagatgccggaaatttgctgacaacaacattggttattctcgatcagctcttctagcaaaaatgtgacctaaaaaaattcttaaagcaatttttaatttcacaaaaacaaaaatttgctcgaaatactgattgttagttaatttaaaaaaatttaaatcaattatttagtgtaaattatttatttatttttaatagaccctccgcttccgtgaataattatacaggaatg

SEQ ID NO: 104243 - DNA, 432 bp, Heterodera glycines
gctaaagcaaacggctaataattttgcaagcctttttggattcaaggaaagcagagacaggtggcacaggctctcttttttcggtttgaaaattgggttccattttaatatttaataatagccaaatcaaaaaaaaattgttcttacaagggaacctcgcgaactgttagtcaaaaaatgggtataaatttggtatcattggatagagagcatgttcgacttctattgtgatttttttagtaatagtggtatataggaaaatataaagttatggcctcaaaaatcgaaattttgactgtgttttcactaaaaattggtggctcagttggttaaattcgcatttttggagctcgggttcaaatccacacaaaaataaattaattttaatataaataaataattttaaaaagcattttttagactaagaaaatg

SEQ ID NO: 104244 - DNA, 891 bp, Heterodera glycines
tttactcatttttgtaaagacatgaaatttcctttttcgttacgcgatttacttcctaaattacaatcgctaattattgcgacgaattaattcgtttatattttaaggcaatgctcataattaccagtttcaaaatcactatcatgttttagctcaatattttattttactttagataattacatatataaagtttatatatatatattttctattatgtaattagcgggggccgggtggaaagttagagagagaaaaacgtagtcgcgagagagtctacgaaaataagagaacagacgcttagagaaaggcgagggatttgctgctcccagtgttaatggaaaagttcgttatttgaaccaatgcttttttaattataagaatttcataaaaacccattaactattccttttttaattataagaatttcataaaaacccattaactattccttttttaattatcaaaaaaaatccttttttggtaaaagtaatcattcaaaattttttcacctgcgtgataatttgctttaattttggtttttatgccgtgattaccattttatcctattgttttgggattacgtcaattaatttaatatttattaaaatatatccattaaaaggtatttaatcctacgaaaaagaaactaaatgcaacccaactcccattatagaaccatttttcaattttcattatatcattaaaagcacacaaactgttgacgtgctaacattttttattctcaaataaaaagcaatttgtgtccctaattagttttagatttcatataaaaaaaatttatctttgcagcaaaaaaaaattgtaaaaatttcatttttacccttaaatactttatttaatttacggcgatagaacataaagctaatg

SEQ ID NO: 104245 - DNA, 934 bp, Heterodera glycines
aataaaaataaattttgaaattcaaaaccataaggggacaaaaaagagaactgaaatcattagcatattaatctagattttttttttgtttttttttgtcatcacaacaatgggagggattacgaaaatttttaaaattaaaagttgtcaaaaaaactcaaattaattaatttttgtttcggcttagaaacaaaatggatacaaaaagaacaaataaatttgttaactcaaatatcaaacaaaaagcatcgctttcgtcctcacacaaatcgatcttttaaatttccataatattcggctgttaaaagtccgggttaatttcaaaattgtttgtcccgttaagcaatgaaaatcaaaactaattttattagccgtttctttggtttaccgtgcttactaattagtaccccccggggcttctatttttcaacccccctcgagaggggtattctaatttagagggggggggggggtactaattcagtaaatacggtatattgattatgaacatttcaccgcaacatgtagaaaccgtaattttgaaaaatacggactcggaccaggacctgaatatccgagttcgctggcaccggcctggcttagaacaaagcccggcgggcatatttcaacttcgagaaacaaattccgacaaagtcaattgaaaatggaatgaattttcaaacttgttctgattttcacatttgtcctgagaaaatgaataaaatgacgattttttttgttattataattaatgtaaaatatttctgttttggatgaaaaatttgttaataaatgtcctgattttttatgtttgtactgacttttttataatcgatccaagcaataaattctcatttcttcatttaataaagataaaatttcctttttttttgaattgtaaattattactaatatttattgccaattgaaaatg

SEQ ID NO: 104246 - DNA, 140 bp, Heterodera glycines
  unsure (1)..(140): unsure at all n locations
taagaaatgaatgactttcctttttatgttctttgtctgtgtgttgntccataggtaataaatcgggtcaaaacgggcggtgaatggatgatcagacgatcaaagtgtatcattaattagctaatgagcttaatgacatg

SEQ ID NO: 104247 - DNA, 378 bp, Heterodera glycines
ctccattaaagtgcagttttcgtatcttggtactcatttggctgcatatctgtagtacggaaaaaatattaatatccttttttaatatcaaaaaaataatttttattgtatttttaataattcccccagaaaaaatttaatcaaatttcgcagaattttattatgatacaacaaaattcagtggtaattttcagtggttttatcgacaaaaataagcccttaaagtgcagttttcgtatcttggtactcatttggctgcatatctgtagtacggaaaaaatattaatattcctttttaatatcaaaaaaataatttttattgtattttaataattcccccagaaaaaatttaatcaaatttcttagaattttattatg

SEQ ID NO: 104248 - DNA, 1003 bp, Heterodera glycines
aactatttggatcaaaacatattgtaattgtcttgttcaccattcattgtatctctctctcaaatacacgcaaatgtagcctttatttctcttttatatctcaaattgtttaatcatttagtcattttattcgtttttctataaaatttacacataattaatggaatgaggatgaaattggcaaataattaaacactcgaagttgtcattttcaggtagaaaatgcataattatgcgaaataagttacaatttgtgaaaaattaaggattagaagatgcaatttttaataaattatcgaattggtcgtttttatattgaaagtgaaatttgaaaataattaatcaatgggatgtaattttaggtgtaaaatgcataatttaatagaaagaagacataattacagaaaattaggaaattgaagatacaattttaataaaaattaaggaaaaataatgagttacatcaaggaattactcaaaaaagtgtaaaaattatacatattggtgtggttgcgtgagtctagttgtttaagcatgaggataagtgtgttatagagtgtgttcgagagttctcatattattatgtaacttatataaaaattattaattgtattcttaaacacaaacaatgttcattgacaattcaacgtaaatgaaaagtttggattatcaccaaaataattcataatgttaatacaataacatttacaataagaaataattaactaaccgaaaatgaacccattcccatcctacgcgattgacaatttaataggaaagtttttaaaatatcataaataaaaatttgtgtttcaatgataccggttagcgagagattaaaaattatttaaattctaggctatgcaggaggcaaaagaatacataaaaataagtatagtaggtatgatcgttgtcgtagacagagacttttgaagtattggctactggtggaccaagcctaatggggcattggctaccggagagcctagccttatgaggtatg

SEQ ID NO: 104249 - DNA, 814 bp, Heterodera glycines
aattactaattggattttatttaatttactttttggccaaattcaatgatttttgaattaaaaataatttttagaccaaacattgtttaacgaattgaccaaagaagcgaatttgattgaaatggttgaggaaaaagaacgtgagaaattccgattgacgaaattggcacaatttccggaaggatggcaagaaataaaatacggagaaaattcaaaaataaatgaggaaaaaacaaagcaggttttgctgttttattgcataatattgagtaaagcattagccaaatttaagattttaaaagagacgcaaaaaataaatcattcaaaagaaacgcttaaaaatttgacggaaaaattggagaaaatcattcaaaattgggtgagagagaaagggaagggccaaatttggaaaaacagttagtaattaatttgccaatttagtcggcggaggtgcgaattcaattctcaagtttaatgcatttgcaaatgcaattggaccaaatcgacgccattggcattttgccgcatggctttgaccagcgaaatgtcctcggcaaattccaatgcgaccaaagcgacgccaaaaggggcgaccaatgcgcggaccaatccctccactgcacactttgcagggtgagcagagaatgccatgggaacaaaaaacaaacactttgccaacaattaattcaaaattcaatttcagcattcgaatgtcaattctttgtataaattttccacgatgcaaaaaatgtctattccacgaatgacactcaaatttatggacattttgttcgaattaaaatttttcagaatg

SEQ ID NO: 104250 - DNA, 989 bp, Heterodera glycines
tgctcttgcgtggactattttgtttttgaaacaaattctatttaatttttatatcctttaactgactcattttttgttcttgcaaaatctgcgctgagattcgttaccatttttttattttgcatatattaaaacacatttttctctcccaaatcacattttctccgaatacgtgtcgaattagagcgattttttaacaagtaattttaactatttgggatttttgtcaattgccacttatatattttggcttgtgaaatttttttaaaactttttttttcaactatttttgcttgtgaatgcaaactttgttatgaaaaacgcaatcaaattaaataaaatgcgccctgagaatcgactaaattttaaaaaaacgcacctaagaatcgacttttcaaaaagcaaaaatcctgtccatgatgaatggtgggtggataaacgaaaacattttactccagaaaatcttaaaatgtttttcagtttgttagcgacttgttaggtatctatctatttctctgttttatcacctaaaaatcctagacttgctaatgaattaaagcaccaaaaaatatttgcgatagcatatttttgcttatggtaaaatttttttaataaaatccgaaaaattcattcggagtttcaaaaaaaaataaaattaaccattaaaaaccttttatgaaaaacaataaatatttcaatcataaaatatttattaaaaaattttaataattatttgactgatcgcttttttcaataggcgaggattaattggaacaaaattgaaatgttcttttcatgcaggtcacttgctgatttagccatctgtcagctccatctcagcccggattatgccacaaatgacgacgatctgctgctgctcacagagaatgagaataagactgtgaaggaggaggcagagatgccatttgcagaaattcctccgctccgttttggcatcaaaaaagaacaaactcatcaaaaacgccatg

SEQ ID NO: 104251 - DNA, 172 bp, Heterodera glycines
tgtgatttttaaaattcaataaagcgccaaaatgatatataattttaattttccatttttcacatttatatttaattttctttttaaatacctattttattaatcattttattgtatgtaaatttgcacttttcaggtttaaaattaaaaaaagaatacgacggtttaaatg

SEQ ID NO: 104252 - DNA, 806 bp, Heterodera glycines
atttaatttgagaaatgatcaatctcaatttgatgctctctttttctctccgaaatgcttttgttgattctttcgttcgaataaaacatatgtacacttaatatcttattgaaaaccttactaattaaattaaattaaaaattaagtttccgaacctcggaatttaacaaaaaattcaaaattttcaaaactcacttttatatcgtacgcccaaagagcaaaaaacaaagtatcatcaaatcaatccaattcgtcgtaactcaaaaatgatcggtccttttttttaggaaaacagcgccacaaaaacaacgattaaaagcaaaaaatttaagaaattttaatttattaaaaaatccagaattttgggacccagaaaattccaagattccagatcccccccccccccccgaaattggcattgcttttcaatggcaactcgtacaaacaattaccaaaaaagttatacatgaaaaacatgaaaattgcgaaaaggtcgaaattatgaagttttttcttaataaaattttttccaggctagaaaatcatttcgtttttgtaaggctaatagagcatatgaagagctttcgaatgataccaacaatcttggatttggatgccaaagaaaaaagttatagcgaaaaacataaaaatttttaaaatctgcccacagataacacacaagtacctttttttgtacgagttgccatgaaaccttttgttttaccaatttttgtgtttagacatttcgccgtgccaccacttctgtctgttacaatattcaactttatttttgggtggacacaatg

SEQ ID NO: 104253 - DNA, 426 bp, Heterodera glycines
ttaagttttacgcgttttgctccttaaaatccttaataaaaagttttaaataacttttttcatgcctttttcgggattttcgtgccttttcatgctttttttcaattttttgcgccattaagtgcctttttcgcgatttttggcgcgccgttttttacattctctaataacaacaatgagcaaaaacaattgtttcgatgtccccaagaaacagttgtcattggaagagacaactgatcaatcagttcagtcaattttggccgcaatcgattcgcagaagcgccttttttaccctttaaaactgagggccaacatttcggatgcaaaaaaaacctaaaaatgcgctatccaatcttccaaatctttctgattatgtcttttatttgtcgctttaaatcggcggtaatcttccgatcggacacaatg

SEQ ID NO: 104254 - DNA, 184 bp, Heterodera glycines
ttccttctctttggttccattttcatgcagaattttctcacttaattaagttagcacaattttgtgcttttcctccccattatgttcctcgtcgtaattttgtgccatgtttggcttttatttaaatcaaaaccagcgaaaaagaaataaattattttattttcatatcaaatcagtgaaaatg

SEQ ID NO: 104255 - DNA, 241 bp, Heterodera glycines
atgcaaagaaaatgaacaatcgaattttgaggaaacctcccagtttttggcttaataatttatgaatttcattttaaattctctcaaaatatttttcccgcattttaagttggatttgcactgatgttttgatggacattctgccattttttgaccatgcccaacttggcctcaaattggcactgatttcgccacgtttcgatgttttagtggacacgcattttgatggcaaaagcgaatg

SEQ ID NO: 104256 - DNA, 609 bp, Heterodera glycines
  unsure (1)..(609): unsure at all n locations
aattttaactattgcccctgctctatgtgtactcctgttaagcaannngctgnccatgggcggaaaagagacncccctttcccccagggggcaacnnaggaacannnnggccaacgcnccacgggaaagaaggnncgnncannaannggnctatcngagngngannnncagcnnacncnccgcnngcaagggccnnggccgcgncnnccggggaaaagccgcggnccancacaaannnaaggaaannnnngcgggggnccgacgcannagaagaagncganggnncaacggcagaacaancggcagcagccgaggcngagggaaggncgncaaaananngccncagncganccannngagcagaagcancggccagaaannggcgaaggnnaancaccggagaaaggnaaggcnnnncancgcnnnncaaaannnnanccaaagacancaaaaggcnaaaaggggnnnagaaangggcaatcctgcagaatggatgtctaatttaactttgttattttagctaaaaatgtttgccattgtctaaactatgattttattactctgacaagtagggtggggatttatatggacataaaatcgcaaaatatg

SEQ ID NO: 104257 - DNA, 725 bp, Heterodera glycines
aatacgagaaaatcttagaaaaatcaaaaaagaaaatttcaagaaaattcaaggaaataaaatcgatccctgtttaatccaatggtatataacacatacgcatttccgatttccagttcgggtgggtccattgttagattttcaaaaaagataaaatagtgttttttctttaaatgttttaatttttttggcggcggcgttatgtcccggcgtcgttttgtcggggatgtgattgtcctgttccggagccctccttaaatttttaaataaaaatctccgccccttcccccgcggcggaatttccatgccccgggcggtggcattctcagaaaaccttccagcgccctttgcccctctgctgccatcccaaaggatttgtttgcctctctctctctctctccgctgtctttggcacaattcgccccattcttttcccgccctttcgctcgataagtgaattccaaatttggcaccaccaattgctattcattgcgacacgaacggacaaatgtgggcaacacgcggacagacaaatcggaggaacagaagcaacacatttgtcaaaaaggacatccaattgtcataccaatcattagcactaattacatttaatttcgatcatttatttcattaatttggacagagcaatcaattaaagggggaacacaaaagggatgaaaaatgtcaattgaatggtttaaagagcagaaaagcgagcacaaatg

SEQ ID NO: 104258 - DNA, 79 bp, Heterodera glycines
tgcgatttatctgtccagaaaccatttttccaaattcttagaagaaaaaaaagaaacctcgggaaattcgttgcaaatg

SEQ ID NO: 104259 - DNA, 93 bp, Heterodera glycines
gcagtcagatgtatgggaatatttcgaatcgggactggccgggaattctattttacttggtgatagtggctatccattaaaaaatggctaatg

SEQ ID NO: 104260 - DNA, 325 bp, Heterodera glycines
ttgatgcgcaggtaatgcttaagccttcgatggatcacattattttgcttcgggggttgtcaaagaaacgaatgtagagtcaatgaaatccttagggagaccaaaatttattttgtggattgcggtgaaagtgacacaagtgcaagaaagaaaaaacagggatgttcatgaagagttggagagagctgaggaaggaggtagctttgtagcacatccgatgattccgcagggtttggagttgagaagggcatgttttgcgtcaaatcttccatctcgagttgccaagctggacacaaatcaaggaaagctgatgagggcagtaatg

SEQ ID NO: 104261 - DNA, 188 bp, Heterodera glycines
aaaagggctacgacagggaatgggaagattgggaatccattcttgatgaaagggaatctaatgtgattccaattcctaattacggaggtctccctttcagagaacaggcatttgaactttcagtcccgtcggatattgcagaagggcaatatcccgtctcaaaaattttaaaaatattgatgggaatg

SEQ ID NO: 104262 - DNA, 157 bp, Heterodera glycines
cagtcaagccaaactgtcacaaatccgaaaagggacgaaggccaaacaacaagcaagctcaatcatcatccgctccggcacaacaatgttggcgatgtggttggacaaatcacagccactgggagtgtaagcataagtcagcaaagtgccaaaaatg

SEQ ID NO: 104263 - DNA, 276 bp, Heterodera glycines
acgctgaggacgccggtaaggggcaatttgtgtgtgattgaagacaggctgactgctgctggagttggttgttgttgttttttcctttcattttatcagtgcaatcaatacgttcccccttcgaaaaattgttttagttttataaatttcttaattttttcaaaacaatttacctttttttactcgataggagtatacggtagtatgtacccgtctactgtatcatgtacaagggtagtttcatcattgttaggctaataaacgattgggacaatg

SEQ ID NO: 104264 - DNA, 244 bp, Heterodera glycines
agttatgtgtgaaataggtggagtgagggtggcaaaagccttaaatcttattgaagtctccaacgatatcgagagaaatgctgagggtttctctactcgcgggtcgagactctcgacacgccgagtaattatcatcctaaccgtcacccccaccctcgttgattatcaccttaattaatctaccctccccattttatgtgccatcgcccgaggatcgctacgacgaccgtgccgtggtccgatg

SEQ ID NO: 104265 - DNA, 227 bp, Heterodera glycines
cccccccccccccccccccgccccgcccctccggcgagggcacctttccctaattggcttaatttaccaaaacagggtaataaaataagtaaaatgttttagtgttaacggatgttaacgatacggaagatcgtttaaaagaatttattggtgctgaaaacattgctacagctaatttgttgtttggcttaaacggggaagagtgcagaaaatttgttaaagtaatg

SEQ ID NO: 104266 - DNA, 176 bp, Heterodera glycines
gctcaggaatagttcaccatctttcgggtctcagcgcatacgctctgtctccgccccatcgcatgcgatcgagacgggactatgttgcgccccaacaccgcagtgccagggatcacacatcagctccgtaagaagccttcactttcattgcgcctttgggttttgaacacccaatg

SEQ ID NO: 104267 - DNA, 230 bp, Heterodera glycines
tgtatttggagggtgtcaaatcaatttttgtttcttccattttgtgcgaaatttgcaaaagaaattgaaggaacaaaatttgtggcaggttttaataatttttttttaaattattgcggcgccgaagtgcccccgacccgtttcagcgctactgcaccgattctgtgtttgccgagaacgctcgaatgatcacgtctgttgcgttcgtgcccttgtgtgacattagaatg

SEQ ID NO: 104268 - DNA, 438 bp, Heterodera glycines
atactatcattcatctcaccataacaataaagaattttcttaggcggtggttcaattagattcttatgatgttttaaaattcgtaatagccaacgggtcttaccactcccggtagcccctgagagaattagagtgaacggaccgcgaaacatttttaatgcctcttatttatttgatctatttatattttcatagggaacatatttcgcgcatttggggcatatccagaaattatcaaaaaatgatgtaccgaaatgcaaaagactgtgctttttacacctgctacaaatctcgtaatgacagggacagtaatgacaacacttaattttatgtgggcagttcatttttcaatttaattttattttgggttgctatttatagaaggggtatataaagggagtgaaaggaccatttgattgataccttgtatcaaaaatg

SEQ ID NO: 104269 - DNA, 1003 bp, Heterodera glycines
tcggcataccccaaattaatttgatttcattttcttttatcagtaaaaatttttctgtcatttattttttcagtttttcttactgtatgtttttttttgtagcgcaagtaccgtaaccaaacaaaaaagcgtaccatcaattgactggttgtttctaatatcaaatgatccgaggtataataatagtaaagccctattagcaaaagtatctgatcaatttcaaataaccaaaacatgcccaagcaaaatcccttaattatgggtaattaacaaatattcgatcaaaatctagcaaatctatcaacagatcagagatatacaagagtaaagttaattttaatcgcctgtttaaatagattttcataatttttaaagattttccgttttttaattgagagttttcgaaattttaatcctttgaattgtccaagccttgaccccattaataaaacatgcccgagctaaatcccttaattatgggtaattaacaaagaaattttcgatcaaaatgttgcaaatcccttaattagtgtaaaagcgcctcaaattaactgctgctctccgcaaaaagcggtcactagcatcacagtgcaattagtagaagaatgtcagtgcaaaaagcagcacatttcaatttctgtatcaaattattcacactttagcaccgtaaagcactagcaaattactccatcactccaccattttcattttttttgggggggttgggattgatcacaaaataaatccagaaatttgcgaaatcccaaaaatgtcatcagagtcatggcatccccttgggggtgggcactgctggccgggacaaacaggatggaaagtggtggaaaagcatgctttttaaaagtggtcgccgggattgggatttgggtgggaacgggtgagtcccactttaagaaatgctttaacgcgcacccatttgggacatcccaaaaatgtcatcagagttatggcatcccctcgggggtgaagcatgcttttaaaaatg

SEQ ID NO: 104270 - DNA, 844 bp, Heterodera glycines
gagagggggagagagagagagagaagagagagagagagagagaaagtgacagagaaagaatgtgagttaaagagagagagaaagaaagagagggcgagaccacatgctctctcatccacataaaacctttcagttgcgcaacaaacggatgccgaattcaaccaatgggactgaagggtatgtgactgattgaatggttagaataaaactgaacccgttcgggatcaatgcttcaggcaaatccagaagaatgtgccgtccgaagcgcgcagtgaaggcggtgccaccaaaagcactgcgtcaaaagtcagttttatgaagattgtgggtaattagctccttgagactctcgactttcataagttttaatgctcgagactctcatgccattgttaatactcagccaaaaatgaattttttgaacagaatcgcccggaggacaaagacggacgctacaccgaggcaaaggataattcgcaccgtgaggcgcgagcattgttcggcaagcagtgatcggaggcggatcaatcgatcagaagcaatcaataaccaatcgatcggagagaatttctgttcccgagttgcttttcgagactaacaaaagttaatagtattttggattcaataagttatcatcaaaatttttcgactaacgcagtgcaaaaatgaatttttgaaattttagtaagaaaattttatagaattttttaaggacaagatttataaggacttttggggaagctattctgattcgatgtttcgttctctagtcacaattctcgtttaaatatgcatttatttctcgactatcattaaatctcattttgaatgcatttacagtatg

SEQ ID NO: 104271 - DNA, 53 bp, Heterodera glycines
aataccccgcaaccattttgttttgtgtacactcactcattttgtaaaatatg

SEQ ID NO: 104272 - DNA, 789 bp, Heterodera glycines
aatgccaatgcaaatcgaattgacttaggcaaagttagagttgagtgaattaataattttctttccattaaaaatttagcaatttgtcatgggttgttcagatctccttgactgatggagattattgtgttgttttttttttctgaaataaattttccccagcacgtttttctgctatcttttgaaaaaaagatttggtaccataactcattttttttaaatttatttttcttgttgctcgaaaagatcattttttgagcgagtttgacaaagttccaagcgtgaagttgtctaacaatattaagatgatgtatgtataattcaaggctaatgtattggttggatacatgtccgatgggttacagtgctctttccttgatattactatactgttttaaattcggttgatcactgcacttcttaaacgcactgtaccgtctcgtttaagacaacagcattgggccatgcgtaactgggcaccgcagcgtgtagcagatggaccggcagcgacactttttgacgccggcggcggcgccccggtcagcggttcgtcatccgcgacggcgggtggcggcattgttgtgcccggtctgctggagatggctcagcaccagcaccgcttcaacgccaacctgttcaaccggagcttttcctcctcctccaattcggcgatgccgtcatcggtggcggcggcaattgcttctcctccggccatcacttcaacgccaacgacggcggcactcgcggctgcttctcttcgctcgccggcagtcaccacatacaacaatg

SEQ ID NO: 104273 - DNA, 116 bp, Heterodera glycines
agtagaaaagataaaataaaaaacaaaaatttaagatttttgcccgtttcagacgcgacgaggcgggccgtgccttctctgcagctgcacaactcgagctgagcgacacggccatg

SEQ ID NO: 104274 - DNA, 794 bp, Heterodera glycines
tacaaaatcaagggttgacaaacccaatttaaaaaaaaaacacacacacacacacggatcaccaaacccaatcaaaaaaccgaaaaaggacaccataaaaagccaaacataattaaaagtcataataaaccctacagcaaacccatcactaatttaaataattaagtggacagagcgactcctaattcaattactccgacgaccaaagccaacacgaaaaagaaacaagtggcgaaaagcactacactgactgaacttataaaatttaaaaacacaaaccgaaatacaaattaacgaaacttcgcccgaaacatacagagaatatactgaaagaaatttacaaaaaaaaggagcaaataattaacaaaaacaaaaaaattctgtgattatatatattttttttaaatttcgtaacaattgttaattctgtgatcattaaaattataataatatttattaacttgtgataaatacctaattaaaattctcatttttctgattatccactaaataaccataaaaggatacttagttaattattttaaaattttaaaatacaaactatgtccggtacgcttcgtagcaaaatacccctccttaatcgcgtattaaaaagggaaatagaaacgatcaaaacaaaaattgaggaaaacaaattcgaatatgatcaaaataatcccggagaatgcatgcggatattcaataaaacaaaggaaattatccaaaaaatagagccaaattttgaaaaattaaaagccttaaataaaaggtggcaaaatttaatgagaaaaatg

SEQ ID NO: 104275 - DNA, 166 bp, Heterodera glycines
  unsure (1)..(166): unsure at all n locations
tgctttatctncagtgaatggctggtaaaataaaataataatttacacttaaaatattcaaaaaaatctttaattttttttaaaacattaaaaatttatgttttaaaaagagatttttaatattgtatgaaataaacataggcatcactttgtgcgggttggcatg

SEQ ID NO: 104276 - DNA, 83 bp, Heterodera glycines
attatggaaaaaaaggacacggagtcactgctcgactatgacgaggacgaccaagaaaagtcgacggagcagctaaaaaaatg

SEQ ID NO: 104277 - DNA, 122 bp, Heterodera glycines
tttccgatccaaacaaatccaacggcacactttctacggtaattgaaaagctatcggaatttgagcgagaaatcgaaggaagtgaacgtaacagtgaaactgctgtgtacataaagggaatg

SEQ ID NO: 104278 - DNA, 68 bp, Heterodera glycines
tttttcgggcgccctttttccacacaattgtcggtgccgggttgccctccacgacgcatttgatgatg

SEQ ID NO: 104279 - DNA, 206 bp, Heterodera glycines
atgaccaattttgacaagcattgggcatttctgtcgtagcaaatcttggaaaaaaatgaaattcaagaccaattgaacccaaaaatttgaaaatttcggggatagggttggaaatcctctaaatctggtcttataacgagttgacgttcattaacaggaaacttgccgaagaacaaaacagtgtgtcgccagtgcgtccgaacatg

SEQ ID NO: 104280 - DNA, 58 bp, Heterodera glycines
tcattttaacatactttgaatttttattaatctgctctttttatttcagtatcaaatg

SEQ ID NO: 104281 - DNA, 547 bp, Heterodera glycines
tcggcacacggtctctctctctttctctacccgctccctttccccgcccccttttgtacattttgctcttcaggtgttcgctttcttttggctttggtactgtctgcttttatgtgccacaacgtatgttttttatggggaatgaacgcggcttcttttccaaataaaaaggagaagtattccaaaacttttcttctcactccgtaaattgtgggggatataaaaagttggaaaaagctaattaatgacagggatggtccccggaattcggtgaggagggattaattaccgctagtgatgctcgaggtttcggtctcgagcatcactaattaccccctccccctccatctgctgaactcacagcaacacttggtaattaagctgttccgccctgttttggctcagcaacattctgttgcacatcgcccgggtggactacgtgctgaagtttatgcaaattgctgaacacagtgaacaacagcgaagcagcggcagaacgccaaaactatcgcaacaaaagtgggcgatggtggaggagggcgaaatg

SEQ ID NO: 104282 - DNA, 64 bp, Heterodera glycines
ggttgttgactagtttcagtttcacatttttctaaatttcacttgcttcattctttaggtgatg

SEQ ID NO: 104283 - DNA, 84 bp, Heterodera glycines
ggtaggcggtgtttttatttgctttttctttcggtttaatgttttgggttttttctctttgcaaaggttcttggcaaacatatg

SEQ ID NO: 104284 - DNA, 57 bp, Heterodera glycines
tttaggagcatatgctttatttcatgatatttttaacgctttattcggctggagatg

SEQ ID NO: 104285 - DNA, 769 bp, Heterodera glycines
  unsure (1)..(769): unsure at all n locations
aaatagttgttcaataaatttgaagcatttacttcaagaaaaatgtaatccttggaaaaaatttcaactttttgttagaattcgggtccggggttcggaattgggtaaatccgagttgagattcgtaatcagcacctcgaaaacctcttanaagttggtttcgaactcaaaataaaaaataaatttttttttttaaataatccgggaccacaattctttaccattgcccgaatttatttttatggcccaaaatggactttaaaaattgaaattggttttttttctccttttaattgtccattttcggctgccattgtttttgtcattaattcgttttctccatttttgttttgcttattttctcgccggttagtgggtgtgtaattaattaactgtaacttgttaattatgtaattagcgtgtaattataattgattgtctaattgacctaaactcattagcaacatttgttgttaaactgttgttttgtttttcctaacttgtcaaaatcaatttttgcccagcagtcagttccttcttcgtttgttcttcattcatccgccaatttgtactcattaattaatgtccattagaaatgcttcctcccctgataatgatgatcattaaaatggtgctcttttaaatgttttttaatatttttttctcaaaattttcgtttaaaaattcaatttatttttcaagtttagttttttgtatttattttaaatttaattcccacagttttttgttttgatgtaaatttttaatg

SEQ ID NO: 104286 - DNA, 267 bp, Heterodera glycines
actttgtatatgtaaagtatgaagcagatatcatgatcatacatagatagatcactttaaattgccttataataaatgagattttggaggaaatgtcgcaacaaaaaaaaaccaaaatgattatgcagaagtgctcatcacattcggctttttgcaaatatgtttgtacatgatgatgatgatgatgatgatgttgttgttttgctcccaaatacataacaaaacaaattgtaaaattataagtaaataaatgactaaaaaaacatg

SEQ ID NO: 104287 - DNA, 67 bp, Heterodera glycines
cgtttgccccccccccacttttttaacttaatttttcattttccagccgcctattgaaaaaacaatg

SEQ ID NO: 104288 - DNA, 68 bp, Heterodera glycines
acggctcgcagcagcacattcggcgtgatgcggatttccaagagcgcagtcgcagccgtggcggcatg

SEQ ID NO: 104289 - DNA, 577 bp, Heterodera glycines
tgcgcgcacccattttatggtggaccttgtggggagtacaattaaacttcccaaagcggcgcttttcttttaccccccccccccccccttcattactaattaattaaatttaattaaaaattatttcaatttcccttgcaattatactatttattctcccatcacatttctgatttaattttgcaatttcttacttttccccctccaatttctattttttcgcattaaaaattatattttttttgtttgattttcctgtattcttttattaatcactcccaccattttttttctttctttcctatttatcattactaaaatgtttaaccaataaccaaaattaatagtaatattaatgaaaatgctttgaatagtaaatattgaataattttgtttattaaattaacaaataaagtattttaacaagtgatgtgttaaggccgtgccaacgatcaacccgaaattacattgaggagacaatacgactggacaaaacactaacacggcgctgacattggtcacagaccccaaatgaggcaaatggaaagactcggcggacacggaccacagccaaatg

SEQ ID NO: 104290 - DNA, 894 bp, Heterodera glycines
gcagcagaggacgccaattcgtccgttcattgagcattgtcggacgccagtgggtaagcaaaaaacaaaaaaaaaaaaaatcatgaaacataaaaatggttcctctccccgcccccgagttttttttttaattttccaaaatttcaattttttggaaaatctgtttaaatcggtcaaaattcaaaggtttttccgatggacttacttacgggtctgggtacgcccttgattagaatgttttttcttaagaaatttcaaaaaaaaaaaaatttttttttaattttgcagcaattttttcaaaattttcttgcgggggtaggaaacgaattgctcccggtgggttgaccgttgggccgagtattttttttctatcggatttttcgctgaattttttcaaaaaatttgcaccgttcggcgacacttttttgggactgccattttaaatttgtttttttttacatcattatttaattctatacatttttcagatcgcgttttggactttttgatgggtgaaagtatcaacagtcggtcggtttttaacattttttttcactgatttattatagcaaaacaaaaaaaggaaattttttccgaaaaaatattaaattaaaaaaaaattcgagggagggcggaagaacggtacgggggaaacgaacttctcccattttattcatttattttttgccccattagaattcatagccctgacaaaacatttatcagaaacatttctgtggtcttccatcggtgctgatgtgtgccgctggggaaaaaattttattttattttttgaatttttgtgaatttctaacccaattttttgcccatttgattgttttcttgtacagttacgcgctgatctgtgcccattgtcacacccacaacggcatg

SEQ ID NO: 104291 - DNA, 60 bp, Heterodera glycines
ttcttgcgacccatggcttaaatagcggccaattgtgaactaggccagagagcaaaaatg

SEQ ID NO: 104292 - DNA, 1003 bp, Heterodera glycines
gctgctggaggtggtcgggtcgttttggcgccgacgttttggagccagcccaagttttcggactataacttttttttattgttaaccaaatttaacattcttgttatcattcgaaagattaacgtgtttagaagctgtttctaagctattgtttcgtgattagacaattaccaaaaaagttataacatgaaattacaaaaaaaaaaccaaaattttggaagttttttcttaatacattttttacaggtacattttttacaggctaaaaaatctttttgctttttgtaaggctaatagagcacgtgaagggctttcgaatgataccaagattgtttaatttggcctacaacaaaaaaagttataatcaaaaaactcgcgctggcgccaaaacgtgggcgccaaaacgacccagttccgctggtagggctcggcttcgccgccgccaactcggcctctggccgcgagtttttcgctgcgagagtattttatgattccagtcagttgacaatctcgggtttttatacaataactttgttcatattcgaacaaaccctatcagcaaatattttttgttaattgcctaaacattgcgatttataaattttagcttcgttagacttagtgctttcgaatgctaccaataagatagagtgatgttctttggttctttgatgcggaagagcaaaagatcaacccacggtgggactcgaacccacgaccccagctttccgtgctgtgctctaaccaactgagctacgcaggcatcctctccattgctctcttctctctcctatcttaggaggagaatcactctcttaatctccttcactgccgtcttggcacaaggggagagagtgaccgcatttatcacatccccggcctttgagaagaccggtccccggtctctttgatgagaaagctccagtctttggataacttctctcagagtggggagggggagctgtcggcttgacacaaactccacaccgaatgtgattccatg

SEQ ID NO: 104293 - DNA, 85 bp, Heterodera glycines
gcggtacgccccgctcggcgaccacagcagcggcggcgattgtggcggtggcagcgcaacgcgcgcggcagcagcggcaaaaatg

SEQ ID NO: 104294 - DNA, 379 bp, Heterodera glycines
tcttaaaatatttaaaaaattatcttaatacaaatttatttttttgaaaatcaaaaatttaaaaattttcattttcccacttttgcttaaaataattaaaaatattcactgtttttgtgaggaaattgatgactccaaaatgatggcttttcctttgtcatttttggtttgctttggcactgtgcgaattttaatggcgcgccaaattattgtgacatttttgttgccatcttttggcatcttttgcacacattctttttcaatcgaatttccctggggaattaatatgtaattttaattaggtattacccaaatttaccattttagcgccaataatagattttcttttgacttttgaatttccgcttttctccaaatg

SEQ ID NO: 104295 - DNA, 168 bp, Heterodera glycines
aatttagtgcccaaacttcccggtgcccaaatttctcgctgtccaaacttcctggtgcccaaacttcccggtgcccaaacttccgccccccatttaaatggtgtctttccaatcctttccccacactcttcattcatttatattatttattgtttttattaccacatg

SEQ ID NO: 104296 - DNA, 1003 bp, Heterodera glycines
acttcgtaaaggcgaaaagattaaacaattaaagattttcaagattgaaatagacaatttttcgttagatttcggcaccgccccctccaggggtggggcgcgcacaaaaaaaaaaccgcggccgcacattcaaattgccgcggccgcgcatcgcgcaaaaaaaaaaccgcgcaccgcgcattaaattgccgcggatcgcggatcgcgcatttaaaactcaaaattttctaatttttaaaccgttttttaactttttttttaaattttcttatataaaaaagtaattaaaatcccgaagggactgaatgggggaggaggtgagtcagtgttcaaatttgcgaaggaattccagtcatgaaatcctatgattttttgtttttcagaagcttttttcggcgcgctttttctaaacttttgtgaactgataggggggggggtggatccagcggtgccgataggcgccgcagggaaaaattttgaaaattttagtgcaatttggttaaagttttgtaaaaaaatgacctattttgtgatttagagccaatttttttaaagaaaaattaaggttttctcagctctgacgggaaaaattggaattttaaaacgaatttttgagaaaataatacaagttttcaaaaaaaatttcatttaaattttgaatattcaaaaaagacatcgtttcaaaaatttttctttatagaaattttacaaccaaaaaatgcgcggcgcaccgcgcaaaaaaaaaaaaccgcggccgcgcaccgcgcattcaaattgccgcggccgcggatcgcgcaaaaaaaaacgccgcgaatcgcggtcgcctccagccctgcgacctaccctagtttggacccaagacaaacagtaaaataaaaatggctgcattcaaataatcttttttttctctagctctgttttctccatttctgacttttaaatttgtaaatttattttgccgtccgtctattcttcaccgttttgttcgaattccttcaaaatg

SEQ ID NO: 104297 - DNA, 274 bp, Heterodera glycines
gagagctgttttttatattacgccggctctgatgcacccaccgacgaaatttcttcattggccgttgatccctcgaacatcaatgactcgccttcaggtcataattggggtgacagggaaatccaaggaaacccgaatcccccgaaatccccctgcgccccgcttctttccgcctgccaaccgtgcccttcctttgagccgcactttgccgttgtccaactgtactcgcccacaaccttcaccaaaatctgctcaaatcgaacgaacggcgatg

SEQ ID NO: 104298 - DNA, 77 bp, Heterodera glycines
agtgatgaaaagggagtcaaattagcataattgaaaggtttcagggcattgagaatcgtcagacaaagcgcagaatg

SEQ ID NO: 104299 - DNA, 89 bp, Heterodera glycines
cacaattagcactgttttaaggaatacaaaaacattgtccacaaatttcctccaattaaaaaaacatttcagagcgtttcctgcaaatg

SEQ ID NO: 104300 - DNA, 192 bp, Heterodera glycines
ggtaagaaatggaataattataagtccaaggagaaatattgacgaaattttatgaacaacaaaatttcctttcttttcccctgggggtgcatcggcgtattactcgcatatgaatgaataaatgggttattgttttcctattataatttcatcttcttccacagggctgtgattagcatcaaagctgagatg

SEQ ID NO: 104301 - DNA, 224 bp, Heterodera glycines
agcctcagacctggggacccctgattaataacaagctaattatgagcaactttctgtgattaaacattagggcttccattttttctaagaaactgctaatttttttttttggacctaattaaatttgttttacaataacaaacggacattccaaagacaattttttaaaatgaaatgatattgtttgacctcataaataattctttttaatttctaagattatg

SEQ ID NO: 104302 - DNA, 431 bp, Heterodera glycines
ttgtgtgccactgaatagcagaggatatgaatttttgagcactaacattaaataggggggggggggtttgtcgaggccgtttctgaacacaaatggaggggatgtaaaaagaagacaaaaaaacacacgaaaaaaaagagaaaaaactcacaaaaatgttgcaacgggtgcacttctatatgggcaaatggtagtagcgaaggtgaaaaggatgaaaacgcatccccttatatatcaaatgaaatttggcaaaatgttgggtttaagaattgtcgtggctgagattgaataaaaggaaccgacattcgcattttcgctcacttcccaataataaaataatctcaacgacgataattgcgcaaacactttcaacccacacatcttccacacacgtcaacttcgaccgcgcttgttctccaatcaaccaaatg

SEQ ID NO: 104303 - DNA, 621 bp, Heterodera glycines
ctaagagtctgtagtctgtgtccagccagatctggctttttctgcgtctggatttttgtccagaaaatataaacagttccaagcaagtctggttgctgaaatttgtgccaaactaaaataggattttaaaaccaatctctatgaactttcgagtataaaaaaagacagaatttgttgaaatcgccgaaaatattcgcctgcaccgagaattgtagaaacaacattgcactcatccggcactttgcaatttcaggtttactttttaaacaaatcatttttgacataataacctaaaatgaggctttgtagggtcgtttcctttgttttcttaagctttgacgttcaaaaatttttttttcacttaatttaaaaaagaattacctagcctattttacaactagcaccaaaaatttaatgccaaaaagctaaataggaaaacaaaaattagcagaagtgccgccgtatgaatacaatgtttaactattttattaatttttttgcacttaacgtgttctaaacctttgtattatgataccatttactatacatttttttaaattaaccgtttgtaatttattttcaaaaaaaaaagttattttacagagactcttaaaagtgatg

SEQ ID NO: 104304 - DNA, 133 bp, Heterodera glycines
atcagcttaacattgatttggagaagccgctatatccagtttcaacaatgaattgggggggggggaatggaaaaattgatcctattttcgttgttaaatgaccaaaatcattgctttatccccccaggcgatg

SEQ ID NO: 104305 - DNA, 412 bp, Heterodera glycines
atatttataattgattaattcgattgtgaaaaatagggatggtaattatattaggtttttatagattttttccaaaattagaatatctagggtcaaaaattagaacatttaacaacatagcttgaaatatttttacaatttaatcaattaatgtcaatttctgtattttcgcctcctattatcattttaaacaattttaaggaaattagaaaatcgtaaactgcatagggatcaaaaatcaagaattttttcgcagtgaattttttcaaaaactttaggggaacagggggagggccggcggtgccgataggcgccgccgggaaaattttgaatttgaaatgtaatttgttaacagaatttatcaaatgacaatattttttaatttaaaattcaagatcttaattaaaaaatg

SEQ ID NO: 104306 - DNA, 288 bp, Heterodera glycines
aggggggggggggtgattgagaaaaagtaagaaagatttaaacaaattttcttgcggggtacctgttggtacgttgctaggtcgttacacaaattttcgtttttgatctcattcgaaagcctaaatttgatcactcgaggctgatcaggcttataaagataattattcaattctattgtcattgtccctcactataaaatgcttttattagttgattaaaatcaattgataattgcgttttaattaaaataaaaatttaattaaaaaattacattttaaaataccatg

SEQ ID NO: 104307 - DNA, 245 bp, Heterodera glycines
gtcgtcaaaaaataatttgatttattattttttttaaaagatgtatggaattgtggccacagtgggcgaaattggctctgtgttcgccccttatttggatagaattgtgagtgggaaatttataaacaaataatcaaattagctttcgaatttatgataattattcaagttgttatttttaaagaaatcaacaacattttacaccttttcattgctcctttccctgtcagggtgacgaaaatatg

SEQ ID NO: 104308 - DNA, 210 bp, Heterodera glycines
ttgattttttttggacatttctttattaccaatgaaatgattgtctagagaatttagaaatacagtagttaaggtgtttccctccagcccgcttagaaaaaaaaaaattaaaaattactagggtaatacataagtagggttgcgattttaatgaagaaaactcgaaatagtttttcatgaaaataagcaaattttaaattttctcgcatg

SEQ ID NO: 104309 - DNA, 499 bp, Heterodera glycines
  unsure (1)..(499): unsure at all n locations
ttttgtaaaatataaaaaagatttaaaattttggatcatacttgacttctttgttatttgttatattntaatttttttcacgtaaaatatttgaaaattcgattttttctgttttgtattaaaaaaagttaaaacaaaaaatgaaaaactgtggaagagcgaccataaaatcagaagtgtaacccggaatttattgaaaactttattaaaaattttaatggaatttatgcataaaacgaccaattctgcagattaagtcattttttcggcaccactggaggaatttggaaatatgtactggaaaccaatatgacttatttgaggtttttgggtttaatttttgaaaatccaaaaaaaagaagataaaatggtaatatgcgctaaaacataagtggacgcgtttcgcgcaaaaaagtcgccgcgataagcagtcgccacaaaatttcaaaatgaattcgcaaaatttggacatacaaaataaagttggtaggtgacaatg

SEQ ID NO: 104310 - DNA, 500 bp, Heterodera glycines
tttttcgtaattggaatgcaacatttgactcaaacttcagtttcttattttcaaaaaaatttgaattgtcatacctaagaaaaatagctttatatttattatcagggctgtccgtccaaaatatgcaaatgcatatttttttcctggattctacgtagtcggatataggaaaaacattttcttttgggttacttagggtggaacataatttttgatacccaaattttttccaatttttaaaaattcataactccgttatttctgcgcctatttaaatgattctttttttattttgttcttcatggtgtcctcttttatatctcttactatcgtttcactttttatttgattgatagatttttctgccttttttcccgaccatgccaaaattgaaaattggcccactaatttttctcgaattttttatggtcaaaaaccaaagctgatataacaaaatcttagtttttctatacaatttagaccagtagaatccgaatatg

SEQ ID NO: 104311 - DNA, 834 bp, Heterodera glycines
aatctgctcccgatggtgatgtaatgaacgatttcgtcaatagcattcaagcggcgacaagcaatatgcaatagcaaaaaaaagcttaaacgatggactcgctctgccctatatataaaagttgttgattgctcaatttgtggttctccatactattattcacattttaaaaatgttaaattctcaatcgttcagtaataaagacatttgtttcaaattgccttgcggtataattatttccgggccatcctatcgggcaaaacggaattcctactaaaatttattgctgagtgcaatgaactgatcgcacccagtcccatctcaattatgtactgttttggtgaaatgaattcggcggttccgctactgcaaaaggcgggagttgaggtgtattcgggcgtgccctcggaggagctgattaggcgtcttcccaaaccgatgctgctcatctcgacgatctgatgttgtcaatcgatgagcgctatctgtccgatttgttcaccaaaaaatcgcatcaccatcagtttgcggttgtgttcatcactcagaatttgtttgagcggaagatcaaggtggcgtgcctttcggcgcagtatttggtgctaatgcgcgcgcccaactctctgctgtccattcgaaatattggagttcagctttctccgcgtcaactcgattttttccttgacgcctaccgcaaggcgaccgcccgcccctatggttatttgctaatcgatatgcacgcatcatctgatccagcgcttcgcctccgcaccaacatatttaaagaggagcaggatgaggacgtgggaacagttgtgttcatccccaaaaatg

SEQ ID NO: 104312 - DNA, 620 bp, Heterodera glycines
atggcggattaaggaattgatttgaatttcttcatattccaattcaatttttaaaataatttttatgaatttttttctttaaattattttctcaaggaaaaagttccagtcccgatcgaaaatcaaggtccccccggtcccggtttttccaaaaatccccggtcccgctctactctattacaaaaaactattagtttttttaaatttttttaaatttaaaattaaaatactttaaaaaaagttttccctttcttttggccaaaacacaatttttgagaatacaattcattaatttttttttttcttttctgtggatggaggtcatttcttatgctttttatacaattttgttgtgaattttttgaaaaatttattaaatatttaaaaaaatttggatttgcaaataattgtttccttttaatttaattgaaaatttaaaaaattatcccaaaaataaattttacagatcgaaaccggacggagaattggcttttgcgctgcaattggaccaaattttgggcaaagttttcgctttcaatttaggcaggcatttttttagaaaaaaaatatctgccaaaaaccaaaaatttggcatttttttagttgaacaggaaccaatg

SEQ ID NO: 104313 - DNA, 216 bp, Heterodera glycines
ataaattattagtctctttcagtgaaaaagaaaaaatcattttgtgtcattttaaggaaatcatggaaatgattgttgagcttgagaatcggatcaaagcctaccgattcgtggcttattccgccgtttgcttttccgtcgtttcggatgctcagcgttgtgtgttacagcttcccctcggtgtacaactatgtgcaccacgtgcgccgtagcatg

SEQ ID NO: 104314 - DNA, 292 bp, Heterodera glycines
tttcctgcaataaatgttttcatataaaggtttaaaaaattcgatcgggtttagaatcgttcaacaaatgcatagataaattttttgaatattatacaatcgtgctttttgctctctatcaatttattataaaaactagcgggtgcgtgaaccgtcggatctgggctgggaaaaagcgcttcgcgctttgtgagcttcgctacctaggcgcgttttagtctgttagggtctttgcgtcagccgacatgcacttggtttcctccaataattggagttgacacatcgcataatg

SEQ ID NO: 104315 - DNA, 1003 bp, Heterodera glycines
ccgcttatcatttgttgctattcatctctcaattaactaattaattaccttaattacccttacacaattgccaaggtcacttctctttcttgctaggtgagcaaaagttttggagcaattactacaaaacattaaacagttgttgctctatctgcagaatatatttttaaatggcttgaaaaatatgtataatataaaaatttaataaaaataaataaaaggattttaaattcattttccaaattattcattcacaataaataaaataaaaaagttattatttatccataaaaatcataaaatagtttatttttaagttttttttaaattatatatttttgccttataaattaatggaaagaaatattttttgaatttaaataaaatttccttttttccgttttaatttaatgctttaagtcacttgttcaaaaaatgcccaagttatttttactaattatatttttaaatgcccaaattcctcccccccccctttccttttccaaattttcgccctttccttttccaaatttcgttgcgctttctcttttccatcagggattcctcttcttctctgttttttcacaagcctcccatccattcgtcttgcgcactgactctgaccagcccccccccaaataacaacaatttctcatcgattctttccgtccatcgttatcgccgcaactgggtcttttagttggcgtcgcaactgcctccaccagtcgccccccccctaagtaacagcaatttttcattgattcttttccgcccatcgccgttatttccgcaactttggatggcgttgaatttgaaaaaaattattcattcgttttatgcgattaaagattttaccaaatttaatatttaattcttttaatttttttacttatattcaaataaaatttaaatcccgaatcccataataaaaattaggaatattttctgtcatgtggtcctttttcaaaattatttaatttttttcattcagtatttacaaatg

SEQ ID NO: 104316 - DNA, 174 bp, Heterodera glycines
  unsure (1)..(174): unsure at all n locations
catttgtgaataattttcataagttaaattgccaattatgggatattctactgcaataaattggactgggaggcccattccaaatntaccagatttttgggccttcggaattcgaagtttttttcggggcctttggtcccatctctgantacatatacatgacctgttcagatg

SEQ ID NO: 104317 - DNA, 105 bp, Heterodera glycines
ttgcaaacaccgaggagctgaaaatttatataaaatgaccatttaaacctgttttttttttttgcagaattttcctagtcgtacaaaaatctaaccctgaaaatg

SEQ ID NO: 104318 - DNA, 567 bp, Heterodera glycines
tttccgccgccttttcccaaacatttttaacgcgtagcggcaaaatgtgtgcttttaataaataaataatatgcccaatcgttctgtgtcattttataatgatgagcaaaaagccagcagcagcaaattaagaaattcacatgcggccaaagtaaagaaatttttaaaatttaaaattaataataattaaaaattcgaaaattcgaaaatttccgttttgagaaaaatttttctaaaattaaaaaggaatatagcaaaaattagaattgttttccaaattagcaaccacgggttttcatttattaattattaaaaaattattttgcatttttttgaaaaatttttcatcaaaaaaccaaaaacgcacgcaaagtatcggattcttcgaaaaattatttgtatttcgtttatttcgaaatttaaatatattcttaaataaaaatcaaccctcgcgtctgcgctaatgtgaaatcccagccgaaccagcaggtggtcccaaaccgatcgcaaccttacaaaaatggtgccaaaaagaagagcacttcttttgaggcaatgtccacgatg

SEQ ID NO: 104319 - DNA, 74 bp, Heterodera glycines
caaaagggatgaagaggaggacaaaagggaggaagaggagcacaaaagggaggaaggggaggacaaaagggatg

SEQ ID NO: 104320 - DNA, 1003 bp, Heterodera glycines
aaaatgacaaccctgacaatttccactcgaaaatatgtacattttcatttattcctcaatctaattttcatcatatcatccttattaaatatatttatgatctctatactcatctgcgcctgacaaatcagtgtaattgagctagataaaatgccagtccctggttgaaattttggttacgccacccgaaattgaaattgatcagaaaaaatgaaaattagaactttgttcttattgactgtaaagtgagttatttctatttttacaatgacattttagcagctggacttttcggtaatatttcgagctaaaatggcaggaaatacttttatattaacccgaacctaagagagattaactttggtacaaacgcattctcgggtcaccagtcatgaattgcttttcagagcatagtcaacaaaatgacagcacagactttttgtttgcactcagactcaacggcccaataattacgctacagttaagtggatacagaagaaagttactgtacagccccaatcaatttcttactaattaaaacgcaaaattatgccaaaggaattgcaagcaatcaatgcctcgcggcatgttaacttatggaaaatttaagacattctttgcgattgtagacaaaactttcaaaaaattatttagataaagatgaaataatttagtatgctgttggaagaaaaaaattaaaatttttcgtactttgcggcaaataatttcaacataactccaaacacacaaaaattcgttgagggaagagtggaatccttattaagtctagtcaacaattattaatttaaaggacaagcgcgtaattgagtttttaatagggcttattccatgtgttaacgtccctcttgggggaacagtcaaattggtggcaataaatctgccaaatagaaccaagaaattttatcaaagcattttttaaaagaataaattaatttcgttgaagatataaataaatttttgtacatttggcaattcaaatatg

SEQ ID NO: 104321 - DNA, 392 bp, Heterodera glycines
tttttggcttatttgttgttgtcatcatttttcttgccgtattcattggcatttgttcctcacttccaattcctttattattttccccattttcctttttcatatttttggcactttttctccatcttcctccctcaattgccattggataatcgcccttctgaaacattttccaccgcgcccgaaccaaagagggcgatttgccattgcagaaggaatgggcacaacagcagacaaactttgggaaagaaaggcaaaatggggaaaagaatgagcagacaaacgaactgattggccatcggaggaaagggaacagcccgaggcaatgcaaaggtcggaagagttggcacaacccgagaggatttggccctaaagggacaaagaaagcaatg

SEQ ID NO: 104322 - DNA, 931 bp, Heterodera glycines
agcagcacaaccttgaaccccaccgatcggtagccgaattgtttttgcttattttatttgttattgtaagccgaggggaccgtcttttctagtgggcggtgatgtgctaattgacttcatttcaattttaaattattaatttctgtggcgtttcgtatatttttaagagactcaatatattttgtgatgtttttggttgttttatgtagtttttaattttggagaagaaattgtgctgaatttattatttttgtttgtcgtcgtattttaactgtttggtataaatttatttgtgttttgttttgttttgtaaagacagatcgcagagaactgttgacaatcgccgttttgacatttgaattgggaaaagtggacgcaaacaagcttttgttttcaacttggcgctcctgcaacaaaaggttggcttgcttagtgacgactaaacggaaaacttttacgtcggccatataagttgcgataatcctcgtgttggattttggattttatcgacattatcatatatcgacattatcattttttctgtcctcgtgttggactcttcatgcatcccaccgaattataaagcactcgtgttgtgctcttcaagattctccaataaagcactcgtgttgtgctcttcaagattctccaataaagcactcgtgttgtgctcttcaagattctccaataaagcactcgtgttgtgctcttcaagattctccaataaaactcgtgttgttttaaaaagatgattaaccgctctccaccattcaccagacaacgagctcgagatgcggcggcattacagcaacagcaaaacggagttgtagggaatttaagcaggccgaataacaccgctaacacataaaatcgaaatgtttcgttgaataaccgggttgatggtgaacttttagagtcagaagaaagcatg

SEQ ID NO: 104323 - DNA, 691 bp, Heterodera glycines
tttttatttgttcgtatttggcatttaaatagcaatttaaaatattagaaattcaatttaaaaatgatgggaattttctgccataaaaaacaattttctttatttcttcagtgactattcgttttttgttgcgtttgatcagtgtgaaatttgattcaattacgaattgcgcccaaatgcccccggggtgcacagtgtacaaaaaatgaaagtgtttgacccttcactctctcgcgacaatttggcctccaaattggcgacaacaatgggacacaaactttgccctctcttttctgaatttctctcccctccccgcaattctgcgcattttgtaattcattcttttgcccctcgaccatttgagcgcattttttgtcattacattccaattaaaatcaaataaaataaaattaaataaaattaaaataaaataaagcacaaaacagaaaatagcagaaaggagaaaagaagaaaagaggggagagaagaaggaatgggaggaaaagcatcacaataataagtgtttatataatggaaagggatgataaataaataaataaataaaaaataataataaaggaaggaaggaaaaagacagatggccaaacaaaaagtggcatcaacaaacgaacaaatggcacaataaaaacaaattaaaaataatgacaccgaatttgacaacaaaggaatg

SEQ ID NO: 104324 - DNA, 1003 bp, Heterodera glycines
aataagcaaaaatattagttctggaccgggttcgaacctccgctctttttctcttttaaatgaatttttcttaacaaatatttgtaaaaaaataatatgaaaacacacgcaaattcacctttatttaccaaatggatcaaaaaaggcaaaatatgatttatcaaagatgaagctgcattatggttgcgccacatctatttcaaaagaagtctcggcattttttgtattctcggcactttaaaaaaaaattaattattctacgtatgcatccattctttataacaacaaattctttatttaatttatttgtttgtctttatgtttaaatatctttaaaaaagaaattttcatatatggccacttccagtaggaattgagagaatgcaaaatcactttgaggggaggtggggggcagcaacacaacgacgacgggacgtcgcaatttgcgcatcgcataataatagacaacggcggatggacactgctgatcaccaccgattgggcagactgatcggagccattgtgttgcacagagattgtgacggccgcagaattggagtggctcaaaattgtccacattttgacgcaaaatttcgcatactctgtcccatccgacgcgccatttattgtttgatcaaattaataacattgttcatctaccggtgttcacacagcagcaggacttgttgtcgtcatgttttgtttttgtgttggaattggccattacaaattggccaaatatttcgcgtaccatttacagattttttcactctttaaattatgcaatttcagcagctctagattcattttaattaggccgtcaataatttagtttataaaaaatctgattttgtaatcagtgtgatcaccctcaaatttttatcccaaatcatatatattaattaatccatgtggatgtccatgcggccgaaaccgatggagattatgcattaaattaatatttttttagacaggcattataatttgtttcggcataaaaatg

SEQ ID NO: 104325 - DNA, 63 bp, Heterodera glycines
ttcatcagttggagcggaatattgcgcaaagacccgctaattatactgaggaagcagctaatg

SEQ ID NO: 104326 - DNA, 95 bp, Heterodera glycines
ccccccccctatttaatgcatgttgacgtctgcctctgcccaaatcgtttattattaatcatttttgatttatttgcctaatttgtcaggcaatg

SEQ ID NO: 104327 - DNA, 259 bp, Heterodera glycines
aaatcaaaaatttgttcggagataatgctattttgggcttctctcgccataactaagccgcaaaaaaaatatgtaaaaacataaaaatccgggccctagcgatcactgatctgcaacgcataaaactatagtgaacaaattttcacgaaaagatgataataagaccatatctgggacttagaacttgtatcaaattaatagattaattgttggttaatctctattacgactaacttcaatcgtttctcagcaaaatatg

SEQ ID NO: 104328 - DNA, 82 bp, Heterodera glycines
  unsure (1)..(82): unsure at all n locations
catgatagaatagataattaaaaaaatataaaattgtctaaaacgacataggttttggctatatgtcttttnaaaatgaatg

SEQ ID NO: 104329 - DNA, 57 bp, Heterodera glycines
tttcttattggtagcaccggatggttgccccaccgcgccagcagcaattaactaatg

SEQ ID NO: 104330 - DNA, 214 bp, Heterodera glycines
aaacaaaaattacagaacattattgaacaatttggtaaaattttatgcgaaatatgccgaggtaattagtaggaaatactaattgattaattagtaatttaatttttcctttccttcacttttcgaactcgtaaatgacgttgagctgctccgccgtcttcacgcagaacaatttgatgttgtacttgctgaactttatgatccgtgtcccatg

SEQ ID NO: 104331 - DNA, 108 bp, Heterodera glycines
ctctcacaatcaaacacacatagcaatagaaagaaagaaactctcaaaatttcaaattgtcaaacctcaatttctcaaaatgtgtgcggtcgggcctcccaattgatg

SEQ ID NO: 104332 - DNA, 117 bp, Heterodera glycines
tccttctcccggaattcgttcatggtttttacgacctctgacgaaacaaaaaaaattggtagaaattaaaaagctttttaattattaatgtttgatttcccatatatttaagtgatg

SEQ ID NO: 104333 - DNA, 1003 bp, Heterodera glycines
aaatttttggggggggttttttattaatagaacactttataaaaaaaaattttgggggttatttttttttttttttttttttaaaaaaaagaaaaaaaaaaaaaaaattttttgttttttttttttgggaaataaaaggaaaaaagggcttccccctccccaaaaagggtttaaaaaagtcccctttattttttccccgggaaaaaaggggggccccccgggggggtgggaaaaaaaaattaatttattttgccattaaaaaaaaaaattaaaaaaaaaccccaaaatttgggcagggctttgggaaaatcgggtggtttcagtcaaaaaatgttaaaatttgaaattattggtccaaaatggactaaattgggggggggggggggaggagacgatttaccaattttaatttaggcaaatttacggatgaagaaaaaggcgacctcatttttgaacttactctttttcttttaaaataaatttttttaaaattttgttattatataattcaaatcatattatgagaaacatatattataatataatcatatttatttgcatgaaaaaataaatcttttctaatagtgatcaactgggcttcattttctactctactgctcatcatatatttgccatgaataattgctgtcaaattaagtaaacatttattttaatgcttttaatataatttgtttttagaaatatttcatcattaaaatgaaataacacctaatattttctttacttttatttttgatcgtcttaataaaaattaattatgttgaagcaaaaaaggaaaagttgcaacaaaaatcatttgatgaaatatttggagaaaaatggaaagaaaaagaagaaaaacagcgaaatgagcagaaaaagagagaaattattgaaaaatattataaaataaaagaaaaaataaagcaaaaaggaagaaaatattcggcaaaagaatggggaaaaattgaaagaaaaatagcaaaaaaatttgggacaaatg

SEQ ID NO: 104334 - DNA, 201 bp, Heterodera glycines
tttttggcaaaaaatcgtcataattttctcgaaagtaatcaaaaaatcactatatttttctgttaacctaataaatttatgaaaataaattattttttattaaaattattttaatttgcttaaatttttaattttactttttactttattaatgaattaattaattaaattacaaattttatctagtgtgaacaaatcatg

SEQ ID NO: 104335 - DNA, 1003 bp, Heterodera glycines
aacattgaacaacatcgccacccgttgcagagttatacgaacgtcccctttttcaattgagaagattattcttgcccttgatttttatttttgtcagaccaatattcgaaaatttttgaatttcaagataaatctgaatagacaatcaaatgtttataatttttaattaaaaaaaaataattaaactatttttatgacaagaccagtaatttaccattggttcgttacctttgcgctggttggacccgccccctgctgctgttggcgttggatttctcccccccccctccctcccttctaattggtctttatccttctgtatttctgctgctgttctcgatttgttcttgtgtttgtttggctttctctgtctgtgcgtgcgtttagggatttgaattagtcaaatcggaggacaattaatgcctttcgttactctgtataattaactaattaatgcataaataccaaacctaaaaattattaataattagcaaagtccatttggctaattgccttttacctagagtgcagcgggaccgggacctggacacggacaactgagtaccaaggtcccggttttgaccgggaaattcccggcttttttcccagccaaaaagtcccggtttttcaacccaaaaagtcccggtcttgcccaaattcccggtcccgctgctctctacttttacccccaaagttaattatttgcttacacttacaaatgtttttgttctctttattttcagccagcaccttctctcaacgatttaataagttttctctatttgctgcacagaatgccttttgcgaatttcagtgtggacagtatcctttccaccggagaagggaacagcggcacttccaaagtcattcattttgccattccattccattagcaaatccccccccccccaattagtgccacaattcctttcgtccctccgtcgtttccgcttcgtcatgccatggctgtctcactgacgagggaagttcctgtttcgaaatg

SEQ ID NO: 104336 - DNA, 1003 bp, Heterodera glycines
ttttatttttttagctgcccgatttgctggccctccgtctgataatttatctgcagaaaattgatcatctcatcgattaacttttatcttgcgaatcttggaatcaattaaatagtgaattaattgttttgacattatacgaatttattaaaatgacaaaatgtgcatttttaatagtttttttctgttaataaatcgatgaagaatatgaaggataattgtaaattttcattgaatatggaccagggcttaaaatgaacccgaggaatttaactcgaagtcgtttaatacgaactgggaaatggaattaaaaaatgcttccataaaataaatcaagtattttttcatttttaaatgagcaaaagttttttcgaaatttgactacaactgcttgataatttttttttgtcaccaaatcacaccaaaaagcttgagatggtcaattttcgaagataatttcatttcaaaatcgaaaatgggaagggcttggtgaacaattggaaaaaattttccaagcaatattcaaaaaattttagccgatttgaggaaagaatagatttattttgttttagaattgaaaacacaacaatacttaaaagtaacattaacaaaaatagtgattatgatcgaatttgtgtatgcattgttaagggtttattgttattgcatgaattcttttcaaaataaattacaaattgaattcgaattttttaaaatccgttttaaataaaattcgattcatgcaataacaattagcaatggcaaagtaaatgctaaataattgtttaaaaatatgtgttgaattactaaaatgaatttttcatcatcgcatcagacgtagttgcgggaaaccaaggttttaatgaagaccaaatctaaaaatttaattcagtaagtactattaattgagaccagagtcaattggctaagtaacaataagagatactcggaaatcgttgcactaaatatgcactagaaactggactaaaaaagtcaaaaaatg

SEQ ID NO: 104337 - DNA, 1003 bp, Heterodera glycines
ccgtttgtttttgctcacttcgccaaatttggtgcacactctgtcgtccatgcaatagaagtaagtgccggagagattctcggccctatcggacagaagcagttccatcgactagaccataatggaggccaaatgccggcataaatctggtattgggtgccttagtttggccaaataccctcgtgaatggcattctgtcccccttttcggtgactccgttccccttacatattgtatcattccatttgattacccagcgatttcgctgatctctccgtgccgttccaccactttcttaagtgccatgacaatctcttctccccttcgccgcacacaaaagtcggacggaggaaaagcgcgtggaagggctgtcctcaacaaattggcaatctgtcattattaatcatttgttcttttcacatttcgcatcgtccggaagggttttcccgcatttgtctcgcccggccaattcggcctttgtccgctaatggccaagcaaaaatttggagggtaatccgcgatggatgtgctcagcgctttcgaacgttcgcccgggggaatgttggcgaaaacatcggaaagggaggaaaaaattgtgaaaacggaggaacgaattggaaaaaggggaaagagaaaatgccagtggacggacacaattgaattaggccattctaagtccaggctgccaaaaaaatttcggtggggtgaatcctaaggctttttagctcataacgggcctaaaaatctccaattgcagcgccgggcaaaaattgccattttgccaatttttgggttcaaaatttcaaagaatatggccaaattggagttcgtcattgccttaggcgccgccgagaaaattttttggaatataaaagaaaaattgaattgaaatttggaacttcaaaaaatctatttatttttggccagaagagaaaaaaaaacaattcttcgaaaataaactgtctttattttaataattgtagcactggcccacagtcgaatg

SEQ ID NO: 104338 - DNA, 933 bp, Heterodera glycines
aacccgcttcaatgatatttatcgacagtgatccgtcatgatgtttaaaagaccccgtattgttcccccacatacctatgcctaattgctctattgtctgtgatcacgtatatcatttgtaaaaccgttgtgtgatcattatttgtgtatatgtatgtatattgtatgtatgtgtttggctgatcagcggatgtcgataaaaggaactaaaaattaagtgcaaattttcaaaacatttatgccgaattcaattcaaaggcaataaatggacatttttacggaaaaatatgggaatgttaagctctataatttttcggatcggaatgcttctcaagttggtttacatgtctttttaattgttttggtcaattgtcgaaaatcgaaaaagaaaatggtacatacttgtgtgttatctgtgggcagattttcaaaaatttttatgttaaaaatgaaaaatcacagtaaaaacaactttttaaatttcagcataaaaatgtaaaatacacattttaaaaataaattcaacaataattttaacaataaaaaacgtaaaaattaacagaaattcacgggttcataaggtaatttggacaataaaacaaaaaatcacgggttcattcgctagttgcgagaaattccccggagaaacacaaataatgtgaaattgagcgccaaagtggccggttcccaatcttaatttttaaaaaagcacatttttaatctgcgataaacagttggaaatgccttccttatatagccccgttgattgggttatatgttaaagttaaacattttattggaaaagaagtttattttttggctatataaagggtcgctttccgcccattcgtccattccatcactctcatttcatatattcacgacactttcatctgctgcttcatctgctgtcatcaacaacgcaacgccatg

SEQ ID NO: 104339 - DNA, 380 bp, Heterodera glycines
caagtatgtaaaaattgaatataaaatatttggcaaaaaccgtgtcgtgtattgccgggaaaccgagtccgggtccggatcctaatttttcaacggctattgggtccaacaatgtattgaaaaacctaaaaaaatatttattttttaattatttttttcacgaataaaagcttgtcaaccaataataaaaacatttagcttttttcttaaattcaaaataaattttagaaaatttggtcgaatatttcatcaaaaaaaaaagaaaaaaatatttaaattaatttcattcatcagttactgatttatgaattataatcgtgctgagacaaagtgcgaataaaagggcaagcttcaagggatttttttttaaaagctcaatg

SEQ ID NO: 104340 - DNA, 77 bp, Heterodera glycines
atttatggggctgactgttatagtttttcgtatacggtgctcgagttgctttggctcgagaaaagactcccggaatg

SEQ ID NO: 104341 - DNA, 239 bp, Heterodera glycines
aattttctttttttcttttttagaattcatatgattactattttatatatatattattttattttttaaattgttaatttaaataaattgaaaatatattttataatacattttatttttaaacttttgatgacttttgctattaaataattgattttaaaattaaaaataaataaataaataatttttaatttttaatttttcaaaataaaaaaaacattgccatcgcggcacagatg

SEQ ID NO: 104342 - DNA, 1003 bp, Heterodera glycines
cacaacggactcgaaccaccaccctttgtccctttactatcttacaaaaaccactgagccacacatgcaaatcttttctggtacaggagctcatttctgggatggtgtgttaatttatgcgcttttctgtcgccgattggcaaaaactgggcagggggagggggtccgatcattccttgcactcttctaaaatcatagatattttgtcaaatctatgattaaaaagtcatcagatgttaaaataaatatcatattcgtgatcagcaaccttgaaaaccccaaattacgaattttggaatttttttgaagggggcagcataacccggaagtaccataaaaacagcctaaaattgaaaaaaaaatggaaatgaaaaggaaagagtgttggggtggaagggaggggcagacaaaatgagagagaaagggagcaaagatggcggcgcctggtacgattggctgcggggacggctgaggcaatgaatgagtgggaagcagcaaaacattcaccggcgggagagagaaaggccctccccccccccccccactgctcaccaaatttaccaattcttgaatatcgcttcatctacaatgcgttgaaaaataaggatactcctttttgtgtttaccgcttcaccatgaacggttgaaattttaacatttgcgttttaaattattcgagatttaaaaagtttcgccagcggcacctactggcatcgcaggctccctttaatccccaagttttttaattgtacccgaaaaacaaactccatatttttcgataaaacctctcaaatcgttaattttaattttaatttcgcggatttaataaatcaattacttaaaaatccctatggctaatataaaatccattacttttttttctgcagcttcgactaataagccaaggctgaatgtcctcctctctgctgattgcatattttgctgcttattgctaaccctctgctgaatgtctttaatccaccaattttccatcattgagatg

SEQ ID NO: 104343 - DNA, 106 bp, Heterodera glycines
tttatcatttcagaattttacgctgggcaatttgaaaaactgtaacatcacagaacagttggacaagtcaaagataaaggaattcaacattggcattcacgtcatg

SEQ ID NO: 104344 - DNA, 53 bp, Heterodera glycines
ggaaacgcattcgcaagtccgcagaacagcgtctttaacggacggaaagaatg

SEQ ID NO: 104345 - DNA, 412 bp, Heterodera glycines
aattaataaatccataacaagcacaaacattattatctcgattttaaaactcaataaattttatttgaaatttaaataatattagaaaatctttgtgttttccaatcctatcaaggaggggaccggtaaattgaactccttaaaattatacattagacaattgtacaattaataattacacactcattggaaaaatgaaatccgccatgaaaattaaaccttattgaataacaaaccatcatgaaaatgtctactaagatttttattattatgcgcattaattttcgaaaatgcaattgatcagaaataagctgtacaaaataagtctagaatgaagttatgatgaaatatcttggccaaagatgatacgacgagagcagaagaaaacatctgccaaatttatcaaataatg

SEQ ID NO: 104346 - DNA, 151 bp, Heterodera glycines
ttttttgggtcaatactttagaaatgatccattaaaatgacgagaatctaacattatactgtccctaataatgggcggggcttaaatacataatttacacactcgtagtgtcatcattatttaaatttagtacactcatatacatccgatg

SEQ ID NO: 104347 - DNA, 273 bp, Heterodera glycines
aattcctgctttttcgcttttgcgctgaaaatttttttaaaataatacgagtaaaaaatgtttgtccgatgagcaaaaaaattttggattccctccgaaattttttctggctacgattaatatggcttaagaaagtgagcatggtcaacggtagaacgcgtaaacttttaaaaagtaattttcctttattttgtagaaaatccatgaaaaaaattttttttttgaaaattaatttggtgatcaccccatcggcaaacacattcagacggaatg

SEQ ID NO: 104348 - DNA, 520 bp, Heterodera glycines
gggtacaccccaaaacgtcgccgccgaaacgtagccgcaaaaaaaataaaaaattttcaaaatttcaagaaacttaaaagtatttaagctttttgaaaatctaagtgttaataaaaactaaatttgctgaatttccgggaaaaaaaacttgaaaaaaatttttcgtattaagttagctaactaaatttttgacaatttttctagatttttttctaaaatttaaaaaaaaaaattgcggcgacgttttgtcctgctccaccgggaaatggcaggcggagcagtggcaagggacaaatgatgggagatggatggcctctgtcttttataaatgaaaaatatgtttaaattggtgtgccatagtagcaaaattacgtcaaaaaagcgcactaaattttgaatttatttcccagtgagagaattggtggtccggcaactttttttgccgtcgtattttttcccaaatttagtgccggacggggccgacggcaccaccacttttgtggtgcccttcctgcagatg

SEQ ID NO: 104349 - DNA, 265 bp, Heterodera glycines
tttcgatcgacactctttttaattaggggcaaatgcgattcggtggtgttgctgcgccgacaaaacattttgatgatgcaacttaggaaaatcagcagacaaaaccgggaaatgagggaggtcattgcgaaataccagcagattcccaacctcttgcaagcaataaagtcagtattttatttaccaacaaatttcataaacaaatttaaaattaaaataatttaaattcatacactaaatgtaaaatgatcaaatatttaaaatg

SEQ ID NO: 104350 - DNA, 232 bp, Heterodera glycines
cagcggaaaatccagtgtggtttgggttgggaagcgcaaaagttcggatcgtggaccccacccaatcaggtaattgcagaagttttgtttcaacaaaaaaaaaaaattaattttttcactaattgctagggttcgagcagggcgtggcctacggcggcgtagaaaacgcagaatttttggaagccgggaaaaatacaatttgttagtgaatttgaacgactaatttcgcatg

SEQ ID NO: 104351 - DNA, 1003 bp, Heterodera glycines
  unsure (1)..(1003): unsure at all n locations
cgtttagtctacagcagtgaaatttaaggtagaaaatattgtttaagtagaaaatagaatttcaatgtttgactcttttttctctctctcgngcgtgcgtaaataataatacgtgcaaatggacgagggggggggggaaagagcaatggaagtgaatgaagtgtaattaaagaatttaatgattttaaccttaataaatgaacagcctgctgctggactgatttggatgctatgcaaccaaaggagtgtcaattttctaaccaaaaaataatttttattaaacaaaaaataggaaattttagtattaagaagttatttcgtccagagtgccgcactcaaaagaaattgagcggagagaaattggaattggaaaagcggctaattccaaaacaaatttgtacctcattaaggcgacatgggactgaatttcccgtggtgaccagtccattcaaaaagaatgtattattgtacagcaggacagaaaaatgtatcttgagatctgcacggaggcggctaagtttaaaaaagtccttacaacaaaattaattttggcaaaactgcaaaaatgccccccggcgaatggatgtaatttttccccttcgtactgcgccatcaaatttacttttttaaatattttcgagattctcgacgcaaattgctcacataaataaagggtctccgccggagattaatgggagagagagaagatggcagggagggcccaaaaataattttcggccgtacaaataaatttgagagagaaagagatggaagatgaggagaagaagagtcattcactcgcatattaaacagtgaatttgtgatgagacagtttttgttaatgggccattatcattcattgactgaggcatcaccagttaattggataataatgccttttgacaccactttcgaatttgggagggacaaattaattaattaatttccttggacgagcaggaggatgaagacgaaggaacagttgtattcatccccaaaaatg

SEQ ID NO: 104352 - DNA, 1003 bp, Heterodera glycines
ttttaataaatcaggtttttaaaaataaatcttactggcgtattttcactgggcgaaaaacccctaagagggggccgaacaatttggctctgtatacatcaaagttttgatgccctgcctttttgttgttttggaaattcttcatgattttttttttgcatttttggcggttttcatacccgattcttattgttagcactaataagatggctaattccttccggtcaaatgatgggctgaagaataaaaggagaaaagtaattagttctaagcatgtttgaaaacccaaaatatttattatcaaagggttaaaacaaattctatgctttcagttatttcgcaatgaaaaattaagtgctgtgctataaaatgaaaagaagctaaaccaataaaaagaaaaaattgacagaataaagagatgaagtgaaaaggtaaatgataaaacaatgaatggtttgaaaataaatcaactaatgcgaccaccaagctggctgccagcattagctccaattaaatttaaattttaatgaaataatgtgcgaaatgtcatatagctgaataaataaaatgagaaattgacagaagaataggcataaaataaaagggtaaattatgagaccaccaagctagccagcttaagctccctatataagcaattgctcaggcagaaattatatgataaacctattcaatgttaacttaaactacattgcagtcctattagtttttaaataaaattttatttattatttattgaaaagtaatttttaattctcgtaccaattgttaaacatctcataaaataaatctaaatattaaaaattaaaggccgttcagtcaattaattggccgaattggagctaaactggcgtttcagttcatttgatcatcattaccattcaaaaagttgagtatttaagaagtcttaattgtcagtaccaatcaaaattttgactttagcccaaaactttttaaattttatttttagttggtttgtataatg

SEQ ID NO: 104353 - DNA, 1003 bp, Heterodera glycines
aaaatgcggatgatgggcagagatagataccggaaatgttttgaaaaaggtggcacatcaataatatgaatatattcatatgtaaaatatacatcgatttattaaaaattaaaaaaaaatatatattgaattattataaaataaattttataaaattatttcattgcttcaattcgttgtgacggtttaattcgtcagtgcaacaaaatccatcattggacagtccgtcagtggcaaattgtagatggacaatccgtcatttgacaatacacaggtcggcaatctgtcagtggacaatccgtcagtggacactccgttagtattagacaatccgttatttttgggatgtatttttttcgtgactggaaatggattagtttgaaaatctctgttaaaatccgtcagtattggcattcgtcagtggacaatccgtcagtattggaaaaagcgtcatcaaattgtggattagcatacctaatttatattttaacaatcatttaaaaagcataattaaaaaatgcgtaaaatttactttactattctaattttatatgtttagctctatttgcttgcaattttctattattcttatttctcaacattcaaagttttataatttttatttaaaaaatttaatagggtttattttttgaaaaattattctaaaatatttttattttttttctattgtaaattaaatgcaagtatttttttacaagtattttctattattttttatcatttttcgatcaattccaataaaaaaaatttaattccttataaattttttaaatgagactgctgtgaattattgtttgacatttttcataccagatagataattttcttttaaattttattgccatttttaattggtgaatggatgataacaatttgattattcatttacaataattaagataaaaattgggacttcaattattacttttaaattaaaaagcaaaaaaaaatatattaatttatttttttattaaagaaaatg

SEQ ID NO: 104354 - DNA, 1003 bp, Heterodera glycines
cgcacaccgaacggtctcggcaaaatttgagaaatttcctaaaaattaaaaaaaaataaaggctaaaaaaatatttattttatgatatttaaatatatgtaatttaattaaaaagcattaaattttggtgaacaaaaaaagtattcggatttcccttactatattttccggttgtgttttgcaaatataatttattaaccggaaagcacttttttaaatttagtaataacagggaacacattccatttagttgttttccggatagtttaaacggtttaagtaaaacccggaagctgtttaagtacaaaacctaaaaaaatacataaaaaatacaaaacatgtcgtctgttttaaaaataacgcggaaaactccggttaattctaaaataaataaaaaatgctgtaaggaaaattttaaaaaaatcattaattaattattcctgtttttccatcaacaccaatttttcaattttttgattttaatagctgagttgctaaagttaagtggcattgagcgtctgctgttgtaccgtcgattcgccgcctatttttttgaaaaaaaacaaaggggtttaggagtcataatctcgaatatgacatccaatctgagttaattggtttaaagtgtgttggaggctttgacgcattgacctcatgattaggaattttatcaagcataaagacatttgtaattaataaatattttttttttttctttaaattttgatccaaaaagttcaatttaaatgagttcatgttaatagtttgttgctgtagaaaagctataaaagtcacaaattaatgttctcagttttacccaacaatttgggcaatcaattggattaactttgcagcatttgcagcagttttcaaaatcatagtgaaatgttattttagccatttttatagagatttatattgaattccgatgcaaaatttctattgcttaataattagaaaaattttgagtaaaaactaaaaggagaatttcgattaaacaatg

SEQ ID NO: 104355 - DNA, 389 bp, Heterodera glycines
atttattttcacacatttctttttgttgataaatttagaataacttaaagggaaattttttatagtccataccattaatgtctacgagagaaattttctcttctcaaaacttattttatttcacgttgaaatttttcgaaataattttggtatcataccattaaactaattagaaggtctttcacgtgaaaaagaaggtcattttttctattaattgaacgaattttttgtgcacgtgaaaatgttattaaaatggtaccatcttgaaaatatatataaaagttatggtttacaaaagaaaaccatttcataatttggcttttaacgaataaaattcgattttcttatagtttttaactaattagcctattttaagtattcacaatatg

SEQ ID NO: 104356 - DNA, 249 bp, Heterodera glycines
ttttaaggattttgctcttcgctgcttggattacattgaccaaaatgccgaaactttgtttgaatctgaggaatttttggaaatggaacaaattttgttgtgcgaaattctcgaacgtgaccaattgaaaatcgacgacgaactcaccatttggaattcggcacttactaatgaattatcatgcaaatttaaaattgaaattcatttcgcaggcactccgttgggctgacgcgcaatgccttcaaaatg

SEQ ID NO: 104357 - DNA, 106 bp, Heterodera glycines
cgtaaataaatttaaaaattatttccaattttttaattaaatttttttcaaggttctaaattttcaattttttaagaagcttcgtccctgctctcgcaaaaagatg

SEQ ID NO: 104358 - DNA, 495 bp, Heterodera glycines
aaattggactgggattactattaatatttattattttaatactttaaatcaattaaaaaatcaaccccggcttaatcggaaaaattaagaggggaatatggtaaagttagaattattttttttttaaatttttcacggttacgcttagcatcaatcacattagttgcgtcagttgattgataatcctataaaataaaaaggctacggataaaaagtcttagtgttgctaaatatgggatcaatcaatcgatcgatcaattgactggggctgaccaaatactttttgatcggattttcttgcgatcgataaccgtttctttcacttatccactatacagtaaaagtttctttatcaaattgcttaaaagaagagaaaagcccgatcaaattggtccaattaatggctcattaaatggtggcaacaaattgtcaaatgcattacggtatggcggccgtccaataaatacggtccaacagcgagcggcggtgaaaatg

SEQ ID NO: 104359 - DNA, 450 bp, Heterodera glycines
gtctcataattcaggcttaacccctaggcccattataagcagtgagcgggtggggggagaagtttttttggaaaatttgtatttgttaaaagttagtgttaattttggtaacaatttgctcagaatttattgggattactcgtcactaccgtgatgacaaaattttttatttctttgaatgcgaaccaaaattttttttggacacttttaaaaacttatttttgttcccaactacactcgaaactacagaaatttgttggcattttttgtagtctcggtttcgactcttataggtcgagtctcgaaaagatgacaataattttgcacaaccttgatttaaacagttaaaatttttgtgagttttaatcacattgttactaattgaattgattaatcggcataaatttttttcttataatttagctttaaacaaatctttaaaataaaatg

SEQ ID NO: 104360 - DNA, 180 bp, Heterodera glycines
tattgagacgctgaaacaatatcaaagggcgaaagattaaacaacaacaccagccgatgggacctgagaattggagacagttgagggattgacatccggaaaagagacgggcctcagttggtcttgccaactccacgcgttggagaagtcaagcgcccacgggtaaatggtaaactcatg

SEQ ID NO: 104361 - DNA, 644 bp, Heterodera glycines
aaaatgtcaaattcattttttaaaagatttttttttaaaatacttttaaatttcaaaattcagtaactcaaccgatcaaggttccattgaaattgagccgatcatcagcccatccgaaaattactccgaggaaccggaaacccgccttctactttgttggcaagcaaaattgttttttctgttgataaatgtaattttaaataaaatttcgaaaatgggtgtttttgagcgcataacaaagcggaagtggcaagtaacacatattgatttttaaaatatttataatttttataatccatattgattcgtccttatagatattctcagtgtcaaacgacaaatctgttttttatttttggttttacataaataggaatatgtaattattgttattcataagtatgtttcagatcttttcttcttttaatgaaatacttctatattaaggaagtagtttcacaaaactatacaagtgtgcagaaatagattattgtttttagagagttaatgatgcaggggaattcgtcggtgccaacagtcgccgtcgtgaactttttacatattttggatgcaattttttttagggttttttttttatttggaagtcccgttttgattgatttataattaaacgaacagtgatg

SEQ ID NO: 104362 - DNA, 139 bp, Heterodera glycines
tttttgggttactttactctttccctttttttcatttttcaatcagcctccactaattacactaattaattttcaattagcctctgctaattgtcccgtggaggtccccgatgttgaagcagcagcgttcaaagtgatg

SEQ ID NO: 104363 - DNA, 1003 bp, Heterodera glycines
atgggatttatttgggatttctatcttaaaaagaaaacaagttattccagaatttctgaaaattttcgatttctcagaaaaaaattcataaccgccttctgaaaagaaatttttgaaacttaaaatactacaaaaatccgcaatttttttctttataatataaattttattttacatttttatcactttcttacgaattgttacaaaaataaaaccgattttgggattatggaccaaaggggtgagcataggatttttgagttgaaaaattttttcaccaaaaatcttcaaaaaatatgtctttaggggttatttggccccctgatcacgaatacgtaatcagattttactttcgacatggttaaggcctcagaatccctgtgtgattggggattctgaggcacccttatgaggagggggggggggcggcaggttcggacccggtacggtgtacattatttttttatgcactcttgggtcatgttcaccatggataactaatcgcttcccccccccccccccacatcgtttccccccactgcgagaaagttttttttaaatttactaacatagaaatttttcaagaaaaaatagctgaaaatttttcttagaattttcttataaaaaactttctaagaatttttcttgaaaaattacaagttagtaaatctttttaaaaaaattttcggggtgggggggggaacgagctgctcccacagcatggtcgatttgctttgccacgaaattaaaatttttaaaaattttccagcaaatatgaaaaaatttttgaatcccccctaatgaaaatttaaaaattttatgggtacattgttgaattttatagtcaattttcgtaacaaatagcattcacattttcaaaaaaaaaatttgagaataaggcgagccggcggtgccgggaaaacttgtaattttaatgcgcattattagcagataaaatttcccttctatttcagtatgctctcacgtggtcacccaggagatg

SEQ ID NO: 104364 - DNA, 55 bp, Heterodera glycines
ggcaatttttaaacattttatttaaattaattaattattatttttaggtcgtatg

SEQ ID NO: 104365 - DNA, 441 bp, Heterodera glycines
ggttattattctatggtttcacaaatttttcgattattttgagtattttaaaattggtttttgaaaaaaataaatgataattgcatttaaaaaatttcacttcacttttttatttttattattataataaatttttatcgaaagaatttatttttatttgaaattaaatgaagaaattaatgataatgtgaggtataattgagaattttcaaacacaactaatcaaacaaatttatgaatgtcatttatgctggattttaatagaagttttggaggaaaatcatttcgggggattccgaatgtcccatggattcctaagaaaaatggtttcctttttacaaaataagcccggtgccgagttatgacgtgccaaattttatagttttttatgtataaaaaaaaatttgcatgtattttatctatttcaaagcttttaaaatg

SEQ ID NO: 104366 - DNA, 111 bp, Heterodera glycines
acccatttgttccgttgcttttagcctgattttggtgctgcggtgacgcgcattgtttccgatttcggcgctggtcgtgtcaaaagtgaggcgcacgaggaagtgattatg

SEQ ID NO: 104367 - DNA, 301 bp, Heterodera glycines
ccttcaatgaaatggggacgcattgaattatttaatgcccagaggacaaattgcctgagggatcagtcgtccggcaggcgccggaggaggaggcggcacgggagcaagaggcgggggcggcaaagcagcaatgggtggcgcactttaaagacaaactaccaaaattttttttgccattttcagtaccatccgactgggccatgggcaggggcacacggaccgtaactgaaaagcaacggaaaatgaattcggagaggggcggggggagcttacgcagaaggaacaccgaatcctaaaaatg

SEQ ID NO: 104368 - DNA, 295 bp, Heterodera glycines
tttttcggcttttgctttgtttcgtcggcttctccgtccatttgcttttgctctacgccgtctttgacatttatttttcttctccaattgtgcgcggggcgcggccttttataatcgccaaaaattcggagagttttacgcccgccgatcgcatcgtttttttctcggcaggtcaaacaaatttgagacatttaccagtaaaatttacttaaaggtaattttaaaacaaatgaaactttgagaattggacacatttaaagcgaaaataaaaattaaaaaaaacaaattaaaaatg

SEQ ID NO: 104369 - DNA, 1003 bp, Heterodera glycines
gagttgccagcgatgtactcttattaatagaattaacgacttaaagtgtagagcgtgccaattcgaatgtccttcagtaaatgggcgatcaaaatttcttcacaaaattaaatgtttgtttatttttattgttagctaagagtaaagctttaaaaagttttttagtaccacatatttccctcaactcggcattggaaaagattgacaatgccattgattttgttgcaaattcaatcgtaccaaaaagtgaacaaaatgtacacttttaccatgctcccgttgttttgtgcgagcatcctcaacccaagtctgtgaattggacatgtccaagctgtgcacagaccaacacttcgacattgaagaagtgttcatggtgtgacacggacagagtcacgggtagttcaagcgaaattgaattcaaagcgtagataggtaactgtgattgaattaaagatgttacaacttggtactggtgctgtcagaattcgaattgtgctcttcgccagccctttcctccgttcgacttaaaatgtcctttatgccgaacaaaaacttcagcaatgaagccgggacattccaagagtatggtgagggatttatattcgtcaatcaaatgctttaaagtgttcccatataaataccacgatacaaaaacatctaatgccatgattgtatggattaaccaagcaagaaagaacaaaacttatggcataaaattaagtctggccaattattggtgttgtgaccgagcagtagtctattgctcggtcaccacaaaaaaggaacttcaagtttttagctctgaattgagcactaagtcacaaacgaatatcagaatatgcctcacccgactgatggggatattcgctcgacttttcagtgcttttcacctacttcctcccctttatctatactttttggtgcttatcagcactacaatgctgccgtagtggcgtaatgtggaccgtggcggccttatggaattaggttcatcaaaccaatg

SEQ ID NO: 104370 - DNA, 236 bp, Heterodera glycines
ttttggcgctaaatcaaaatttgaattttcgcgtcgatactctgtgggtggagggacgcttgctgggtggcaatgccgtagggtgaaaggctaatttaatgctattttaaatatatttatctattttaaatatgtgtttttatttaatttagaattatttatataatttaaattgtttatttttaggaatgtaatatatattatttaaatgttttatttttagatatcccaaaatg

SEQ ID NO: 104371 - DNA, 79 bp, Heterodera glycines
ggtggtcaatttaaacactaatggaccccatcagggaactccgtacgattggccgatgaggcggggggggggagggatg

SEQ ID NO: 104372 - DNA, 397 bp, Heterodera glycines
ttttacaagggaaaatcccaaaaaaaattttaagttttgcaaagtgttggcgttctgattactaaataaataataaacctatttgcactgagagcccaaaattgggccgctgtgtcaacccatagaaaaaattttcgaccataactatatcagttgcgccattttttctgggggtttgacgaatgttcagccaaatttttttggattttgttcgaatttgggcccgatgttcaaatagggtcgaaaaccgttgcttgccggatcttgataaatgatcccgaaagcttattaatttggcttttttattttgaaatgtgaaaaaaaaaatatgggacttaaactgtaaaagaagaaactaaattaatttattaattcatatttttaagaaaacaaaatg

SEQ ID NO: 104373 - DNA, 465 bp, Heterodera glycines
ttttcgctttttatttgcatttgtgaaggaatgtccaaattaaattatgcttaattgacagatctggctttaaactaattcataattatcaaaaagaccaaattaaattatgcttaattgacagatctggctttaaactaattcataattatcaaaaagaccaaatataattatccttaattgtgagtttggctttaaattttattaaatgttatacagaaaaccaagggttagcccgaatggtaataatttcattctattttatattagcaattcttcagtgtttgaattttcctttgcacaatgatttaaatttggctttctataagaagtataaaaaagattttttaaaattttttgaaaaattaaattttcaaaaatttatttaatcctattctagcacaatatttaaaatcattatttggctaattgtccgacaataatattccaattttcgtcaaaatg

SEQ ID NO: 104374 - DNA, 362 bp, Heterodera glycines
ttttgtcgtctcgaaatgattttattttatttttcttcaattaaatgacaattcattttttgaggcatttaaatgattttttctgattaaaaaactgaataaatcattattttacttagtaaaataaggaaatcctgtttaatttcaaagaaataataataataattttatcttaatgacaaaaaaattgccaattggtaaattaatgattaaataaaattttattactttctactggcgctcattcgaaaataataaacatatttcaataaaaaaaaaataaattcacaatgtaaagagattttagaaaaattaaagagattttatgaaatttcattatatcagaaaattggtgtaaaatg

SEQ ID NO: 104375 - DNA, 382 bp, Heterodera glycines
aaaatttattaatttttttagcgcaaaatcaacaccctttgcgaaattttcgcttttttgcttatttttaacataaatttattaatttttaagaaaatttaaatttattcaatattctcgagaaattttggcgaaaaaatgattttttgaaaaatttttcgggttttgggctcaaaaaggctaatttagctgctgggggccgttctaatagaggtttttttgaaaaatgccaaaatatggacataaaatatggacataaatcgcgaaatatggaaaaatatggaaaatatggatatagaaatccttcctagaagcttcaaaccaagctaaaaacatgtttttcgtgcgtttcaggcctcccacattccaggaaaaaaatatg

SEQ ID NO: 104376 - DNA, 151 bp, Heterodera glycines
tcggatgtatatgagtgtactaaatttaaataatgatgacactacgagtgtgtaaattatgtatttaagccccgcccattattagggacagtataatgttagattctcgtcattttaatggatcatttctaaagtattgacccaaaaaatg

SEQ ID NO: 104377 - DNA, 270 bp, Heterodera glycines
aaagaaagggagcgaggggaggggaagagttaaggcaaaatgaagagaaaagggaggggaaagggcacattttatgagctaaactctttccgtgtgccatcaaatgcttattaattgcccatttctgtctttttaagcccaatttccaattgtcccacgccggcgattgaattgcaaaatgaccaatcgaaaaatttgaacggcggagcgtacatcaaaaaacagaggaacggaagaagaaaacaatcgcatggagtggagggacggatg

SEQ ID NO: 104378 - DNA, 1003 bp, Heterodera glycines
ccgcgcagcgccgcgggaaggtcatcaatcatccacctgtcaccaaaagtgacaggtggaggaaattcaatttttcttttgtaaatttaaatctttttgatcccaaaccttttgggcggttttaatttctcaaatcctgagtttttttttatgacggtttctctaatcctgaaattaaaaattcattttttgaaaatgtgccaaaacagtgcgggttttttttgcatttcctccccgctcgccccgcgccgcgatgccgccgccgcgaaaaaaaaaatcgataacggaatttggaagaagtgtgaattaattgatattagcagcaaacaatgacatgaataattattgaattgcacaataaaattgattatttaaaaataaaaatcgaaaatgaataaataaattaaaaaactttttcaaaagtaggtcacctttcaaccaaaattgattgatgggtttttatttctcttccattatttcgaaatctgcacgtgactttttgttcaaattatttcgcaatatctcccctaaattaggtcaactgtcaataaaatgtgattgattggcttcttatttaaatgtctccattatttttggttccaactatttcgcaatatggcccgtaattttgcaaacctgtcaaaaaaaaaatgattgatgactttcgaaataaggaatatccaaacgatttttgcacggtttttgaataaaatgtgacagctgtctaccgaaatgattgattaccctcaaaattaaggcaaccccagacagtcacgtgactagacccctcccctctcgcccaatccgtacacccggcccaaatcgaaaatcattcaactaaatagttggatttcattaaactctcttcgcgctctaattttaattcactccgctctatttttatttgcattaattaaatctattactatttacttacgtcttttttcttttaaaatctctctaccctctttaattcttctgctgcaatttcttgtttaaaatg

SEQ ID NO: 104379 - DNA, 92 bp, Heterodera glycines
tttggccattgcgaaccgaattgtttaaaggtggacaaattattttttgataaatttcgaaaaagctagttggctagcaaaagattaaaatg

SEQ ID NO: 104380 - DNA, 82 bp, Heterodera glycines
ttttacagaaaaacacctaaaaaatataaataagccaaaaaagtaaaatattattcttttaatagcctcttaatttttcatg

SEQ ID NO: 104381 - DNA, 237 bp, Heterodera glycines
attttattcgttttcctcctttttaataatttgtcatttcccaatgatttcctttgtttttcagatttatttaatttacagcgcaaattgtgcagcattaattagtaattgaattttctcacaatggccctgccaatggtcggcggcgtttatttgggccatttgtggcgcggcacaaccggcaaattgcgcgccttggcccgtccgctgctcaaagatggcatcggcgaccgaatg

SEQ ID NO: 104382 - DNA, 1003 bp, Heterodera glycines
gagtcggctactgcaaagacttatttgcttaaaaaattgcaaaaaccattagttatgagtgtaaaattatttaaaaaatagtatttctaatatgaatcataaaaaacagaattattcattacacctttatctgcacgacaggggccgtaaattaattttcttttgttcaaaatttaattttaataaaaaaaattatttattgttagcaaaatgaattaataaatcaacaaaaaatgttaatcttcataatatttcattttttttttgaaaattctctcatgtttttcttttttatttttgttaaccctctcaaactaatttaaaattaatttacaaattttttttcggcagtagttaatatattttttttataaattcttctagcaaattttagccatgcataattttttaaaaaacataaaagtttgaaaacataagtaagttttaaccacctatttattcagttgtttttgcactgattgaaggtatttgcatttatccattcgcggactctgtacgccacagactaattaaaaccttaatagtcaaaaagcagatacaaatcttaaaaaaataaatttgaaaatttaaaaacattttaatatcaatatcgtcaaggtatttaatttttttaagctcaatttttaattataaattttttaaaaataaatgcatttaaaatttttccgcaaaataaactgataattgtgattaacatcgatccgttaaaaaatgctgctcatgtggataaattctaagtaaattattttaagttatattgtcggttgcttctgattgtgagcaatttttaactcattcattcatacaattttttattaggttttggcaataaaattcgtgtacacgattaacctaattaattatagttttttaaatcggcaacgtgatccgcaattacgcattaaagtttcgcaaaatttgactattaattaaaaagaaagtttttcatttttattaagtgctaattgaatgtaataaaatg

SEQ ID NO: 104383 - DNA, 253 bp, Heterodera glycines
tagcggatgaggcaaaacaatcaatcgaaatagccaaaaattatcggcaagaaattgggcaaacctatcggaccgcttactcacagcccgatttaggcattggagacttggccaataaattaaaagaaacaatgcgagaaaagcaactacatttggaaaggccaagaccccaaacagaatttagggacgaatttattgcatataaaatataataatataaaagaaaacaaaaataatgaaaaataaaaaaatg

SEQ ID NO: 104384 - DNA, 63 bp, Heterodera glycines
caaataatcgagatggattgaattcaactgattgagatcagtgagaattgttggcgaagcatg

SEQ ID NO: 104385 - DNA, 69 bp, Heterodera glycines
tttaaaatctgtgaaaataaaaaaaaaaactataaataaaaagaaaattacataaaaaaaagtaaaatg

SEQ ID NO: 104386 - DNA, 56 bp, Heterodera glycines
ttttcattccaacttttgaagggaaggactaaggcacttctcttgctcaattcatg

SEQ ID NO: 104387 - DNA, 144 bp, Heterodera glycines
tcagacaatgtcactcaattccatgccgcagaattcttctctagttgcagcgagtttggcatcaaacataccttcacccttgcgtatcacccgcaatccaatggccaagcggagagattcgttgatacgttcaaaagggccatg

SEQ ID NO: 104388 - DNA, 141 bp, Heterodera glycines
ttcgttgagcctgtcaaaaaaaggaaatcgtttggacggaaaaataaacaaattctgccgattgtacgcactcggttgaactgcttggagatcgtgccgacccgcttgaagtccttgaacgggagttgtgaggcgacaatg

SEQ ID NO: 104389 - DNA, 53 bp, Heterodera glycines
ttagaacatttaaaattacataaatactaataggttaaactagattaaaaatg

SEQ ID NO: 104390 - DNA, 391 bp, Heterodera glycines
tcggtgtgttggtgaagaatttgcttgtttgtcgaggccgtttctgaacacaaatggaggggatgtaaaaagaagacaaaaaaacacacgaaaaaaaagagaaaaaactcacaaaaatgttgcagcgggtgcacttcgaaatgggcaaatggtagtagcgaaggtgaaaaggatgaaaacgcatccccttatatatcaaatgaaatttggcaaaatgttgggtttaagaattgtcgtggctgagattgtataaaaggaacggacattcgcattttcgctcacttcccaataataaaataatctcaacgacgataattgcgcaacaccttcaacccacacatcttccacacacgtcaacttcgaccgcgcttgttctccaatcaaccaaatg

SEQ ID NO: 104391 - DNA, 87 bp, Heterodera glycines
tttggaagagatttcccatggaaaatttcgcgtcgcttcgctttcaattcattttggaggacaaccacggaaaaagtggtaaaaatg

SEQ ID NO: 104392 - DNA, 52 bp, Heterodera glycines
aagaaaatttggccatgattttgagacaataaatttaattgaataaaaaatg

SEQ ID NO: 104393 - DNA, 1003 bp, Heterodera glycines
ttggatattcgcccctaaaaatccctattttgagtgttcgcccctaaaataagtttttatccctattttggcgtttcgcccctattttcgcccctatttcgcgaattttttgcccctatttaggtccctaaattggaatttttcgcccctaaaaatccgcaccctaataataactttaaatttatgaatgattgcaaaaattcaatttattttatttaagaaaataattagcaaaaacttcgcccaattagtgacactttttgcagcccttcgaattgtcctcagacaaatcgcaaaagccatctttgcaacggtcacagctgaacaaattaacggataaatggagtcattgtttaaatttattattattattattttaattttctgtccaatttctcccactttttcccctgcacattttccttgcaaaggcattgtccggccaccaattggcgtgccgtgtcatcctccgccacgcatgtgccgtcgttttgggtgccccttttgtcgcattggcatggacgacaaacatttgggtcttgaagagaacctctcatggaattttaaatctttaaagagtttttaagtgtacaaatccttcaaattggcattattttgaaaggacatttgaaacaaatgtatgtacgttaattcacttggcactgttcacaattcaacccttttgtgttgtgtttgcattcgtaaatgtcatggacaacctcataagaacggctttaaatcaacaaaataataataattaatcaaattgaaaattgtggcacattgccgcgcctggcatggtggccgtactcatattttgtgtatcatcgtgctgaattaagatttaatttgaaaaatattcaaaataggaaactctcgcacattttggcgcactgcaactgcacacaatgcaaaaaaaacgtccaaaattgtgtataaaagtcgctgttgtgatgcatttttctcatattttactaacggggcgtaacacaacgagaagatg

SEQ ID NO: 104394 - DNA, 429 bp, Heterodera glycines
ttataagaaataaacttctaaatgcggaaaattctgaaacatacgaaattgtcaaaaaattttttatgttcaaaattcttattgaaaataacttttattttgaaattttctcaatgagaagaaaattattttctttaattaattttgaggtacatatctaattaatattttcgttaattaaaaaaaatttcgcttttagtttcaaaaatttaatgaacaatttttgagaaatcttttgtccatattttgggattttttcatttgttttataatccatttttaaaatatttttcaatataaatccgagccttaaataaattataaaaaataatagaatagtgtttttaataatattttaagcatttttcatatgaaaaagggccgactgatcagccgccgccgccttgggcaaatttggcacgggaaatg

SEQ ID NO: 104395 - DNA, 271 bp, Heterodera glycines
ggtgcttcatttactacaaatttagaaattttcaagaaaaaatcttagaaaaattttttgtatgaaaataccaagaggtaaaaaatttttttatgatttttttgcaaaaattttcgaaaaaactttttaatgcatcataaattttttaaacaaaaatcgctgaaaaatttttgaaattccttttcttgaaactttcttataaagttctaagtttttttgtgaaaaattttagaaattttttaaaaattttagtgccaaaaaatcggcgatg

SEQ ID NO: 104396 - DNA, 72 bp, Heterodera glycines
ccggaattacggcaaaaaaatcattttgcaaatgatttttaattgttttagacaaagcctcatcctcgaatg

SEQ ID NO: 104397 - DNA, 1003 bp, Heterodera glycines
  unsure (1)..(1003): unsure at all n locations
accttttaggcaaagatctttttgtgattttctgaaaaagttttttcactaataacagtgatctgatctgggtgaaaatattgaatgtgatttacagtatgtcaaaaaatacattttttataaaatgngaattaaaattcttatccaaaatgctgacttgaattaataaataattacaattttcactaaaagtttattatttacaattattaaaataaaatctttgcaattgtcggtagcaaaacaaataaatattttgaaaaacttaataagacacaaaaatatcaacattaaaattccttaaatttttaaaaatttacaaattaataaaaaaaaaacttttttttctttatgatactagggctcggatttttaggcaaaagcctattttttttcctgagctccccgtggcctgaaacgcacgaaaaacatgtttttttgggctgttgttaagctacttttcgagttattagtgcctttttttaggcttttatttttaaagcctaaaaagcctaaaaaattttgaaaaaacctattttggcgttttgcccaaaattattaacaaaaatgcaataaaaacgaaaaatacacaagaattgattttttgggaattttaaaaatacatccctaagaatcgaccaaaatttttttcaaaaatacactgctaagatttttcaaaaattcatctccaaaatttatttatttattttcttgacaagaatttgtgatttagaaattatttatctcaatactgatttggctgaatttttttacttttttgaatacattttgtcattttacaccccctaaaaatgaggttttttagtgcctttttcccatttttagtgcctattttgggggtttttttagagcctaaagcctacctattttggcagtttttagagcctaaaaatccgagccctacttatgcccatatttgaaaaaaaatttccaattaaatatttcagaaagtgatttattcgccaaattgaacttacaaatg

SEQ ID NO: 104398 - DNA, 136 bp, Heterodera glycines
ggtacggacagcgcgggacagaatctagagagcatccgggactctcgctactcgaattgcggaggctcgagaagtgatcgaccaagaccttaccgaaggggaggcagcgtaccaagcggcgcgacttttggccatg

SEQ ID NO: 104399 - DNA, 68 bp, Heterodera glycines
tgtatgttgttacttgaacagatttaagcattatttaattttctttttcaactgtcacagtttaaatg

SEQ ID NO: 104400 - DNA, 440 bp, Heterodera glycines
taattttgcaaaataataaataattgatgaaaaagtcagaatttggaaaattttaaaaacaacaagcgttggcattttttcaggttaagttagtcctttacaatggagaaggcctgcaaaatttggagagattatatcgattttagtgcgctaggttcgatgaaactttataaaatataagcctaaactttttggcctgtttaaaaaggaattaaaaatttttaaaatatttattcatctccctttttgatagtgaaagcatcagagagccttatttaacttttaattaacatttggtgcgtttcagagcacgttctaaaaaatatttatgaattaattttgcaaaataataaataattaatgaaaaagtcagaatttcgaaaaattttaaaaacaacaagcgttggcattttttcaggttaagttagtcctttacaatg

SEQ ID NO: 104401 - DNA, 212 bp, Heterodera glycines
ttcactcgcgcattcccacaaacagccgacggtttaaacgccaatcattttatgttcattcatcatcatatttgacccgcggactggccaattcataagcattcacaccaaaagccattcccgacgccgcccaattcattcgactctcattcggactcgatcattgcattgttttcatttcactcataatcatggcaaatcccgcggacatg

SEQ ID NO: 104402 - DNA, 475 bp, Heterodera glycines
gttggcattttcgagtctgacaataagctaagccccccccctttcttcccatggaccgagatcaaatgcatttccggtcaaaaacaaaatgttcaccatttgcactgcggacaaaagcaaaatcaaattcaaggcacaggacatgtcaatcaatcaggcactgattcataaattattttaaatttttaagctattataaatgggggaggctgtggcatgacgcccggctgtgctttgattcgattttcacgaaaatggaactgaattttgcaattcccaaataacccgggacattaattatgcctttgttcaatttcaaatttaaataattttttattaatttggaacaatttccggggaccggtaaattggactctcgaaaaatccccgcgctggatccctcccgttccgggaaatctgttgttttaattttttttttttctgatattttccaattaaatattcaccggttatg

SEQ ID NO: 104403 - DNA, 968 bp, Heterodera glycines
  unsure (1)..(968): unsure at all n locations
ataagaaaaactcgaaaaattctaagatttccagagatccccgcttaatataaaactccagagaagtaagctttttttcaacgccaatgaatgttcgtattattgtgcgaattgatatgctatacaaatcatatattgttaaaagtatacaaatagctttcgagggcaaaatcaaaaaacgaaatcattagaattattttcttaatttcctttacaataattttttcgtttaaaaaatacaaaatataatttataaaaaattataattttaattatttcaaaataaggaatttccccattatgtataatgttaagaaataatgaaatatctattttattttatttgggagtatgacaaaacgtcgcccctcgaaacattgccgaacgaatttttggatataattctttagcaaaaagttcgaaatctatgtttttgggttccttttggccataatttttttttctcaaccaaaataaacattcttagtattgtacaaaaacacttaaagatatttttgtgatttggcaaaataataaaaaaacgcctagaggtaccgagcaacatcaagaatacttaatttgactaacacggacataattatggtccaaaaagtattctggcgacgtttcggccggagacattttgggatgcacccatttaatttatgcaattttcaaattatttttatgtccattatggtccaaaaaaagttttggggtgcacccatttaattcaccanatttttaaattaatttctgtgncccaatctncaaaagaaatttacccgagttccattaaggagaaaatacganaggcttaataacgttntaattgcatttaaagggggtttgttgtcaaaagatttaaaaaatgaaatgtgtacaaaaaattgcgaagtttggatttttggccatttctaaaaatttccttaaaacccccttaataatacagatagataacataaatg

SEQ ID NO: 104404 - DNA, 338 bp, Heterodera glycines
cagtccccccgaaccgatgcgcccagatttatggggagaccgaatctttcgggattagcttccctatagtctgtactttaattctgcgttggattttgctccccataattgcgtgagtaccccaaacggacacttgaataaatcgatttttttatttcataaatattttttcagaaagtgctctaaagcgcaccaaattttatttacaagtcaattttagcactctgatgctttagtatcaaaaaggaagatggagaaaaaattttttaaaaatttttccttatattttggttatatcgttttgcttttggtggggtgcttggaacagtggaatcatg

SEQ ID NO: 104405 - DNA, 786 bp, Heterodera glycines
aatgtgatgggaggattgcgccatgactgaccactaacccctcggggttatatccctccgttaaatgaattcgtgaccaaattagaccattttattcattgttttgtttattaccaatcccatgcttatataagctattcgtcttatctataccaatgttattccactcattaaataaataataaattaattttgtaaaaaggttcatacgagattaatgtttcctttctcattaaacctgattatgtatggtatctatatttaaaaatattcaataatttatcgagccgtggccgtccacgtacattttgctgccggtaatgccgtgcattgtactttttggattatgcaaaagtttttactgagaatccttgtcgggaatggccaatttggcaaaagacaatggccaaagagggagcaaaggccaacagaaaaattcgatttgaaggatatgcataactattttagaaaaatcatttaggtaatttataaatggacaaaaataaaaagaaataggatttttattccttttaaattcatttttcttgagggtccattctgatttcgaaattgcattgtcataggtcattcattatcactcgttttgatcaattcacctaattagtgaattaatttgctgctgaaattcccccggcgccatctctcaaacgattcacaatttttctttataaatctcctctcaaatgcttttcattttctttgtttctattttcgctattctcgcattccaaattcattttttggcatttgcaattcccgaaaatg

SEQ ID NO: 104406 - DNA, 364 bp, Heterodera glycines
agaattaattggtgttaattgggaataatttaatatttgtgattgattttcttattatctaaattgtgatatttcctattcaatgtgattttcgtgcttagtattagtcactcttttttgttgttgatcgttctgtctaaattgctccacctccgcttttcctctctatttaaacacgcacgtttttcgcttcaacgcattcttttcatctgacatcttattatatttaccaaataaaacttcttttatttattcggtatttatcccccccttattcaccccgccctctctccctcgcgccttcccatttttgcccccctttgccgcccgagtcaacaagtggtgccgttagcaatcaaagatg

SEQ ID NO: 104407 - DNA, 151 bp, Heterodera glycines
gctgaaaaaggtaacacttggatctgcagaggaacaacatgattataagaggtacaaccacgagtggaaggttcgaaagatacaaccttggctagaaaaagtaacactttggtctgcaaatgcacaaccataaggaggaattacaaccatg

SEQ ID NO: 104408 - DNA, 85 bp, Heterodera glycines
cagtgacccgcggttgtcagcggttgtccgcgcggacaaaacgggcgcagtgtcaattgccatcgctttgggtgccgaggcaatg

SEQ ID NO: 104409 - DNA, 659 bp, Heterodera glycines
aaaaatgttttttttttgccgtttttgcccaattcctttgttggaaggacacaatctgtgataattattgttaaataagctgttaattttacttctttttttgtcttattttcatttgatagtttaatgatattccgtcggtccatcggcgggcgaatgcattgtcagcatcaagcacaaaaaattcaatctaattaggtatgcaacatatcggctgattgtcagcactgagagtgggcatgaaagcatagtatgctaatatgatgattgtgagataaatatgggtataagcgtcagcgaaagaatgttaattgattcgttttttcagatagtttggtatgtaagtctataatatttaaagacattgtgtaactctatatatagatgaatcgtctgtcggcgaaaccgtttgtcggcgaatcgtccgtcggcgaaccttcctgctcccgtttttctctataaattttaagcgtaaaaactaatgcattttgtttgcacatatgacaatgagttctgttactaattacttttgtcagatgtccttccttcttgtttacttggtctcagatttgttatcgttaattattcggtacatatttttattttttagactaaccatcctttcattgactctgtctttttcatcttaatacgaaatg

SEQ ID NO: 104410 - DNA, 879 bp, Heterodera glycines
aaacccaactcgtactgtttttcgacaaaaaaattgtcataacttttaacattcttggtatcattcaataacccttaaaattctctatctacaagcaaaatgtaagaaagcgggaccgggaaatttgggcaagaccgggaccgggacttttttggttgaaaaaccgggactttttggctgggaaaaccgggaaaaaagccgggaattccccggtcccggtcaaaactggtcaaaaccgggaccttgtactcagttgtactgttatccgtaggacccaagcttaactagtaccaaaataaggtacaaccccaaaaccagaacatttattagaaataaccagggcttccatttttatgtaagaaaaatcgcgaaatatgtaaataaaatatgtataaaaaatgctaaaatatatgacctaaatagacttagaatcatcttttagtatttaaaaaaaaaaaaattaatttttgatatcccatttcaaaaaaaaaaaattatttttttggagcacattttcacaaaaaattctataaattctcaaaatttttgaaaaaattgcgaaattttggatatttttgggggcatttaataaaaaattccttaaaaattctcaaaaaatgcaaaatatgtacgaaaaaatgcgaaaaagtccagaatatgtataaaaatatgtacatatttaatatgtagaaaaatcccaaaatatgtaaataaaagtcccaacttttgttcgcaaacacaaaaaagaaagtgtttttcccactatttagagcatggaggccaggaaaaaaatatgtatttacataaaaatagaatccctgtttataatcaaaatgctaaaatttattgtttttttattgatgtaaatgactagggatg

SEQ ID NO: 104411 - DNA, 96 bp, Heterodera glycines
aggcaaatccccttaattacaataaattaataattcccaagtttcgtttccaattcccccccccccccccctcagaattatttggccaccgcaatg

SEQ ID NO: 104412 - DNA, 84 bp, Heterodera glycines
cttccaccagaggacgtcgcaacaatcatcacgcagaaggtagtcttcaacgccccgttcgacaacaaggccacctactacatg

SEQ ID NO: 104413 - DNA, 1003 bp, Heterodera glycines
aataaaaattatttttagattaaaataaagaattcgaatatgcaaaatttaatttaaaaagagatcccaaaattttacacttgaaaatttattaaagaattaatcaaaatgtattttatgttgaaaattaaataaattaatatttaatttaattaaataaacaaattaattattttaaaataaatttgactaaatataatttagttttaatgctttgaataatcatttttctgatttagcgcatattatcatggcgatctgttctgtatacccttgaacgaatatttctcattaattgaattttttttatttaaattatattcttttgtgcattaaataatttaatagtaatactattaattgcatatatcgatttttaatatttatttatatatatttttaatcattttttatcattttatttattagaaaatattgttagtaattaatgtttttttaaattatttttttatttctttacgaaattttaatcttcgttactttatatattcttttgggccgttgacgtaattaaatcttttagagtcattttatatatttttttcttttaatttgcttttattgtgtaataatttgatgtgtaataagtttgttttttcactttttaattctaattataatccgttttcgatatcaaattaaaacatttattttataactcctttataattataaaaactaattctttcatttttaaatgctttttacattgcctcattagttttattctttcattgaaactatttttttgtgaaaatctgttaacaaattgcactcaacttttcaaaattttgcccggcgacgccttcggaaccgctgaaaacttgtccccaaaaagtttttttgggaaaagcgcgccgcaaaaaaactttttattgtatttttttgatagtaataaaattttcaaaatgcttattttttgttagaaaaataatgattttgaaaattttcatctgacaggccctgatctaaactatgaatg

SEQ ID NO: 104414 - DNA, 137 bp, Heterodera glycines
aaaaagcgaggacagatttttcgtcagtttcaaagtcgttctttcttctcttttttcattgaaaaaatttctttcgaaaatttatttttttaaaattttatttaaaatatttaaatttcagatttattttaatgatg

SEQ ID NO: 104415 - DNA, 376 bp, Heterodera glycines
taataaatatttttaaagtaataaattgataggtcatctcatttctctgtttgtgtacacataaagctaacaaatgagcacctccaatataaataaagtgattgattcagagatgttaattaacaacaaattgttagcctaaggcaatcgccgaaatcatcgagaaatacgaggaaaagcattcattcccacccgctcccttaagtagctttgatcatttactaattaattacatttgtgcataaaaagaccgaacgcagcagcgctttcacattccttttttggctttgatcgcgaattattatcggatattatgtggctaaggacgttgtgctaattaatacccattaattaattgtttaatctattgaaaatg

SEQ ID NO: 104416 - DNA, 251 bp, Heterodera glycines
tctcaccctaattatattgtattgtccactaatggattttcatccattgacgtatttatttataggagtctttacataaagtgcagacggataaatgtacaaaatttttaacagctttttctcatggaggagagaatttttcagtccctttcttggggctcattcgtccgctctcaaaaatccttttttgtgagtaacttaaagaaagtgtaagtttgagcgaacgtcacacgaaaatttgggggaaaatg

SEQ ID NO: 104417 - DNA, 1003 bp, Heterodera glycines
aaaaatttttccatcggcgcctatcggaccggccggaccccccccccccccccccggttctgcaaaggttttttggaaaaagcgcgccacaaaaaagcggatatgaaaatcaaaaattttttcgcccgaagagcaaaaaaaagctcttcgcgaagttgtttctggctaggggcctgaagaggacttcgggaagtttcgactacgaccccccccctggacttcaatcgtatgaagtggggtgacaccccactactatttcatgcatgtttataaggatggaacaaacttgcatttgtgatgattcctcactacattttgatgtagctagttgaggagtgagaggtattatggtttatattagtatattccgttttccacttattcattatgtccatagtttcttagttattgtttataaatttttgcaaggtttttgaaattattaattcctagagaatacttaaagccataaaattttcaatgaaagaatttagttgtctttagcaattttatgattttatttttccattttaacaccatttggaggatttataaaagccctgcttgctgattatgaaccgacctatcagccaacagtttgtggttttttatgggttttgaaattttcaaaaactttatcataattttcgaaatttcctaaaaatactcattgacgcatcatcggagccagtttttatatcaagtttttgtttttttaattcgctaatgtggaaccctttcgccaaagtcatcatcattcatcaattaatcatgcaatgaaagtcgtccttcagcagcaatttaccaaaaaaccattaattaccccattttatttattaagttagagaaatcttttctctttttctccaaaaataatttttgaaattacaaatttttgtaataaacaaatttattaattaatgataattagtgaaaaatatgtttaattctatctccttttgaaggaataattagaaaaataaataatttagagaaaaaaatg

SEQ ID NO: 104418 - DNA, 64 bp, Heterodera glycines
ccaaccaaatcgaagacagcaagcacccattcaaaatccgtgttttttcgaaaatgttgaaatg

SEQ ID NO: 104419 - DNA, 82 bp, Heterodera glycines
atgtgccaagttcaaattggtgaaaaacaaatcgcgttttattatcaaagacatccctgctgaccctgaggcactcctaatg

SEQ ID NO: 104420 - DNA, 477 bp, Heterodera glycines
  unsure (1)..(477): unsure at all n locations
gtcatggatttcgaagttctctgctggactttcnaatttatagaaatgatttatcaaaaaaagacaatnttacnnccaaacacttcgaaaatgtatntgatttgcgttgtatgggctaaaaatgataaagaatgagatttttgggaatttttatgcaaaaacacacttattttttcaatttttaacacatattttagcacatattttggcatttttgggggtttttagcacatatttcagcattttttagcacatattttattacatatttcaggatttttagcacataaaaatccgggccctagtaattacgttttttcctgcgcagaatttactttttaagcgatttttatgcaattctacttttaaaatacatccaattatctccataatttgatatcttgacacatttctcttaggaaatgaattacccatccggtagtatttactcaccactaataaacacaagaaaatatg

SEQ ID NO: 104421 - DNA, 92 bp, Heterodera glycines
acttttgaattttggagggatgctcaaaattactaaggaaagaaaatacgggaaaagtcggagccaacgaagagcataaattgccgacgatg

SEQ ID NO: 104422 - DNA, 96 bp, Heterodera glycines
tttgtccacttactgctattttgtaaccccgaactccacacaatttgttcgaaagtcgaaaattttggtagcagaaccaaaaagtgagcaaaaatg

SEQ ID NO: 104423 - DNA, 84 bp, Heterodera glycines
  unsure (1)..(84): unsure at all n locations
tgtgagcagtcaacagtttctgttgcattgaagctgttcattggtgagcctccaaaaaggaaaaacaatactatttcanagatg

SEQ ID NO: 104424 - DNA, 1003 bp, Heterodera glycines
gtgccctaaaaagggagctcaagcacttttggtcgggatttcttccaaaaaagaaggaaaaggaaaagggaattaaatggaaaggaggcaagtgattcggtggtcaagtggttagtgtgcttgcctttggttctgtgatggctgatggttcgagtcccattaatttatgggattttcccgtcaaatattatatttaaattattcgttttaaaatttatttttaatgttttttttataagaattttatgagtgagttaaaagagaaagaaaggcataataaaaaatatggaggagcaaagtacttttggataaaaattgatttctttcctttctttcctttttttatatgtaatgcacactcgccagtggtctttaacctcgccttttcaataagcaaaaaatgtctcctccttttctttccccagttcattatcaattgtttccatttacatcagttttttactgctcctacttttattcaataaatatttccaactaaattattgctgttttaatagcataaatttttagtttttgcctttggtggtggtgggcgacggctcgggtcccacctattctgggtgttttcatccattattttattacattttttgaacgattttattttttttaaattaattaagtttattaaaaataatttattttaaatattaaaaataataattctttcttcctaatttagcccaaaaatctattgtttgaccttttttgtgcaaaatcatttaaaaaatggagacaaattaataagttacctaaacataaaattataaatattttatgccaaaaaaagaaggaaagtgaaaaggaaattaaaaggaggcaagcgatccggtggtcaagtagttagtgtgccttcctttggtgctggcttcccatgggttagagtcccatttcttctgattattttaaagcaaatattatattgaaatttttctaatttttgtttttttacaatttatttttttaattaattaactttatg

SEQ ID NO: 104425 - DNA, 508 bp, Heterodera glycines
ctcaagaccgagattcttgtccagcaccaagaatgaatatgaaacgaattaattactgctgcatttcgcatttgcctgaaccctctgtcccactttacgttaaagccgtaatattttttcaaaaattttcataaattttctttttaccaattccttcttttttcaagaaaaatgatgaatgattatttcgttgtcgcattaaatgttttttaatgcttctttaatcaaatgtaaaaactaaaatggcgaagaaaaagttttacgataaaaatgcttagtaatcattcaaatgtctgtctggttgaatttttctaattatttaattaaaaaggcattcttcgcaaaattgtttcacatcaattgcttctccattccttttgtcatacacaaaatgttaacaaccaaacattttttttagtataaattgagaaatttttgtaaacaaaaaatcaaaaataaattaaatccaaaaattcctccattattgaaaaatttaaattaaaaaatg

SEQ ID NO: 104426 - DNA, 424 bp, Heterodera glycines
tggtcaatgtgatggtagtgccaaagtcaatgccaataacgacaccaacaacggcaacaataataataattcacgatcgtccccccaacgatcaccccaactgcatgcacaaaaagtgaattgttttccacaaaaaaaaacaatataaaaaatttctaacttcctgaaatgtttaaagaaaaaccttaatttatttaattaatttcccgatatttttttattttcaaaaattttgaaaaatccaaatgtttaaattgtttaataaaaaaaaaaaacttttaagttagaaatttaaaatttccttttttgtaattattttaaaaattttttggcagtgcaacgccgaatttaaaaaaaaaattataatgaaatttatattgaaacttaatttattataattttcaatattttatagcggcaaatg

SEQ ID NO: 104427 - DNA, 686 bp, Heterodera glycines
tcttaaaaattaatgattatttgttaggattttcgctgccgccaagcgccagaatcagtggaaatcgtaagaagcacgaagcctacctaacctggagttttcagaagtttttcgagatgaaagtcaaaagaatatttaagaaaaggaaggatcatccatcttcgggataaatttttttttggtttaggttcgttgcgcctggaaaactgttccccccccccccaaaaaaaaatgttggatcaaactctgcgcctgcctcgaatattattaataaaatgatatggaagtaaattaataatatatttcatagaaatgaatatataataaaaatagcatttaaatagcaaataaaattattttttatgggacggttttttataaaagttaattaattcgtcaggaaatcgaaaagttgaaaaagttatgctcttctgtgatgagccggcatttaatgtgaataaatgaacgatttatttgcttgtaaaggtcatttgttctcagccaatagatggaaaacggatatgcaaatgggcagaaaaataataataataataatgacctccaaaatcaaggagaaatcggcaaaccatcaataaaaagaagcaacggaagactttcaaatgccaaatttgggggtccaaaatcccatttaaaaaaatgttttacaattagattatgaataaatg

SEQ ID NO: 104428 - DNA, 258 bp, Heterodera glycines
ttggaagaatttgcagaaaaaaaaaatgtaaaaagaaatgaatgagaagggcattctcgtcgtcgatgacggcatatgtttgctcttctccgttcgcgtctcgacctactcacaatatttattacgctgataagaaaaaggggccatctcaaaaaattatgcaaattatataaagctaaaaaaggatgaacggtccggtatataaatggggacaaacaaatttagtttcattttgatcagattttcaaaaaaaatatg

SEQ ID NO: 104429 - DNA, 647 bp, Heterodera glycines
ttgatcaggaagccttgacggggctttttgggcgcggagagaatatgatcaatggaaaagttagaggatcgttttcgtggttccatttttttaatctgagagtggagtgaggaggaatgagtaaaatctcggtatttatatgcgagcgccggcatggaaaatggcgtgaaatgatgaatgaataaataaacatttggagatggaaaaatttcaaaaaacataaacaaactatggcctgaagagcagcacaccgccacccatgaagcacaagacgacagggcacctaaacgactcgggaaattagtcaagtcaagcgaacgacctcaagccttaaaaggcaaattgctgccaggataaacggagctttttgtaattatagctaccgccctggttaacagcaaaaatattaatttaattatacggtcccaaaatcacaattaaatgatacggtccccataaagcacaggacaagtgagggcggagaggaaaacagcagatgtgcaaaaaaaaaagatgaaaatttttaaaatgaatcgggaaaatgaccgggtgtacgatgtgtgcactttggccacgcccacttgcgcaccaccaaatgattcccagcaagaaatcgaaatcattctttattcaaattctttaaaatg

SEQ ID NO: 104430 - DNA, 123 bp, Heterodera glycines
tttgggaaataaaatctttgtttgatatatatattttaagtttatcagcttaataattttctaatttaaaggttaaaatgattttaatcctgtctttttcactttattttcaaattttaaatg

SEQ ID NO: 104431 - DNA, 714 bp, Heterodera glycines
attaatgtaaatagcatacaaattggcaattatttaaaataaagtctggacttggatttgcatattctggagaaaatccaggaaaatccaaattgccgaaaaattgcatggacaaatttccaggaaaaacctaggcatatagattcatgtccagatcggtctctaataattaattaatttggattaatttgtaaaatttaatttaaaaaaaacattgacatttttattgccaattttttaaattaaattttaaatttttcatttgtttgttttgccaaggttgcctgcttcaatgagcacgaatgttgctcggtgtgggccgggaaaggcgagtgcgagcgaaaccaagcttacatgagttcatggtgtaaagcaagttgcagacaagtaagccgaaaaacaaaataattatataaatataatttaattataaagggtttatctaaaaattaatttttttttttataaaacattcaaaaattttattttaaattaattgttaactaaatgaaattccaataataaaattctaattattgaaaaaatcaaaatttattattcatttattttacacaaaggacaaaagaaaaaattatttagaaaaaaattttgtgaaaaatttactatttttcaatgttttaatttaatgcgtttaatttaatatattgaatttaattaattaattattttggatttagtgcgattttgactatg

SEQ ID NO: 104432 - DNA, 285 bp, Heterodera glycines
agatttgaccagcatggaaagccggtcggtctgagcccactcctcggttaaccccgtgaactgcttgaatttcttggttaaggtgtttccgaagaacgaaaagggtcatttcattttgccaaaggatgagaaagggtcgcccttcttccccgtcgatgatcgaacagtgcctatttttccatgggaccacgagaaaggaatgccaacatttcctgtcggtcagcctttgaatattagataattgtggtttattctggtaaattgattgttgtacgcttccagatg

SEQ ID NO: 104433 - DNA, 169 bp, Heterodera glycines
aactaaacacgataatttgtgtttaaaataatttaaaattagtttaattatatttaaaaaaacagtggataagtagggggacgttaccaattattcttagacgaggttttgccttcttttaattgaagctgctttttgtttaggccgaaagccattattatgcccaatg

SEQ ID NO: 104434 - DNA, 98 bp, Heterodera glycines
gggcgcttcgcgcctgttttttagcttgttaggccgcttcgcggccttggacgggcgcttagcgcccgttatttaaattttgaggtacaaaagtgatg

SEQ ID NO: 104435 - DNA, 287 bp, Heterodera glycines
ttagggatgtggccaccacccagtgttcttattgtgaatcatttgtcacgctacaaacaaattcaatataattctcttccccttcagtctgccaactcaagtgcgtgtgggcgtcatgtcattttctttttgtactgtcgatgtgttggaatgacctttgaaaaaattgtcagctttttgcactatggaaaggtgcaaccagatgctcttgtaaacaattttgtaaaaaccataattttaaaagaatataaataatgcaaaaacagttggaaaaattttaaaaaatg

SEQ ID NO: 104436 - DNA, 1003 bp, Heterodera glycines
ttaaagagggagcccggaaatgcatagagcatcaccgaacgacaacaaccaccacaacgccgccgcaagccgagggcgagttttggcactttttagcaactataaatatcatcccaaattattacttttgcaatttttatggcattgatcactaggacatttttttattgtcatcatttttttcaatgaaaaaacctttttctggaaattaaattaaatcaaaagaataatttaattcaatgaattaattaatattttttcaattaatatgcattgatttgcggatataagatgtttcttgttgttattagtgcatttttttctttcacattattcgttgggtattaatgatggcgattaagataaacgcaaaacaatgcattaatttgaatcagaatgctttcactaaaagaaagattatttcattttaataggaatgacattagaattttgaaaaaataaaattaaattaaaatttcagtttttattttttatgcttcaatcgacaaaaataaactttttcatcgcattatttctcttccatttatttgttatattttttgtatttcataaatatttaaatggaaacaatgggccaaaagcaggcaaaaattaaataaatttaaatttcatgtattatttatttgtttttatttttcaccctaccgtaccctttgccctttacagtaaagccccggcacagagaaagtgcactcgcccacaaattgttggacggcctttggggcattgaaattggcgcttctgttcagaatccctttggtttacgtgcactgaatgtggactactcagatgacccaaacgcattttatcagcaacatcaaacggaaattgaaggtcggcatttggaagaggacaatggcattggcatttgatgggattggccaaaggcaatggcacttttagcaaactataaaaaaaccaaacaaaaccaattggtcgttctgttgttcagcaaacagtccattaattaactattttcatg

SEQ ID NO: 104437 - DNA, 612 bp, Heterodera glycines
attacatcttaattatacaaactttgggaaaaggtgcgatggtttgcttttttcaaggacatcctttggatccaaggacgcttttccatgtcctgttttggactattcacatagtttttttccatctttgatgttttgtcagacaatacaatttctttctttcttttttgtatttgtttgctcaccgacccgctttcattcatcccgacaattgctgctgttgctctcgttgaatttttttttgcctctattgcaagccgagaacagcatgctctcgagtggagaatgttcatgttcatgcaccctaacctcctaccccaacaaaatttccacttgagaatgtatttggagcattttttgaagtatgccatcgcttggagatggagcggagcgcggcacttgaacaacgatttgttggcattttaggagcaatttttgagtggtgtgccaaccgacagtcgcgcatgcaccgccgataagcctctggtggggggagcttggccccatataaaaggcgtaaatcccaaccaacaaatcatcaatttgcgaagtcaaaaaattctttcaatctccctcacattcaattttcttggctcaacaaacaaaatcatg

SEQ ID NO: 104438 - DNA, 106 bp, Heterodera glycines
agtaaaaatgccattttttttttttgcaaaattttccattttcacctcccctttttatttcagtgtaacaagtccaagtacgacgggatcaacaggttcaactatg

SEQ ID NO: 104439 - DNA, 576 bp, Heterodera glycines
ataatattctgctcattattagtttggtcggtgtaataaaaggatcaaattaaatcgactgatcatttatttcctctgggagcaattaagatcaattagaagtgaacatggtcagatagatttgtgcttcaatattttgtaattatttgaaaaatttctcaaaattataaaatcatatatagacggaaaaatgtttgtaaaaacatgagaattcaaaagaaaatgttaatagttatgatgatcacttgcgtgaccaattttaattagtaagcaattaaagaaatattgaaagggtttaacttttttttttttgcaaattggaaagatcgattcacaacactatgaattaaaaataacatcgttgatcatcataaatttttcttaaaaattcctttttcctctccaggcttaaattcaaaattttttatccctttttctctcataagcccttttcccagcctttccaattcaaatttttcccatcgggccaatttcccattccctgaaaatccccttaatcccgcatatatcccattttgccgcctcatcggaaccgccccctgcaccgcccacatg

SEQ ID NO: 104440 - DNA, 249 bp, Heterodera glycines
acggccccaggcccggacggcatccgttactcagtttggaaaaagtatgaccaaggagcacatgtcctgacgtctatctacaactgtgtcaaaagagctcaacacatcccccgaaattggaccaaatcagtcactgttctgctccataaaaaaggagaccgaaatgaagtgtcaaattggcgaccaattgcactttcaaataccatcggaaagttatactcttcagttttggcaaaccgattggcaatg

SEQ ID NO: 104441 - DNA, 120 bp, Heterodera glycines
ccttttccctctctctcttttcatttatatttcttaatttcggacttttgtccctctccatccgtcactcctcaaattgtattaatcacttccatttgccattttcccattcagccaatg

SEQ ID NO: 104442 - DNA, 428 bp, Heterodera glycines
gcctttttaagtttcgggctgtgattttttaagcattttaaggccataatttgacaatttttgccatttaattgggtacttttataattttttaaaattttgttttctggggttttcgggtacgctgatcacgaatatgacattcatgtccatctattaaaaccccggaccagaattcgaacaaaagccgaaaattatttttcacatgtattgtccaaaaacgattcaagtgcactgaatggccgtgaatctctattttttatattcccgtctatttgaatcgtttttaaatgtgaatttggtgaaaaattaatttcgccttttgtttcaattcgggtccgggatttgaaatatgtgaaactttggtcgttttggggtatttgttttaacaattttggtgaatttattcattttttaaccagaaaatg

SEQ ID NO: 104443 - DNA, 767 bp, Heterodera glycines
ttcactgaaaaagacaaaaatgaaaaaatgtaaaattcgtaaaaattattattttacattaaagccccataatcatggctttaagaaaaatgtatcttcccccatgttttacgtaggaagacaaaataaaatatttcgtgtcaaaaaatcgatagaatcgataatgccaacgcaaagaaaattcatggaaaagtagcgaaaaatatttatgaataaaattattataaatcagaagacacaaaaatagttttaaaatgatcaaatgttaattatgaacagggctcacaattatgaggctttggcctcattttgtggttttttaaaaggcaaatgaagcatgatttttacagtgaagctttgagacattttttgtggggttttttttggattttttgcccataaacaaacaacacaaattactattagaaatatttgcaaaatattaataaagatttattattatttaaaaaaatttccatttatatgaatttcacccagcaacaatatattaaataacgtcaaaactatgtattcagagtagaattcgcttcttttcctcttttttcccaatctttcggctgtcaataatcaaaacacacggagaagcgcgcaatttcttaaattaattttgagttaatttggaatttcttttttgggtattattttaatttaattagtcattagtcacgcttgggtgcgatccgggccgaccctggggaggcattgggttgtggggacaaagctttctagaaagtccaattaaaatg

SEQ ID NO: 104444 - DNA, 496 bp, Heterodera glycines
atcaaacaggcgcgccatatgtttattcttttttttctcttaaaaatttcatcatttgctgagcaaacatatcgcatttactatcttcaattcaatcactcaaaatttatttttggtaaataaataaatatttgtttaaattaaaatttgattttttttttggcatttctgatattttatttaataatttttatcggaccacttgtccggtctcggaatgatttcaacaaatttataaataaattattacaaattaaacagtcatgtcaaaaaagtgttgtttcatcctctttttaggctgataaaaaaagatcttttacatcaacttgatcagattacccttaataaaatcaattattcaattcaaaaaaatcattaaaaacaaattcttttaaataaattttctaatattattttaattattaaattatcatattttttaaatcttaaaattaatctcagcagtgaattttatagtccattgcttgttaaaatg

SEQ ID NO: 104445 - DNA, 264 bp, Heterodera glycines
aagttagatggaataaataaaagttataacaaacttggtaatttatgttcatttctgagcatcagttttagaagaacaaaatttataattcattaatttgaatctttaaaacttaaattaaattgaatgcaaaaattgaatttacgcaaattaaccaaggaaaatgctttataacattagacaagaaaaattgttgatttctctaatgtttactatggcaaatgcggtcatttctcaattttagtgagagaaatttatttaatg

SEQ ID NO: 104446 - DNA, 67 bp, Heterodera glycines
gcagcgctaatgatagcggtcatgaggtgatccaacagcaggactattatcttcaccacccacaatg

SEQ ID NO: 104447 - DNA, 88 bp, Heterodera glycines
cgtgagttgatttttgtttttcgcctaatattttgttgcattaaaattgcagcggatctcaattttttcgtaagagatagtgagaatg

SEQ ID NO: 104448 - DNA, 75 bp, Heterodera glycines
ttgcaaaaccgaaatttgtgggattcaccgccggcgagtgacggattttacggacggatgagaaacggcgaaatg

SEQ ID NO: 104449 - DNA, 384 bp, Heterodera glycines
tctgtaacagatgccgcgcctcgacaccatgaaacttttggtgcccaatcttaaccacagctttccgggtacttttgacaaagatagaattaaaaaatattaaaaaattaattaaaatatctgactttttgtgatcagtaggattgaaattttaattatttaccttattattataatattattaaatgtgacaaataagtagagagaaaaaaatcaatttacaatttaatgagtgttgtaatcatgtcaatatttcactttaaaatgtgtagaatttataagagaaaaatataaaattcattttgagaaatatttttatattcttatttatttcgttcttatcaaaaaatattattataatttctaaaaaaaaattctgcaatg

SEQ ID NO: 104450 - DNA, 439 bp, Heterodera glycines
cattgcttatcgcgacagaatacgtggaaagtaaaaatttgtaatccgaaatcccaatttcaacggaaatattccgtattgggcaaattcgagaaaatcaggtcgccgaacaggctgaagacttaagtgatgaacagaggaaagagtgggttgaaaagaccaaaaagagcgaattggcgtttgtctatgagtttttggaaaaacgcgttttgccacatgacgttcgcgatcgagaaaattattgtcatctttgcacaatttttcgttaatcaacggacttttgttccgcaatgagaacgatggaaaactacagctttttgtaccaaaagagttcagggaaatgatgataagagaaaggcactcgggaatttgtgcggggcaccttagcggaaaaaaaatttttcgtcagctctcggagctttacttttggccaaatatg

SEQ ID NO: 104451 - DNA, 176 bp, Heterodera glycines
cagatgcgtcacgagaacgagctgttgaggcgcgcgtgcgcaaaggaacgcgagcgccgtatgttcactaccaacgcgtacagacagctgttggagcagttcaaccatttggtggacttccggcgcgtggttgtggccaacggagggggcggactgtcggaacaactgcaacaatg

SEQ ID NO: 104452 - DNA, 60 bp, Heterodera glycines
aggcagatttcatttaataaacctaatttgatttgagctccttattcttgaaatcaaatg

SEQ ID NO: 104453 - DNA, 821 bp, Heterodera glycines
atagaaccgatcagaaatggggacggacggaggacggaaaagttatcagaggaaaatgcgatcagataatcagcccaatccattgtagtcaatttttagtgtaattaatccgaccaatttgtaacttttttgtgcaattggcaatggcttttgtcattaaaaaacaattttggaaaggaaattaagcacaataatccatctttttgtatccatttttgtgttgtgcaatttttggaccaagaaaaaaaattgattgatgatcttccctaattatttttttattttgaaagtttttccattatttaaatttttccgattcttttttttgcgtcatcccactgaacaaataataatttctttccaaatgaatgggaattttgctgaactaattccaattaataaattcaattaattaaatgcttcgctgtaattttgtcaataaatttggaaaatatttctccttttttctccccataatttgtcaacttttaaagtgtgaagtatgttttggatttttattattataagaattttaaaaaatgaaattgaaaatttaattttatttatcaaaactacaaattcaaaactaaaattaaaattttcgaacattaacattgaatttcttttttaatgtatagcatttgatcgaataataaaactcattgtcagccaattgcgattgatttggcggcacaacacggcacgcgaaatcggcatggaaatggcgacgtggttcagctgtgggaggagaatcagcggttgagcaccaccgaatttgggaccaaattttggcaaatttcaattttagaaacccaaaaatg

SEQ ID NO: 104454 - DNA, 626 bp, Heterodera glycines
ttagggaatagagggtaaaatctatcccactttaaaagtgctttacatgggcaatagaggctggaacaattggaaaattttgcgcaatttttggcaaatattaaaactaccgttaatttttttaattttaaaaattcaatttttgttgttgtttgagctattaaaaaaatcttttattaaatctttctaagttcaaggaaaatcatgattacattcaaaattttagtactgttaagaacaaaataaaaacaggtgtatcattcaaaaaataaataaattttatttaaggaaaatgtgtcaataatcaaaatattttaccattttaatcagtaaaatatatacagttgaaataatttataatagatttaaattttgtattaagttttgtcaattttttgttttgttttgtgaaaattatttgatttcacatctccaggattcgaacttggttactttttttcatttaattaggcaaaatgatgtcctacataaatgataaacaaatgagccaaaggctaataaaataaagataaaagaggctttaacaaaaaatgtgaaaaattacaagcaaagaccaatcggtacttgtctagtttaggtgatacgtttaacaacattttcagatg

SEQ ID NO: 104455 - DNA, 154 bp, Heterodera glycines
tccatatttttaccagccctagtcatcagtgcagcattttttgtttacaattattaataaaatattttcaccgaaaaccgatataaattctaagtttttaattttaattttatggtttttcgtcttatttttccggctgatctctaccgtaatg

SEQ ID NO: 104456 - DNA, 276 bp, Heterodera glycines
atatataagaaaaaaaaaatttggtctgaaaatcaaaaaacaaaatagcgcttcggattcccacatccgacgaaatctttttctggctatgggctgccttcccctatattgtcatgaatttttttttaatatcccatagaaattggaaaacatttttgaaattttagatattatctatcactcagccaaaaaaaaatgaaaaaataataataaatttgtttgaaaatttaggcggatcattattttaaacaatttgaaaaatttgttgaagcaatg

SEQ ID NO: 104457 - DNA, 279 bp, Heterodera glycines
ggcactaaaaatttgttttagaaaaacaaaaaatttttccaataaaatcattattttgaaaaaatgatttattataattaacatttttttaataatataatttataaatttttgcatctaatttcaatttcaatgccactttctaaactaacagaattttaccagaaaaatctttgttcatttttttaaattagcaaatttagataatttttgactttgagtacttttctcacctattacaatcacttattgtgaaatttaattcttttttagataatg

SEQ ID NO: 104458 - DNA, 370 bp, Heterodera glycines
gccgttggtcttataagattaaaaaaaatttttttttcggaaatttatttttaataattcaaatgaaatgtaattaaaagtaaataaataaattattgattggccaataattacaatgatttaaaataattcttatatattttttcttcatttttggaggttcaattaaaaacagttgaactttatttctgctaaaaatttgctaaattttaatcaataaattcactttaaatttgatgtgcccaaaatgtctgccaattatttattaaatctcaattgaaattacaaaaaattcttgcaattaaatgcgatcaaatcttcaaaaagcttgtcaatggacgacaaccgattggcaactcgtaactcaatg

SEQ ID NO: 104459 - DNA, 59 bp, Heterodera glycines
gggaacattacgagacgacatttttggataagtcggccttgggactgcgaagcaaaatg

SEQ ID NO: 104460 - DNA, 487 bp, Heterodera glycines
agtaaaaattcgcaaattcaaggcggtgtaaaatggttggaaaatttatttaaaaaaaaaagtaacaaaacagccaaattagtagtgagataaataatttttaaaatcaaacattcataatccaaaaaataaataaataaatttaagagaagaaaatttttcatttcataggtgtgtatttttttaaattcccaaaaagtcttatgggtatattttgcttctgtttttttttcttgtgaaaaaatggctaaaatgtgtgctctaaaacgcaaaaatggcaaaaaattttgtgtttgcgatcaaaagttgggaattttatttatatacctattttggggttttttcgatattatatatgttcatatttttatacatattttagactttttcatacatattttgcaaattttttcttacataattttattttacctagtttatcaataaataacaaatttaaatgatcaaataaaacatcatacatatg

SEQ ID NO: 104461 - DNA, 926 bp, Heterodera glycines
  unsure (1)..(926): unsure at all n locations
tcgagagcttgaactgtaccgtnngttatattctctgtcatatanaatctcataanagtnntctcaacagtactgtaaggaaaaatataataaactcacccggatctgattcgaaaataatcaatgtgatattgacctcgtttttaatttaaataattaatttgtggcattttgtctatttaattttgttccacttctaaattttttttgttttctcagtgttttctcatattatattttggcttcaaaatgatggtaatttattctcatcgctctccgactttcgaatttttattgaattaaatttgttctgttttgtgctgtggactttaatttgtgttggagatacacttttggttttaattgtttgagtgcaattcttttttgttaattttggttgacgacgaacggggacgagaagtgaattcggaggagaagagaagagcccgcaaaagccctgcatttgtgttctccctcattttcttcgaatattttcgacgtggcgctcctgcttttctgggtaagctcagcgacgggatttgattcgattttcggttttcaacaaaaagggagcaaaagtgggaagtaaattgggattgagcgcattttgaggaaaattagtgattcacagggtgaacactaaacaatttgattgctgtcattcgaaagatagatccacaggttgggctatcagattttgaatttgttatcggatcaactcgccgtttttcttcacactcgccatttttgttttgttccgcagtacggacaaagcacaactcaacgattttgtttcaacagcgacactctcagtaaggggttgcaacaaaactgcatcaaaagcgacactctcagaaaggggttgcgccacacagattgtggttatttgaaattcagtggataaaggaaaaaattgttgaaaaatg

SEQ ID NO: 104462 - DNA, 62 bp, Heterodera glycines
aaatgggttgataatccacatggattagccgaagagcaattaaaaccgaagggataaaaatg

SEQ ID NO: 104463 - DNA, 871 bp, Heterodera glycines
agaaaaaggaaatacaaaagcaaaattggctatctcttccttgtgaacgaatttttcgtcaatacaataaaatttgaccaaaagaatttgctatttatttactgctcattggtcatttttatgtatttttacaatatgaatatttttaaattagactttctcaaataaggctttttgcaagcaaaagagattttcgactttgtattctttaatcaaactaacaattccaattcgatacaaatttttttggaaaacaattagctattgaatgataccacaaaatattaatttgatttaatttccatctcttttctctttttttccttttcacgctgttttttttttgggggggggggggggtgcgctttgaactaaaaattgacaattttggaaaaaaaaatccaaaatttgtacaaaaatttttcctgctgttctttggtgtgaccacgactcggagtgttgttggggtctaccctaccccaatttgtagatacattttcggcaaaattaatcacttttaattcgcaaagtaaacgagtcgacggcaaaaaaggaaccggccaaaaacaatcatgagattattatttttgttcatttatctattcattattaggtcacaattttgctgaaattattgggaaattcaaatatgaatgatctctatgggtcatcattttgccgcaatttattcttaattgaccctaaaaatatgtaagcaaaatcaggcagaagaatgaatgctcatttatttattcgatccctttttaacgaaataataattatctataaaaaaattaaaatctgaaaatgatttaaggaatttgcattttcttaacttattaaatgtcaatctcaaccaattctacaaatg

SEQ ID NO: 104464 - DNA, 271 bp, Heterodera glycines
tgttagcttagtaaataataaagtgcgaatgtttcctgttggaaatggttctccatttaaatatcgttcggtggcttttcctctcggccataaataactccgccccttacaattgcctcaggcaaaagaggcggggccttttgaagatttttaaaactttttattattttaattttcttggttttttttttgcaaataaaattcaaaaattattttcatttggcccaatgaaagaatcaattggtgcaaatttaaacttttccaaaatatg

SEQ ID NO: 104465 - DNA, 989 bp, Heterodera glycines
agcgatgaagaaaccgatggacgcaggcacagattttgagcaccaaatgcggcggcgattttcggtcagtagcggataaactcccaaagcccccccccctccttcacaaagattgaactccttccgacccccttcagtccgatttgtaatatccatcgtccgtccgtccgtctctccattccgctgaccttgggggggagagatgctttaccaacagaacacaaatcgatgctggtcaaacacttaaaaagcattcaaacttaaaaagcatattctgttaaatatttgttggtgaccttttctctctcccatctctttaattattaatttttgttaaattttgttttatttaaatttttcaaataatcatttttatactttttgttatcgtttccaaacagaaaaaaagaagaatgaaacccacgaagagaatgccatcaggcaaaaatcgaatgtttggctgcttaaggaaatgccattggcactgactctcccccccccctttcccccgtcgcttctctccgctcggagtgtctttttgaaacccttcgccttttgttgttttttctccagtattttaaaattctctcccgggcattcttttctacatttttttttgttttgttgttttgccattccatcgatttgactcatttaattgtgacgaacgaaactcacgaaaatgaaaagcgggtgaaaacggggggggggggaaagtattttttatcgatagttgcttttatttcaccaacgaagcacttagggggcggggggggggcagtcacacggcaatttggccccgggggaacccccgccaaacggtccaacgccctctcccacttttccaagtgttccctcccctttccccattcccccggtgctcccccattttttccattcattcgcctccccccttttccacgtcagcttatcacacactttcgtagaaaaaaattcgaattttgactccaattctcttggcaccgatg

SEQ ID NO: 104466 - DNA, 193 bp, Heterodera glycines
tgtgtttaaggtgtatcgtttgccaaaatttttgttttttttaaatgtataaaatcccgatttaatgaaaatgtcgggctggacgaaaccggaaacattaaaaataagaaattttaaacgtataaaatcccgttaaaaatatcaaaaatctaacttttttagtttctaaaatttttaaatttatagagaaatg

SEQ ID NO: 104467 - DNA, 347 bp, Heterodera glycines
caaaattccgtcgcgacaaaatcccgtctcagcaaaacccgaaaaattccgcctccacctataagcgacaaagcataatcgtacgagttcttgtacaagcgtcagattcaaatagaatagcttaagacctaataaagccaaaatttctcattttttgtctgccattcataaagttctgataaactcaaatttatttgtaaaaaattcgtgaattttttcttgcggcggaggtggccttttttgtttttttggacggagttggggggacggagttgacccgcttcggtttagatggtatcacaccttttttgaaaaatttttcaaaattttcaagtcttaaaaacatg

SEQ ID NO: 104468 - DNA, 80 bp, Heterodera glycines
atgcggctcacaacaaatgtgaacagtttaaatttgctaacatcgcactgcaaaaatatttgaattattgtgacaaaatg

SEQ ID NO: 104469 - DNA, 803 bp, Heterodera glycines
aaaggaaaaaattttcaataaatttttatttgaaattgtaagcaattttcttaacaaacttgcattaaaatactcaaaaattttcccggcggcgcctatcggcaccgccggacctccattttaccatatttttgaaaaatggaggccaaaatgtcaaaaatattaattttttggcgaaaacggcgaaaaattttgtaaaatacaccccataattcgggatttcaaaaaaccaaaaatacaccccaaaaaatcgacttaaaaaagaaaaatacacccctaaaaatcgaatttttgacttcagccctcccccccccccccaaagccaagggttcacatttgtatcatttctattgggtccggaaaaagtagcacgaaattttttttattttcgattttataagtaattttcaatatttcgctatttacatttaattagagttttgtcctcaatgtaagcggatctttccatttttgtggactttttctttattgacaataaacaatgatgaaaaaaataaaataaataaatcgtatgtaaatttttatttctttttaaaatcattttttaacaacctttcaacccattcaaaaggtccgttcacccctttttccgtcaatttattttcttatatgatcataaaaagttaacaaattttttgcacataattattttttttttttggtgtttaagctttcttaaaataaattttaaaaattcacacattccatttttcatttttatttcatgcattttaatattttgtttccagcaggcacaaaatctgttcattcatattttaatg

SEQ ID NO: 104470 - DNA, 1003 bp, Heterodera glycines
tgggcaagagggagggatttcaaaaaaataaaacaaaataaatatgtaaattgttatatatcattaaaatttataacaagaacccgtctaattttgtttaaactcataaaattttaagtcttgaacagactaagccttgtaatgatacaaataacacatgtatgacattgatagggtgtagaattatatgcacatgcatatttttttcctggactgttggaggtctgaaacgcacgaaaaacatgttttagcttgttttgaagcttctaggacgtatttccatatgcatattttgcatatttatgcctagttcgcgatttatatgcatatttgtgtgtattttggtattttgtgcatattttatgtgcatatttgggcattttttaaagaaatcctctattaaaacggtacgcccccccccctattaaagcggccattttcgtaggataaataatgatttatccttattttattgttttgcaacgattgtttttcgcgttaatttaaaatatttttgcatccttcatttaattttccttttggtggttgtctttgtcttcgtgttatctcaagttttatatattttgtgcttttgaattattgtaataaaactacaaaatttggtgcttttccccgtggactttcattcaacaacaacaaacgcccaaaggcttaattggtactgttatttgagttcctaattgcaatttgccttattctctaattccttgtcagtaaagtggtgttgaaaattaagtaaatctttccttgaccccaaaatctcaacccaaaccccagcaaatcccaaagtccctccccgaaaatacgccttttctccaacgtggcgctcctgcaaaagcgacgtaaaatccaacctttcgacaccgaattgcaaaccgattgtgtgcaagcgacattggaaatttggtcaacaccaattgtggaggatttttgttttgaattttttctttctccttttcatttcaaagtttagaaatgtatg

SEQ ID NO: 104471 - DNA, 86 bp, Heterodera glycines
ttaaatgtgattcgcgatcatcgaccccaaaaaccctaggaaagtgtgtttcagggctttttaaaatttaattttttcagagaatg

SEQ ID NO: 104472 - DNA, 277 bp, Heterodera glycines
ttttcccatcataaaaaagtgagaacaaatctgtgctggacacaaagacagttgaattgggacaaacagttcgtttttgcggagtaatattctcgaatcggccaaagaaccgatacccgcgggcaaaacgccgttggcaatcggaaaatggaaaagagaaatcagaagtgaggggatgggagtggaaagtggcacctcgagattactgtagcaggaggagcgccagagaatgtcggaaagcggcgaaagggacggctaaaccaagggacggacaatg

SEQ ID NO: 104473 - DNA, 1003 bp, Heterodera glycines
acattttaatattcagaaaaaaatttcgggggggggggggaatccgaagaatttttttggtcaaaatttgtttagattattttaaaaaattcagcgccggagagcaaaaacaggaattgtaactatttttagccaaaaaagactaatttttgccattttggagtcaaaatttaaaaaaataaggtaaaatcgagtaaattatggtccggcaatgccgataggtgccgccgggcaaattttttttgaaaattttaatgattttattaagaaaaatcgacaaaaaattttaaaaagtaagaaactttggtttttataaaaaaataatcttgcaggaaatcgtctcgaaaaataatcccaaaaagccaattacggatcaaaattacagaaaaatccacaaaaatccgtaagccgtaattacgggggtccaaaaaggccgtaattcccgtaatccgtaattgcgcccagccctgattgctatcattcaagagcccttcagattttattagcctgcaaaatttcataaaatttgtttaatatataaaaagttatggaaaaaatgctcgaaaatctgagtttttgaattcatctggccataacttttttgtatcttaaagaaattttctgacattttacaggctaatagaggacacttagggctatcgaatgataccggcaatgttgaatttggttgagaatggaaaaagttacagccaaaaacttgggcccgtgcgaaaacggcccgtacgaaaacgacccgaaaaaagggacaaagaatttaaaagactgaaatttgaaaaatgtacatttggcataatgtataatttattttaaattcaaatctttttgtatgtacacttaagaaaaatgaatgccaacttttacatcccaattagctaggtaattagctattcggacacaaaattttttgttgtttgatcattttcatgttacaggtgtttaaaataagagctgaatattcaaatatttttagaagatcaaaatg

SEQ ID NO: 104474 - DNA, 79 bp, Heterodera glycines
ttgaaatcgactgaagaagccagcaactgggtttgccaaatcgccaatttcttctcaaattccggcagcacgatgcatg

SEQ ID NO: 104475 - DNA, 128 bp, Heterodera glycines
acttaattattcaaattattcaaaataataatacaagacaagactaaacaaaataaataaataaacaaacaaataaataaacaaaagggaaagaaataaaattaaattattgcttcggcaagaaaatg

SEQ ID NO: 104476 - DNA, 425 bp, Heterodera glycines
ttgtttgaattgatattgaaacaaatattagctaaaagattggagaatatggacacctcgaattttgtatatagagaccggattttgaaacaaacggactggaacttgacgatggatgggaccaatgggactaaaactaccatttttccggttagatatttcatttgaggaccggaaatgggctatcattagcagggctgcaaaaaatatgcaaatgcatatttttttcttggcttctccaagctctaaatagtaggaaaaacactttcttttttgtgtttgcgtataaaaatcgggacttatttgcatattttgagtttttctttatatttaatgcatattttaccattttctatacatattttcagattttttttgcatattttgccatttttcgtcaaatttttcagatttgattgaaaatg

SEQ ID NO: 104477 - DNA, 884 bp, Heterodera glycines
gctgaacggggggaggaaagggaaaaatgaatggtggcggaaaagcgcatgaaaatgggggggggggggggatcaccgatcttgaagaagtcatctcgtcaaagagtgaagaagctgctgttgacgaattggaattgtgttgtgataacaacagagaggaaagaggagaaagggaaatgtgtaacccctaaaattaattgcaacaattaaaattagggataaagtcgatttgaaaagagtgaaagcggtaaaagcaattttctattgaaatttaaaggggagggggaatatctgaagacatatgtacttttagcttagatttgcatccaaaatagtgtacaaaacgaaaaatccggaaatttatgcattgatttccctattctgtgtttttctatgccttaaaatttttttgaaaaaactaataataagcgttctttttgtttttcaattaaacgctctaagtaaatgtcaaaaaaaatggtaggacaattaaaaagggacaaacggagggagaaaatggacagagcggaagagtgaatttgatgaattcaaaccaaaaaatggacaaaaaaaaagttcaaatttctgtatgactgagaaaaaatggcatttttctccgtatttaagcggtgaattccccaccaaaaccatccattcattcaattgctgcactcacttccattcttttcccccatcggtcgaatcttcatcctgctgctgctgtacaataaagataattcccgtcagtttttttttgttttgtttatttcggttttcaaaatgtattaaattttgtgcctttttcaggatggtcagagcaacaacggccaggacaagggcatcagcagcgcgagcacggagcatcaaaatcaatcgtcgaaatg

SEQ ID NO: 104478 - DNA, 82 bp, Heterodera glycines
  unsure (1)..(82): unsure at all n locations
tcgctacanatttcggagtcaatacaacgactttcgaccaaatcagcagcaccagtgacaaggcgttggtcagccaacaatg

SEQ ID NO: 104479 - DNA, 282 bp, Heterodera glycines
ttcattacaattccaattttacgttcgcatttttgtgcgactttcatttctgtttttgcaaaagaaatttaatcggccaccttttcaattcaaccgccccacgcattcattaactttttgtccaattcgatgatttggggcgtggcaattggcctttgctattttaatcttataaaatttcccacaaaaattaaattttggaatttctcatttaattttattccttagtaatttttgtgtaacaaattttaaggcatttgttcactttaatattttgccatg

SEQ ID NO: 104480 - DNA, 569 bp, Heterodera glycines
ctctagagtcaatttttaccaatttttatttaaaaaataaattttaccttttaagaatctaatttagtcacctatttccaagtagaaaagaacacagttaaaaatgtttaccgattttttatttaaaaaaaattaatttaattattacgtaatttaattttttattaaaaaagaaattaatcattatgttttttattaaaaaaatcaatttaatttagcagcctatttaattttaaaaataaaattaaatttttataagaaatttattaattacctaattaagagcagaaatgttgattgtgatagttttttggttatttcagtccaatttataccccccctcccctctctctctctttctctctaccaacaatctttttttttcaaaatggtaaaactttcatgaaagcggcatttaaaaaaatatattgagtgagacttttggcctaaattcaaaaaattactagaaaatgtaatttttcgtaaaaaacacattacaaattttgaaaccggcaaaaaaaacacctgttgctgagactggtctggtcgaactgtttgccattggcatg

SEQ ID NO: 104481 - DNA, 1003 bp, Heterodera glycines
acgggggcccaaacgctctggtcccaaatgtgggcgtaattccaacacaaaaatgatttgattcaccaatgaaactcatttaataagtaaccaaattcatgcatttttaatttttattttatttattaaatcccattaagaaatattaatttgccaaattaagcattttaaaatgcaactcaaaaaagcaaaatcacttttgttgctaagttttaccatctttttctgtggccacgcattttgtggacaaactccggtccaattcacaacaaaacataaccttttgttcacggcattaccgcccgacaatggggaggccgtatacaaatttgacggtaattaaaaagcaattaaattcgatattggctaattacctaattaggcactttttacgcggatcgcatcgcccaattggaatacatagcggaggaggggggaagcacacaatccaacgactgtttggaatacggcgaatatttgaagcttagagaaagcggcaattttacaaaggaaacaatcgaaaaatttgaaaaggcagtgaaacaaatggacgcaaaaattgagcaaattaggggagaaaacccaattttagggacaaaacgcatcgaaatgaacgaattcagggcaaaattggacaaagaaattgtaattttaaaattttgaattaattgtaatttaaaaattataaataaaaaaggattttggattaattacaattttaaaattaaataaaaaataattttggattaaaaagttactttaattgattaattaattattaatttcattttttgtcttgtgcgagtgactcagctgatcgtaatcaaagcgaacaagaaattgtctatttgatttctgggaataaaaaataattgactaattaatgaatttttgttgttaattgcccaatttgctaaattagggccccgcagctgacgatgagtcaccaccactgctgcaccaattggtgatcaaatgcaagcagttcatgcgaaaattaatg

SEQ ID NO: 104482 - DNA, 97 bp, Heterodera glycines
ggtccgaccaattctgcaattgttattcaatgaaagatcgttttggatttgttcaggcattgaaaagtgcgaacaattggtgaccgtcgccaaaatg

SEQ ID NO: 104483 - DNA, 118 bp, Heterodera glycines
ggtgtctcgccatttttctcaaattgtttttgtttttcccaattttgtttagacatttctccgtgccacctcttcggccagttacactgttcgaattatttttcgtgtgaaaccaatg

SEQ ID NO: 104484 - DNA, 470 bp, Heterodera glycines
aaattaatcaaacatttaaaaaatagtaaaaattacaatttaaattaccaaataagccaaaaaatgaaaatgaatgcagcagcgatcaacgatcgctgccataaattattgtagaactgcggcttggaattttcataaaaaatcatctaaatagtgaataaaaataaataaattataatgaatataaaaattatttaattagctaaaaataaagaaaaaacaaacatacataaaataggcaaatgatgagtcgatcgaacagagccatcgttctctgctggtcactcattcgagaatggcatatgtaatgtgaatgtaggtcacacttacgaccgaaacaaataagagggaccatcttattaaatgataaataaataaataaataaattacggatgtataaattaaagaggtgtatataaaaggtggcaattttttggatagattcattttgctattttcttgaaaaatg

SEQ ID NO: 104485 - DNA, 55 bp, Heterodera glycines
gtatttaaatatttttgttcacatctttttgtgtatattttattaaataaatatg

SEQ ID NO: 104486 - DNA, 685 bp, Heterodera glycines
taattttcaaaaaggacacacacaattgcttctttggcttttttgacgagcaaattcgttgccacctgaaacaattggatgaatttggcgcggatgaattggacagaccgtcgacagattttatggaagcatttttaaaggaaaagctaaaaaaggacagggcgggggaacagcacaattacaggtggattattaattagaaaattgcagtaaagtgactaattgatgatttggagcaaaaagcgaatgccatggcatggcgagagtggcgaactcttcccccccccccctccacccccgccccagaaatccgattttcattttagcttcttctattttcaaaaaagtcaatattactttaattaacggagttaaagatttgtcgaatttttgattcatttgaatttttaatcttaaatagataaaataatctttagtggagtgttgatgcttttcagttcagtttcatgtgtttaagccgatttcgtaccaaaactagaaatatttttataactttttttaattcaaatttttaagttttgaccaactgaaggcaactttattcgatctttggatttcgggacaggtaggcattatgcgtacggtatcgtcttttgtacagtaggattgtaaaaaaacacaggaaacgacaacgacagcgttggcctggggagccgcttacatg

SEQ ID NO: 104487 - DNA, 67 bp, Heterodera glycines
ggtgttttttaaacatacattaattagttaatcaaagttaaaccataattttaaggggaataagatg

SEQ ID NO: 104488 - DNA, 808 bp, Heterodera glycines
agtctcaattttaaagcgcagataagttttgatgctgatcaaaaggtcttacattaaccagatttgttgtccacatcctcacttaattgacgatcaccacaaatttttaaaataaaatttcgaaattaagctcatttggattcgtaatttaaatatttattttcaaaatacaaatcagttaatataaatttattaataaaaattaacaattaaaatgtgaaagaaagaaaaaatttcaaatataaaactaattagcaccgcactggtttggcacccccccaaaccccaaaatttacataacaatgtgagaggaagagagaaagagaggaaaatcaggaatttaaaacagaaaattaattgacattatttgaggcattatttgaaagactgatgatttgttcaataagagtggtaaggtcaccagtgtcaaaacaattataataagcagtacggtaacgctcatggaggaggacggtgttccagccttttctttttaaaacgatgttcaggaggagacggcaagtgcgtccgtttccatccaaaaatgggtgaattttggcttaaatacttttcttgcatgttatttaagcgagaattatctttattaaagtaaaataaacgaaatattacaaaaaactggctaaaaacgaatattattaaagtggatcgttttatgaaagctaccccgacatcacattggcatggagagttttgattgtctcaaaaattacaccgattagaacaatgacgagaagcggaattaataattttttacggacaaattcatacatatacaaacatcaaaatg

SEQ ID NO: 104489 - DNA, 161 bp, Heterodera glycines
atgcttcacggactgagaaaaacatagaggaggaagagctggaagaggagaaacaaacggaagaaaaagaagaagaagatgatgagagtgatgaggaagaagaggaagaaagagagagtgtggaaccagcagaggaagagaaagaaaggaacgaaagaatg

SEQ ID NO: 104490 - DNA, 1003 bp, Heterodera glycines
agatttaataaaaacctggtctttgtttctgaagtcttcattgagaatatctgattcatgtgcaaaatgccaaatccaattatttggtaaagtttgtgatatacaatcgacaattttcggcgtcttgagtcaaattaaacaatgaaatggcatttgaaaggtacaaaatcttaagttaactacctattttgaattttaaaagggcttttacctgtgctttcaaccgtagtcttttgtgtacattttggtcagttgttgcctcacgtaccaaccgaagcaattgaagcgatttaatatcatttgaataacaaacaattaaaacatcacgctaaaatttgaataaggagtaaaaacacggcactaatattgtaatcgatgatttattgaatagtattaaaaaccaatttattgaatagtattaaaaaccaacggggtaatccttttagtttgcaaattttttttgtgatacataataagtcgtgaaactttgctcccgtgggttttccgggtcgtgattacgcatctgacacccattttgactaattcctaatccctaacccgaccatcctcctttggtttctaataaaattcaaaaacgatttgctaatgcccaaaattcgacttaccctttgttggtctttaaacacgcgatttttgccaagacaaaaagcaaatttctgtctaatcattttcgaaaaacattgtagacaatatcctgcaacttttgtattttccagttgaaaaaagctaccatctccattagaacatttcaaacattgagtggttggcattcttttgagtctaaaaattagtggcaaacaaattaaaacaaatccagtacaacctgagtttctgctttttaaaatttcaactcgattggttcatgggaagtgaccaaactcccaaaaaatagggtgtccttattctaatgttacacagtgtataatattcattacctaactgcctttattttaaagtctaaattctgtttaatgtgtcaatg

SEQ ID NO: 104491 - DNA, 604 bp, Heterodera glycines
taattaaatattatttaaatttgtgttttattgttgcaaatttacgcattccatcggtcgaaagcatcaaatagagaaaaaggcaaaatccagaaacgaaaacccagcgagaaaatgtaagaaaatttcatttttttctaaaaactataaaaaatattattaatagataaaatatttaacaattttatgagaataagcattttttattttacattatgcctgacgtaaacaatttttggtttacatttatattattattcaattaacattttttccaacatcaaaatatgactgacgtcattataaaaaatattcattacataattttacgtaaataaatttaaattaatcaaatataatttataataaattatacaatcacaaaagataaattaattatttggtgttatttatgagataaactaatatttatataatataaaaaaaaatctgtgctacataaataaaagacaaaaacgctatgattgtgacaaatacttttgtaattgtctatatgaaacaattgattgttttttaacaaaagtttaaaattatacggttttacgaaatgcaccagtacgctttttagctcagaacaaaaatg

SEQ ID NO: 104492 - DNA, 1003 bp, Heterodera glycines
taagaaaaagataaagtggagaagaaaatgtttaaaataaagaatttttattatttggcatttaacctggtttttgtttggttaaaaatgaaaaaaaaataaatttcaggatttggatctggaaacaatgattacacctaaaagggacccaaaatgccaatgagaatcaaaggtcaagaaaaaaaaaattttccaattaattgtaattcgacccgttttctcaatttaccagttccagatttttaaataatcggaattattttccgttacaaataattcatcttcaacttacttttgctttatttcttgcccgcaggcaaaggagtttaagtgaattattggagttatttgtttttcgatagtttaagagaaaaaggtacatatatgagcaaaataaaagacagaaatgaaaatgaataactgtgaaaagaatttatgcaccgatcatggagaaaagggtgagacaatgtacacaaaactagtttaacagagagcagatgtaagcataaatggatgcaagagaaacgatttgagagacaaataaaataagtcaataaattggaatattttaattattattattttcgtttaaatttagacttaatactggcttttattttgttatttttccaaaacaaatattaaaaacctatgaaatataattattttatcaaaattattgttttcatatcgttaggatcgaatttaacgtaatgatgaacacttagaatattatttgcataatttggaacaaaatctcggccgacacgctatttaaaatagtactattatataattattggcgaaatgtatttaaattaaataatataattaagactgagtaccaagtaattattttattggctgtctatccttatttttagttaattttatgtgcttgtgcatttaaattatttttttaaaactttttgtcaattaaaaaatgttaaagggtgttgaaaaacatataaaccatcatttcagctttttctcggccgacatg

SEQ ID NO: 104493 - DNA, 57 bp, Heterodera glycines
ttttttctgaaaatcaacaaaattaggattttttagtaaaaatctcctaaaaatatg

SEQ ID NO: 104494 - DNA, 111 bp, Heterodera glycines
aaaagtgccaagtcgccagttttagctttgcacgtgtatttttttttgttgtttgttcagattcgcaacctcaagttggattgggatgaattcgacgcaggtgatgcaatg

SEQ ID NO: 104495 - DNA, 330 bp, Heterodera glycines
tcaaaaatgttggcacatttaattgcgtgaaagggtataatttcccaaacgattaaatgtaagcgcatatttattaagaaacaattgggcaaaattcaaaaattttttaaagattttgccaatttaaatttacggtttttgagatcaattttggcattttctccgaaaaatttataactaaaaagtgtttgggtgtctgtagccctaaaataaatgaattaatcaaaccattaaactaaaattgataggcatattttgccccctaccaattaataccaattttaattaaatttttagtgaattcttttttaagctaaaaatttcaccatg

SEQ ID NO: 104496 - DNA, 604 bp, Heterodera glycines
  unsure (1)..(604): unsure at all n locations
gtaaccagacaaaaaaatcaatcgtgtaaactactatagagtagagcggaccngggactgggtactgaaaagacgggacaactgatacnntacaaataagtccggttttgaccggaaccgggactagtcccggttttcccagccaaaaattcccggttttttaaccctaaaaggttccggttttgcccaaaatttccggtcccgctcttcttctctaggtaaaccaaaaaaataaaagtgtattttatatcccgctccgtttcataatattttttcaagaaaatgataaagtttttctattttttttaattaaagatttcatttaaaggatattccctctcactggctgcgggtttattctgcgtaattcaatttttataatttatttaatgggatcagacaaaaggttgttgcttgttttatagtctaatttattcactgtgcaacgaataaacattattattgttttgttaattttcgtgtttttgataatgctttattcaattaaaaattgccaagatattgacaaaatgtgaactttaataattgtgtttactccatttcttgtccattgttggatattgcaacataataattgcaaatg

SEQ ID NO: 104497 - DNA, 231 bp, Heterodera glycines
attctccaatgtggcccaaattttaggcccccagccacagccccttgcttctcccagttttaagtcttggatttgtcaaataaattcaagacttcaaattaataatcaaaaattctcttaaaatttttttgaacccaattcaaaaaaggaaaaaaatttgcagtcaaaaaattattcgaatttctccaattttgtttccataatttccgaaagttattcggtatcataatg

SEQ ID NO: 104498 - DNA, 870 bp, Heterodera glycines
tattttaatacatattttttcggaaatcggtaaaatgcgttattcatcgggttattcattctattgttgtttaagcttaattttcgatcacattttatggaaccataatttcaaaaattttcccttgttcatgttttcatattgccttctccaattcaagacaaatttgaaaaacgcagacaatttgaacctggcttcagtaaaagtgcagtatgactttgtctgataaattattagttagtaataacaatttttttaattttcatattttagtccttcacttatattaaaaatattaatggaaaaaattttattaatataaataaatgaatattaattagagtagagcgggaccgggaattttgggcaaaaccgggaccgggacttgccgggacctgagaagccgggaccgggacctcggttttttttcgggaccgggaaccgggaccaaccgggaatttttaaaaattcaaaaaaattcaaaaatttttaaaaaaattcaaatttaaattttttttcaactgaaaataataaattaaatttttattttgtttttttatttaataaaatccaaaagttaaagctaaatttaatttttcactcagacccccattcttaccagtgctcgtttttcccggttgccctaccgggaccgggacctgagcttttcaaaatccgggaccgggacctctgaggaccgggaattcccggcccggtcccggcgcactctaatttaaaccccttaataaatcaaatttaaaacaattgttccaggtttacgactgcaaaagaagcgacacattgacaggggtgccataaaaataaaaaattttttttttccaaaatttcttgtccccaggcctatcgatg

SEQ ID NO: 104499 - DNA, 264 bp, Heterodera glycines
aaaaaaatcacgaccactctgaaaaaacagcagaccactgggtgccctgttgtaaattcaatcataattttttaaatctaagaattttttatggatatatgtttataaaattgccaatttttttttcatcatcgcaacgtggcttttcgattgacagcagaatatcattggcccaataatattttgcatttgctaaatttttcccatttttcatttcttaaaaaaatatccaacaaaaattattttattatgatatgaaaaatg

SEQ ID NO: 104500 - DNA, 114 bp, Heterodera glycines
aattggacactttcaacgggtgtgctgattgttgtcgcgctgagcctggagcgttatatgtctgtcgtttttccgctgcattttcgcacatggaattcgccccagcgagcaatg

SEQ ID NO: 104501 - DNA, 405 bp, Heterodera glycines
tcactaaaagtttaaataaatataagcaatatttatttaaataaatataagcaatatttatttaaataaatataagcaatatttattgttaaatagaaaatttcggtgtttctaagataatattctcggtccctgaaagctgaaaaaccgattggctttcaaactcgcaaatttgaagccaaatgttgagtccaatctccatgcaaaaatataaggggtcaacaatgaatgtgcggagggggaaataacaaaaacataatgcacacatattcaaatggtgtctcccgaacacaaacatttaggcctttttgtggtgaacggacaaagtgtagacaggcatgacaaaatgtccatatctcttgaaaatacaacttttatataaatctttttttacaggcaacaatg

SEQ ID NO: 104502 - DNA, 618 bp, Heterodera glycines
gattaaaagtgtttatattatattagtggcatttcctttctttagtgaatgtttttacattttttagaacaaataaagtgtgtgaaatggcagttaacgcaccttttttgagccaaaagttacaaccgatcaaaattggcattttataagagttgggctagggaagttttgccagaaattttccgtttatttttaattaaaaatatttttttatttaaattattcccatcgcatctttgttctttctttacaccattcatctgctgaatgaaagccacgattttctgctgacattaaaaatattgattctgtctgtcactccgcagcatttcaatcagggctgtgcgaaaatcacaaaaaaactttttcgtatacgaaaacgaaacgaaaaagtgcattcgatacgaaaacgaaacacgaaacgaaaaaaaatattttgaaaaccgaaaacgaaacacgaaacgaaaaaattttgacggacgaaaacgaaacacgaaaacgaaaaaataaccattttcgtacgaaacgaaacgaaaaaaccgaaaattttttgaacttatttcaatcataattaagaaacataaaactttaaaattgtatcctctaactgaaggaatg

SEQ ID NO: 104503 - DNA, 721 bp, Heterodera glycines
tttttttgtcccatttttctcatcgcattatcgggccgggccggggggaagttcgggagtgcccgaagcagcggcaaattcgagcagttcggtctcccaccagtcggagcagccgaagagacgggtgtgaactcccgtcgtcgtcaagtccgagcagggtagtgagggaaggaagagccgggcggtgccaaatcgtccaacgaaggacagggccgttcgtcagcgcaactcccaccagccggagaagcgcgcagtgggcgggagtcgaaacccgtgatcgtcgagtcgagaacgaagcagcagttcaaaggggtccgacaagcccttctccaaaccttgtcggtggtgccgttaagcaagcagcaaatcgctgcacaattccatcaagcaccagtccattttgtcacccctccccctcccattctcgtccccatttggcgccgataggatcggtcggcagcatcagacccatcagagctaacggcaaaagggggcgcaattccctttacggcatcgcgagcggagtgaacagaaagagaagggacgagagcggtgcagaggagcgggaaccaatcccgcctcagcttggcccaccccaacccccaagcgcgtggcgcaatccgggactctcgctactcgaattgcggaggctcgagaagtgatcgaccaagaccttaccgaaggggaggcagcgtaccaagcggcgcgacttttggccatg

SEQ ID NO: 104504 - DNA, 69 bp, Heterodera glycines
atttacgtgttaatacacggtcatgagttacgtgttaattcacgatcatgatttacgtgttaatacatg

SEQ ID NO: 104505 - DNA, 561 bp, Heterodera glycines
tttggccgccgcggtgcacaacgaggatgaatggttgcgcacccagcgcaaattgggcaagttttggccaaacttttatatacactggtcagggccaagaacgaatctggcatccattacgaccaaatgccgaatccatagcccgaatttgaacaaaaaggtttcgaagtcttttaaacttttcgttcaaaactcgggttaaggactcgccattgagaccaaatttaagtcagataggtattcacgattagctctcatttataatatttattccctaccccaatttttattgaaataattttgaaacttttttttttgaacgatggatttttgctagtccctttttgttgaatttgccattttcccagttgccgaagctgctgcacttcggcgccaacgtgagcaggtggtgtgctgtgcgtcggtgggcgcttcctacgcatttttggcactttctgttgcactcagtttatccgtggtcagtaaaaaagcaaacaactttttttttaaactttaatttagattttttcctaaaaatttctcaaatatttaggctaaatg

SEQ ID NO: 104506 - DNA, 1003 bp, Heterodera glycines
tatttaaataaacatttattgattgacttattgatattggaaaaaagccacttccagaaaaatgatccgaacaatgagacaagaattatgatctaataaaataattaaaattcataaattaattatttttaaactgcaataaattattttacaaattcgaaattaacaaaaggtatattaaatacatatttaaatagttattattaataaataaactttatataaaagtttatttttttaatttatcataaatttttgctttataaaatcttaattgtatgcaaataacgagctttaaattttatgacatagacattaaaattgatcatagcaatgcataaaagacaattgtttaacaaaaattcaacatttttctcttagccaacattgttttaataaatatcaacactggcgttgatatttatttaatatcaacatacattaagccatcaacgtaatataaatgctatttttaaaaattcgataatttttaaaatgttaagcaattttttaatgacttttggcggaaaaataaaatgtggagagagatagaaaagtgagagagtgctgaatttcagtcccagtcatacaaaagcatttttgtgaagaagaaccagggattcttttttatgtaatacatgtttttttcctggatttgccttttttgcaattttggtgccttttttcatgcctttttcagcattttaggaaaaaaatagaaaattttaaaattttttgcaatttttcttatcatatttcactgcaatttccaaaaaaatttttcccagcggcaataaattgcaaaaattcaaattagaaaaatatttttattaaattgtaagagcaagagaattatcaatctttagaaaaaaaacaattaaagcaaacacaattcctaagacgaatcagtttttttgttgatgaattgatgttttcaataagttgttcaataaaaaattcgataaatcaaaataataattactttttcagaatctaaaaaatg

SEQ ID NO: 104507 - DNA, 213 bp, Heterodera glycines
agtgagtacatttacaattgaattgggataaagcacatggagagaacttcaaaaaggaacgccagtagctcaacaggtttaagtgatagattacggtataaacgccataatgaccacaggagaaacttagctatttgttttaaaaattggcggaattaatgttcatataagccatcgaattgatggtggattctagttacagtttacctcatg

SEQ ID NO: 104508 - DNA, 113 bp, Heterodera glycines
tactgtaccaatcatggcaaagggtgtttacagtaacgcgcagttttgatccaatcactactgtaacaccgttatctgcccatttcctggattctgtacattttcacgcgatg

SEQ ID NO: 104509 - DNA, 589 bp, Heterodera glycines
tactgaaaatgtgaggaaaataaattaaaagggcggaaaaaataggaaaagcaattaaattcacgaactaatcgggaaatcgaggtcaacaattaggtatttattacctattcacgtttaaacggccaaaacaactctttataaaagaagaaacgaaaacaaaaagcatttggaattttggaggggaaaaggaaaagaaagcaatgcacaatttggaaacgaaaagccaaagtgcgagtgccaaattgcacaaattacgaattacctgttttttgtcggcgtacgccgcacaaaacgcgacggatcgaatttcgttgttgtgtctcgtcatgttcactttttgtttgcctttcctccacgcgccgatcgcacgtgcttttttcgctccctgtttctgttctccctttgcctttgctctctctttttgttccaatatttcgttcaattcgttcgttccgttgttttttcagcccatttctcattacacctttttttattcgtaaattactactaccaaagaggtattttaatttcaaaatgattgcctcaacagtccattcatccgtataatttgatttaatagaaaatg

SEQ ID NO: 104510 - DNA, 292 bp, Heterodera glycines
atggctattctaactcaaagagagagagacggacgttgcgtttcaaattgagtgtggggagaaaaaaggatcagatgatccaacaaactccaaagacgttggccgtttttaagtaccaacaaaaggattagtctcattctttttaacaatgtctttcttggtcttccctgagaatgatgcatttttatcctaatattcaaaacactttagcctatggaggtgtatgtcgatgatgaggctaagctcacgcttcacggacttcaacagtattatgtgaggctgaaggaaaatg

SEQ ID NO: 104511 - DNA, 610 bp, Heterodera glycines
aattgtctattttttttaatttaccaactttttcaatttttgggattttcctttttggataaagataattgaaaaataaagcgtaattaaattcaatccaatattatgtaggaaattaaaaatggaatgaaaaattaatgaaaattagaaaggaagaattttgaaaatataatttttgaaattatttttaaactacatttttgtccacaatattttatcatccctaattataccatagcaacgtataacgattaatattttttaaataaaaattgttttaaaaaattagtgaaattcacatgaataaaataaaaaaaatacaataaatttttgtaaaatcaatatacttaataagaaaaacgaagaaaaatgcaaaataatgcatattatgattgcgaaaataagcagaaaaaaataatattgtaaacaatattattatatatatattttattatctattaaatattattaaaagttaataaaatgcttgtgcgcttattaatggtactaattttaatggtgtcattaagcacatcgactaccaaaagtttccaaattggtgaataataatattaaaaaaataaataaacgtattatatttttagcaatg

SEQ ID NO: 104512 - DNA, 178 bp, Heterodera glycines
  unsure (1)..(178): unsure at all n locations
gcattcgggatttggggcgattcaaatgtcgggttatgggaatcggggatttgggcggcaactctaaagagaattattaaattaaaatntatttttaattttagctctcattaaaagttcgaacaaaaattttacggcaaaaacaacaaaacatttgttaacaacatcagcaaaaatg

SEQ ID NO: 104513 - DNA, 81 bp, Heterodera glycines
ttcgaatttttgcaattttcatgtataacttggtaattgtcaaatcgcgaagcaatatcttagaaaaagcttctaaacatg

SEQ ID NO: 104514 - DNA, 757 bp, Heterodera glycines
ggaccaacaaaatcaattgatcagacaaattagccccaataatattaattgttaattaccaaaaatggaaaaataggaaataaaaagtcacaagggagacgggctaatccacaggcaatcctcagaggaataggatttaatccgttcattaaatttaaaacattttcatcctaagacaattatttgtggatccgtttttcgtttgtttcatttcaaaaattgggaagtttgttcattttttcaacaccctagaatattataaataaaaaagattcattatgaatctgatcatgattaggtccgatctctttcaattgaactgaatccccttttaccaactaaaaaatatgcataaatttcattgattttattgtacgtatagttttgtatatcaatgatttaaatttttgatgttgattatttgataacaaataaaattgatttgaatatataaattataatttgaatttcatcaatgagctgtaagtgaaaaaacgtcctcatggattttgcgatgaccgagaattttggaaatttataatacaataaaaaataataatttttgattaaaaacaaaattatttgttctaagaaacagaaagaaatgaattaatttatcttaaaattatagattttatcatattttcctagtctcttacaatatgaaattaattattttttcatatttttaaataattaaataatattgaattaaataaatttttgccaattcttaaaatacaaaactaagacaatg

SEQ ID NO: 104515 - DNA, 283 bp, Heterodera glycines
agtgagttggcggcactaatgttttatgccaaattggcactaacgtttacaccaaaaatgaaattttgggagtctttaaggaaacaatacaattctggtggagcagctcgttccaccccaattttccaaggaattcctctaatatattttttaatttcatacaatttttccaaaaaaaaaaaaaaaaaatcggagggcggggggaaaatgtctacactcttgcaatgctatgcacaattgtaacggaatttaaacaaatttttctagaaacattgaggagatg

SEQ ID NO: 104516 - DNA, 1003 bp, Heterodera glycines
attttcttaatttttccgctcattttgtcacttaattaggtaattaggtgggctgactgattcttcattattctttcattatgctaacaattagtgatatttaatcgagacaaagcaataaatgcttcccaatttctcttccgcgaccatataaaaataaattagcattagtgtatttattgctttgtgttccatgtccgccgcgcctaattactctaattaccctcccccctcccctgcggcgattgttttgtgactgacgaataaaaataaaaataaattcaaaaataaattgagttccactttctcaaaaatgtggtttctttcatattcattttatttaatttcctgctttcctgtacatttcattgtgtgttcattttcttaattttccgcccattttgtcacttcattagttaattaggtgcactaattggtcattgttcatcattaagaagtgcctcaattagtgctgctgctatttacctcttgacaaagcattctgtccaaaaattaatttgatgccttttctcagcgccagcaattaatcatttcggtaattgacccgtgttactctgcccacttatgttcttatgtgtaaccccgtataaatacacatgtccaaaaaagaagtttcacttatgctatgaaccattgaatttttctttttttctttttcaaataataacaaaaaaaattttttttacaaattttacaagaaaaatttttatttccaacataaagttgaaaagctcattttgtttaagatttgccaatctaaaattagtcttaagttttgtatttattttttcattgccattgcgagtgtttccttaattaaaatgaaagaatttgacactatatgtaaataaatttgcaaaaaaaatattattttttattttaaaaattcattgtttttcaaattgccatagtttgtctatttttataactttaaaatataaattatatttatattataatttcagttaaaaagctaaaaatg

SEQ ID NO: 104517 - DNA, 865 bp, Heterodera glycines
tttgccgcgacgacggcatgtcggcacattcaaaagccgaagaagcagcagcagcaacaacaacggcatgaactccagaagcagtattagacggaggcggacgaggagcaaacaacaacaatttcgacacagcggcgctcggctgatcacatcggctgctactgctgatcagaattacaatgctttttcgcgaaatatttatgatagatgaaaacttttaaatttattattgtttgtgcatttaatttagtttttcttgccgttattttttgtttgtttgtttttcatataaaattagttttaagtatttgaattttattttcatcaggaccgattctccaggctatgaagaataacgaaaaaaaacaagaaattcccaagaatgttgattgcataaaacggataacaaaattccgacctttactttatttaagtgcatgcatagacacagcggcccaattttgggctctcagtgcaaataggtttattatttatttagtaatcagaacgccaaaactttgcaaaacttaaaattttttggggattttcccttgtaaaaataaaagagccgatctcgagttaaaaactagacagctaaaaaataaatgagttggagaggcgcgtcgacgaatttaaatcttttttgtctgcccaggagcggatgcgcgggtttctctcaaagaagcccaaagcacatcttttgttgagccattttgttcccttcgctcgcgagcacaaatttcttggccttttagatgaacagggttgtggtgaaaaatgttttctatcccattaatctggattttaaggtgatgaggcgctccattccgtttggcgccgacttgagcaactgtggaagtgtatg

SEQ ID NO: 104518 - DNA, 316 bp, Heterodera glycines
ggtgagtaaagttcataaaacgggggcgggggcattcgtggagggatggaacaaaaaaaggactgtcaacatttaaaaatggaaaatggcattttctgggaatgacgggggcgggagagatcggttaacggataagcgggtactgctccaccccgacctccattcgtccaccgcattcccccgctcccactcattcatttggacattttctaacggccaatctgcaccgctccccccccccccccattatttcatactcattttaaatgaaattttgaatttaatttttaaatttcagcacaaaattcacaaaatg

SEQ ID NO: 104519 - DNA, 590 bp, Heterodera glycines
taggggcgaaaaagtccaaaataggacccaaataggggcaaaaaattcgcgaaataggggcgaaaaagttccaaattttgggatataattttttaaattgcagttttttatatgaaaataatttcaaattaaggcaaacaattttattcactgattgcagttacatataagatatattttcgaaagttttttcatttcttatgggtctatttttgaaaaatttagtgtcgattcttaggggtatatttttctgaaaattttttggtcgattctttggggtatattttttcaaaattttttggatcgattcttaggggtgtatttttcgtttttattgcatttttgtatttttatccttggatatcatttgagcttctctcgccataactaagccgcaaaaaaaatatgtaaaaacataaaaatccggtctctattgatgatatatggaactgcgtttttcatgcttattatcaacttcttacttttgattttttttaattgtagtaaagttttccaaaatactgttttttgtcggccaattgctgatttttaaattttcatctaatcagcagaaaatatttgtaaagatg

SEQ ID NO: 104520 - DNA, 620 bp, Heterodera glycines
aaaaaaggaaaaaaatttgcagtcaaaaaattattcgaatttctccaaatttgtttccatatttccgaaagttattcggtatcataatgccaaaacaaaacgaaatcgtttaaaatattcctttctggacttgacttggtttcttgatatcgaagctgttttctacgctatttctaaaacggttataccaaaccccagatttttgaatccggttttcagaaaaaatgccttgtggtgaaaacaatatttcacatttcactccataactttgtgagttcggcacggatcgagaccgggataagaccattggaaagagcagctcgagctctacaagaaggtatggaaagaaaaaatagttatttctgggactttttcagaaatcagaattaattctccaatgtggcccaaattttaggcccccagccacagccccttgcttctcccagttttaagtcttggatttgtcaaataaattcaagacttcaaattaataatcaaaaattctcttaaaatttttttgaacccaattcaaaaaaggaaaaaaatttgcagtcaaaaaattattcgaatttctccaattttgtttccataatttccgaaagttattcggtatcataatg

SEQ ID NO: 104521 - DNA, 908 bp, Heterodera glycines
gttttcttgagtgtaaaatgctctaaatttcagtgaaaattttgttaaaaatggtcaacatttctatttttcctccggcggcgtctatcggcaccgccgggccttccaaaacttattctttcataaaaattgaccaaaaattgtcatattttgaataaatttttcaaaatgctgattttttgtccgccaaatgctgattttgaaaattttcagttggcagccctggtttttccgctaataaaatattgttttaagtcgatttttcatatttttattgcgtttccttcacgctactattagttttagaaaaatcttatttttggggtccgaattttagtttttgagccattttgtcttattttgaaaaaaaaaacatggaaactctgttttatttacctgctgaattttcctctaaccctccccctgcggtctaaatttttttgttgtgtatcgattatttttaatgctttcgatgtgaactgtctgacttctcgctgtctccactcctacacaaacacaaaaacaaaacgaaacaaatattcataaaacaaatattgctgataatttcgcaacttttaaaaaaatcattgttttgtttttcatttttttgaccggcaccaccggggaaaaaactcataaaaatagagggaaaaattggcatagatccataaatttggcaaatacctttttaaacaatatggaagtttcagcaaatttttggccaacgatttttcaaaatttgaaaaggctttcaaaaaatatgtatcaaaaattatggtaaaactaaaattcgtttttttaaatttatatttttatcccttttataaatgcgcctcatttcagagctaattaccgaagacaaaaattttgatcaaatttccgagtgcaatttttttttatataaaatg

SEQ ID NO: 104522 - DNA, 188 bp, Heterodera glycines
  unsure (1)..(188): unsure at all n locations
taaattttttatagatttttaaatgtttgattttttttggcttaccaaaacttcatcgancctggttctttctattctctttcaaatcgccccaaatttttttacagcttaactaggccctattaagcttatttccagaaaatctcgcatgaattctcatttttaaattttttatagatttttaaatg

SEQ ID NO: 104523 - DNA, 1003 bp, Heterodera glycines
tatattttcttcttttagacatataaatttaaatttattttcattttattattattttttgttcttctgacgatttttatattgctgaaatcttaaaaagtttatttattttttctcatatatttaaattattaaaaattcgaaatattactcaatttttttatataatcctgggcaggattatttaaattttctcatttcgtttaattataataaaaaggaacaccaaaacattttttagataaaattatttaattaataaattttccttcatcaaatacatgctataataatataatttttttgttcaaaatataagaaattttattttacatctgaaactgtcatttcctaactatattttaaagtttacgtatataattatttttaattttctaacaattaattttaaatgtttatgatccttttgattaactttttactattttgttctaaggccataaatattatttttaagtaggaaatatgtaactaaaagcgcgagttattaaaattttaatttctcaattttcgtaattatatgtaaatatgaattcatttttgtataaaaaatttaataactttaaaaaaataaaatattttttttattatttcatttctttttttaatagatattaattatatcatattttcattatatctttgattaatggttgaaaataaattgtatttatttattatttaatcaattttattttccatttcgaaatatacatattttaattttgagtaaagaattatttcatttaattttcttgtaaaaatttattctcataaatgcatttttattcaagtaggtaattagtttataatttgttgctttatcgtgacgtctttctaaataataattttgctcaattttaatctattactacttaagataaaaaattatagtattcgatttttgaaacattgtttttttattttattatgtaattaacttcataaaaaagtgaatatttttattttttagattataatg

SEQ ID NO: 104524 - DNA, 116 bp, Heterodera glycines
taattaatttaatacttaattttaaaataacaaagtatgggttcgaaaacttcaaaaaaaccaaaaattaatttctccttagtgatgggtccctatttccttgtttcagggtcatg

SEQ ID NO: 104525 - DNA, 236 bp, Heterodera glycines
gatgagaaggggagcaattaaaaatattattgcactaattagtatgcaatattactttcaagaaaaaacactcatttaacatatttaaatatgaaacccaagttattttttgatttatttacatattctcctcgtcagagtgtgacaatgaaagatggcagatcgttgatgagcgcttctcatgaagatgacattcctccggatgttcccacgtgcggcttcgatggcaacggatg

SEQ ID NO: 104526 - DNA, 240 bp, Heterodera glycines
taacggaccccgaaaattgagctttcttgaattcgaacagaaaaatcagccggcccctcaagaagcaattattagcataatcaaattatatttcctaaatcatcccaaaagtcctcaagaaaatctcattaattttccctaccttttttttgccgcaccgctcactattaagcattgtcccaaccaattaacaatttcctaccccccttcaggtagaaagctttgcaaaaaaaaaaaatg

SEQ ID NO: 104527 - DNA, 235 bp, Heterodera glycines
tacgtaagtctttttcgtgtcaattgtccatttattagtttcgttattagctgcggacgaaaaaaggcaatgcttttgaaagtgagattaccaaaattggacatttcggcgataaatgcgcgagggaaaatggcagaattgcgcggcatttcgatcgatttggacatcagcaagggcgggtggtgagcatcttatattggtcgactaatagtgccttcttgatataagggacatg

SEQ ID NO: 104528 - DNA, 60 bp, Heterodera glycines
agtttataaatttatttttaaatgctttcaagttttagtgatgtttatctcggggaaatg

SEQ ID NO: 104529 - DNA, 737 bp, Heterodera glycines
aacaattttactattcttttgaaaattaagtaatttttcttaaatataaaagaaaactcagaaaaatgctaggggtcttttcttacagattttttatgttttgatttaaaaaaattaaatctctcggcgggacagcgtgcaccccaatcacgccgccgaaatcacgccgctcaattttttaaaaatttttcaaacagaaaattttttatacgaaaatgtcaagaaaaaaaatttaaaaattttctgcgattttttttggaattttatgataaattactaaaatttttttcagaaaatttgccaatttttttttaaattttcgtataaaaaaatttctaagaattttttctagaaaaaattccaggttcgaaaatttttttaaacatttctagtgacgtgatttcggcggcgggattttgtcctgttcctgaaaaacatttgggggaaggaaattatctgttctgcttcataagcgcagcaggtcctcccccccccccctttcacgaaagaaaaaaataaatgtacagtaaatttcaagaaaaaatcgaattattttcagcgatttttagaaaaaattttttgaattttttctaaaaattatcttcttttttttttgaaattctgttatttacggcttcatcccttccgattttctcaaggtgaaaattccactggacgaaagcaacattttatgcttcaacaatgccccgtttgaagcactttgtctgatcaaaatg

SEQ ID NO: 104530 - DNA, 94 bp, Heterodera glycines
aggttgctcacaagctccttcgctgtaaccgcttcgggttacatcaccgaccatgttcgcccgttccgccggggcaccatttccttcacacatg

SEQ ID NO: 104531 - DNA, 252 bp, Heterodera glycines
  unsure (1)..(252): unsure at all n locations
tttataatgaatgctcancctcttttnntattatcgagtcaaaattcggacttcagcagcacgcncaataatggtctgttttgttcaggttattattacatgagtgttggaggcgagcggaaggacggctccgcgggcgttgtgctgttgtacagaaacgaaagtaaagagcgggaccgactcgacaatgactgggcttatcaggtggcggagggggggaggagtggaaatagaggaaaagcattgaaaatg

SEQ ID NO: 104532 - DNA, 1003 bp, Heterodera glycines
tattctttttgcagcatggaattattggacaaaagaagaacaacaagacgaatttgatgattttccagaatacccaccgccttattaatgaaataaattttttgttgaaatgtgtcatgaaaaactttgtttaattcatgcacattttttcagctttaacatttccatttcaaatatcaaagcttttaacattgaaaagtgttcgactcatccttttttgctgatgtgaaagaactagggcgtattccagcaccaaaggggaaatttagtgagaagaaaaatgaaacacaatttatcaaaatatttaggtatattttatgcacttgagttcgctaagctttatcaaacggtttgacgtgaaaaccgacatattatgaaaacagggaaaaacaacacgaattgggatggtttaaaatctgttactcaatttttcgccgtcaaaaatttttgtgtaagctgtgaggtgacattttgaccaaagaccgtcaccaaatggaatgtagggagcgctgcaaaaagtgttgccggatggggttcgggttcccctgtttggatgtttgtgaggcgatacactgtggagaatgcaatcggaatttctacaacaatgattgtttcgagtctcacaaaaagacagcttgtagggagtacaagaaatgcaacaaatgtggggaaacacacaatacgcgaaacaaacacacgtgcggggagaaattctgtagaatttgcaaagtctatcatccgggtcggcaatgtttcattaaaaaaatcaaactccgacagaagaaagcataccgaattgtggcttatgacctcgagacgacggttgaagggggcgaacacaaaccaaatcttgttagtgccgcgcacacagaaattaaccagaaagaaaatatcgaaaaaataattggattcgttttgattttagtcatttttcgttttagtttttttgtttctgtgccgctatagtaagagaatgccaccgtgtcttttttagctaacaatg

SEQ ID NO: 104533 - DNA, 112 bp, Heterodera glycines
atcatcactcaatgctgcggcggtggacagaaggtagcgatgcttctgtcgtgactgattttttaaaataatttccctttttcattttcagaacacggaagagccgcaaatg

SEQ ID NO: 104534 - DNA, 106 bp, Heterodera glycines
gaaactcatccaacactgacaataatcaatgatcggaaatcaattcctctcttttccctcataggtttcggcacagaatggcgcgccaccgctgatgcccgccatg

SEQ ID NO: 104535 - DNA, 414 bp, Heterodera glycines
  unsure (1)..(414): unsure at all n locations
ctttgcagcacgagtgagacggtcaccagactcaccgacgcaaatgtgagacagagttttgatctttaatctctcatgggtttcncaactcttctccttttttccgcagcttgttcggctttagtcattcttgcgaatagtcaagcgatctctaagtgtaacaaaaggaaatgcttaaagaaccaaaaggaaagttaaaacaaaagatggaaaccactttccaactgaaaaattaataaaaaataaaaatttggcaaaatgttcattccaaaataaaacaaaaaaaaatatgtgtgttgtgctgttgagttgtgttttctgtggagcgtttgggagcgtttgtccatcatctattccaacattatctattgtcaaactttcgtttataattttttttaggtttttcgagaaatg

SEQ ID NO: 104536 - DNA, 156 bp, Heterodera glycines
  unsure (1)..(156): unsure at all n locations
tatgaatgttctntcatatccaaacaaaattattacttattatttccgttcataaatttgtcgagaaaaatgaattcatttgttatttaatatacgtaaatatttaaacatttctttatttttttattaattatttttttaataaaatattaaatg

SEQ ID NO: 104537 - DNA, 65 bp, Heterodera glycines
tgtgttgacgcttctactccaaccaaacccatcaaaaatggccaatttacattgactatgtgatg

SEQ ID NO: 104538 - DNA, 72 bp, Heterodera glycines
aagaacactgacaaatgaagcgaagagcggcggagcgcttctaaagaaaggcgaacggagaaattattaatg

SEQ ID NO: 104539 - DNA, 84 bp, Heterodera glycines
tctctgtaccggatccaccgagatatccggcacaaattcgcgcactacacgccaaagaagggcaaggagcggaaggaggggatg

SEQ ID NO: 104540 - DNA, 1003 bp, Heterodera glycines
aaaatattccctttttcattacaaataaaataaaattgaatttttattgttaaaaataactaagaaagaaatggtgtaatatgaattaattactgtaacttttctcggacttttgtaagaattttaatgacataaatccaaaagaaatccctctcaatcggtctcactgaatctgaatttcaagcctcagagtcgtttaaagataaacgaaaactaaattcaaattcatatttacgcaattttgctgaacaacttcccacagaaaaaaactttcaactaatttatttatcaaatatcattctcttgattatagcctttcaaatggtttaataatttcatgatgtaaaagtttcaaaaatttaataaacaatcaacttttgcaatttggctttatccatctctaagtgtcatacataggtatcagtgctaatgattgaattattttcattttccattaagaagcttttcttcttgacagagtgaaaaattaatttggaatttgcggctaagacaatttaatttacacatacctatttattaatgaaataaaaagccagagaaaaatttttcggtcgtacaaagtcctaataaatttaattaatagtaattcggagaatggagcatttgtgccgtccctttttcggcatcagttcgctcctaatcaaacaaatttaattattggacaacgaatatatgcaaagcatttggcgaaacacttcatttccaaggtgattaggtggggcgtgtattctcaatttcacgtaaaatgtggggtctttgctgtgttgtgatgctcctcgagaccgagcgagacagcaaaatcgagagattctcgacttaaggccggcctttgttttattgaacaccaaacttagatcataatttctcttgcctttgttcatctcattgttttcccgttgattatcttcagctgagacggcgaaactttgaacttcgactgttaagccgatcttcgcccgtccttgcttcagttcactcaatg

SEQ ID NO: 104541 - DNA, 875 bp, Heterodera glycines
ttctctccattaacttttttaccatcattaccaattcgttaaattttgcatataaatagagaaaattaaacttctgaatacttttccattttgtggctacacctcaaaaatttaaaaaaaggcaaacaaaaggatgtgcaaaaaaaatttttttttcatttatataaattaatttgcaaaaaaaaatattttctcatatatgaagaatcaacaaaatgtacaattcagatccacagaagcctacagtaccttggccttttttcgaaatgcttacagcaatcatactgtagattgattaagttgaaagtgagcgccgactcttcttggaaatttaactgaatctgaggttattagtaacttctccatgctctaaatagtaggaaaaacgatgattttttaagaaaatttttattaaatatccccaaaaaaatcccaaaatttcgcaattttttcgtacatattttcattttttttttgttacaaaaatttttttgaaaaattaaaaatttttttgaaaatgtatgcctaaaaataggttttttcaaataaaaaaataccaaaaattatttttaaaatattaaaatatgattctaagcctatttttgtacctatttcagcatttacgaagaattttttttacaaaaaataaccattaaaaaattttatttacatatttggtatatattttgaccacttgtacatatttttgatttccttagtattacataatcccttatgtttgattatttattcaaaatttcaaactgaaaattcacccgcttcggggttggaacttaagtttttgcgtgacggccctaccggattaatcctattaaatttcattcaatcacgcaaatcccgcaattctaaaaatg

SEQ ID NO: 104542 - DNA, 767 bp, Heterodera glycines
atcaaatttttaaaattgtgataataattgttaattccataatcaataaattgtgattagcatttaacctgtgataaaacaattctgttaattccttttttgagtaataaaatgttcatttcattaattattttaaattacggtatttaacaaaatttcaaactgtgtcctaaaaatataatcgatttaaattcaattgacttgtcaaatcaacccgatcagttaaatcagatcgagaatattgaaatattaccggaatttgaggaaccaataattatagagaacgaaaatcagaatatcgaaatctttgaacctaacgaaattgaacaaataacaaatcaagacgatttaatttttggaaatttctacggggctttaatcactgaaccattgtcaaattattttaccattaatcaagacaatattaccaaagtcaaaaaatttaaatttaatccttctaaatatatatttaaaattactattgctctcactgtgcatgtacacaaaaatttgtcacaccgtaatatagaaattttctgtcaaacaatttctgaagaagtaacaaatagcatactatcagactttttacacacaacagaacaaaccataattgactcaatcgaaacggaccaaagaaaaatcaaattaacaaaatttctcaagagaatagaaaatcgaatatctaagcagattaaaaaacagtggggtccatattgctatcatccaattcttgtactttcaactcataagtatattttttaaatatg

SEQ ID NO: 104543 - DNA, 1003 bp, Heterodera glycines
gggtttgctttgaatttgctccaaaaaatctcacaaaaaatgaatttttatgaatgatgtgttgtttctcttaactttgacctcgtcatcattattttcgtcatccttttcctcttcagccaggggccttatgctcgtctcgcggtttagagctaaaccacggttaacggcgttaaccgtggttaaaaatccttaaccggtatgctcgtccttccctttttaaccgtggttaaggataaaccacggttgagttaaccgtggtttactcccttcttaaccacggttaacgcaagttaaccgtggtttatttccaaccggtatgctcatctaaccgtagtttaatctttcttaaggaatcttaaccacaactcgagttgtggttaacgtaaatttatttaataatttaaatagtaaaataaataaataaattttttctagggtaattttacatgcagaaaaagaatctgacttttatttttgtctatgatataaattattgacggattagtgttatttcatcaaaaaatttgcacacgcccaaaccgctaaaatagctttttaaaaaaggtgacaaaatttaggtacaggccattttttgaaacaggtacaactacggttttgaatctggtaaatcattttctcagatttggccccaccatattaaaacatttgataaaacaaaacagatagaaggcctgatctaatatgttcaaaaattgtatttcatttaaatcgagtccgggcttcgcaattgtcaagatgaatacaatattcgtgattagcgactcagaaaactgacgaatacatattttcatttattcaaacatagacaaaatttaaaaacctgaccctggcgccaaaacgtgggcgccaaaacgttggcgccaaaacgaccttggcgccaaaacgtgggcgccaaaacgtcggcgccaaaacgaccccgaatcttcgctatttacaccttttttggggcgcgcaaatcgaaattccgaccccaaaaatg

SEQ ID NO: 104544 - DNA, 288 bp, Heterodera glycines
ggtcatttaatttaatttataaaaaaaatatccggcacgtaaaatattgaaaattacgattttttttaggtaatttttggtcttcgcaaaatgtcggcaaaaattcgtgccgaaatgaagcgcaatgggccaaatgcaattgacttaattgagccaataaatgtgctggtcggctcatcaataaaccttcttttgtatgggaattcattggaagaggcaaataaaaaaatattattttttaaattattaaatgtaattacattaattaattgttttcaggggaatatg

SEQ ID NO: 104545 - DNA, 87 bp, Heterodera glycines
  unsure (1)..(87): unsure at all n locations
ggggggggcaacgaanncggcggttttgttagtcatccaaacattttctgtacgggcagcgcatcgtttgtcgtgttgaaatgtatg

SEQ ID NO: 104546 - DNA, 191 bp, Heterodera glycines
tggcttcagatacgaaggggaattaaaatgattaaaatatgaattaattggacgacattttttggaatttttttaacatgtttaacaaaccagctctgaaaaatttgaagtagattatattttcccattttaggttattatcataaatttctaattttaaaaatcaattttttcagaaaccctaagaaatg

SEQ ID NO: 104547 - DNA, 271 bp, Heterodera glycines
ggctgtccacttcactccgacattattttttcggcttggtgcattaaaacatgttccatcggcatttgttgcccgaaaaagcagctgatttattgcatatttgccacataaatgtcgcatatctcctcctccattccactcatcccaatcactgctccttctgatcacttttctcatccatttgatgatcgctgttcctttaatttttgaatttcgttttgttcgttcatttgttccaaattgtcaattgatttcattcgctctcagaatg

SEQ ID NO: 104548 - DNA, 524 bp, Heterodera glycines
attgggatgggcaaagggcgaacagaaaaattgttccgagactccatgcaaacgaaatttttgaacaatttaagccggattcataggttcaaatcagcgaaacattgaaaaataaaaaataaataaaattaatccggtccgtcttttgcctcgggttttttgctcacctggttaatctgggcatatttattttgggaaaatattattgttcttactgtaatttgcacagttccatcgctaccgtaaaccgctggatgagcgacagctgaaccgttttattaacatccatcgtccatttttggtggtctacacagaggaattagcatcagcgaaaaatggagggaatgaagacaaatttgcaggaagacgtgcaaagcgcgacattcgcgcaacactgactgattacggtaggactactgtaggatttatgacaaaaatttaaaatcttttaaaatttcataatacaaaattataagacaaaaaaaaatttcatgctctttttagataactttcggcatcaaatg

SEQ ID NO: 104549 - DNA, 329 bp, Heterodera glycines
atattgtaaggattgggccagcggacgattaaactctttaaaacaagaggcatacagaacgaaagggaagggtttgggtgataagccaatagctgttgaacagaaaggtctagggttcgattccatctcaagtctaaaaatttttaaaaaattaaaaaccgatatttcttcctgggatttaaaaagcctttatcttgaaaaattactaaattattttatgattgaatttaccagattttaattttgtaaattaagattgttttaaaaggttttaaatttaaatgttatttttgttttttcttctaatttcacttattttttgaaaaatg

SEQ ID NO: 104550 - DNA, 231 bp, Heterodera glycines
atgttattttcctgaatttttcgttgaaaaaatatttttctccaattttttgaattttcggtgggaaaaaaataaacaaattaattgactcttaacacggagactgaacttgttaataaattatgattttttatttcccaaaaaagtgacgggtctgtatttttccccttaaattttacattttttacaattcgctttttttaaattgcccctcccctccctttgccaatg

SEQ ID NO: 104551 - DNA, 1003 bp, Heterodera glycines
aggtgcgaaaataggtattaaaaattggaaaaatcaagtatatttatgcaaaaaatcttatttaagtcccattcgttattcatttcgcccttacaattgcaagttatcaagaacaaaaattttggaaacgaatttttggggaaaattttcatttcttaggggaatattttctgaaattttggtcaatttttagggtatattttttgaaattttttagatcgattcttggggtgcatttttcgtttttattgcatgtttgctatgaaatttctggaaaaaggccaaaataggtgctaaaactcgaaaaatgccaaaataggtgctattgaccgaaaatccagttttaggtaattttaggtgctaaaaagtcgctctaaatcgaaaattgttcggagaaaatgctatttttgggcttctctcatcataacaaagccgcaaaaaaaataggtaaaaaacctaaaaatcccagctctataaataacccattgaatgtaaaaaaagcaatttttattaaataaatttaacattttcaatttatgttaaatttctgctagataatatagtttttccgggcttggaaaatataaatatatttattttgttcatcttactttgttaatatattttaattggtggaaaagatcaaaaaatatgtaatgaggagtgtcaattactaatgaaccttgttacgtaacaggtggttaacaactaattaagaacaagcaaaaaataaacaaaaccaaagcatttaatataaatgatattaattagttattaagttcgctcagcagcagataattattactaatcgttgcactaagaatgttgattaacatttaacattagtaattataaaacgaccgcgaacaggtgatcaagaaatgattgaatagagaatattttgcatataaaagaccctcaaatttgtctgtaaaaccattcagtttcaaatcgtattttaattccaaaaatcaacaaattcacctcccatttttacaaaatg

SEQ ID NO: 104552 - DNA, 357 bp, Heterodera glycines
ggtttcattttttaataatcaatatgcggtaatactggaaaaaataaattaaaattgtttcttttccaaaagtcgttaaaatatatttatgagggttttcggttcgctgatcacgaatctgacattaattttgaccaatttcgaatctctgatccagactcgaacaatagtcgaaattcaaaattctcacacataaaaacaagtttgaattttcgactttttgtcttagttcgggtcctggattcggaattggccaaaactaaggtcatattcgtgatcagcgatagaaaactcgaaaagaaaaattttaaatttatttttcgcaggggcaccaattctccagtattacctaatatg

SEQ ID NO: 104553 - DNA, 115 bp, Heterodera glycines
cgaaaagaatgtgccgtggataatcggcgtgtgcctttcttccgttgcgctcggctgtattgcgtacaaattgttgcagcaaaaaaactcccagaaagaacttctagacgaaatg

SEQ ID NO: 104554 - DNA, 108 bp, Heterodera glycines
taatgatgggggtttaaactttaaatcaatttaaggccttctaatgtgaacaatcatggcggcagcactggtgccgatccttccggtgctttgcagttggaacacatg

SEQ ID NO: 104555 - DNA, 371 bp, Heterodera glycines
ttttttcctcatccatacccaaaaatttttcggaaaaatgcgccaaaaaaaatgttaaaaatatgttttttattttaaatgcactgaatttaccaattgcttaaacccgggatgtcaattgattggactcataaagtgcattagagcccaaaaagcatattgagcatggaaaatcgaaaattaagcagtttctttttaggccttattaaaacagttgcatttcccgcttgtgtcacataaatcgcttgccaatttgataagatgagcgaatttgtgagcattgtgtgtggacaccctcgacgattgttgctcattggtgtcggagttggcgtttctgtgttcgctatccaagcattttggaggtgaaaatg

SEQ ID NO: 104556 - DNA, 185 bp, Heterodera glycines
aaagccattcaccattcgaacatcttttcgttacgcttttcccaccacacggagcgcatttactcggccggcaatgaccaccgaatgcacgtgcatgacatcaaaacgcgggaaagactgcgttcgtacagggccagctcaaccatttattacatagcgacccatgtaatttgaattaggcgatg

SEQ ID NO: 104557 - DNA, 431 bp, Heterodera glycines
ttcactccttagcccagtcgcctccgctcactctttcggccaatgcttcttcccccgccccttccgacttttcctccactctctcacgcctctccccccagtggggcccctggtccccctggtcaaattgcacttccacttgtggtttttccctccggcgaaggtttcgcttctgcgaattgtctcacgaatcgcaactgtcagagcagaaatgtgaagggattgcccaaatgacggcgatgtgcgacacgcctttttcttgtccgaatggtgccaacagaagccaaaattgaaacactgacaaagaaacgaactaacaaagcacagatactgcggtgacggacggacgatggtcggaatggggcgaatggtcgaacaattgcgaatgggacacctgtaaagagagtgagccgaaggaaggcgacggaatg

SEQ ID NO: 104558 - DNA, 849 bp, Heterodera glycines
ttcctaacttgattacattttctatgcttttaaattagatggttgcaattcatagccaattaaaaatatttttattttttaactctttaagttggtgcccaaacttcccggtgcccaaatttctggtgcccaaacttcccggtgcctccgccccccaattaatgagggggaagggagtgataaacaaagtgctgccgacaggtcaaaaaaaaacggaaccaaaatttcttgaaatttttgcgaatttttaaaaggaatttaaatacaattttattataaaaataggtaatagaaataaaaaatattttggcgctactgtaaaggttaccgattttgaaacaaaaggggggacccttttgttttgcaaaattttttaagataaaaaaccacggactgggacagtttagtctggccggtttagtctgaaccaagtttagagcatcataactcttttctttgttgaccaaatccaacaatattggtatcattcgacagctcttaacaagctctatcggcttcccaaaaaccacaaggatataccgacatatgcaaaaattctgactttttggtagtattcatcttgcaacttttttataggtttttcaatcgcttagaaatagcttatcaaaagcttctaaacatatagggctttagaatgatgccaaatttataaaatttggccagctgagaaaaaagttatgatactttaaacttggctcagactataactgccagacttggtgtcccccacccttctttttcacctcctccccccccccccgttcagttgaacttttgtctgtgaatgacgaactcaacaccaccttcgaaaagtacgaccgatgcatg

SEQ ID NO: 104559 - DNA, 147 bp, Heterodera glycines
tttacggtcattagaccttcaaattaatatttgttagatattgatttatttaaaaaaataaattttaattttaaagcgaaatgtaaaaaaattgcccttcaatattttattttataataattcttgccaatttctcctgaaaaaatg

SEQ ID NO: 104560 - DNA, 58 bp, Heterodera glycines
ataaatataatttgtaaaagcataaaaaaatatataataaaaattaaattgcaaaatg

SEQ ID NO: 104561 - DNA, 1003 bp, Heterodera glycines
tctaccccctctctctcgcttctcttatttttatctctctctttctcttatttgtctctgtctcattcactcccatactttctctctcttttttcctgtttctctaatcatttctctctcctttactctccgctctttgttcctaactgtcttcatctctctctcttcttcactctttcttacaatacaacttatctctattatctctgttttttcaccatttcttccatccaaataaaaacaatcgcgtcaaaactttatttaaattttttgtttactttgtgacatacattacgaaaattaactgcataagtgacccaaaagtccttatttgttagcgaaatattcgtgagtacatcttataggtatgtcagcctttctggctgttttgttgttttcgatttttccaataatgaagaaatatgtgctcgctcataacacaaaaaagacgtaaacaacaaacagaaaagaaaaaaagactgaactattttccaaaaggaattcgtttcgataaattgtttacttttaaatgtattagttacagcacaaaattaatatatagattattcattttttgtcaaattgaattaggaaaattagaaaattcaatcttctgtttcgatgacataaattaagtattcctgaattgaattacatgtaccaaaatatcaaaaatttcgtcaatttggcctagattacatgttttaatcccaaaaaaacgagcagcaaccccgaaaatctattaactgtttttttttgaaaaatgcaaaaaatgtggggctaaacggaataagagccccctggcggcccgctaaaggcccgtccgggctctaattttaatggcttttcctttattgatttaacacagtttttaattttctttctcaaattgcatgttctgtttcaatttaattccttctttaacagatctttctcagatttttcacatgaaactgtaaatttttcaaaatttctattttttaaaatttcaattatcgacatg

SEQ ID NO: 104562 - DNA, 1003 bp, Heterodera glycines
ttttaatttttgagtttcgatttggggttcggaattgaactgattttaatgccgtgttcatgattaaaaatccatgagaaccaaaaaaaaccttggaaacttttgaaaggaaaacaaaatcaaacatttagttgaaaaattcgaccaaaatatggtactaccaattttttagttaaacttcaaattgcacagatgcataaattggattttttacgaaatttaaaataattttttttttcggttgtcggcactttgatgtaggccacgtgcgcttgactgccacgtgtggtatttgcctccgatgaccaaagaggtgggcaaaaaaattaaagaaatttttttcagcgattgatgtgtgttttttcgaaataggaatttcccccggtgggggtcgactggggccctggcgaatcggccatcgagtttggccaatcgggtgaagaaggcaatcgctgtgcggggcggactcgtcgacttggactgggacgggcagctgaagcggtacaaagtgccggcacggatggttgacgaacagcgggaaaggtggtgggtagaaaaaatttaataaaaaattttttcctcccagaaacttaaaaaaaaattcggagaaggtcgtttccatccgaaaaatttttaaaaaaatttcaaactagtattattattcaataaaaattttttgaaaaatcgctgaaaaaaatttcttcaaaaataccaagtttggaaaattttaaaaaaccatttcagtggaaaccatgcgtgggataatgaaccgggaagttttatttgaatttttttttctatgtttttcgattagattgttttcctacccccaggtactaccagaggtatcagcggtacacctccgacccgccttcctctgcctcatcggcgcccatccgcagcacaatgatggcggacggggacgaggaggagtacaaccacagccagcaggaccaccaccaccacaatcatcatcatcatcatcatttgggtgccaatgatg

SEQ ID NO: 104563 - DNA, 247 bp, Heterodera glycines
ctacaaaaccgccatcaaaaaaaacggagcctatgtcccgtcgtgccaaagtgtttcggggaatgccaaaatttgatttggttttaattttgtgttgcccctttaattatgcttaattaagtgtgaagacagcgagaatacagatgttaaggaccagtcgctcaaaaacaaaaaccatgatgtaataaataatcttcgtcttcaaataaattttggattttaaaatgtaaaaattaagaaaacgatg

SEQ ID NO: 104564 - DNA, 198 bp, Heterodera glycines
atatttaaataaaaatatgaaaaacgatgattgataatgtgataaattcaataaaaaaacgaaagataaaaagacaaataaataaataatggttttgttattatttacaaaatttaaatttcattttaagcactccatccgtttatttccttctcacccatttaatctcaaaaactgaattaatccaattttgtcatg

SEQ ID NO: 104565 - DNA, 803 bp, Heterodera glycines
attgcacttatgcatctgacaaacaacactaagacatgacaatcattgtttaagcatatgaaaaaaactatacgattttttgcctcgcgtccaattcagtcccattttattttaatgcctcatgaaatgaggctaggtaatatataaacaaacttcaaaagaaaaatattgtaataaatttttttttaaaaatcaacaatttaagcattaaaaaataaaatagaaatgagaaatttttataaaaaattaaaaaataagaatatataaaaataaaatcaattttcgatacaagagaactgattttttgcgattcttaaatttaaattgaaatttatccgtcggtgattagggatcgagatcaaattttaaattatgcaaaaatacccaaatattttaaaagttaaaaccagatccattcgccttaatataatattttttatataatcaccatactcaagtcccgagattacaagtgaaattgagtgcataaaaaagtatataaacattgttaattccccttattaacaagtatagatttagtaattaattagtgattaatttgtggttgacagctattagttggtgcagatttatcggtgattaaatgaaatgtgaatggatttgtgttggttatgtgtgaatagtgactggagtagaaatggaaggtacaaattgagggttaaatatggtacaaaatgagggggcgaggggcacaatcatatggaaaattgttagtaaataagagtgattaatcgttaaataagccaaaaattggcacaaataatggtgattaataaaaaatg

SEQ ID NO: 104566 - DNA, 588 bp, Heterodera glycines
atgtaacaaattgcaaattttcaaaaaaaaaattttcctcttgggtcctaacaccaccgccgctcatcccctctttgttccccaaattttttatttgaaaaagagcgccgcaaaaaatggtggtaaaattccgtgctgggacatttcgtaaaattcgccaccttcgggcgtttcgtaaaattcgacatttttgcaatttttacaattaaatatctaatctgttcacatttattccgattgatttattcaattaataaaattattttcactttaaaaataacaagaaatatcttattaaaaatgttgccaagaagatcaatgccgattcggtcgtcaattacttatgtagtaattaatgagttaattttgttaattttatagtatgaactatggccccgaacaccaaaatttaatatattaattgattttttagttattgattaaaaaattctctactttttaaaaaacttatttaattctggtcagcactttggaacaaaagaataaatatctaaatctgcatcaagttaataattgttttaaattaatggaaaaaaaacaattttacacttttacagcctacacatg

SEQ ID NO: 104567 - DNA, 1003 bp, Heterodera glycines
aagagatattaactcaaattgtggcagttaggtatgcctccgaaataattttggtgcgtagttttagtaattctacgcgccaaatgttgatttaaaaaaaaaaaaattttaaactttgaccccaaaatggaaaagtacccaagcaaacattccatgatttgatccgctttttctttttcttcttccgctggtggcgacaatggcataaaattaagtgcaatttgaattgagtatatcattttttacactcacccaatccaattattgtcataaagcacaaaatagactttgttcaaattggcatccaaattttcgcccttttcccatttaactgccccttttcaatgcaaaattcattctgtagctgactgaagcggtgcatggataaacttctaaacaaaaggaaacgcaaattaaaggcattaaatcagccagtcatttaggctctattgcatgcagtttacgcatcttaacgatttatgcatccaaaataaaaagtttacgcttctaaatcaatgcaagggcctcgctccctattctgggcaaaaataaattgtccaaaaacgaatcatccttttaccagaaaattttcggctcgaatcagaatggcaacaaaatgattttgtcccacaaaaatttttcacgctgatcacgaattccggcatccatttcgacccatttcaaactccgagcccgaattcgaacaaaaagtcaaagactcaatttccaactaaattcactttgttggacaaattagaattaccccaactaataaacggctccaaatcgtattaagatacacatgactaatttgtaacaaattgcgcaacggattaggcgtttgcgagaggcattttatgccgaattgcgccttgttgtgcttggcgcagataacagggcccggacctgtctccacggagccgggcacatcggcaaagcccacttcgacccggattttccggacgaattcatccctgtactatttgggcttaatacaattatg

SEQ ID NO: 104568 - DNA, 67 bp, Heterodera glycines
gtacggaaaattgtaaaattaatattaatcggatttattttaaaaaagttcagtttctcaaccgatg

SEQ ID NO: 104569 - DNA, 314 bp, Heterodera glycines
  unsure (1)..(314): unsure at all n locations
aattntcggttaaatcttcgtaactttttgaaaaaaacttgagtgagggggagaggaatttgaggaattctctcatctctccaaaatgaaaaaatgaacatttctaaaattaaaaaaatggaaaattgttcccgacgatgtcccaaattccttaaaatttattattttttcgtcaaaatttgatgcaaagcccattcaaaaagcggttttttttcctttcgctaaaattccatttttttgggccacaaattttcttaattttttttttcaaaaatgactcaaaagtcgccttttcaaaactttatgaatacatg

SEQ ID NO: 104570 - DNA, 208 bp, Heterodera glycines
attaacttaagggtttttaaactcaaaattgtattcccaatttctgttctttttaccaaacttttcacgtaaatgcaattctttactttttcaaaaacgagttcagttttccaatctacattggtggggcaacactattgtcacttcacgactttggattggccgactgccgcccaactgtggcgagcagtatttgatgagcaaaatg

SEQ ID NO: 104571 - DNA, 104 bp, Heterodera glycines
agtgagtgacgacgataaaacagagaaaaaacgacaagccatcggacagtctatgaaatgctaattgtaaatgattccgcacccattttcaggctgttcacatg

SEQ ID NO: 104572 - DNA, 109 bp, Heterodera glycines
aatcacttacaaaaacacaaaaataaaaaatttttggcactaatattttaatgttttagaaaatagattgctttttgcaaaaagaaaaatctgttaatttcagcagatg

SEQ ID NO: 104573 - DNA, 92 bp, Heterodera glycines
ttttcaggtcacgtcacttatttgtgggaattgtaagtgctgttaaaataattaaatctctttttaaatttgtatattttttgaaacgaatg

SEQ ID NO: 104574 - DNA, 603 bp, Heterodera glycines
atcacataaaaattttgcaaagcaaaagggtccccccttttgaaaaaattttcaaaactggtcacttttaatatagcgccaaatgcgtccttagtttgttcccaattttgttatttttgttaaatttttgaatttttatatcgctgacaaattattaaagaaggtaccagcctcaggaaataaaaaaacaaaaaaagtaaagaaaattttcgaattcgggttcgggattcgaaaaatggatgtttggaacatatccgaccaatttcagtcgtaaacaggcactcacgcgaaaacgaccacgcgaaacgtcctggcccgcttaaatctcaccaaatcattggcattttatcggtactcaaatgtacgctaatattttagtataaaattgccattttttctccttttcggtaatttcaaagtttttaatgtgaaattactgtttttcacttttcatgtaccttctctaaattttgtgttctttttgcgctctctcatttttcctaattgtctatgctttaagttaacacagtttttttgccctttgtgacacacaaattaaattgaaaaaattggtgagacctgtgctgattgaaccacaaaatg

SEQ ID NO: 104575 - DNA, 1003 bp, Heterodera glycines
tatttattttataaaatctaaaagttaaagctaaattaaattaatgaaatttttaaacgaatttacttcagttatttcaaacaattaatcattttggactaaatgatcgaataatcttagaaatccagaattgcttttcacataatttttcggcgcgttttttccaaaaaactttttgggaagaaaggggtccggcggtgcagttaggcgccgccggggaaaaattttgaaaatttgagtgagatttgtttacgaatttcaacaaaaaggctggttttttggactactgggctcaatttgtatggattttctttaaaaaaattataaaatatgcgcaattaaaaaaaagtatgaggaagcatagcttgtcgatatgtaggaacccatgaacaaaaagaaaatcaaaatatttgaatttctgcagagtgattgaaccaagggaaagaagtagaaaatcaagaggattccatattcgtgatcattgatcagcgacctcggaaacccccggcggatacttgttttctgaactttttaaaccaaaaaaagaatttgaaaaaatgttgaccaaaaatgtggatacaaactcctgtagtaccatttttataattagagaacaaagcggaaaacaatgaaaacaaaatttgagaagctcgaaaaacagaaaaagggaacgcaacagaagaggagaggaggaccaccaaagagaatattttgcaaaatgatgaccatttgccgggcgttttaccttatccccccacccacaaatcaatcgatcaaataatcaattggacggatagagggaaaggatgaaaatagcagtggggaaggaggagagacggaagagaaagagaggaaaaggaaaaattcgacggaagaaggagggggagaaagaggaggaaaaggatgaaaatagcattggggaaggaggagagacggaagagaaagagaggaaaaggaaaaattcgacggaagaaggagggggagaaagaggaggaaaaggatg

SEQ ID NO: 104576 - DNA, 490 bp, Heterodera glycines
tggcactccaaattttatttattttcattaaaataaattatttttcataaaattattagtaattttccttagctttttattcaaatatttatttgtttacacatctttgttgttttacacatgtaaacaaattcatctaataaacaacgatttctgacataaaaatatgtattgatcatggggtcgtagcatttgcactttctaaaaatgttttccacattttctaaggtttttccatttttacacctgacaaaaaattcttttattttttattttatttttttgattttgcatttttgacaaaaaattttccaaaatttatcagggtccacccgtgatttattcgaaatgaattcataaatttgtctttttacgactttgtacaaataagtcactaaatgtccaatgcaattaatatttgttgccaaaatatgtatttgtttatatttaaatagtttttaatagaattaaattaaaagcacattcaatg

SEQ ID NO: 104577 - DNA, 1003 bp, Heterodera glycines
aaaattccaaacttaacaatccatagcttgtcttggtagcgaagctcccaaagcgcgaagcgcttttttccagctaaatagccgacggttcacgcacccgctagttaaattgtatagttactattaattaccaaaaaaattcttggaaagattgcgtaaaattcgccattttaagtgggtttattaaatgtttttttctcagtcttgagtctcatgccttggaaaattctcgatctcgaggcacgaatattcatttttttgtccttccgtttcaccggcgccagtttttctaaattgtggggaaaaaagatttttaatttgtaatttccaaagcgatttcccaaattctcatgctatttgaaagcaagggctcattatttgtattcattcattgacgcaatggcaaaagttttaataaaaatttttgttaatgagcacaaaaagaaatttagagaaaataattcatttaacaaatatttctcttggttttaaacataatgacatcaattaataccagctcagaacatccggtatgaataaagtgcaaaatatcattttattaattttgtaatattttggaattgttcgagttcatttttaaactttaaattggttttttattaaataaatatgcttttgagatttaaaaaattataattagctctcatgttttgcattaattatataattttttagatttttttttgctaattttccactggccttattaaacgcccaatttattagcaaattaagccctgaataatgaattttgcgagacatatttaaaagtaatacaattttggctagatggaaaatcgtactaaatttagaaaaatcactcaacaatgttcattaaaaatttccatttcattaatcaaatgaaaaatgtaacaatgccaaatttctgtgtaaatttaacaagacacaaaagcatttgttagccattcatcataaacccggcggaaatttcacaaatttagccaaattaagcacaaaaatg

SEQ ID NO: 104578 - DNA, 143 bp, Heterodera glycines
tggattgatccgccctgcgcttgattgccgagatcgctcgaaagagattccattcaaactgcacttgttgcacactgcaaagtgaccaagccgatctgatcgattcggagatgcagacggagacagaagagaagaccaaaatg

SEQ ID NO: 104579 - DNA, 299 bp, Heterodera glycines
ttggtacagttacttttttttgtcaaagaccaaaattgtggaagcaaaaacatttcagggcccaaattttttaactgttcgtaattcaaccaaataaaaattttacgggtaatgcccaacaattgcaacaatataaaattcctttttctgaacagaccgagttcgattggttttaaatttccttttccaattgctttgtctcccccattttccattcggttacacctcgaagttgatgccatttgtgcagtgctttcatcgcaaattgcatagaacacggagtttccctctcgccgatg

SEQ ID NO: 104580 - DNA, 110 bp, Heterodera glycines; identical to SEQ ID NO: 98226

SEQ ID NO: 104581 - DNA, 820 bp, Heterodera glycines
ttttttctttttccgttattattttcggctaatgccaaattgcttcttccattttttaattgtggcataacttaaaaaatcagtaaatttcggctttataattgcatttaaaaatgtgcttgttttaacacaatttttttagtgggaaaagttgggaaaagaaaatttttatggaaatttatgtatatgccttttaccgtatattttctaattatccccatgggggattattgttcaacctcctcagaactcaaaattgcaaaatttggccattttttggacaaaatctattaacaaacctcattaaattacaaaaatttttcccggcggcgcctatcggcacgccggccccctcttgttccccaagttttttggaaaaagcaccgcaaaaaaaaaatcaacttcgatttttcatgctcaaatgatcagtgaaaacaaaaaaaaatgttggaaaaaatccattgcgttcaatgaaatgttcacgttgtggtgattggaccgcggcgcctagcaaaagcacgagcagtttatgtattccatggcccgacacttctgccaaaaatgaaaagaaaatttttggatttttgggttttttccgaatttaaattttttgaaatctgctggtgaaaatagaatttgaaaccgtacaaaaatttgtacaaaaacagccaaattttgaaaaagccaataaacaggcgaaaatttttctaattaacgtcatcaaatttatggattatttttaataatatattcaaaacattaaacaaattctgtcaaattgagcattttatttgaaaattagtaatattttaaaagaatg

SEQ ID NO: 104582 - DNA, 1003 bp, Heterodera glycines
gttgagctcgctatcgacttcaacagcgccttcagccatacattttttcacgaatgtcgtttatattaaaaatttcaatggactggaggcaacccatctgcattttatggttgttttttaatttactacaggcaaatttaaaaaaatatgtttgaaaggtctctgccaccaccctgccctcccggacttcatctgtaaaattaatgaaaacaccgactgatggatggacgctgcccgatctgagctgctcgccatttcattcgcatgtgacaaaagggatacaccatacaggacgccgtcattatgcgaattttgccggacgagtaatgcaacaacaatggtgaaatccatggccaggtgacgccgatcggtcttcaaattgaaggacattcaagaaaattgaaggatttcgagaattttgaggattcgattgtccatgttccgttataaattttattgtatttttaataaatttatttattttaacttgtgaagtttgtctagggatagaattcggatcacttgcgaactcaaaaacttgttcgaattttggtcgccatcgtgtatagaattcttagtttattttggtattttatatttatatttgggtccagggttaggcaaggggcgatatgaaggtcgtattcgtattcggcgaccccgaaaaccctaaattagactccttttccgggtttttatgagctttttcgagttttggacatttcgtgttttttacccttatggacatttcgaggcttggacatttcgtggcttggacatttcgtggcttggacatttcgtggcttggacatttcgaggcttggacatttcgttggtcagcgatcaaaagggccattcctctcttaggtttttaacaaattcaaaaataacatcttagcaactaccgtcgttttatccatttttatcaaaatcttatgaacgtgacataatggcctattcatctagctgattttcttcagttttcttatccgcgcatataatg

SEQ ID NO: 104583 - DNA, 574 bp, Heterodera glycines
ctaaaaactaccaaaataattagtttttagtttctaaaatacccccccaaaatagttgctaaaaatgggtaaatagttgctaaaaactttcaatttagtgatgtaaaatgacaaaatttattcaaaaaagtaaaaaaattaggccaaatcattattgagctaaataatttttaaaatcacaattttttgtcaagaaataaatatttaaattttggagattgatttttgaaaaatttcatttattagggatgcatttttgaaaattttcgcgtcgattcttaagggtgtatattaaaaccgccacctctattacagcgcccttttgaccaataatgactgaaaaattttcaaaaaatttcagttttttaggtattttctcgattaataaaaatgaaactttttaaaaaattggaaatttatgccaaaaataatttcaacaatggaaaatttttgatattttactccaaaatcaatttttattttgtattttttcttcaaaatgcttttttaaaccatatttaactattttcgaaagcataaattgctaaaaataaaaaactttaagcccacaatg

SEQ ID NO: 104584 - DNA, 493 bp, Heterodera glycines
tttatcaattcgacgaatgttccgttcttcgcagattttttccattttttgtatttttgtgatctgattcatttccttttctagaacattgttattgtatttttaaaatttattttattttattttttgctgatttggtattatgcgatgttttgtgacagtcaaatgttttatcatgttaaaaagattatgtaatccttagagaaaatatcatgtgaatgccgtcatctaatagattcatcatcatcatcatgagatttcggtcccgaaaattttggaatatacgagatgcttttgctgcgtgccatctgaacagttaatgtttatgtgcttttagagttttggtttcgggtcacaccaaaattttggtcgaacagaaaacggattttctgaaattttaaatatccattttaaataaaattcacaggatttggttgtgacattgcaccgcttgtgcgatgaaaatgcgcgtgccaatgccgagtggacaatg

SEQ ID NO: 104585 - DNA, 877 bp, Heterodera glycines
ttttcgacaaaattttgctaaaaaatgtctttttcagaaattttttcggtccttaggagtcaaaaaggccaatttatctcatgggggccgttctaaaggggttttttggaaaaatgccaaaatatggacataaaatatggataaaaatgccaaaatatggacaaatatggaaatatggacataaatcgcgaaatatggaaaaaatggatatagaaatccatcctagaagcttcaaaccaagctaaaaagatgttttccatgcatttcaggcctcccacagtccaggaaaaaatatggattcccatataattggactccctaatgatgatcaatttatataaattaaatcatcaaatgaatgttctttttatgtccataatttctgtccgtttaaaattctctaatcctttttagaatctctgatgcaatttacatatttttaatagtgtaaatgttcttaatctttgtgtgactgttcacatatttttggtttcatttttttccattttttgtgatttttgcaaaaaaaaaaaaagaaaattaatttgacaataaaattactaattgtaagcaaattgttttttttcgtaattcgttattcgttttgcatttcttccgcaagatctgtcttttgacgaacaaataatcaatttgctcacctaattgctaaattattgcatttgtaaaaagaaaaaatcaaaacttaacaaaaaaaactccgcaattttcctcactattacaaacatcaaaacccgaaatttgaatcctaaaaactgtaagtaccaaaaatattttttcctttctatgtttataaagaaaggccaatctaacgttttaaatgcaatttttatgccattttatttgtgtcgtcaaaatg

SEQ ID NO: 104586 - DNA, 275 bp, Heterodera glycines
ttgtgcaacagccgtaaaacaaaaatattggcggaaaaggagggaaatgcctttcagagaatatcatttttatgttcccagcacttcgttttggtattatcacataatgtcattcgcttgtcttgtcagataatttcaatgaaatatgtgattaaaattaataaacacaaaatgctttgaaacctccaagggttttaaatgatgacaaattttacaacttcttgaacattttcaaaataatgcaattaagtgaatgttgtaaaggataagaaatg

SEQ ID NO: 104587 - DNA, 348 bp, Heterodera glycines
aatcagggctcggatctgttctgatttatcagaaatgttctgatttggagggtccaaatctgataaaataaaaaagttctgatttgtcagaaatgttctgattttgggctattgttcttattttgttctgatttgtcgcttctccgaaaaatctgtcaatgtttctttataaatttggattggcatactgtttaagaaaaatattttcaattttggccttataatttatttcttgctgttaatttggctaattatttttgtatttattgctttattgtatttctcttttctttttaatttagcacctgcactattactaacaaatggcaccgcctaagcgcaaaaatg

SEQ ID NO: 104588 - DNA, 187 bp, Heterodera glycines
ttaatgaatatttttaataattttcaaaaaaattgcccttcacttgattgaaatttacaaaattgttctttatttatactctattttctctattttaaataggtatatttagattttaaaaattgggattgaaatgttcggtgccattttctttttttcaatttcttccattgttttgttcaatatg

SEQ ID NO: 104589 - DNA, 302 bp, Heterodera glycines
ttttgcacctttttccttaccaaaatggccatccgattttatacaaccaaattttatcggaagacagagttttcaggtgcgtatctccataagatataaccatttattcggtgtgagttattccctttacccagctcattcatcagtttcaatgtaattttttgcttcttagggctccctttgcatcgttcttaccacgtttttctcaactcaacttttaattggttaactttcgctcgtctgtgaccttgcaatcgttctcaacagctcattaacactaggccaaatgggcttcaaaaatg

SEQ ID NO: 104590 - DNA, 206 bp, Heterodera glycines
atgtgtattttctaaattattttaaaagatggttttctttttcgtttttggctaatttttcaggactgtatttttcgcaaccaaatgaaattctcacaaggaaaataaataaatttcccgctaattgagtgcggacagaaaagcattacttgagcatgaattaaggtgccaattaataaattgtttaattcacactaaaaataatg

SEQ ID NO: 104591 - DNA, 260 bp, Heterodera glycines
ggttaccgagagaatgaaacattccttaaattacatattttgaatttcctttttctttgactttctccatttagctgatcctgccctatctcgacatcgacatcaaatattacgacttgagcatcgaaaatcgagacgccactgacgatgaagtgacagtggacgcagcggaagccatcaaaaaatacaatgtgggcataaaatgtgcgacaattacggcggacgaggcgcgcgtgaaagaatttggccttaaaaaaatg

SEQ ID NO: 104592 - DNA, 201 bp, Heterodera glycines
tgacaaaattggattaattcagtttttgagattaaatgggtgagaaggaaataaacggatggagtgcttaaaatgaaatttaaattttgtaaataataacaaaaccattatttatttatttgtctttttatctttcgtttttttattgaatttatcacattatcaatcatcgtttttcatatttttatttaaatatcaatg

SEQ ID NO: 104593 - DNA, 514 bp, Heterodera glycines
gcttaaatctcaaggggaaattgatagccaatactttacataaaatttaaatgacaccaaactttgaataattggaccagtaaaaaaggcacttaacaatttgtaggttaattatgtcccaataaatattaataataactgtttaatttttaaataattttattattttatttcatacatatatgtatctttttttcttttttctgctctgaattaattttttcttttattgctttctctcgcactttttcttcatcattaaatcacatttttcagatgcttattcttgaataaatttaatgatttttataaataaaaaagcaaataaccaaaaatattttaatatttccacttcacgttaagattaattaaataaatttataaaattcatattttattttttaattgatgttggctgtttttaataaagacttggaaatatgagcatataactacaattttataaaatcacaaaattcttatttcaaatatttttaataattttttcaagatg

SEQ ID NO: 104594 - DNA, 494 bp, Heterodera glycines
tttgcacttttccttcccatcatttccaaatgactcccaaaatgcccttttcctctcttttctctccctttttcttttcctcttcctttttgtcctcctcctcttccttcttcctcttttcctcctctttttttctcgttttcctttccttttctgtcgctgtgttttccgcttgccaagtgatgaccaaaattgagaaagtgtacgcaatggtggacgaatatcagagaacttttgcgggcagtgaaagacaatttgagtgagttaaatgggcaaaaacattcattggattaaggcctaattaattagtccattttggtaaatccaattcaaaccccccgcccccccccccccccctctttttgttacccctcactttctctcgttttcccttcgccgctctctcagcgtggccatcgcctcactgcgacctcaacgccgccggagaatcgcttcaaggcccggaagccaagttggacaaaattggaacaatg

SEQ ID NO: 104595 - DNA, 88 bp, Heterodera glycines
ggtaatgttaattttactttttgttgtttatcgtacatttatttccttttagcgccaagtttgcatgttgcaaatattagcccaaatg

SEQ ID NO: 104596 - DNA, 172 bp, Heterodera glycines
ggaaaagctcaacaacctgcaactggctattgagggttcgactggaaatttgggcgtgcaagtcagcgatctgaacgcgagagttcagagctcgcaaacgctttcttcaattgcggtaaagttgtatatattatttatgataattacatgacttatttagactgaggacatg

SEQ ID NO: 104597 - DNA, 1003 bp, Heterodera glycines
caactcaaatttttaggttttttgattccgtttcctttaacaaaatgattttaatagttatttttaatggtttttcgaatgtgtacaataattaaaaaaaattatttgtgtaccctaaaaagatttttaaactctaatcccctctttgtaaaaagccttttctcattaattgattttacattagggtggggttgcgtttctcctgcagttttttcaatcaacttttaggtgaccaatcataattttcgcgatcaatcaaaagcttttgtcgatttagtatcattttaacaaaaatcacttaaatgataaaatctctgaagtaatttatttcatggttagttcactggacttgctgccgaattttttttggaatggagtgtttttttttattaccggtttgattttttcaagtattgtaatgatttccaattgatcgaaaacaattataaaagtaattaattctattttttaaaatttttactcccatttaaaaatcctttctcatttattaggattcatttgcagttctgctacagttttagtctccaatcaatttttacgacgttcaaccacaatttgcgcgattaattaaaaacgtttttgtgtgtgattattacggttaacacctttttaataattttttattcattaagaactaaaaattttatgttaattggacgaccaattgtaaatttggttatagtttttataaacgaaaattaatacgaaaaatatggtgggcatgtaaattgcagtagaaccaaatgtgtagggttttgtttaccatatctttgtgagtcgacaattttttttgagttaaaaatccataacagcaagtcgtgaaaaaatcgatcagtcattttttaattgcgattattttttattgttttgtttaccctccccccattctttatttttcttattacatttttattcactttttttaactttttacctattttctaagctcggttttttaaaaaatatttttttagataaaatg

SEQ ID NO: 104598 - DNA, 105 bp, Heterodera glycines
tccccccacccacaattcctacatcttcccgtccaaacattctttcgtcacaaataatgaaaatgaatgaatgtgcgggggggggggaagttgggggaaagaatg

SEQ ID NO: 104599 - DNA, 250 bp, Heterodera glycines
ttggcataggcacttcccaaagcatggatttggtgtttagttctaacatttccgcccttttcgggcccatttgctctgatggtatttccccccccccaattttcccattttttaataattcactttttattccatagatttgttgctgactgatcgaatcacttcttcattggacatttttcagtgcaacttttggcgcgaaagttgggccaacagagtgtcggacaatcttttggatctgtccacaatg

SEQ ID NO: 104600 - DNA, 220 bp, Heterodera glycines
agaaaggctaaatcgttcgataattgaaatgttacggaaaacgatcaccagtccttgggaatgggacaaacgaattccttatgttgtattttcatataatgcaaccccaaatgagtcaacgggacattccccttttactatttttttcggacgtactattcagtttccaaccacgttaacagcaccaaaaagagttaatcctgcttatacagtagatatg

SEQ ID NO: 104601 - DNA, 132 bp, Heterodera glycines
attaatttattcgcctatcggttttgtttcattttagcctcactcaaagacatttcgatgccgcaggctatggaacgtctcaaagaaattggggagttggaaccggaatacatcaattatttgcaggaaatg

SEQ ID NO: 104602 - DNA, 249 bp, Heterodera glycines
ggcccggcgatttttggaaaatccgggttgaccgggttttgagaggccgggcccggaacccggttacttctggaaaagtcagcccggcccggcatttttggaaatcctctcgaattctagtttttttcattccacgcattgtaagatttttaagaaaaaacaaattatttttttatccatgaaaaaatctaaaattgaaaaatttctgcaaaaatgaaaaaataaaattgttttcagttcgagaatatg

SEQ ID NO: 104603 - DNA, 288 bp, Heterodera glycines
atgaaatcattaggattctaaatatttaattttgtttatggatttggattatctttgccaaataaattcatattttttttttgaaatttaatcataaataaattcgctttgcttttatgctaagaataaagatcagaacatttatttttggcttcttctctgcaaaagaattttgatttgattaatgcattttcaatgtagtaaaatttatttatgttcccgctccccgcgtcatctttgaattccaattgaattccaattgccccgcccccgacaatataaaaaatg

SEQ ID NO: 104604 - DNA, 82 bp, Heterodera glycines
tctttgtctgtctcccccctccaaaaggaattatccctccgaaatttccgcgctttctcatcgtcttcacatccccgacatg

SEQ ID NO: 104605 - DNA, 1003 bp, Heterodera glycines
  unsure (1)..(1003): unsure at all n locations
taagtttaaaaaaaaatttttctttttgtaaaacagtttaaaaagctggaaaaataaccaaggaaatgttgaattgaaaaattttcagcaaaaattttatcctaaattaccatttttatcggcagtggtgaaaatttgttacggacttattttttgaacaaaaatttttagtccattcaataaaaactatttaaattgaagttgattattaagattttcactgagaacaataattaaattatataatttggaaattcaattttttccttaaaaaattttggtacttgtctgtcatctaccccagattttttgtacaaatttcaaaagtcgagaattcatttttcaccaaaattcacatttttaccaaaatcgctaaaatgcttaatacaatgtgactgattattcccttcatgccatagtcaattgtttaaaaaattaaagcgattatgtgcaataaatttggattttggtaaacaaaaaaatgtttttgactttgttcggctccgggttcatggttcgaattggcacaatatggatggttttctcgactctgaaaaccctaaatgagtttatttagttccgttcctgtccctaaattcaaatatttatttaaatatttctatattttctcttttatttttaatgttaaaaatatgtcagatccgccatgggcgttcgcagcagcacaatgaaaacattgacttggacccaatgcagccgtcgaccagtaccgccgcagcaaaaaatggtgcgttatgtcagaatttttccaagagattttataacatcattttcagtgcatatttcagatttttttttcattcttcaaattttagaatntagtaaacaaaaacataaataaaacattgcgcttgtaaatccaacttttacaaattcacaaaaatcccatccccataaaaaatgaaatgactattttttgtaaaataaaacattaaataacactttaaaaacaacctaatttgaggtttttgtacttaaaatg

SEQ ID NO: 104606 - DNA, 896 bp, Heterodera glycines
ttttcaagcaatatagtttctggactttcaatcacaattttttcaaagctctatttttctctttacggtgaaggtaccggcattggttacatatgagataaatatcattatttttttcattatcttgtgaatatattttaaaattgtcttcagttccaattatatagattgattctgtaggatctctcgattgacacttttcaactattaattgcgaatcgggcactttgttttcaacctttgtattttgttttcttgttacaacagttaatttaacatttcataaaatatcattaaatataattatttgcccaattcggacttcgtccagcacggctgtacataattagtagggccttgatttttagtgattcaacttttttttttttttttttgcttaattattttgaagaaaagcgctcaaaaaacacatttatttcagaaaaacatacccctaagaatgaccataaaattttcaaaaatagacccctaagaaatgaaaaatttttgcggacaagaatttttgattttaaaaattattttatctcaatactgattttgcttgatttagttactttttgaatacatttttacactcctaaaggttgaaattatgtcactattcgtcactgtttcggactttttgtcactgttttggcatttttcctcactcttttagttaattatttcgagatttttcgtaacaaaaaaccacggccctaataattaaggttcgagactgaaaatttctcgatttttcggactcgggacagctaatggcgcataaactcgagaccgtaattcttcgaatcggagaattcgtttgttaaatgatcagagggcccgggactcttggccataacaaagcatgtttcggtacattgaaattgaacatg

SEQ ID NO: 104607 - DNA, 610 bp, Heterodera glycines
aattgatcgaaatgctgctggtttcaacaatgatgactagggctgggaattatatgcacataaaatcgcaaaatatgcgcataaaatatgcaccaaaaattgcgaaatatgcacataaaaactagagatcggaccggtcggtttttttttcggtttttttcggtattttttggtttcggtttttgaccgaaaaaaaccgaccgagaaatttatgagttttcggtttttttcggtttttaaccgaaaccgttcgaccgaccctcttgtccggtctctaatttaaactagggttaagccctcctaatcctcgggagagaaaagtcggggaagaaattccccgacaaaatttgatcaaaataaaatttatataaggaaattcttgaaaaaataaaataataataaatatgcaattctatgggatttaatgcgttctaacaatctgtaaaattaagcgaattcaaattaatttccaagttaattttttaattaaatgaaaaattaaatatcatttttcaaaaattaggcttaataaatttaggaaaaatagtcattgggttaattgcgccaatgccaaacaaattaaagtaattagagaaataaatttaaaatg

SEQ ID NO: 104608 - DNA, 417 bp, Heterodera glycines
ttgctaaaataataattattattttttgttaaataaaagagaaattattcacaaaattacgaaataatgaaaatataaaaaattcaattttatttaggtcggccacagtcaccaaatttgctcatctgttaattcatcattcattaacaatgaaattttccaaaaaatcctccccccccccccccaaaatcccaattttaattatttgcatttgaacagatgaaccattattttttaaacacgaaatttgcgaattggtttataaaattttgattttaatgtgtgtataaatcgttaataagaataaaggaaaaaatgacaaaatttgattggaataaaaaagtaaatattgatcaaaaacacaatttaaattatatttaattttgtaatacctaaatattattttacttaaatatg

SEQ ID NO: 104609 - DNA, 104 bp, Heterodera glycines; identical to SEQ ID NO: 98209

SEQ ID NO: 104610 - DNA, 145 bp, Heterodera glycines
ccaccaccaccaccacaacgcgacgagttaataataattaataaaaaaattaaattttgtggcatttggtcccatgcccccttaaactctcaaactgattaaaaaaactcagatgctaagccccgaggaatgggaggtgcgcatg

SEQ ID NO: 104611 - DNA, 343 bp, Heterodera glycines
actgcgatactagaattggtttaagaattaaaaaaaaatagtagatgctttaaaaggcttaaaccccatgccaaatgacaaataaatttatacttgaaatattttcaattgataatccatcaatcaatgctccttattttgaagattcaaaactgaaaaccaccaagagattagaaaaacatcataaataagggattaatctcgcttttttaaattgttttttcgagcctgtgacaatattttttcaatttcttggtgtatattattcatttgccaattttttgttttctaagagattaaaatacataaaaacatacggcagaacaacagcaacattcacatg

SEQ ID NO: 104612 - DNA, 581 bp, Heterodera glycines
aatgccgaaaggggaaggcgcgtccaatttatggccaaatgttggcactcgcatttgcttttttctcacattttgcccagaattttttgcttataattttctaattagcatattaggcactttcagctgatcaatccctccccgccactccctaacattgattgtccttgataatttgatcattttccatcttttccccccattgatcgcttccttttgttgtgttcaaagtgtctcatctccgacgattcattcgttcggcgcatattggaaaagcgccgtctcgcaaaaaaggaggtcatcagccgcccgccaaatcgtctcaactgtcatcatttatttgtccatctttgctccgtcgtcggcggaagggatcgatcggtcgttttcgccaatcccagcaaaaatccatcgccaatttttgatccattatggaagtgtttgttgtttcttctcattcccttttcggttggtcattctcggcttggttcttcaccgattgctcaatcatttacgacccaatttttaattattttgcaattaatttaattggctttaaaattttgtctcaaatttaaatg

SEQ ID NO: 104613 - DNA, 802 bp, Heterodera glycines
gaaataatgtaccttcataagctagcttctcaatttttggttttgatttagcataattttcgttaagccatttaaatgtgaatttttctctttcgagtttgacactaaaacgaaaaaaaaatataggtatacacgcactcaaacaaatatttcttacaaatgtattccatcaatgccataaactttgcaatatataaatgaagccatcaggtaatccgattgaaaattctgaaactttaggttctcttatgctaaagtcattcgtaagacagttcttatagatagacacggaaaaaacgaatgggggtaaaaatgaatttgataaaaaggatttttttctaactgttttaattggtaagtgatcttcaaatcataattttaattggttacttctagaatattaggtgattttttcaattgtgatttatgagaaaattgtatttttcaaatactttttaaatttgaatttttatttattaacaaaaagccaaatttttcttttttttttacttcaaaatctgagatctataaaattttaaaatacaaaaaaaaaattttacccgctgtcttaatttttccgatttatgatgcttgaaaatccatgcgcatatatattttacagcttaagcttctctttgcagaaccaatgaaaataaataataaacctatcaatttttgtctttcgactcgcttgaaacttctaatttattaaaaatatacattgttcagattacactcacaatcttatctacctagttattttttcatttgatcaactacacgattaaaagcgtcaatcatg

SEQ ID NO: 104614 - DNA, 111 bp, Heterodera glycines
ttattttttaaaaaaattctgaaaccgaggggtctggcggggaagataggcgcctccggcaaaattttgaaaaatttgttcgtcttttgaacagatttggtcaaaaaaatg

SEQ ID NO: 104615 - DNA, 1003 bp, Heterodera glycines
aaataattcacttttatatttcgtagctgtacacactgagttaattttgggctcccagttcaaaaagtaaatgtgtgtgtggcaaagtggtttttgtaagatagtaaaggaacaaagggcggaggttcgagtccgttgtgcaacacgactatttttatttatttttgtccaaatattaaaaaatgacgatttttgggaattgtttttgaagctttttcccaaccaaattggacaatcttggtattattcgaaagctcttgggaaggagaagctttttctaagccaatgctaagcaatttgatagttaggaaaaagatatgagtcttcgaaaaattgttttccttataactcatgaaataatgtataagccaaaaaatggctgtattactgaatgtattatatttttctctatctttatgcaaaatttgaagcgcatttaacataggacaaaaaaactaaacatagaaatgtaaattccgtttttctctattaacagagataaagaaaaagtacgccaaaataagagatgtttttttctctgcactctctatttattgacacatgtctctttttttgactcgctgtgtgtacagaatgaccattctttgatattccaatggtttgtgaccaaatttagtatgttttaatcaatttaggaactaaagtgagaattttggagttttagactttttgttcgaattcgggtccgggattcgaaatttgtccaatgaaggtcatattcgtgatcagcgaccctgaaaaccccccataaacatgtttccaagacttttcagaacaaaaaaactcttcgtcacaagggggggggggggtaccatctatagtattacccgcttttcttcttcttaagaattgattagaaagtatgtgattacgccataaaaaaagttttccttttctttgtagaggctttatttccgtttatcaaaacgaaatgcgccacacgcaaagcggcgggccaacgcaaccgccgaacggcacaatg

SEQ ID NO: 104616 - DNA, 205 bp, Heterodera glycines
atattgagacaaattaatactcattcatattggaagacgattaatgtttagaccaaattattttggagttgattgatattgggacagtttttcattgttggccaattggtgttggaacaattctttgtaatggttctaatccatgttaaatattgacgcgttaataagtgttctttatatcattttaaaacgactaaaagagatg

SEQ ID NO: 104617 - DNA, 143 bp, Heterodera glycines
ttaaaaatttaagcaattaacgagagaaaaccccttttaattaacatatgtttttataaaataaaataaaaatttaaacaactcaacaaaagagaataatgaaactgacaacaaaaattaaaagaaacagattctttaaaatg

SEQ ID NO: 104618 - DNA, 290 bp, Heterodera glycines
tgcttgttgctcaacatgaactagagaagaagagaactcatagggttttcagctgatctatcaatagtaaaattgcaatacctgatccatttgttttggccgggtcaattgagctgtatttgacatattcaacctaatatttggcgctacaatggtgagggaaacaaacgctcattgagaacttttaggctttcaaattttacgacgcattggctgaacggtccgtgaaaaatgggcatgccattgacattttctcgtgcgcccttgaccaaaccgggctttacgaaatg

SEQ ID NO: 104619 - DNA, 295 bp, Heterodera glycines
  unsure (1)..(295): unsure at all n locations
agttttntggaggcacttttgacattgactgaaaattgtcccattcaaatggcctttgtgacgcgaaacggacgttcattggccgaaattttccgttacagcggtactcacaatggacaatacgtaaatcaaaccgggattttgactgacgcgggaatcaaggccgtccttatctggttgtataatgtggcaaatttcccgggagagcgagatatgggacgaaggcgttcagtgattgggaatgtgccttcggggtctcataaccgtctaggcgacggtagtgggcgagaaaatg

SEQ ID NO: 104620 - DNA, 1003 bp, Heterodera glycines
ttggactgccaaacggcggcacaaaatccaatggacaatttaatgccaacctaaaatccctacttggcactttttttttacgatttaaacacctaaaaaatagtttttcgttctttttatttaaaattttctatttttcattttttatattcagaagtttacacaaatattttgaattattgcaacttcatttctgcaaattcgcgctacgaaggaggctgtaatatggaacgtaattcaaattgtggcattttaaaagcgcgggaaaattaatcgtcggagacggggcatttgaaataagtgataaatctgatgaacgctgagattaatgaacccattaaaatatttgtttattaataattgtgaattaattatgttttattttcttattgttttaattccatttcattttaatcatttgcattttgtcgtacttggtccatagcaccggatttattttgcacatttgctgttaaaagcaggcttttgtttttaacgagtaaaaagtaaaactaatattaaaaaattaaaaaacttttgttctaaattgatcaaaataagctgaatttagtcaaaaattattgcagcatcaaaaaatggtcattctatacagatacggacataagagtgaattttgaaaattttaatttcgacttttttgttcgggtccaggattcgaaattggtcaaaataaatgttggattcgggttcctcgaccctgaaaaccaccataaacatgttttcacgacttattaaaaccaaaaaattttatccaaaaagggggctcacccaccatctatagtattaccaaaatttcttatggaagtatttcttttccgtcattttttttctaaaaccaaattagacttaaaacctcatagatatccaatgatcaaagaagatttaatttggatgcttctattgtacataaatattgtttaataaacatatacatatgtacttaataccacaaaattttatagtagcggaattacaaagaatg

SEQ ID NO: 104621 - DNA, 334 bp, Heterodera glycines
aaaagatataaaaaattatatttaattgtttataatgataaaaataatttgaaattggaaaaaaaattaatattttaaattgaaattaaaattaaaattgtaattattgttcaaaatcatgtacaaaaattaattttcttttcatttaatcatttataaaaaaataatttattcatttatttaaaagaaaattaacaaaaactaatattatttaaatatcaaaaatcattttcaaatttatttttcttcttattttttaattttttcccctaaaaggataaaattggcaaaatcattaaatgatcatttccatttttagattttgccaaaaatg

SEQ ID NO: 104622 - DNA, 323 bp, Heterodera glycines
tatgtactgtatgtataattgtaaattgttcatactgtatgtgccaatcactttgtttactcggttttatgtgaggtgcagacaataaaggtatgaaatttgatgtcttaaaattagtaaaataggcaactcaactcgtacacaaaattttttatattttttaaaccaaaatttttaaaacaaaatttttcaacataaaaattatataggaattgcaaagaaattcaaatacatggcaagttataatattaagctaccacttattgatttttctatacatatttcgacaaatagcctttatttattgcttacatccacggatg

SEQ ID NO: 104623 - DNA, 141 bp, Heterodera glycines
tatttttcggttgcgtcgctttagttttatgttaattacaataagctttttgctttcaatgtgttatttatttcatgttaaatcattctctcctttcgcagttcgtcctcaaacgtcggttgtttttccgccgttaaaatg

SEQ ID NO: 104624 - DNA, 129 bp, Heterodera glycines
ggtaattttgaatttgttttttggattttgcaaatatctatcttgacaggaaatcgtccacaggatgaaaattgtttgggttttccacaaatatcttgtctgattttttccattttagggcggcagatg

SEQ ID NO: 104625 - DNA, 58 bp, Heterodera glycines
tgtgtgttgacttttataaatgtcatttccaatccgtacaatattcgtttagggaatg

SEQ ID NO: 104626 - DNA, 490 bp, Heterodera glycines
tttcttctcccttttctcctctttttgtgatagaattacgcaaaacaaatttttgcactaaaattggcttcaaccgaaatggacaaagccaacggcaaataacgtcaacaaacgaaagcgtcgttcgccccactcgaccgacttccgtccgcaaaacttcatttgctcataatcagcgatgcttctggccaattgagtgggaattgtcaaaggcgacgggggagaaaagcaaaggaaagggagggaaaagcgagcgaatttggcagaagggccaatggcacaattaattatggcggaacgtgctaaacagttgcaacaaacaaaactgatcagcaacggcggagcaaatttctctggggaatttttaaggcaaacgaacacattttgtgaagtaaaaaatatgacaagggattaagaagagacagaaaaaggcgaaaattggacgagtcacatggcaaaataatggaaatgataagagaagagaaaaatg

SEQ ID NO: 104627 - DNA, 56 bp, Heterodera glycines
agtactaaaatattgaaatttaccgggaaaattaatatttttagtcaaatgatatg

SEQ ID NO: 104628 - DNA, 125 bp, Heterodera glycines
  unsure (1)..(125): unsure at all n locations
tgaaagttgaaggttcggtgggcagtcaaattaaaagnccatttgcccctctcacaaaaatnggattcatttcggacgattgtgctgcttcttcggccgtgaagaattcgtcgaggtcgaaaatg

SEQ ID NO: 104629 - DNA, 343 bp, Heterodera glycines
taactgaattaatttctcaccgtttgttgtccaatggccgttaaatgagttggcttcacagaaggattggctatgacttttcactggaaatgataatttatgatgaattagctatttgtagagagagagaaatccaattcaaatggaatgttttgctgaatcataatgggaaatgaaaagaaaacggacaaaaaagcactgatcacttctctgttaaatcagtaaagcagcagataacttcagcacaacattaataattttgggctgctttttccaaaaaataaatatacaaaaataaatttatttatttatttatttttttgtttgttaggtaatttcaatg

SEQ ID NO: 104630 - DNA, 226 bp, Heterodera glycines
agaaggggaacgatcagaaggggagtgatcaacggggcctttgagggaagggattaatcacaagtggaagtgatcagtgactgctcatgagcacaggggtaaattatgagaggcagcagaaggggagggcggacggactccagagcaaaccgggatatgatgttaataaaattgtttttgtttcaccgtttccgggacagaaatcagttccgccactgtcggaatg

SEQ ID NO: 104631 - DNA, 467 bp, Heterodera glycines
ggacattcgttcgctgcacgtcttcaggacgggccattcgcggcagttattatattctatgggggatattcggccgcttcgcggcctcaggacgggcgcttcgcgctctttttaaattttgtgggggacattcggccgcttcgcggcctcaggacgggcgcttcgcgctctttttaaattttatgggggatattcggccgcttcgcggcctcaggacgggcgcttcgcgcttaaaaatcgaatgcattttagtttaaattttttttataataaaatactcgttttattaattaaaaacaacgtcgaaaattaataattgaatatttgtttaatttgaaatgaaattaatttttttgcaaattcaaaaaataaataatgaaaatttttaattaaaaaaaattaatttaaataatttacatcaaaactattttaatttattaaatgcagtgaaaattacccaaaaaatg

SEQ ID NO: 104632 - DNA, 167 bp, Heterodera glycines
atgcagcaatcttaaatattaaaattagacaacaaataaaactgcgtttaactgcttcacatttttgcaccgaaattcttttttataagtataatgttttgtcgacgaaaaataagaaaaaaattgcaaaatttggccaattaggaggagaggcgctcacaaaaatg

SEQ ID NO: 104633 - DNA, 420 bp, Heterodera glycines
tttggccaattggtgggttggcttattcataggacaattttactttgcattcttgcattcctttaagccacttcgcaaactgaaaatttagaaaagcgcaactttttacaattttatggaaaaatgccatttaattttgcgataacgagttttttagctttaggtctcaattccatttgaaagagtcacataaatctgctgttttgtctattcattctttgcaaaatttgcatttgaatggattttggggaatataagttaattaggttaataataagtttttaatagtgctttccgatcccttggcaatttttaatttatttcaaattatgtctgaattgaattaccaaattaattgctttgtccattcgctttaggtcgctgttctgcttggacttctgtgccctggtggtgccaatg

SEQ ID NO: 104634 - DNA, 161 bp, Heterodera glycines
caatgatactcctcagcgcaagacacttctggcaattcttccaagggaagagagaagtgtctcccgggctgtttgtgatcaacacatcgtttggcccgatgataaatggcgagtccaacattggaccgccgaactcaaatcaaaaagctctctcaatgatg

SEQ ID NO: 104635 - DNA, 98 bp, Heterodera glycines
  unsure (1)..(98): unsure at all n locations
ttgtttagccatttctccgttcgaccactctttctgcctgctacanaattcgacttgaactttttgagtcaacggaaattgcgccctttgaattgatg

SEQ ID NO: 104636 - DNA, 178 bp, Heterodera glycines
  unsure (1)..(178): unsure at all n locations
tttattggggattatgccaccantttttgcatcaccattattatatcaacattattgtgctttagccccccatacacgggcggaaaaatgttcggacaatccgccgcctggcttccctggcattgaattcatgctcccattactgctccaagcggtggcggacggtcggctgaccatg

SEQ ID NO: 104637 - DNA, 392 bp, Heterodera glycines
ttcccacttcgattatgcgctttaggtgaaacttgggtaattaaatatttaattatgcttttacccttaatccatgccaaacgaatagcaattgccacataaaatgaggacgaaacacccagataagtcaaataagtccacgaatactgtgaaagaactaaacccaaaaaacttttgtattggataataaatcaaattaaaaaatgatttaatatcttacaaatgtaaaaaggagtcaaaatgaaggacaacaaatgcaaaagcaaacgttggagcagaatgcatcttaaaataataaatgtgaatgtgattcaattgttattggcctaaattcaaattgatatgtaaattaaattaaatatttttttaggtgatcgaaatcgagttcgatg

SEQ ID NO: 104638 - DNA, 77 bp, Heterodera glycines
aaattggcattcattttggcaaattgttgcgtcacagagagtgccaaaatttaattgcaaaataatttgaaaaaatg

SEQ ID NO: 104639 - DNA, 108 bp, Heterodera glycines
  unsure (1)..(108): unsure at all n locations
cctgggtttttgtccagaaaatctaagtatgcttccttgttttgctatcctcaccctcgaaaanntttaaaaatttcaaaaaaatcattagacattttgttaaaaatg

SEQ ID NO: 104640 - DNA, 245 bp, Heterodera glycines
acaaatgagcagacaaacacttttttttatttatttatttattaagcatttaaatttgaattttaaatgaattatatacaattaacatttgcattgtgtgtgttttattcgtatgctttccttcccctttcaatccaacgaaaatcaatgtttactttttctatgttctccaccaaatactcttttttaattttattgttgcaatttgtctcaattttttaaaatgttttttgagatacaaaatg

SEQ ID NO: 104641 - DNA, 54 bp, Heterodera glycines
aaaaaaattcatggagggaaatccaaacaccggtttttgttctatccgcaaatg

SEQ ID NO: 104642 - DNA, 210 bp, Heterodera glycines
ttgcttaaagaccgggaataacgccgacgacggagctcaaagactgaggctgcaaataaaagaaaatttagtcgagaatttgtcgaagttgctcaaagactgaggataacttcgccatttgagtgatttgctcaaagactgagaagcgaatttgttgaaattgcagacattgttggatttgaattgaaccaagacggttaccgaaaaatg

SEQ ID NO: 104643 - DNA, 1003 bp, Heterodera glycines
aatattataaaattaaaaagagaaaaacttttatcaaatttctcgccctttgagaacaaaaacagtgttgcgggggacatgaaacattctcaaataaaagagaaaaaatgcagcgaaaaattgtttatacaaaaatttaaaaacaaaaagttgatttaatggttaattatcataaatagggttataagttgtatgcttttgcatattttttctgcgcatatgctatgaagaaaggggctcaaaaatagcatttctgcgttaaaattttttgatttggtgaaggtttttagtgcatataaaagcatattttgggggtttcgagaataaatgcatatttggccatttttgcgtttttgagagcatatttcggtcatttttggcattttttaaaaagttaaaagccaattttgacagtttttaaggcatattttagtgcatatttgggcatttttagggtttttagggcatatttgggggatttttagtgcatattttatgcgcatattttgcatttttttagtgcatacaacttataaccctaatcataaataataaaataattaggtaatagaataatttttaaatcaaaaagaaatattttactcaattcaaataaaataattatttatatgacctttttaaattaatttgtacataattaaaatattaacatttataaataaaacttattattagtgatgtaaattctatgtaaattcttaattttttttcatggatttccccatggtctaattagtaggaaaaacattttctttttttgttgtagaaaaggtagcactataaagttgaagttgaattagtgctaataaaaacttgctggcgttatgtctttgtcaaataaaaaaacagcaaaaaatgatgattttttcatttatattatttttccattttttcttcaataaacagaattttgcaccttttttgccaccttttaagcctaataattaacaaatagcacgacaatttaaagagttgcaaaatg

SEQ ID NO: 104644 - DNA, 522 bp, Heterodera glycines
ataacttttctcttaattttgtctttttcgtcattttttgtttgttactcaaaatttattttttatcaataatgcgtttttttgttattttgaagctaagtgtaataatttattaacttcgtaaacggtctcttccagtttttgcattttttagcacaacattgagtcagacaatgcaaaacggcgaatttgattgtactacaatatgttgttggtcgacactcagaaatgattttatgcgttcaatgctaataaacaaatgctttgtttaattgcgtctcccttaaattgcacaatctttttaattttaattgtttagagcgttattttatgcgcttttatttttcattttaatgattttttttttgcttattttataattgtttaagcctgttatttgctgccttttgccttgctttaaagagctaccaaattttattggtaagaattcatttcccaaaaagagtgtgcctatacactttaactttattacagactttgtcctcaaactgttacaaaatg

SEQ ID NO: 104645 - DNA, 390 bp, Heterodera glycines
aattttattcaaagtagtactccacctagcatatttttatgcagttatttaaattttctataatgttatttcatagagaattgtttgctaatcattttaaaataagtttgcttgctctatcattttttttgaattttttatgaacttttaaaattttgtcttttttattgatttttcgaaactttgatcactttttcttatcatttttggcgccagagccaataaagccgaaaattggcaatagcaaatcgactatgctctacacgataaaagcggttttaaaacgctctgagtggtgacagttcggaatgttcccttgttaacagggtggaggcgcagagtcatacatttaaaaaagggagggggattaaccaaaatttttgcaaaatg

SEQ ID NO: 104646 - DNA, 1003 bp, Heterodera glycines
gaatggaacagtcggcgaagaaggaattgagattgactgaggaattccttttgttattttctatatttaaatgaaaatggtagcaacaaaaagttttgtttagaaattgtaactcaaaaatgaaaattgagtataaatattgcgattttcccaccttttttcatcctcatcattcctcaattacaaattatttaattccctgcgatgctcgtcgacgtcctcttcaccgcgtccctttcacttcaactgctgcccctgcactatgggtcaactccactgtgcagagaaaagcctagtactatctcgtcgtttctctttttctttgtaatttctctcactttggcgtactatctcttcattttaattatgtaaaaagtaacatttacttcgctacgtttaactttttttctatacgttaaacctacaccaaattttgcatatcgatagagaaaagaattctgcatctttctatagtgaatttaattttgtctatggtcaaactcaaaagttgtaaataataataaaaacgtatttctttttcctctcattttggcgtactattttcaagtctctaacacatgaaaaaacatcaaattcgcaaattcctataattttggttatacgggtacaaattcactttggacatttagaaccaatagaaaaatgattagttttcgcattttggttgaaatcagcagtttaggacttgagttataacgtgataaaaatttgaaagtatcacaacttttttctgagatgtcaaattgcttagcattcgcttagaaaaagattcaccttttcaaaaactttttttaaataccaaatttgttcagtttagttgggaatgaagcgagttatggcagatcaaaataaaaaatacaaaaaagacattttccagtgtaaattttgaattaacgcgcaaaaatttacgccaaatacgctatttggcgttatgagcaattttgtctaacactgggcttgacccatagtgcccctgctgatg

SEQ ID NO: 104647 - DNA, 1003 bp, Heterodera glycines
tggatatggtataatattctagcactaccttcgtattatttctgttcaaatttctaggtggtataattgcggggctgttaacgctttgaataataaagttatattatattttttatttatcattatttttttttgtcattgaattttttgtaaaatattaaatgcttgttttaaaatttattttgagtttttctttatttttaatataaataaatatgattaaataaaaaattaataaatgaaactgatcaaaacccaataacaactcgaattgtcaatggactcgataatatatattgctttaataacataattaatcattaaatgatgagtattattgaaaacgataaaatgttaatatgcggtcttttgagtaccatttaaaaatttgaattttttaaaattgcatttaagttttcattattgacgaccaaatcatattgccaaaatttaaatatcaaataaaaataataaatgatataaaaataaaattaattttaaaaaatataaataaaatattcagttgttaaatataattaataaatttaaaatagttcctaattgttaaaataggcataaaaaaattctctccggacattttgaattaatttatacataatgaatgcattttcaatcgcctattgtgtatgattgtgaataatgaaaatgaaaaaaaacaaaccaagacgcggacctacatagggtgtaacataagtttccgcacaattttttttgacaaattcaaaaattcataactccgtaatttctgcagttattttaataattctttttttattttgttcgtcagaaagtcttctttcatttcatgccattgtttcattttttatttgcttattcaattttttagtattttttcccgaccatgcaaaaattgaaaattggcccactaatttttctcgatttttttatggtcaaaaaagtaacctgatataacaaaaaagaaggttttctgtacaaattagaccagtagaatccgaatatg

SEQ ID NO: 104648 - DNA, 392 bp, Heterodera glycines
catgttttttaaaacatgcaattaaaaaaaatctcttaacggaattgaatgcttttcatacttaatagaaaaaaaaattaaattaacataatatcattacaaattaaacgataaaattcactatcagagcatatctgagcaactttttcattggagttacgatagattaacttttttttttgctctttacatgcgtattttgaaattgtagtgaaaattaataaaaaaaaaatttaagctccaacaataattaaaattatacttaaaataactcttataagaatacaataaatgaaaactctaatcaaatactaaatacaacacatgtaaaacaattaatgtaataaacattcttattctttactacttttatttaaataattcttaccatg

SEQ ID NO: 104649 - DNA, 894 bp, Heterodera glycines
  unsure (1)..(894): unsure at all n locations
ctctagagtcaanncggacacttgaaaaaatcgatttatttttgttttcgcgtcagtccccccgaaccgatgcgcccagatttatggggagaccgaatccttcgggaatagcttccctatagcctgtactttaattctgcgttggatttttgctccccataattgtttgagtaccccaaacggacacttgaaaaaatcgatttttttgttttcggggcagtccccccgaaccgatgcgcccagatttatggggagaccgaatccttcgggaatagcttccctatagcctgtactttaattctgcgttggatttttgctccccataattgtttgagtaccccaaacggacacttgaaaaaatcgatttttttgttttcggggcagtccccccgagccgatgcgcccagatttatggggagaccgaatccttccggaatagcttccctatagcctgtactttaattctgcgttggatttttgctccccataattgtttgagtaccccaaacggacacttgaaaaaatcgatttttttgttttcggggcagtccccccgaaccgatgcgcccagatttatggggagaccgaatccttccggaatagcttccctatagcctgtactttaattctgcgttggatttttgctccccataattgtttgagtaccccaaacggacacttgaaaaaatcgatttttttgttttcggggcagtccccccgaaccgatgcgcccagatttatggggagaccgaatccttcgggaatagcttccctatagcctgtactttaattctgcgttggatttttgctccccataaatgtttgagtaccccaaacggacacttgaaaaaatcgatttttttgtttcataaatatttttttcagaaagtcatg

SEQ ID NO: 104650 - DNA, 122 bp, Heterodera glycines
aaatgccaaagtgatttgggaaaattcagattttaatataattaggtagatatgtttttgggaaagaattatttacgacggacaacggcggcaaaagcgatgatcaaagacagcatttaatg

SEQ ID NO: 104651 - DNA, 1003 bp, Heterodera glycines
gacagtgctgtggggcagagaaaagaaaagagtgaggagatggaggagagggatggtgcgggggcaagggaggaagagagagatagaggagagagagagagattgcggggcaagggaggaagagagaaagagacagattgtggggcaaggggggaagagcggatagagagagagcaaattgtgaagtggcagacagacagagaaaattggggtgcggataagcgaatggggggggtcatttttcggtggagatgaccacgccaataaggcgtcgttttctctgcttcttttgcccatacgctctctaactgggaaaggtcattggaccgaagagggcaggggggggggacgaatgaatggcattcattcattcactttagcgacgccaaacacccaactctccaaaacaatttaagcaaatatttattgtaattttagatttgttttccaattttttattaaaaaatgaaacgtcaatttgctaaaaggtcgggtggggcgccatcccacctcagacgggcagcggcaaatgtggccactgaccttatgaaaaatgtaaaattttttaccttttttccaaaaaataaaataaaaataaattttgtttagtattttactccatctggtattgaacggggggtatgaatttctttttaaatttaataattaaattcaaataaattttcatgtgttgagcgcgcgttgctgggacaatgaaattgggggcacaacgacaaatggccagcaagtaaaaattttttcaaattttttccccatttaataattcttttttctattttcatgtgtggggggttgatttttatgaattaatttctaaattttaccccaatccctaaaggcggcggcggcgacgaacaccggtgacaaacgacgagcacccgacgatgccgaacaaaggcgtaatgaggtctgttgaatatttaaaatttttttttcaaaattcattttttctttttgtttcaggaagcaccgacaactgatg

SEQ ID NO: 104652 - DNA, 867 bp, Heterodera glycines
ataaaagctataattcatgcacccactattattttttggattaatacaatgcttcaaagtgttaatcggatataaatgcgcggtttttgccaaaatttgaccgattttaacttatatttttgaaaaaaaaatttcaacttttttgttagaattcgggtccgggtttcggaattgggcaaatccgagttcagattcgtaatcagcatcctagaaaacccccggaaactaattttgagccaaaaataaaaacgttaaattagggacacccattcttccagggattgcggattttgtgcatccaatcaatgactatcctcagtttattaggccataatagtctttacatcattggtaccaaagaaagcttaaagtctctagaatataaatacaagaaaataacaacaaaaaaaaagtaaaaacccatcgcactgccccgactcgtactgttggcataggcactaaatcaaagagaataactacatttcttcccgtcatgcaaaaattttgagtttcaattccgccgcgcatccgtaaatttgattttggtgcgggctcccgcgggatccgtgtattctttgaaaatcgcaatgacaaaatgccaaaattaagttttggacaaaatttgttaggaaatcggtaaagggtttcaaggcgtcaccaccgccccagttcaccaaaagttccttggaaaaagcacgccgcaaaaaagtgatttaatcccgcaaattcctgcaaattataaatgcgggattgatctcgcggcatcccgaaaattattacaaatatatgtgtatcgcttcatcatttctaaattttcagtgttagtgttacatttatcttctcttgcaattagcaaattttaaaatg

SEQ ID NO: 104653 - DNA, 391 bp, Heterodera glycines
  unsure (1)..(391): unsure at all n locations
tgtacagtccaaatctctgatgctacaataagcccacagacggagaaagaattgtgaatgggacaatattagaaaataaaaataaaaatttgtgatttaaatttattttagcattgtgttaagaattttatttatttatttttatttataatgcaagaaaaaaccnccatttggcaaattgactttagcaaattgtctcggcaatttccaactgcgttttatggggtgcatttgttatttatggaaaaggcattcatgaaaaatgtttcttttctcatcagtgcgattgcctttttaaaaataattattttttaatatttattattttattttttgaattattactcttactgtatgtaataccgtatcaaccgaccgaccgttcgacatg

SEQ ID NO: 104654 - DNA, 1003 bp, Heterodera glycines
tcattttttttgtttttatggaaagttttatttgaaaattgaatttacttttggttttatactaattttcaaaaaaaacatttaatactccgatatttatttaattttcaaaaatttccataatccgccgtaccgcatgggatcccaaattattgaatggatatctctattaaagtggcccctgacattaaaagacagttgaaaatttcacaaaaaattttacttagctaatttcacgatgattttgtaaaaatttgtaagttctctaaaaatcatacactctctgagaaattttacccataaattgccaaatttttttttatacatatttttacaattttatttgcaattttacgatttcatctgtatatatattgtatgatgaaaaaagatgaataatattataattgaaaatatgagttaaaatgcattgttatcgattttataaattttttttttcttcaacaatagcgaataaaatttcatttttatattataatttttataaaaaatgtataatattagtttttcgcattagaattaatattaaaattataatatttttacttttctatattaaacccctttcaataaaattaatataaaatttattttgacaaaatataataaattttctgagcttaatttcctggtaaagtggtatgatttaaaatagtgtgaaaataatttcattcaaaacttgaagcattccccaatttattgtaagttgtatgaattgggtcaaatttcttttttgaactttgtcaaaccctcgaaaaataataacaatcttagaaataaggacttacattggcatggcaaaataaaatataaatatataaaattgagttgttcttgaaaaacgaaatcccgaccttccccggctcactctcgactttttacccgaaagtgtgttgtgggtcggggaggtaccgtaatttaaaaaataaaataaaatttacggctaaattatttttagagaatttgaaaattttttaccatg

SEQ ID NO: 104655 - DNA, 106 bp, Heterodera glycines
  unsure (1)..(106): unsure at all n locations
ttttgtgatttttgttttccaatcaaattgttnagcatttctcgtgccaaatgccatttcttccgtcacttacgaaattcatttttctgttcatgtgccgtcaatg

SEQ ID NO: 104656 - DNA, 205 bp, Heterodera glycines
acagtccgagaaagacgctcgcacaattggcaatgattttggagggaagcaagctgaaattgccaaggtgacacacccaaagccaaggggcgggtcaaaaggtcaatgttttcgttgtggttcaacaaatcattgggccaataaatgtcaaaatcagaaggacaaatgcagcaagtgcggaatgattgggcattgggcaaaaatg

SEQ ID NO: 104657 - DNA, 817 bp, Heterodera glycines
  unsure (1)..(817): unsure at all n locations
agtttctgaatgctgctgatctggccaaattgcggtgcccttaaaagccgccaagtctcaccgagcacaacaggaaacccctaaaaaaggctnnnggnntggggangggnnnaangttgatcaaaataatcaaccaaaaaaaactgcaactgctggccaagcgttgtccaattggttgcacacgccgaccgccgatggccaacccaagcaattgtttttttattcgcctattaatggcccagaaaaaaaagaatgggtcgacagattcaaagaggtgtgacagggagggagcagcagctcgtccccccccccctcaacgcccccgattttttaaaattttttggaaagttttcaaaatgaaaaatcagtaattcaccatgaaaaaaaattctttttttacttattcaaaaaactcagaggtgtgccaggaagcgcatgtttaagcgagttttggaaaaagattttagaaaaatgaaaaatcggtagtgattcacgatgaaaaaaaatttttgtttgaattttattaaaaaactaagatttttcttgaaaaaattctacattagcgagtcttttttaacatagtgcacattttcataaatattattcaattgattgttgccaatttgtgttggttttcattttcacaaatttgtttagcaatttcgccgtgccaccactgccgtcagctacaaaattcagtttactgcttatgcgccggcgtcaacatcatggtgccatttgaattggtgaacgaaagaacccgggaaaagctgacattgaccaagccagcaaacaaccgatggataattaaacgatg

SEQ ID NO: 104658 - DNA, 221 bp, Heterodera glycines
agtaaaaagaaaaaaagagccttttaaatcactcctattttaattaaactcaatttttcactggctttaaggttttggctgatattgtcaaagtgtctctggaacagctctttggccaactttcgaaagtggatttgtcttccacggagcgcaccacccaaaccatcgttgatctaactgcttttgaggaagcctttcaggaattcatcacaaccgaaatg

SEQ ID NO: 104659 - DNA, 645 bp, Heterodera glycines
ttggcccaaggaacttacttttacattggactcggaagacgaggggccctcgctgggtgaacgagggctgaccacattcgttgcccggcgggaggaaacccccgaagcgtcgacagaacggactgactggctactcaatcggtccggcgatggacgaaggcagtgcgggtcatggcgtggatgcgacggttcatcgcaaggacacatcgcaaaattaatgatggcacgggcgacccgcggtgccaaagcgcgagtcacgggcgatgcccgcccgtcctaagcaacgaagaattggcgcgagcaaaatggcagctcctccgttcagcacagagcgaatgccaaacacgggaaggcatgcggaccgaggtggacggccacggagtaaccaggctgatcagtcggatcggctggtgcgcggaggccgaagtcagtaggccagtcatactcccgaaacactcaagggcgggagcactcatcattggcgacatccatgggcggcttcatcatctcggcgtagacggaacgctggccgaatttttgagggactggtggtccccgagcgcacggcagcaggtgcgaaaggtactcggccaatgcaggcagtgccgacgactccgggggatgccctaccccctaccgactatg

SEQ ID NO: 104660 - DNA, 611 bp, Heterodera glycines
aataaaaagtcatcagaagggcaaaaaaccacttactctgacgactgttcagatagtatgtcgtagagtaagtgatataatatatatggatgatcaaaaaataaaatcaaaatatatgaataaaatgaggtcaaagtcaattgagatcgataacacaaatgtcaaatcacttaaaaaattaattctgtgtttgcttttccggttattaccctaatgaatttttaagttttgttttaaattgatttaaagaatttgtttcaaaactggggtaaaagatttactaatcgattcctctcgaggagctaattgtaagaggggtgggtcgcggacagaaaaatcccgcggtcgcggatagcggattcaaactgccgcggatcgcgaatttaaaaattcaaaaatttcaattttttaaacatcaatgctttgagtgtaatttgctaacagattttgtccaaaaaatggactgatttttcttagcatctcataagccgcgaatcccggtcgcatcttttgacattgtcattatatttctatctatattgtatcttttgttttgttttcaaattctttagataattttattttcacagattctgtactttcaatcaatg

SEQ ID NO: 104661 - DNA, 203 bp, Heterodera glycines
tgttcgtaaagatttactcaatttcaaacagaaatttcacccgaaaactgctggaataataataatgccatttgaattgaaccgttttcaagtggtagaaaatacggtttgactaattttgagggcaaaataagaccctaagaccgaagaatactttcttacaataaaacgaaactgcttattttctttgtctttttagcatg

SEQ ID NO: 104662 - DNA, 622 bp, Heterodera glycines
aaacatggaacggaaagtgatttttggctcgtccctccattattgacaacaaaacaaacaccaaatagcaaatacaaaaacaaccaaattcaatggaccattcgaatttaattcattccgaccggttggaaagggtgggagagattaagagattaacagcgaaagaaaagggtggcacaacagcgaattggagagaaaaagaaaaacagagaacggaaatagacatagagagagaaaaagagagagagggctaaaggaacgcgcaaaaaaagagcgaaaaatgccgaaccaacggagaaggaatgaacgaaggaaaagagggagcgaatgccgtggcatgacaacgaaatgaacgaacgaacgaacgaacgactaactgaatgtgactgactgttgttgcttgttgctattgccaatttgtgcattcgttacatttttaaattatactttatggcgaaatatttattttaaatgcattaggtaaatttgaatttcgctaacaaatcaaacaatccatccattcggtcggactttttcattaaatgctttaaattttcagaagattttaccaatttagatcaaaaaattttcccaatctttatatattatttttttcaaaatg

SEQ ID NO: 104663 - DNA, 577 bp, Heterodera glycines
ttttgtaacaattagcatgcaattaattaattgttcccaaattacataatgaagttaaattacacacctttttaattgacacagatcactacgacaaatttgctgttgccatatgccagataaacatcgagtttgttttttacgcaaaaaatatttaaaagtgccgcgaaatttggcacgtcaaattggcattgatttcagctgccggatcagcaatgatcagacggcactgatgacgaaatatttttattcgattaaattttgtaaaaaaattaacatattaaaaagataactaattttttttaaatgtgtgttgtgttttttatgtttgtcctaaggaaatgaaaatctttgtaatatttaatcataaattgtcctattttacatatttttgtcctgcagatttggtaataaatccaaggcttttaattttttaatacgtaattattagcgttggaaaacatttcctattaatcgaaaaaatattaattctataaaatttatttcgttaaattattaaattagtaatttttttttgtgaatttataattttgtcaagcattatcattgaaatatg

SEQ ID NO: 104664 - DNA, 280 bp, Heterodera glycines
tcgcccaatccgccgatgtctctttcttttccttctttctttgttaattgattttgccgttctttttcaataataaatttcgtccttttgagattatcacgcgagaaaatcacagagaaatggcagcaaatgttgcggaattgaggccaaatgagtcggtgtttctttttccctttttctgccctttacaaattcaaattgttttcgtccggcattcctttcctttctctcccttttcagtgtcagtgttggcgaacggcgacaacaaacggcggaaatg

SEQ ID NO: 104665 - DNA, 423 bp, Heterodera glycines
tcccctctctctctctctaaatatctctctctctctaaatctctctctctctctaaatctctatctctctctaaatctctatctaaatctctcctctctctctaaatctctctctctctctctctaaatctctctcactctctaaatctctctctctctctctctctcccctctctctctctaaatctctctctctctctctcccctctctctctctaaatctctctctctctctaaatctctatctctctctaaatctctatctaaatctctgctctctctctaaatctctctctctctctctaaatctctctctctctctctagatctctctctctctctctctcccctctctctctctaaatctctctctctctctctcgcccctctctctctctaaatcgctctctctctctcgcgatg

SEQ ID NO: 104666 - DNA, 1003 bp, Heterodera glycines
tctacggtttagccctacaaatggtcggtttgaaatttgcattgtaggtaagaataggtattctcagaaaatggttatcccttttttctacatcattagacatgtgggtttcagccaaatcgcattactatctacggttgagccctacaaatggtcggtttgaaatttgcattgtaggtaagaataggtattctcagaaaatggctatcccttttttctacatcatgggtttacagccaaatcgcattactatctacggtttagccctacaaatggtcggtttgaaatttgcattgtaggtaagaataggtattctcagaaaatggttatcccttttttctacatcatttgacatttgggtttcagccaaatcgcattactatctacggttgagccctacaaatggtcggtttgaaatttgcattgtaggtaagaataggtattctcagaaaatggctatcccttttttctacatcatttgacatttgggtttcagccaaatcgcattactatctacggttgcctacaaatggtcggtttgaaatttgcattgtaggtaagaataggtattctcagaaaatggttatcccttttttctacatcattagacatgtgggtttcagccaaatcgcattactatctacggttgagccctacaaatggtcggtttgaaatttgcattgtaggtaagaataggtattcggagctcgctgacacggcagtttaaaattttggcgattttttccgtaagaagcaccattttgagaatttggaagctacaattttggaaaaattaacgaaaggaagagtgcaatttatagaggaaaaatgcaatattaatgagatgaagacaacaaaatgtaaaaattaagcaagtatacatgctatttatattgatttcgaatgagccaaatttattttatgggttaaataaacattgaaaggtataaaatgcaaaatttttagttctttgtattattattcttccattttcctaaaaatg

SEQ ID NO: 104667 - DNA, 538 bp, Heterodera glycines
aacattttattaatcatgtaaaattacaaagataatttatttattttttaaattaaggttctttggttaatgtttaatcatgaaacttgttctcgaggggtttttgacgacctctgatcatgaaaatgacatctattttggccaacttctaactaacccgaactcggacaaaagtttaaaattccaattgtccatttatgattttttgttcaaatttaagccatttttaaagtagcgcaacaaattccattgatttaaagatgaatttaaaatctttaaataattccaaaaaaaaaacaaatgcaatttctttttttgctaagaatttcatacagtccatgattagaatcaatcaatatagccgcattgattgatcagcttcaatcaataatgattgttggttgaccaaaaccaatcaatcctcattattcagaacgaaattccgcgttcatcggatgccgatttgcgctgggccaaaccggagtgccataaggcggaggtggcccaagcggcagtgagcaaattattgggccaaatg

SEQ ID NO: 104668 - DNA, 570 bp, Heterodera glycines
gacatgagtaataaacattttgattattacaattaaaataagcttttattattatacatttataaaaaaaatggctaacaattaaaaaatatattcatatttaataatctcaataatgtcagtatctaaaaaataatataaacgcttttcattaattgttaaaataatgaaaatcttgcttaaattatttcatttaatgtgcatgaaaataggcctaaacaggtcaagcaactgcgataacaagactactttcgtttttaaattttaattattttgttattccaaataaaaaaatactatttatttaaaataagttttaatacatataatagcccgtcctcaacacttgcagggcgttttcatgcatttttggcaggtcatatctgttactgtcatttaaaaacaatataactttctgattataatattagcataaattattgtttttaaatactgaaaaatagaaaattttttgctctttaatgctttttatggtaatttaatattttatttttctttgtggtaattatgattttcatcaattccagataatggcagttaaacaatatg

SEQ ID NO: 104669 - DNA, 1003 bp, Heterodera glycines
atttctgaaaaaaaattaatttaattaaaatgtgtttttcgtgcttatctctgcaataagtgcgcagaattttaagcatttgactaaaaatcgcatccctactaataaatcgaccatttatttagaaatattttatactttatatcacaaatctgatagtatattttaataaataaacgattttttttaaatcattttattttactttatataataattatgcataaattcttcctaaatatttttgtggtagcgatggttcaatgtgaaagtggataaaattgtccgttttgtccacataaaatgaaaaaaaggcatttgaatcgcttctctcccaaacactgcactgatttgtgaatatggaatggacaaaattccgatcagcagaaagataaagccaataaacgatgagtcaccgtttctattggcttttttggctttttaagcgtttgcaaagccagctaaacccactaatttaccaatcattttacccattttcagcaaatttattcctttcccaaaatcaaaatgaatttaatttgcttttcgctcttttttgttgttctggcgacaaatgccatcggtgaagggtaattaaatgaatgcaaatcaattttcaaatgctttctgtttctttagaattgccgaggacaaatggaaaaagtgcgaattgaacggaatgatcagaatgggaaaggacgttaaaaagtaatttgcaaataattttggtgataattaattaattttccctcattaattagtctgctgatctgctaccagagcaaattggccgataattttggatggaaagtgggaaaagtgttcaaaaggcgcaatttgaataagcaattggctgaaagatgtgttggcacagacggcacgaagggatggcacgcgctaatgatcgaacagaaggaaaacgggcaaaatggtctgatccttaagtcctcttttgggtgagtgatttaattttaaattaaaaacaaatttaattttagaaatg

SEQ ID NO: 104670 - DNA, 68 bp, Heterodera glycines
atgatccagtgggaccacaggagtgggaagaaaatgaggaagaaacgacgaaaaagggcgaagaaatg

SEQ ID NO: 104671 - DNA, 110 bp, Heterodera glycines; identical to SEQ ID NO: 98226

SEQ ID NO: 104672 - DNA, 187 bp, Heterodera glycines
attggcaccaatttttgtggggtgtccgtggcattttcctcctcttttttgtcggctgtccccgcattcgcatggagaagcgtttggcaattcaaaatgtcaacagtgagcaaaacatattgtggcattttcatatttaaaatacaattttggcacgcttttttgcataggtgggactcaaatgatg

SEQ ID NO: 104673 - DNA, 776 bp, Heterodera glycines
agtggtcatttttgttcaatgttacattataagcataagaaattacctgtaaacccaggttctttgttctacataagcaatattttttatttcttagtgagcatgtccgtgaacaattcgtcttttattcaaaccatcgctgccaatttgtgcttttcttcgcgcccgggaaggagtcagcccatcctggtgacgtgcaccatgtgttcaaactgcaggaagtcgaacatggcaagcacaactttttctccatttcatcccatttttctctctcaacgatcttttgaataataattggttgataaaggtgttctgactcaacatgtctcgcctaaaatcgtggacaaggccactgggcgccagggtgccatcatggtcttagacaacatcatgttgaagatgaacttgaaaatgggcggtgccaattacgaaatttatgccgcacaggcattcaaacaggccaacgggatccgccatgacattctgtaagtggtcggccggcgagaatcgcgagtattcaatcttttgacttatttgtaccaaccaaattgttaagcgccgaacaatggctgggcagcaaacggatgtttttcggcttagaaatgtcccacgcgccgccacagactttgttcgaacggcgtacgggaaaggcgccggccattccgacgattgttggcgtaagtgatgctcttctgcgaagggttccccatttgggcaaggggttgaccccaccttctccattatgcacctgatcatgggcctgccttccccagatg

SEQ ID NO: 104674 - DNA, 183 bp, Heterodera glycines
ttatgccgtttagctcttgtcccaaaatataaactaaaaagacattttactcattatatatatatatatatatatatatatattaaaaagcaacttatccttccccctcccccctcccgcacatttcgcatattgacatatataaagtttttagcttccgaatttttgaataatcattcaatg

SEQ ID NO: 104675 - DNA, 956 bp, Heterodera glycines
tactgtacccactgcaatttccgtgccatgtacgaatttcacctcatgggacaattgtgatggacattgaaaaattttccgaatttgcgggtgaagctgtggggagtcgccgattgagcaaaacagtgcaaataatgggatttggatggagaattatggcacaaaaaagaataaatataaaaaacagagaaaagtttttggcctttcacctttggtacatagcaacaaaagaaggtaaaaaaaattttcactttcctagtttttatcggacatatttcacataaacattttttaaatgccaataaatgtacaaatgttactagagaccgcaaaaaaggcatcacaaatcgcgaaaaaggcactaaaataggtaccaaaaaatttaaaaattaaaaggcacaaaaatcccgaaaaaggcatgaaaaaaggcctttaaaaaaaatttttaaggttttttagtgagcaaaacacgtaaaacttaaccaaaaacttaattttggtcattaaaatgattattaaatattttataatgtttttcgaataaggaaaatttttaaacctaaaattttttatcaagaaaaaaatgaaattttggcggtcaatttttgagaaaacttttcttaggggtgtattttcggaaaatttttcaagtcatttcttaggggtgtgttttcccgatttaattccatttttaactcgactcgagtaaattctcgagtttctttttttttggtctcggcctctagatattcggtctcgggaaattttaggaattcaataaacttcgatatatgccataaattaatctaatatttgtacatttattggaaatatacggtaaaaattaggaaaataccaaaaaatttaaattactaaaaagatcattttattgttttaagattcgaatttgtgctgcgtttgttcggcaacctttcgaattgttccgcaaaagaatg

SEQ ID NO: 104676 - DNA, 401 bp, Heterodera glycines
  unsure (1)..(401): unsure at all n locations
gtttttgacacatcattcagcanaagctgtgcaaattaagtgaatgtgtttggcaggaggattaatgcgaaggaaattaaaattttcaactatcaagaacgtggcataatactcaaaagttggaaatccaatagcaccacggcagaataaacaaaaaaaattgcaatattgattttaaattaactattttcatgccaaaaaattttaaaaaatttaaacaaaaaaaggatttactaataatttcaaaataatgaacaaaattgatttaaataaatcaaatgccgtcaaattcaaacgcccattttttacttgtttggacttttggccatttgttaattaggctctttttttcatttgttgtagctaaagaattgtcctttatgctgtgacattagaaaatg

SEQ ID NO: 104677 - DNA, 102 bp, Heterodera glycines
tttgttaagcacgcaaattgcacaaactaacccaataatcattctttttcatttaattattattcagaacaaatattgattagctaaaaattttaaaaaatg

SEQ ID NO: 104678 - DNA, 1003 bp, Heterodera glycines
aatatgtgttaaaaatgcaaaaatatgtgctaaaaattggaaaaaccaagtgtatttacgcaaaaaaatcatatttaatatcagtctttatcacttttcgcccgacctccaattaaaattttggcgatatcaatcaatttgtaaagtcccggattaatttttccatcagttgaataagttccttctgggaactttgaaatccagtgacgatttaacacagcgttcgatttggctgctttaggcgcatttaaatatataaagaaattttctaaatgcttaagaaacgtaaagtagtcaacttttagggtgcattttcagattttcttgtattttttttacgatttttctcaaaaatgccaaaatatgtgcaaaatatgtgccaaaaccccgaaatatgtgccatatgtttttatgtgccaaaacgccaaaatatgtgtttttatgtttttataagtcgctctaaatcaaaaattgtttgagaaaatgctatttttgggcttctctcgccataactaagccgcaaaaaaaatatgttaaaacataaaaatcccagctctaatttttaaatgccaattttcaaagattataaattttaaattatttgaccaaattattttttaatggaaaagcaatgaatgaatgctatgacaaaaaaacaaaggctaacgaagctaatggcattttgttgaatatttaatgaaatccaactttaaaatatttttcataagaacgtgtatgcgttttaaaattatttagccaaattattttagcggaaaagcaataaatgctatcaaaagtacaaggaaaccaacaaaaaaaaagctgcccgttgaggtagttaaaatcgataaaaaatatatttttattataaacaagcaaaataatttattccttcttaattatataaaaaaattccaagatgctggcttattagaaataattgatcacttatttttctaatcaaatttattttaattcgaatttgttttctgcgataaaaatg

SEQ ID NO: 104679 - DNA, 215 bp, Heterodera glycines
gttaaaatttgcgttagagaccatctgaaatagaaactaggtaatcctatgttaatcaaaagtaatcttgtgttaattaaaaattgtttctaaaattaaaaaaaaaatttgaaataaaacagtaaattaaatgccaatggcataatttaaaattaaaaactaaaattttttttaataaaaatattttctcggaaattaaaatcccctcgattatg

SEQ ID NO: 104680 - DNA, 160 bp, Heterodera glycines
aaaattgcggcgcagcgattgaaaggaatggggcgagacgaaaagaaatggcgcacaacaaagcccaaaacgaacaacagcagaagaagacgaaaatgtcatcggtgaaaattgtaccgaaaacggcggaggacaaaacgggcgaagtgaagcgaaaatg

SEQ ID NO: 104681 - DNA, 132 bp, Heterodera glycines
attcagccaacaattaagattttggaataatttttcgattaatttggtgcttgtctcagtttcatcttcgtaaacccttaagccagcccatttagcaattttagcagaaaaatgaatgttttcagcataatg

SEQ ID NO: 104682 - DNA, 69 bp, Heterodera glycines
aaacagcaacacaccagtacacgctttgacggaaaaaaacacatcgtctgataagcggtggcgaacatg

SEQ ID NO: 104683 - DNA, 153 bp, Heterodera glycines
gttcgcttccctccattttcccttccctccctttttcgtcttccgtcttcttcccttccccttcactttctcctcggctaatcagagcgcgtcagctgagggtcgaagaagaagaggcgatgacgaatttaaggagacaaaacaccaaaaatg

SEQ ID NO: 104684 - DNA, 341 bp, Heterodera glycines
ttgagtatcgaggcaattgtccccgtcccccctgtccatttcagtacattatggtcggaattcctctctttctgatcattttgacggaaattggtcgccttttgtcgcgcggacttcggaagctctacaaaaaattgcacgctgcgcggaaaaagctgccggaagcatcgcgaaaaatgagcgaaccgatgcgcgtaagttggaaattttagaaattaataatttgcccttgggtaatttaatggcttaacaatgggcatacattgtcgacaattattgcccattttccccaaatgcatcaaattgctccttaggccatttaccatctgacggccgcaatg

SEQ ID NO: 104685 - DNA, 677 bp, Heterodera glycines
  unsure (1)..(677): unsure at all n locations
agcttataacnttggtgaatactagagcaaataaaaccattttatgctcattttgaagggaaaattctggagaatattgtaaattttatttggtttgaccttaaattgtggacttggctaaaaaagaattaaaattattgaaatttttacccttgtaaaaaattttttcctattgtttaattttcttaatattttgcataggccaatattttgacctcctctagcgattccaagtttattttatggaacttaagtttttaactcgagatcggctcttctaattttacaagggaaaatcccaaaaaaaattttaagttttgcaaagttttggcgttctgattactaaataaataataaacctatttgcactgagagcccaaaattgggccgctgtgtcaacccatagaaaaaattttcgaccataactatatcagttgcgccattttttctgggggtttgacgaatgttcagccaaatttttttggattttgttcgaatttgggcccgatgttcaaatagggtcgaaaaccgttgcttgccggatcttgataaatgatcccgaaagcttattaatttggcttttttattttgaaatgtgaaaaaaaattatgggacttaaactgtaaaagaagaaactaaattaatttattaattcatatttttaagaaaacaaaatg

SEQ ID NO: 104686 - DNA, 133 bp, Heterodera glycines
  unsure (1)..(133): unsure at all n locations
aatcacatagagcgaattttctgttcaaatggctgcgtgatttttaaaaaattngaaaaagttccgtacagcgaagcaaaaattaatatttgaatcactacgaaatcggagagaacaattcgaaaaaaagatg

SEQ ID NO: 104687 - DNA, 470 bp, Heterodera glycines
  unsure (1)..(470): unsure at all n locations
ccatattttttttcaaaatttcatgaaattctatgctatttttgatncatatttgggcgcaaatctgtgtacaattacgctcaaatttttaatgtttttccggcgccacttaacggcaccgacggcggatcaataaaaacaaatttcttaacaaatcgcacctaaattcctagcgtaaccatcataattttttggataggaaaataataattagagggtttattgaaaaaatttttttgaaaaccctcataggatccgggtcctaaaagttgaacaggacccggaatcctgttaaaacaggaagttttgtacggagtcttgttctggtccgattttcgagtttttcttcaaaactccgggatcgttggagttaccaaaaaaaatagttatacgtttaatgggtttttcatccttttttctttcataacatttttattgctaaattttaaagatttgtattgacattgatg

SEQ ID NO: 104688 - DNA, 1003 bp, Heterodera glycines
ctacctgcacggcacctacacactcctccaatttcgaacaaaatcggcaacccttttaggcggaggagtctcggagatcatgttcaccaggaccagcattgggcatgtgcaggatgagcaagagtggttgaaagtggcaggtgaaaaaattttaaattaaaattggtacggtgggaacaaaggagtttaacaaaatgaaaaagtgccaaaaccggttttgccgtaattatccaaatatgtaaatagacaagtggtggatcaaaataaaaaatttcctattttgaattacatatacattccaatttgagtccagggtcggatttttcgcttcttagcacacaaatttaaaaaaatggtagcgaatgatttgcgacgacgaatggcgaattggcgtcgtcaatttaacgaagagttgcgccaaacgattcgcgctccgcggcaacaccgtgtgcgcgtctcctgccacgaagtcgggcactgggcgatcaattggtggtcggctgacagcatagaccatctgcgatgggtaatttttttgaaaatctatttttttcaaaatacgatcatagttacagtatttatttggtaaaacaattaatttgttaaactgattacaaattatgttttcaattctccattttatattgtgctttgaccccctccccttttccctaaatttttttatgttttcaaaagtcatttaaacatttttacaaggattttggggtctctgatcacgaatccggcacccgaaaatagcatttctaacattaaaattttaaataaatatattgaccattttttgataactttttgttgagcatatttttttactttggcaaattgaaggttttgttcgcttcagacattcacctgaagcttcaaaaagcgtattcggcaatgggtttttgggtgcaccttttgtggacaaaaataatttattgggaaaaatgtttaaggtttcaagatgcagcgctaattttttttttttgaaaaacagatg

SEQ ID NO: 104689 - DNA, 55 bp, Heterodera glycines
ttagaacatttaaaattacataaatactaataggttaaactgtagattaaaaatg

SEQ ID NO: 104690 - DNA, 121 bp, Heterodera glycines
tttttcaagttcgttggcatccatcgatcatcttgttcccctttgtttccattttattggattttttattatttataccattttaattttttagggtcgaataaaaagtctgtacgcgatg

SEQ ID NO: 104691 - DNA, 1003 bp, Heterodera glycines
gtattgaacatcattttcttttattctgttcatttggtgatctaaagttcgcgtcacatcgcgtcaattggtgagaagttggaatctaaatttatataaatacatattttttctggcttctccatgctctaaatagtaggaaaaacactttcttattttggcttgtgaacaaaaaccgggacttttatatatttcgtgattttttgcatatttggtgtatattatggacttttttctgacatattttcatttttttgcacaaataatttttaaaatactaaaaaatgattgattataagcatattaacaaaagaaaataacaatttaaaaaatattttacttatttagtaaaaatattttggttttttgtacatatatgtatatattttgaacctttttgtacatatttttgacatccatagtgagaagattctttttttataagtaaaatagtgatggaagtaatttattttttaaaacagctggtgaggaggccgagataatgtttttcggtcaaggcactcctcctgaggaccttaaaaccgaccgagacgaaatgaacaacatggctcaagcatgggtagttcaataagaaaattttaaaatagtaagtaatataatttagtaacatcaattgatgttaattcccatgccttagcagcatttttgtcactgttctctacagaacaacacccaatgtacaattggtgatatcccaactaattgcaaaggcacgaaggacatttcgggagaattttgacacagaggaaatgcgtcagtgattaagaatggtaaaattgctaattaacattaattttatcttaactcattttggtgcagtattttgagagaattattgattggaaggggtacagtagttcatataaacacgataaaattttaaattatttaatttattttgattacgtttgcggaagaacttgaaagaagaagaactttatcttacaatgacattttccagtaagccctcgtgtaaacaatg

SEQ ID NO: 104692 - DNA, 1003 bp, Heterodera glycines
gtagcgatgaaatggatgaaaacgggagggagagacgaccatttgacgaaatagtgcaacgtatgcacacgaatagaaagaaaccaccacaaaatgggaggagggaggggaatgaatgaaaattatgtgtatgtgtagagctgacgtgttggaagaataagcattaagtgaagggaagggagggaaaattggtggaaggaatgaaaacagtgggaaaagcaatcgcagaaactcacaatcaaatcatttatttgtcagcagccgaaggaggagggtaatccaacgctgacgtggcgctgattgtgcctctattagtatttctttgctggtgctgtgattgattatcccagggcaaattgatttcagataatattgtcgtcatgtcatgtcatgcacacaaaattgaaaatttgtaaccctaagctatgagtcatcgcaaaaaaatttttttgggctttttttgattttccgtgtaagtgtaacaaatgttaaataaacgacgactactaatttggaaatgattatgattacgttgcattaggcaattaaagagttttagcaattgaaaatgcaggattaactaattgtttgttggatgaatttttcattatgtaattaaattttggtgtcaaacattttttgagttttcggtttacaaatttcacaaaatctcatttgtttcagtgtttcaaagtggtgacagatttaaaaattctggatgaagatgcaaccgaactaagattaggatatatatacatacagaattaaatctatttgcttaaattttaatcaaaattctggatcagaaatcctagtaaatccgttccatcttttctctgtctgtgatatctttagtttcaactttcaacccaaataaaacatatttattcttttgatttcatatgcattttaatcaaaatcgcatttctattctattccattgcaggaattaaaacactacttcattttgttttaaaaatctgtcaattttctccaaaaaatg

SEQ ID NO: 104693 - DNA, 796 bp, Heterodera glycines
gcattgacttgagcccctcactaaatttgtcgcttattccctccagcaaatcctcaaacattccgccggcatttgaacggtcgacagcgcaaaggaaaaaaaggcaaaacgccaaaatgacaaagggacgaaacatttagcgcaattgaaatgatttaaaatataaaagattcaaatataaactaaaatatacaaaaaattgccaaaaatggataaacccacaaaaaatgaaaaaacatatacgaaatacaaaaacaaaaccaacaaatggctaagtaattttcggaaatgtaaaattgtcggggagtaattctatttgaatttttttacgtgattttaaattgttaggacacttaacgcaattaaaataatttagggaaatgataattaatgctaattagagaattggacacttttgcattgtttcttttctttgtttgttgtgagttattattctccactgttgtgttctttgcttattcttttttttgctaatgagtgtttttgcattcttattttgctaatgacggagtgctcaaacaaaacaacacattactgcgccggaagggcacttaatgatcggctaattgcaacagaaaaacgggacagacatttttacaatgtccaacagaagagaagaaagaagaagggcaattagaatttgtaatgaaaggtcggcaatcacttatttgtataataaaagtgaaggactttgaactggcaaaagtgaagcattttggacccattagccggcgggaaatggccatcattagagggaaaaggccggcggattatg

SEQ ID NO: 104694 - DNA, 669 bp, Heterodera glycines
tctgacgaaatcacatgttaccctccttaatgttgatctacactagagatcaacattttgaaaaaaccgtagttgtacctgtttcaaaaaatggcctgtacctattttttctgtacataagtacaggaaaataaatgtacaggaaaaatccaggttgccgaaaaatggcctgtacctggatccaggaaaaatacagggctggatccaggtacatgttgatctctaatctacacccataaaacacagtcaaaatcgggaagtttgaaaaaaaattctagggggttgtgaattttttgaaaatttgaaaaacccattggaaggtaaaagtttttcacttttttttataaaatttttgatcaaatttttaccttttttaatttttggcttcgcgccaaaacgtgtgcgccaaaacgaccctggcgccaaaacgtgggcgccaaatcgtcggcgccaaaacgtgggcgccaaaacgacccagtcccttcgggggggggggggggggggaagaaatgctgatgtcgacattgtgttactgatttgggccatttgatgaaatgatcctaatgcaatctcacgcatttcttgcgcagtaaaggcctccgtaacattgtcacgattgaatacgtcaagaaagagtgtgcctgttgcaaaagcctaaaataacgcatg

SEQ ID NO: 104695 - DNA, 511 bp, Heterodera glycines
gaagctaatgatcttatcttagagaatgactaaagaaagggagaaggaaacgaaatgttcgatcgacgacaaagctcctataatttgatattcccaaaggaaaggggcaaaagcgcattgaacggaaggctaacggacggagaattttagtgaatggagggagagagagagagaagcacttcctgcagctgctgccgttgatcattctctgtgagggcgacaggcgcacgctaaataggagggaaaagggaggggacaagcgaaggaggagggagaaaacaacggggagacagacaaagaaagcgaagcaaaacgcatttctcaaggatcgctgagagtggcgggtggacaaacgctttgtgggattccctttccctctgtcccttcatttattcatcatcgacttcttccactcaaagaaacggatggatcgactggggtggggtggaccgataagttgagatttcaaaccgccgaagggacaaacagaaggaggaggcgatgacaaatg

SEQ ID NO: 104696 - DNA, 74 bp, Heterodera glycines
gctgggacgaaattaaaatgtggccaattttcaaaagtgccaagaaaattcttagaccggtttgagtcaaaatg

SEQ ID NO: 104697 - DNA, 225 bp, Heterodera glycines
agggcaaaacggacagggagcaccagcaaaggacgggcacataaatggccacgaaaaagtgggcaattaaaaaagcaaaaaattaattttgtacgatggacaacatacatatgtcgcataaaatttatttaattttggttaatattaatctgggtcaccaaactcaattttgctcaaaaacgatcggaatcgatttagaagtgcagaaaacgatgagaaaaaatg

SEQ ID NO: 104698 - DNA, 209 bp, Heterodera glycines
gctaaaaataaaattatataaaacataatcataaaacgtaaaatgtaaacggagaattatctccgcaatttattgaagttgtaaaggaatttgcggatcgatttgtgcgcaattggattggtaggagtacgaccaagggggacaagaagagcgaagcgggcgaacgaagggagatggtgagggagggctgtcaattactgcgcggaatg

SEQ ID NO: 104699 - DNA, 256 bp, Heterodera glycines
tttcaaaattccgggctctaatgaaatccttaggccatattcagcttttcgaaaaaagttatggccaaagaaactgaggatgatcatttatgggacgcattacataaatgtcatgggaaaaaatagtcattcaatgcaggttcgagcttaaaaatattttgaaaaatttgtttcggacgtgttgattcgggcccccaaagagaatgccataatctgcaatgttactttattttctaacaaaacacttaagcaaatg

SEQ ID NO: 104700 - DNA, 175 bp, Heterodera glycines
tgtgaattatgaaatgccaaatttaattcaccgtcttttgcagtattgccaaattgccccccccccctctaaattaattaattaattatatttaagcaaattgtaaattcacttttggccataattgagacagtttactttataataacataaagcagaagcttgaaaaatcatg

SEQ ID NO: 104701 - DNA, 474 bp, Heterodera glycines
caaattggacgaagggctcacaaaaaagctaatcgaatctttcagagaaaacaatctaacagaagtgggtgattaattaaataattaatagggactccatttttaggcataaaggcacctataagtctgaaaaaaattgcaagatatgcattaaataagcacaaaaataggcaaaaaaattctttataacttttttgggcagcaaaacacataaaaacttaatcaaaatatttaaatttggttatatttcattgtaaataaaataatttaaatatttcaaattttcgaataaggccaaattttaaagacaaatttttatagagaaaaaaaatatattaaattttaaaggatcaatttttgggaaatttttttcaattcttgtgggtgtattttctgaattttttggtcgcttcatatggggtaattttttgtaagcataaaaaccccgaaatagacaaaacttgcctaaaaatg

SEQ ID NO: 104702 - DNA, 85 bp, Heterodera glycines
aaatttgattttctcaattaatacagttaaaaaagcatacatatcttttacctgtcaagatcaatattttcaataatttacaatg

SEQ ID NO: 104703 - DNA, 75 bp, Heterodera glycines
tgcgttgcgtcccctcccttccccgtgtccccgtccccccgctttccccccgttaattgtccccccaatgcaatg

SEQ ID NO: 104704 - DNA, 210 bp, Heterodera glycines
ttctgtaaattttttttttctaaatgctaaaataatgatgaaaacaagacgaaaacactaaataaaacaatatattacatttgatgaattattcatttcattcttgtttccttatttgctcgaatcaatgaagcacaatttgattttcaatcacatcagagaattcagaaaataatttatttcttttaagtgaatacgtaactgaagatg

SEQ ID NO: 104705 - DNA, 154 bp, Heterodera glycines
gccatcacaaagcagaaaaccgaccaaaggcccgatagttaaggtcacgctttttaaaggcctcccgagaacgggctttggaaattttcctagacctggattatctgattttttttacaagaaatccagcccagtcccatggttttttcaaatg

SEQ ID NO: 104706 - DNA, 534 bp, Heterodera glycines
atcaagatcagagcagattttggcacgaagatcagagcagattttggcacgggaaaattttccttcgcgaaaaacttgcaattttcctcggaaaattctcgcttaatgaataaacagtgaacctgttcccagtcaacttataattagagaaataatttctgtgttttcccatttccggagaaaatttatgaaaaatattctcatgagatttttaatatattttatgaaatatatgtttttttgaaatttttataaaatcctctggagattattaattatttttttattaattattttataatttttaattatttgactgacggggagagaaaaacagtttaacacactctctctcattgattgagtgaggcgattgtttgatgattaaattttgttgtaaaagccaaaattggccgcaatcttcagtcttttcttaatcatttctttacttactttactgataaataattaaataatatttatgattttaaatttaaataatttttttcaaaatttatttaaaaggaaaaaatg

SEQ ID NO: 104707 - DNA, 115 bp, Heterodera glycines
  unsure (1)..(115): unsure at all n locations
tgacacttctacaacaagtccacagcaancaaagtgacttttcactctcaaacagcggcaaattgcggacgaagcggttcaagaccatgagcgtcggcgaagcgttgtcgtaatg

SEQ ID NO: 104708 - DNA, 73 bp, Heterodera glycines
acagacaagcacagctacgaattgttttgtgcaaccagcaaccatattcatcaaacggcagactctacaaatg

SEQ ID NO: 104709 - DNA, 140 bp, Heterodera glycines
  unsure (1)..(140): unsure at all n locations
tgagactgaattggttttttatnagggaagaaaatttagaaaatttgtcggacgaaaatccgacgacggaaagagcgcggaaaagggcacgaattaatggagatgatggcacagcaagagcagaatttgaggaaaaaatg

SEQ ID NO: 104710 - DNA, 374 bp, Heterodera glycines
tgcctgcaattagcgctacctagaagatgtatattaatgtctaattgaaaaaaataaatgataaagtgcgggagaggaatgtaaaacgttatgaatttatacgaagtcaagttgtccatccagttgtaagtgtattaggctgcgagatcgcgaaaatgttaatgagcaacaaataaatgagcggatttgaagacggaatgaaaaaatttctatgtgacttcatttctctctaccccttcgttaattttactacactctactcgattggtaaaccaatgtacatgtgctgaatgataagtcgagttaaatacccggaagataaacactaccccttgacaatactcaaagttttggatgattcctccacgaaaatg

SEQ ID NO: 104711 - DNA, 81 bp, Heterodera glycines
ggtcagaaaatattaaatgcgacgactcgctatcatttatcaatccttttgcaagttttcagtcttattcaattggacatg

SEQ ID NO: 104712 - DNA, 341 bp, Heterodera glycines
ttatattgctaaaaatatttggataaattttgtttccctaaaaattgcgaatatggaacaaatatggacgaaaaagtgaaatatggaaaaatatggattatatggaaaatatggacaaaaaaaagttgtcctagaagtttcaaacatggcgaaatatggaaatatggattatatggaaaatatggacaaaaaaaagttgtcctagaagtttcaaacatagcgaaatatgggaaaaatataaataaaaagtgaaatatggaaaaatatggattatatggaaaatatggacaaaaaaaagttgtcctataagtttcaaacatggcgaaatatggaaaaatatg

SEQ ID NO: 104713 - DNA, 793 bp, Heterodera glycines
ggtgggtgcatagagcacccatgggttcttaagaaaagtgattttattttctgcgaaatgaatactagtgccgagatatgacgtgtcaattatttaattgtgaaaatattattttattacggtgcgcctattgtgaaatgtatctctgtttccatcatttttataatgactaccatatgtgcgaaaacgaataaaaaattgtggaacgaaaaataaatttttgggtgtgagtgggattgattttttggccattcaattgcataaaagcaaaaataagatgggggaaattaatttgcataagagggattcgaacctgtgggggcaaaaacaaacgccaaacgcacaacctccgcaccaccgaacaacacaaaacgatgcaaatgtttattcgatttattgggatagaaaaaagtttggcacgtcatatctcggcactcgtactcatttcgcagaaaataaaaccacttttcttaagaacccatgggtgctctatgcacccaccaaatttcattccgaaactccacggacacctccagaccttcctttgttagctaaactgctgttttctgattacgttaataatatatctatatcacctcggcagagttttatgaccggtcccgacattgatatgttgattaaagattataaaaccgtgatccttttttacagttcatgaaaaatgcacatggcacttttcggcaagatgaagctgaatttttttcgaaatcagtaaaaatgtgcctcaagcaatcacaatcaaataataatttaggcaattaaagagtgtatg

SEQ ID NO: 104714 - DNA, 136 bp, Heterodera glycines
tccttttaaaaattccgtttgcgcaatttgaaacttaaaatggacggggtttcacagacggctggctgtatataagcagatggtcaatctgccgtcctccatttcattctcaaaaattttctccaaaataaaaatg

SEQ ID NO: 104715 - DNA, 92 bp, Heterodera glycines
actaaaaaataatattttttgagcttttggtccaaaatatattatttattactacaatttttcatctttttcagacaacggaagtaaaaatg

SEQ ID NO: 104716 - DNA, 929 bp, Heterodera glycines
gagtcaaaatggtcaccatggacggtaaaaaagaaaaaaaagcgacaataaatctttttatggataattatgggaaaaaattggcgttctgtcacatttactttttatctttatttctctcacttttacgtactatctcttcattttaattatgtaaaaaacaacatttacttctctccatataacttttttcctatgcatacaatttgcaccaaattttgcaaacctatagagaaaagaattctgcatctttctatagtgaatttaattttgtctatggtcaaactcaaaagttaagaagttcctaataaaatgtatttcttttcctctccttttggcgtactattttcatgtctctaacacattaaaaatcatgaaattcgcaaattctaataattttggttataagggtacaaaatcactttgaacatttagaatcaatagaaaaaagaataaatttagcattttggttagaaagagctggctaggacttgagttataacatgataaaagtttgaaattccgacaacttttttctgagatgtcaaattgcttagcattcacttagaaaaagattctccttttcaaaatctttttttagataccaaatttgttcatttttgttgggaatgaagcgtattatggctgatcaaaataaaaaatacaaaaaaggcatttaccagtgtaagtgcatatactttgtttttgcgtgtgttggcgttttgttttacgccaattattttttggcaatttttttcgttttttaccgtccatggaataaaccggtcgataattccaatataaatttttggaaatttgtaaacattttcacttccgacatccaacattttcgggctcggaaatagtgttcataactaaactaatttaataatctgcatatttaagaagcaattataattttaaaaatg

SEQ ID NO: 104717 - DNA, 729 bp, Heterodera glycines
  unsure (1)..(729): unsure at all n locations
tttttaaaataattaaattttttttttgcgattttcaaatntctccaaataatcatttggatccttcaccgttcgctcattcgtgtttattggcctggatatgtatgatgattaacctgctgctggattagtctagtaaaccaaagtaagaaattaattcatttaattagtcgtcattaaattttaattggttttcggcactcggttgggccgattcgaagtgccgtgaaaatggcattgaatgcacggcagagaattgtcgttctatgcttggtccggcacttttcaacatacgttttccgcttttgtcaaacgtggaatttgcgaaggatattgataaaaaaaagagattaaaaccaagtttaaactcattcaacaacgagtgtcaactttttaaaataattaatttaaataaataaaataaaaatttaatatgcttttcttatattttcagtgcattcaaaatgaaatataattttttaaaaattgtattccattttttatccatggagaatattggcacaaattaaaaggaaatggggaagcactgatcagaattgtttgggctttaacctttttcgatgctccaaaagaaggtgcgaattaactgttaattaatgctaattacaacgatgattaatttccatttagacgaaaattggagttgcaaatgtcctgcaacttttcgaattgtctctcaaaagaacgatgggtcggatttgaagaatg

SEQ ID NO: 104718 - DNA, 929 bp, Heterodera glycines
aagtcacgataatttttcaaaaaatctccattttttaaattaagatcttgaattttaaattaaaaaatattgtcatttgctaatttttcttaaaaaatcccttaaaaatcccaaaaaattttacaggtctccaaaattccactaaaattttcaaaatttgacgcaaaagttggccattttgtgacttttatttcttcataaaaagaattattttttttaatttctaaaacattagtctaaatcttattaggtagttttatggcacaacgatttctaagaattttgtccaataatcagaataaaaattgttgtctacgcatttttccttcggtgccaatcggacatcaccagacccaagaacccattattttcttataaattagttcaaaatcacaaaatatggacagtttttgtataaattctgttaacaaattacatttcaaattttcaaaattttcccggcggcgcctatcggcaccgccgacctcccccccggttcccctaaagtttttgaaaaaatttgcagcaaaaaaaaatcttaaaaatctgattttttgattccgtttctcaaaattattaaaaatgatcatttgaggcgaaaatacaaaaattgatattaatttattaaaggctatgttgttaaatgttctcatttttgaaaatctgattttttaggcatgatattccaattttgaaaaacttctataaaaatctgatataattcacatcccttttttttcttcaatcgaattgatcaattataaatattagataaacatttgaacaaaacttggcacaaaatgtaaaaaaaaattgcgttagagcaaatcccgataagcccgcgggatcccgaaaaaaaatcttcggggttgatcgggattcggtcgggatcccgacccgggatccgtcccgatcgtttttccaaaatg

SEQ ID NO: 104719 - DNA, 1003 bp, Heterodera glycines
gctttaaggttttgtctttgactttgcttttttttccatttatttcaatcggctagtgctttaaggttttgtctttgactttgcttttttttccatttatttcaatcggctagtgctttaaggttttgtgttttgactttgcttttttttccatttattccaatcgaccacgttaattcattctctatacatttagtgtcttatttcatgaaattatattaatttaattttaaataaagaggcaaatttttacagaaaataaatagacgctgactaattagctaacatttataaagaaagtagaaatttgattaaatgcatatacaatatacaaaatattacttttttaaatttgtataaagttcctattttgtctttgactttgcttttttttccatttatttcaatcggctagtgctttaaggttttgtctttgactttgcttttttttccatttatttcaatcggctagtgctttaaggttttgtctttgactttgcttttttttccatttatttcaatcggctagtgctttaaggttttgtctttgactttgcttttttttccatttatttcaatcggctagtgctttaaggttttgtgttttgactttgcttttttttccatttattccaatcgaccacgttaattcattctctatacatttagtgtcttatttcatgaaattatattaatttaattttaaataaagaggcaaatttttacagaaaataaatagacgctgactaattagctaacatttataaagaaagtagaaatttgattaaatgcatatacaatatacaaaatattacttttttaaatttgtataaagttcctagtcgtatgtgctttgcgttggttaattggcgtgggtgagtgtggtggttgggccgtttttgcgatattgtggctggaaaaaagaagcgatttcgctgtggggagcgcggccgtctgggtttaagtgcttgcttgcgcttgtgctcggcattgaacggtgatg

SEQ ID NO: 104720 - DNA, 129 bp, Heterodera glycines
  unsure (1)..(129): unsure at all n locations
atacgtgttaaacccntgaaatantgtgcgatantttttcttttgccaaaacgccaaaatatattttttttttttttgtttttataagtcgctctaaatcgataaatcgaaaattgttaggagaaaatg

SEQ ID NO: 104721 - DNA, 1003 bp, Heterodera glycines
aaatggaggtggaggggagcaattagtactaatgaatagcaaattaatgagcggaaatacaattaaacaatcgcatgcgttaactcattaagagaagggaccaacaaaaaatgttgacaatcacttagaaaatggaaaaagcgaaaacgcccagcgaacggacggaacgaacgacgtggaagaaagcaatagaaagcgatcagagaagacagaacaacgacgagggcttagtgatcagacgaatacattggcatcaatcactgagaaaaaggcgaatttggcacaaaaaagaaaaactgtaagtaaaagcagagagatggaaaacggggaagggacaacgccggtgaggtgatgcggcattctgacactttcggcacagacattgggagagaatgaggaaatgagaaatggctgagaaaaggggggagagagagagaaatagagggggatgagagttggagtaaagggagaaagtgggaagatagagagggaattaccattaattgatgcgaaattcggttaacaatgtggattaatctttgctgttgtgtgccggacaaaagtcgctgcccaactttgtcatctgtgtccccctgttgaaggccgacaaacttttgcggcattgtttgtgccgatttaggcacggagggctgaccagaacaagcagacagaaggaggagatggaagcgaaaacagacgaggcaaggggataaaaagcgatgaaacggaagcggaaaatggtagaattgagaaggacgcggaagcggacgaaggcattacggaaggggacgcggaagacgggacaacgaagagggaaggggaaactatgaaggagtcacgacaactaatggcgcaggaggagggcgaggtgggcaaattaaacggctaataatgtttttcggcactcgttgggacacaaagaacgcttgccatggctaaatccgagaatggctttgaacgttctactagtccaaataatctccccatttttgagtcttagatg

SEQ ID NO: 104722 - DNA, 361 bp, Heterodera glycines
cgaaacaacaaagatgctgttttgaacgaataaagggcataggttattttgaagaagtgtcaaagaacatgcagcaataagcctgcaaaatctaataagtggaaaatacctgagtatagaatttattttcagaaagtgtcaacagacttttggaaaaatatatttgcaatttatcaacaattttgagaagtgagttagaaatgataaacttcacgattcaaaccagttttcggtgctctaattaaccgcgataaaaacatccgaatcaattaaatagcttctgagataataaggtttatcataaaatttcatttaaaaataaaccctcaattattggtatgaacgatactttccaaacatg

SEQ ID NO: 104723 - DNA, 131 bp, Heterodera glycines
ttttgactcaaaccggtctaagaattttcttggcacttttgaaaattggccacattttaatttcgtcccagcaaaccgttccctttggcacttccgtgctcgagtcggcggacggcgttcggttgggcatg

SEQ ID NO: 104724 - DNA, 425 bp, Heterodera glycines
gcttttggaattttaatgagtaaatcagtaaccgtaaatgacattctatgcttctcttgttggatacaccgggaagaaataatagttagtccttttgttgaatttttagaaattctatccgtccaatcggcttttggaattttaatgagtaaatcaggaaccgtaaatgaaattctctgcttctcttgttggatacacgggaagaaataattgttagtccttttgttgaatttttagaaattctatccgtcatatcggcttttggaattttaatgagtaaatcaggaaccgtaaatgaaattctctgcttctcttgttggatacacgggaagaaataattgttagtccttttgttgaatttttagaaattctatccgtcatatcggcttttggaattttaatgagtaaatcagtaaccgtaaatg

SEQ ID NO: 104725 - DNA, 547 bp, Heterodera glycines
  unsure (1)..(547): unsure at all n locations
ttcccgatatttccaaaaatcgtatttctgaccncagtattaatccccaaaagctgcattaggtcggaattcccccatgttggaccncanncnaatattcttctttctttacctttacgctatttatttttaaacatttttgaaaataataaaagaaaaatatgagtttctcacgattaaaactgctttacttttgtatattttttttcgtgttgttactgatacttatgtttttgtatggttttggcggaatggattctattttatattttattattgttattgttttccaagcctttaaaatataaattttatttttattaataaaaatcatttcatttttcgagtataatgaagaataatttataaaattattgttttaatatttagcattcatcagttttggctagagttgagcgggaccgggccggggcgggaaaacccggtttttttcaggtcccggtcccggtttttggaaaaagataaatccggtcccggttttgccagtcccggtcccggcgggactaaataaggactggtaagaatg

SEQ ID NO: 104726 - DNA, 77 bp, Heterodera glycines
ggttagtcaactccactttttcctccagtttaagtttaatttagcaacatcttctctaaactctctgaacaacaatg

SEQ ID NO: 104727 - DNA, 163 bp, Heterodera glycines
ttgtcccctctgttaagtccactgggaattggtgcttctccacggctcttctttctgttgttctgtccaaccgcaccttcccaccccaaaaagtcctttcattcacaaaaattcactcatccaaatgacaaaaacgcatttttgttcaaaagttgccaaaatg

SEQ ID NO: 104728 - DNA, 500 bp, Heterodera glycines
aaaaaagtaattttaaacacgaaaaaataatagaattcattttataaataattaattacacaagaaaattaaaaacaaaacgaaaaataaagcataaaaagaatagttctaatgaattttttagaaatgtataattaaaaaaagaaggatttgataatgaaaaaattaaaataatatttctacaaagctcaattcatatgtcggataacatttgaaaatgataaataatttaagaagccgcgaaccaaacttacagaattcagacaccatgataatttgattaatataatttaaactgaattattatttttaaatactaataatgcaattatccacaaattaaataaattcatttcaaagtttcatgtctaaggcatataaaagcaaaaaaagttaatacatacctagataaataacaattaatcttattacttaaaaaaactttgttaaaggaatgaaggaatgataattagatatttcgctatttcgcatcaaacatg

SEQ ID NO: 104729 - DNA, 1003 bp, Heterodera glycines
aattttttttaatttaaagcaaattttttaaaaatgacttttggcggaaaataaaatggggagaaagataacgcaaaaatgagagggtataaaaatcagccccagtcatacaaaagcatttttggtgaagaagaataaagaaaaattaattaaaaagagagtgttatgggaagagatttaagaccgagagagaacagagaatatagtgaggaatctgcgtctattaccaaaagaatcagcgaagaagagaagtgaattatcttcccattgcactctctattggaaatattttctctaccctccttcatcaaaaatgtcttgtatgactgggactgagatccagcactccctcatttttgcgttatctctcgcactaaaattattacccgttgaaacaaattttaaaaaattatcgtaatttttaaaaaatacgttgatatttgcgttgatggcataatgttagttgatttaaataaatatcaacatttaaattgatactccgcaaaaagcaataaaaaggttgatttgtcattctctaggcctgagccaaacttccagcttcatgcatcgaaaacattttttcaatcaattaaattttctaatttcaataaaatatatttggtggaattatcaattatttttaaattgcgtttaataatttgtaatgcagtgtttgagctttttctaatctccattatttttttatctatttaaaattttcttattttccggcggtaacacaaaaattataaccaaattgtcacttccgattgtcgtggccacgtaatttagggatgtgttttttcaataactgttcaataaaatataaacaacaagaagtctttcttcaaaataatatattttttaatcatttcatagaaatgcatttatttgttttattattgctgagtttgttaagcatttgccaagcacaaagcggtagcttttaatttagagttccgtctccgattgtttaattttagatgcaaaatctgtggaaatg

SEQ ID NO: 104730 - DNA, 95 bp, Heterodera glycines
tcttcaataatgtaccatccataaacaaagtagaatatgatattctattattttaagtttttagtcaaattttccgattgaaattctgcaaaatg

SEQ ID NO: 104731 - DNA, 91 bp, Heterodera glycines; identical to SEQ ID NO: 100405

SEQ ID NO: 104732 - DNA, 233 bp, Heterodera glycines
aatttaaatcttcaaacaagcaaattacatttcttctgctttgtaagatgcacactttaattttgtttatgagaaaaaccgaatattattagttgttcttaaaaccaaattgctatcaaaaagaataataaactgaaaatataagcaataaaacaattttcttttgacttgtccatttcaggtgccggcagcaacatcagcaactctgtaagaccttttttctgttgaaaatg

SEQ ID NO: 104733 - DNA, 112 bp, Heterodera glycines
tttaaaattaatccaataatttatagttgatgctctctcaccaattaatgatgaattgttatccgagcctgaggattatgaccctactgaaaagagtgcatttgatgaaatg

SEQ ID NO: 104734 - DNA, 581 bp, Heterodera glycines
ttttgcacttttttatttatttatttaagtaaaaaccatttttgttattcgttaatttttaattaaaatttttgactggaaaatgcaaatgcctatagaaattttcgtttccttcattgttcaatttaaattaaaaataaaattgcttattcatcatttttcaattaaaaatatgaaaattcgtcttgtatttaagcggagaaaaagaaataaataaataattattatttttaatttcttttattaaaaaacctaggcctttctaactattggggaattgaatgaaattttaaatacggagccttaaatcctatattttgggagggagcatttcatccgaaatcctaaaaaagcaaaactttatttcttttaattttccaaaccaaatttggcatttttccgatcaaaactttgagaaaattttttaattttttcaggtataacaaagtccgaaataacaaaattaaatttttaaattttcatttttttccaaaaatttttaattttccatcaaacacttttccattccatttaattccaatcgctgttggtcgatcaaaaaaaatattttactaaaaatg

SEQ ID NO: 104735 - DNA, 349 bp, Heterodera glycines
gttattaattgttctgaattctgtgaataagcctttgtgtcaaagctaattttatgggaaattcgttcaaagcccaaaaaaaaaactaaaattacaaaaacacaatcagatgacatgcttttaatcattctttagttatttttttatatttaagttttataattcgtataaagttatgctctaagttagggcgcaaaaacaaattaatgaatttaaaagggatttataattcattattttagaaggaatttttataaattttaaaatgacctaaaaaatactttagaaggaatttttaaacctttttatatggctttgaggctttttgggcaaaatttttttatccatg

SEQ ID NO: 104736 - DNA, 323 bp, Heterodera glycines
ggtaattgaaacattgtgaaaacctgttaaaaagttctcatgtaattgtcacggactaaaattaaaaaataactcattggatctaaatgtgggggaattaattaacactcctctcctgctgtgtaccgtacttactgaattagtacctccggtggttttatttcgaaaatagtggttttaatccagagggggtactaattcagtaagttcggtatttgtattagtgcataatagctttgttttcctttttgtcatctccttgcaaatgtcccctgcattctctgctccaatttttctgctcattggcgtgctcttcgccaatg

SEQ ID NO: 104737 - DNA, 356 bp, Heterodera glycines
  unsure (1)..(356): unsure at all n locations
agaaaaataaaaatattttttttatgtggcgtaaagtgacaaaagtccgcgaaaatntttggttttgtgattctgttagctgtgattggttgatgaagcacaaaaagattaattacctattttggcaacaactgatggaacactgtgggattggctgatgaaaatgcatccttatatactgtataaattaaagaattggtggtcattacaatacctcaaaactcaatttgcctttgtctttggtaacttttcctgagtatataaactccgctttcctacatttctcatctcattcgtttggcgctttctctttcctttgtatattcgacctccttaattgccttgttcgtcaaatg

SEQ ID NO: 104738 - DNA, 145 bp, Heterodera glycines
aatggatgtttggcacgagctaaagattcaaccaattgaacaattgccaagcggcttcacaatttgtcaatcaaaaattggcaatattatcagcggaaagggtcgaatcgaactcagccaaccatccaacgtctctttcgtgatg

SEQ ID NO: 104739 - DNA, 192 bp, Heterodera glycines
tgtttgaagcatcaaacgaaggtaaaaacatgttttttcctcccacattccaggaaaaaatttatggattaccatattatttatgattttgaataaattttcgaaaatttagcctaaatcggaaaattgtccatttgagaggcgaataaaatttttatttgttgcccttttcatgctcaggtgtcagaaatg

SEQ ID NO: 104740 - DNA, 391 bp, Heterodera glycines
aaacagtggaaggaagaaatagcgcaggaaagcaaagaaaagaaaggggagagtggagagagcgaggaggaggagagacggagacagaattggtcggagagcaaaacgacagatctgatcagaaaacaattggcagagatcgaacgagagattgccaggaggatgcagaacaaaaatgtgaagaaggtcgagcggggagacgccgcaattcactttttagggtttttgaatgaatgtctttctttctctcgtcacatcccttgtctctctccatcactctctttctcttgctttccctcttttatttctccgttctatttcctctgtcctttttgttttcttccgcacgggtttcggttcggttcgcctcgctaaatggccctttcagatg

SEQ ID NO: 104741 - DNA, 1003 bp, Heterodera glycines
gccttttttgattaaaattggttaatatgttataaattttcaaataaatttttgtccgctatgaaagaactttccgaacaccccaataattagttcaattttaatgacaatgagtagggttgtaaattatatggactaaaaaacgcgaaatatggacattaaatatggactaaaaaagcccgaaatatggactaaaaaggccaaaaatggccaaatatggaccaaaatatggataaaaaatgccaaaatatatgttgtaaacccccaaaaatcccaaaaaaggtgtgcatatttaatatttgcttaaataaacctaaaaagtacaataaacaaccaaaaaatggggtttaaaacttaaaaatgcatattttttattgttgttcgttgtatcaaaaacacctccaagtttgccaaatttcgaaaaaattctcattaaaaaaaaagaaatgttcgcaaaaaaatgacgaaaatatttattgaaaatgccaaaatgacgacgaaaactcaaatttttcgtgttttgtggggtgtaatttttaaaaatttccaaaaagttgatctttaggggtgtatttttcgtttttttttcatttttcttgtgaaaatttccaaaaaatggccaaaatatggactaaaaacccaaaaatggcgaaatatggatttattcccgaaaacccccaaaatatggatttatatggactaaaaaccttcaccaaatcaaaaaattttaacgcagaaatgctatttttaagcccctttcttcatagcatatgcgcagaaaaaatatgttaatccatataatttacaaccctaacaatgagtctctgcatttttttgcggcgcgctttttcagaaaacttttttgagttacggcggtgcagatcgtgataaaatttgaagcaattgtaacagattttgcccaaaatacttaccaaatttttaagccagtcaaatccttttgcgaattgttgatcatttttatcacatctcaacaatacaaatg

SEQ ID NO: 104742 - DNA, 600 bp, Heterodera glycines
aggccaaaaggggaagtttcccgccaggcaaattattattatatttgtgtaattttgtcgccttttctcacactttcccaccattggcaccgcattacccctttttcataacaaagtttcaaaaatgagaaaaataaaaatgagactaaatttttaaaaaattattattattaaattgagagacgagacgagacgaacaaacatttatttagacgcaacttaaattggcactttaaaaaaaaggtaaaaatggtcaaatgcgaagaacgctttttgccggtgccgtcgaaggaaataaaattaatttgaatttcccatttattcgtactctttttacacattgtcacatgagcaacaaacaaacataggtaagtgagttccaatttccataaaagtgcaccttttacgtcaatcgaaaaacaatggcattcgtttggtgacattggcactgatagtccacggcaataaggaaaataaatgccaaatttggcaaggaaaagagggaactgcaaattagggttgagcggtaccggtactggccggtaattaccggtttttttggtaccggtaccggtaccggtaccggttttttcaaaaatg

SEQ ID NO: 104743 - DNA, 140 bp, Heterodera glycines
aataaaaaaaaatttgttttttttttcatcttttcaccccaaataaaaaagtgtccaaatatgtatgaaaatcagaaaattaagcagcctctttttaattttcagctgaatcaaaattctgtaatattattgtaaaaatg

SEQ ID NO: 104744 - DNA, 76 bp, Heterodera glycines
ttgccccaaattacccacccaatcaaccgatttatccgttctttgctcccttttagggtacagtgaccctgagatg

SEQ ID NO: 104745 - DNA, 821 bp, Heterodera glycines
gcaatccgtaatccctttagaattgcgatctcggcgaaataaatcacttttctgggacaaaaaaaggctaattagggggtcattctgacaaatgagctcagaatttggaaattcattaattttcagagctttaattaagttgtactcttttgctcctgacaatgagccttttcagttccttgatcacaaatatttacatttaatattttcaattttttgctcgaattctctgaagtgctcatatgtaagagtgattagctcagaaaaaagttaaggatacgccggtaccgcaattcttaaggagtaccgaaaaaatggatgttaaaaaaggagttacgcagattaaaaatttatttgctggtcaaccacaaaaaacatgttaagagtgtgataaaaaaaaacgattgtgataattataattaaatatatggtgggaggaggcggagaatgaggaggagttaacaacacaacgtggaggaggccactcgcaaaaatggaccaaacaaatgaccattttcgtcgtgtacaatttgatgccgcagatcaacggtctgatcagagaaacaaaaggagaagaaaaaaggcagtgcatcgccaagcgcaaaacaaaatttggaggaatcatataaattgatttaaaaaaataaaaaatggaccaaaaaattggacaacaacaaaaaagaatggaggagggcagaaaattgaaaaacaacagaagcagcagatgaaggaagcatggttatgcaccaccaaaaacagacacaaacaaatgcaaaatgtaaaaggtatgattttcgtgtgaaaattttggcaccaaaatg

SEQ ID NO: 104746 - DNA, 82 bp, Heterodera glycines
atggggcaaaaaggcactcaagatattttttacaattttaaattctcagttttatttgggcactaccgtcgctgcctcaatg

SEQ ID NO: 104747 - DNA, 281 bp, Heterodera glycines
agaatgagatttcaaaaatctaattgtgagacagaaaaattattggagagcgagacggacgtaaaagatttcaaatttcgagattcgggaaaatttgtcgttagtattcgagaatttattggaaaaattatttatgaatttaattaaggtcatttggtgacttcaatgagtgccattcagcaggccaatgccaattcgaatgagtacacttttttacacaatttcattttttcgatgggtaaaaaattattttcctttagccagcgaaatgtttacaaatg

SEQ ID NO: 104748 - DNA, 260 bp, Heterodera glycines
tatttaaatttccctatgattccaaagcgtaaagcgtaacaatggggtaactatgacgtaaataaagcagtaagaaaatcatttgaataaattacatttataaaaacaattgcaataaaaggcagaaacaattttgaatattttactttatctttacttattatatattattattaaatttccttctgctctcaaatagtaatttttcaaaattttattggttcgcaatcactcaaatagaaagatattgcaaccaaatg

SEQ ID NO: 104749 - DNA, 332 bp, Heterodera glycines
tttttcaatatgtcgagctctaattttttttaataatttacataattaattacttttgtgtgcgtcgtattcaactgaaatgactttgacaaaattcaacaaatcttcttggaaatacttttcaaattcaaaatgttccctaaaacaacaatttcagggcgctgtgattctgtgtgaaactcattaaaggattttgttagaattaatttatttaaattttaatgggcactatgcctaagagaggtaattgactagtgatagtccaattaagacaattaattgtccaaataagatcgcaaaaaacaaatattcctttctaattattcgacatg

SEQ ID NO: 104750 - DNA, 670 bp, Heterodera glycines
  unsure (1)..(670): unsure at all n locations
ggatagcagttaattgtataaaaaaggggtatttcatttagtttcagaaaaatccagaaaaattctaaaaagaactcttagagctgctatctaatgatcccaaaatgttggatgcttctagaaccggttgtggggcgttggtttnttttatgatgttgggcgccgcgccgttttctcttttggggcgtagcnngnccttcgnccaggggttcccngttccgctggtcgctggtccggttgtctcgngcctctctgntgttctcgcgcccgcgnnntttcccggtgttttggcgctggtncttggtccgnncccggccctcntggcnctcggtggtgttcccgcggccctttggggggtggtcttgtccnncgcttcgccttgcgtttcgtggttttccgcttggttnggggtngggctgctcgctcttncctgcctgctcggnctgcgntgccntcgggttgggtctcctccggggtgtggttgctcgntctggtcgtgcgngtgcgctgggtntttgcttccntcggntgggcgtgcntgtgctnnngctcccgncgcgtgctcntcgncnnttntttttttccctttcngtgccgacaatttgngcnncctgcggtggtcttccctgctttttcttctcttncctttttnnnttctncgtgtagcatg

SEQ ID NO: 104751 - DNA, 969 bp, Heterodera glycines
gctatgaatatttatttcaaaagataatcaatgtggtctacgtcagttgggccctcacgttcaatgcgaccaaattttgcgattttgagcaaatttttgtttgtaaattaaggatttttacggtccggcggtgccgataggcgccgccgggggaaaaattaagaattttgaccatatttttagcatattttcattaaaaaaattctttattttgcggtttttctcaaaaaaccacaaaaagcctcaaagcctcattttgaaaatttagcctcattgacctgtcaaaaaaccaaaaatgaggctaaagcctcagatctgccatccctgcatagaaagtttttagcaactattcccatttttggcatgtaacctaaaaacgaactattttggctgtttttagcaactaaaaatcgtatccctaattatgtgaaaggaaaaaaattaaattttttaatatgtcaatatatcttaaaattttgtgacattcaatcatcgcgtgagtctcaattaagataaaacaaaaaaaattaataatttttattttgcatttacacgatatgacaaaagtttcatcatttaaacaattttaaatcggtccggtacttagaaaatcattgcgtgacttcgtgtaaatctttttaaaagttggctgtgcgcatgtgaaaaatgaaattaattttgttttattcataatttttattcgcatgctcacaaacaaatcccaattaaattaattttatttctaatggatgctttcgcagaattttaatattaaatgacaataattaaaaatgtcataattaaggtttgtaattatatggatgaaatatggccataaaatatggaccaaaaaagcccgaaatatggacataaaatggcgaaaatatggacataaattttccgttatgggtaaattttcaaaaaaaatttttcaaattcattaaattctagtaaaatacatctaaaatg

SEQ ID NO: 104752 - DNA, 110 bp, Heterodera glycines
gtaaataatttttattaaattcatttaaattattaattttaacaatgccacttttaaattaaatggatttttaaattaaatattattaaaatgatttaagcccggcaatg

SEQ ID NO: 104753 - DNA, 357 bp, Heterodera glycines
cctgaaacctaaactttgatggacaatcaatccatttcttgaaatgtccaccccgtttctcgatcaactccctcccaagggccggacttagcttattattattttttttaattttttttttatttagaagctggaattatataagccgttttgtaggattgaaattctatctttacatgttaacacaattaatttcatatcaattccctttttttcatttccgtgtgagggaggagtcccgagattatatttttttctgttttatccaataatttatgctcattttcaatttaattaattattttcttgaaataaaagcaataaatttttttatctttaagaataaacaaaggaatg

SEQ ID NO: 104754 - DNA, 366 bp, Heterodera glycines
gggtaatttaattaagaaccaattaatcattaaaatgcgggaaaattattaacaaagttttgatcgagatgttttacatttgtgttttggtatggtcgaatcccatggtaaaatactccaattgctgatagggtatgacatctgcattaattataattataaccaattattctttaatctttacaaactgaatatttctaggggaaagaagggttatgatggaacttaaattatgtgccacatttttgttgtaattcaatgaagcagaatacttgaagctgagacaaaggaaatgatgaacactaaatgagtatgataattgttgacagattaacttagttatggtattgatggctaggaaatatg

SEQ ID NO: 104755 - DNA, 269 bp, Heterodera glycines
ccaagattatttagttttattaagcattaattaattttctttttggatttgaatttagggacctccaaaacatcaagtttcctcattacacagtcaaagttccaatttttgaagccctcagaaataacaaattcacactaagtaaatgtaaaatttgtaaaaaaacggttaaaaatttcgcgaatcttcaaagaaaaatcgtcgtattcaaccggccgctgctgtcattgtcattgtcattagcattttctcacctgtccaagcgaatg

SEQ ID NO: 104756 - DNA, 164 bp, Heterodera glycines
  unsure (1)..(164): unsure at all n locations
cgggcattaaatcgtttattttaaaaatatttttaattaatttgctaatcgaaggtgaaaccaaatcgacntcccgacaattggcttctttggtcaatgaattccttctccgttcggcagacattctgaacagattttgtgctcaatttgaaaatcggatgatg

SEQ ID NO: 104757 - DNA, 123 bp, Heterodera glycines
cccctccaaatgtctttcgttttgtggctccatcagctcaattcgctgttttgccttttattcggtgtccctttgaattcgcttttgctttggcttctcctccgccgcacttccaacgaaatg

SEQ ID NO: 104758 - DNA, 832 bp, Heterodera glycines
  unsure (1)..(832): unsure at all n locations
ttggcattttttagtgcatacaactntcgaacactaatcatcgtatatttgtgttttgtatgtcttaaggataaatgattaaatttgttatttaagcgtcggcacagtcggactccattttaccattatttttcggctttacggaaattagacaccaaaaattgaaaaaaaattgtgtcatttttgacacaaagttggaattcctttcttgtttagcctgatcatttctgatcaataattagtgtgatatctcccccccccccccccccgatcagaatgtcattttactcagaatgccattaaactccattcattttcctcatttgatcactccttttccttttttgaatgattggactcatggagtgccattggactcctaaatatttgattggactcataaagtgcaatagagccaaaaaaggctaaattctgacttttctgcagttttcaagcccatctttatgggttaattaggtgcttagaaaaaagacatacctattaaatatctttgaaactttagagtattcggagacacaaaggttattttgctttttacgaacaaaaaaattatgctttattaaagttgtcttcatacactgttaaaaaaagtgagtgaatgaaaaaaatgggggagggagggagggcttttatagtcgagaaaaaattggaaaatgcaaaagcgtacaaatgaacataaaaattagtataaaagtggttgctcctcatcctccaccttccattattattcattcgccatttatttgttttcgtctctctctctcttcgactgtttctctctgacaataccttcaaagttccttcaaaaatg

SEQ ID NO: 104759 - DNA, 184 bp, Heterodera glycines
aataatctctaagctaaataaaaaagggagccgattgtatcaaatttattttaatatattttcagctgattttttgacaatttgaaaaataaaggccccgggctctattttaggaaacacaatatatatatatatatattataaaaacactaaaacatatgttaaaactcaaaaagccaagatg

SEQ ID NO: 104760 - DNA, 745 bp, Heterodera glycines
  unsure (1)..(745): unsure at all n locations
acaacccttgggcaaaaagatttcaacaacaatgacacggaactccaacaagccaattcgaaacatcgattgntctcaaagcaacagacaaatttcaaaatccattaattttcttcacccgcggatcaatttttgaatctgagcaggcccgcctggaacagaatctcaaggaattgacgagaaggatcactcggcctgaattgaacttccctgacatagggacagtcgacattaatcagactgaaattcacggaagcacggtcacagacatattttccatcggcgaaatactggcggaaaagatgcagaaagagagcgaaaatctcagaaaaaaggcggaagaaacgattgaaaaaggaaaggcatggatggaagacccaattggaatcatcaaatacatcaaatggatactaatcacaatcgcattcattctaattgtgattggatgcaccgttcttttgtggaaaatcaaaatttattccactttgcttttggcgccaattcatttgctacaatctctggtcaacaccataatgaactgtttaaattctggaagaagacttgccgaacaagtgcgatatccgatcgtgatggaagtcgaactccaggaccgagccaagccatcggcaccacccgaggaaccgttacttgaccaaaaggcttacgtgctaattatcttcctaacatttgccaaattgaacaaacaagacgaaaaaagaaaagatgttacgtcaattttttcatg

SEQ ID NO: 104761 - DNA, 237 bp, Heterodera glycines
attaggacgatcaatattatccgaagaatatttggaaaatttcagacataaaaaatattcaattttttacaaatgtttttataaataattttttttcggtttataaaattattaatcctttttcatcgcttataaaaaatatttgataaaaatcgttgattatgctaataacatttttaattggtttagttgaaaaaccaaattaatttttcatatttatttttattttgaaaaatg

SEQ ID NO: 104762 - DNA, 213 bp, Heterodera glycines
tcattaatttaccaattggcaattattttgtcattaagataaaattattattattatttctttgaaaataaaacaggatttccttattttattaagtaaaataatgatttattcagttttttatcagaaaaaaaatcatttaaatgcctcaaaaaatgaattgccatttaattgaagaaaaataaaataaatcatttcgagacgacaaaaatg

SEQ ID NO: 104763 - DNA, 902 bp, Heterodera glycines
tgccatgcccagggggccgttacgcaataccccctccggctggctacatacaatccgacaaaaattagtttttaaatgcaaaatttctcggtctctagtcgtaggaccaagaaagcccatttcagacatttatgacaggagtctcgcgggcaatccgtaaatggacattgtatttgtggcgaaggagacaatccgtcatagaaagacaattagtctaagatggacaaagccaatccattaatgaaagacaaataaaattttctgacggattgtctccatttctaaatgattgtccactgaccgattgtccggatataggacaatggataaaaatttgaaaaattacataaataaaattgaataattttaacaaatttgatccgtcttttaattttcacaaatttattaattcatttcgacaacgaatacccaatttgaacttgttgaaggctacttgcttaaagaagcaagcgtgccatgccacatcacaattaaataagtctaaagtcaatttataatcgtagcgcggtttctgatcacttcccatgcttggtaatttgggcacttttattgcttcatcattaagaaattgtgcagctggttgaatcattcagcaagtcaaattagatattcgttgtcaaaatgaaaaaataaatttgtaaagaataaattaaaattattcaagtgatttttttttgaataatgatttttcatttaaaaatttcgtactttcgtaagtaatctcatatttttaggatgttcgtgtgtccgtgtctcataattattttttgtttcattatttcgtatttttattgttattttttaattacgcaatatccctggctacataaaaaccaacaaaaaaaaaaaaaaattcctatgaaacaggcggtggtgccatg

SEQ ID NO: 104764 - DNA, 103 bp, Heterodera glycines
ttttagatagaaataccacgcatgctaatattttaataaattcaaataacaatgttaaatttactagcatttttcgcttttttactcgtatttattaggaatg

SEQ ID NO: 104765 - DNA, 741 bp, Heterodera glycines
tttttgcgcagttttccagaaaaactggtaaggcctaggggttcggtcaagaaacaaaaaatgtgccaaacatccatacgaagctcctttacggagccgatttttcatttaggcctttaaaaaatttttgaatttcaaaaagtgcaaaaaaaattttgaaaaagccgtttcagcgccgttggcgctcagttggccctcggagcgaaaaacctatagttttaccagatgcgcctcaaaaagttgtccccaaggtcgaaatttcaaacccctcccggcaaaccgtaaggagattttgtttttggaaatgagttgccttgtttctttagtagtatataactagcgggtgcgtgaaccgtcggctctgggctgggaaaaagcgcttcgcgctttgggagcttcgctacctaggctgtaaagcgattcaaatttatcgaattggttggagaggtttttttgaatttttaaaaaattattaggggtttttagtccacatcgaggctcaagacgggcgcttcgcgcccgttttttagcttattaggccgcttcgcggcctcagtcgggcgcttcgcgaggtacaaaagtgattagaagaggtacaaatttgatgaagaggtacaaaagtgattagaagagtgattagaagtagtacaacagtgattagaagaggtacaaactgtgattagaagaggtacaacggtgattagaagaggtacaaaagtgattaaaagaggtacaaaaatg

SEQ ID NO: 104766 - DNA, 66 bp, Heterodera glycines
tcgctttttcttttcctttcccctttaatttatttgtggttttcagctgcccttggccacttcatg

SEQ ID NO: 104767 - DNA, 1003 bp, Heterodera glycines
cttttttacttagaaattaaaaaaaaatttatgggggacaaactgaataagagccaacatttgtgccattcattcgcgaccaaattggtgattgttcgaatttgcgagtttggccagctgtcgctttgctgaactgttcctcccccccccccccccacaaaagggcctccccgccccatcactgactgataagcctttctcattcatttcataactcaaaaaagaaatggcaatcgatcgattgttgcgcttttcccttcttttccctccattctcgtcccaattccacgtattcattcattcatctgcccaaatgaatgaatgattgaatggatgggtcggccgattgttgacactgaggcaaaatggggggggggagaaaagggtgggggagggagcgttttgggagtttcgcccgaaaaggcaaacccaagcaaaaagtcatcatcctcttcctcctcctttctccattttctcataacctttgcgaaaatgaatgaatgatggccaattggccatttttattgcgatggtcgagagtcccgggcaatttcggcctaattatcatatttagggctcgacctctggaccttgttgatccaggcatgggttagtcgaggcctggattttttcagtgtatccggtctatgcttttttcggcaacctgggtttcttcctggattttggtctaggaaatccaggtccaactcatttttcaaaatgtcgaactcaaattatataattcgcccttttctgacccctccccaccttaaattctagcaaataatgtcacgcacaagcttaacagatttaaattacataaagagggaatttgggcagcttgcccctgaaaatttgtttaatttttatatttttgcattttcgataagcaaaaaaaaatagtcgcccgcaggggcaaaatgcgcacttttaaaaagcaaattttgccaaaaataaaccacctcttttgaagcaatagtcgctcatttgtcgccaaatcatg

SEQ ID NO: 104768 - DNA, 259 bp, Heterodera glycines
ttattatctcttatgtgttcctttatttcgcattgattttcgccccgcggggaaattattttttatttttattaggaacagaaaatatttctaatattgtacattttgtcagtttaaacttgtgtcatatttggtcctaatttctattttgtgctttgggcgggacactttgacgcaaattctgtattaattcattagacggtaattaatgctaattagccttaatagttcattttttgttgattacagctggctaatg

SEQ ID NO: 104769 - DNA, 668 bp, Heterodera glycines
tctcttctttgggtgaggttttctgattttagttttgtcaagaaatgcaattttggtccatttttgaactaaatcaaagttccatggcaaacaaaaaaatacgataaaaagtgataaattctaaaaaaaattttacaattagaaacattttaacaaatttgttttcctatttcaattagcgacattcaaagttgtctgaattcggttgaggagaccaaattcccaaatttttgaacatataaattcgaattttattttttattttgaaaaaataacctcacatcattaagctttggtttttataattagtaaaaagattattgctaatttaaattggaattccccattcagttcagtggtgcggaacatggtcaccgactttctgcaacgagccaccacattgtacggtccccctgcaccggttgaccccgaatttgcaacgccacaaattttgtcttaccgagattgacttttgtttgttgtttttttctaattttcaaatgcttgattcaaataaaaatgataaatcaagtgtgtgcattttgttttttgttggttatttcatgtaatatttaaacgcattttttttatgccacctattgtaaatttaaaattggcgacatttcgaattttagaggaaaatattttaaaatttttacttaaaaatg

SEQ ID NO: 104770 - DNA, 463 bp, Heterodera glycines
ttgaaaattaaatttttaaacaattatttattttcctatgtttataaaagcgtggtgattattagtgatggcattagggcgcaagagtttggtggcccaacctgacccaaggccatagaacgacccggtgtttcttgaccaagctcgcaaggtccgagggaaaaaaataaaataaaaatttcccactaatttttgtacacctcttttgtgggatatccgaatgttataaattaaaaaaaaaagaattaaaaataaataaaacgttatactcaaggcgttcaaaagcattttccaaaataagaataactaaaattttgggtttttctatcggctaaaaataataaaattatttttaatttatattaccgtaattttttttaacctattttactagtctcgtttctatgtcattttatcggtgtcagtaatttttaaaatttgtttcagaacactcgtgccaatg

SEQ ID NO: 104771 - DNA, 459 bp, Heterodera glycines
tctgaaattttttttatttggaatggctggacaagtttaaaatgtctgggagaaattcttttgtcaaggggaaaattttattttaaaaagtttaaaaaagacaaaaaaaaagtttctatttcttaaaacaaaattcttagaatgatgtgttatgatgatgagcaaaaaaatttaaaaatgagaaaattagttaaatatttaatttaatttttgttgggttatttctttattttgttgaaataaattaattgattttgttaaattactaatattataataaacaaataagtgaaatttgttttttaattattctcaaacatacaaagaaataaatatgatgaaattaaatttttttatttttaattaaaaagtcgaatttttcaaaatattcatatttatgcatatgaaaagaacacacagaacgcaattgaaattttctttttttttagggtaattatg

SEQ ID NO: 104772 - DNA, 126 bp, Heterodera glycines
tctgaacgaaacgaaaacggtggaaaaagcaaagtaattaatgaataattatttttgtatatttttaaaacactttcgattattgattgatcttgttaattaggcactctactattaatgaggatg

SEQ ID NO: 104773 - DNA, 504 bp, Heterodera glycines
ttgaatgacaaattgcaaaacgataggggttgaggacggacacaaaaacgctgacatttttttctgaaatttttatttattcgacaaagtttaggcaatccattgactcgcatttgaaaattaacggaaatcatcgtttattttttgatttcgtgaaatctgaaaaaaccacacggatatatttcgaccaattctgaaactccggaccctaattccaataaaaagttgaacacctaaacccatcgaaatgcgaatttttgaattttaatttttgttattagctcatcaaaaaaggtaaactttgtggaatcttgttttatttatgttttcgttgtttttgatgacattctttgcgaccgtcatttctctcatttgaaatggttgattttaacatataaatgcttttaattggctaattgtaagggaggcatttctgacggatgacaacaccacggggaccacaacgacggacgacgaactgaacgtggccaggctggagacatg

SEQ ID NO: 104774 - DNA, 1003 bp, Heterodera glycines
ccattgggccgaaggtgcgaggttttaaattggaggattttaggtaagaatttcttggcacggtgccagggttcaagttccgccgatccgaattgccgatttaatattttttgccgtttgcctaaatatccatggggaccgaacggtgtggcacagattttctgctttgtccttccttacttggccctcaactagttttgccgggatttgagtcccgacaccgaaattcgagtcccagttttgtcgggatctcgatcctcccgttttccaataaaaaaaaacggatcggcgtctcgggaaatcctaatgggatcccgatcccttcccgtctatagtctcgaattttcggaggtcaatctcggtccgagtcttgtcgagtctcaaattttccatgcctaattttctgggcctcaatgcgcggctggccagcagcagcccttttccaaaacagtggtgccaagtcttagcattcagaggtgccaattctttcataaatccgccaattatatcgaatttttcgacaaaacatgggataactttgcttaaatgcaataaaattgtatattcttggtatcattcgatagccgagctttttctctattagcccgcaaaataaaaataaaaattggtcaactttagaaaaagttgtatgaaaataagtactatttctgccataacttatgttaaatttggtaacttttttgaaattttccaagctaatagagaaaaagctgggctatcgaatggtaccaagaatctaaaatttgattgactttaagcaaagttatgccatgttttgtcgaaaaatttgctaaaattggcggatttatgaaacgatctggcacggcattcggagataaaagaaatattttaaaatgggataatgcatttttaagagcgatggatcactgctggcggcggcggtggtcgctccatttcgacagagtcacgaaatgagggggatgaagctgcttccgagccggacattgtgcaggacagaatg

SEQ ID NO: 104775 - DNA, 163 bp, Heterodera glycines
tatcaaattttgctttaaaaagttcaagtggtgtaactcgggctttttcaaagctttcgtgggtttaaaagcagccgaacatttgctttcctaattgtgcttattgttagcgatctcgaaactcatccgaatacataaagctcagatctttttgtccgaaatg

SEQ ID NO: 104776 - DNA, 378 bp, Heterodera glycines
ggttagattcaaaaaaaaaaaatttttttttaaatttcggcgtggaaattttttttttttgttacttttgtttaggtattaattttcttcgttattattattattttttaaatgggtttgactctgaaaaaagaaaaaattctcaaaaagtttggcttgagaaaataagaatgttttgccatcgttcaaaaatgccgagaaaaaattcttgaacatccaatagcttacaaaattagcttattgcatctataacacgcaaaagaccccacccaaaccgatcaattctttgatttttatgatttttttacacaaaaattctcatattttttttttaaatgccgactttctgatgaggattttcacaatttttgaaaaatg

SEQ ID NO: 104777 - DNA, 1003 bp, Heterodera glycines
attaaattaattgaagcagcatgtgcgaaggcattttcctaatttgtcaataaactaatcagtttggcaggtgatttttttcatcattctttttaattaatttgtcaaacaaaaatgaaattgaattttcacgttattctattttaatttaatattttttcacgacaatagttaggcgaaattcaaattttgcagtacaaaattacccattttacatattttagaaaaatttttaaaatcttaatatgttatttgtttctttaggcgtgcacctgaaaattttcgagaattttatgactgaaaaatggtggcaaaacgctgaacacaaatttggcactaatacagacataaatcgcgcaaatttttttttgttaaaacatttaaatggctaaaaggtgacggggctcccaaatgttgtccttaagttgtccgattttcggctaagtttagagttaagattttctgattttaattcatgactacctatatttattaaaattttcaatttcgaatttcgacaatttccaaaaattgttttctgttcgtttaaagtgcgttttggcccagcgtttcatgtgtccgtcccatgcggcatcactaattaagaaactttttttttcatttgattcgcatcacttaaatttttaacgcaaaccggaatataggggttctcataagataaatgttagctattccatggattttttctgcttagtttagcaaaaaacaatcattttttcgaataaaaaaatttcatcgatcttatgttcggatttagtaggaaattagggaattcttttcaaaaagttagtgaaaaaatataataaaaaggatctttaacatacgtattagcacaaccatcaaaccattgcataagtccacccaaatatgggagcgaaaatattaaattttttttaaaaaaaaatggacggggatttaagtaatttcctattgttgtctctctttttataatttgttttcagtttgatgttttcggcttatg

SEQ ID NO: 104778 - DNA, 687 bp, Heterodera glycines
tccgtgcatttctccctcatttcatttgttgtatttccaatattattgtgaccccgctttctcccctcgcttattatattatatttatttgtgttgaaataaatcaatatttatttcattgactgttgacggacacaacaaaattttttcactattacacaaattatttattatcaaaatttaacaaactgtctggcaaataattttgctttaatatgactatagacatataaaccataacaaaaaccccgccgtgcagattaaaatatttctttaaaaaaagtaatattaagcctagcattaaatatttaacaattttgcaaaaatttatttaaaataaaaaatgctaatcaataatcttcaatttagccaaaaatatatttttatttccttgttaatattgactgatttatttttacattatatgcaaaaaataatatgaatatggaatatgctgaaaattctcttttttatataaaatcatttatatatatatatctctttttattttatactttttatatttttgggtttacgcctctgaaaatattagttcgacttaatttcagctttaatactcctaaaatataaaaaatctatttttttttgaaagtgagtgaatttcatttattatttcattacagaagagtgaacaaaatagtagtcttgatgttgcttaaagccatg

SEQ ID NO: 104779 - DNA, 97 bp, Heterodera glycines
  unsure (1)..(97): unsure at all n locations
agcaattntaagtgagcgggaaaacgggtcaaggcactgtttctgttaggccaccaaatgtgcgcacaaccacaccaggtaggataatttttgaatg

SEQ ID NO: 104780 - DNA, 224 bp, Heterodera glycines
aaatctcagatttttcgggattttcacgacgccaagatttcacgttacctttacaaaatacaatgatcataatcagagaaacacgatctgacactacagatttgacataaatgatttttcaccaaaattcaaaattcgttgaacaaatctaaaattttaaaaacatttttattcaaaatttatttcattgcgaatggcattttgtaaataatctatttcagatg

SEQ ID NO: 104781 - DNA, 1003 bp, Heterodera glycines
ttttgtgagatttttggagctaattcaaagcaaacccccgcccccgcccccgcgggggcggaattatcgtgcccccgccaccgcccccgcgactctgacccccgccaacccccgtccccgcgaaaagattgacattttaaattaaaaattttgttacataaaaaaacaaataaatttttgggaaaaattttccaattcttaggggtgtattttttgattttattgcatttttgttaaggaattttctgaaaatccttaaataggtataataggtagaaaaactccaaaaaggtaaaaataggtattataaaagtcatcgtagacacccaaaaccaagtgtaaaatgcttttttcgtgcttatctgtacgtattaaatgcgcaaaattttaggtatttaactaaaaatcgcatccctaatgattagggctgctaattttatgtaaatacatattttttcctggcttctccatagcctaatcagtaggaaaacactttcttttttgtgtttgcaaacaaaagtttggacttttatttacatattttagtagatattttgcaaatttgaatatctgttagaaataaatttaaaattcgcttctatcggcacgccgccccccccccaaaaaaaaacctttttttcttaaaaaattacccaaaaatcgctaaatttgattatttttagacaaaatctgtgcaatttatgtcaaaataaatattatcaaggcgatcaacgaataaaagaatgtggagccaaagaaattattcataaaaaatattttttttgtgagatttttggagctaattcaaagcaaacccccgcccccgcccccgcgggggcggaattatcgtgcccccgccaccgcccccgcgactctgacccccgcccccgcgaaaagccacccccgcccacggggctcgaaccctatattttataatgagccgcaggtaattggaaaaaattccatcggagaattaaaagaaatttgtgaaaattggaaaatg

SEQ ID NO: 104782 - DNA, 130 bp, Heterodera glycines
cctcaaaaattttcttataaaaggccaaaatcgatataaccaaacacttattcttgaatgttaggtatttccattatttgtaaaactataattcattttcccataattttgttttaaaattcagcggatg

SEQ ID NO: 104783 - DNA, 85 bp, Heterodera glycines
tgtaagtttttttttgatgatgaaaactccgccaaaatttgcagaaaattcgaaaaaaaaaaattttttttttcagtgacaaatg

SEQ ID NO: 104784 - DNA, 63 bp, Heterodera glycines
  unsure (1)..(63): unsure at all n locations
gaacgaattatnttcaacgacccgcgaagacaaatgaaaaagcacaacagcagcagagaaatg

SEQ ID NO: 104785 - DNA, 288 bp, Heterodera glycines
aaaggtatatgagttgccaaacttttctacctttggtctcccaaaattgcgattgctggcacgtggtgggatgggaatgcgaagaacctgtgaaaaaacgcaataaattgctaattcttgctataaattgaggaaaaagtgatcagcagcatattataaaatatgataaaccgatcagaaaatagagaaaaaagtgagatggttaatgatcaaaaatttttataggcaattaaagaggaaaaatgaattaactaattgctattttttttttataaattactcaaaatg

SEQ ID NO: 104786 - DNA, 92 bp, Heterodera glycines
aatgtgcgggcgaagtgcgacgtgacaaaggtgagaaaatgcccaaataaaaatgaatttcaatgcaccaatttctaatttccacaggaatg

SEQ ID NO: 104787 - DNA, 332 bp, Heterodera glycines
ttattattaatctctaagaaaactctaatccccccacccctctcccccctcgcccaaagatctctccagacaaagcgtgttttttgttaaacaaattttccaaaaaatttggctaaattttttcgaaaatccacaaaattggcaatttttgttgaaaagtatccgtatccccatcacccttctagtagttcatcttaaaattatgaaataatcggttgagaaattttcaaaagaattttttttttgaaattttctaggttgaaaattttaaaaaaaaatttggggggaaggaagtgtacccgacattaaatattccttttaatttcaaaatg

SEQ ID NO: 104788 - DNA, 78 bp, Heterodera glycines
ggttagaaatttgatcccccattcatttgaatgactcagtttattcagaggtgtactatgacaggggtaatcagcatg

SEQ ID NO: 104789 - DNA, 398 bp, Heterodera glycines
aaaatatcgattttcaagtttacaggtaataatttattttataattgtctaattgccaagcaatagcttagaaaaaacttctaaacatattaggcttgctatgaaaatcgtttgatttggttggcaatggaaaaattatagtcaaaaaattggttggggccgaactgatcgagtccgtccgggccacaagcccaaaagaaaattttaaaaactgacaaaaattatagctagatgagatttttctagtaaaattatgcaaagatgttttgaataaatatattttacacatttaaaatcattgctttttgaattcgaaaaactacccattcgttaaaagcaaaaatattattgtttctttttctatacttttttttttgaaaaatggcactttaggtatg

SEQ ID NO: 104790 - DNA, 169 bp, Heterodera glycines
ttgtgagtgttcataattattctcatcaatttatgcaatgtttctaattggtattttagaaggttcgtaaacaaaaaatatttgataaaactacgtaggaggcaacatcgtctgcttgttttccagtcttatattaattttgatcatgtaaagattatctttgcagatg

SEQ ID NO: 104791 - DNA, 139 bp, Heterodera glycines
ttctctgttggcattttgcatatttaattattctcggcacttcccgggaaagaaatgttattaaaatggtaaatgataggtcatgggaatgatgatggccatcctttgggcaaaaagagcattttgacaaaattaaatg

SEQ ID NO: 104792 - DNA, 792 bp, Heterodera glycines
ataccggatggtgggcggccttaaattttgggaaaaaattgaaatttgattttttttccagttggcttgggtgttacctctgcaaaacagattcattatgggaagtgagtagataattggaagagaagctcggctggtaatcgcttgggcattatattggtcatgaaatttgaaagaatgaatgaagagtgaattaaaatatttttgtgcccggttctcatgggctcattaattattcaataattaatatggacttcaaaagacatttgaatttgccgacaatagtgaaggagatgacttcaaaggaaatttgaatttgccgacactacgaaggagttcgagaaaattaattggtattcggatggggacaccccgcccccaatcttcataaattccccagtccaaatcacatttcatttacatctgctcatatctttactcactttaataataataatattttaaatagttaatttattgctgttaaccagggcggttgctccaattattgggctccgtttatcctggcagcacttgtgtgtcttttagggcttggggttgtgcgcgtgacctttactaattatccgagccgtttatgtgccctgtcgtgttatgcttcatgggtggcagtgcgctgctcttcagggcatagttggttaaaaaattttaaaattattattattatccattaatttgcattcacaacgacaatttccatgcctcaaaaatatgtgtcaagattgttcattttattcattcaattcattattttccctgaaaaattagataatg

SEQ ID NO: 104793 - DNA, 1003 bp, Heterodera glycines
  unsure (1)..(1003): unsure at all n locations
ggtaactcgcccggtgggactcgaacccacgaccccagcaatccgtgccgtgctctaaccaactgagctacgggcgcctcttttagaggttctctcaggtcctttatcccactttctcccacactcctttccttctggcatcacaaccaaaatttaagggagggtcccaaatttctcttattttaacgcaaatcatggataaggtaagtcaaaaggacgtcgtctcccgctttgaaaaccgaatcatcgacataaatgaaaggaagtgaagtgttatggtgttgtttctctgcccattcacaaaattcatgaaaaaacccaaaaaaattttccagtcggcgccgccgtgccccaaaattcccctaagatttcaaaagtttacatanatttgccatgcaaaaattggccttttttggtgcaatctgttatctagtcagactaaaaatttacaaattttgcccggcgggcgctacccggcaccgcaggacccttttccctcgcacattcctcaaaattttttggaaaaggcacgccgcaaaaactcttaaaaaatgggtacttttgaagcggatttaattgggaaaaataaaaaatttaataaaggattattaaagggatttatttttgtaaaatgacgacatattaaatatttgtactgaggcaatacatattaaatatttataattaggcaagcacaaagtacatttttgtctcaaaaatttcaattacaaattgagtaataaacgaaaattgttgaaaaaatgttctgcgcctatttaaatgattttttttttattttgttcttcatggtgtcctcttttatatcttactatcgtttcactttatatttgattgatagatttttctgccttttttcccgaccatgccaaaattgaaaattggcccactaatttttctcgaattttttatggtcaaaaaccaaagctgatataacaaaatcttagtttttctatacaatttagaccagtagaatccgaatatg

SEQ ID NO: 104794 - DNA, 290 bp, Heterodera glycines
cccatttttaacaaaccaaaaaatatattgggtataatatttctatatttgcttgaaaattttttagtgattttcatcaaaatcttttccagtgcaatttattaacagaaatttttctaagctattgcttcgctattagacaatttccaaaaaagttatacatgaaaattgcgaaaagtcgaaatttttgaagttttttcgtaataaaattttttccaggcttgaaaatcttttcgcttttggtaaggctaatagagcatgttaagagctttcgagtgataccaacaatg

SEQ ID NO: 104795 - DNA, 73 bp, Heterodera glycines
gccggatgcaaaatcctctctgccgaaatggcttcttggccgaaaaccgcgcacaacgattgatctcctgatg

SEQ ID NO: 104796 - DNA, 294 bp, Heterodera glycines
attaggcaattaattaattaattaatcaataagtaattaatttttcattgtattgtacttgtgtcgttgaaggattgatggagctcaaaaattgaataggcagcagaagacatttttttgtggataaatggtagaaaattccgattaaaaaatgaaagaagcgaaattcttaaaggaaaattaaattgaaaataataaaattgaaaaaatggggcaaataatttcagagaataaatgagtcattattttaggtaattcgaaatttactttttttgtaaaattatttgaataatg

SEQ ID NO: 104797 - DNA, 329 bp, Heterodera glycines
aaattgattgggaccaaaacaatttctgaattaatgaggatgaattctaaatttcgaatggaatacaaagccaaaataggtcaaaaaacgggacgaaaccccaaatagaggcaaatctgaggggcgaaaattccaaaatagggatttctaggagagaataggtgcgatgaatcgaaggattctaaaatatgtttttcgcgcatctctcatagaaataaatctgcaaaaggaaaccggactctaataaaaactacggttgttgaaaggcgcgctgaatatacgaacggaaacttgtgaataatttcagactcaaaaaaaatttaaaaatg

SEQ ID NO: 104798 - DNA, 788 bp, Heterodera glycines
atttgatgctatttactctttgaatgtgcttactttttcttttgtttaatggattttcattcaaaaattgcaataaatttcaaaaatttgatttttttttattgcggcgtcatctgaagaaaattcgcgttccgcgactctgaaaaccatcatatttttctcactaatttgtttcaattgcttttattttaagacgagattaatttttaatgacaccgcctgccgagaaaaagcaaaaacttttgtccgccgttgaaaatcagcagcaatcgtcgtcgtcggcttcttttgtgaaaccatttggaggacggaagaaaatgcgagtgctcagatttcgcggctaaatgttgatatttaataaaatcaacaaacattatgccatcaaaacaaataccaacgcaaatttttaaaatttatttaagtggcttataattttatgtagagcgataacgcaaaaatgagttctgctatctctctccccattttatttttgcgccaaaagtcatttgaaaaaaattgctttaaaatttcaaaaattatcgaaattttaaaaatgatgttgagcctttctctaccctcgagcccattggcaacaatttaaggcgaacagatttgaaaattgttttgatagaaaatgcgattctcgtgtttttctcatcaagtattatcgtaaaaaataggaaaatcctaaaaatccaggctttatccaacgcattaattcttctgctatatattgtgtgacatcattcagaatttggccaaattgtgcttatttctgccaaaaaatg

SEQ ID NO: 104799 - DNA, 347 bp, Heterodera glycines
aaggaaatgtttttaattttatcataattttcataaacttaattcattttccataaaaataatgcaaaataacgaaaatattaacgaaagatatgttgtgacgctaataaagtaaatttttctttaaaatataatcaattccaaaatgatcatcttataaatcataaaaaaatatggcaaatgatatgggggaatttagttataatattatttaaataattttcttaaatttgtcaattaataaatattttaattaaataaatcttttttttaatttaaataaaataatacatatacttataattacttaataacaactgtagacaaaatatcattaaaaagagatg

SEQ ID NO: 104800 - DNA, 444 bp, Heterodera glycines
ggaatattatcgcattgacgtttcttcacataatacacacatctatagaggaattgttatccgcaaaagtcggtccgcaaatgtcgcactcacggaactcacaggcccttaaccagaaaacaaaattcggaaagggggggggggcgggggcgtcagacccaacgagcttttttttcttttgctcttcgccccagaaaaattttctttccggatcccaatttagcccactttggagcgaaaattattttttcatccattcgagacaaaaaatgttttcatttcggagtagccctgcccctcctggttacggacgttcagctcttatcattcatgactccttttttaacaataatttttttagtttttcttttcttaaaaattatgttcttttaaaacagaaaaaaacagtttcttttggttaaatcttaaccaaaatttcagatg

SEQ ID NO: 104801 - DNA, 256 bp, Heterodera glycines
  unsure (1)..(256): unsure at all n locations
gagtggagggtgacgaatcgcatgcgntgatacttcgacnnaatgtganncaacaaactttgaacgaggctgacttttcaacagtgacctgnagcgcggaaagaccaattttgggggagattgtctgtcaaagagaacataaccatctcccagcacctcagaaacaacaagtttgtttaaattaaaagaaatgttttgtattaaaggcagagtcaaagcggcagaaaataaaagaaagtgtcctggccgagccatg

SEQ ID NO: 104802 - DNA, 190 bp, Heterodera glycines
cgccgctgtcaaaacgtacacatacaattaattagtaaaacgacagaattggaaaacccggaggttttattgcaatttataagtccaattaatcaaccaatgaattttttgggccgtaacttttgtcgtgtagaattatatagggattgttcgaatatgaaaaaaaagttatagtaaaaatccaattatg

SEQ ID NO: 104803 - DNA, 464 bp, Heterodera glycines
ggcacaaatgccaacaaattcctatcccttttttcttttctttttctttcatttcatttctcactcagagagactgaataaaacattgtgcaatgtgacaacagttctttgtttttgttttttggatgaaattgtcaaatcattttttagttttcttttttaaattgcaatttattattttatattccccattttttgtcatatttttttgctggcaatgagcaggaacttcgccgctcttctccgtgtaacgtgtgaccggaagatggcacgtcgggccaacaaacagctgaaaagggtgtgcaagaaggcgcatgcgcaacacaaaaatgtaaatttaatgcttttgtgcacataactcgtacggtaatgaaattttgaaaacgaggcctatcccctaagctttgattcaaacaatcttttaaatttcgaaaattaagaaaacttatatacgagttgtcatg

SEQ ID NO: 104804 - DNA, 79 bp, Heterodera glycines
ttaacaatttaattaataattttttaaaattggcgtttattaaacattgcatgagaatgcttctcaggtggccacaatg

SEQ ID NO: 104805 - DNA, 105 bp, Heterodera glycines
ccttgaaaaattttttttttgcattaaatgacaagagttaagcattttttgtggcagcagtgaccattaaagggaaaatttttgaaaaaattttcagggaaaatg

SEQ ID NO: 104806 - DNA, 297 bp, Heterodera glycines
taataaaatgatgtgatgaatgaagactgaatgtggaccagcaaaagtgagtgacaaaatgatggctatttatggacgatgctgagagatggtattgacacgaattgggtacagtaaatggcgtacatttgaatattgagtgatatacacaacatttacaaaaatttttttataagattttacaagttaaataagaacccatcattttgtctcagttttgattctccccccccccgcaaagacttgaccgatcccatcgttttctccataaatatccccgtgttcgcctcccatatg

SEQ ID NO: 104807 - DNA, 722 bp, Heterodera glycines
  unsure (1)..(722): unsure at all n locations
ccccccccccnactcactttcaattcaaccgctccaattttcttcttcgcttattttacaaaatgtccctacgggaattagatgaattaagaggaaaattaaaaataaacgaacatttcaatgatgactcatttaatgccattgctttccgcgtttagcccaattcgccgtttgacaaatattcccgcgacagttcgtcgcctcgccatgaccaaagtctgcatgacgcgccctttctgatgtcctcctccaccgctaatttccctcggtcctccgtccgcgacattcccatccaacgttccgcgtccgcgttcgccccaatgtttggcagagccgcgggcggcacggtgccgccgctgccctcctcgcggacgacaacggccgcaccaacggaatactaccgcaaagaggtgcggtggtttgccttggccctgttttcttgttgggtcacctcctccccatcgtaggtgctgacgcgcactctcgtcacgcgctcaaccgaggcgctcagtgcgccgcttccgcttggccgttcgtcccctgcggcgccttttctgacgttggaacagttgccaccgcagagggatgaaatgccagaggaatattggtaaggatgggggggatcgaggctggggcttaattagcaaagaatcaaaatttagatggggtaattatgcaaatgttggcactttttgtttccatgcgggtattttcctccaatg

SEQ ID NO: 104808 - DNA, 608 bp, Heterodera glycines
ttaaaaaaatgtgatttatatggttggcaattaattatatggcagcaatccattattttttccctggacactgggagggtgtgaaaggcacgaaataaaaaaatagtttttatcttggttttaaatttaaaggattttatggccacatttttgcgattttatatccagatttttgccaaccctcgtggtatttaacaaaattttacaacgaaaaatgttaaaaaattgatcttctatttattaaaaaaataacgagtcaaaaaaaaaataaataacaattttttttagaggaagtgaaagatcaataaaatattttttaattttaatttttgtattgtttctttcttttgctgatttttttcaaaactctattttcatagatatacatttacatttccattaaaaattaattgaaatgttgatagaatgtcaagaaaaaataatgaattaattttaattatatttcaaaattttcaaattaatttttaaaataaaatcaaatatatacaacaacatataaacacacacttaccggttacatcatcaacacgcgacacgttggcactttcttggtgtccttggcccaaattggcggcggcggcaacatg

SEQ ID NO: 104809 - DNA, 986 bp, Heterodera glycines
tgattaagcatatcttcaaaatatttttttatatctaaaattagaagaaacgttctgatgagtcaaaattttgcattgcatttaaaaaaaaaatttttttataaaaattttttattttttcccgaaattgtccgcaaatgtccgtccgcaaatgtccgtccgcaaatgtcagtccgcaaatgtccgtccgcaaatgtctggacgcgctttattgtaggttttaagcagtcacaacgaaaatgaaattgataaaaggcatacaaaatataaaaataatttttaagaaaaaaaagctgatggagtgcgcttttctcatttttcttttctttctcgaaatgggcctaattcatagccaatgccacaattcatatgaattaaacatttaattcatgctttatttctatcgattatgattaattaccatgcttttttcatttttgaaaatttattctttttttttgtgtagtgtttggattaacattctattagtattaatattcataaatttaatgcaaattttaaaggctaaatggctcaaaatactttacgaaataagaaataatttaaaaaaatataatataaaatacaaatattaattttaagaaaattaatttgtatatgtaaaagtttagtatatttaaaaattattttttaaaatatttatatgaaatattttatattgcttttgttttcctttcctgcggttttggcagtattgccagtgattgaaagttcatctgcaacaattaactctacagaaccttcaaaaaaggaaaagcaaattttaaaaggtaaaaagaaagaaagatttaaaaatatatataaataagtttggctaaaaagtggcaacaaaattttaatggagtttagaattttaaaaataaactgccggtttttttggctattctccaacctcgggaattttctcagctcaaagcttttgtgatagtctctaattaattcataatttttaaaaattgaagatg

SEQ ID NO: 104810 - DNA, 272 bp, Heterodera glycines
ttcgatgccgtttctttaattatcgctctttttatataattttacgattttcgctgctgcttttatggaattgactttccttgggcctattaattacctaattggggtgttgcgttctcaagtgtttttttgctcccatttttcaatttcccaattttttattggctgcgtttattgcataaatggtgccatgataatttgtccactgtttcaggttggacgtgcacaaatttcgcctctctcgcacccaaaagcgcgtgctgcgcacaatg

SEQ ID NO: 104811 - DNA, 1003 bp, Heterodera glycines
agcgagagttaatgagagtagaacgaaagtggtcgtcggcgtgcgacgacatggcgaccacctgctgctgcctccccccactttctcccttcccatgtctgtggcacacactctctcctacgctttcctcttcaggaagcactctctctcgtccgtcttgtttctttcccccatttgtccctcccgttaaacgctatttccccaattttttcaatatctctgctcccacgatgtgcaattttggtcgcctaaaatgctacccatatgttttcgatggtgccggttccgtttccggaacccattttgctgttccggcatcgcttctcggccttttggctaagatcaaagtgtagtatctgttctttacggcttaatctccgtaacgacccctaccggggtcaaagagattaaccaatttttggaaaaaggtcgcagtagggggcttgccccctctcgaccgcgcgtcggcccggtattgcacttacctccgggagcggcgcatctcccccgcgggggagatcaaaagagcaaaagcattgggtgaagcaatgcaaatgccaggggattgattcttcacaattctgcctgacaattttcatttaaggggaaaacaaaatcccatcgatcgccaatcgtccatccgtcaaacttaaaagggaaaaccaaatcccatcgtccatccatccgtcgaaaaaccaaacactcgtgttgtgtgcggttccgctgggtgcggtttcatatccgacaaaaaaaccaaacactcgtgttgtgtgcggttccgctgtgtgcggtttatcttccaacaaattcatcaattcgttcgacactacgaaaaaaaagggtgactaaaaccccgaacttctctactttcttcaccgaaaactaattcggttttccatctcaatccgacttcacttcattaaggtctctctcggagagtcttatcttccaaaaaagggtagaatcccaattcatctatcggacgaaaaactaacccataatg

SEQ ID NO: 104812 - DNA, 54 bp, Heterodera glycines
aaatcagaattgcgttttctgaattgcgtcttttccattttaggcattggcatg

SEQ ID NO: 104813 - DNA, 130 bp, Heterodera glycines
ttgtcggcgcggtggcgcccaatgcgcgacgtcccaagagaaattcgtgcaaattatagcaaacgcggtactgaaatgggagaataacattgcttgttttgtcttgaaatcggttctcaaactttacatg

SEQ ID NO: 104814 - DNA, 77 bp, Heterodera glycines
tgcaaggaaattcgagagtgctgctgaggacagcagaggtgaccatcttcaatccatgcaatccgaaaaaaatcatg

SEQ ID NO: 104815 - DNA, 430 bp, Heterodera glycines
tcggtttcacgtcctctttaactctctcttcaaagtgctttgcaactttacctcacggtacttgttcgctatcggactcttggccgtatttagtcttagatgaagtttaccacctgatttgggctgcgatcccaaacaacccgactccaagacacgtaaagatgggtaggcaccgccagttggacaggtcttgcaccttctctggagccccggtcaagggaaacttgaacaagcgggccaacccaagctcacggtctatacgctacacctcgcaaccctagaggagctgcgattcagcgctggactcttcccagttcactcgccgttagtacgggaatcctcgttagtttcttttcctccgcttactgatatgcttaagttcagcgggtgttcacgtctgagttcaggtcgaaaaatcaaagcaggaatg

SEQ ID NO: 104816 - DNA, 519 bp, Heterodera glycines
cccccccaactcccaacattccatcgaatgtgtgcccccccccaggggagaatcgtccttctcctcctcctcctcctcttccttcgtcttcttcttcttccgctgctgcttcttcttcttctgctgttctcccgccgttttcacccgccccaacacattaaataataataattgatcatcatcatcatcatcatttagaattgtatttaatcattcgcatcacattttgcccactaaattaaaccacagcggaaattgcgtggcgtggcgctggcggggggggggggcgggaggggagaaacgggcccaaaattgggtgggaaagcaaagagttgaacccaggaaaaatctaaattcgtccgtccctatcaattaaaaaaagaataattaaaaggtaaatacactcactaattactaatgggtgacaattaaattttaggtaaaaaaaaactttatgttgcttatcggacaaagctgaaaaaacttagttaaactcgtcaatatttgtttttaattatg

SEQ ID NO: 104817 - DNA, 273 bp, Heterodera glycines
aacatgtgaaatactaatgaatccgatttgttaaggttgaactgaacaaacacaaatttcatggccgcgatttatttctcaagcttgcaagaccgaaaactcgtggtggacctgccgagaaacgatttccgggtcatggtggcccccccaatatgttaggtcacgggtacggagctgcaggtggattcggtaaaaatgtcataattgaataaacgagatcaggcgcaattttctaaatacctagagcaaagaaatcatgcgccattgcaaatg

SEQ ID NO: 104818 - DNA, 732 bp, Heterodera glycines
ttggcattgtgcttttacgcaacttttcgcaaattgggctttggaaaagtacgcgtggtggtgtgccctcgtcatcttcgccctttttgtggctgtttgtttgttgataattgttttccgcgaaatctcttcaccggatcctcaaatttgtcgttttcacaaaagtctgtgagtgttcaaactttggaagttttttcgcacttaaatctctcctcacttttcccataatatttacctaatttattttattatttatttttcatttttttattaaacattcaaatatccacataatatcacttcgtcttactttgctgatatttcaaaatctattttggtcccttttcgtgccttgattttattgtatacacgccattattgtattaaaattaaataaattccactgacaaatgatttatcttaattatctttccgtaaaatttatttaaaacatttttgggacggaagtggtcttgttttttggtcggcgggtggtaatttggcgaagttggttcccaaaaaagattgaaccaaccaatcataatttaaaaataattatatatggatgggaggccgggcatagaaaaataaaagctaaagcagagaaactggccaaacaccaaattttgttttgaaatgacgtgatttataaaaattctaacctttaaaaaggaccaaccgggctaatctttaatcttttaatagtcaactcatcaatttgcagtggttatg

SEQ ID NO: 104819 - DNA, 63 bp, Heterodera glycines
tagtggggaaaattcatgaaattcaaggacatttaaaatttttattatatgcaatgcaaaatg

SEQ ID NO: 104820 - DNA, 120 bp, Heterodera glycines
  unsure (1)..(120): unsure at all n locations
atgattcagccacggtgatgatgcaccnacatgagggcagtgccgccgggggacggcccgtcgcggtgcttttgccgcaccagcaacaacagccacaactccacgacgacgaagacgatg

SEQ ID NO: 104821 - DNA, 192 bp, Heterodera glycines
cctaaaaatatctcaatcaaatcaatttagcttaaatttgttaccaaattaaaaaaagttagtttggtatgctggtaacaaaagtacaataaaataaaaaataattaatgatagtgatccatacaaccataaataaataaatatgcaaaagtaaatgtggagtgacccataaaaccaaagtgatgagaaatg

SEQ ID NO: 104822 - DNA, 345 bp, Heterodera glycines
gggtcataaaaagtttaaaaaataggtataaatccagcaaataaaattctaagtaaggatttagagtaatttaaaaatgtgggtgggcgctcgcgctatataaataagtgcgcgtgtccccatcggcccatttcaatttattcctgtcaaacatttggccatcagtttttcatgtcggataaaaaagcattgtttaagcgtgttatcgcagaggtggacctcactataagcacgggcggcataactttgagcggcccccgcctgtctgttccccgtttcattccgtttgaggaaaacgggcgttgccgagcatgtaaaggaactgaggctgaggtggacacaatg

SEQ ID NO: 104823 - DNA, 997 bp, Heterodera glycines
tttcggggtcgctgatcacgaatctgacatccatttctaccaaattcgaactccgaactcgtattcgagttattttcgcaccataaaagatatttttgaaaatttgaatttttgttcgaatatgggttattttggtctcccagtagaaaaatgcatgcttggcttatgtatagggttgtaaattatatggactaaaaaacccaaaatatggacataaaatatggactaaaaaagcacgaaatatggactaaaagctaaaaatagccaaatatggaccaaaatatggactaaaaactgccaaaatatgtgttttaaaccctcaaaaattccaaaaaaaggtgtatgaattcaatatttgcttaaataaatttaaaaaaaacaataaacaaccaaaaaatggatttaaaacataaaaatgcaaaaaaaaatttattgtcgtccattgtataaaaatattttcaagtttgccaaaattttaaaaaaattcttatttaaaaaaagaaaagttcgcaaaaaatgatgaaaagatttattaaaaatgccaaaatgacgacgaaaattcaaatttttcatattttttggactgtaatttttaaaatttccaaaaaatcaatctttagggggtgtatttttcccttttcttgcattttcttgtgaaattttgccaaaaatggccgaaatatggactaaaaacacaaaaatggctaaatatggatttattcccgaaaacccccaaaatatggatttatatggactaaaaaccttcagcaaaccaaaaaattttaacgcagaaatgccatttttgagcccctttctttatagcatatgcgcagaaaaaatatgttaatccatataatttacaaccctacttatgtatattgttttttgtaagatagtaaagggacaaagggtggattttttatattttctcgaccattatatgcataaacaaaattatgagtagtgatatttcagatgtccacgaataatcacaatg

SEQ ID NO: 104824 - DNA, 168 bp, Heterodera glycines
accaaccaaccgatggcgcattccttttgaagacattggcactttccatttatttatttaaaaatattttgatatcacttataacatttgggttttatttagtttttacaaaatatatattatttttttaacaacttcgattaataattatttttaacagaaaaaatg

SEQ ID NO: 104825 - DNA, 255 bp, Heterodera glycines
agtgcctattgaaaataaattttaaaaaaagaaaaagagaaaaagaaaattttgtaaaaattacgaccaaatttaactttaaattcaaaaaacttccattttttattatgaaattctgccaaaaaaattatcagtaaaaatacgattttttgcaaaattttatttacgaattttcttctaaaatttttctgaatagcgtagttttaactaaagcttacattgagattttgtgacccagtataaaggaaaacaatg

SEQ ID NO: 104826 - DNA, 199 bp, Heterodera glycines
  unsure (1)..(199): unsure at all n locations
ttttntaattagttggtcatttgcgtttaatttatagttttattaaaattntgttgataattacctaatgttgaattttatttaaaatgtaattggaatggaagttttaattccgaatgctacattaactttaaacattaaaattgattgagaaaattatgctttaaataatcaaaattgggggggggcggcgcaaatg

SEQ ID NO: 104827 - DNA, 432 bp, Heterodera glycines
tgttattttcttgtatttctaaatcccagagacattgcgctttcgtttgttaccaagaattttttttaattttaatcattttctcaacaaaaagcactaaaatttcaaaaatgtttcacgtcggcgcctatcggcaccgccgggtcaccattttagcatattttttttgaaatttggacataaaaatgacaaaataaaaaccgctagaaatgtctgtttttgctctacggcgctgaaatttttaaaataacactggacaagtaagaaaaaattatgtgccaagaaacttaggatggccactgattggacgcgtaattagaattgagccgaaatttgttaattttatatcaattagtgcactataattaattatcctcatagaaaattttcctttaatttgaaataatcaatttcaaagtgcaccccaaaatg

SEQ ID NO: 104828 - DNA, 750 bp, Heterodera glycines
atttagcagaaaaaatgctgttctataattttctctttatttgattgtcatattttgtgcagaacaatccttgttaatttgaattcaatttaaaattgtttcgaatttaaaaattttggtcgagaaaaaagaaattttttgaaagattttcaaaaattttaaatcctaatgtatgcaacttttgttatatgggtatttttggaaatttctcagaaatacccaaatttggcttcaaattatgcttaaatttacttaatgaattttacatttaaatttattttttttattaactaaactttttctctaatttgtttagcctaatgcattgatagcttctaaaagaaattgcaaaaaaaattggagcaccaattttaagaaattaataatttaccttagaaacaaagtaataaaaaatgcttcccaaaaatgtattcaataaaaacaaatatagattttcgtcatttgtggcaccaaaaaatttaattcattttaacttcacaataataatttgaataatataaataatttaattttgcccataatcaattaactactttatttattttattaagtttgagtttattaaattattttagttgggaaataaatacaaatatttttattttcattcatttgtgaaggaaaaataaaattagcttaattggcaggttggagcttaattgacagtttgactttaaatcaaatttataattatcaaattacttctctttttctttcagaaaaagaatg

SEQ ID NO: 104829 - DNA, 782 bp, Heterodera glycines
tccagagttcaggatcaaagataacctgcaaatttcatttgaaactggggatgacttttacaaatccaatttccagctttttttatatttgtgtcaaatttccccatttttttttgcagaggcaaaaaataaaatttgtgccaaaactgtcatatttttcaccattgaattaccaacaacaaattgttttcagtcactatcatcgggacaacgcacttcttttcgcgtctattttctgccagtcctcgagcagttcggcccgcaacgggaactgatcaaagtgcacacgtccgtcggcacatttgcccaccgcgtccagggcgagacgggcggaaacccgtaccggatacggtaacactaggattgagcagtattaactcattgcaaatatccgaatttggcttgagggtaacaaaaatttcttatccatccattcactttttgacacttttgctgtttggtcccccgaaaaatacataagaaaatgttcatgaatgaaaaatataccaaaatatgttgctttttaaatcataaaaaaacaaaagtgccattttttgttttgaatttttctttaggatttaaagtattttaaatttaaaaaattttcgaatttcccacaaaatggcttcttttcggtttatttggggctgaatttattgctagattacatatatccaccaaattgatgcccctaattaaggtcctttttgggcattcatcttcctctgaatgccactttttcggctccgctgagtctgcacaatccgcacacaaaaacgatg

SEQ ID NO: 104830 - DNA, 77 bp, Heterodera glycines
tatgattccatttttaggcattaagctcaggctgaagaaggagaaaagggggtttttgtttttctcttccaaagatg

SEQ ID NO: 104831 - DNA, 239 bp, Heterodera glycines
  unsure (1)..(239): unsure at all n locations
ttcggcccgaagtgtaccgaaacggcactcttttggcacagacaaatagaagacattncatgggcaagaaattttgccgatggtgttnnatgttacgatattacaaatgttatcctttaccatccttttacagaaattgtcttcgagcaaaaaaacttaataattgatttgcccgagttccaatcgatcaaacgcttaatgttcagctcattcaatgctgcgccgattccattaagatg

SEQ ID NO: 104832 - DNA, 186 bp, Heterodera glycines
tcctgctcgaggaagagttcaccttctttcgggtctcgagcgcgatacgctctgtctccgccccatcgcgtgcgatcgagacgggactatgttgcgccccaacaccgcggtgccggggatcacacgtcgagctccgtaagaagccttcactttcattgcgcctttgggttttgaaccaccccaatg

SEQ ID NO: 104833 - DNA, 145 bp, Heterodera glycines
aaaatgaatcaaaattaattttttatgatatttttttaaagttgaattaattaagaatgccacaaagtcagccgagtggaatgtgaccgaaagtcaaaaatcactccgacaaattcaaattggcgcaagtcgcagattggtcatg

SEQ ID NO: 104834 - DNA, 341 bp, Heterodera glycines
ttgacaaataaggcaaaaggcaaactaacagtcctccgaggctttagtttagccataaggcaaaaggcaaactaacagtcctccgaggctttagtttagccataaggcaaaaggcaaactaacagtcctccgaggctttagtttagccataaggcaaaaggcaaactaacagtcctccgaggctttagtttagccataaggcaaaaggcaaacaccttgtcctccgaggcaggtgtttagtcacaaaaggtccaggaccaaggccagactgatctcggaaaaagacacaaaacaacaagtgcaccacaacacacacacgcacaaccaaactgcacgcaatg

SEQ ID NO: 104835 - DNA, 690 bp, Heterodera glycines
  unsure (1)..(690): unsure at all n locations
aaagacaaaaagcaaaagcagccgcacgtttttgatntaatntaaaaaataccaaaggaaaatgatactgtaggaaattcaaaataaaaatctgattttttcatactgtttttcgttaaattttggaaatctgtattgaaattacaaatggggatttaattcatggataaagttatattctttttattgtaatttttaaaatttgttcataaatttgtttacaaataaagagttctacctcacaaaaatatggatttgttttatacaatttaatacgaaaaatatttagtttttttgttattttctgtcgctctttaatttttaaagattaaatttaattttaaattaaaattaaaagaaaaaatgggggctactaaaaaccattaaaaaatttaatgttctctattatcctgaaaattaaggaagattatgaataattttttttcaaattttaaaaacttggaggcattccgacaactaggaactgaataagaaagtcactttttcaaatttcatgaaatatcctattatattttcccatctataaaaaatgggggtttaattttttatatatcttatataatttaatacaaaaaattgagttttaagttttgcttgttattttattttgcttttcatttttaagtttaaattaaaaaaagttgttactaaaagcgacaaaaaaagatg

SEQ ID NO: 104836 - DNA, 392 bp, Heterodera glycines
gagagatgtttttttctctgcactctctatttattgtttcatgtctcgttttttgaaacggtgtgggtacctttacacacatcgattcaaaaaacaaagacgtatgtcaataaaaaagagggtgtgaagataaatacacctcagttgggtatttttttgtgatttttggataaaaaataaaaagatttatgccggggacgggctcgaacctccattccttttcctttactatacctatcttacaaaatccatcacgcagttatcttttttagtttgggggctgaaattaaataagtatgtatatgacggattataaaaccgaaaaaagtgattccagcttaattaaacaggataatcttatttatttttaatctctcatttgttctcgaatg

SEQ ID NO: 104837 - DNA, 1003 bp, Heterodera glycines
gcagcgccgcgggaaggtcatcaatcatccgtctgtcaccaaagtgacaggtgaaggaaattcaatttttcttttgcaaatttaaatcttttgatcccaaaccttttgggcggttttattttctcaaatcctgagatttttatgacggtttctctaatcctgaaattaaaaattcattattgaaaatgtgccaaaacagtgcggggtttttttgcatttcctccccgctcgccccgcgccgcgatgccgccgccgcgaaaaaaaaatcgataacggaatttggaagaagtgcaaattaattgaaatgactgcaaacaatatcaattataaattggacaataaaattaatcatttaaattgtgtttaaaaataaaaatcgaaaatgaataaataaatcgggatgaaaaaccttttcaaaagtaggtcacctgtcaaccaaaattgattgatgtgtttttatttctcttccattatttcgcaatctgcacgtgacttttgttccaattatttcgcagtgtggcccattaattaggtcaactgtcaataaaatgggattgattggtttcttattgaaatttctccatatttttagttttgggtccaactatttcgcaatatggcccgtaattttgcaaacctgtcaaaaaaaaaatgattgatgactttcgaaataaggaatatccaaacgatttttgcacggttttgaataaaatgagacagctgtctaccgaaatgattgatgaccccctaaattaaggcaaccccagacagtcacgtgactagatccctccccctttttgcctatttcgcacacccggcccaaatcgcaaatcattcaactaaatagttggatttcattaaactctcttcacgctctaattttatttctctccgctctatttttatttgcattaattaaatctattactatttacctacgtctttttcttttcaaatctctgctctctttaattcttctgtttcaatttcttgttttaaaatg

SEQ ID NO: 104838 - DNA, 100 bp, Heterodera glycines
tttttgcaccatttccctgaattttaattcacatggattctttaccaaagcacatattattttgtcagacagcggccgaactttttacaaaggggctatg

SEQ ID NO: 104839 - DNA, 596 bp, Heterodera glycines
actgggatcgggaggattgggggagaacgacgagggctgccaggaaaggaagggggtcaagacgtgaatgggcgcctccgtttggccccgcacgagaatttgccgaatgtgatggagtgtggagggtgcttttccctcctttccgaatcctccaagccgtttcagcacgaatttattaaagcaaaacgaataatgaataaaagcgacgaattgatcgaattgggcgatgggacgggggaattggaggaattggtcacaggcagaccgaatatgaagcgaaggggagtggaagcaagagaagagaagagaagagaagagagcgaccccttggccgggggcgcttaaatagacaattttcgaagggggcgggcaaaaggccatgcacttagacaaattgtgagagagacaaaaaatggacagaaaattctagaagcgaattgcgaacaaaggaaatgggcgcacaaaaattgaatgtgaaatggcagatgtaaaaagtgagaaattgtgaaaggaaatctgagcacaaagttggccgaagatgagccaaccgatgagaaaagatttgaattgtgaagggatgcgatggggcaaaaatg

SEQ ID NO: 104840 - DNA, 63 bp, Heterodera glycines
aataaaaataatgaaagaaataattcggaaaattttggcaaaaatgttgaatatttagccatg

SEQ ID NO: 104841 - DNA, 416 bp, Heterodera glycines
  unsure (1)..(416): unsure at all n locations
ggcattcattctttttttaacggacaaattcnttcgccaaacattttttctgcacatttttttttgcgatggcttttcgtctcccatcatttttctcttcttcttttgctgcttctgatcaaatttttacatcattttttttatcacctctgtctgatcagcccgcttctttttgtttgatcacggataagtccagcacatcgccaaatgtgctatttttaaaacagccgttaacccctgtcccgcccgccgctttgttcctctttttccaagccgaagttggttggggcttcatcatttttaaaagcagcagagtgtgaaatgcaaacttaaaatttcaaaatcttcattttcaatatattttatgagaaagtttggaatttatatgatatattaataatttttagccaaaaatg

SEQ ID NO: 104842 - DNA, 645 bp, Heterodera glycines
  unsure (1)..(645): unsure at all n locations
ggactaaaaaagcccgaaatatggactaaaaaggccaaaaatggaccaanatatggataaaaaatgccaaaatatatgttgtaacccccaaaaatcccaaaaaaggtgtgcatatttaatatttgcttaaataaacctaaaaagtacaataaacaaccaaaaaatggggtttaaaacttaaaaatgcatattttttattgttgttcgttgtatcaaaaacacctccaagtttgccaaatttcgaaaaaattctcattaaaaaaaagaaatgttcgcaaaaaaatgacgaaaatatttattgaaaatgccaaaatgacgacgaaaactcaaatttttcgtgttttgtggggtgtaatttttaaaaatttccaaaaagttgatctttaggggtgtatttttcgtttttttttcatttttcttgtgaaaatttccaaaaaatggccaaaatatggactaaaaacccaaaaatggcgaaatatggatttattcccgaaaacccccaaaatatggatttatatggactaaaaaccttcaccaaatcaaaaaattttaacgcagaaatgctatttttaagcccctttcttcatagcatatgcgcagaaaaaatatgttaatccatataatttacaacccttattaataatg

SEQ ID NO: 104843 - DNA, 150 bp, Heterodera glycines
ttttagagggattacataaagttgcaaattggacactcattttatactcaaaaacttggccacgcccatccaaattcaaatttgactccacccatttttcaagcaaatttaaattaccatcccgaatcccaattcatttttgccaaaatg

SEQ ID NO: 104844 - DNA, 124 bp, Heterodera glycines
acaactgattattaaaatgcaaatgttttcaagaatatatatgtatttatttttattatttttcaatattattaaaaattctaaattttctattttttcaatttttccgagtgccacctgtatg

SEQ ID NO: 104845 - DNA, 250 bp, Heterodera glycines
ttgaagttgttgcgccgggcacgtccgcttcgtgtgtgatgaagtgttgtagacgatggacgataataataataatataatatgagggcgatgaagtgaattgtgaggaaaagtgaggaaatgtcgcccttttatacaactttttttcccttaatttcggaatttttttgcttgtctatataaaggcgagcattgcaaaattttctctcattcattgcgtccgttcacatttttaaattcttctattatg

SEQ ID NO: 104846 - DNA, 1003 bp, Heterodera glycines
taaaatatgcactaaaagtcccccaaataagccctaaaaacccgaaaaatgcccaaatatgcactaaaacatgccttaataaactgcaaaaatggcttttaaccctcaaaaaatgccaaaaattgtgtataaattaagaattgcttttaaaacaccaaaacaagggctaaggagcatttttttagacaattgcaaaaatatttaatttccaaatttataatatatgctaaaacaaaattacatttttatatacataaatttttttcccaaaagttctgacagtttaatttttttcgatttttaagggtgtatggacaaatatatatttattctcgaaaactccctaaatatgcttttatatgcactaaaaaccttcaccaaatcaaaaaatttttgatttccggctcctttacagccgagaaaaaatgaaaaaatttttcaagttattagtccaaatttacagaaaatttgctaattttactgaatattttgccaattttatttgattttggactgaattcttaaaaacatttatattagaattttaaaaaatatgcataaaataataaattttatcattttatgctgttttaaaaatgaaaaacaaaatttgaaagtgggggggggcgcctcacaaaattgggtcgtcgtcgcacagaagcagcgggcgaagatgcggtgggtgttgacgttgaaatagaataggtattggagaacagtggtgaaagtgatgaactcaaccaaataggcagaaggttgaaattagtgaggaatttgcggagatttgttgcttttatattgccttttttggaatgaatttctttaagtgaattcacctctataaaaggcgttgaattttgcaaaaactttcattgccttaccctaattaattaactattataattctctctatatcgtcgtcgccgtcaacctcaatttgaggtgttttcactccattcataattttttaatctccgtttttcttacagcagtcatcacgatg

SEQ ID NO: 104847 - DNA, 227 bp, Heterodera glycines
tgcaggtcttgatgcagtcatatctcagggtttcaataggtgaggaacttatcattagttgcaatttgacatgtatcacatcgacagatgattttcttttcggctttccttgcctttcctccatcagaagagcgtcgacggcgactcaaatgggtcggttccttccctttgatgtcccatcccaaatattaaattttcgaagcaatttgacattttctttcaaaatg

SEQ ID NO: 104848 - DNA, 188 bp, Heterodera glycines
  unsure (1)..(188): unsure at all n locations
ggaacagtccatcaaaaattcacagtacgactccccgagactttggaattggcacaaattggtcagtagctctctcatcaattatttacccctactcattcaccgcactcggtataacgggtcaagagtttatanaagtatgggaaaacgacagcagtgtcccgactcaagtttatttaccggacatg

SEQ ID NO: 104849 - DNA, 338 bp, Heterodera glycines
  unsure (1)..(338): unsure at all n locations
attccccccccccncccctcaacatgtgttgttcgttcatccatttccattctcccccaaatgccttatggcgctgaaacgaatgaaaccgaagggggcaaatggcgccattttttcactttgaagcatttcacacagtcaaacaaacacatgttataaaacagagaaggaaaggtgccaagatgggcgcttaaaatccaatccgaagaagaaaatttgccgatttgcgtttagccaaaaagtgaggagtcatttttcgacgatttgaattttcattgaatattatgccatcaatgcattcattttattttaatgttaagggaatatttcttgaaatg

SEQ ID NO: 104850 - DNA, 74 bp, Heterodera glycines
tcagctcactgactagtccaacttaagcaatcagagattttttatggataaatttttgccagtttcagctcatg

SEQ ID NO: 104851 - DNA, 646 bp, Heterodera glycines
ttagcaaaaataaaataaacaaacgcttcaaaacccgggttccattaataacttaaacgttaatttttatattttatgaatatttacacaaaaaattactcgacaaaattcggatttgcttgtcaaatttagcactttcttccgaataaaatttgttcaaatatttttccattgtttcttcgctcaaaacatttggcaaatttttcctgtccggtatcgaaacgaaagaaatgtccacgtcaaagccaccaaatttcaatttgagcattggcactgtgccgtaattgatcttcactatgccactcacattttcattctaaattcttttttgtaattgatcatttggcattaagaatctttctagtatgtatatatgctcaataatgtggagagacgaagttacaaaaattatcatgaaagaaatattaaatttaattattattatttatgtgaaatattttacttaaaatatctttcttaataaaattattattttcaaaaagcattttatgcatttggcaagaactcaaaccaaatttacgctacttccaatttttgagtcaattttttgaatttctgacattctccgcaaaaattcggtactcaaattcgaatttcgttttcttttttcacctcacaaagaatg

SEQ ID NO: 104852 - DNA, 335 bp, Heterodera glycines
ccgtgactttgcctccaccatccgtttttcgtgtttccttcacttttgcatttttcctgtgccttttgggtactaattttcttggtagtaaaatttaatcgggaaagaatgacaagacgaacaacatggtttttatttttgaaaattttgcatttgaagctgacatcggtttttcatgtttcattttctttcctttttatatcttttacttttcgtgtttcattttctgtctttgtttcgttgcattttccctgtgccattttattataaaagcaccgccaactccactctttccctccattcacttctctttcattaacagtgccgctgaaatg

SEQ ID NO: 104853 - DNA, 1003 bp, Heterodera glycines
tcgttataaactaaatcccattgtatgaattaactttgtactaattgcgatgaattgccatgattgggtacggtactaaggaaatgtatttagtgctgctgatcaagtttgatttggaaaaggctctcggaagtccttttggttaatttaattttctattatcatacataaatggaaattaacaaaaaaaaataataataattagggatgtcaaaaatatgtacaaaaattggtcaaaatatgtacataaatatgtaaaaaaatcacgaaatatgtaagaaaatgtataaaaatccaaaatatgtacgaaaatatgtataagttggcacaaaatggcagaaaataacctaaataggtttagaatcaccttttaacatctaaaaaattatttttgatattttttagggtgcatttaaaaaaaaaaagtttttttattttttcacaagaaatttcgaaaaaattttcaaaaattctcaaaatatgtataaaaaaatataaaaatttgtcgaaattttggcttttttttgaggatcttcaaaattttcataaaaaaatcctcaaaatatgtaaaaaaaatgaaaatatgtaagaaaaagtccaaatatgtaccaaatatgtataaaatctcgaaatatgtaaaaaatgtataaaaccccgaaatatgtaaaaataagtaaataaaagtcccaacttttgttcgcaaacacaaaaaagaaagtgtttttcctactatttagcacatggagaagccaggaaaaaaatatgtatttacataaaattgacatccctaataataattcataattcgtatgaaaatcaattggcaaaaaccggatataatatatgcttcctgtttatggataatattaatattttatttttcatccataaacaaatgacgtcaattaattaattatccccaaggtatatttcccatataaaaagcaattaatttttgaaaagttatcacaaaaatttattctcatatttccgattaattatg

SEQ ID NO: 104854 - DNA, 189 bp, Heterodera glycines
  unsure (1)..(189): unsure at all n locations
actgcgagagttggtcaacatnttcaaggcccagttcgatcggggcctagcggcgatcggggtcaaagcgccggaagctgcacgactacgttgtatgatgctttcaccgtgcccactcccgnccagcaacgagatgtttggggcttcgatcgcanccgccncccagccgaactgcttcaaatcgcgatg

SEQ ID NO: 104855 - DNA, 611 bp, Heterodera glycines
aaagataaaaagttatggctcattgacagaatcgaggtttttaattatttccacaacaaagggtgggtgggaaagtgtgacaaaaatgactcagagaaattgaataacaaaaaccaatcgatatcttgtcgtacgtaaagaaatatttgatcgaaaaatgtaaaatttgttttttagttaataaagggaataatttattttaaatcttttgttttattttgtttttaaatgaattattattatatgcatccaatttttaaatctagttttgcttaaataaatctaaagaatttcttatttattatttaaactaaaaaaattaatttaaaaaatacatttagatattcattattaataaaacaaaaactattttaaattatttaaaacactgaaaataacacaaaaataaatagaaaaaaatgtacaccgtccggattcgaacttgcccctagcacataaaatagtgatgagaataggtacaaaagtgattagaagacgtacaaaagtgatgagaagagttaaatagtgatgagaagaggtacaaaagtgattagaaaaggtacaaaagtgatgagaagagttaaatagtgatgagaagtggtacaaaaatg

SEQ ID NO: 104856 - DNA, 599 bp, Heterodera glycines
tgacctaattttaagccaaaaattaagcaaaaataaatttattcactggttgcagttgcaaatgagctacatttcctttataaagttctctttagcaaatattgacattttttaaatcaaaaattttgtcaagaaaaaaaatttgggggaaaaatttttgaaaaaattttccaattcttagtggtgtattttttttgaaattttttagatcgtttcttaggggtttatttttttgaaatttttttaaatcgattcttaggggtgtattttttgattttattgcatttttgctaataaaatctctgaaaaatgtcgaatagtgaaaaaaatagcgataaaatgccaaaatagtgaatttcaactattttagtgacgaaaggccaaaatagtgatttctagtgacccatagtgacatcagaatcaaaaaattttaatgcaaaaatgcgttttttgagctcctttcttcaaatcaattgagcaaaaaaaaaaaaatagtttttcactaaaaatagcggccctactcataactaagccgcaaaaaaatatgttaaaacataaaaatccgggctctactggtaaatgtttgccttttgcgaatg

SEQ ID NO: 104857 - DNA, 569 bp, Heterodera glycines
ttcgaatgttttgtgttcaaggtttctgcagttcgcactaattatcgcagttggctgcgttcttcatcgatccacgagccgagtgatccaccgataagactagaattcattcttcaacagaagtgtaaaaaaaaataatgaaaaaaaaagaaaaagctggcggtgcccgagctgacactcattgagtcttaagccacgtgctaggccaagcacgggcactaccgcgtcgtctcatcacggccacggacgtagcagcaagcacaaacacaccgctagttacggcacgtaagaccgggaacgaaaccaccatccccagtcagtgtgttatgtgcctgccacaacaaccgctcaacgacgcacagacgccagcacagccgttaggtcgccccacgagcgtgcatcccacattggcgcagcgaaccagccaagcgaggcggcccgccaccgacacattgccacgcagcagccatacacaggctttcacatgtgcagcactgagcggtataccacagctccaacgtatggaagcaccccaaaagcatggctcgtgaggcagctgccccgtaatg

SEQ ID NO: 104858 - DNA, 582 bp, Heterodera glycines
gcgcatcggctcggggggactgccccgaaaacaaaaaaatcgattttttcaagtgtccgtttggggtactcaagcaattatggggagcaaaaatccaacgcagaattaaagtacaggctatagggaagctattcccgaaggattcggtctccccataaatctgggcgcatcggttcagggggactgccccgaaaacccaaaaaaaaatttttttggataaaaattatttaaatgaactgactagataatatttaaaataggttattactcttcctttcagtatccctgcaaagtttggtgcgcttctgatcagtttctgaaaaaaaagttaagcctaaactttttggcctgtttaaaaaggaattaaaaattttattcatctccctttttgatagaaaaagcatcagagtgcctaaactaacctgtaaataaagttttgtgtgtttcagagcactttctgaaaaaatacttatgaattaattttgcaaaaaataaataattaatgaaaaagtcagaatttcgaaaaattttaaaaacaacaagcgttggcattttttcaggttaagttagtcctttacaatg

SEQ ID NO: 104859 - DNA, 761 bp, Heterodera glycines
aaaaaatcaaaaaattttcatattttcagtgatttttgtaaaaatttttgaaacttagtaatagtcataaaacttggtaaaattgttagagaaattgaaatcttataaaaaatttgttaaaaaaatttttttttttgaaaaatttttggtttttccaaatgttccggggatgaagaaacaatgatgtgggggggggggggggggggataaacgagctgctcccggtttttcagtacctaagagagtggagactgatcagtgatcattttcatttattgaccagaggttagtgactgatcagtacactgatcagatataattgccgaaaataatgctgtccggactaagtgaacgaaaacaaataaatttcaattggttatgtttgagaaacaaataaagtttaaattgattaggtcaaaaaaaaatcttattaaaactaaatcactatatatgcacattgatcagcagaaactttgcttgatcagggaactgaatttttgaattgtttgtgacagggctaaggtgccgaagagtccattaatgacatcatcttacaagcatcgcaaagtgtccaagagtcaggaacggcacatcacttcaaacaatcactatggactgatcgattttcgcaagagattggaaagggttggcatttttctaaaaaacaaagatgccaaaatttgcaagtgccaaaatgagtttttgggaagcaggtcaggaaactcgagcgaaccgaaggggacgagggaaagtcaaaaatg

SEQ ID NO: 104860 - DNA, 304 bp, Heterodera glycines
agaaaatctctcatcagattttgggtcatcattttgctgaaataaaaatcaaatgggaatattgggggataagcaaaatccaattcaaatttgtttcttttttgggtcaccgttttgccgtgaattattattttatgtgctcgccgccgtccatcataaatataagtgaaccatcccatctttcttcatttaactcttctggtgcattttttacaaaataatacaataattattcttttatgaattcataaatttgacttttgtgattattagcccctaaaaggaacctcgggaatccaatatg

SEQ ID NO: 104861 - DNA, 177 bp, Heterodera glycines
aaatttagctccggttagacctcgtttttccaaaattcccggttccgactaacaccaattttaacctttaaatatcattttaactttggatctatttatattttcattttatggtttcccatttttcttttccttaaataaatttcaatacttatttttagtactaaagaaaatatg

SEQ ID NO: 104862 - DNA, 225 bp, Heterodera glycines
tctaattggtgggcgggcacctggataattttgaaatttaaaaattgagaaactcgctaatataaattttttgaaatttctattttcaaaaaaagggcccatcatctaagtattaccaaaactcaatttttttgactcttccaaactacaaaatgccttaaatattacatgtctcattaaataatattgcctctttaggtttattatttataaatttataaaatg

SEQ ID NO: 104863 - DNA, 187 bp, Heterodera glycines
cctctagagtctttcaataaaaacaatttatttttttcattaaattactcatataaagctacgctgataaaggaagaaaaaaaagaaaaaactttaaaaaaaaaatgctttttctatatttaattctatgttcgattcataaattgttatgaattttaaattttcagataaattcagctgtttgatg

SEQ ID NO: 104864 - DNA, 215 bp, Heterodera glycines
agtgagtttaggaatgcatgcccaaccagggactaggatttcaatgtagggaggcataacgattttctcgtcctctgtttaattttataaaactaaactttgatcaggaagcggccattggacaggcaccagaaactgtggaactacagaacgtgaccattgggtcacaccttcccgcgcaacaaggcgaggaatgggaaattgggccacacatg

SEQ ID NO: 104865 - DNA, 73 bp, Heterodera glycines
gcatatatttaaacatttatcttgattttctaacccaatttcagcccaattgaatctgaacgaaacaaaaatg

SEQ ID NO: 104866 - DNA, 132 bp, Heterodera glycines
ttcttccgccaccacttcctcaaccattcaccacaatcatccgcttggttgctgttttgctgcggttgttccacatttattgtccatcattttctacctctacccccgcggctccctgaaaaacataaaatg

SEQ ID NO: 104867 - DNA, 69 bp, Heterodera glycines
tggaactaattacggtaaatttgcttacgactgttctccacccttctgtcgtcctttgtccacacaatg

SEQ ID NO: 104868 - DNA, 78 bp, Heterodera glycines
tcatagaatattcgattcacagaaattgacgacgctcgaaatccgactttgttccgcgagaaggtgtccaatgggatg

SEQ ID NO: 104869 - DNA, 91 bp, Heterodera glycines; identical to SEQ ID NO: 100405

SEQ ID NO: 104870 - DNA, 175 bp, Heterodera glycines
ttatgaatgaacacaataacaaaacgaattaaatcaggatcatcaacaaaataatacagtaaacgcattggacacacaaaatgatcagtacggtgttgtgaagaagcgcacacattcaattgatcttggaaccccccggaagaaatcaaacattttaagttgccaaaattacatg

SEQ ID NO: 104871 - DNA, 530 bp, Heterodera glycines
  unsure (1)..(530): unsure at all n locations
aaaaaaaaacgaaaaaatacaccccctaaagatcaactttttggaaatttttaaaaattacaccccacaaaacacgaaaaatttgagttttcgtcgtcattttggcattttcaataaatattttcgtcatttttttgcgaacatttctttttttntaatgagaattttttcgaaatttggcaaacttggaggtgtttttgatacaacgaacaacaataaaaaatatgcatttttaagttttaaaccccattttttggttgtttattgtactttttaggtttatttaagcaaatattaaatatgcacaccttttttgggatttttgggggtttacaacatatattttggcattttttatccatattttggtccatatttggccatttttggcctttttagtccatatttcgggcttttttagtccatatttaatgtccatatttcgcgttttttagtccatataatttacaaccctattaattagttttttaacatactgtttggatggattatcatcaagaaagataatg

SEQ ID NO: 104872 - DNA, 1003 bp, Heterodera glycines
aattactaatatcaatccacgtttttaaaataaagaaattaaattaagtagagttttcatctgcgttaatgctttgtttgaaatgcccaccttccttcccttcacgtgaaatcattgtcacccactcattttggcccatatttaagcccgtccgaattctccccaatcatcattcgcttatcaccatcatttgggaggaaaactcctaattcctctttcctctcccccaatcgatcattttgttgtaaaaattgtatttttacattttttgtttttgttgtaaatttggcttaattacccaagttggagcttgaccagttaattgtactgttgctgtgaattctttcaatttgtggtaattgacctacgccgagaaccaccgtcccgaccccactcaaaacaaaaactaccgtcttttggttattttcggcagcctcgctccccgacagtcataacttttttttctttgtcatccaaatccaacaatcttggcatgattctaaagcttaacatgtttagaagccatttctaagattgcttcgtgattagacaattgcttaaaaagttatagcatgaaaaatgcggaaactaataactttttgatattctagaaaatttttttgctttttgtaaggctaatatagcatgtgaagagctgtcgaatgatatgaacaatattggatttgaaggacaaagaaaaaagtttagccaaaaaattctatgtccaaccgtgagggcccaactgacgggttccgattgaaaagtttttaacaaacaaaaatataatacataggcataatttcaaaatttaggcaataaaattaattaataattatttttttttatttcaaaatatttcatttaattttttgaatttttttataaaaattccctcaccaaaaaggaatttttaatttaaattcagtgtttcttttttgacccttccattctttcattgttccttcactttcatttttgaaaatttaaaaataatagaaatatg

SEQ ID NO: 104873 - DNA, 144 bp, Heterodera glycines
tcaagacttcaaattaataatcaaaaatctcttaaaatttttttaacccaattcaaaaaaggaaaaaaatttgcagtcaaaaaattattcgaatttctccaattttgtttccataatttccgaaagttattcggtatcataatg

SEQ ID NO: 104874 - DNA, 279 bp, Heterodera glycines
ttccgtcctgcaaaaattttgaatttcaatcccgctgcgggattgcacatgtgaaatttccgtactctaatattaaccagttaattactccttttatttatgtgttttcccaaaaggaattatcccccccccctccctccacctctacacaatcatttaatttctacaaatatttgtcttttctatgataacacaacaatccccttttacattctaccaattaaattagattattaatatttattgtttaattgttattttaatatttatcaaaacatg

SEQ ID NO: 104875 - DNA, 403 bp, Heterodera glycines
ttcgacataaaaatttgaccaaatcccacccatgaaaacggagaaaattactaaaatcccattactgaatttgaaacgttttttacttacattttgaaaattttggtaaaagttcattttgtcatacaaacaaggctcaatatttgctgttggaaatgctaaaaaaatattggaaatgtattaaatatttaactgttaataaacatgaaaacaattaattcaaaaaataaagagtaaaatgaacagtaaaaatgctttggcggtacacaaaatttgctttttatataaacacaattcgcaccgacaaaacacggtgagaaaaaattgtgttttagaagaaaaatgggatataaaaggcgatgcttccgacaaaacgaaacattcgcaactcaattctcaaatg

SEQ ID NO: 104876 - DNA, 119 bp, Heterodera glycines
aatccaaacggggaatattctgtttacaaatgagactcactgttcttttttcgacttttcccgtttcttttgttttttatcactctctccccccattttaggtttatgagaaggaaatg

SEQ ID NO: 104877 - DNA, 94 bp, Heterodera glycines
ggtgagggagaaaatggaaaaaaggagagattaattggaattatgatggtgccatctgtttcaggtagaacactcggaattccactcgattatg

SEQ ID NO: 104878 - DNA, 262 bp, Heterodera glycines
  unsure (1)..(262): unsure at all n locations
aataatttatgcgatttctttcacattttgtcatttttctcgtgatgactccgccanataaaaggaataataattatatgatgattttaatactcacattataatatttctttataaatatttaacatttttcactttcatttggtcccattttttaaattccataaaaatattttgcctatttaatggttttgcttttcaattaattttcatttaattaatcattttttccctcctcattacgccttccttcttccctatg

SEQ ID NO: 104879 - DNA, 1003 bp, Heterodera glycines
catttgataaaacaaaacagatagaaggcctgatctaatatgttcaaaaattgtatttcatttaaatcgagtccgggcttcgcaattgtcaagatgaatacaatattcgtgattagcgactcagaaaactgacgaatacatattttcatttattcaaacatagacaaaatttaaaaacctgaccctggcgccaaaacgtgggcgccaaaacgtcggcgccaaaacgaccttggcgccaaaacgtcggcgccaaaacgtgggcgccaaaacgaccccgactcaattgctgctgtttgtagcatgttgcataacaacgtaattgtttgtaatgcactattaccaagaaatgttggctccattgcagttcacacggccataaaaaaataatttgacaattttaatgcagcaaactttttcttgaagcatccaaattaaacattcttggtatcattctatagccccaagagtcctctattaatttgcaaaattaaaaaaaaaaattgctgtgtttaaaaaagttatggccaaaaatttttagaaaaccaattcttgatttaatagttttttcggggttttttaataaaatctatgctaatattgataatataaacaaaaaataattattataataatttaattatatttttttaatattaattatttttcaatttcaagataaattctcttaaccacggttgagttaaccatggttaaagacgagcataccggttaaggtcggtcgttaaccacggttaacgaaaccgtggttaatgcgttaaccgtggtttactaaaccgcgagacgagcataaggccccagatcattagatggacccaatctaaaaacttaattcttaacggtgtattattatcacccgcgcccctgcgagggtgaaggtcgcgggggcgggggtgaggccaaaaaagcagtcccgtccccggaggcggggcttgaaccttaattaatccttgaattttccactttttagttgagtggtcaaatg

SEQ ID NO: 104880 - DNA, 740 bp, Heterodera glycines
tcatggatttaggtagcattttaaaaaatgaaaattaaaaatatatctatttaattttatatgattttttatatttctatcacatattgtttgcattattttttgcgtaaaatgaaaaataattttttgcaattttgtgacggccaaaattaaatgtaaagacagcaaaaaccagtgcttttgcgcaaatttgggacggggaaaaaatgaaatgagtgaacaggtctaaaccagtgcttttgcgcacaatttgatggcaaaaataaatcgtttcctgtgaagaaaaatgtaataattttaacgatggtcgaagaaaaaaccaaaatgaacaaattgtcaacaaaatgattacaacaatcatattcttttgtgtaacaactcctatttggtttcatttggcctttgttgtgcctatttaaagcggtggaaattagtttttgtcacattcaactggcaaccgatcacttatattattcattaaacctaaccaagattttgccgtatgttattaagaaaattgtttaacttttgtcaaatgaaataaagtgccgagataaaaaatgtcaagcttttacaattttttggtccaaagttcaagtcccttacatcccaaattcattttctcttttaatttttacaaaattcctattgaaataccacggagcattttcccattttcgttgtttttctaatttttctcttttcatttaagtaaattcatttataacaaacgaccaatg

SEQ ID NO: 104881 - DNA, 355 bp, Heterodera glycines
ttagctgataagagcgatattgattaattaggacggtgataataattgataaaatgatatatatatatatataacatatgggccgaagtgatcagagggaaacattgattgttcagagcgatatcgattgataagggtagtgatataattgattagtgatcagagggaaacattgattgataagagcgatatttgattgatgaggatggtgacgttgattgattaagtgaccggtaataacctaatcaatgcaagctaaaaaatatttgattgatcggtgaagtggtattgatcgggaataatcgattcaaaattttaatcaatgccaagctggaaataatgattgatcagaatg

SEQ ID NO: 104882 - DNA, 1003 bp, Heterodera glycines
aaatattcaatcatttgtagtctaatatattcacatcggttcagaattcaatattaataacatcaacggtgagaaaaatggggtatgcaaagtttatgggggtaaagaaccctatccaaaataattcccctgggagaagggagtgggtgagcatgctgtgaatataagccaatacatttagtatcagtgactcaaaatgggcacgcaaacatcgatgtgtgggaaaaggcaaggggtgagaaaaagaaaagaaggaaatagtgcgctgtctgactgtctggatacgctttttaaaatttgaccagaaatatggggcgcccctacaaagtgtccaagcctcgaaatgtccaagcctcgaaatgtccaagccacgaaatgtccaagcctcgaaatgtccaagccacgaaatgtccaagcctcgaaatgtccataagggtaaaaaacacgaaatgtccaaaacgcgaaaagctcataaaaacccggaaggagtctaatttagggttttcggggtcgctgaatacgaacacgacctttatattgccccttgcctaaccttagacccagccgaataagaaaaatctgaaaattcggttaaaatatctgctgttttttgtcttcagattttgttattcattgatcgaacaaatgattcgtaataaacttgaaagtctacaaaaaaagtcggaagaagcgtttttgtcagacatttcaaacacaactgaggaggccgtgaattttggagtggaggttgacgaatcgcatgccgtgataacttccgacaatgttgaacaacaaactttgaacgaggctgaactttcaacagtgacctttgagcgcggaaagaccaagtttgggggagattgtctgtcaaagagaacataaccacctcccagcgcctcagaaacaacaagtttgtttaaatttaaaaccaaataattaatgctgtgttaaaggcggaatcaaggcgacagaaaatcaaagaaagtgtcctggccgagccatg

SEQ ID NO: 104883 - DNA, 804 bp, Heterodera glycines
gaaggaaggaattccttcgggccaaaaaaaacattattaatttttttttggcctaaaaatatggacaagaaaatactatttccccccgcggcgggggggggggccccttcggcaaattggggtcgtccgtccgttttgcccccggggtttttgctgtgcgctaatcgtagaaaagaaattgctgctggagacaattagggaactctaaggatcgcgcccccgatattgaaatgaaatgaaatgaaagttccacccctacggacaaaaagcggtcgccgcagccgccgctactccgtcggtaatggacacattaaactgaaattggcgccgcaacagtgccgggagaagcgagtgagtgtcgtctcataacacaacaacaaaataatggccggctaatcggtatttaaggggcccaaattggaacagagcgatcagttcccaaaattggggagtggaaagaggccagagcagaagcaaaacaccccaaaaggctgacactgtccaaggggaaaagcccagggaccagcaacagcagaagaagcagacacgggcctaatttaaaggcatatccccactaattagcaataattgggggtaggtcagtttgttacaaaaagcttcaacaactgttcaaatgatattccatgcccctcattatcctaattatattgaaaacagcaaaatatgtcatttacttctgtttatggcgatggtgtgatccaagcatgactcattttggctgtttcactcccacgcacaaaaatttgtttatctgctgatgaccatgcccttaatttgtagatg

SEQ ID NO: 104884 - DNA, 311 bp, Heterodera glycines
cctataaataggatggtaccttttttgcatcttcaaacgaaacctgcaatgctgtgagccaatgggttggtaaagaaaacattattctgtgcaatagagaaagaattattcgtcatctgagttgttgtgcctttatgtttgtgattaaactcattagaaatttagtccaaaaaattcctgaaatttggtaaaattattattaccagtagcataacactgattgtgagacagaaagtttaaccctttagggaggaaggaaataaatctaaaataacagaagctcaatgtaagaagcataatgagtgggaatg

SEQ ID NO: 104885 - DNA, 117 bp, Heterodera glycines
tttatgacattttatgcaaatagatattcattttttatgtgaatttttgaagaaaataaagccatttaagtgcaaaagtgccaataaccgtcttaataattcgacctcaacaaaatg

SEQ ID NO: 104886 - DNA, 167 bp, Heterodera glycines
cccctagagacgtgttataacaggaaaaaatataaagaaaaaacttttcgggaccaataatttagaggattgccggtgttattaggttattatttgtaagtcatttcacaggtaaacatattgcctaccgagaacataagtcgttgactgggacagcccggtacatg

SEQ ID NO: 104887 - DNA, 82 bp, Heterodera glycines
actaaacgaaaacataaaaaacaggataaagagtagttttaaatttttttagtttttattctcatcggtttggatcaaaatg

SEQ ID NO: 104888 - DNA, 132 bp, Heterodera glycines
gctaaaataaaaaatcttgagaaaacgagataaatttaaataaaatgttaaattaaaactataaaaatataagaaaataaattttaaaaaatacaatcttaaaatgtctcttcaggcttaaaaataatcatg

SEQ ID NO: 104889 - DNA, 121 bp, Heterodera glycines
gggacaacagcgacacaaggtcaactacctgtcagcacgcattacctgcacggagtgctgtgattctgaaaatggcgtgcgactcaattgcaaaatctgtttgacaacatacggtgcgatg

SEQ ID NO: 104890 - DNA, 892 bp, Heterodera glycines
  unsure (1)..(892): unsure at all n locations
tgaagtcgaatcttttacgggtggaagagtaccagtgacctttaaactgaangngccganggaaaaaggaaangggcaaggctttaaaagcgcgcggccaccaaaaaaccnnncccnnacgannnagnacnnggacaaaangcgnnaagancncngggannaaacancggaaaggnaannacaaangaaanaannaannncggcgagagnccaaaacanncgaanaanncancgccaaacncgggncgaancnccncccnaaaaanngnaccgcgccccacacaancgagaancannnccaacgaagggannaaancaannnccccggncaaacgcanaaaanncanncaaaaggnnncanccaanncaaagaaggcnnccaacaaaaccgaacaaacccccnnngncaaacnncaaaaaanccccaaaaagaacccgagcccaccaancaaanaagncannaaggcaanccgncanaaaaaggaggannnggancaaaaacagaccaaacgggaacgacgacgggnnnnngnnaannccaagnacaaaaaggnnnnncgccaaccaagnaaaagccaaaaaanccncctcccaagccaanaatcaannaaanncccccgcccannnnngaacagaaanncgccaatccttgcaaatgcccccagttcgttattataagagtttaaaacgtggaaaagcggctcgcaatgacttaaatttacttattttgttattatttcttcagcttcggaccataatgttattctcatacatggcctattgcatttttattgttctttttatatttttctccaattggccaaaatccgttgccacaatcctgatcaccccccccccccacaatcattcccttttttattttttcagaatg

SEQ ID NO: 104891 - DNA, 366 bp, Heterodera glycines
taatctgtaaaaaaaatcaataaatcggctttgggattcactgtgtgtttgaattggcgcccttttgtatctttctctaaccactactctctcgtcaatgtgtttgtggatgggcgtggcctatcgattaagaagggacagcccgtctggaggtcgctgcgcgctaacacccctctcactatcaatcaataattacgtgtttttttcgcaggttcattttatgcttttaacaattataatcataaactatttcttaatagtaatggccccgagaaaaatcaatgatcaattggtgtttgagaacaaaagtaatcattttttgggttttttataataattttagatttttttaaatttaaagaaatg

SEQ ID NO: 104892 - DNA, 210 bp, Heterodera glycines
tttttggggaggatttagtggcaatttgaaggcaaatgggagggtgtaattaggatgaatgtgcgggatgtgaagaactgttattcatcaatgtcaaaggcagccttttatggagcagaattctgctcaaacattgtattttgtagtatataaatgtagatgatcatatttgttcgtaaaatgaatgaattttaaggatttacatccatg

SEQ ID NO: 104893 - DNA, 218 bp, Heterodera glycines
ccgcttttctcacatgtggaatttactgttcaaattggccaacagtggatttaatattaaaacaaagtaaataatgggatatcaattttaacataaattacctattaactatacagaaaagcaattagaatatcgtttaaaatttatagtttattagttagtaaaaatttataaaattagacattttaagggttgcttaaaattaattgcttagaatg

SEQ ID NO: 104894 - DNA, 167 bp, Heterodera glycines
ttccttcgccgacccgaaacgatcgacaggtaaacaaaacaaataataggtaatataaaactaacaagattttttaaattagtaccaaaggatctgctcttgcagtgcaaacgatgggcctcctttcccgagcatttgttgggcactaacgcaacgatcagcgaatg

SEQ ID NO: 104895 - DNA, 801 bp, Heterodera glycines
tctttttcgggattttgatgcctttttcttgccttttttcgggattttggtgcctttttcttgctttttttcggtattttcgtgtctttttcgggattttgatgcctttttcttgccttttttcgggattttcatgtctttttcgggattttgatgcctttttcttgccttttttcggtattttcatgtctttttcgggattttgatgcctttttcttgccttttttcgggattttggtgcctttttcttgccttttttcggtattttcacgtctttttcatgattttgatgcctttttcttgccttttttcgggattttggtgcctttttcttgccttttttcgggattttggtgcctttttcttgccttttttcggtattttcatgtctttttcgggattttgatgcctttttcttgccttttttcgggattttgatgcctttttcttgctttttttcggtattttcatgtctttttcttgctttttttcggtattttcgtggtgtctttttcgggattttgatgcctttttcttgccttttttcgggattttggtgcctttttcttgccttttttcgggattttcatgtctttttcgggattttgatgcctttttcttgccttttttcggtattttcatgtctttttcgggattttgatgccgttttctgccttttttcgtattttcatgcctttttcgggattttcgtgcctttttcatgtctttttcccgattttgcttgccttttttccgttctctactgataattgtctgtgaaaagcaacacactttaagatg

SEQ ID NO: 104896 - DNA, 811 bp, Heterodera glycines
gattataaattgcaattttttttatgcggttcctaccccaccgcttttgacaccccccccccccccaattttcctgcgcctaagattttttttaatttgtaagaatagcttagtcaaaaagaataactttacaatttacagtttgattgataaatatgtaaattgaagcccaaacccgaaaaaagcttacaaatttgttatgaaaagctcaaaaattgattaattttaattggttttaagtgaacaagaaaattttattaaaaaactctcgggtcttcggtcccgtgtcacaattttttttttttgtttgcaattattgtcaattaaatttagtccgctttatctattgctgaccatcaaattggcactgaacatggagaagcatcaagccataaagatgaggacaatttggcaactgagaaaagtggcttattttttttttatcatttaaaatataatcataaaataattaattttatttatatttttccattttttagttgaaaatggatttaatttgtcattatttatttctctctttgttaaagcaaacaaatttttaaaatattgcacgataaaattggctaaccaattgacatgaaaattggtttctccggaagctatttatcatttttgttcatgacccgatttttaagtgcagtcgactataatatttttccccaaatggggctttagttataaaatcaatttaaaaatatcagaccattttcccataaattttgtaaattttaattaaaattaaaaattaattcattttcaagtgattgccgaatcggcaacggctgccatg

SEQ ID NO: 104897 - DNA, 476 bp, Heterodera glycines
tgtcgcgagagcgactaagaaagtggagaaaaagaagaagtgatgggaaatggaaaaagagagagagagagaaagaaaatggaagaaaattgaggaagaataatttaattatgttaattggaatatttaatatttgtgattgattttattatttctatctaaattgtgatattttacattcaatgtgatttttgtgtttaatattagtcactctttttgttgttgatcgttccgcctaaaattgctccacctccgcttttcctatctatttaaacacgcacgtttttcacttcaacacattcctttcatctgacatcttattcatctttatattatatttattaaataaacttctttcttatttgggaattattttcccccttattccaccccgccctctctccctcgcgccttcccatttttgtccccatctcgccgtccgagccaacaagtggtgccgctagcaaacaaagatg

SEQ ID NO: 104898 - DNA, 419 bp, Heterodera glycines
tttctttttttacacaaaagtatttatgcaacagtttaagcaaaagcaaatggaaaaggggagaataatatgttttgatagattttatctgcacacatatttcgcgacatccttaacattgaaaaaagcgcaaaaattgcctcgactttgactacaaaagggatgtgtacagtatgccaaagaaaaaggtgctgggtcgaacctaaaaaagtatcagttataataaaaataattaatttaaatgttataaagtgactaaatcctataaaattctaatttttttgtgcatgtttcataaatattttggcatttttaatacatatttatttacatattttgcaatttttcttacatatacctaaattcattccctagtaataaactttttagcgtttttttgcagccattttagcattatg

SEQ ID NO: 104899 - DNA, 426 bp, Heterodera glycines
ggcattcggggaatgagtctctattgggccgtgcactagcagctaccggcgcaaaggagcacgcgtggcatcccgcaggagtttcggttggccgtgcagtaacagctaccgaaacatcgcgtggcacccgtgagcagttggaacccgggggctttgccaacgatgagttcgcaaaggcgcatcgcgtggcatccggcaggagtttcggttggctcgtgcagtagcagctaccggaacatgcgtggcacccgtgcagcagttggaacccgggggctttgccaacgatcgtttcgctaaaggcgcatgcgtggcattcggggaatgagtctctattggctgtgcactagcagctaccggcgcaaaggagcatgcgtggcatccggcaggagtttcggttggctgtgcagtaacagctacagaaacatg

SEQ ID NO: 104900 - DNA, 212 bp, Heterodera glycines
taagcactattattcgattgtttggatagattctcttttaaaaattcttaaattcattgacaaaaaaagtgaaaaatttttaattttttttaagatttcaccaaattttttatgtcactttttaaaaaatgctttttttaaattttcattcaagatttaacccccaaaacattgttcaattaaaaaaaatgctcattatgttcaggcccatg

SEQ ID NO: 104901 - DNA, 98 bp, Heterodera glycines
  unsure (1)..(98): unsure at all n locations
cgtaaactntcattcataataaagaacaacaattttgctaattgcccattttagtatggccacgattttattggttttacgagggaaaattgtacatg

SEQ ID NO: 104902 - DNA, 181 bp, Heterodera glycines
attcatcaaatttttcgcattatttggataattttgactaccaataaacatttttaaatttgaagtgcagaagcagatgtggggagtgggagggttcatgatcgcgcgcctcctcttccattggtcacgccattccgcataaactgctcatttcaattatattcccaaatccacaaaaatg

SEQ ID NO: 104903 - DNA, 144 bp, Heterodera glycines
  unsure (1)..(144): unsure at all n locations
aaaaggagccgcctcacggcnggggcagcaccaaaagccccacattttaaaaaggaaacggccgatttcacataattttttcatctttgctaagccaattgaagtccgacgaaaactgtcttaattatttgcctcaataaaatg

SEQ ID NO: 104904 - DNA, 602 bp, Heterodera glycines
attgacattgaaaaagtgtcagaatttgcacgagaggaggttgagagcagtcggtacagcgaaaaagtgtacataaatggattgccatggaatatatgggcaaaaataaaaacgaaaaatggaggcactgacaatgagaaatggttgggcattttcatttgttgcgatacttcgaaaaaaggtgcaaaattactaatagttaatatatatattaacaacaattaattgttaattagtactaattaacagcaataattaatactccattaagattcgctttggcgctgctgcgttcgttcggcaacttttcgaattatctcgcaaaaaaatgggacggagaattgcgttgggacacttagtaactttgtgttggacaataaattgaccaatttgggattccctaatttcgtttcgtttgcggtaagtgccaattcaaacaaatatttaaatttgacattcgtggaccagccaatattgaagttcatttatttatttgcctggtgtaaagaaatcataacaaaataaattaatttctaaaacataaccaattgaccacgcataaacaaaaattaaattagatgatttaaattaaggaattgatg

SEQ ID NO: 104905 - DNA, 1003 bp, Heterodera glycines
attagtatttaaattatatgtaagaaattagaattggacaaaaaaaaacccgcagcaaccgaaaaaataaaatgtctttccgactattcagcgcctggagaaaacacgaaaaaaatgtgttgtattgtatttcttttttcttttattttgagcaatttgggatatgaaaaggcaatacatcaatttaagagcataatattttaagttcagctcgagaaaaggtcagttcaaatacgtaacatttaatctagtaaagaccgaatgtgattgatcgattggttcctttaaacagccgatcagctttgagaagatgagggcgggtcggcaacttctcaaagcgaggccataacaaataaaagaggaagaagctgttgtcccagaaaaaaagcctagtcaacagattgctataatttgtgtgtcataattagggagcgaattcataggtttatacacatgaaaaaggcacataattttccgatttttctcccctattttactatttttgcccttttttaccattttcgttcatattttacattttttttgtccctataaatcccgaaattgaaaattttcaccgctaagcatccgctccttagtcattccttacaatttatatatgtcatatttctatattttgccaaattttgagttatgtccacattttataaacatagtaaaaagttaactttcagctcttttgtgtcaaaaatagggcttaatattaaaatatttcatttttgttttcattttcccacgatattaataaatttcagtttatttttctatttaaaatgatttttatttttgagaaagaagaagatgctttcctaaaaagaagcttaattgattcatttaagcgacaattaaccttttttaagggtcggtagtcttcccaagctgattcattattcaataaaaattaaaatcttttattgctttttagctaatttataagcaaacaatcaatggctttaatttaaattctccggccttcacaatg

SEQ ID NO: 104906 - DNA, 141 bp, Heterodera glycines
accatttccgcacacatgcgtgcgcgatcggtaagacattccattgttaaatttgtaaaacattttgctttttcgataggtttaatgagcgattgaacgatgatgtatgaatgaattccgtatggagagcctccaccaatg

SEQ ID NO: 104907 - DNA, 411 bp, Heterodera glycines
ttgggccaatcgccactcacagcagggccaatcagaaacaaaaaacagtgtaaacagcaaaataaatgacaaaaaaattaatatagtaatagccatgtcaaaatcacggaatttactttccatcgcaatcaaaatcttgaaaaagctgcgaatattccgaaacgaaaatttaacaaaaattgaaaggaaaattagtgtgtttgtaagttttgagtgtaagatttcaggccttgaaccgcatttcattcaaaaattctcgaaaaacaataaatcaacttttttaaaaattttatttctttatacatttacttatctttacgcgagatttgcatattctaaaacaaaattacaaaatataataaaattttttgctcaaagaaattctttttatttcaatcaatgggaaaaatg

SEQ ID NO: 104908 - DNA, 1003 bp, Heterodera glycines
acgtaaaacttaaccttaaaacttaatataggcgagaaataccttcgccggggaggaaccgaaattccccgcatttgtcggagaccaaccccattttgagaagacaaaaaatttgggaaacaaaatttttcattttgaaaaattccaaaatgctgatttttttactttaaattttgttttttgtcggttcaaatactgattttcaaatttttcagttggcagtcctgtttttacactaataaaatattgttttaaatagtttttcatgtttttattgcgtttccttcgcgctacattagtttttaaaaaatcttattttcgggttccgagttttcgtttttataaaataaaataattaattaagttttattttaaattaaatcattttcacattattaggtaaatataaaattttccgtttaaagaaaaatttgctgacggattattcagtgaaggattgtccatcactgacgaattgtccgtaagccgcccacacgtacgcatccaacacattgctgtggcacgcacaccgcacgcgtccgtccactgtctgcccctaggcaaattttcgttccttctccctcccccaactatttcctttgcctttcttctttttcacattatccttttcttttatgtatttattaatctctctctctctccacaacagattttgctttacgccaaatcaaatgaaggcacacagagagagagagagagagagagagacaagaagggacaaccaaattagtatagttaattgaaaaattaattttggaaagtttttcgtgggttaaatttttggattttaagtttagagcactaaagtgtcctggtttttcaatttatctgattttgaggtttagaaacaaaacagggaaattctgattttaattttgttgttaattttatgctattttggcttcacttacaggccttattcgtaatttccaattaatttcttatttgccaccaaattcatttatttcccccgcccgtaatg

SEQ ID NO: 104909 - DNA, 407 bp, Heterodera glycines
gtccccgaatttctcgaaatggctcagtcccgggcagcgacgggcggtgtgtacaaagggcagggacgtattcagagcgagttgatgactcgcccctacaaggaattcctcgttcacggacaataattgcaatgtccgatcccaatcacggcaaattttcaccggtttaccaacccctttcggggaaggacaagcacgctgattttgccagtgtagcgcgcgtgcagccccggacatctaagggcatcacagacctgttattgctcaatttcgtgcggctgaacaccgaaaatccctctaagaagttgtgcccacagaagcaatgagccaactatttagtaggctagagtctcgctcgttatcggaataaaccagacaaatcgctccacgaactaagaacggccatg

SEQ ID NO: 104910 - DNA, 626 bp, Heterodera glycines
atcgtcggctgtgccttttgccctgtccaacttttctctaaatcggtgtctgtcattggtcagctcaacacggattttttgtcgacaaatatttacaattaaatttatttaatgcttttttgacctttgcttttgctttacgggtgccgataaatttgccagtttaattaagtaatttggcacggactctcataatttaaacatttttacacatgtttaaaatatttattaacgaattcgacaaatccatttaaatcttttattttcttttgaaattggaatgactgtcttacaaaacaaacagtttcttctctgcccatcactgtttttcaggtcgtttaatttgttattttcttaaaatggctccctttttgcaaatgttttgccttttcagggctgtccaactccgtcgaattaggggtcgtcctgtttcgcgtccgcgcatttcgccccctccgtccggcgaaggcattcaatgggcgcccgccaccaatgcttttcgcgtcagcaaagacggcgagccgaggccgttaccgtcggcattcattgtgaaaagaatatttgcagacattttagccttttataacccatttccgacattttggtaggacgacgacgaccaaatg

SEQ ID NO: 104911 - DNA, 252 bp, Heterodera glycines
  unsure (1)..(252): unsure at all n locations
gcgatcagcagcattcttcggcggagagaatgtgcgagcgaatgtgcggggagattaatcagtgggaagaattcgctgatcaggtgccaccaaatcatttgttttntcatttcgtgaatggtgggtgacaaacaacaaacgacgtatccgccgttgacaaatttatcgtttatctttttgtcatttgtcggccgacggggaattgcctcaattaatcaaataaataaatcaaacggtaccgatttgcagatg

SEQ ID NO: 104912 - DNA, 295 bp, Heterodera glycines
aagccctagtgatgaagtgtgaaaacatccaatgggacataattacgaaatggcatttgaaattatgatgaaattcatggctttaattattttaatattatttattaatattttattattaagaaaatctattgatgatcagtttcacttattgatcgcatttttggcaatgcttctccacattcattaaaatgaaataaaaaattattttccgaagaaattagcttaattttaatacaaatatatatattaaaaacttattaattaattatttattatactttttttagtgatg

SEQ ID NO: 104913 - DNA, 97 bp, Heterodera glycines
attaaaatgcttaaatatttgcttaatttatgttaaataattaatttcaaaataataattaagggcgatagcggtgggcctttgttggccacaaatg
